United States Patent Application Publication US 2022/0090207 A1 - sequence listing, part 29

SEQ ID NO: 403353 - DNA, 187 bp, Homo sapiens; identical to SEQ ID NO: 251820
  chr2:240747276-240747463
  hypo

SEQ ID NO: 403354 - DNA, 138 bp, Homo sapiens; identical to SEQ ID NO: 251822
  chr2:240756517-240756655
  hypo

SEQ ID NO: 403355 - DNA, 146 bp, Homo sapiens; identical to SEQ ID NO: 251825
  chr2:240905881-240906027
  hypo

SEQ ID NO: 403356 - DNA, 193 bp, Homo sapiens; identical to SEQ ID NO: 251833
  chr2:241068023-241068216
  hypo

SEQ ID NO: 403357 - DNA, 173 bp, Homo sapiens; identical to SEQ ID NO: 208657
  chr2:241069130-241069303
  hypo

SEQ ID NO: 403358 - DNA, 195 bp, Homo sapiens; identical to SEQ ID NO: 251835
  chr2:241130457-241130652
  hypo

SEQ ID NO: 403359 - DNA, 99 bp, Homo sapiens; identical to SEQ ID NO: 251838
  chr2:241196841-241196940
  hypo

SEQ ID NO: 403360 - DNA, 72 bp, Homo sapiens; identical to SEQ ID NO: 251839
  chr2:241196970-241197042
  hypo

SEQ ID NO: 403361 - DNA, 154 bp, Homo sapiens; identical to SEQ ID NO: 251841
  chr2:241226633-241226787
  hypo

SEQ ID NO: 403362 - DNA, 264 bp, Homo sapiens; identical to SEQ ID NO: 280824
  chr2:241306313-241306577
  hypo

SEQ ID NO: 403363 - DNA, 194 bp, Homo sapiens; identical to SEQ ID NO: 208660
  chr2:241328246-241328440
  hypo

SEQ ID NO: 403364 - DNA, 172 bp, Homo sapiens; identical to SEQ ID NO: 251847
  chr2:241338271-241338443
  hypo

SEQ ID NO: 403365 - DNA, 236 bp, Homo sapiens; identical to SEQ ID NO: 251850
  chr2:241364406-241364642
  hypo

SEQ ID NO: 403366 - DNA, 264 bp, Homo sapiens; identical to SEQ ID NO: 222056
  chr2:241375298-241375562
  hypo

SEQ ID NO: 403367 - DNA, 114 bp, Homo sapiens; identical to SEQ ID NO: 251855
  chr2:241381612-241381726
  hypo

SEQ ID NO: 403368 - DNA, 157 bp, Homo sapiens; identical to SEQ ID NO: 251856
  chr2:241502881-241503038
  hypo

SEQ ID NO: 403369 - DNA, 48 bp, Homo sapiens; identical to SEQ ID NO: 208665
  chr2:241543042-241543090
  hypo

SEQ ID NO: 403370 - DNA, 81 bp, Homo sapiens; identical to SEQ ID NO: 251862
  chr2:241544693-241544774
  hypo

SEQ ID NO: 403371 - DNA, 138 bp, Homo sapiens; identical to SEQ ID NO: 208666
  chr2:241545031-241545169
  hypo

SEQ ID NO: 403372 - DNA, 47 bp, Homo sapiens; identical to SEQ ID NO: 208667
  chr2:241555876-241555923
  hypo

SEQ ID NO: 403373 - DNA, 115 bp, Homo sapiens; identical to SEQ ID NO: 251866
  chr2:241631410-241631525
  hypo

SEQ ID NO: 403374 - DNA, 160 bp, Homo sapiens; identical to SEQ ID NO: 251868
  chr2:241660274-241660434
  hypo

SEQ ID NO: 403375 - DNA, 229 bp, Homo sapiens; identical to SEQ ID NO: 208671
  chr2:241721305-241721534
  hypo

SEQ ID NO: 403376 - DNA, 61 bp, Homo sapiens; identical to SEQ ID NO: 385323
  chr2:241721587-241721648
  hypo

SEQ ID NO: 403377 - DNA, 156 bp, Homo sapiens; identical to SEQ ID NO: 208675
  chr2:241750153-241750309
  hypo

SEQ ID NO: 403378 - DNA, 112 bp, Homo sapiens; identical to SEQ ID NO: 251876
  chr2:241776236-241776348
  hypo

SEQ ID NO: 403379 - DNA, 208 bp, Homo sapiens; identical to SEQ ID NO: 251877
  chr2:241842760-241842968
  hypo

SEQ ID NO: 403380 - DNA, 115 bp, Homo sapiens; identical to SEQ ID NO: 208676
  chr2:241858348-241858463
  hypo

SEQ ID NO: 403381 - DNA, 38 bp, Homo sapiens; identical to SEQ ID NO: 301110
  chr2:241862320-241862358
  hypo

SEQ ID NO: 403382 - DNA, 250 bp, Homo sapiens; identical to SEQ ID NO: 251889
  chr2:241992477-241992727
  hypo

SEQ ID NO: 403383 - DNA, 217 bp, Homo sapiens; identical to SEQ ID NO: 208683
  chr2:242010983-242011200
  hypo

SEQ ID NO: 403384 - DNA, 212 bp, Homo sapiens; identical to SEQ ID NO: 208684
  chr2:242011230-242011442
  hypo

SEQ ID NO: 403385 - DNA, 92 bp, Homo sapiens; identical to SEQ ID NO: 208685
  chr2:242076563-242076655
  hypo

SEQ ID NO: 403386 - DNA, 110 bp, Homo sapiens; identical to SEQ ID NO: 251896
  chr2:242102770-242102880
  hypo

SEQ ID NO: 403387 - DNA, 314 bp, Homo sapiens; identical to SEQ ID NO: 251897
  chr2:242122192-242122506
  hypo

SEQ ID NO: 403388 - DNA, 174 bp, Homo sapiens; identical to SEQ ID NO: 301130
  chr2:242128594-242128768
  hypo

SEQ ID NO: 403389 - DNA, 680 bp, Homo sapiens; identical to SEQ ID NO: 301131
  chr2:242128827-242129507
  hypo

SEQ ID NO: 403390 - DNA, 52 bp, Homo sapiens; identical to SEQ ID NO: 251900
  chr2:242142973-242143025
  hypo

SEQ ID NO: 403391 - DNA, 222 bp, Homo sapiens; identical to SEQ ID NO: 251905
  chr2:242209285-242209507
  hypo

SEQ ID NO: 403392 - DNA, 120 bp, Homo sapiens; identical to SEQ ID NO: 208688
  chr2:242268832-242268952
  hypo

SEQ ID NO: 403393 - DNA, 255 bp, Homo sapiens; identical to SEQ ID NO: 251908
  chr2:242277632-242277887
  hypo

SEQ ID NO: 403394 - DNA, 42 bp, Homo sapiens; identical to SEQ ID NO: 251911
  chr2:242354475-242354517
  hypo

SEQ ID NO: 403395 - DNA, 208 bp, Homo sapiens; identical to SEQ ID NO: 251914
  chr2:242435159-242435367
  hypo

SEQ ID NO: 403396 - DNA, 413 bp, Homo sapiens; identical to SEQ ID NO: 251917
  chr2:242438422-242438835
  hypo

SEQ ID NO: 403397 - DNA, 162 bp, Homo sapiens; identical to SEQ ID NO: 208693
  chr2:242439377-242439539
  hypo

SEQ ID NO: 403398 - DNA, 95 bp, Homo sapiens; identical to SEQ ID NO: 208694
  chr2:242439569-242439664
  hypo

SEQ ID NO: 403399 - DNA, 71 bp, Homo sapiens; identical to SEQ ID NO: 208698
  chr2:242585229-242585300
  hypo

SEQ ID NO: 403400 - DNA, 252 bp, Homo sapiens; identical to SEQ ID NO: 251928
  chr2:242600213-242600465
  hypo

SEQ ID NO: 403401 - DNA, 33 bp, Homo sapiens; identical to SEQ ID NO: 251933
  chr2:242609242-242609275
  hypo

SEQ ID NO: 403402 - DNA, 206 bp, Homo sapiens; identical to SEQ ID NO: 208701
  chr2:242611928-242612134
  hypo

SEQ ID NO: 403403 - DNA, 55 bp, Homo sapiens
  chr2:242618832-242618887
  hypo
gtaatacttcagaggggaaggactcaagctaacacatgaagaaatggcagaatta

SEQ ID NO: 403404 - DNA, 103 bp, Homo sapiens; identical to SEQ ID NO: 251939
  chr2:242618947-242619050
  hypo

SEQ ID NO: 403405 - DNA, 120 bp, Homo sapiens; identical to SEQ ID NO: 251941
  chr2:242636478-242636598
  hypo

SEQ ID NO: 403406 - DNA, 105 bp, Homo sapiens; identical to SEQ ID NO: 208707
  chr2:242637132-242637237
  hypo

SEQ ID NO: 403407 - DNA, 245 bp, Homo sapiens; identical to SEQ ID NO: 251945
  chr2:242664010-242664255
  hypo

SEQ ID NO: 403408 - DNA, 107 bp, Homo sapiens; identical to SEQ ID NO: 251947
  chr2:242712093-242712200
  hypo

SEQ ID NO: 403409 - DNA, 171 bp, Homo sapiens; identical to SEQ ID NO: 208715
  chr2:242755673-242755844
  hypo

SEQ ID NO: 403410 - DNA, 104 bp, Homo sapiens; identical to SEQ ID NO: 208716
  chr2:242762674-242762778
  hypo

SEQ ID NO: 403411 - DNA, 253 bp, Homo sapiens; identical to SEQ ID NO: 208717
  chr2:242762831-242763084
  hypo

SEQ ID NO: 403412 - DNA, 281 bp, Homo sapiens; identical to SEQ ID NO: 251956
  chr2:242791134-242791415
  hypo

SEQ ID NO: 403413 - DNA, 85 bp, Homo sapiens; identical to SEQ ID NO: 251963
  chr2:242845592-242845677
  hypo

SEQ ID NO: 403414 - DNA, 189 bp, Homo sapiens; identical to SEQ ID NO: 208720
  chr2:242887764-242887953
  hypo

SEQ ID NO: 403415 - DNA, 47 bp, Homo sapiens; identical to SEQ ID NO: 301206
  chr2:242890344-242890391
  hypo

SEQ ID NO: 403416 - DNA, 113 bp, Homo sapiens; identical to SEQ ID NO: 251970
  chr2:242948202-242948315
  hypo

SEQ ID NO: 403417 - DNA, 61 bp, Homo sapiens; identical to SEQ ID NO: 301213
  chr3:3167927-3167988
  hypo

SEQ ID NO: 403418 - DNA, 209 bp, Homo sapiens; identical to SEQ ID NO: 208721
  chr3:3179063-3179272
  hypo

SEQ ID NO: 403419 - DNA, 37 bp, Homo sapiens; identical to SEQ ID NO: 251975
  chr3:3426022-3426059
  hypo

SEQ ID NO: 403420 - DNA, 41 bp, Homo sapiens; identical to SEQ ID NO: 251976
  chr3:3639126-3639167
  hypo

SEQ ID NO: 403421 - DNA, 218 bp, Homo sapiens; identical to SEQ ID NO: 251980
  chr3:4735234-4735452
  hypo

SEQ ID NO: 403422 - DNA, 62 bp, Homo sapiens; identical to SEQ ID NO: 251982
  chr3:4840917-4840979
  hypo

SEQ ID NO: 403423 - DNA, 37 bp, Homo sapiens; identical to SEQ ID NO: 208728
  chr3:4993606-4993643
  hypo

SEQ ID NO: 403424 - DNA, 35 bp, Homo sapiens; identical to SEQ ID NO: 251991
  chr3:6109803-6109838
  hypo

SEQ ID NO: 403425 - DNA, 35 bp, Homo sapiens; identical to SEQ ID NO: 251992
  chr3:6110078-6110113
  hypo

SEQ ID NO: 403426 - DNA, 47 bp, Homo sapiens; identical to SEQ ID NO: 251995
  chr3:7620289-7620336
  hypo

SEQ ID NO: 403427 - DNA, 213 bp, Homo sapiens; identical to SEQ ID NO: 252000
  chr3:9173888-9174101
  hypo

SEQ ID NO: 403428 - DNA, 148 bp, Homo sapiens; identical to SEQ ID NO: 252001
  chr3:9553508-9553656
  hypo

SEQ ID NO: 403429 - DNA, 127 bp, Homo sapiens; identical to SEQ ID NO: 252003
  chr3:9704771-9704898
  hypo

SEQ ID NO: 403430 - DNA, 154 bp, Homo sapiens; identical to SEQ ID NO: 208734
  chr3:9782960-9783114
  hypo

SEQ ID NO: 403431 - DNA, 155 bp, Homo sapiens; identical to SEQ ID NO: 252010
  chr3:9987359-9987514
  hypo

SEQ ID NO: 403432 - DNA, 229 bp, Homo sapiens; identical to SEQ ID NO: 252011
  chr3:9991408-9991637
  hypo

SEQ ID NO: 403433 - DNA, 73 bp, Homo sapiens
  chr3:10132062-10132135
  hypo
gcagcaggtgagtaagataatagtcacttcaagaagtggactttggattacttggaagttgctgatttttttt

SEQ ID NO: 403434 - DNA, 112 bp, Homo sapiens; identical to SEQ ID NO: 252017
  chr3:10332492-10332604
  hypo

SEQ ID NO: 403435 - DNA, 41 bp, Homo sapiens; identical to SEQ ID NO: 208742
  chr3:10363448-10363489
  hypo

SEQ ID NO: 403436 - DNA, 33 bp, Homo sapiens; identical to SEQ ID NO: 252024
  chr3:10976104-10976137
  hypo

SEQ ID NO: 403437 - DNA, 215 bp, Homo sapiens; identical to SEQ ID NO: 208746
  chr3:11210148-11210363
  hypo

SEQ ID NO: 403438 - DNA, 42 bp, Homo sapiens; identical to SEQ ID NO: 208747
  chr3:11300932-11300974
  hypo

SEQ ID NO: 403439 - DNA, 37 bp, Homo sapiens; identical to SEQ ID NO: 252029
  chr3:11574543-11574580
  hypo

SEQ ID NO: 403440 - DNA, 88 bp, Homo sapiens; identical to SEQ ID NO: 252032
  chr3:11595081-11595169
  hypo

SEQ ID NO: 403441 - DNA, 357 bp, Homo sapiens; identical to SEQ ID NO: 252033
  chr3:11600065-11600422
  hypo

SEQ ID NO: 403442 - DNA, 38 bp, Homo sapiens; identical to SEQ ID NO: 208750
  chr3:11606285-11606323
  hypo

SEQ ID NO: 403443 - DNA, 32 bp, Homo sapiens; identical to SEQ ID NO: 252035
  chr3:11607101-11607133
  hypo

SEQ ID NO: 403444 - DNA, 99 bp, Homo sapiens; identical to SEQ ID NO: 252038
  chr3:12186545-12186644
  hypo

SEQ ID NO: 403445 - DNA, 81 bp, Homo sapiens; identical to SEQ ID NO: 208753
  chr3:12204374-12204455
  hypo

SEQ ID NO: 403446 - DNA, 119 bp, Homo sapiens; identical to SEQ ID NO: 252040
  chr3:12486439-12486558
  hypo

SEQ ID NO: 403447 - DNA, 39 bp, Homo sapiens; identical to SEQ ID NO: 252042
  chr3:12558547-12558586
  hypo

SEQ ID NO: 403448 - DNA, 118 bp, Homo sapiens; identical to SEQ ID NO: 208758
  chr3:12660087-12660205
  hypo

SEQ ID NO: 403449 - DNA, 125 bp, Homo sapiens; identical to SEQ ID NO: 252053
  chr3:12856636-12856761
  hypo

SEQ ID NO: 403450 - DNA, 43 bp, Homo sapiens; identical to SEQ ID NO: 208761
  chr3:12940404-12940447
  hypo

SEQ ID NO: 403451 - DNA, 102 bp, Homo sapiens; identical to SEQ ID NO: 208762
  chr3:12940862-12940964
  hypo

SEQ ID NO: 403452 - DNA, 439 bp, Homo sapiens; identical to SEQ ID NO: 252060
  chr3:12984507-12984946
  hypo

SEQ ID NO: 403453 - DNA, 57 bp, Homo sapiens; identical to SEQ ID NO: 252062
  chr3:13028240-13028297
  hypo

SEQ ID NO: 403454 - DNA, 148 bp, Homo sapiens; identical to SEQ ID NO: 252063
  chr3:13028558-13028706
  hypo

SEQ ID NO: 403455 - DNA, 108 bp, Homo sapiens; identical to SEQ ID NO: 208768
  chr3:13083878-13083986
  hypo

SEQ ID NO: 403456 - DNA, 94 bp, Homo sapiens; identical to SEQ ID NO: 208769
  chr3:13205534-13205628
  hypo

SEQ ID NO: 403457 - DNA, 44 bp, Homo sapiens; identical to SEQ ID NO: 252073
  chr3:14208688-14208732
  hypo

SEQ ID NO: 403458 - DNA, 93 bp, Homo sapiens; identical to SEQ ID NO: 252074
  chr3:14291143-14291236
  hypo

SEQ ID NO: 403459 - DNA, 144 bp, Homo sapiens; identical to SEQ ID NO: 208773
  chr3:14383872-14384016
  hypo

SEQ ID NO: 403460 - DNA, 265 bp, Homo sapiens; identical to SEQ ID NO: 208774
  chr3:14384852-14385117
  hypo

SEQ ID NO: 403461 - DNA, 91 bp, Homo sapiens; identical to SEQ ID NO: 252079
  chr3:14452944-14453035
  hypo

SEQ ID NO: 403462 - DNA, 36 bp, Homo sapiens; identical to SEQ ID NO: 252080
  chr3:14508072-14508108
  hypo

SEQ ID NO: 403463 - DNA, 270 bp, Homo sapiens; identical to SEQ ID NO: 252082
  chr3:14535135-14535405
  hypo

SEQ ID NO: 403464 - DNA, 112 bp, Homo sapiens; identical to SEQ ID NO: 252083
  chr3:14563228-14563340
  hypo

SEQ ID NO: 403465 - DNA, 131 bp, Homo sapiens; identical to SEQ ID NO: 252084
  chr3:14564198-14564329
  hypo

SEQ ID NO: 403466 - DNA, 40 bp, Homo sapiens; identical to SEQ ID NO: 252086
  chr3:15004944-15004984
  hypo

SEQ ID NO: 403467 - DNA, 92 bp, Homo sapiens; identical to SEQ ID NO: 252094
  chr3:15432501-15432593
  hypo

SEQ ID NO: 403468 - DNA, 215 bp, Homo sapiens; identical to SEQ ID NO: 208783
  chr3:16439262-16439477
  hypo

SEQ ID NO: 403469 - DNA, 77 bp, Homo sapiens; identical to SEQ ID NO: 252100
  chr3:16542622-16542699
  hypo

SEQ ID NO: 403470 - DNA, 89 bp, Homo sapiens; identical to SEQ ID NO: 252103
  chr3:18427927-18428016
  hypo

SEQ ID NO: 403471 - DNA, 76 bp, Homo sapiens; identical to SEQ ID NO: 252106
  chr3:19276255-19276331
  hypo

SEQ ID NO: 403472 - DNA, 86 bp, Homo sapiens; identical to SEQ ID NO: 208790
  chr3:19790879-19790965
  hypo

SEQ ID NO: 403473 - DNA, 44 bp, Homo sapiens; identical to SEQ ID NO: 208791
  chr3:20070404-20070448
  hypo

SEQ ID NO: 403474 - DNA, 97 bp, Homo sapiens; identical to SEQ ID NO: 208792
  chr3:20071112-20071209
  hypo

SEQ ID NO: 403475 - DNA, 132 bp, Homo sapiens; identical to SEQ ID NO: 252112
  chr3:20113812-20113944
  hypo

SEQ ID NO: 403476 - DNA, 38 bp, Homo sapiens; identical to SEQ ID NO: 252114
  chr3:20630727-20630765
  hypo

SEQ ID NO: 403477 - DNA, 57 bp, Homo sapiens; identical to SEQ ID NO: 252116
  chr3:23521987-23522044
  hypo

SEQ ID NO: 403478 - DNA, 162 bp, Homo sapiens; identical to SEQ ID NO: 208793
  chr3:23750593-23750755
  hypo

SEQ ID NO: 403479 - DNA, 45 bp, Homo sapiens; identical to SEQ ID NO: 252119
  chr3:23848677-23848722
  hypo

SEQ ID NO: 403480 - DNA, 152 bp, Homo sapiens; identical to SEQ ID NO: 222085
  chr3:23986746-23986898
  hypo

SEQ ID NO: 403481 - DNA, 169 bp, Homo sapiens; identical to SEQ ID NO: 208796
  chr3:24344850-24345019
  hypo

SEQ ID NO: 403482 - DNA, 31 bp, Homo sapiens; identical to SEQ ID NO: 208797
  chr3:24374243-24374274
  hypo

SEQ ID NO: 403483 - DNA, 219 bp, Homo sapiens; identical to SEQ ID NO: 396288
  chr3:24535595-24535814
  hypo

SEQ ID NO: 403484 - DNA, 36 bp, Homo sapiens; identical to SEQ ID NO: 252128
  chr3:27563872-27563908
  hypo

SEQ ID NO: 403485 - DNA, 37 bp, Homo sapiens; identical to SEQ ID NO: 208809
  chr3:31717147-31717184
  hypo

SEQ ID NO: 403486 - DNA, 139 bp, Homo sapiens; identical to SEQ ID NO: 252137
  chr3:31786601-31786740
  hypo

SEQ ID NO: 403487 - DNA, 273 bp, Homo sapiens; identical to SEQ ID NO: 252139
  chr3:32663085-32663358
  hypo

SEQ ID NO: 403488 - DNA, 41 bp, Homo sapiens; identical to SEQ ID NO: 252140
  chr3:32886051-32886092
  hypo

SEQ ID NO: 403489 - DNA, 145 bp, Homo sapiens; identical to SEQ ID NO: 208814
  chr3:33012238-33012383
  hypo

SEQ ID NO: 403490 - DNA, 74 bp, Homo sapiens; identical to SEQ ID NO: 222104
  chr3:37045891-37045965
  hypo

SEQ ID NO: 403491 - DNA, 73 bp, Homo sapiens; identical to SEQ ID NO: 222105
  chr3:37048481-37048554
  hypo

SEQ ID NO: 403492 - DNA, 92 bp, Homo sapiens; identical to SEQ ID NO: 222106
  chr3:37050304-37050396
  hypo

SEQ ID NO: 403493 - DNA, 280 bp, Homo sapiens; identical to SEQ ID NO: 222107
  chr3:37053310-37053590
  hypo

SEQ ID NO: 403494 - DNA, 113 bp, Homo sapiens; identical to SEQ ID NO: 222108
  chr3:37055922-37056035
  hypo

SEQ ID NO: 403495 - DNA, 154 bp, Homo sapiens; identical to SEQ ID NO: 222110
  chr3:37061800-37061954
  hypo

SEQ ID NO: 403496 - DNA, 371 bp, Homo sapiens; identical to SEQ ID NO: 222111
  chr3:37067127-37067498
  hypo

SEQ ID NO: 403497 - DNA, 165 bp, Homo sapiens; identical to SEQ ID NO: 222115
  chr3:37089009-37089174
  hypo

SEQ ID NO: 403498 - DNA, 93 bp, Homo sapiens; identical to SEQ ID NO: 222116
  chr3:37090007-37090100
  hypo

SEQ ID NO: 403499 - DNA, 38 bp, Homo sapiens; identical to SEQ ID NO: 252153
  chr3:37214389-37214427
  hypo

SEQ ID NO: 403500 - DNA, 61 bp, Homo sapiens; identical to SEQ ID NO: 252156
  chr3:37774454-37774515
  hypo

SEQ ID NO: 403501 - DNA, 162 bp, Homo sapiens; identical to SEQ ID NO: 208820
  chr3:38017265-38017427
  hypo

SEQ ID NO: 403502 - DNA, 128 bp, Homo sapiens; identical to SEQ ID NO: 301448
  chr3:38030490-38030618
  hypo

SEQ ID NO: 403503 - DNA, 90 bp, Homo sapiens; identical to SEQ ID NO: 208822
  chr3:38030782-38030872
  hypo

SEQ ID NO: 403504 - DNA, 176 bp, Homo sapiens; identical to SEQ ID NO: 252161
  chr3:38051945-38052121
  hypo

SEQ ID NO: 403505 - DNA, 143 bp, Homo sapiens; identical to SEQ ID NO: 252163
  chr3:38323910-38324053
  hypo

SEQ ID NO: 403506 - DNA, 100 bp, Homo sapiens; identical to SEQ ID NO: 252164
  chr3:38413411-38413511
  hypo

SEQ ID NO: 403507 - DNA, 78 bp, Homo sapiens; identical to SEQ ID NO: 198884
  chr3:38495097-38495175
  hypo

SEQ ID NO: 403508 - DNA, 52 bp, Homo sapiens; identical to SEQ ID NO: 39102
  chr3:38495213-38495265
  hypo

SEQ ID NO: 403509 - DNA, 101 bp, Homo sapiens; identical to SEQ ID NO: 198886
  chr3:38495679-38495780
  hypo

SEQ ID NO: 403510 - DNA, 105 bp, Homo sapiens; identical to SEQ ID NO: 222125
  chr3:38496021-38496126
  hypo

SEQ ID NO: 403511 - DNA, 177 bp, Homo sapiens; identical to SEQ ID NO: 252166
  chr3:38674620-38674797
  hypo

SEQ ID NO: 403512 - DNA, 91 bp, Homo sapiens; identical to SEQ ID NO: 252167
  chr3:38755471-38755562
  hypo

SEQ ID NO: 403513 - DNA, 57 bp, Homo sapiens; identical to SEQ ID NO: 252168
  chr3:38984804-38984861
  hypo

SEQ ID NO: 403514 - DNA, 277 bp, Homo sapiens; identical to SEQ ID NO: 222128
  chr3:39148232-39148509
  hypo

SEQ ID NO: 403515 - DNA, 381 bp, Homo sapiens; identical to SEQ ID NO: 252174
  chr3:40429457-40429838
  hypo

SEQ ID NO: 403516 - DNA, 96 bp, Homo sapiens; identical to SEQ ID NO: 252183
  chr3:42223003-42223099
  hypo

SEQ ID NO: 403517 - DNA, 62 bp, Homo sapiens; identical to SEQ ID NO: 252185
  chr3:42249920-42249982
  hypo

SEQ ID NO: 403518 - DNA, 88 bp, Homo sapiens; identical to SEQ ID NO: 252186
  chr3:42268588-42268676
  hypo

SEQ ID NO: 403519 - DNA, 104 bp, Homo sapiens; identical to SEQ ID NO: 208838
  chr3:42577666-42577770
  hypo

SEQ ID NO: 403520 - DNA, 110 bp, Homo sapiens; identical to SEQ ID NO: 208844
  chr3:43121573-43121683
  hypo

SEQ ID NO: 403521 - DNA, 214 bp, Homo sapiens; identical to SEQ ID NO: 198903
  chr3:43663334-43663548
  hypo

SEQ ID NO: 403522 - DNA, 34 bp, Homo sapiens; identical to SEQ ID NO: 252201
  chr3:44237214-44237248
  hypo

SEQ ID NO: 403523 - DNA, 153 bp, Homo sapiens; identical to SEQ ID NO: 252203
  chr3:44461798-44461951
  hypo

SEQ ID NO: 403524 - DNA, 141 bp, Homo sapiens; identical to SEQ ID NO: 222138
  chr3:44518642-44518783
  hypo

SEQ ID NO: 403525 - DNA, 291 bp, Homo sapiens; identical to SEQ ID NO: 252204
  chr3:44752300-44752591
  hypo

SEQ ID NO: 403526 - DNA, 42 bp, Homo sapiens; identical to SEQ ID NO: 208858
  chr3:45968717-45968759
  hypo

SEQ ID NO: 403527 - DNA, 86 bp, Homo sapiens; identical to SEQ ID NO: 252218
  chr3:46020639-46020725
  hypo

SEQ ID NO: 403528 - DNA, 226 bp, Homo sapiens; identical to SEQ ID NO: 252219
  chr3:46230413-46230639
  hypo

SEQ ID NO: 403529 - DNA, 76 bp, Homo sapiens; identical to SEQ ID NO: 301524
  chr3:46245385-46245461
  hypo

SEQ ID NO: 403530 - DNA, 102 bp, Homo sapiens; identical to SEQ ID NO: 252221
  chr3:46586214-46586316
  hypo

SEQ ID NO: 403531 - DNA, 35 bp, Homo sapiens; identical to SEQ ID NO: 252223
  chr3:46769817-46769852
  hypo

SEQ ID NO: 403532 - DNA, 352 bp, Homo sapiens; identical to SEQ ID NO: 252225
  chr3:46874965-46875317
  hypo

SEQ ID NO: 403533 - DNA, 195 bp, Homo sapiens; identical to SEQ ID NO: 208859
  chr3:46943639-46943834
  hypo

SEQ ID NO: 403534 - DNA, 182 bp, Homo sapiens; identical to SEQ ID NO: 252227
  chr3:46944572-46944754
  hypo

SEQ ID NO: 403535 - DNA, 38 bp, Homo sapiens; identical to SEQ ID NO: 208862
  chr3:47007698-47007736
  hypo

SEQ ID NO: 403536 - DNA, 78 bp, Homo sapiens; identical to SEQ ID NO: 222142
  chr3:47050739-47050817
  hypo

SEQ ID NO: 403537 - DNA, 36 bp, Homo sapiens; identical to SEQ ID NO: 252232
  chr3:47185204-47185240
  hypo

SEQ ID NO: 403538 - DNA, 138 bp, Homo sapiens; identical to SEQ ID NO: 252237
  chr3:47373436-47373574
  hypo

SEQ ID NO: 403539 - DNA, 81 bp, Homo sapiens; identical to SEQ ID NO: 208863
  chr3:47889946-47890027
  hypo

SEQ ID NO: 403540 - DNA, 361 bp, Homo sapiens; identical to SEQ ID NO: 252240
  chr3:47890801-47891162
  hypo

SEQ ID NO: 403541 - DNA, 35 bp, Homo sapiens; identical to SEQ ID NO: 252245
  chr3:48316727-48316762
  hypo

SEQ ID NO: 403542 - DNA, 76 bp, Homo sapiens; identical to SEQ ID NO: 252246
  chr3:48456672-48456748
  hypo

SEQ ID NO: 403543 - DNA, 70 bp, Homo sapiens; identical to SEQ ID NO: 252248
  chr3:48461257-48461327
  hypo

SEQ ID NO: 403544 - DNA, 296 bp, Homo sapiens; identical to SEQ ID NO: 208868
  chr3:48474263-48474559
  hypo

SEQ ID NO: 403545 - DNA, 187 bp, Homo sapiens; identical to SEQ ID NO: 252250
  chr3:48506154-48506341
  hypo

SEQ ID NO: 403546 - DNA, 39 bp, Homo sapiens; identical to SEQ ID NO: 208870
  chr3:48607711-48607750
  hypo

SEQ ID NO: 403547 - DNA, 76 bp, Homo sapiens; identical to SEQ ID NO: 252255
  chr3:48659179-48659255
  hypo

SEQ ID NO: 403548 - DNA, 257 bp, Homo sapiens; identical to SEQ ID NO: 198926
  chr3:48700956-48701213
  hypo

SEQ ID NO: 403549 - DNA, 40 bp, Homo sapiens; identical to SEQ ID NO: 252257
  chr3:48702183-48702223
  hypo

SEQ ID NO: 403550 - DNA, 73 bp, Homo sapiens; identical to SEQ ID NO: 301566
  chr3:48732603-48732676
  hypo

SEQ ID NO: 403551 - DNA, 31 bp, Homo sapiens; identical to SEQ ID NO: 208876
  chr3:48986829-48986860
  hypo

SEQ ID NO: 403552 - DNA, 120 bp, Homo sapiens; identical to SEQ ID NO: 252268
  chr3:49014624-49014744
  hypo

SEQ ID NO: 403553 - DNA, 85 bp, Homo sapiens; identical to SEQ ID NO: 208877
  chr3:49023684-49023769
  hypo

SEQ ID NO: 403554 - DNA, 323 bp, Homo sapiens; identical to SEQ ID NO: 208879
  chr3:49035605-49035928
  hypo

SEQ ID NO: 403555 - DNA, 42 bp, Homo sapiens; identical to SEQ ID NO: 208880
  chr3:49080008-49080050
  hypo

SEQ ID NO: 403556 - DNA, 32 bp, Homo sapiens; identical to SEQ ID NO: 208882
  chr3:49145906-49145938
  hypo

SEQ ID NO: 403557 - DNA, 31 bp, Homo sapiens; identical to SEQ ID NO: 208883
  chr3:49433706-49433737
  hypo

SEQ ID NO: 403558 - DNA, 32 bp, Homo sapiens; identical to SEQ ID NO: 252277
  chr3:49522230-49522262
  hypo

SEQ ID NO: 403559 - DNA, 36 bp, Homo sapiens; identical to SEQ ID NO: 208884
  chr3:49532336-49532372
  hypo

SEQ ID NO: 403560 - DNA, 97 bp, Homo sapiens; identical to SEQ ID NO: 252279
  chr3:49636112-49636209
  hypo

SEQ ID NO: 403561 - DNA, 117 bp, Homo sapiens; identical to SEQ ID NO: 208886
  chr3:49690065-49690182
  hypo

SEQ ID NO: 403562 - DNA, 57 bp, Homo sapiens; identical to SEQ ID NO: 208887
  chr3:49690212-49690269
  hypo

SEQ ID NO: 403563 - DNA, 210 bp, Homo sapiens; identical to SEQ ID NO: 252285
  chr3:49699563-49699773
  hypo

SEQ ID NO: 403564 - DNA, 159 bp, Homo sapiens; identical to SEQ ID NO: 301594
  chr3:49723051-49723210
  hypo

SEQ ID NO: 403565 - DNA, 100 bp, Homo sapiens; identical to SEQ ID NO: 252293
  chr3:50140300-50140400
  hypo

SEQ ID NO: 403566 - DNA, 39 bp, Homo sapiens; identical to SEQ ID NO: 252295
  chr3:50145392-50145431
  hypo

SEQ ID NO: 403567 - DNA, 126 bp, Homo sapiens; identical to SEQ ID NO: 252297
  chr3:50214171-50214297
  hypo

SEQ ID NO: 403568 - DNA, 48 bp, Homo sapiens; identical to SEQ ID NO: 252299
  chr3:50225313-50225361
  hypo

SEQ ID NO: 403569 - DNA, 133 bp, Homo sapiens; identical to SEQ ID NO: 252302
  chr3:50404009-50404142
  hypo

SEQ ID NO: 403570 - DNA, 40 bp, Homo sapiens; identical to SEQ ID NO: 252303
  chr3:50420382-50420422
  hypo

SEQ ID NO: 403571 - DNA, 53 bp, Homo sapiens; identical to SEQ ID NO: 252305
  chr3:50523258-50523311
  hypo

SEQ ID NO: 403572 - DNA, 31 bp, Homo sapiens; identical to SEQ ID NO: 301615
  chr3:50575571-50575602
  hypo

SEQ ID NO: 403573 - DNA, 38 bp, Homo sapiens; identical to SEQ ID NO: 252308
  chr3:51617714-51617752
  hypo

SEQ ID NO: 403574 - DNA, 119 bp, Homo sapiens; identical to SEQ ID NO: 252311
  chr3:51680379-51680498
  hypo

SEQ ID NO: 403575 - DNA, 107 bp, Homo sapiens; identical to SEQ ID NO: 252312
  chr3:51737837-51737944
  hypo

SEQ ID NO: 403576 - DNA, 206 bp, Homo sapiens; identical to SEQ ID NO: 252315
  chr3:51749768-51749974
  hypo

SEQ ID NO: 403577 - DNA, 66 bp, Homo sapiens; identical to SEQ ID NO: 208896
  chr3:51996783-51996849
  hypo

SEQ ID NO: 403578 - DNA, 166 bp, Homo sapiens; identical to SEQ ID NO: 208898
  chr3:52088124-52088290
  hypo

SEQ ID NO: 403579 - DNA, 202 bp, Homo sapiens; identical to SEQ ID NO: 252318
  chr3:52255938-52256140
  hypo

SEQ ID NO: 403580 - DNA, 115 bp, Homo sapiens; identical to SEQ ID NO: 252319
  chr3:52256498-52256613
  hypo

SEQ ID NO: 403581 - DNA, 282 bp, Homo sapiens; identical to SEQ ID NO: 208899
  chr3:52257379-52257661
  hypo

SEQ ID NO: 403582 - DNA, 133 bp, Homo sapiens; identical to SEQ ID NO: 252321
  chr3:52258190-52258323
  hypo

SEQ ID NO: 403583 - DNA, 303 bp, Homo sapiens; identical to SEQ ID NO: 252326
  chr3:52537789-52538092
  hypo

SEQ ID NO: 403584 - DNA, 59 bp, Homo sapiens; identical to SEQ ID NO: 301644
  chr3:52558899-52558958
  hypo

SEQ ID NO: 403585 - DNA, 147 bp, Homo sapiens; identical to SEQ ID NO: 222158
  chr3:53190592-53190739
  hypo

SEQ ID NO: 403586 - DNA, 111 bp, Homo sapiens; identical to SEQ ID NO: 208912
  chr3:53276152-53276263
  hypo

SEQ ID NO: 403587 - DNA, 154 bp, Homo sapiens; identical to SEQ ID NO: 222161
  chr3:53528643-53528797
  hypo

SEQ ID NO: 403588 - DNA, 98 bp, Homo sapiens; identical to SEQ ID NO: 252342
  chr3:53560156-53560254
  hypo

SEQ ID NO: 403589 - DNA, 202 bp, Homo sapiens; identical to SEQ ID NO: 252343
  chr3:53675067-53675269
  hypo

SEQ ID NO: 403590 - DNA, 227 bp, Homo sapiens; identical to SEQ ID NO: 252346
  chr3:53845189-53845416
  hypo

SEQ ID NO: 403591 - DNA, 59 bp, Homo sapiens; identical to SEQ ID NO: 208914
  chr3:53857419-53857478
  hypo

SEQ ID NO: 403592 - DNA, 147 bp, Homo sapiens; identical to SEQ ID NO: 252349
  chr3:54067944-54068091
  hypo

SEQ ID NO: 403593 - DNA, 41 bp, Homo sapiens; identical to SEQ ID NO: 252355
  chr3:56792413-56792454
  hypo

SEQ ID NO: 403594 - DNA, 107 bp, Homo sapiens; identical to SEQ ID NO: 252356
  chr3:56840408-56840515
  hypo

SEQ ID NO: 403595 - DNA, 147 bp, Homo sapiens; identical to SEQ ID NO: 301677
  chr3:57040317-57040464
  hypo

SEQ ID NO: 403596 - DNA, 325 bp, Homo sapiens; identical to SEQ ID NO: 301678
  chr3:57040499-57040824
  hypo

SEQ ID NO: 403597 - DNA, 48 bp, Homo sapiens; identical to SEQ ID NO: 252360
  chr3:57117482-57117530
  hypo

SEQ ID NO: 403598 - DNA, 256 bp, Homo sapiens; identical to SEQ ID NO: 252361
  chr3:57131629-57131885
  hypo

SEQ ID NO: 403599 - DNA, 180 bp, Homo sapiens; identical to SEQ ID NO: 252366
  chr3:57544507-57544687
  hypo

SEQ ID NO: 403600 - DNA, 39 bp, Homo sapiens; identical to SEQ ID NO: 252368
  chr3:57674950-57674989
  hypo

SEQ ID NO: 403601 - DNA, 144 bp, Homo sapiens; identical to SEQ ID NO: 252372
  chr3:58090180-58090324
  hypo

SEQ ID NO: 403602 - DNA, 84 bp, Homo sapiens; identical to SEQ ID NO: 252376
  chr3:58652283-58652367
  hypo

SEQ ID NO: 403603 - DNA, 37 bp, Homo sapiens; identical to SEQ ID NO: 252377
  chr3:59041984-59042021
  hypo

SEQ ID NO: 403604 - DNA, 384 bp, Homo sapiens; identical to SEQ ID NO: 396407
  chr3:61546308-61546692
  hypo

SEQ ID NO: 403605 - DNA, 92 bp, Homo sapiens; identical to SEQ ID NO: 252378
  chr3:63082429-63082521
  hypo

SEQ ID NO: 403606 - DNA, 337 bp, Homo sapiens; identical to SEQ ID NO: 208932
  chr3:64547143-64547480
  hypo

SEQ ID NO: 403607 - DNA, 39 bp, Homo sapiens; identical to SEQ ID NO: 208935
  chr3:65435159-65435198
  hypo

SEQ ID NO: 403608 - DNA, 254 bp, Homo sapiens; identical to SEQ ID NO: 252387
  chr3:66423428-66423682
  hypo

SEQ ID NO: 403609 - DNA, 134 bp, Homo sapiens; identical to SEQ ID NO: 252389
  chr3:66455988-66456122
  hypo

SEQ ID NO: 403610 - DNA, 51 bp, Homo sapiens; identical to SEQ ID NO: 252390
  chr3:66460441-66460492
  hypo

SEQ ID NO: 403611 - DNA, 196 bp, Homo sapiens; identical to SEQ ID NO: 208940
  chr3:66482908-66483104
  hypo

SEQ ID NO: 403612 - DNA, 155 bp, Homo sapiens; identical to SEQ ID NO: 252394
  chr3:66852898-66853053
  hypo

SEQ ID NO: 403613 - DNA, 156 bp, Homo sapiens; identical to SEQ ID NO: 222173
  chr3:69062098-69062254
  hypo

SEQ ID NO: 403614 - DNA, 136 bp, Homo sapiens; identical to SEQ ID NO: 252397
  chr3:69230707-69230843
  hypo

SEQ ID NO: 403615 - DNA, 76 bp, Homo sapiens; identical to SEQ ID NO: 208944
  chr3:69309454-69309530
  hypo

SEQ ID NO: 403616 - DNA, 180 bp, Homo sapiens; identical to SEQ ID NO: 252400
  chr3:69589306-69589486
  hypo

SEQ ID NO: 403617 - DNA, 40 bp, Homo sapiens; identical to SEQ ID NO: 252406
  chr3:70901512-70901552
  hypo

SEQ ID NO: 403618 - DNA, 118 bp, Homo sapiens; identical to SEQ ID NO: 252407
  chr3:71019767-71019885
  hypo

SEQ ID NO: 403619 - DNA, 270 bp, Homo sapiens; identical to SEQ ID NO: 208950
  chr3:71049502-71049772
  hypo

SEQ ID NO: 403620 - DNA, 77 bp, Homo sapiens; identical to SEQ ID NO: 252411
  chr3:71120998-71121075
  hypo

SEQ ID NO: 403621 - DNA, 77 bp, Homo sapiens; identical to SEQ ID NO: 252415
  chr3:71247380-71247457
  hypo

SEQ ID NO: 403622 - DNA, 152 bp, Homo sapiens; identical to SEQ ID NO: 208954
  chr3:71366445-71366597
  hypo

SEQ ID NO: 403623 - DNA, 80 bp, Homo sapiens; identical to SEQ ID NO: 252419
  chr3:71408816-71408896
  hypo

SEQ ID NO: 403624 - DNA, 285 bp, Homo sapiens; identical to SEQ ID NO: 208955
  chr3:71410779-71411064
  hypo

SEQ ID NO: 403625 - DNA, 118 bp, Homo sapiens; identical to SEQ ID NO: 252421
  chr3:71451127-71451245
  hypo

SEQ ID NO: 403626 - DNA, 65 bp, Homo sapiens; identical to SEQ ID NO: 252422
  chr3:71496761-71496826
  hypo

SEQ ID NO: 403627 - DNA, 93 bp, Homo sapiens; identical to SEQ ID NO: 252423
  chr3:71533900-71533993
  hypo

SEQ ID NO: 403628 - DNA, 56 bp, Homo sapiens; identical to SEQ ID NO: 252424
  chr3:71563898-71563954
  hypo

SEQ ID NO: 403629 - DNA, 43 bp, Homo sapiens; identical to SEQ ID NO: 252425
  chr3:71581510-71581553
  hypo

SEQ ID NO: 403630 - DNA, 225 bp, Homo sapiens; identical to SEQ ID NO: 281283
  chr3:71833751-71833976
  hypo

SEQ ID NO: 403631 - DNA, 98 bp, Homo sapiens; identical to SEQ ID NO: 252430
  chr3:72680453-72680551
  hypo

SEQ ID NO: 403632 - DNA, 84 bp, Homo sapiens; identical to SEQ ID NO: 252434
  chr3:72795276-72795360
  hypo

SEQ ID NO: 403633 - DNA, 152 bp, Homo sapiens; identical to SEQ ID NO: 208959
  chr3:72877846-72877998
  hypo

SEQ ID NO: 403634 - DNA, 45 bp, Homo sapiens
  chr3:73045686-73045731
  hypo
gaagtaagtagcttaagttcacacagagaggaaatggcagggatt

SEQ ID NO: 403635 - DNA, 448 bp, Homo sapiens; identical to SEQ ID NO: 281292
  chr3:74663366-74663814
  hypo

SEQ ID NO: 403636 - DNA, 92 bp, Homo sapiens; identical to SEQ ID NO: 252440
  chr3:77427993-77428085
  hypo

SEQ ID NO: 403637 - DNA, 40 bp, Homo sapiens; identical to SEQ ID NO: 252442
  chr3:84175659-84175699
  hypo

SEQ ID NO: 403638 - DNA, 42 bp, Homo sapiens; identical to SEQ ID NO: 252445
  chr3:87652052-87652094
  hypo

SEQ ID NO: 403639 - DNA, 77 bp, Homo sapiens; identical to SEQ ID NO: 252448
  chr3:88098649-88098726
  hypo

SEQ ID NO: 403640 - DNA, 155 bp, Homo sapiens; identical to SEQ ID NO: 208965
  chr3:93707709-93707864
  hypo

SEQ ID NO: 403641 - DNA, 84 bp, Homo sapiens; identical to SEQ ID NO: 252453
  chr3:94174884-94174968
  hypo

SEQ ID NO: 403642 - DNA, 108 bp, Homo sapiens; identical to SEQ ID NO: 252455
  chr3:96984570-96984678
  hypo

SEQ ID NO: 403643 - DNA, 37 bp, Homo sapiens; identical to SEQ ID NO: 252456
  chr3:97473826-97473863
  hypo

SEQ ID NO: 403644 - DNA, 271 bp, Homo sapiens; identical to SEQ ID NO: 222186
  chr3:97690771-97691042
  hypo

SEQ ID NO: 403645 - DNA, 45 bp, Homo sapiens; identical to SEQ ID NO: 252458
  chr3:98290224-98290269
  hypo

SEQ ID NO: 403646 - DNA, 184 bp, Homo sapiens; identical to SEQ ID NO: 252461
  chr3:100329428-100329612
  hypo

SEQ ID NO: 403647 - DNA, 45 bp, Homo sapiens; identical to SEQ ID NO: 252462
  chr3:100796978-100797023
  hypo

SEQ ID NO: 403648 - DNA, 127 bp, Homo sapiens; identical to SEQ ID NO: 252464
  chr3:100998459-100998586
  hypo

SEQ ID NO: 403649 - DNA, 153 bp, Homo sapiens; identical to SEQ ID NO: 301806
  chr3:101021637-101021790
  hypo

SEQ ID NO: 403650 - DNA, 981 bp, Homo sapiens; identical to SEQ ID NO: 199027
  chr3:101231399-101232380
  hypo

SEQ ID NO: 403651 - DNA, 81 bp, Homo sapiens; identical to SEQ ID NO: 252468
  chr3:101232951-101233032
  hypo

SEQ ID NO: 403652 - DNA, 37 bp, Homo sapiens; identical to SEQ ID NO: 252471
  chr3:101441002-101441039
  hypo

SEQ ID NO: 403653 - DNA, 43 bp, Homo sapiens; identical to SEQ ID NO: 252480
  chr3:107552852-107552895
  hypo

SEQ ID NO: 403654 - DNA, 84 bp, Homo sapiens; identical to SEQ ID NO: 252481
  chr3:107750328-107750412
  hypo

SEQ ID NO: 403655 - DNA, 92 bp, Homo sapiens; identical to SEQ ID NO: 252485
  chr3:109035085-109035177
  hypo

SEQ ID NO: 403656 - DNA, 145 bp, Homo sapiens; identical to SEQ ID NO: 208982
  chr3:109061756-109061901
  hypo

SEQ ID NO: 403657 - DNA, 142 bp, Homo sapiens; identical to SEQ ID NO: 252488
  chr3:109128854-109128996
  hypo

SEQ ID NO: 403658 - DNA, 154 bp, Homo sapiens; identical to SEQ ID NO: 252491
  chr3:112357813-112357967
  hypo

SEQ ID NO: 403659 - DNA, 252 bp, Homo sapiens; identical to SEQ ID NO: 281376
  chr3:113557555-113557807
  hypo

SEQ ID NO: 403660 - DNA, 252 bp, Homo sapiens; identical to SEQ ID NO: 252494
  chr3:113957889-113958141
  hypo

SEQ ID NO: 403661 - DNA, 96 bp, Homo sapiens; identical to SEQ ID NO: 252498
  chr3:119342487-119342583
  hypo

SEQ ID NO: 403662 - DNA, 44 bp, Homo sapiens; identical to SEQ ID NO: 252499
  chr3:119432910-119432954
  hypo

SEQ ID NO: 403663 - DNA, 42 bp, Homo sapiens; identical to SEQ ID NO: 208994
  chr3:119517358-119517400
  hypo

SEQ ID NO: 403664 - DNA, 31 bp, Homo sapiens; identical to SEQ ID NO: 252502
  chr3:119827279-119827310
  hypo

SEQ ID NO: 403665 - DNA, 158 bp, Homo sapiens; identical to SEQ ID NO: 252504
  chr3:120064577-120064735
  hypo

SEQ ID NO: 403666 - DNA, 38 bp, Homo sapiens; identical to SEQ ID NO: 252507
  chr3:120313290-120313328
  hypo

SEQ ID NO: 403667 - DNA, 182 bp, Homo sapiens; identical to SEQ ID NO: 208997
  chr3:121438459-121438641
  hypo

SEQ ID NO: 403668 - DNA, 45 bp, Homo sapiens; identical to SEQ ID NO: 209002
  chr3:122231267-122231312
  hypo

SEQ ID NO: 403669 - DNA, 57 bp, Homo sapiens; identical to SEQ ID NO: 252519
  chr3:122355300-122355357
  hypo

SEQ ID NO: 403670 - DNA, 455 bp, Homo sapiens; identical to SEQ ID NO: 209007
  chr3:123166198-123166653
  hypo

SEQ ID NO: 403671 - DNA, 42 bp, Homo sapiens; identical to SEQ ID NO: 252525
  chr3:123200212-123200254
  hypo

SEQ ID NO: 403672 - DNA, 181 bp, Homo sapiens; identical to SEQ ID NO: 252527
  chr3:123456130-123456311
  hypo

SEQ ID NO: 403673 - DNA, 253 bp, Homo sapiens; identical to SEQ ID NO: 252529
  chr3:123813450-123813703
  hypo

SEQ ID NO: 403674 - DNA, 95 bp, Homo sapiens; identical to SEQ ID NO: 209014
  chr3:124436154-124436249
  hypo

SEQ ID NO: 403675 - DNA, 84 bp, Homo sapiens; identical to SEQ ID NO: 252534
  chr3:124465924-124466008
  hypo

SEQ ID NO: 403676 - DNA, 203 bp, Homo sapiens; identical to SEQ ID NO: 252535
  chr3:124466068-124466271
  hypo

SEQ ID NO: 403677 - DNA, 193 bp, Homo sapiens; identical to SEQ ID NO: 209015
  chr3:124518663-124518856
  hypo

SEQ ID NO: 403678 - DNA, 261 bp, Homo sapiens; identical to SEQ ID NO: 222207
  chr3:124605642-124605903
  hypo

SEQ ID NO: 403679 - DNA, 110 bp, Homo sapiens; identical to SEQ ID NO: 209019
  chr3:125078701-125078811
  hypo

SEQ ID NO: 403680 - DNA, 39 bp, Homo sapiens; identical to SEQ ID NO: 252542
  chr3:125210665-125210704
  hypo

SEQ ID NO: 403681 - DNA, 43 bp, Homo sapiens; identical to SEQ ID NO: 252545
  chr3:125411624-125411667
  hypo

SEQ ID NO: 403682 - DNA, 170 bp, Homo sapiens; identical to SEQ ID NO: 252549
  chr3:125679708-125679878
  hypo

SEQ ID NO: 403683 - DNA, 114 bp, Homo sapiens; identical to SEQ ID NO: 252553
  chr3:125826120-125826234
  hypo

SEQ ID NO: 403684 - DNA, 189 bp, Homo sapiens; identical to SEQ ID NO: 252555
  chr3:125977272-125977461
  hypo

SEQ ID NO: 403685 - DNA, 361 bp, Homo sapiens; identical to SEQ ID NO: 281430
  chr3:126074822-126075183
  hypo

SEQ ID NO: 403686 - DNA, 36 bp, Homo sapiens; identical to SEQ ID NO: 252557
  chr3:126137173-126137209
  hypo

SEQ ID NO: 403687 - DNA, 140 bp, Homo sapiens; identical to SEQ ID NO: 222210
  chr3:126195083-126195223
  hypo

SEQ ID NO: 403688 - DNA, 38 bp, Homo sapiens; identical to SEQ ID NO: 252559
  chr3:126195713-126195751
  hypo

SEQ ID NO: 403689 - DNA, 158 bp, Homo sapiens; identical to SEQ ID NO: 252564
  chr3:126274128-126274286
  hypo

SEQ ID NO: 403690 - DNA, 402 bp, Homo sapiens; identical to SEQ ID NO: 209027
  chr3:126724696-126725098
  hypo

SEQ ID NO: 403691 - DNA, 64 bp, Homo sapiens; identical to SEQ ID NO: 252575
  chr3:126736637-126736701
  hypo

SEQ ID NO: 403692 - DNA, 181 bp, Homo sapiens; identical to SEQ ID NO: 252576
  chr3:126747049-126747230
  hypo

SEQ ID NO: 403693 - DNA, 168 bp, Homo sapiens; identical to SEQ ID NO: 209029
  chr3:126894145-126894313
  hypo

SEQ ID NO: 403694 - DNA, 158 bp, Homo sapiens; identical to SEQ ID NO: 252580
  chr3:127285885-127286043
  hypo

SEQ ID NO: 403695 - DNA, 284 bp, Homo sapiens; identical to SEQ ID NO: 252583
  chr3:127325614-127325898
  hypo

SEQ ID NO: 403696 - DNA, 207 bp, Homo sapiens; identical to SEQ ID NO: 199079
  chr3:127348123-127348330
  hypo

SEQ ID NO: 403697 - DNA, 203 bp, Homo sapiens; identical to SEQ ID NO: 252585
  chr3:127349664-127349867
  hypo

SEQ ID NO: 403698 - DNA, 56 bp, Homo sapiens; identical to SEQ ID NO: 252590
  chr3:127439440-127439496
  hypo

SEQ ID NO: 403699 - DNA, 143 bp, Homo sapiens; identical to SEQ ID NO: 252591
  chr3:127439917-127440060
  hypo

SEQ ID NO: 403700 - DNA, 72 bp, Homo sapiens; identical to SEQ ID NO: 252593
  chr3:127515530-127515602
  hypo

SEQ ID NO: 403701 - DNA, 109 bp, Homo sapiens; identical to SEQ ID NO: 301953
  chr3:127570889-127570998
  hypo

SEQ ID NO: 403702 - DNA, 80 bp, Homo sapiens; identical to SEQ ID NO: 252598
  chr3:127637229-127637309
  hypo

SEQ ID NO: 403703 - DNA, 182 bp, Homo sapiens; identical to SEQ ID NO: 252601
  chr3:127798795-127798977
  hypo

SEQ ID NO: 403704 - DNA, 213 bp, Homo sapiens; identical to SEQ ID NO: 252602
  chr3:127816140-127816353
  hypo

SEQ ID NO: 403705 - DNA, 262 bp, Homo sapiens; identical to SEQ ID NO: 252604
  chr3:127937301-127937563
  hypo

SEQ ID NO: 403706 - DNA, 308 bp, Homo sapiens; identical to SEQ ID NO: 252608
  chr3:128070501-128070809
  hypo

SEQ ID NO: 403707 - DNA, 117 bp, Homo sapiens; identical to SEQ ID NO: 252610
  chr3:128110728-128110845
  hypo

SEQ ID NO: 403708 - DNA, 62 bp, Homo sapiens; identical to SEQ ID NO: 209042
  chr3:128118207-128118269
  hypo

SEQ ID NO: 403709 - DNA, 39 bp, Homo sapiens; identical to SEQ ID NO: 209044
  chr3:128290742-128290781
  hypo

SEQ ID NO: 403710 - DNA, 45 bp, Homo sapiens; identical to SEQ ID NO: 252617
  chr3:128401972-128402017
  hypo

SEQ ID NO: 403711 - DNA, 120 bp, Homo sapiens; identical to SEQ ID NO: 252619
  chr3:128526383-128526503
  hypo

SEQ ID NO: 403712 - DNA, 271 bp, Homo sapiens; identical to SEQ ID NO: 252623
  chr3:128782774-128783045
  hypo

SEQ ID NO: 403713 - DNA, 163 bp, Homo sapiens; identical to SEQ ID NO: 209046
  chr3:128785014-128785177
  hypo

SEQ ID NO: 403714 - DNA, 84 bp, Homo sapiens; identical to SEQ ID NO: 209047
  chr3:128791633-128791717
  hypo

SEQ ID NO: 403715 - DNA, 31 bp, Homo sapiens; identical to SEQ ID NO: 209048
  chr3:129008731-129008762
  hypo

SEQ ID NO: 403716 - DNA, 478 bp, Homo sapiens; identical to SEQ ID NO: 252629
  chr3:129045163-129045641
  hypo

SEQ ID NO: 403717 - DNA, 166 bp, Homo sapiens; identical to SEQ ID NO: 252633
  chr3:129246205-129246371
  hypo

SEQ ID NO: 403718 - DNA, 166 bp, Homo sapiens; identical to SEQ ID NO: 252635
  chr3:129251136-129251302
  hypo

SEQ ID NO: 403719 - DNA, 111 bp, Homo sapiens; identical to SEQ ID NO: 252636
  chr3:129252488-129252599
  hypo

SEQ ID NO: 403720 - DNA, 181 bp, Homo sapiens; identical to SEQ ID NO: 252637
  chr3:129284111-129284292
  hypo

SEQ ID NO: 403721 - DNA, 138 bp, Homo sapiens; identical to SEQ ID NO: 252638
  chr3:129289962-129290100
  hypo

SEQ ID NO: 403722 - DNA, 87 bp, Homo sapiens; identical to SEQ ID NO: 252643
  chr3:129398051-129398138
  hypo

SEQ ID NO: 403723 - DNA, 87 bp, Homo sapiens; identical to SEQ ID NO: 252645
  chr3:129510237-129510324
  hypo

SEQ ID NO: 403724 - DNA, 39 bp, Homo sapiens; identical to SEQ ID NO: 252646
  chr3:129511160-129511199
  hypo

SEQ ID NO: 403725 - DNA, 70 bp, Homo sapiens; identical to SEQ ID NO: 396490
  chr3:130235723-130235793
  hypo

SEQ ID NO: 403726 - DNA, 43 bp, Homo sapiens; identical to SEQ ID NO: 209057
  chr3:130237352-130237395
  hypo

SEQ ID NO: 403727 - DNA, 157 bp, Homo sapiens; identical to SEQ ID NO: 252653
  chr3:130464453-130464610
  hypo

SEQ ID NO: 403728 - DNA, 120 bp, Homo sapiens; identical to SEQ ID NO: 252654
  chr3:131595102-131595222
  hypo

SEQ ID NO: 403729 - DNA, 151 bp, Homo sapiens; identical to SEQ ID NO: 209058
  chr3:132034534-132034685
  hypo

SEQ ID NO: 403730 - DNA, 36 bp, Homo sapiens; identical to SEQ ID NO: 209060
  chr3:132399371-132399407
  hypo

SEQ ID NO: 403731 - DNA, 49 bp, Homo sapiens; identical to SEQ ID NO: 199099
  chr3:133276458-133276507
  hypo

SEQ ID NO: 403732 - DNA, 98 bp, Homo sapiens; identical to SEQ ID NO: 252661
  chr3:133364598-133364696
  hypo

SEQ ID NO: 403733 - DNA, 134 bp, Homo sapiens; identical to SEQ ID NO: 281499
  chr3:133646157-133646291
  hypo

SEQ ID NO: 403734 - DNA, 266 bp, Homo sapiens; identical to SEQ ID NO: 281500
  chr3:133646451-133646717
  hypo

SEQ ID NO: 403735 - DNA, 227 bp, Homo sapiens; identical to SEQ ID NO: 209063
  chr3:133648404-133648631
  hypo

SEQ ID NO: 403736 - DNA, 52 bp, Homo sapiens; identical to SEQ ID NO: 199100
  chr3:133969907-133969959
  hypo

SEQ ID NO: 403737 - DNA, 108 bp, Homo sapiens; identical to SEQ ID NO: 229803
  chr3:134093757-134093865
  hypo

SEQ ID NO: 403738 - DNA, 157 bp, Homo sapiens; identical to SEQ ID NO: 209069
  chr3:134203266-134203423
  hypo

SEQ ID NO: 403739 - DNA, 78 bp, Homo sapiens; identical to SEQ ID NO: 281515
  chr3:134514788-134514866
  hypo

SEQ ID NO: 403740 - DNA, 140 bp, Homo sapiens; identical to SEQ ID NO: 281516
  chr3:134514895-134515035
  hypo

SEQ ID NO: 403741 - DNA, 85 bp, Homo sapiens; identical to SEQ ID NO: 252668
  chr3:135601878-135601963
  hypo

SEQ ID NO: 403742 - DNA, 172 bp, Homo sapiens; identical to SEQ ID NO: 252669
  chr3:135741866-135742038
  hypo

SEQ ID NO: 403743 - DNA, 135 bp, Homo sapiens; identical to SEQ ID NO: 252672
  chr3:136454636-136454771
  hypo

SEQ ID NO: 403744 - DNA, 132 bp, Homo sapiens; identical to SEQ ID NO: 252677
  chr3:136678363-136678495
  hypo

SEQ ID NO: 403745 - DNA, 195 bp, Homo sapiens; identical to SEQ ID NO: 252683
  chr3:137783021-137783216
  hypo

SEQ ID NO: 403746 - DNA, 162 bp, Homo sapiens; identical to SEQ ID NO: 252685
  chr3:137831298-137831460
  hypo

SEQ ID NO: 403747 - DNA, 31 bp, Homo sapiens; identical to SEQ ID NO: 209075
  chr3:137891419-137891450
  hypo

SEQ ID NO: 403748 - DNA, 34 bp, Homo sapiens; identical to SEQ ID NO: 209076
  chr3:138001202-138001236
  hypo

SEQ ID NO: 403749 - DNA, 146 bp, Homo sapiens; identical to SEQ ID NO: 252691
  chr3:138413616-138413762
  hypo

SEQ ID NO: 403750 - DNA, 34 bp, Homo sapiens; identical to SEQ ID NO: 209081
  chr3:138542517-138542551
  hypo

SEQ ID NO: 403751 - DNA, 38 bp, Homo sapiens; identical to SEQ ID NO: 209082
  chr3:138577523-138577561
  hypo

SEQ ID NO: 403752 - DNA, 212 bp, Homo sapiens; identical to SEQ ID NO: 252697
  chr3:139180923-139181135
  hypo

SEQ ID NO: 403753 - DNA, 42 bp, Homo sapiens; identical to SEQ ID NO: 302077
  chr3:140434249-140434291
  hypo

SEQ ID NO: 403754 - DNA, 38 bp, Homo sapiens; identical to SEQ ID NO: 252701
  chr3:141053875-141053913
  hypo

SEQ ID NO: 403755 - DNA, 33 bp, Homo sapiens; identical to SEQ ID NO: 252706
  chr3:141363515-141363548
  hypo

SEQ ID NO: 403756 - DNA, 143 bp, Homo sapiens; identical to SEQ ID NO: 252709
  chr3:141495874-141496017
  hypo

SEQ ID NO: 403757 - DNA, 38 bp, Homo sapiens; identical to SEQ ID NO: 209090
  chr3:141509677-141509715
  hypo

SEQ ID NO: 403758 - DNA, 130 bp, Homo sapiens; identical to SEQ ID NO: 252711
  chr3:141523991-141524121
  hypo

SEQ ID NO: 403759 - DNA, 35 bp, Homo sapiens; identical to SEQ ID NO: 209094
  chr3:141954424-141954459
  hypo

SEQ ID NO: 403760 - DNA, 40 bp, Homo sapiens; identical to SEQ ID NO: 252720
  chr3:142354392-142354432
  hypo

SEQ ID NO: 403761 - DNA, 143 bp, Homo sapiens; identical to SEQ ID NO: 302099
  chr3:142499677-142499820
  hypo

SEQ ID NO: 403762 - DNA, 44 bp, Homo sapiens; identical to SEQ ID NO: 209100
  chr3:142728140-142728184
  hypo

SEQ ID NO: 403763 - DNA, 131 bp, Homo sapiens; identical to SEQ ID NO: 252730
  chr3:142775176-142775307
  hypo

SEQ ID NO: 403764 - DNA, 299 bp, Homo sapiens
  chr3:142895258-142895557
  hypo
cctcctggtggcggagaccccggtgggggtagcggggggttcccgggaggccgagggaagcaagacatcggggacattctgcagcagataatgaccatcaccgaccagagcctggacgaggcccaggccaagaaacacgccctaaactgccaccgaatgaagcctgctctctttagcgtcctgtgtgaaatcaaggagaaaaccggcctcagcattcggagctcccaggaggaggagccggtggacccacagctgatgcgcttggacaacatgcttctggcagagggtgtggctgggcc

SEQ ID NO: 403765 - DNA, 33 bp, Homo sapiens; identical to SEQ ID NO: 252735
  chr3:142930276-142930309
  hypo

SEQ ID NO: 403766 - DNA, 78 bp, Homo sapiens; identical to SEQ ID NO: 252739
  chr3:143316755-143316833
  hypo

SEQ ID NO: 403767 - DNA, 72 bp, Homo sapiens; identical to SEQ ID NO: 252740
  chr3:143317071-143317143
  hypo

SEQ ID NO: 403768 - DNA, 39 bp, Homo sapiens; identical to SEQ ID NO: 252743
  chr3:148472162-148472201
  hypo

SEQ ID NO: 403769 - DNA, 203 bp, Homo sapiens; identical to SEQ ID NO: 252744
  chr3:148556040-148556243
  hypo

SEQ ID NO: 403770 - DNA, 214 bp, Homo sapiens; identical to SEQ ID NO: 199133
  chr3:148709993-148710207
  hypo

SEQ ID NO: 403771 - DNA, 54 bp, Homo sapiens; identical to SEQ ID NO: 252747
  chr3:148802384-148802438
  hypo

SEQ ID NO: 403772 - DNA, 143 bp, Homo sapiens; identical to SEQ ID NO: 209112
  chr3:149096959-149097102
  hypo

SEQ ID NO: 403773 - DNA, 288 bp, Homo sapiens; identical to SEQ ID NO: 252756
  chr3:149700884-149701172
  hypo

SEQ ID NO: 403774 - DNA, 173 bp, Homo sapiens; identical to SEQ ID NO: 252757
  chr3:149931181-149931354
  hypo

SEQ ID NO: 403775 - DNA, 189 bp, Homo sapiens; identical to SEQ ID NO: 252759
  chr3:150026518-150026707
  hypo

SEQ ID NO: 403776 - DNA, 210 bp, Homo sapiens; identical to SEQ ID NO: 222252
  chr3:150320966-150321176
  hypo

SEQ ID NO: 403777 - DNA, 159 bp, Homo sapiens; identical to SEQ ID NO: 252765
  chr3:150379955-150380114
  hypo

SEQ ID NO: 403778 - DNA, 136 bp, Homo sapiens; identical to SEQ ID NO: 302146
  chr3:150443086-150443222
  hypo

SEQ ID NO: 403779 - DNA, 186 bp, Homo sapiens; identical to SEQ ID NO: 209118
  chr3:150497417-150497603
  hypo

SEQ ID NO: 403780 - DNA, 39 bp, Homo sapiens; identical to SEQ ID NO: 252775
  chr3:152891478-152891517
  hypo

SEQ ID NO: 403781 - DNA, 45 bp, Homo sapiens; identical to SEQ ID NO: 209125
  chr3:153010748-153010793
  hypo

SEQ ID NO: 403782 - DNA, 37 bp, Homo sapiens; identical to SEQ ID NO: 252779
  chr3:153404031-153404068
  hypo

SEQ ID NO: 403783 - DNA, 161 bp, Homo sapiens; identical to SEQ ID NO: 252781
  chr3:154907062-154907223
  hypo

SEQ ID NO: 403784 - DNA, 42 bp, Homo sapiens; identical to SEQ ID NO: 252782
  chr3:155315612-155315654
  hypo

SEQ ID NO: 403785 - DNA, 39 bp, Homo sapiens; identical to SEQ ID NO: 209127
  chr3:155454719-155454758
  hypo

SEQ ID NO: 403786 - DNA, 41 bp, Homo sapiens; identical to SEQ ID NO: 199149
  chr3:155722292-155722333
  hypo

SEQ ID NO: 403787 - DNA, 65 bp, Homo sapiens; identical to SEQ ID NO: 209130
  chr3:156543100-156543165
  hypo

SEQ ID NO: 403788 - DNA, 43 bp, Homo sapiens; identical to SEQ ID NO: 252791
  chr3:156843278-156843321
  hypo

SEQ ID NO: 403789 - DNA, 32 bp, Homo sapiens; identical to SEQ ID NO: 252792
  chr3:156862936-156862968
  hypo

SEQ ID NO: 403790 - DNA, 42 bp, Homo sapiens; identical to SEQ ID NO: 209133
  chr3:157866879-157866921
  hypo

SEQ ID NO: 403791 - DNA, 97 bp, Homo sapiens; identical to SEQ ID NO: 252794
  chr3:158361237-158361334
  hypo

SEQ ID NO: 403792 - DNA, 211 bp, Homo sapiens; identical to SEQ ID NO: 222257
  chr3:159706814-159707025
  hypo

SEQ ID NO: 403793 - DNA, 170 bp, Homo sapiens; identical to SEQ ID NO: 252800
  chr3:159814276-159814446
  hypo

SEQ ID NO: 403794 - DNA, 38 bp, Homo sapiens; identical to SEQ ID NO: 252801
  chr3:160328305-160328343
  hypo

SEQ ID NO: 403795 - DNA, 35 bp, Homo sapiens; identical to SEQ ID NO: 252803
  chr3:160863217-160863252
  hypo

SEQ ID NO: 403796 - DNA, 112 bp, Homo sapiens; identical to SEQ ID NO: 252805
  chr3:166834368-166834480
  hypo

SEQ ID NO: 403797 - DNA, 39 bp, Homo sapiens; identical to SEQ ID NO: 252806
  chr3:167911807-167911846
  hypo

SEQ ID NO: 403798 - DNA, 122 bp, Homo sapiens; identical to SEQ ID NO: 302192
  chr3:167916991-167917113
  hypo

SEQ ID NO: 403799 - DNA, 37 bp, Homo sapiens; identical to SEQ ID NO: 252808
  chr3:168197107-168197144
  hypo

SEQ ID NO: 403800 - DNA, 87 bp, Homo sapiens; identical to SEQ ID NO: 222261
  chr3:169380983-169381070
  hypo

SEQ ID NO: 403801 - DNA, 163 bp, Homo sapiens; identical to SEQ ID NO: 222262
  chr3:169381408-169381571
  hypo

SEQ ID NO: 403802 - DNA, 32 bp, Homo sapiens; identical to SEQ ID NO: 252817
  chr3:169795277-169795309
  hypo

SEQ ID NO: 403803 - DNA, 60 bp, Homo sapiens; identical to SEQ ID NO: 252819
  chr3:169796500-169796560
  hypo

SEQ ID NO: 403804 - DNA, 100 bp, Homo sapiens; identical to SEQ ID NO: 209144
  chr3:169915438-169915538
  hypo

SEQ ID NO: 403805 - DNA, 39 bp, Homo sapiens; identical to SEQ ID NO: 252822
  chr3:169916138-169916177
  hypo

SEQ ID NO: 403806 - DNA, 40 bp, Homo sapiens; identical to SEQ ID NO: 252825
  chr3:170154037-170154077
  hypo

SEQ ID NO: 403807 - DNA, 74 bp, Homo sapiens; identical to SEQ ID NO: 209145
  chr3:170179927-170180001
  hypo

SEQ ID NO: 403808 - DNA, 42 bp, Homo sapiens; identical to SEQ ID NO: 252828
  chr3:170267374-170267416
  hypo

SEQ ID NO: 403809 - DNA, 45 bp, Homo sapiens; identical to SEQ ID NO: 252833
  chr3:170870834-170870879
  hypo

SEQ ID NO: 403810 - DNA, 163 bp, Homo sapiens; identical to SEQ ID NO: 209150
  chr3:171363249-171363412
  hypo

SEQ ID NO: 403811 - DNA, 78 bp, Homo sapiens; identical to SEQ ID NO: 209151
  chr3:171493948-171494026
  hypo

SEQ ID NO: 403812 - DNA, 154 bp, Homo sapiens; identical to SEQ ID NO: 199199
  chr3:171758579-171758733
  hypo

SEQ ID NO: 403813 - DNA, 153 bp, Homo sapiens; identical to SEQ ID NO: 252842
  chr3:171886950-171887103
  hypo

SEQ ID NO: 403814 - DNA, 193 bp, Homo sapiens; identical to SEQ ID NO: 302235
  chr3:172033319-172033512
  hypo

SEQ ID NO: 403815 - DNA, 38 bp, Homo sapiens; identical to SEQ ID NO: 252846
  chr3:172056805-172056843
  hypo

SEQ ID NO: 403816 - DNA, 50 bp, Homo sapiens; identical to SEQ ID NO: 252847
  chr3:172341459-172341509
  hypo

SEQ ID NO: 403817 - DNA, 38 bp, Homo sapiens; identical to SEQ ID NO: 252852
  chr3:172394537-172394575
  hypo

SEQ ID NO: 403818 - DNA, 80 bp, Homo sapiens; identical to SEQ ID NO: 209159
  chr3:172395702-172395782
  hypo

SEQ ID NO: 403819 - DNA, 41 bp, Homo sapiens; identical to SEQ ID NO: 252858
  chr3:172426415-172426456
  hypo

SEQ ID NO: 403820 - DNA, 108 bp, Homo sapiens; identical to SEQ ID NO: 209161
  chr3:172727654-172727762
  hypo

SEQ ID NO: 403821 - DNA, 180 bp, Homo sapiens; identical to SEQ ID NO: 209163
  chr3:173864875-173865055
  hypo

SEQ ID NO: 403822 - DNA, 32 bp, Homo sapiens; identical to SEQ ID NO: 209167
  chr3:175307701-175307733
  hypo

SEQ ID NO: 403823 - DNA, 43 bp, Homo sapiens; identical to SEQ ID NO: 302255
  chr3:175338091-175338134
  hypo

SEQ ID NO: 403824 - DNA, 466 bp, Homo sapiens; identical to SEQ ID NO: 302256
  chr3:175338171-175338637
  hypo

SEQ ID NO: 403825 - DNA, 218 bp, Homo sapiens; identical to SEQ ID NO: 252870
  chr3:176710430-176710648
  hypo

SEQ ID NO: 403826 - DNA, 34 bp, Homo sapiens; identical to SEQ ID NO: 252875
  chr3:176893551-176893585
  hypo

SEQ ID NO: 403827 - DNA, 36 bp, Homo sapiens; identical to SEQ ID NO: 252878
  chr3:176990424-176990460
  hypo

SEQ ID NO: 403828 - DNA, 35 bp, Homo sapiens; identical to SEQ ID NO: 252879
  chr3:176990700-176990735
  hypo

SEQ ID NO: 403829 - DNA, 103 bp, Homo sapiens; identical to SEQ ID NO: 252882
  chr3:177085605-177085708
  hypo

SEQ ID NO: 403830 - DNA, 230 bp, Homo sapiens; identical to SEQ ID NO: 252883
  chr3:177094901-177095131
  hypo

SEQ ID NO: 403831 - DNA, 89 bp, Homo sapiens; identical to SEQ ID NO: 209173
  chr3:177158385-177158474
  hypo

SEQ ID NO: 403832 - DNA, 33 bp, Homo sapiens; identical to SEQ ID NO: 252888
  chr3:177269266-177269299
  hypo

SEQ ID NO: 403833 - DNA, 31 bp, Homo sapiens; identical to SEQ ID NO: 252889
  chr3:177308262-177308293
  hypo

SEQ ID NO: 403834 - DNA, 43 bp, Homo sapiens; identical to SEQ ID NO: 252890
  chr3:177829173-177829216
  hypo

SEQ ID NO: 403835 - DNA, 180 bp, Homo sapiens; identical to SEQ ID NO: 209175
  chr3:178860953-178861133
  hypo

SEQ ID NO: 403836 - DNA, 40 bp, Homo sapiens; identical to SEQ ID NO: 199210
  chr3:179064154-179064194
  hypo

SEQ ID NO: 403837 - DNA, 36 bp, Homo sapiens; identical to SEQ ID NO: 209178
  chr3:179203080-179203116
  hypo

SEQ ID NO: 403838 - DNA, 79 bp, Homo sapiens; identical to SEQ ID NO: 230001
  chr3:179367505-179367584
  hypo

SEQ ID NO: 403839 - DNA, 160 bp, Homo sapiens; identical to SEQ ID NO: 252901
  chr3:179398900-179399060
  hypo

SEQ ID NO: 403840 - DNA, 373 bp, Homo sapiens; identical to SEQ ID NO: 252902
  chr3:179449287-179449660
  hypo

SEQ ID NO: 403841 - DNA, 34 bp, Homo sapiens; identical to SEQ ID NO: 252903
  chr3:180502777-180502811
  hypo

SEQ ID NO: 403842 - DNA, 170 bp, Homo sapiens; identical to SEQ ID NO: 199225
  chr3:182511623-182511793
  hypo

SEQ ID NO: 403843 - DNA, 34 bp, Homo sapiens; identical to SEQ ID NO: 209187
  chr3:182650849-182650883
  hypo

SEQ ID NO: 403844 - DNA, 163 bp, Homo sapiens; identical to SEQ ID NO: 252920
  chr3:182935983-182936146
  hypo

SEQ ID NO: 403845 - DNA, 147 bp, Homo sapiens; identical to SEQ ID NO: 209191
  chr3:182976758-182976905
  hypo

SEQ ID NO: 403846 - DNA, 120 bp, Homo sapiens; identical to SEQ ID NO: 209195
  chr3:183183284-183183404
  hypo

SEQ ID NO: 403847 - DNA, 41 bp, Homo sapiens; identical to SEQ ID NO: 209196
  chr3:183209172-183209213
  hypo

SEQ ID NO: 403848 - DNA, 57 bp, Homo sapiens; identical to SEQ ID NO: 252933
  chr3:183245666-183245723
  hypo

SEQ ID NO: 403849 - DNA, 171 bp, Homo sapiens; identical to SEQ ID NO: 209200
  chr3:183381135-183381306
  hypo

SEQ ID NO: 403850 - DNA, 220 bp, Homo sapiens; identical to SEQ ID NO: 209202
  chr3:183479752-183479972
  hypo

SEQ ID NO: 403851 - DNA, 55 bp, Homo sapiens; identical to SEQ ID NO: 209203
  chr3:183525222-183525277
  hypo

SEQ ID NO: 403852 - DNA, 48 bp, Homo sapiens; identical to SEQ ID NO: 252941
  chr3:183529223-183529271
  hypo

SEQ ID NO: 403853 - DNA, 231 bp, Homo sapiens; identical to SEQ ID NO: 222281
  chr3:183602814-183603045
  hypo

SEQ ID NO: 403854 - DNA, 84 bp, Homo sapiens; identical to SEQ ID NO: 252944
  chr3:183639003-183639087
  hypo

SEQ ID NO: 403855 - DNA, 44 bp, Homo sapiens; identical to SEQ ID NO: 252945
  chr3:183642080-183642124
  hypo

SEQ ID NO: 403856 - DNA, 101 bp, Homo sapiens; identical to SEQ ID NO: 209209
  chr3:183670355-183670456
  hypo

SEQ ID NO: 403857 - DNA, 31 bp, Homo sapiens; identical to SEQ ID NO: 209210
  chr3:183676454-183676485
  hypo

SEQ ID NO: 403858 - DNA, 194 bp, Homo sapiens; identical to SEQ ID NO: 252954
  chr3:183688726-183688920
  hypo

SEQ ID NO: 403859 - DNA, 31 bp, Homo sapiens; identical to SEQ ID NO: 252955
  chr3:183698521-183698552
  hypo

SEQ ID NO: 403860 - DNA, 199 bp, Homo sapiens; identical to SEQ ID NO: 252958
  chr3:183720218-183720417
  hypo

SEQ ID NO: 403861 - DNA, 144 bp, Homo sapiens; identical to SEQ ID NO: 252961
  chr3:183775518-183775662
  hypo

SEQ ID NO: 403862 - DNA, 127 bp, Homo sapiens; identical to SEQ ID NO: 302348
  chr3:183801859-183801986
  hypo

SEQ ID NO: 403863 - DNA, 186 bp, Homo sapiens; identical to SEQ ID NO: 302349
  chr3:183802021-183802207
  hypo

SEQ ID NO: 403864 - DNA, 86 bp, Homo sapiens; identical to SEQ ID NO: 199238
  chr3:183851915-183852001
  hypo

SEQ ID NO: 403865 - DNA, 214 bp, Homo sapiens; identical to SEQ ID NO: 252965
  chr3:183898698-183898912
  hypo

SEQ ID NO: 403866 - DNA, 291 bp, Homo sapiens; identical to SEQ ID NO: 252970
  chr3:184026067-184026358
  hypo

SEQ ID NO: 403867 - DNA, 143 bp, Homo sapiens; identical to SEQ ID NO: 252973
  chr3:184043272-184043415
  hypo

SEQ ID NO: 403868 - DNA, 86 bp, Homo sapiens; identical to SEQ ID NO: 252974
  chr3:184045150-184045236
  hypo

SEQ ID NO: 403869 - DNA, 58 bp, Homo sapiens
  chr3:184057190-184057248
  hypo
gggctgcttgctgacagggattggtggagaagggtttttgttttttgttatttatttt

SEQ ID NO: 403870 - DNA, 163 bp, Homo sapiens; identical to SEQ ID NO: 209219
  chr3:184059511-184059674
  hypo

SEQ ID NO: 403871 - DNA, 325 bp, Homo sapiens; identical to SEQ ID NO: 252980
  chr3:184071379-184071704
  hypo

SEQ ID NO: 403872 - DNA, 224 bp, Homo sapiens; identical to SEQ ID NO: 281784
  chr3:184097688-184097912
  hypo

SEQ ID NO: 403873 - DNA, 280 bp, Homo sapiens; identical to SEQ ID NO: 222284
  chr3:184098372-184098652
  hypo

SEQ ID NO: 403874 - DNA, 86 bp, Homo sapiens; identical to SEQ ID NO: 281786
  chr3:184099331-184099417
  hypo

SEQ ID NO: 403875 - DNA, 34 bp, Homo sapiens; identical to SEQ ID NO: 281787
  chr3:184099446-184099480
  hypo

SEQ ID NO: 403876 - DNA, 212 bp, Homo sapiens; identical to SEQ ID NO: 252982
  chr3:184133791-184134003
  hypo

SEQ ID NO: 403877 - DNA, 101 bp, Homo sapiens; identical to SEQ ID NO: 252987
  chr3:184257024-184257125
  hypo

SEQ ID NO: 403878 - DNA, 171 bp, Homo sapiens; identical to SEQ ID NO: 209227
  chr3:184273717-184273888
  hypo

SEQ ID NO: 403879 - DNA, 31 bp, Homo sapiens; identical to SEQ ID NO: 252990
  chr3:184294858-184294889
  hypo

SEQ ID NO: 403880 - DNA, 165 bp, Homo sapiens; identical to SEQ ID NO: 209229
  chr3:184295484-184295649
  hypo

SEQ ID NO: 403881 - DNA, 135 bp, Homo sapiens; identical to SEQ ID NO: 281794
  chr3:184320096-184320231
  hypo

SEQ ID NO: 403882 - DNA, 148 bp, Homo sapiens; identical to SEQ ID NO: 209232
  chr3:184340018-184340166
  hypo

SEQ ID NO: 403883 - DNA, 88 bp, Homo sapiens; identical to SEQ ID NO: 252996
  chr3:184357510-184357598
  hypo

SEQ ID NO: 403884 - DNA, 45 bp, Homo sapiens; identical to SEQ ID NO: 209233
  chr3:184378704-184378749
  hypo

SEQ ID NO: 403885 - DNA, 31 bp, Homo sapiens
  chr3:184626377-184626408
  hypo
ggcctctggccccattgtgtggggtggctgc

SEQ ID NO: 403886 - DNA, 63 bp, Homo sapiens; identical to SEQ ID NO: 209239
  chr3:184800818-184800881
  hypo

SEQ ID NO: 403887 - DNA, 93 bp, Homo sapiens; identical to SEQ ID NO: 209240
  chr3:184833596-184833689
  hypo

SEQ ID NO: 403888 - DNA, 92 bp, Homo sapiens; identical to SEQ ID NO: 209241
  chr3:184833749-184833841
  hypo

SEQ ID NO: 403889 - DNA, 278 bp, Homo sapiens; identical to SEQ ID NO: 253015
  chr3:185245476-185245754
  hypo

SEQ ID NO: 403890 - DNA, 33 bp, Homo sapiens; identical to SEQ ID NO: 209244
  chr3:185266642-185266675
  hypo

SEQ ID NO: 403891 - DNA, 50 bp, Homo sapiens; identical to SEQ ID NO: 302408
  chr3:185270832-185270882
  hypo

SEQ ID NO: 403892 - DNA, 119 bp, Homo sapiens; identical to SEQ ID NO: 209245
  chr3:185277645-185277764
  hypo

SEQ ID NO: 403893 - DNA, 161 bp, Homo sapiens; identical to SEQ ID NO: 209246
  chr3:185277844-185278005
  hypo

SEQ ID NO: 403894 - DNA, 67 bp, Homo sapiens; identical to SEQ ID NO: 209247
  chr3:185303180-185303247
  hypo

SEQ ID NO: 403895 - DNA, 104 bp, Homo sapiens; identical to SEQ ID NO: 209253
  chr3:185363652-185363756
  hypo

SEQ ID NO: 403896 - DNA, 47 bp, Homo sapiens
  chr3:185365929-185365976
  hypo
gtttaagagtttctatgtaaagagctttacaacagctgggtgtggtg

SEQ ID NO: 403897 - DNA, 73 bp, Homo sapiens; identical to SEQ ID NO: 253028
  chr3:185373822-185373895
  hypo

SEQ ID NO: 403898 - DNA, 166 bp, Homo sapiens; identical to SEQ ID NO: 209259
  chr3:185551759-185551925
  hypo

SEQ ID NO: 403899 - DNA, 32 bp, Homo sapiens; identical to SEQ ID NO: 253036
  chr3:185565288-185565320
  hypo

SEQ ID NO: 403900 - DNA, 38 bp, Homo sapiens; identical to SEQ ID NO: 253037
  chr3:185630395-185630433
  hypo

SEQ ID NO: 403901 - DNA, 37 bp, Homo sapiens; identical to SEQ ID NO: 209260
  chr3:185630673-185630710
  hypo

SEQ ID NO: 403902 - DNA, 95 bp, Homo sapiens; identical to SEQ ID NO: 209263
  chr3:185668397-185668492
  hypo

SEQ ID NO: 403903 - DNA, 80 bp, Homo sapiens; identical to SEQ ID NO: 209264
  chr3:185681620-185681700
  hypo

SEQ ID NO: 403904 - DNA, 412 bp, Homo sapiens; identical to SEQ ID NO: 396611
  chr3:185825761-185826173
  hypo

SEQ ID NO: 403905 - DNA, 526 bp, Homo sapiens; identical to SEQ ID NO: 396613
  chr3:185826974-185827500
  hypo

SEQ ID NO: 403906 - DNA, 43 bp, Homo sapiens; identical to SEQ ID NO: 209268
  chr3:186142830-186142873
  hypo

SEQ ID NO: 403907 - DNA, 191 bp, Homo sapiens; identical to SEQ ID NO: 209270
  chr3:186409540-186409731
  hypo

SEQ ID NO: 403908 - DNA, 224 bp, Homo sapiens; identical to SEQ ID NO: 253050
  chr3:186471842-186472066
  hypo

SEQ ID NO: 403909 - DNA, 47 bp, Homo sapiens; identical to SEQ ID NO: 199254
  chr3:186544979-186545026
  hypo

SEQ ID NO: 403910 - DNA, 149 bp, Homo sapiens; identical to SEQ ID NO: 253053
  chr3:186713655-186713804
  hypo

SEQ ID NO: 403911 - DNA, 50 bp, Homo sapiens; identical to SEQ ID NO: 209275
  chr3:186938675-186938725
  hypo

SEQ ID NO: 403912 - DNA, 143 bp, Homo sapiens; identical to SEQ ID NO: 253057
  chr3:187281941-187282084
  hypo

SEQ ID NO: 403913 - DNA, 144 bp, Homo sapiens; identical to SEQ ID NO: 222300
  chr3:187462668-187462812
  hypo

SEQ ID NO: 403914 - DNA, 227 bp, Homo sapiens; identical to SEQ ID NO: 281825
  chr3:187463100-187463327
  hypo

SEQ ID NO: 403915 - DNA, 171 bp, Homo sapiens; identical to SEQ ID NO: 253060
  chr3:187930467-187930638
  hypo

SEQ ID NO: 403916 - DNA, 164 bp, Homo sapiens; identical to SEQ ID NO: 209280
  chr3:188070251-188070415
  hypo

SEQ ID NO: 403917 - DNA, 94 bp, Homo sapiens; identical to SEQ ID NO: 209281
  chr3:188353741-188353835
  hypo

SEQ ID NO: 403918 - DNA, 93 bp, Homo sapiens; identical to SEQ ID NO: 209282
  chr3:189618732-189618825
  hypo

SEQ ID NO: 403919 - DNA, 161 bp, Homo sapiens; identical to SEQ ID NO: 253072
  chr3:190278465-190278626
  hypo

SEQ ID NO: 403920 - DNA, 31 bp, Homo sapiens; identical to SEQ ID NO: 253075
  chr3:192670616-192670647
  hypo

SEQ ID NO: 403921 - DNA, 87 bp, Homo sapiens; identical to SEQ ID NO: 209285
  chr3:193235538-193235625
  hypo

SEQ ID NO: 403922 - DNA, 147 bp, Homo sapiens; identical to SEQ ID NO: 253078
  chr3:193314534-193314681
  hypo

SEQ ID NO: 403923 - DNA, 219 bp, Homo sapiens; identical to SEQ ID NO: 209287
  chr3:193392562-193392781
  hypo

SEQ ID NO: 403924 - DNA, 99 bp, Homo sapiens; identical to SEQ ID NO: 253086
  chr3:193489691-193489790
  hypo

SEQ ID NO: 403925 - DNA, 35 bp, Homo sapiens; identical to SEQ ID NO: 209295
  chr3:193503310-193503345
  hypo

SEQ ID NO: 403926 - DNA, 208 bp, Homo sapiens; identical to SEQ ID NO: 209296
  chr3:193505272-193505480
  hypo

SEQ ID NO: 403927 - DNA, 160 bp, Homo sapiens; identical to SEQ ID NO: 253091
  chr3:193513920-193514080
  hypo

SEQ ID NO: 403928 - DNA, 55 bp, Homo sapiens; identical to SEQ ID NO: 253097
  chr3:193696015-193696070
  hypo

SEQ ID NO: 403929 - DNA, 169 bp, Homo sapiens; identical to SEQ ID NO: 209299
  chr3:193711554-193711723
  hypo

SEQ ID NO: 403930 - DNA, 441 bp, Homo sapiens; identical to SEQ ID NO: 222307
  chr3:193721033-193721474
  hypo

SEQ ID NO: 403931 - DNA, 104 bp, Homo sapiens; identical to SEQ ID NO: 222308
  chr3:193721577-193721681
  hypo

SEQ ID NO: 403932 - DNA, 484 bp, Homo sapiens; identical to SEQ ID NO: 199269
  chr3:193853887-193854371
  hypo

SEQ ID NO: 403933 - DNA, 121 bp, Homo sapiens; identical to SEQ ID NO: 222312
  chr3:193859656-193859777
  hypo

SEQ ID NO: 403934 - DNA, 68 bp, Homo sapiens
  chr3:194049272-194049340
  hypo
gcctcctgtgcttcaggaaggcagccctggagaccttctggatgcttcccaggaaggccccacagcag

SEQ ID NO: 403935 - DNA, 93 bp, Homo sapiens; identical to SEQ ID NO: 253106
  chr3:194058380-194058473
  hypo

SEQ ID NO: 403936 - DNA, 82 bp, Homo sapiens; identical to SEQ ID NO: 253109
  chr3:194078512-194078594
  hypo

SEQ ID NO: 403937 - DNA, 148 bp, Homo sapiens; identical to SEQ ID NO: 253111
  chr3:194105561-194105709
  hypo

SEQ ID NO: 403938 - DNA, 160 bp, Homo sapiens; identical to SEQ ID NO: 302516
  chr3:194128258-194128418
  hypo

SEQ ID NO: 403939 - DNA, 217 bp, Homo sapiens; identical to SEQ ID NO: 253118
  chr3:194324945-194325162
  hypo

SEQ ID NO: 403940 - DNA, 34 bp, Homo sapiens; identical to SEQ ID NO: 253120
  chr3:194341460-194341494
  hypo

SEQ ID NO: 403941 - DNA, 571 bp, Homo sapiens; identical to SEQ ID NO: 222316
  chr3:194353932-194354503
  hypo

SEQ ID NO: 403942 - DNA, 186 bp, Homo sapiens; identical to SEQ ID NO: 209320
  chr3:194596888-194597074
  hypo

SEQ ID NO: 403943 - DNA, 184 bp, Homo sapiens; identical to SEQ ID NO: 253125
  chr3:194669150-194669334
  hypo

SEQ ID NO: 403944 - DNA, 48 bp, Homo sapiens; identical to SEQ ID NO: 253128
  chr3:194783225-194783273
  hypo

SEQ ID NO: 403945 - DNA, 158 bp, Homo sapiens; identical to SEQ ID NO: 253131
  chr3:194790635-194790793
  hypo

SEQ ID NO: 403946 - DNA, 52 bp, Homo sapiens; identical to SEQ ID NO: 253132
  chr3:194793570-194793622
  hypo

SEQ ID NO: 403947 - DNA, 38 bp, Homo sapiens; identical to SEQ ID NO: 209323
  chr3:194799662-194799700
  hypo

SEQ ID NO: 403948 - DNA, 504 bp, Homo sapiens; identical to SEQ ID NO: 209325
  chr3:194851494-194851998
  hypo

SEQ ID NO: 403949 - DNA, 166 bp, Homo sapiens; identical to SEQ ID NO: 209326
  chr3:194866034-194866200
  hypo

SEQ ID NO: 403950 - DNA, 258 bp, Homo sapiens; identical to SEQ ID NO: 222317
  chr3:194980253-194980511
  hypo

SEQ ID NO: 403951 - DNA, 77 bp, Homo sapiens; identical to SEQ ID NO: 253146
  chr3:195139467-195139544
  hypo

SEQ ID NO: 403952 - DNA, 38 bp, Homo sapiens; identical to SEQ ID NO: 209334
  chr3:195183766-195183804
  hypo

SEQ ID NO: 403953 - DNA, 181 bp, Homo sapiens; identical to SEQ ID NO: 253156
  chr3:195573453-195573634
  hypo

SEQ ID NO: 403954 - DNA, 87 bp, Homo sapiens; identical to SEQ ID NO: 253158
  chr3:195591689-195591776
  hypo

SEQ ID NO: 403955 - DNA, 279 bp, Homo sapiens; identical to SEQ ID NO: 253159
  chr3:195592096-195592375
  hypo

SEQ ID NO: 403956 - DNA, 159 bp, Homo sapiens; identical to SEQ ID NO: 209341
  chr3:195595789-195595948
  hypo

SEQ ID NO: 403957 - DNA, 115 bp, Homo sapiens; identical to SEQ ID NO: 209347
  chr3:195604987-195605102
  hypo

SEQ ID NO: 403958 - DNA, 99 bp, Homo sapiens; identical to SEQ ID NO: 253173
  chr3:195643956-195644055
  hypo

SEQ ID NO: 403959 - DNA, 342 bp, Homo sapiens; identical to SEQ ID NO: 253176
  chr3:195735474-195735816
  hypo

SEQ ID NO: 403960 - DNA, 505 bp, Homo sapiens; identical to SEQ ID NO: 281869
  chr3:195808865-195809370
  hypo

SEQ ID NO: 403961 - DNA, 36 bp, Homo sapiens; identical to SEQ ID NO: 209354
  chr3:195863857-195863893
  hypo

SEQ ID NO: 403962 - DNA, 37 bp, Homo sapiens; identical to SEQ ID NO: 209355
  chr3:195866855-195866892
  hypo

SEQ ID NO: 403963 - DNA, 169 bp, Homo sapiens; identical to SEQ ID NO: 253188
  chr3:195923150-195923319
  hypo

SEQ ID NO: 403964 - DNA, 32 bp, Homo sapiens; identical to SEQ ID NO: 253189
  chr3:195960904-195960936
  hypo

SEQ ID NO: 403965 - DNA, 32 bp, Homo sapiens; identical to SEQ ID NO: 253190
  chr3:195961176-195961208
  hypo

SEQ ID NO: 403966 - DNA, 44 bp, Homo sapiens; identical to SEQ ID NO: 209357
  chr3:195990771-195990815
  hypo

SEQ ID NO: 403967 - DNA, 98 bp, Homo sapiens; identical to SEQ ID NO: 209358
  chr3:196039618-196039716
  hypo

SEQ ID NO: 403968 - DNA, 38 bp, Homo sapiens; identical to SEQ ID NO: 209359
  chr3:196138792-196138830
  hypo

SEQ ID NO: 403969 - DNA, 138 bp, Homo sapiens; identical to SEQ ID NO: 209360
  chr3:196143804-196143942
  hypo

SEQ ID NO: 403970 - DNA, 77 bp, Homo sapiens; identical to SEQ ID NO: 209361
  chr3:196144182-196144259
  hypo

SEQ ID NO: 403971 - DNA, 242 bp, Homo sapiens; identical to SEQ ID NO: 209362
  chr3:196199259-196199501
  hypo

SEQ ID NO: 403972 - DNA, 44 bp, Homo sapiens; identical to SEQ ID NO: 253204
  chr3:196263529-196263573
  hypo

SEQ ID NO: 403973 - DNA, 197 bp, Homo sapiens; identical to SEQ ID NO: 253208
  chr3:196376654-196376851
  hypo

SEQ ID NO: 403974 - DNA, 42 bp, Homo sapiens; identical to SEQ ID NO: 253217
  chr3:196469496-196469538
  hypo

SEQ ID NO: 403975 - DNA, 202 bp, Homo sapiens; identical to SEQ ID NO: 209367
  chr3:196530355-196530557
  hypo

SEQ ID NO: 403976 - DNA, 89 bp, Homo sapiens; identical to SEQ ID NO: 253221
  chr3:196700062-196700151
  hypo

SEQ ID NO: 403977 - DNA, 291 bp, Homo sapiens; identical to SEQ ID NO: 209368
  chr3:196723696-196723987
  hypo

SEQ ID NO: 403978 - DNA, 613 bp, Homo sapiens; identical to SEQ ID NO: 253224
  chr3:196752264-196752877
  hypo

SEQ ID NO: 403979 - DNA, 112 bp, Homo sapiens; identical to SEQ ID NO: 209373
  chr3:196766007-196766119
  hypo

SEQ ID NO: 403980 - DNA, 86 bp, Homo sapiens; identical to SEQ ID NO: 209374
  chr3:196766195-196766281
  hypo

SEQ ID NO: 403981 - DNA, 192 bp, Homo sapiens; identical to SEQ ID NO: 209375
  chr3:196817782-196817974
  hypo

SEQ ID NO: 403982 - DNA, 147 bp, Homo sapiens; identical to SEQ ID NO: 253229
  chr3:196907217-196907364
  hypo

SEQ ID NO: 403983 - DNA, 85 bp, Homo sapiens; identical to SEQ ID NO: 302640
  chr3:196910545-196910630
  hypo

SEQ ID NO: 403984 - DNA, 156 bp, Homo sapiens; identical to SEQ ID NO: 253231
  chr3:197027476-197027632
  hypo

SEQ ID NO: 403985 - DNA, 158 bp, Homo sapiens; identical to SEQ ID NO: 253232
  chr3:197094180-197094338
  hypo

SEQ ID NO: 403986 - DNA, 283 bp, Homo sapiens; identical to SEQ ID NO: 253234
  chr3:197124819-197125102
  hypo

SEQ ID NO: 403987 - DNA, 86 bp, Homo sapiens; identical to SEQ ID NO: 253235
  chr3:197127430-197127516
  hypo

SEQ ID NO: 403988 - DNA, 141 bp, Homo sapiens; identical to SEQ ID NO: 253242
  chr3:197231739-197231880
  hypo

SEQ ID NO: 403989 - DNA, 300 bp, Homo sapiens; identical to SEQ ID NO: 253243
  chr3:197238899-197239199
  hypo

SEQ ID NO: 403990 - DNA, 360 bp, Homo sapiens; identical to SEQ ID NO: 253244
  chr3:197241231-197241591
  hypo

SEQ ID NO: 403991 - DNA, 156 bp, Homo sapiens; identical to SEQ ID NO: 281883
  chr3:197281702-197281858
  hypo

SEQ ID NO: 403992 - DNA, 238 bp, Homo sapiens; identical to SEQ ID NO: 109572
  chr3:197281920-197282158
  hypo

SEQ ID NO: 403993 - DNA, 180 bp, Homo sapiens; identical to SEQ ID NO: 209386
  chr3:197330487-197330667
  hypo

SEQ ID NO: 403994 - DNA, 99 bp, Homo sapiens; identical to SEQ ID NO: 253252
  chr3:197401910-197402009
  hypo

SEQ ID NO: 403995 - DNA, 114 bp, Homo sapiens; identical to SEQ ID NO: 209388
  chr3:197616593-197616707
  hypo

SEQ ID NO: 403996 - DNA, 155 bp, Homo sapiens; identical to SEQ ID NO: 253258
  chr3:197640193-197640348
  hypo

SEQ ID NO: 403997 - DNA, 135 bp, Homo sapiens; identical to SEQ ID NO: 253267
  chr4:530423-530558
  hypo

SEQ ID NO: 403998 - DNA, 111 bp, Homo sapiens; identical to SEQ ID NO: 253268
  chr4:610967-611078
  hypo

SEQ ID NO: 403999 - DNA, 253 bp, Homo sapiens; identical to SEQ ID NO: 209396
  chr4:616352-616605
  hypo

SEQ ID NO: 404000 - DNA, 236 bp, Homo sapiens; identical to SEQ ID NO: 209403
  chr4:655879-656115
  hypo

SEQ ID NO: 404001 - DNA, 226 bp, Homo sapiens; identical to SEQ ID NO: 281898
  chr4:667540-667766
  hypo

SEQ ID NO: 404002 - DNA, 44 bp, Homo sapiens; identical to SEQ ID NO: 253278
  chr4:708090-708134
  hypo

SEQ ID NO: 404003 - DNA, 167 bp, Homo sapiens; identical to SEQ ID NO: 302705
  chr4:741787-741954
  hypo

SEQ ID NO: 404004 - DNA, 474 bp, Homo sapiens; identical to SEQ ID NO: 209408
  chr4:756822-757296
  hypo

SEQ ID NO: 404005 - DNA, 183 bp, Homo sapiens; identical to SEQ ID NO: 209409
  chr4:757326-757509
  hypo

SEQ ID NO: 404006 - DNA, 139 bp, Homo sapiens; identical to SEQ ID NO: 253290
  chr4:793648-793787
  hypo

SEQ ID NO: 404007 - DNA, 97 bp, Homo sapiens; identical to SEQ ID NO: 253292
  chr4:815186-815283
  hypo

SEQ ID NO: 404008 - DNA, 378 bp, Homo sapiens; identical to SEQ ID NO: 253298
  chr4:860587-860965
  hypo

SEQ ID NO: 404009 - DNA, 177 bp, Homo sapiens; identical to SEQ ID NO: 253300
  chr4:866140-866317
  hypo

SEQ ID NO: 404010 - DNA, 149 bp, Homo sapiens; identical to SEQ ID NO: 253302
  chr4:873652-873801
  hypo

SEQ ID NO: 404011 - DNA, 135 bp, Homo sapiens; identical to SEQ ID NO: 209416
  chr4:882583-882718
  hypo

SEQ ID NO: 404012 - DNA, 92 bp, Homo sapiens; identical to SEQ ID NO: 253311
  chr4:937313-937405
  hypo

SEQ ID NO: 404013 - DNA, 89 bp, Homo sapiens; identical to SEQ ID NO: 253312
  chr4:937752-937841
  hypo

SEQ ID NO: 404014 - DNA, 178 bp, Homo sapiens; identical to SEQ ID NO: 253315
  chr4:965203-965381
  hypo

SEQ ID NO: 404015 - DNA, 309 bp, Homo sapiens; identical to SEQ ID NO: 222331
  chr4:966933-967242
  hypo

SEQ ID NO: 404016 - DNA, 32 bp, Homo sapiens; identical to SEQ ID NO: 209424
  chr4:982809-982841
  hypo

SEQ ID NO: 404017 - DNA, 38 bp, Homo sapiens; identical to SEQ ID NO: 209425
  chr4:995247-995285
  hypo

SEQ ID NO: 404018 - DNA, 250 bp, Homo sapiens; identical to SEQ ID NO: 209427
  chr4:1007048-1007298
  hypo

SEQ ID NO: 404019 - DNA, 133 bp, Homo sapiens; identical to SEQ ID NO: 253321
  chr4:1012455-1012588
  hypo

SEQ ID NO: 404020 - DNA, 128 bp, Homo sapiens; identical to SEQ ID NO: 209432
  chr4:1189100-1189228
  hypo

SEQ ID NO: 404021 - DNA, 333 bp, Homo sapiens; identical to SEQ ID NO: 253333
  chr4:1202638-1202971
  hypo

SEQ ID NO: 404022 - DNA, 135 bp, Homo sapiens; identical to SEQ ID NO: 209437
  chr4:1212170-1212305
  hypo

SEQ ID NO: 404023 - DNA, 415 bp, Homo sapiens; identical to SEQ ID NO: 253341
  chr4:1215813-1216228
  hypo

SEQ ID NO: 404024 - DNA, 365 bp, Homo sapiens; identical to SEQ ID NO: 209443
  chr4:1222883-1223248
  hypo

SEQ ID NO: 404025 - DNA, 76 bp, Homo sapiens; identical to SEQ ID NO: 209445
  chr4:1224555-1224631
  hypo

SEQ ID NO: 404026 - DNA, 38 bp, Homo sapiens; identical to SEQ ID NO: 253347
  chr4:1224661-1224699
  hypo

SEQ ID NO: 404027 - DNA, 166 bp, Homo sapiens; identical to SEQ ID NO: 253351
  chr4:1238879-1239045
  hypo

SEQ ID NO: 404028 - DNA, 140 bp, Homo sapiens; identical to SEQ ID NO: 199293
  chr4:1243421-1243561
  hypo

SEQ ID NO: 404029 - DNA, 135 bp, Homo sapiens; identical to SEQ ID NO: 253357
  chr4:1305766-1305901
  hypo

SEQ ID NO: 404030 - DNA, 91 bp, Homo sapiens; identical to SEQ ID NO: 209453
  chr4:1322319-1322410
  hypo

SEQ ID NO: 404031 - DNA, 223 bp, Homo sapiens; identical to SEQ ID NO: 209454
  chr4:1323177-1323400
  hypo

SEQ ID NO: 404032 - DNA, 56 bp, Homo sapiens; identical to SEQ ID NO: 253365
  chr4:1324514-1324570
  hypo

SEQ ID NO: 404033 - DNA, 256 bp, Homo sapiens; identical to SEQ ID NO: 253366
  chr4:1324847-1325103
  hypo

SEQ ID NO: 404034 - DNA, 220 bp, Homo sapiens; identical to SEQ ID NO: 253372
  chr4:1333934-1334154
  hypo

SEQ ID NO: 404035 - DNA, 68 bp, Homo sapiens; identical to SEQ ID NO: 253373
  chr4:1334471-1334539
  hypo

SEQ ID NO: 404036 - DNA, 248 bp, Homo sapiens; identical to SEQ ID NO: 253378
  chr4:1354334-1354582
  hypo

SEQ ID NO: 404037 - DNA, 132 bp, Homo sapiens; identical to SEQ ID NO: 253379
  chr4:1355307-1355439
  hypo

SEQ ID NO: 404038 - DNA, 256 bp, Homo sapiens; identical to SEQ ID NO: 222343
  chr4:1407532-1407788
  hypo

SEQ ID NO: 404039 - DNA, 137 bp, Homo sapiens; identical to SEQ ID NO: 253381
  chr4:1411719-1411856
  hypo

SEQ ID NO: 404040 - DNA, 524 bp, Homo sapiens; identical to SEQ ID NO: 253392
  chr4:1600696-1601220
  hypo

SEQ ID NO: 404041 - DNA, 127 bp, Homo sapiens; identical to SEQ ID NO: 209469
  chr4:1616406-1616533
  hypo

SEQ ID NO: 404042 - DNA, 471 bp, Homo sapiens; identical to SEQ ID NO: 253394
  chr4:1621151-1621622
  hypo

SEQ ID NO: 404043 - DNA, 265 bp, Homo sapiens; identical to SEQ ID NO: 253395
  chr4:1626395-1626660
  hypo

SEQ ID NO: 404044 - DNA, 45 bp, Homo sapiens; identical to SEQ ID NO: 253397
  chr4:1642970-1643015
  hypo

SEQ ID NO: 404045 - DNA, 162 bp, Homo sapiens; identical to SEQ ID NO: 209471
  chr4:1656589-1656751
  hypo

SEQ ID NO: 404046 - DNA, 99 bp, Homo sapiens; identical to SEQ ID NO: 209472
  chr4:1658844-1658943
  hypo

SEQ ID NO: 404047 - DNA, 43 bp, Homo sapiens; identical to SEQ ID NO: 391023
  chr4:1738656-1738699
  hypo

SEQ ID NO: 404048 - DNA, 97 bp, Homo sapiens; identical to SEQ ID NO: 209478
  chr4:1782913-1783010
  hypo

SEQ ID NO: 404049 - DNA, 474 bp, Homo sapiens; identical to SEQ ID NO: 253413
  chr4:1784388-1784862
  hypo

SEQ ID NO: 404050 - DNA, 73 bp, Homo sapiens; identical to SEQ ID NO: 253414
  chr4:1785062-1785135
  hypo

SEQ ID NO: 404051 - DNA, 174 bp, Homo sapiens; identical to SEQ ID NO: 383989
  chr4:1794972-1795146
  hypo

SEQ ID NO: 404052 - DNA, 1121 bp, Homo sapiens; identical to SEQ ID NO: 396657
  chr4:1795182-1796303
  hypo

SEQ ID NO: 404053 - DNA, 83 bp, Homo sapiens; identical to SEQ ID NO: 209485
  chr4:1804646-1804729
  hypo

SEQ ID NO: 404054 - DNA, 207 bp, Homo sapiens; identical to SEQ ID NO: 209486
  chr4:1804884-1805091
  hypo

SEQ ID NO: 404055 - DNA, 55 bp, Homo sapiens; identical to SEQ ID NO: 209487
  chr4:1805637-1805692
  hypo

SEQ ID NO: 404056 - DNA, 92 bp, Homo sapiens; identical to SEQ ID NO: 209488
  chr4:1805992-1806084
  hypo

SEQ ID NO: 404057 - DNA, 64 bp, Homo sapiens; identical to SEQ ID NO: 302865
  chr4:1806113-1806177
  hypo

SEQ ID NO: 404058 - DNA, 239 bp, Homo sapiens; identical to SEQ ID NO: 253424
  chr4:1808362-1808601
  hypo

SEQ ID NO: 404059 - DNA, 104 bp, Homo sapiens; identical to SEQ ID NO: 222346
  chr4:1828625-1828729
  hypo

SEQ ID NO: 404060 - DNA, 140 bp, Homo sapiens; identical to SEQ ID NO: 209491
  chr4:1835054-1835194
  hypo

SEQ ID NO: 404061 - DNA, 141 bp, Homo sapiens; identical to SEQ ID NO: 209492
  chr4:1844710-1844851
  hypo

SEQ ID NO: 404062 - DNA, 424 bp, Homo sapiens; identical to SEQ ID NO: 253440
  chr4:1980623-1981047
  hypo

SEQ ID NO: 404063 - DNA, 44 bp, Homo sapiens; identical to SEQ ID NO: 302888
  chr4:2038292-2038336
  hypo

SEQ ID NO: 404064 - DNA, 155 bp, Homo sapiens; identical to SEQ ID NO: 302889
  chr4:2038366-2038521
  hypo

SEQ ID NO: 404065 - DNA, 188 bp, Homo sapiens; identical to SEQ ID NO: 209499
  chr4:2045628-2045816
  hypo

SEQ ID NO: 404066 - DNA, 177 bp, Homo sapiens; identical to SEQ ID NO: 253447
  chr4:2128212-2128389
  hypo

SEQ ID NO: 404067 - DNA, 213 bp, Homo sapiens; identical to SEQ ID NO: 253448
  chr4:2165234-2165447
  hypo

SEQ ID NO: 404068 - DNA, 74 bp, Homo sapiens; identical to SEQ ID NO: 302894
  chr4:2251591-2251665
  hypo

SEQ ID NO: 404069 - DNA, 186 bp, Homo sapiens; identical to SEQ ID NO: 253451
  chr4:2303623-2303809
  hypo

SEQ ID NO: 404070 - DNA, 51 bp, Homo sapiens; identical to SEQ ID NO: 253453
  chr4:2306804-2306855
  hypo

SEQ ID NO: 404071 - DNA, 246 bp, Homo sapiens; identical to SEQ ID NO: 253455
  chr4:2362985-2363231
  hypo

SEQ ID NO: 404072 - DNA, 277 bp, Homo sapiens; identical to SEQ ID NO: 253456
  chr4:2396220-2396497
  hypo

SEQ ID NO: 404073 - DNA, 44 bp, Homo sapiens; identical to SEQ ID NO: 209501
  chr4:2427613-2427657
  hypo

SEQ ID NO: 404074 - DNA, 31 bp, Homo sapiens; identical to SEQ ID NO: 209504
  chr4:2559965-2559996
  hypo

SEQ ID NO: 404075 - DNA, 120 bp, Homo sapiens; identical to SEQ ID NO: 209505
  chr4:2568040-2568160
  hypo

SEQ ID NO: 404076 - DNA, 268 bp, Homo sapiens; identical to SEQ ID NO: 209508
  chr4:2626993-2627261
  hypo

SEQ ID NO: 404077 - DNA, 220 bp, Homo sapiens; identical to SEQ ID NO: 253478
  chr4:2687342-2687562
  hypo

SEQ ID NO: 404078 - DNA, 194 bp, Homo sapiens; identical to SEQ ID NO: 253480
  chr4:2698197-2698391
  hypo

SEQ ID NO: 404079 - DNA, 54 bp, Homo sapiens; identical to SEQ ID NO: 253482
  chr4:2745778-2745832
  hypo

SEQ ID NO: 404080 - DNA, 104 bp, Homo sapiens; identical to SEQ ID NO: 253484
  chr4:2806952-2807056
  hypo

SEQ ID NO: 404081 - DNA, 38 bp, Homo sapiens; identical to SEQ ID NO: 209515
  chr4:2957244-2957282
  hypo

SEQ ID NO: 404082 - DNA, 142 bp, Homo sapiens; identical to SEQ ID NO: 209516
  chr4:3208227-3208369
  hypo

SEQ ID NO: 404083 - DNA, 155 bp, Homo sapiens; identical to SEQ ID NO: 209519
  chr4:3240561-3240716
  hypo

SEQ ID NO: 404084 - DNA, 146 bp, Homo sapiens; identical to SEQ ID NO: 253496
  chr4:3241773-3241919
  hypo

SEQ ID NO: 404085 - DNA, 149 bp, Homo sapiens; identical to SEQ ID NO: 253499
  chr4:3251091-3251240
  hypo

SEQ ID NO: 404086 - DNA, 119 bp, Homo sapiens; identical to SEQ ID NO: 253501
  chr4:3265175-3265294
  hypo

SEQ ID NO: 404087 - DNA, 370 bp, Homo sapiens; identical to SEQ ID NO: 253503
  chr4:3288566-3288936
  hypo

SEQ ID NO: 404088 - DNA, 121 bp, Homo sapiens; identical to SEQ ID NO: 209523
  chr4:3292280-3292401
  hypo

SEQ ID NO: 404089 - DNA, 203 bp, Homo sapiens; identical to SEQ ID NO: 253505
  chr4:3310030-3310233
  hypo

SEQ ID NO: 404090 - DNA, 31 bp, Homo sapiens; identical to SEQ ID NO: 253507
  chr4:3311032-3311063
  hypo

SEQ ID NO: 404091 - DNA, 99 bp, Homo sapiens; identical to SEQ ID NO: 253513
  chr4:3375344-3375443
  hypo

SEQ ID NO: 404092 - DNA, 108 bp, Homo sapiens; identical to SEQ ID NO: 209526
  chr4:3413102-3413210
  hypo

SEQ ID NO: 404093 - DNA, 147 bp, Homo sapiens; identical to SEQ ID NO: 209527
  chr4:3415798-3415945
  hypo

SEQ ID NO: 404094 - DNA, 242 bp, Homo sapiens; identical to SEQ ID NO: 253518
  chr4:3416700-3416942
  hypo

SEQ ID NO: 404095 - DNA, 136 bp, Homo sapiens; identical to SEQ ID NO: 209528
  chr4:3417330-3417466
  hypo

SEQ ID NO: 404096 - DNA, 589 bp, Homo sapiens; identical to SEQ ID NO: 302964
  chr4:3417496-3418085
  hypo

SEQ ID NO: 404097 - DNA, 269 bp, Homo sapiens; identical to SEQ ID NO: 253520
  chr4:3418657-3418926
  hypo

SEQ ID NO: 404098 - DNA, 199 bp, Homo sapiens; identical to SEQ ID NO: 209531
  chr4:3425119-3425318
  hypo

SEQ ID NO: 404099 - DNA, 274 bp, Homo sapiens; identical to SEQ ID NO: 253523
  chr4:3426136-3426410
  hypo

SEQ ID NO: 404100 - DNA, 367 bp, Homo sapiens; identical to SEQ ID NO: 209539
  chr4:3480304-3480671
  hypo

SEQ ID NO: 404101 - DNA, 252 bp, Homo sapiens; identical to SEQ ID NO: 253537
  chr4:3515543-3515795
  hypo

SEQ ID NO: 404102 - DNA, 71 bp, Homo sapiens; identical to SEQ ID NO: 253538
  chr4:3528239-3528310
  hypo

SEQ ID NO: 404103 - DNA, 92 bp, Homo sapiens; identical to SEQ ID NO: 253539
  chr4:3576258-3576350
  hypo

SEQ ID NO: 404104 - DNA, 96 bp, Homo sapiens; identical to SEQ ID NO: 302984
  chr4:3616196-3616292
  hypo

SEQ ID NO: 404105 - DNA, 89 bp, Homo sapiens; identical to SEQ ID NO: 302985
  chr4:3616322-3616411
  hypo

SEQ ID NO: 404106 - DNA, 376 bp, Homo sapiens; identical to SEQ ID NO: 253542
  chr4:3671151-3671527
  hypo

SEQ ID NO: 404107 - DNA, 32 bp, Homo sapiens; identical to SEQ ID NO: 253543
  chr4:3681906-3681938
  hypo

SEQ ID NO: 404108 - DNA, 99 bp, Homo sapiens; identical to SEQ ID NO: 253544
  chr4:3682490-3682589
  hypo

SEQ ID NO: 404109 - DNA, 137 bp, Homo sapiens; identical to SEQ ID NO: 253545
  chr4:3685351-3685488
  hypo

SEQ ID NO: 404110 - DNA, 65 bp, Homo sapiens; identical to SEQ ID NO: 253553
  chr4:4498752-4498817
  hypo

SEQ ID NO: 404111 - DNA, 123 bp, Homo sapiens; identical to SEQ ID NO: 383992
  chr4:4861657-4861780
  hypo

SEQ ID NO: 404112 - DNA, 56 bp, Homo sapiens; identical to SEQ ID NO: 253556
  chr4:4921831-4921887
  hypo

SEQ ID NO: 404113 - DNA, 312 bp, Homo sapiens; identical to SEQ ID NO: 209545
  chr4:5024029-5024341
  hypo

SEQ ID NO: 404114 - DNA, 236 bp, Homo sapiens; identical to SEQ ID NO: 209549
  chr4:5970096-5970332
  hypo

SEQ ID NO: 404115 - DNA, 222 bp, Homo sapiens; identical to SEQ ID NO: 253562
  chr4:6330984-6331206
  hypo

SEQ ID NO: 404116 - DNA, 160 bp, Homo sapiens; identical to SEQ ID NO: 253563
  chr4:6525352-6525512
  hypo

SEQ ID NO: 404117 - DNA, 92 bp, Homo sapiens; identical to SEQ ID NO: 253564
  chr4:6540026-6540118
  hypo

SEQ ID NO: 404118 - DNA, 40 bp, Homo sapiens; identical to SEQ ID NO: 209553
  chr4:6590875-6590915
  hypo

SEQ ID NO: 404119 - DNA, 304 bp, Homo sapiens; identical to SEQ ID NO: 209554
  chr4:6600488-6600792
  hypo

SEQ ID NO: 404120 - DNA, 41 bp, Homo sapiens; identical to SEQ ID NO: 253571
  chr4:6658784-6658825
  hypo

SEQ ID NO: 404121 - DNA, 233 bp, Homo sapiens; identical to SEQ ID NO: 303025
  chr4:6669888-6670121
  hypo

SEQ ID NO: 404122 - DNA, 53 bp, Homo sapiens; identical to SEQ ID NO: 303026
  chr4:6670214-6670267
  hypo

SEQ ID NO: 404123 - DNA, 189 bp, Homo sapiens; identical to SEQ ID NO: 253574
  chr4:6695028-6695217
  hypo

SEQ ID NO: 404124 - DNA, 101 bp, Homo sapiens; identical to SEQ ID NO: 253575
  chr4:6699159-6699260
  hypo

SEQ ID NO: 404125 - DNA, 57 bp, Homo sapiens; identical to SEQ ID NO: 253576
  chr4:6726065-6726122
  hypo

SEQ ID NO: 404126 - DNA, 41 bp, Homo sapiens; identical to SEQ ID NO: 253578
  chr4:6735826-6735867
  hypo

SEQ ID NO: 404127 - DNA, 96 bp, Homo sapiens; identical to SEQ ID NO: 209556
  chr4:6738169-6738265
  hypo

SEQ ID NO: 404128 - DNA, 35 bp, Homo sapiens; identical to SEQ ID NO: 209560
  chr4:6902912-6902947
  hypo

SEQ ID NO: 404129 - DNA, 211 bp, Homo sapiens; identical to SEQ ID NO: 253587
  chr4:6925274-6925485
  hypo

SEQ ID NO: 404130 - DNA, 114 bp, Homo sapiens; identical to SEQ ID NO: 253592
  chr4:6958171-6958285
  hypo

SEQ ID NO: 404131 - DNA, 104 bp, Homo sapiens; identical to SEQ ID NO: 253593
  chr4:6964580-6964684
  hypo

SEQ ID NO: 404132 - DNA, 282 bp, Homo sapiens; identical to SEQ ID NO: 253595
  chr4:6995747-6996029
  hypo

SEQ ID NO: 404133 - DNA, 83 bp, Homo sapiens; identical to SEQ ID NO: 253597
  chr4:7003855-7003938
  hypo

SEQ ID NO: 404134 - DNA, 119 bp, Homo sapiens; identical to SEQ ID NO: 209567
  chr4:7167402-7167521
  hypo

SEQ ID NO: 404135 - DNA, 109 bp, Homo sapiens; identical to SEQ ID NO: 253606
  chr4:7218650-7218759
  hypo

SEQ ID NO: 404136 - DNA, 210 bp, Homo sapiens; identical to SEQ ID NO: 253607
  chr4:7395597-7395807
  hypo

SEQ ID NO: 404137 - DNA, 217 bp, Homo sapiens; identical to SEQ ID NO: 209568
  chr4:7432357-7432574
  hypo

SEQ ID NO: 404138 - DNA, 118 bp, Homo sapiens; identical to SEQ ID NO: 253609
  chr4:7472895-7473013
  hypo

SEQ ID NO: 404139 - DNA, 482 bp, Homo sapiens; identical to SEQ ID NO: 253610
  chr4:7600670-7601152
  hypo

SEQ ID NO: 404140 - DNA, 280 bp, Homo sapiens; identical to SEQ ID NO: 253612
  chr4:7666010-7666290
  hypo

SEQ ID NO: 404141 - DNA, 32 bp, Homo sapiens; identical to SEQ ID NO: 303066
  chr4:7741249-7741281
  hypo

SEQ ID NO: 404142 - DNA, 91 bp, Homo sapiens; identical to SEQ ID NO: 209569
  chr4:7741694-7741785
  hypo

SEQ ID NO: 404143 - DNA, 1009 bp, Homo sapiens; identical to SEQ ID NO: 303070
  chr4:7757467-7758476
  hypo

SEQ ID NO: 404144 - DNA, 74 bp, Homo sapiens; identical to SEQ ID NO: 209571
  chr4:7789549-7789623
  hypo

SEQ ID NO: 404145 - DNA, 44 bp, Homo sapiens; identical to SEQ ID NO: 253618
  chr4:7791292-7791336
  hypo

SEQ ID NO: 404146 - DNA, 34 bp, Homo sapiens; identical to SEQ ID NO: 253619
  chr4:7812695-7812729
  hypo

SEQ ID NO: 404147 - DNA, 306 bp, Homo sapiens; identical to SEQ ID NO: 209572
  chr4:7813251-7813557
  hypo

SEQ ID NO: 404148 - DNA, 49 bp, Homo sapiens; identical to SEQ ID NO: 209573
  chr4:7967943-7967992
  hypo

SEQ ID NO: 404149 - DNA, 356 bp, Homo sapiens; identical to SEQ ID NO: 253629
  chr4:8062502-8062858
  hypo

SEQ ID NO: 404150 - DNA, 216 bp, Homo sapiens; identical to SEQ ID NO: 253634
  chr4:8172088-8172304
  hypo

SEQ ID NO: 404151 - DNA, 399 bp, Homo sapiens; identical to SEQ ID NO: 253636
  chr4:8237001-8237400
  hypo

SEQ ID NO: 404152 - DNA, 271 bp, Homo sapiens; identical to SEQ ID NO: 253638
  chr4:8285419-8285690
  hypo

SEQ ID NO: 404153 - DNA, 121 bp, Homo sapiens; identical to SEQ ID NO: 209582
  chr4:8396396-8396517
  hypo

SEQ ID NO: 404154 - DNA, 154 bp, Homo sapiens; identical to SEQ ID NO: 253646
  chr4:8411915-8412069
  hypo

SEQ ID NO: 404155 - DNA, 71 bp, Homo sapiens
  chr4:8455168-8455239
  hypo
ctgggcaacatagtgaaaccccatctctgcaaaaaaaagaaaaacaaataagagaagcttcagttctggct

SEQ ID NO: 404156 - DNA, 262 bp, Homo sapiens; identical to SEQ ID NO: 253651
  chr4:8474998-8475260
  hypo

SEQ ID NO: 404157 - DNA, 142 bp, Homo sapiens; identical to SEQ ID NO: 303109
  chr4:8483724-8483866
  hypo

SEQ ID NO: 404158 - DNA, 146 bp, Homo sapiens; identical to SEQ ID NO: 303110
  chr4:8483963-8484109
  hypo

SEQ ID NO: 404159 - DNA, 279 bp, Homo sapiens; identical to SEQ ID NO: 253654
  chr4:8514257-8514536
  hypo

SEQ ID NO: 404160 - DNA, 110 bp, Homo sapiens; identical to SEQ ID NO: 209592
  chr4:8647631-8647741
  hypo

SEQ ID NO: 404161 - DNA, 330 bp, Homo sapiens; identical to SEQ ID NO: 209593
  chr4:8739498-8739828
  hypo

SEQ ID NO: 404162 - DNA, 143 bp, Homo sapiens; identical to SEQ ID NO: 253665
  chr4:8761656-8761799
  hypo

SEQ ID NO: 404163 - DNA, 35 bp, Homo sapiens; identical to SEQ ID NO: 253668
  chr4:9602117-9602152
  hypo

SEQ ID NO: 404164 - DNA, 209 bp, Homo sapiens; identical to SEQ ID NO: 199346
  chr4:9684933-9685142
  hypo

SEQ ID NO: 404165 - DNA, 207 bp, Homo sapiens; identical to SEQ ID NO: 253669
  chr4:9701510-9701717
  hypo

SEQ ID NO: 404166 - DNA, 35 bp, Homo sapiens; identical to SEQ ID NO: 253670
  chr4:9784385-9784420
  hypo

SEQ ID NO: 404167 - DNA, 58 bp, Homo sapiens; identical to SEQ ID NO: 199347
  chr4:10089890-10089948
  hypo

SEQ ID NO: 404168 - DNA, 120 bp, Homo sapiens; identical to SEQ ID NO: 253678
  chr4:10447425-10447545
  hypo

SEQ ID NO: 404169 - DNA, 84 bp, Homo sapiens; identical to SEQ ID NO: 253679
  chr4:10622723-10622807
  hypo

SEQ ID NO: 404170 - DNA, 189 bp, Homo sapiens; identical to SEQ ID NO: 253680
  chr4:11374203-11374392
  hypo

SEQ ID NO: 404171 - DNA, 89 bp, Homo sapiens; identical to SEQ ID NO: 253684
  chr4:14264570-14264659
  hypo

SEQ ID NO: 404172 - DNA, 120 bp, Homo sapiens; identical to SEQ ID NO: 253689
  chr4:17438427-17438547
  hypo

SEQ ID NO: 404173 - DNA, 35 bp, Homo sapiens; identical to SEQ ID NO: 253690
  chr4:17741679-17741714
  hypo

SEQ ID NO: 404174 - DNA, 120 bp, Homo sapiens; identical to SEQ ID NO: 209603
  chr4:17817849-17817969
  hypo

SEQ ID NO: 404175 - DNA, 91 bp, Homo sapiens
  chr4:17818029-17818120
  hypo
caggggttggggagcctgagagaatctgcttataggaatgatattttttgaagtttttaactctcatgagaaggccaagatggctctattg

SEQ ID NO: 404176 - DNA, 53 bp, Homo sapiens; identical to SEQ ID NO: 209606
  chr4:19280790-19280843
  hypo

SEQ ID NO: 404177 - DNA, 915 bp, Homo sapiens; identical to SEQ ID NO: 222380
  chr4:22517139-22518054
  hypo

SEQ ID NO: 404178 - DNA, 75 bp, Homo sapiens; identical to SEQ ID NO: 253694
  chr4:22601450-22601525
  hypo

SEQ ID NO: 404179 - DNA, 33 bp, Homo sapiens; identical to SEQ ID NO: 209608
  chr4:24422943-24422976
  hypo

SEQ ID NO: 404180 - DNA, 33 bp, Homo sapiens; identical to SEQ ID NO: 209609
  chr4:24423216-24423249
  hypo

SEQ ID NO: 404181 - DNA, 57 bp, Homo sapiens; identical to SEQ ID NO: 253700
  chr4:25014433-25014490
  hypo

SEQ ID NO: 404182 - DNA, 184 bp, Homo sapiens; identical to SEQ ID NO: 253701
  chr4:25025017-25025201
  hypo

SEQ ID NO: 404183 - DNA, 533 bp, Homo sapiens; identical to SEQ ID NO: 253703
  chr4:25677738-25678271
  hypo

SEQ ID NO: 404184 - DNA, 204 bp, Homo sapiens; identical to SEQ ID NO: 253706
  chr4:26223413-26223617
  hypo

SEQ ID NO: 404185 - DNA, 53 bp, Homo sapiens; identical to SEQ ID NO: 253713
  chr4:27570054-27570107
  hypo

SEQ ID NO: 404186 - DNA, 156 bp, Homo sapiens; identical to SEQ ID NO: 253714
  chr4:35039895-35040051
  hypo

SEQ ID NO: 404187 - DNA, 113 bp, Homo sapiens; identical to SEQ ID NO: 303185
  chr4:36345195-36345308
  hypo

SEQ ID NO: 404188 - DNA, 86 bp, Homo sapiens; identical to SEQ ID NO: 199386
  chr4:37688564-37688650
  hypo

SEQ ID NO: 404189 - DNA, 225 bp, Homo sapiens; identical to SEQ ID NO: 282091
  chr4:37891998-37892223
  hypo

SEQ ID NO: 404190 - DNA, 49 bp, Homo sapiens; identical to SEQ ID NO: 253718
  chr4:38016579-38016628
  hypo

SEQ ID NO: 404191 - DNA, 188 bp, Homo sapiens; identical to SEQ ID NO: 209617
  chr4:38278935-38279123
  hypo

SEQ ID NO: 404192 - DNA, 130 bp, Homo sapiens; identical to SEQ ID NO: 253720
  chr4:38313304-38313434
  hypo

SEQ ID NO: 404193 - DNA, 42 bp, Homo sapiens; identical to SEQ ID NO: 253722
  chr4:38678869-38678911
  hypo

SEQ ID NO: 404194 - DNA, 206 bp, Homo sapiens; identical to SEQ ID NO: 209618
  chr4:38729967-38730173
  hypo

SEQ ID NO: 404195 - DNA, 153 bp, Homo sapiens; identical to SEQ ID NO: 209622
  chr4:39481996-39482149
  hypo

SEQ ID NO: 404196 - DNA, 249 bp, Homo sapiens; identical to SEQ ID NO: 282101
  chr4:39529736-39529985
  hypo

SEQ ID NO: 404197 - DNA, 97 bp, Homo sapiens; identical to SEQ ID NO: 209625
  chr4:39745202-39745299
  hypo

SEQ ID NO: 404198 - DNA, 254 bp, Homo sapiens; identical to SEQ ID NO: 253731
  chr4:39773069-39773323
  hypo

SEQ ID NO: 404199 - DNA, 38 bp, Homo sapiens; identical to SEQ ID NO: 209629
  chr4:39964135-39964173
  hypo

SEQ ID NO: 404200 - DNA, 83 bp, Homo sapiens; identical to SEQ ID NO: 209632
  chr4:40492771-40492854
  hypo

SEQ ID NO: 404201 - DNA, 39 bp, Homo sapiens; identical to SEQ ID NO: 209634
  chr4:40983409-40983448
  hypo

SEQ ID NO: 404202 - DNA, 188 bp, Homo sapiens; identical to SEQ ID NO: 209635
  chr4:41012740-41012928
  hypo

SEQ ID NO: 404203 - DNA, 34 bp, Homo sapiens; identical to SEQ ID NO: 209636
  chr4:41198150-41198184
  hypo

SEQ ID NO: 404204 - DNA, 138 bp, Homo sapiens; identical to SEQ ID NO: 199395
  chr4:41216265-41216403
  hypo

SEQ ID NO: 404205 - DNA, 35 bp, Homo sapiens; identical to SEQ ID NO: 253751
  chr4:41317297-41317332
  hypo

SEQ ID NO: 404206 - DNA, 89 bp, Homo sapiens; identical to SEQ ID NO: 282120
  chr4:41884432-41884521
  hypo

SEQ ID NO: 404207 - DNA, 128 bp, Homo sapiens; identical to SEQ ID NO: 303233
  chr4:42316081-42316209
  hypo

SEQ ID NO: 404208 - DNA, 34 bp, Homo sapiens; identical to SEQ ID NO: 253757
  chr4:44679263-44679297
  hypo

SEQ ID NO: 404209 - DNA, 105 bp, Homo sapiens; identical to SEQ ID NO: 222402
  chr4:47487073-47487178
  hypo

SEQ ID NO: 404210 - DNA, 150 bp, Homo sapiens; identical to SEQ ID NO: 209641
  chr4:48017182-48017332
  hypo

SEQ ID NO: 404211 - DNA, 227 bp, Homo sapiens; identical to SEQ ID NO: 253761
  chr4:48496110-48496337
  hypo

SEQ ID NO: 404212 - DNA, 89 bp, Homo sapiens; identical to SEQ ID NO: 209646
  chr4:53230797-53230886
  hypo

SEQ ID NO: 404213 - DNA, 394 bp, Homo sapiens; identical to SEQ ID NO: 253772
  chr4:53739882-53740276
  hypo

SEQ ID NO: 404214 - DNA, 75 bp, Homo sapiens; identical to SEQ ID NO: 199422
  chr4:55569950-55570025
  hypo

SEQ ID NO: 404215 - DNA, 43 bp, Homo sapiens; identical to SEQ ID NO: 199424
  chr4:55593675-55593718
  hypo

SEQ ID NO: 404216 - DNA, 34 bp, Homo sapiens; identical to SEQ ID NO: 199425
  chr4:55598031-55598065
  hypo

SEQ ID NO: 404217 - DNA, 204 bp, Homo sapiens; identical to SEQ ID NO: 253780
  chr4:56205291-56205495
  hypo

SEQ ID NO: 404218 - DNA, 105 bp, Homo sapiens; identical to SEQ ID NO: 209659
  chr4:56936357-56936462
  hypo

SEQ ID NO: 404219 - DNA, 37 bp, Homo sapiens; identical to SEQ ID NO: 253786
  chr4:56966393-56966430
  hypo

SEQ ID NO: 404220 - DNA, 38 bp, Homo sapiens; identical to SEQ ID NO: 209660
  chr4:57051388-57051426
  hypo

SEQ ID NO: 404221 - DNA, 31 bp, Homo sapiens; identical to SEQ ID NO: 253788
  chr4:57064132-57064163
  hypo

SEQ ID NO: 404222 - DNA, 89 bp, Homo sapiens; identical to SEQ ID NO: 209661
  chr4:57082785-57082874
  hypo

SEQ ID NO: 404223 - DNA, 92 bp, Homo sapiens; identical to SEQ ID NO: 253792
  chr4:57178241-57178333
  hypo

SEQ ID NO: 404224 - DNA, 41 bp, Homo sapiens
  chr4:57180855-57180896
  hypo
ggaggaggaggatctgggggaagaggaggaggagggccagg

SEQ ID NO: 404225 - DNA, 38 bp, Homo sapiens; identical to SEQ ID NO: 253794
  chr4:57486552-57486590
  hypo

SEQ ID NO: 404226 - DNA, 37 bp, Homo sapiens; identical to SEQ ID NO: 253795
  chr4:57486830-57486867
  hypo

SEQ ID NO: 404227 - DNA, 114 bp, Homo sapiens; identical to SEQ ID NO: 253797
  chr4:57812272-57812386
  hypo

SEQ ID NO: 404228 - DNA, 342 bp, Homo sapiens; identical to SEQ ID NO: 303294
  chr4:57921794-57922136
  hypo

SEQ ID NO: 404229 - DNA, 841 bp, Homo sapiens; identical to SEQ ID NO: 253801
  chr4:64214827-64215668
  hypo

SEQ ID NO: 404230 - DNA, 43 bp, Homo sapiens; identical to SEQ ID NO: 253802
  chr4:66107503-66107546
  hypo

SEQ ID NO: 404231 - DNA, 44 bp, Homo sapiens; identical to SEQ ID NO: 199438
  chr4:66536636-66536680
  hypo

SEQ ID NO: 404232 - DNA, 37 bp, Homo sapiens; identical to SEQ ID NO: 209674
  chr4:71756389-71756426
  hypo

SEQ ID NO: 404233 - DNA, 730 bp, Homo sapiens; identical to SEQ ID NO: 199439
  chr4:71767778-71768508
  hypo

SEQ ID NO: 404234 - DNA, 38 bp, Homo sapiens; identical to SEQ ID NO: 253809
  chr4:71774023-71774061
  hypo

SEQ ID NO: 404235 - DNA, 36 bp, Homo sapiens; identical to SEQ ID NO: 253815
  chr4:74402451-74402487
  hypo

SEQ ID NO: 404236 - DNA, 146 bp, Homo sapiens; identical to SEQ ID NO: 222428
  chr4:74702603-74702749
  hypo

SEQ ID NO: 404237 - DNA, 209 bp, Homo sapiens; identical to SEQ ID NO: 209678
  chr4:75137755-75137964
  hypo

SEQ ID NO: 404238 - DNA, 98 bp, Homo sapiens; identical to SEQ ID NO: 253818
  chr4:75260920-75261018
  hypo

SEQ ID NO: 404239 - DNA, 37 bp, Homo sapiens; identical to SEQ ID NO: 253821
  chr4:76553301-76553338
  hypo

SEQ ID NO: 404240 - DNA, 37 bp, Homo sapiens; identical to SEQ ID NO: 253822
  chr4:76553578-76553615
  hypo

SEQ ID NO: 404241 - DNA, 37 bp, Homo sapiens; identical to SEQ ID NO: 209681
  chr4:76917507-76917544
  hypo

SEQ ID NO: 404242 - DNA, 147 bp, Homo sapiens; identical to SEQ ID NO: 253826
  chr4:76932385-76932532
  hypo

SEQ ID NO: 404243 - DNA, 98 bp, Homo sapiens; identical to SEQ ID NO: 253829
  chr4:77596032-77596130
  hypo

SEQ ID NO: 404244 - DNA, 61 bp, Homo sapiens; identical to SEQ ID NO: 253830
  chr4:77661925-77661986
  hypo

SEQ ID NO: 404245 - DNA, 121 bp, Homo sapiens; identical to SEQ ID NO: 253831
  chr4:77662882-77663003
  hypo

SEQ ID NO: 404246 - DNA, 35 bp, Homo sapiens; identical to SEQ ID NO: 253832
  chr4:77776591-77776626
  hypo

SEQ ID NO: 404247 - DNA, 164 bp, Homo sapiens; identical to SEQ ID NO: 253833
  chr4:78034396-78034560
  hypo

SEQ ID NO: 404248 - DNA, 784 bp, Homo sapiens; identical to SEQ ID NO: 282264
  chr4:78979792-78980576
  hypo

SEQ ID NO: 404249 - DNA, 133 bp, Homo sapiens; identical to SEQ ID NO: 253837
  chr4:79345199-79345332
  hypo

SEQ ID NO: 404250 - DNA, 92 bp, Homo sapiens; identical to SEQ ID NO: 209685
  chr4:79702947-79703039
  hypo

SEQ ID NO: 404251 - DNA, 123 bp, Homo sapiens; identical to SEQ ID NO: 209687
  chr4:79832671-79832794
  hypo

SEQ ID NO: 404252 - DNA, 38 bp, Homo sapiens; identical to SEQ ID NO: 253842
  chr4:80273038-80273076
  hypo

SEQ ID NO: 404253 - DNA, 140 bp, Homo sapiens; identical to SEQ ID NO: 253846
  chr4:83301589-83301729
  hypo

SEQ ID NO: 404254 - DNA, 157 bp, Homo sapiens; identical to SEQ ID NO: 253848
  chr4:83407498-83407655
  hypo

SEQ ID NO: 404255 - DNA, 35 bp, Homo sapiens; identical to SEQ ID NO: 253856
  chr4:84468675-84468710
  hypo

SEQ ID NO: 404256 - DNA, 160 bp, Homo sapiens; identical to SEQ ID NO: 209700
  chr4:86801948-86802108
  hypo

SEQ ID NO: 404257 - DNA, 31 bp, Homo sapiens; identical to SEQ ID NO: 253860
  chr4:86958368-86958399
  hypo

SEQ ID NO: 404258 - DNA, 101 bp, Homo sapiens; identical to SEQ ID NO: 253861
  chr4:87468463-87468564
  hypo

SEQ ID NO: 404259 - DNA, 83 bp, Homo sapiens; identical to SEQ ID NO: 209704
  chr4:87993507-87993590
  hypo

SEQ ID NO: 404260 - DNA, 35 bp, Homo sapiens; identical to SEQ ID NO: 303370
  chr4:88010168-88010203
  hypo

SEQ ID NO: 404261 - DNA, 145 bp, Homo sapiens; identical to SEQ ID NO: 209708
  chr4:88957314-88957459
  hypo

SEQ ID NO: 404262 - DNA, 150 bp, Homo sapiens; identical to SEQ ID NO: 253877
  chr4:90043642-90043792
  hypo

SEQ ID NO: 404263 - DNA, 36 bp, Homo sapiens; identical to SEQ ID NO: 209712
  chr4:91052428-91052464
  hypo

SEQ ID NO: 404264 - DNA, 148 bp, Homo sapiens; identical to SEQ ID NO: 209713
  chr4:91640271-91640419
  hypo

SEQ ID NO: 404265 - DNA, 85 bp, Homo sapiens; identical to SEQ ID NO: 209714
  chr4:95461557-95461642
  hypo

SEQ ID NO: 404266 - DNA, 49 bp, Homo sapiens; identical to SEQ ID NO: 253892
  chr4:99982329-99982378
  hypo

SEQ ID NO: 404267 - DNA, 80 bp, Homo sapiens; identical to SEQ ID NO: 253895
  chr4:100866007-100866087
  hypo

SEQ ID NO: 404268 - DNA, 120 bp, Homo sapiens; identical to SEQ ID NO: 253898
  chr4:103079069-103079189
  hypo

SEQ ID NO: 404269 - DNA, 220 bp, Homo sapiens; identical to SEQ ID NO: 222446
  chr4:103266878-103267098
  hypo

SEQ ID NO: 404270 - DNA, 323 bp, Homo sapiens; identical to SEQ ID NO: 209721
  chr4:103941524-103941847
  hypo

SEQ ID NO: 404271 - DNA, 295 bp, Homo sapiens; identical to SEQ ID NO: 199518
  chr4:106067841-106068136
  hypo

SEQ ID NO: 404272 - DNA, 105 bp, Homo sapiens; identical to SEQ ID NO: 222450
  chr4:106068588-106068693
  hypo

SEQ ID NO: 404273 - DNA, 1085 bp, Homo sapiens; identical to SEQ ID NO: 396799
  chr4:106155053-106156138
  hypo

SEQ ID NO: 404274 - DNA, 2024 bp, Homo sapiens; identical to SEQ ID NO: 396800
  chr4:106157490-106159514
  hypo

SEQ ID NO: 404275 - DNA, 240 bp, Homo sapiens; identical to SEQ ID NO: 199522
  chr4:106159634-106159874
  hypo

SEQ ID NO: 404276 - DNA, 120 bp, Homo sapiens; identical to SEQ ID NO: 199524
  chr4:106161134-106161254
  hypo

SEQ ID NO: 404277 - DNA, 177 bp, Homo sapiens; identical to SEQ ID NO: 199527
  chr4:106180762-106180939
  hypo

SEQ ID NO: 404278 - DNA, 107 bp, Homo sapiens; identical to SEQ ID NO: 199528
  chr4:106182911-106183018
  hypo

SEQ ID NO: 404279 - DNA, 376 bp, Homo sapiens; identical to SEQ ID NO: 199530
  chr4:106193708-106194084
  hypo

SEQ ID NO: 404280 - DNA, 3101 bp, Homo sapiens; identical to SEQ ID NO: 199531
  chr4:106196198-106199299
  hypo

SEQ ID NO: 404281 - DNA, 1601 bp, Homo sapiens; identical to SEQ ID NO: 199532
  chr4:106199359-106200960
  hypo

SEQ ID NO: 404282 - DNA, 57 bp, Homo sapiens; identical to SEQ ID NO: 209742
  chr4:106631892-106631949
  hypo

SEQ ID NO: 404283 - DNA, 176 bp, Homo sapiens; identical to SEQ ID NO: 303430
  chr4:108302304-108302480
  hypo

SEQ ID NO: 404284 - DNA, 43 bp, Homo sapiens; identical to SEQ ID NO: 209744
  chr4:108446495-108446538
  hypo

SEQ ID NO: 404285 - DNA, 168 bp, Homo sapiens; identical to SEQ ID NO: 209746
  chr4:109009508-109009676
  hypo

SEQ ID NO: 404286 - DNA, 101 bp, Homo sapiens; identical to SEQ ID NO: 253916
  chr4:110314367-110314468
  hypo

SEQ ID NO: 404287 - DNA, 40 bp, Homo sapiens; identical to SEQ ID NO: 253917
  chr4:110314768-110314808
  hypo

SEQ ID NO: 404288 - DNA, 87 bp, Homo sapiens; identical to SEQ ID NO: 253919
  chr4:111019210-111019297
  hypo

SEQ ID NO: 404289 - DNA, 156 bp, Homo sapiens; identical to SEQ ID NO: 222468
  chr4:111117165-111117321
  hypo

SEQ ID NO: 404290 - DNA, 411 bp, Homo sapiens; identical to SEQ ID NO: 222469
  chr4:111119823-111120234
  hypo

SEQ ID NO: 404291 - DNA, 36 bp, Homo sapiens; identical to SEQ ID NO: 209752
  chr4:111383532-111383568
  hypo

SEQ ID NO: 404292 - DNA, 577 bp, Homo sapiens; identical to SEQ ID NO: 209753
  chr4:111508744-111509321
  hypo

SEQ ID NO: 404293 - DNA, 190 bp, Homo sapiens; identical to SEQ ID NO: 253929
  chr4:113276888-113277078
  hypo

SEQ ID NO: 404294 - DNA, 101 bp, Homo sapiens; identical to SEQ ID NO: 209759
  chr4:114528566-114528667
  hypo

SEQ ID NO: 404295 - DNA, 38 bp, Homo sapiens; identical to SEQ ID NO: 209761
  chr4:119501591-119501629
  hypo

SEQ ID NO: 404296 - DNA, 211 bp, Homo sapiens; identical to SEQ ID NO: 253935
  chr4:119951552-119951763
  hypo

SEQ ID NO: 404297 - DNA, 38 bp, Homo sapiens; identical to SEQ ID NO: 253938
  chr4:122165518-122165556
  hypo

SEQ ID NO: 404298 - DNA, 76 bp, Homo sapiens; identical to SEQ ID NO: 209765
  chr4:122615463-122615539
  hypo

SEQ ID NO: 404299 - DNA, 222 bp, Homo sapiens; identical to SEQ ID NO: 253942
  chr4:124029142-124029364
  hypo

SEQ ID NO: 404300 - DNA, 182 bp, Homo sapiens; identical to SEQ ID NO: 209768
  chr4:124036406-124036588
  hypo

SEQ ID NO: 404301 - DNA, 209 bp, Homo sapiens; identical to SEQ ID NO: 282491
  chr4:124426861-124427070
  hypo

SEQ ID NO: 404302 - DNA, 79 bp, Homo sapiens; identical to SEQ ID NO: 282492
  chr4:124427137-124427216
  hypo

SEQ ID NO: 404303 - DNA, 104 bp, Homo sapiens; identical to SEQ ID NO: 222489
  chr4:126238450-126238554
  hypo

SEQ ID NO: 404304 - DNA, 137 bp, Homo sapiens; identical to SEQ ID NO: 199594
  chr4:128703235-128703372
  hypo

SEQ ID NO: 404305 - DNA, 568 bp, Homo sapiens; identical to SEQ ID NO: 253954
  chr4:128764580-128765148
  hypo

SEQ ID NO: 404306 - DNA, 42 bp, Homo sapiens; identical to SEQ ID NO: 253958
  chr4:129697834-129697876
  hypo

SEQ ID NO: 404307 - DNA, 102 bp, Homo sapiens; identical to SEQ ID NO: 199600
  chr4:140097254-140097356
  hypo

SEQ ID NO: 404308 - DNA, 286 bp, Homo sapiens; identical to SEQ ID NO: 253966
  chr4:140357386-140357672
  hypo

SEQ ID NO: 404309 - DNA, 180 bp, Homo sapiens; identical to SEQ ID NO: 222492
  chr4:140587058-140587238
  hypo

SEQ ID NO: 404310 - DNA, 40 bp, Homo sapiens; identical to SEQ ID NO: 253968
  chr4:140592642-140592682
  hypo

SEQ ID NO: 404311 - DNA, 82 bp, Homo sapiens; identical to SEQ ID NO: 253969
  chr4:140640071-140640153
  hypo

SEQ ID NO: 404312 - DNA, 90 bp, Homo sapiens; identical to SEQ ID NO: 253971
  chr4:140701211-140701301
  hypo

SEQ ID NO: 404313 - DNA, 531 bp, Homo sapiens; identical to SEQ ID NO: 253972
  chr4:140705006-140705537
  hypo

SEQ ID NO: 404314 - DNA, 407 bp, Homo sapiens; identical to SEQ ID NO: 253976
  chr4:140780992-140781399
  hypo

SEQ ID NO: 404315 - DNA, 108 bp, Homo sapiens; identical to SEQ ID NO: 253977
  chr4:140929945-140930053
  hypo

SEQ ID NO: 404316 - DNA, 37 bp, Homo sapiens; identical to SEQ ID NO: 209787
  chr4:141014855-141014892
  hypo

SEQ ID NO: 404317 - DNA, 138 bp, Homo sapiens; identical to SEQ ID NO: 209788
  chr4:141067295-141067433
  hypo

SEQ ID NO: 404318 - DNA, 784 bp, Homo sapiens; identical to SEQ ID NO: 396859
  chr4:141073728-141074512
  hypo

SEQ ID NO: 404319 - DNA, 38 bp, Homo sapiens; identical to SEQ ID NO: 253986
  chr4:143073506-143073544
  hypo

SEQ ID NO: 404320 - DNA, 540 bp, Homo sapiens; identical to SEQ ID NO: 199619
  chr4:144256959-144257499
  hypo

SEQ ID NO: 404321 - DNA, 300 bp, Homo sapiens; identical to SEQ ID NO: 199621
  chr4:144258375-144258675
  hypo

SEQ ID NO: 404322 - DNA, 117 bp, Homo sapiens; identical to SEQ ID NO: 253989
  chr4:144265400-144265517
  hypo

SEQ ID NO: 404323 - DNA, 124 bp, Homo sapiens; identical to SEQ ID NO: 253990
  chr4:144507008-144507132
  hypo

SEQ ID NO: 404324 - DNA, 41 bp, Homo sapiens; identical to SEQ ID NO: 253991
  chr4:146047172-146047213
  hypo

SEQ ID NO: 404325 - DNA, 63 bp, Homo sapiens; identical to SEQ ID NO: 253993
  chr4:146694922-146694985
  hypo

SEQ ID NO: 404326 - DNA, 33 bp, Homo sapiens; identical to SEQ ID NO: 199629
  chr4:148538935-148538968
  hypo

SEQ ID NO: 404327 - DNA, 93 bp, Homo sapiens; identical to SEQ ID NO: 199632
  chr4:149364560-149364653
  hypo

SEQ ID NO: 404328 - DNA, 33 bp, Homo sapiens; identical to SEQ ID NO: 253998
  chr4:151020124-151020157
  hypo

SEQ ID NO: 404329 - DNA, 75 bp, Homo sapiens; identical to SEQ ID NO: 253999
  chr4:151435900-151435975
  hypo

SEQ ID NO: 404330 - DNA, 33 bp, Homo sapiens; identical to SEQ ID NO: 254001
  chr4:151960720-151960753
  hypo

SEQ ID NO: 404331 - DNA, 62 bp, Homo sapiens; identical to SEQ ID NO: 254008
  chr4:153460846-153460908
  hypo

SEQ ID NO: 404332 - DNA, 37 bp, Homo sapiens; identical to SEQ ID NO: 303559
  chr4:153821326-153821363
  hypo

SEQ ID NO: 404333 - DNA, 251 bp, Homo sapiens; identical to SEQ ID NO: 254013
  chr4:153896021-153896272
  hypo

SEQ ID NO: 404334 - DNA, 233 bp, Homo sapiens; identical to SEQ ID NO: 254017
  chr4:153985892-153986125
  hypo

SEQ ID NO: 404335 - DNA, 230 bp, Homo sapiens; identical to SEQ ID NO: 254027
  chr4:154456109-154456339
  hypo

SEQ ID NO: 404336 - DNA, 103 bp, Homo sapiens; identical to SEQ ID NO: 209829
  chr4:154469359-154469462
  hypo

SEQ ID NO: 404337 - DNA, 143 bp, Homo sapiens; identical to SEQ ID NO: 209830
  chr4:154520339-154520482
  hypo

SEQ ID NO: 404338 - DNA, 125 bp, Homo sapiens; identical to SEQ ID NO: 396880
  chr4:157892596-157892721
  hypo

SEQ ID NO: 404339 - DNA, 465 bp, Homo sapiens; identical to SEQ ID NO: 282608
  chr4:157892762-157893227
  hypo

SEQ ID NO: 404340 - DNA, 104 bp, Homo sapiens; identical to SEQ ID NO: 254036
  chr4:159488285-159488389
  hypo

SEQ ID NO: 404341 - DNA, 45 bp, Homo sapiens; identical to SEQ ID NO: 254037
  chr4:159680339-159680384
  hypo

SEQ ID NO: 404342 - DNA, 41 bp, Homo sapiens; identical to SEQ ID NO: 254038
  chr4:159749469-159749510
  hypo

SEQ ID NO: 404343 - DNA, 195 bp, Homo sapiens; identical to SEQ ID NO: 254039
  chr4:159919845-159920040
  hypo

SEQ ID NO: 404344 - DNA, 111 bp, Homo sapiens; identical to SEQ ID NO: 209836
  chr4:164394802-164394913
  hypo

SEQ ID NO: 404345 - DNA, 321 bp, Homo sapiens; identical to SEQ ID NO: 254044
  chr4:165850787-165851108
  hypo

SEQ ID NO: 404346 - DNA, 161 bp, Homo sapiens; identical to SEQ ID NO: 254046
  chr4:166035044-166035205
  hypo

SEQ ID NO: 404347 - DNA, 180 bp, Homo sapiens; identical to SEQ ID NO: 254047
  chr4:166337214-166337394
  hypo

SEQ ID NO: 404348 - DNA, 92 bp, Homo sapiens; identical to SEQ ID NO: 254048
  chr4:169105970-169106062
  hypo

SEQ ID NO: 404349 - DNA, 43 bp, Homo sapiens; identical to SEQ ID NO: 209837
  chr4:169198694-169198737
  hypo

SEQ ID NO: 404350 - DNA, 37 bp, Homo sapiens; identical to SEQ ID NO: 254051
  chr4:169315725-169315762
  hypo

SEQ ID NO: 404351 - DNA, 33 bp, Homo sapiens; identical to SEQ ID NO: 209839
  chr4:169358978-169359011
  hypo

SEQ ID NO: 404352 - DNA, 33 bp, Homo sapiens; identical to SEQ ID NO: 209841
  chr4:169562060-169562093
  hypo

SEQ ID NO: 404353 - DNA, 205 bp, Homo sapiens; identical to SEQ ID NO: 254056
  chr4:169667598-169667803
  hypo

SEQ ID NO: 404354 - DNA, 92 bp, Homo sapiens; identical to SEQ ID NO: 254057
  chr4:169744533-169744625
  hypo

SEQ ID NO: 404355 - DNA, 124 bp, Homo sapiens; identical to SEQ ID NO: 254058
  chr4:169751969-169752093
  hypo

SEQ ID NO: 404356 - DNA, 150 bp, Homo sapiens; identical to SEQ ID NO: 254059
  chr4:169952682-169952832
  hypo

SEQ ID NO: 404357 - DNA, 209 bp, Homo sapiens; identical to SEQ ID NO: 254062
  chr4:170037586-170037795
  hypo

SEQ ID NO: 404358 - DNA, 73 bp, Homo sapiens; identical to SEQ ID NO: 199677
  chr4:170192274-170192347
  hypo

SEQ ID NO: 404359 - DNA, 37 bp, Homo sapiens; identical to SEQ ID NO: 209847
  chr4:170612105-170612142
  hypo

SEQ ID NO: 404360 - DNA, 215 bp, Homo sapiens; identical to SEQ ID NO: 209848
  chr4:170652116-170652331
  hypo

SEQ ID NO: 404361 - DNA, 41 bp, Homo sapiens; identical to SEQ ID NO: 254072
  chr4:170845921-170845962
  hypo

SEQ ID NO: 404362 - DNA, 120 bp, Homo sapiens; identical to SEQ ID NO: 254075
  chr4:173298723-173298843
  hypo

SEQ ID NO: 404363 - DNA, 52 bp, Homo sapiens; identical to SEQ ID NO: 209852
  chr4:175940748-175940800
  hypo

SEQ ID NO: 404364 - DNA, 184 bp, Homo sapiens; identical to SEQ ID NO: 254079
  chr4:181454371-181454555
  hypo

SEQ ID NO: 404365 - DNA, 274 bp, Homo sapiens; identical to SEQ ID NO: 254082
  chr4:183768991-183769265
  hypo

SEQ ID NO: 404366 - DNA, 39 bp, Homo sapiens; identical to SEQ ID NO: 254084
  chr4:183808323-183808362
  hypo

SEQ ID NO: 404367 - DNA, 203 bp, Homo sapiens; identical to SEQ ID NO: 209856
  chr4:183824599-183824802
  hypo

SEQ ID NO: 404368 - DNA, 32 bp, Homo sapiens; identical to SEQ ID NO: 209858
  chr4:184051481-184051513
  hypo

SEQ ID NO: 404369 - DNA, 41 bp, Homo sapiens; identical to SEQ ID NO: 209859
  chr4:184160138-184160179
  hypo

SEQ ID NO: 404370 - DNA, 321 bp, Homo sapiens; identical to SEQ ID NO: 282688
  chr4:184328290-184328611
  hypo

SEQ ID NO: 404371 - DNA, 109 bp, Homo sapiens; identical to SEQ ID NO: 254094
  chr4:184331205-184331314
  hypo

SEQ ID NO: 404372 - DNA, 37 bp, Homo sapiens; identical to SEQ ID NO: 254095
  chr4:184339996-184340033
  hypo

SEQ ID NO: 404373 - DNA, 223 bp, Homo sapiens; identical to SEQ ID NO: 254096
  chr4:184343147-184343370
  hypo

SEQ ID NO: 404374 - DNA, 133 bp, Homo sapiens; identical to SEQ ID NO: 254098
  chr4:184404652-184404785
  hypo

SEQ ID NO: 404375 - DNA, 32 bp, Homo sapiens; identical to SEQ ID NO: 254099
  chr4:184554620-184554652
  hypo

SEQ ID NO: 404376 - DNA, 180 bp, Homo sapiens; identical to SEQ ID NO: 254102
  chr4:184675874-184676054
  hypo

SEQ ID NO: 404377 - DNA, 35 bp, Homo sapiens; identical to SEQ ID NO: 254107
  chr4:185121434-185121469
  hypo

SEQ ID NO: 404378 - DNA, 245 bp, Homo sapiens; identical to SEQ ID NO: 254108
  chr4:185121499-185121744
  hypo

SEQ ID NO: 404379 - DNA, 124 bp, Homo sapiens; identical to SEQ ID NO: 209865
  chr4:185239992-185240116
  hypo

SEQ ID NO: 404380 - DNA, 89 bp, Homo sapiens; identical to SEQ ID NO: 254113
  chr4:185322205-185322294
  hypo

SEQ ID NO: 404381 - DNA, 228 bp, Homo sapiens; identical to SEQ ID NO: 254114
  chr4:185344286-185344514
  hypo

SEQ ID NO: 404382 - DNA, 280 bp, Homo sapiens; identical to SEQ ID NO: 209869
  chr4:185353277-185353557
  hypo

SEQ ID NO: 404383 - DNA, 47 bp, Homo sapiens; identical to SEQ ID NO: 209872
  chr4:185480839-185480886
  hypo

SEQ ID NO: 404384 - DNA, 196 bp, Homo sapiens; identical to SEQ ID NO: 254122
  chr4:185491195-185491391
  hypo

SEQ ID NO: 404385 - DNA, 165 bp, Homo sapiens; identical to SEQ ID NO: 254123
  chr4:185684718-185684883
  hypo

SEQ ID NO: 404386 - DNA, 159 bp, Homo sapiens; identical to SEQ ID NO: 254125
  chr4:185709701-185709860
  hypo

SEQ ID NO: 404387 - DNA, 211 bp, Homo sapiens; identical to SEQ ID NO: 254128
  chr4:185872523-185872734
  hypo

SEQ ID NO: 404388 - DNA, 78 bp, Homo sapiens; identical to SEQ ID NO: 254131
  chr4:186066016-186066094
  hypo

SEQ ID NO: 404389 - DNA, 68 bp, Homo sapiens; identical to SEQ ID NO: 199713
  chr4:186130483-186130551
  hypo

SEQ ID NO: 404390 - DNA, 130 bp, Homo sapiens; identical to SEQ ID NO: 254132
  chr4:186150229-186150359
  hypo

SEQ ID NO: 404391 - DNA, 157 bp, Homo sapiens; identical to SEQ ID NO: 254136
  chr4:186224801-186224958
  hypo

SEQ ID NO: 404392 - DNA, 95 bp, Homo sapiens; identical to SEQ ID NO: 209878
  chr4:186319410-186319505
  hypo

SEQ ID NO: 404393 - DNA, 434 bp, Homo sapiens; identical to SEQ ID NO: 396920
  chr4:186456293-186456727
  hypo

SEQ ID NO: 404394 - DNA, 179 bp, Homo sapiens; identical to SEQ ID NO: 254143
  chr4:187206902-187207081
  hypo

SEQ ID NO: 404395 - DNA, 36 bp, Homo sapiens; identical to SEQ ID NO: 254145
  chr4:187509900-187509936
  hypo

SEQ ID NO: 404396 - DNA, 199 bp, Homo sapiens; identical to SEQ ID NO: 254146
  chr4:187527079-187527278
  hypo

SEQ ID NO: 404397 - DNA, 42 bp, Homo sapiens; identical to SEQ ID NO: 209884
  chr4:187796040-187796082
  hypo

SEQ ID NO: 404398 - DNA, 302 bp, Homo sapiens; identical to SEQ ID NO: 254151
  chr4:187840652-187840954
  hypo

SEQ ID NO: 404399 - DNA, 171 bp, Homo sapiens; identical to SEQ ID NO: 254158
  chr4:190434295-190434466
  hypo

SEQ ID NO: 404400 - DNA, 149 bp, Homo sapiens; identical to SEQ ID NO: 254160
  chr4:190509469-190509618
  hypo

SEQ ID NO: 404401 - DNA, 43 bp, Homo sapiens; identical to SEQ ID NO: 209891
  chr4:190767154-190767197
  hypo

SEQ ID NO: 404402 - DNA, 120 bp, Homo sapiens; identical to SEQ ID NO: 254167
  chr5:164483-164603
  hypo

SEQ ID NO: 404403 - DNA, 111 bp, Homo sapiens; identical to SEQ ID NO: 254169
  chr5:181712-181823
  hypo

SEQ ID NO: 404404 - DNA, 115 bp, Homo sapiens; identical to SEQ ID NO: 254172
  chr5:230941-231056
  hypo

SEQ ID NO: 404405 - DNA, 122 bp, Homo sapiens; identical to SEQ ID NO: 209897
  chr5:233693-233815
  hypo

SEQ ID NO: 404406 - DNA, 97 bp, Homo sapiens; identical to SEQ ID NO: 254178
  chr5:286140-286237
  hypo

SEQ ID NO: 404407 - DNA, 81 bp, Homo sapiens; identical to SEQ ID NO: 254180
  chr5:306772-306853
  hypo

SEQ ID NO: 404408 - DNA, 194 bp, Homo sapiens; identical to SEQ ID NO: 254182
  chr5:310508-310702
  hypo

SEQ ID NO: 404409 - DNA, 189 bp, Homo sapiens; identical to SEQ ID NO: 254183
  chr5:312943-313132
  hypo

SEQ ID NO: 404410 - DNA, 118 bp, Homo sapiens; identical to SEQ ID NO: 254184
  chr5:314539-314657
  hypo

SEQ ID NO: 404411 - DNA, 84 bp, Homo sapiens; identical to SEQ ID NO: 254185
  chr5:325119-325203
  hypo

SEQ ID NO: 404412 - DNA, 64 bp, Homo sapiens; identical to SEQ ID NO: 282726
  chr5:343971-344035
  hypo

SEQ ID NO: 404413 - DNA, 207 bp, Homo sapiens; identical to SEQ ID NO: 282727
  chr5:344297-344504
  hypo

SEQ ID NO: 404414 - DNA, 285 bp, Homo sapiens; identical to SEQ ID NO: 199726
  chr5:374579-374864
  hypo

SEQ ID NO: 404415 - DNA, 249 bp, Homo sapiens; identical to SEQ ID NO: 254186
  chr5:375541-375790
  hypo

SEQ ID NO: 404416 - DNA, 267 bp, Homo sapiens; identical to SEQ ID NO: 222548
  chr5:377105-377372
  hypo

SEQ ID NO: 404417 - DNA, 163 bp, Homo sapiens; identical to SEQ ID NO: 254192
  chr5:447732-447895
  hypo

SEQ ID NO: 404418 - DNA, 44 bp, Homo sapiens; identical to SEQ ID NO: 209904
  chr5:457006-457050
  hypo

SEQ ID NO: 404419 - DNA, 164 bp, Homo sapiens; identical to SEQ ID NO: 254195
  chr5:458631-458795
  hypo

SEQ ID NO: 404420 - DNA, 59 bp, Homo sapiens; identical to SEQ ID NO: 209906
  chr5:463463-463522
  hypo

SEQ ID NO: 404421 - DNA, 37 bp, Homo sapiens; identical to SEQ ID NO: 254211
  chr5:519702-519739
  hypo

SEQ ID NO: 404422 - DNA, 36 bp, Homo sapiens; identical to SEQ ID NO: 209917
  chr5:537376-537412
  hypo

SEQ ID NO: 404423 - DNA, 100 bp, Homo sapiens
  chr5:555071-555171
  hypo
ggggtggggggtgggtcatgggatgaaccggggtggggggctgggtcatgggatgaaccggggtggggggctgggtcatgggatgaacgggggggtgggt

SEQ ID NO: 404424 - DNA, 162 bp, Homo sapiens; identical to SEQ ID NO: 303794
  chr5:559439-559601
  hypo

SEQ ID NO: 404425 - DNA, 319 bp, Homo sapiens; identical to SEQ ID NO: 254228
  chr5:628859-629178
  hypo

SEQ ID NO: 404426 - DNA, 89 bp, Homo sapiens; identical to SEQ ID NO: 209924
  chr5:633969-634058
  hypo

SEQ ID NO: 404427 - DNA, 565 bp, Homo sapiens; identical to SEQ ID NO: 254230
  chr5:640118-640683
  hypo

SEQ ID NO: 404428 - DNA, 35 bp, Homo sapiens; identical to SEQ ID NO: 199731
  chr5:693798-693833
  hypo

SEQ ID NO: 404429 - DNA, 120 bp, Homo sapiens; identical to SEQ ID NO: 254243
  chr5:855237-855357
  hypo

SEQ ID NO: 404430 - DNA, 204 bp, Homo sapiens; identical to SEQ ID NO: 209936
  chr5:876062-876266
  hypo

SEQ ID NO: 404431 - DNA, 256 bp, Homo sapiens; identical to SEQ ID NO: 209937
  chr5:881857-882113
  hypo

SEQ ID NO: 404432 - DNA, 454 bp, Homo sapiens; identical to SEQ ID NO: 303837
  chr5:912352-912806
  hypo

SEQ ID NO: 404433 - DNA, 150 bp, Homo sapiens; identical to SEQ ID NO: 254261
  chr5:948029-948179
  hypo

SEQ ID NO: 404434 - DNA, 134 bp, Homo sapiens; identical to SEQ ID NO: 254262
  chr5:961624-961758
  hypo

SEQ ID NO: 404435 - DNA, 155 bp, Homo sapiens; identical to SEQ ID NO: 254264
  chr5:993134-993289
  hypo

SEQ ID NO: 404436 - DNA, 86 bp, Homo sapiens; identical to SEQ ID NO: 254266
  chr5:1026900-1026986
  hypo

SEQ ID NO: 404437 - DNA, 242 bp, Homo sapiens; identical to SEQ ID NO: 254268
  chr5:1027769-1028011
  hypo

SEQ ID NO: 404438 - DNA, 248 bp, Homo sapiens; identical to SEQ ID NO: 254272
  chr5:1031561-1031809
  hypo

SEQ ID NO: 404439 - DNA, 403 bp, Homo sapiens; identical to SEQ ID NO: 254278
  chr5:1036739-1037142
  hypo

SEQ ID NO: 404440 - DNA, 189 bp, Homo sapiens; identical to SEQ ID NO: 254282
  chr5:1045515-1045704
  hypo

SEQ ID NO: 404441 - DNA, 78 bp, Homo sapiens; identical to SEQ ID NO: 209955
  chr5:1046857-1046935
  hypo

SEQ ID NO: 404442 - DNA, 32 bp, Homo sapiens; identical to SEQ ID NO: 385522
  chr5:1056006-1056038
  hypo

SEQ ID NO: 404443 - DNA, 40 bp, Homo sapiens; identical to SEQ ID NO: 391173
  chr5:1056068-1056108
  hypo

SEQ ID NO: 404444 - DNA, 244 bp, Homo sapiens; identical to SEQ ID NO: 254293
  chr5:1058147-1058391
  hypo

SEQ ID NO: 404445 - DNA, 182 bp, Homo sapiens; identical to SEQ ID NO: 209969
  chr5:1060413-1060595
  hypo

SEQ ID NO: 404446 - DNA, 46 bp, Homo sapiens; identical to SEQ ID NO: 385524
  chr5:1060818-1060864
  hypo

SEQ ID NO: 404447 - DNA, 370 bp, Homo sapiens; identical to SEQ ID NO: 388174
  chr5:1064042-1064412
  hypo

SEQ ID NO: 404448 - DNA, 218 bp, Homo sapiens; identical to SEQ ID NO: 209977
  chr5:1068045-1068263
  hypo

SEQ ID NO: 404449 - DNA, 89 bp, Homo sapiens; identical to SEQ ID NO: 209981
  chr5:1080415-1080504
  hypo

SEQ ID NO: 404450 - DNA, 166 bp, Homo sapiens; identical to SEQ ID NO: 209988
  chr5:1091065-1091231
  hypo

SEQ ID NO: 404451 - DNA, 37 bp, Homo sapiens; identical to SEQ ID NO: 209989
  chr5:1092774-1092811
  hypo

SEQ ID NO: 404452 - DNA, 222 bp, Homo sapiens; identical to SEQ ID NO: 254331
  chr5:1122179-1122401
  hypo

SEQ ID NO: 404453 - DNA, 159 bp, Homo sapiens; identical to SEQ ID NO: 254333
  chr5:1124659-1124818
  hypo

SEQ ID NO: 404454 - DNA, 813 bp, Homo sapiens; identical to SEQ ID NO: 254334
  chr5:1128888-1129701
  hypo

SEQ ID NO: 404455 - DNA, 322 bp, Homo sapiens; identical to SEQ ID NO: 254337
  chr5:1154638-1154960
  hypo

SEQ ID NO: 404456 - DNA, 86 bp, Homo sapiens; identical to SEQ ID NO: 210001
  chr5:1177291-1177377
  hypo

SEQ ID NO: 404457 - DNA, 231 bp, Homo sapiens; identical to SEQ ID NO: 254341
  chr5:1201777-1202008
  hypo

SEQ ID NO: 404458 - DNA, 236 bp, Homo sapiens; identical to SEQ ID NO: 254344
  chr5:1212420-1212656
  hypo

SEQ ID NO: 404459 - DNA, 287 bp, Homo sapiens; identical to SEQ ID NO: 210002
  chr5:1215723-1216010
  hypo

SEQ ID NO: 404460 - DNA, 147 bp, Homo sapiens; identical to SEQ ID NO: 210003
  chr5:1216988-1217135
  hypo

SEQ ID NO: 404461 - DNA, 266 bp, Homo sapiens; identical to SEQ ID NO: 303931
  chr5:1218542-1218808
  hypo

SEQ ID NO: 404462 - DNA, 462 bp, Homo sapiens; identical to SEQ ID NO: 303932
  chr5:1218838-1219300
  hypo

SEQ ID NO: 404463 - DNA, 399 bp, Homo sapiens; identical to SEQ ID NO: 254361
  chr5:1269045-1269444
  hypo

SEQ ID NO: 404464 - DNA, 192 bp, Homo sapiens; identical to SEQ ID NO: 210008
  chr5:1272061-1272253
  hypo

SEQ ID NO: 404465 - DNA, 100 bp, Homo sapiens; identical to SEQ ID NO: 303947
  chr5:1272283-1272383
  hypo

SEQ ID NO: 404466 - DNA, 548 bp, Homo sapiens; identical to SEQ ID NO: 254364
  chr5:1277142-1277690
  hypo

SEQ ID NO: 404467 - DNA, 105 bp, Homo sapiens; identical to SEQ ID NO: 222563
  chr5:1294071-1294176
  hypo

SEQ ID NO: 404468 - DNA, 111 bp, Homo sapiens; identical to SEQ ID NO: 210010
  chr5:1318452-1318563
  hypo

SEQ ID NO: 404469 - DNA, 213 bp, Homo sapiens; identical to SEQ ID NO: 210011
  chr5:1326183-1326396
  hypo

SEQ ID NO: 404470 - DNA, 278 bp, Homo sapiens; identical to SEQ ID NO: 254371
  chr5:1330258-1330536
  hypo

SEQ ID NO: 404471 - DNA, 234 bp, Homo sapiens; identical to SEQ ID NO: 254374
  chr5:1342379-1342613
  hypo

SEQ ID NO: 404472 - DNA, 74 bp, Homo sapiens; identical to SEQ ID NO: 254380
  chr5:1416944-1417018
  hypo

SEQ ID NO: 404473 - DNA, 87 bp, Homo sapiens; identical to SEQ ID NO: 303963
  chr5:1431283-1431370
  hypo

SEQ ID NO: 404474 - DNA, 241 bp, Homo sapiens; identical to SEQ ID NO: 254383
  chr5:1439038-1439279
  hypo

SEQ ID NO: 404475 - DNA, 105 bp, Homo sapiens; identical to SEQ ID NO: 254384
  chr5:1462598-1462703
  hypo

SEQ ID NO: 404476 - DNA, 235 bp, Homo sapiens; identical to SEQ ID NO: 254385
  chr5:1462733-1462968
  hypo

SEQ ID NO: 404477 - DNA, 242 bp, Homo sapiens; identical to SEQ ID NO: 254386
  chr5:1463474-1463716
  hypo

SEQ ID NO: 404478 - DNA, 236 bp, Homo sapiens; identical to SEQ ID NO: 254387
  chr5:1467132-1467368
  hypo

SEQ ID NO: 404479 - DNA, 95 bp, Homo sapiens; identical to SEQ ID NO: 210016
  chr5:1490331-1490426
  hypo

SEQ ID NO: 404480 - DNA, 72 bp, Homo sapiens; identical to SEQ ID NO: 254391
  chr5:1497221-1497293
  hypo

SEQ ID NO: 404481 - DNA, 145 bp, Homo sapiens; identical to SEQ ID NO: 254392
  chr5:1510456-1510601
  hypo

SEQ ID NO: 404482 - DNA, 202 bp, Homo sapiens; identical to SEQ ID NO: 210017
  chr5:1517524-1517726
  hypo

SEQ ID NO: 404483 - DNA, 271 bp, Homo sapiens; identical to SEQ ID NO: 254395
  chr5:1548856-1549127
  hypo

SEQ ID NO: 404484 - DNA, 114 bp, Homo sapiens; identical to SEQ ID NO: 254397
  chr5:1550654-1550768
  hypo

SEQ ID NO: 404485 - DNA, 82 bp, Homo sapiens; identical to SEQ ID NO: 210020
  chr5:1704649-1704731
  hypo

SEQ ID NO: 404486 - DNA, 148 bp, Homo sapiens; identical to SEQ ID NO: 210024
  chr5:1747177-1747325
  hypo

SEQ ID NO: 404487 - DNA, 114 bp, Homo sapiens; identical to SEQ ID NO: 254409
  chr5:1752559-1752673
  hypo

SEQ ID NO: 404488 - DNA, 243 bp, Homo sapiens; identical to SEQ ID NO: 254417
  chr5:1809726-1809969
  hypo

SEQ ID NO: 404489 - DNA, 116 bp, Homo sapiens; identical to SEQ ID NO: 254418
  chr5:1813758-1813874
  hypo

SEQ ID NO: 404490 - DNA, 164 bp, Homo sapiens; identical to SEQ ID NO: 254419
  chr5:1814740-1814904
  hypo

SEQ ID NO: 404491 - DNA, 185 bp, Homo sapiens; identical to SEQ ID NO: 210027
  chr5:1815267-1815452
  hypo

SEQ ID NO: 404492 - DNA, 98 bp, Homo sapiens; identical to SEQ ID NO: 254421
  chr5:1826983-1827081
  hypo

SEQ ID NO: 404493 - DNA, 173 bp, Homo sapiens; identical to SEQ ID NO: 254422
  chr5:1858632-1858805
  hypo

SEQ ID NO: 404494 - DNA, 197 bp, Homo sapiens; identical to SEQ ID NO: 304007
  chr5:1865341-1865538
  hypo

SEQ ID NO: 404495 - DNA, 42 bp, Homo sapiens; identical to SEQ ID NO: 254425
  chr5:1900863-1900905
  hypo

SEQ ID NO: 404496 - DNA, 154 bp, Homo sapiens; identical to SEQ ID NO: 254430
  chr5:1923520-1923674
  hypo

SEQ ID NO: 404497 - DNA, 101 bp, Homo sapiens; identical to SEQ ID NO: 254436
  chr5:2041329-2041430
  hypo

SEQ ID NO: 404498 - DNA, 328 bp, Homo sapiens; identical to SEQ ID NO: 254437
  chr5:2052998-2053326
  hypo

SEQ ID NO: 404499 - DNA, 31 bp, Homo sapiens; identical to SEQ ID NO: 254438
  chr5:2054410-2054441
  hypo

SEQ ID NO: 404500 - DNA, 69 bp, Homo sapiens; identical to SEQ ID NO: 304025
  chr5:2136841-2136910
  hypo

SEQ ID NO: 404501 - DNA, 77 bp, Homo sapiens; identical to SEQ ID NO: 304034
  chr5:2369537-2369614
  hypo

SEQ ID NO: 404502 - DNA, 112 bp, Homo sapiens; identical to SEQ ID NO: 304035
  chr5:2369682-2369794
  hypo

SEQ ID NO: 404503 - DNA, 55 bp, Homo sapiens; identical to SEQ ID NO: 254452
  chr5:2495120-2495175
  hypo

SEQ ID NO: 404504 - DNA, 48 bp, Homo sapiens; identical to SEQ ID NO: 254455
  chr5:2542212-2542260
  hypo

SEQ ID NO: 404505 - DNA, 68 bp, Homo sapiens; identical to SEQ ID NO: 254458
  chr5:2561183-2561251
  hypo

SEQ ID NO: 404506 - DNA, 45 bp, Homo sapiens; identical to SEQ ID NO: 254459
  chr5:2564558-2564603
  hypo

SEQ ID NO: 404507 - DNA, 113 bp, Homo sapiens; identical to SEQ ID NO: 254460
  chr5:2579041-2579154
  hypo

SEQ ID NO: 404508 - DNA, 118 bp, Homo sapiens; identical to SEQ ID NO: 254461
  chr5:2634150-2634268
  hypo

SEQ ID NO: 404509 - DNA, 300 bp, Homo sapiens; identical to SEQ ID NO: 254462
  chr5:2668651-2668951
  hypo

SEQ ID NO: 404510 - DNA, 86 bp, Homo sapiens; identical to SEQ ID NO: 254463
  chr5:2669179-2669265
  hypo

SEQ ID NO: 404511 - DNA, 200 bp, Homo sapiens; identical to SEQ ID NO: 254464
  chr5:2708350-2708550
  hypo

SEQ ID NO: 404512 - DNA, 109 bp, Homo sapiens; identical to SEQ ID NO: 254466
  chr5:2808978-2809087
  hypo

SEQ ID NO: 404513 - DNA, 119 bp, Homo sapiens; identical to SEQ ID NO: 254467
  chr5:2823299-2823418
  hypo

SEQ ID NO: 404514 - DNA, 389 bp, Homo sapiens; identical to SEQ ID NO: 254471
  chr5:2896879-2897268
  hypo

SEQ ID NO: 404515 - DNA, 52 bp, Homo sapiens; identical to SEQ ID NO: 254472
  chr5:2903649-2903701
  hypo

SEQ ID NO: 404516 - DNA, 38 bp, Homo sapiens; identical to SEQ ID NO: 254476
  chr5:3028123-3028161
  hypo

SEQ ID NO: 404517 - DNA, 45 bp, Homo sapiens; identical to SEQ ID NO: 254478
  chr5:3029916-3029961
  hypo

SEQ ID NO: 404518 - DNA, 52 bp, Homo sapiens; identical to SEQ ID NO: 304067
  chr5:3032074-3032126
  hypo

SEQ ID NO: 404519 - DNA, 82 bp, Homo sapiens; identical to SEQ ID NO: 254481
  chr5:3042022-3042104
  hypo

SEQ ID NO: 404520 - DNA, 136 bp, Homo sapiens; identical to SEQ ID NO: 254482
  chr5:3051522-3051658
  hypo

SEQ ID NO: 404521 - DNA, 92 bp, Homo sapiens; identical to SEQ ID NO: 254485
  chr5:3114549-3114641
  hypo

SEQ ID NO: 404522 - DNA, 190 bp, Homo sapiens; identical to SEQ ID NO: 254486
  chr5:3143537-3143727
  hypo

SEQ ID NO: 404523 - DNA, 42 bp, Homo sapiens; identical to SEQ ID NO: 254487
  chr5:3152257-3152299
  hypo

SEQ ID NO: 404524 - DNA, 359 bp, Homo sapiens; identical to SEQ ID NO: 254488
  chr5:3155670-3156029
  hypo

SEQ ID NO: 404525 - DNA, 263 bp, Homo sapiens; identical to SEQ ID NO: 254489
  chr5:3188087-3188350
  hypo

SEQ ID NO: 404526 - DNA, 55 bp, Homo sapiens; identical to SEQ ID NO: 254490
  chr5:3203778-3203833
  hypo

SEQ ID NO: 404527 - DNA, 114 bp, Homo sapiens; identical to SEQ ID NO: 254491
  chr5:3212680-3212794
  hypo

SEQ ID NO: 404528 - DNA, 147 bp, Homo sapiens; identical to SEQ ID NO: 254498
  chr5:3346708-3346855
  hypo

SEQ ID NO: 404529 - DNA, 45 bp, Homo sapiens; identical to SEQ ID NO: 254500
  chr5:3489720-3489765
  hypo

SEQ ID NO: 404530 - DNA, 149 bp, Homo sapiens; identical to SEQ ID NO: 304091
  chr5:3535478-3535627
  hypo

SEQ ID NO: 404531 - DNA, 612 bp, Homo sapiens; identical to SEQ ID NO: 210045
  chr5:3535785-3536397
  hypo

SEQ ID NO: 404532 - DNA, 208 bp, Homo sapiens; identical to SEQ ID NO: 282771
  chr5:3590903-3591111
  hypo

SEQ ID NO: 404533 - DNA, 94 bp, Homo sapiens; identical to SEQ ID NO: 199747
  chr5:3591458-3591552
  hypo

SEQ ID NO: 404534 - DNA, 218 bp, Homo sapiens; identical to SEQ ID NO: 254504
  chr5:3659551-3659769
  hypo

SEQ ID NO: 404535 - DNA, 237 bp, Homo sapiens; identical to SEQ ID NO: 254514
  chr5:4886500-4886737
  hypo

SEQ ID NO: 404536 - DNA, 390 bp, Homo sapiens; identical to SEQ ID NO: 254515
  chr5:5303189-5303579
  hypo

SEQ ID NO: 404537 - DNA, 71 bp, Homo sapiens; identical to SEQ ID NO: 254516
  chr5:5652238-5652309
  hypo

SEQ ID NO: 404538 - DNA, 60 bp, Homo sapiens; identical to SEQ ID NO: 304114
  chr5:6228485-6228545
  hypo

SEQ ID NO: 404539 - DNA, 42 bp, Homo sapiens; identical to SEQ ID NO: 304115
  chr5:6228575-6228617
  hypo

SEQ ID NO: 404540 - DNA, 115 bp, Homo sapiens; identical to SEQ ID NO: 254521
  chr5:6420112-6420227
  hypo

SEQ ID NO: 404541 - DNA, 51 bp, Homo sapiens; identical to SEQ ID NO: 254522
  chr5:6527276-6527327
  hypo

SEQ ID NO: 404542 - DNA, 76 bp, Homo sapiens; identical to SEQ ID NO: 254524
  chr5:6760002-6760078
  hypo

SEQ ID NO: 404543 - DNA, 72 bp, Homo sapiens; identical to SEQ ID NO: 254525
  chr5:6762500-6762572
  hypo

SEQ ID NO: 404544 - DNA, 215 bp, Homo sapiens; identical to SEQ ID NO: 210056
  chr5:6846210-6846425
  hypo

SEQ ID NO: 404545 - DNA, 34 bp, Homo sapiens; identical to SEQ ID NO: 254527
  chr5:6846845-6846879
  hypo

SEQ ID NO: 404546 - DNA, 42 bp, Homo sapiens; identical to SEQ ID NO: 254529
  chr5:6906771-6906813
  hypo

SEQ ID NO: 404547 - DNA, 36 bp, Homo sapiens; identical to SEQ ID NO: 210057
  chr5:7704693-7704729
  hypo

SEQ ID NO: 404548 - DNA, 42 bp, Homo sapiens; identical to SEQ ID NO: 254531
  chr5:7802432-7802474
  hypo

SEQ ID NO: 404549 - DNA, 78 bp, Homo sapiens; identical to SEQ ID NO: 254534
  chr5:8424507-8424585
  hypo

SEQ ID NO: 404550 - DNA, 92 bp, Homo sapiens; identical to SEQ ID NO: 210059
  chr5:8649803-8649895
  hypo

SEQ ID NO: 404551 - DNA, 120 bp, Homo sapiens; identical to SEQ ID NO: 254536
  chr5:8841451-8841571
  hypo

SEQ ID NO: 404552 - DNA, 42 bp, Homo sapiens; identical to SEQ ID NO: 254539
  chr5:9044652-9044694
  hypo

SEQ ID NO: 404553 - DNA, 166 bp, Homo sapiens; identical to SEQ ID NO: 254541
  chr5:9054171-9054337
  hypo

SEQ ID NO: 404554 - DNA, 155 bp, Homo sapiens; identical to SEQ ID NO: 210060
  chr5:9066591-9066746
  hypo

SEQ ID NO: 404555 - DNA, 155 bp, Homo sapiens; identical to SEQ ID NO: 254545
  chr5:9136512-9136667
  hypo

SEQ ID NO: 404556 - DNA, 41 bp, Homo sapiens; identical to SEQ ID NO: 254548
  chr5:9330247-9330288
  hypo

SEQ ID NO: 404557 - DNA, 42 bp, Homo sapiens; identical to SEQ ID NO: 254549
  chr5:9445440-9445482
  hypo

SEQ ID NO: 404558 - DNA, 42 bp, Homo sapiens; identical to SEQ ID NO: 254551
  chr5:9498629-9498671
  hypo

SEQ ID NO: 404559 - DNA, 144 bp, Homo sapiens; identical to SEQ ID NO: 254553
  chr5:9725136-9725280
  hypo

SEQ ID NO: 404560 - DNA, 216 bp, Homo sapiens; identical to SEQ ID NO: 254554
  chr5:10080575-10080791
  hypo

SEQ ID NO: 404561 - DNA, 902 bp, Homo sapiens; identical to SEQ ID NO: 282794
  chr5:10441403-10442305
  hypo

SEQ ID NO: 404562 - DNA, 498 bp, Homo sapiens; identical to SEQ ID NO: 254562
  chr5:10453378-10453876
  hypo

SEQ ID NO: 404563 - DNA, 106 bp, Homo sapiens; identical to SEQ ID NO: 210065
  chr5:10486101-10486207
  hypo

SEQ ID NO: 404564 - DNA, 40 bp, Homo sapiens; identical to SEQ ID NO: 210066
  chr5:10548513-10548553
  hypo

SEQ ID NO: 404565 - DNA, 36 bp, Homo sapiens; identical to SEQ ID NO: 210068
  chr5:10618606-10618642
  hypo

SEQ ID NO: 404566 - DNA, 100 bp, Homo sapiens; identical to SEQ ID NO: 210070
  chr5:10936742-10936842
  hypo

SEQ ID NO: 404567 - DNA, 39 bp, Homo sapiens; identical to SEQ ID NO: 254570
  chr5:11074314-11074353
  hypo

SEQ ID NO: 404568 - DNA, 152 bp, Homo sapiens; identical to SEQ ID NO: 254572
  chr5:11130729-11130881
  hypo

SEQ ID NO: 404569 - DNA, 80 bp, Homo sapiens; identical to SEQ ID NO: 254576
  chr5:13884614-13884694
  hypo

SEQ ID NO: 404570 - DNA, 40 bp, Homo sapiens; identical to SEQ ID NO: 254579
  chr5:14173630-14173670
  hypo

SEQ ID NO: 404571 - DNA, 191 bp, Homo sapiens; identical to SEQ ID NO: 210077
  chr5:14319946-14320137
  hypo

SEQ ID NO: 404572 - DNA, 175 bp, Homo sapiens; identical to SEQ ID NO: 210083
  chr5:14378048-14378223
  hypo

SEQ ID NO: 404573 - DNA, 102 bp, Homo sapiens; identical to SEQ ID NO: 210084
  chr5:14381249-14381351
  hypo

SEQ ID NO: 404574 - DNA, 263 bp, Homo sapiens; identical to SEQ ID NO: 254595
  chr5:14390712-14390975
  hypo

SEQ ID NO: 404575 - DNA, 188 bp, Homo sapiens; identical to SEQ ID NO: 254596
  chr5:14405986-14406174
  hypo

SEQ ID NO: 404576 - DNA, 39 bp, Homo sapiens; identical to SEQ ID NO: 254602
  chr5:14431087-14431126
  hypo

SEQ ID NO: 404577 - DNA, 105 bp, Homo sapiens; identical to SEQ ID NO: 210088
  chr5:14435287-14435392
  hypo

SEQ ID NO: 404578 - DNA, 136 bp, Homo sapiens; identical to SEQ ID NO: 254604
  chr5:14441380-14441516
  hypo

SEQ ID NO: 404579 - DNA, 160 bp, Homo sapiens; identical to SEQ ID NO: 210089
  chr5:14454341-14454501
  hypo

SEQ ID NO: 404580 - DNA, 155 bp, Homo sapiens; identical to SEQ ID NO: 210090
  chr5:14460339-14460494
  hypo

SEQ ID NO: 404581 - DNA, 122 bp, Homo sapiens; identical to SEQ ID NO: 254610
  chr5:14487503-14487625
  hypo

SEQ ID NO: 404582 - DNA, 183 bp, Homo sapiens; identical to SEQ ID NO: 210094
  chr5:14489508-14489691
  hypo

SEQ ID NO: 404583 - DNA, 175 bp, Homo sapiens; identical to SEQ ID NO: 210096
  chr5:14493321-14493496
  hypo

SEQ ID NO: 404584 - DNA, 537 bp, Homo sapiens; identical to SEQ ID NO: 254615
  chr5:14498253-14498790
  hypo

SEQ ID NO: 404585 - DNA, 98 bp, Homo sapiens; identical to SEQ ID NO: 210098
  chr5:14504056-14504154
  hypo

SEQ ID NO: 404586 - DNA, 76 bp, Homo sapiens; identical to SEQ ID NO: 254621
  chr5:14523713-14523789
  hypo

SEQ ID NO: 404587 - DNA, 321 bp, Homo sapiens; identical to SEQ ID NO: 254623
  chr5:14725552-14725873
  hypo

SEQ ID NO: 404588 - DNA, 222 bp, Homo sapiens; identical to SEQ ID NO: 254625
  chr5:14734656-14734878
  hypo

SEQ ID NO: 404589 - DNA, 132 bp, Homo sapiens; identical to SEQ ID NO: 254630
  chr5:14780932-14781064
  hypo

SEQ ID NO: 404590 - DNA, 85 bp, Homo sapiens; identical to SEQ ID NO: 254631
  chr5:14789325-14789410
  hypo

SEQ ID NO: 404591 - DNA, 212 bp, Homo sapiens; identical to SEQ ID NO: 254633
  chr5:14846242-14846454
  hypo

SEQ ID NO: 404592 - DNA, 110 bp, Homo sapiens; identical to SEQ ID NO: 210101
  chr5:14849840-14849950
  hypo

SEQ ID NO: 404593 - DNA, 33 bp, Homo sapiens; identical to SEQ ID NO: 254636
  chr5:14959676-14959709
  hypo

SEQ ID NO: 404594 - DNA, 44 bp, Homo sapiens; identical to SEQ ID NO: 254637
  chr5:15343332-15343376
  hypo

SEQ ID NO: 404595 - DNA, 93 bp, Homo sapiens; identical to SEQ ID NO: 199768
  chr5:15499745-15499838
  hypo

SEQ ID NO: 404596 - DNA, 129 bp, Homo sapiens; identical to SEQ ID NO: 396955
  chr5:15499947-15500076
  hypo

SEQ ID NO: 404597 - DNA, 872 bp, Homo sapiens; identical to SEQ ID NO: 254638
  chr5:15936621-15937493
  hypo

SEQ ID NO: 404598 - DNA, 214 bp, Homo sapiens; identical to SEQ ID NO: 222589
  chr5:16616869-16617083
  hypo

SEQ ID NO: 404599 - DNA, 204 bp, Homo sapiens; identical to SEQ ID NO: 254643
  chr5:16668250-16668454
  hypo

SEQ ID NO: 404600 - DNA, 34 bp, Homo sapiens; identical to SEQ ID NO: 254647
  chr5:16680075-16680109
  hypo

SEQ ID NO: 404601 - DNA, 31 bp, Homo sapiens; identical to SEQ ID NO: 210108
  chr5:16729562-16729593
  hypo

SEQ ID NO: 404602 - DNA, 134 bp, Homo sapiens; identical to SEQ ID NO: 254653
  chr5:16750563-16750697
  hypo

SEQ ID NO: 404603 - DNA, 42 bp, Homo sapiens; identical to SEQ ID NO: 254656
  chr5:16814253-16814295
  hypo

SEQ ID NO: 404604 - DNA, 32 bp, Homo sapiens; identical to SEQ ID NO: 210110
  chr5:16816658-16816690
  hypo

SEQ ID NO: 404605 - DNA, 33 bp, Homo sapiens; identical to SEQ ID NO: 210115
  chr5:16952528-16952561
  hypo

SEQ ID NO: 404606 - DNA, 88 bp, Homo sapiens; identical to SEQ ID NO: 254662
  chr5:16968119-16968207
  hypo

SEQ ID NO: 404607 - DNA, 120 bp, Homo sapiens; identical to SEQ ID NO: 210116
  chr5:16969886-16970006
  hypo

SEQ ID NO: 404608 - DNA, 32 bp, Homo sapiens; identical to SEQ ID NO: 210117
  chr5:17032024-17032056
  hypo

SEQ ID NO: 404609 - DNA, 35 bp, Homo sapiens; identical to SEQ ID NO: 254666
  chr5:17159691-17159726
  hypo

SEQ ID NO: 404610 - DNA, 35 bp, Homo sapiens; identical to SEQ ID NO: 210118
  chr5:17161190-17161225
  hypo

SEQ ID NO: 404611 - DNA, 183 bp, Homo sapiens; identical to SEQ ID NO: 254671
  chr5:17491366-17491549
  hypo

SEQ ID NO: 404612 - DNA, 76 bp, Homo sapiens; identical to SEQ ID NO: 199779
  chr5:17987028-17987104
  hypo

SEQ ID NO: 404613 - DNA, 137 bp, Homo sapiens; identical to SEQ ID NO: 254678
  chr5:18034128-18034265
  hypo

SEQ ID NO: 404614 - DNA, 31 bp, Homo sapiens; identical to SEQ ID NO: 254680
  chr5:18296459-18296490
  hypo

SEQ ID NO: 404615 - DNA, 36 bp, Homo sapiens; identical to SEQ ID NO: 254681
  chr5:18380066-18380102
  hypo

SEQ ID NO: 404616 - DNA, 31 bp, Homo sapiens; identical to SEQ ID NO: 254684
  chr5:19289324-19289355
  hypo

SEQ ID NO: 404617 - DNA, 42 bp, Homo sapiens; identical to SEQ ID NO: 254686
  chr5:24294250-24294292
  hypo

SEQ ID NO: 404618 - DNA, 33 bp, Homo sapiens; identical to SEQ ID NO: 210126
  chr5:27121727-27121760
  hypo

SEQ ID NO: 404619 - DNA, 33 bp, Homo sapiens; identical to SEQ ID NO: 210127
  chr5:27121940-27121973
  hypo

SEQ ID NO: 404620 - DNA, 137 bp, Homo sapiens; identical to SEQ ID NO: 254690
  chr5:27217838-27217975
  hypo

SEQ ID NO: 404621 - DNA, 120 bp, Homo sapiens; identical to SEQ ID NO: 396960
  chr5:29296855-29296975
  hypo

SEQ ID NO: 404622 - DNA, 32 bp, Homo sapiens; identical to SEQ ID NO: 210129
  chr5:30864345-30864377
  hypo

SEQ ID NO: 404623 - DNA, 46 bp, Homo sapiens; identical to SEQ ID NO: 254697
  chr5:31599717-31599763
  hypo

SEQ ID NO: 404624 - DNA, 31 bp, Homo sapiens; identical to SEQ ID NO: 210130
  chr5:31670494-31670525
  hypo

SEQ ID NO: 404625 - DNA, 31 bp, Homo sapiens; identical to SEQ ID NO: 210131
  chr5:31724694-31724725
  hypo

SEQ ID NO: 404626 - DNA, 42 bp, Homo sapiens; identical to SEQ ID NO: 254703
  chr5:31797549-31797591
  hypo

SEQ ID NO: 404627 - DNA, 41 bp, Homo sapiens; identical to SEQ ID NO: 254704
  chr5:31797711-31797752
  hypo

SEQ ID NO: 404628 - DNA, 57 bp, Homo sapiens; identical to SEQ ID NO: 210133
  chr5:31908394-31908451
  hypo

SEQ ID NO: 404629 - DNA, 228 bp, Homo sapiens; identical to SEQ ID NO: 210136
  chr5:32445349-32445577
  hypo

SEQ ID NO: 404630 - DNA, 88 bp, Homo sapiens; identical to SEQ ID NO: 254716
  chr5:32640983-32641071
  hypo

SEQ ID NO: 404631 - DNA, 72 bp, Homo sapiens; identical to SEQ ID NO: 282839
  chr5:32713505-32713577
  hypo

SEQ ID NO: 404632 - DNA, 37 bp, Homo sapiens; identical to SEQ ID NO: 254717
  chr5:32754968-32755005
  hypo

SEQ ID NO: 404633 - DNA, 37 bp, Homo sapiens; identical to SEQ ID NO: 254718
  chr5:32755245-32755282
  hypo

SEQ ID NO: 404634 - DNA, 359 bp, Homo sapiens; identical to SEQ ID NO: 210140
  chr5:32782525-32782884
  hypo

SEQ ID NO: 404635 - DNA, 326 bp, Homo sapiens; identical to SEQ ID NO: 254723
  chr5:32934066-32934392
  hypo

SEQ ID NO: 404636 - DNA, 38 bp, Homo sapiens; identical to SEQ ID NO: 210143
  chr5:33311279-33311317
  hypo

SEQ ID NO: 404637 - DNA, 179 bp, Homo sapiens; identical to SEQ ID NO: 210144
  chr5:33502053-33502232
  hypo

SEQ ID NO: 404638 - DNA, 40 bp, Homo sapiens; identical to SEQ ID NO: 210145
  chr5:33509454-33509494
  hypo

SEQ ID NO: 404639 - DNA, 119 bp, Homo sapiens; identical to SEQ ID NO: 254732
  chr5:33530561-33530680
  hypo

SEQ ID NO: 404640 - DNA, 91 bp, Homo sapiens; identical to SEQ ID NO: 254735
  chr5:34147860-34147951
  hypo

SEQ ID NO: 404641 - DNA, 39 bp, Homo sapiens; identical to SEQ ID NO: 254736
  chr5:34440316-34440355
  hypo

SEQ ID NO: 404642 - DNA, 163 bp, Homo sapiens; identical to SEQ ID NO: 254741
  chr5:34591003-34591166
  hypo

SEQ ID NO: 404643 - DNA, 33 bp, Homo sapiens; identical to SEQ ID NO: 254742
  chr5:34736210-34736243
  hypo

SEQ ID NO: 404644 - DNA, 218 bp, Homo sapiens; identical to SEQ ID NO: 254744
  chr5:36035944-36036162
  hypo

SEQ ID NO: 404645 - DNA, 147 bp, Homo sapiens; identical to SEQ ID NO: 254745
  chr5:36526936-36527083
  hypo

SEQ ID NO: 404646 - DNA, 42 bp, Homo sapiens; identical to SEQ ID NO: 254746
  chr5:37022498-37022540
  hypo

SEQ ID NO: 404647 - DNA, 79 bp, Homo sapiens; identical to SEQ ID NO: 254747
  chr5:37042504-37042583
  hypo

SEQ ID NO: 404648 - DNA, 106 bp, Homo sapiens; identical to SEQ ID NO: 254748
  chr5:37052539-37052645
  hypo

SEQ ID NO: 404649 - DNA, 76 bp, Homo sapiens; identical to SEQ ID NO: 254749
  chr5:37064066-37064142
  hypo

SEQ ID NO: 404650 - DNA, 36 bp, Homo sapiens; identical to SEQ ID NO: 254750
  chr5:37082175-37082211
  hypo

SEQ ID NO: 404651 - DNA, 38 bp, Homo sapiens; identical to SEQ ID NO: 254753
  chr5:37338512-37338550
  hypo

SEQ ID NO: 404652 - DNA, 37 bp, Homo sapiens; identical to SEQ ID NO: 254754
  chr5:37338790-37338827
  hypo

SEQ ID NO: 404653 - DNA, 65 bp, Homo sapiens; identical to SEQ ID NO: 254756
  chr5:37806566-37806631
  hypo

SEQ ID NO: 404654 - DNA, 31 bp, Homo sapiens; identical to SEQ ID NO: 254758
  chr5:38631851-38631882
  hypo

SEQ ID NO: 404655 - DNA, 42 bp, Homo sapiens; identical to SEQ ID NO: 210150
  chr5:39053667-39053709
  hypo

SEQ ID NO: 404656 - DNA, 87 bp, Homo sapiens; identical to SEQ ID NO: 254763
  chr5:39576392-39576479
  hypo

SEQ ID NO: 404657 - DNA, 228 bp, Homo sapiens; identical to SEQ ID NO: 254764
  chr5:39665680-39665908
  hypo

SEQ ID NO: 404658 - DNA, 369 bp, Homo sapiens; identical to SEQ ID NO: 254765
  chr5:39721486-39721855
  hypo

SEQ ID NO: 404659 - DNA, 129 bp, Homo sapiens; identical to SEQ ID NO: 210152
  chr5:39740632-39740761
  hypo

SEQ ID NO: 404660 - DNA, 223 bp, Homo sapiens; identical to SEQ ID NO: 210153
  chr5:39808822-39809045
  hypo

SEQ ID NO: 404661 - DNA, 42 bp, Homo sapiens; identical to SEQ ID NO: 254772
  chr5:40823270-40823312
  hypo

SEQ ID NO: 404662 - DNA, 39 bp, Homo sapiens; identical to SEQ ID NO: 210158
  chr5:41992156-41992195
  hypo

SEQ ID NO: 404663 - DNA, 81 bp, Homo sapiens; identical to SEQ ID NO: 254777
  chr5:42140523-42140604
  hypo

SEQ ID NO: 404664 - DNA, 36 bp, Homo sapiens; identical to SEQ ID NO: 210160
  chr5:42476009-42476045
  hypo

SEQ ID NO: 404665 - DNA, 93 bp, Homo sapiens; identical to SEQ ID NO: 254782
  chr5:42697695-42697788
  hypo

SEQ ID NO: 404666 - DNA, 34 bp, Homo sapiens; identical to SEQ ID NO: 254783
  chr5:42760113-42760147
  hypo

SEQ ID NO: 404667 - DNA, 34 bp, Homo sapiens; identical to SEQ ID NO: 254786
  chr5:43069386-43069420
  hypo

SEQ ID NO: 404668 - DNA, 43 bp, Homo sapiens; identical to SEQ ID NO: 254787
  chr5:43120111-43120154
  hypo

SEQ ID NO: 404669 - DNA, 89 bp, Homo sapiens; identical to SEQ ID NO: 254791
  chr5:43387666-43387755
  hypo

SEQ ID NO: 404670 - DNA, 34 bp, Homo sapiens; identical to SEQ ID NO: 254792
  chr5:43850518-43850552
  hypo

SEQ ID NO: 404671 - DNA, 44 bp, Homo sapiens; identical to SEQ ID NO: 210167
  chr5:45225672-45225716
  hypo

SEQ ID NO: 404672 - DNA, 33 bp, Homo sapiens; identical to SEQ ID NO: 210169
  chr5:49903305-49903338
  hypo

SEQ ID NO: 404673 - DNA, 46 bp, Homo sapiens; identical to SEQ ID NO: 254802
  chr5:53241084-53241130
  hypo

SEQ ID NO: 404674 - DNA, 139 bp, Homo sapiens; identical to SEQ ID NO: 210171
  chr5:54069074-54069213
  hypo

SEQ ID NO: 404675 - DNA, 32 bp, Homo sapiens; identical to SEQ ID NO: 210174
  chr5:54734440-54734472
  hypo

SEQ ID NO: 404676 - DNA, 32 bp, Homo sapiens; identical to SEQ ID NO: 254808
  chr5:54734712-54734744
  hypo

SEQ ID NO: 404677 - DNA, 40 bp, Homo sapiens; identical to SEQ ID NO: 254810
  chr5:54952935-54952975
  hypo

SEQ ID NO: 404678 - DNA, 165 bp, Homo sapiens; identical to SEQ ID NO: 254812
  chr5:55229393-55229558
  hypo

SEQ ID NO: 404679 - DNA, 95 bp, Homo sapiens; identical to SEQ ID NO: 304429
  chr5:55309217-55309312
  hypo

SEQ ID NO: 404680 - DNA, 34 bp, Homo sapiens; identical to SEQ ID NO: 210175
  chr5:55330547-55330581
  hypo

SEQ ID NO: 404681 - DNA, 33 bp, Homo sapiens; identical to SEQ ID NO: 210176
  chr5:55330821-55330854
  hypo

SEQ ID NO: 404682 - DNA, 94 bp, Homo sapiens; identical to SEQ ID NO: 254816
  chr5:55379300-55379394
  hypo

SEQ ID NO: 404683 - DNA, 31 bp, Homo sapiens; identical to SEQ ID NO: 254817
  chr5:55705173-55705204
  hypo

SEQ ID NO: 404684 - DNA, 133 bp, Homo sapiens; identical to SEQ ID NO: 254818
  chr5:55789717-55789850
  hypo

SEQ ID NO: 404685 - DNA, 43 bp, Homo sapiens; identical to SEQ ID NO: 254820
  chr5:56487659-56487702
  hypo

SEQ ID NO: 404686 - DNA, 630 bp, Homo sapiens; identical to SEQ ID NO: 397000
  chr5:57755330-57755960
  hypo

SEQ ID NO: 404687 - DNA, 619 bp, Homo sapiens; identical to SEQ ID NO: 222614
  chr5:57755985-57756604
  hypo

SEQ ID NO: 404688 - DNA, 203 bp, Homo sapiens; identical to SEQ ID NO: 199868
  chr5:60626141-60626344
  hypo

SEQ ID NO: 404689 - DNA, 45 bp, Homo sapiens; identical to SEQ ID NO: 210181
  chr5:60676638-60676683
  hypo

SEQ ID NO: 404690 - DNA, 200 bp, Homo sapiens; identical to SEQ ID NO: 210182
  chr5:60821632-60821832
  hypo

SEQ ID NO: 404691 - DNA, 39 bp, Homo sapiens; identical to SEQ ID NO: 254829
  chr5:61704349-61704388
  hypo

SEQ ID NO: 404692 - DNA, 342 bp, Homo sapiens; identical to SEQ ID NO: 254831
  chr5:61910224-61910566
  hypo

SEQ ID NO: 404693 - DNA, 42 bp, Homo sapiens; identical to SEQ ID NO: 254832
  chr5:62080933-62080975
  hypo

SEQ ID NO: 404694 - DNA, 359 bp, Homo sapiens; identical to SEQ ID NO: 388208
  chr5:63255343-63255702
  hypo

SEQ ID NO: 404695 - DNA, 156 bp, Homo sapiens; identical to SEQ ID NO: 254833
  chr5:64103541-64103697
  hypo

SEQ ID NO: 404696 - DNA, 138 bp, Homo sapiens; identical to SEQ ID NO: 210184
  chr5:64339982-64340120
  hypo

SEQ ID NO: 404697 - DNA, 39 bp, Homo sapiens; identical to SEQ ID NO: 254835
  chr5:64516272-64516311
  hypo

SEQ ID NO: 404698 - DNA, 38 bp, Homo sapiens; identical to SEQ ID NO: 254836
  chr5:64516551-64516589
  hypo

SEQ ID NO: 404699 - DNA, 41 bp, Homo sapiens; identical to SEQ ID NO: 210185
  chr5:65020927-65020968
  hypo

SEQ ID NO: 404700 - DNA, 77 bp, Homo sapiens; identical to SEQ ID NO: 210187
  chr5:65465907-65465984
  hypo

SEQ ID NO: 404701 - DNA, 42 bp, Homo sapiens; identical to SEQ ID NO: 254840
  chr5:65505217-65505259
  hypo

SEQ ID NO: 404702 - DNA, 205 bp, Homo sapiens; identical to SEQ ID NO: 210188
  chr5:65988337-65988542
  hypo

SEQ ID NO: 404703 - DNA, 186 bp, Homo sapiens; identical to SEQ ID NO: 210189
  chr5:66441263-66441449
  hypo

SEQ ID NO: 404704 - DNA, 119 bp, Homo sapiens; identical to SEQ ID NO: 254843
  chr5:66448539-66448658
  hypo

SEQ ID NO: 404705 - DNA, 761 bp, Homo sapiens; identical to SEQ ID NO: 254845
  chr5:66460859-66461620
  hypo

SEQ ID NO: 404706 - DNA, 34 bp, Homo sapiens; identical to SEQ ID NO: 210190
  chr5:66911431-66911465
  hypo

SEQ ID NO: 404707 - DNA, 162 bp, Homo sapiens; identical to SEQ ID NO: 210191
  chr5:66938604-66938766
  hypo

SEQ ID NO: 404708 - DNA, 36 bp, Homo sapiens; identical to SEQ ID NO: 210192
  chr5:67015513-67015549
  hypo

SEQ ID NO: 404709 - DNA, 35 bp, Homo sapiens; identical to SEQ ID NO: 254852
  chr5:67021470-67021505
  hypo

SEQ ID NO: 404710 - DNA, 42 bp, Homo sapiens; identical to SEQ ID NO: 254861
  chr5:67845323-67845365
  hypo

SEQ ID NO: 404711 - DNA, 43 bp, Homo sapiens; identical to SEQ ID NO: 254864
  chr5:68363914-68363957
  hypo

SEQ ID NO: 404712 - DNA, 107 bp, Homo sapiens; identical to SEQ ID NO: 254869
  chr5:70958355-70958462
  hypo

SEQ ID NO: 404713 - DNA, 252 bp, Homo sapiens; identical to SEQ ID NO: 254877
  chr5:72292520-72292772
  hypo

SEQ ID NO: 404714 - DNA, 196 bp, Homo sapiens; identical to SEQ ID NO: 254879
  chr5:72980654-72980850
  hypo

SEQ ID NO: 404715 - DNA, 194 bp, Homo sapiens; identical to SEQ ID NO: 210201
  chr5:73081113-73081307
  hypo

SEQ ID NO: 404716 - DNA, 41 bp, Homo sapiens; identical to SEQ ID NO: 254882
  chr5:73192671-73192712
  hypo

SEQ ID NO: 404717 - DNA, 136 bp, Homo sapiens; identical to SEQ ID NO: 254884
  chr5:73228902-73229038
  hypo

SEQ ID NO: 404718 - DNA, 176 bp, Homo sapiens; identical to SEQ ID NO: 254886
  chr5:73623643-73623819
  hypo

SEQ ID NO: 404719 - DNA, 31 bp, Homo sapiens; identical to SEQ ID NO: 254889
  chr5:73687766-73687797
  hypo

SEQ ID NO: 404720 - DNA, 191 bp, Homo sapiens; identical to SEQ ID NO: 254890
  chr5:73855841-73856032
  hypo

SEQ ID NO: 404721 - DNA, 202 bp, Homo sapiens; identical to SEQ ID NO: 397027
  chr5:73935786-73935988
  hypo

SEQ ID NO: 404722 - DNA, 516 bp, Homo sapiens; identical to SEQ ID NO: 41639
  chr5:73936032-73936548
  hypo

SEQ ID NO: 404723 - DNA, 285 bp, Homo sapiens; identical to SEQ ID NO: 283039
  chr5:73936774-73937059
  hypo

SEQ ID NO: 404724 - DNA, 103 bp, Homo sapiens; identical to SEQ ID NO: 199897
  chr5:74162616-74162719
  hypo

SEQ ID NO: 404725 - DNA, 39 bp, Homo sapiens; identical to SEQ ID NO: 254892
  chr5:74628696-74628735
  hypo

SEQ ID NO: 404726 - DNA, 37 bp, Homo sapiens; identical to SEQ ID NO: 210213
  chr5:74652649-74652686
  hypo

SEQ ID NO: 404727 - DNA, 89 bp, Homo sapiens; identical to SEQ ID NO: 254895
  chr5:74753808-74753897
  hypo

SEQ ID NO: 404728 - DNA, 37 bp, Homo sapiens; identical to SEQ ID NO: 210218
  chr5:76328105-76328142
  hypo

SEQ ID NO: 404729 - DNA, 169 bp, Homo sapiens; identical to SEQ ID NO: 210219
  chr5:76372312-76372481
  hypo

SEQ ID NO: 404730 - DNA, 197 bp, Homo sapiens; identical to SEQ ID NO: 254901
  chr5:76399986-76400183
  hypo

SEQ ID NO: 404731 - DNA, 118 bp, Homo sapiens; identical to SEQ ID NO: 254903
  chr5:77288993-77289111
  hypo

SEQ ID NO: 404732 - DNA, 85 bp, Homo sapiens; identical to SEQ ID NO: 254912
  chr5:77912255-77912340
  hypo

SEQ ID NO: 404733 - DNA, 80 bp, Homo sapiens; identical to SEQ ID NO: 210228
  chr5:78469179-78469259
  hypo

SEQ ID NO: 404734 - DNA, 36 bp, Homo sapiens; identical to SEQ ID NO: 210229
  chr5:78882208-78882244
  hypo

SEQ ID NO: 404735 - DNA, 214 bp, Homo sapiens; identical to SEQ ID NO: 254925
  chr5:78986242-78986456
  hypo

SEQ ID NO: 404736 - DNA, 86 bp, Homo sapiens; identical to SEQ ID NO: 254928
  chr5:79438045-79438131
  hypo

SEQ ID NO: 404737 - DNA, 145 bp, Homo sapiens; identical to SEQ ID NO: 222640
  chr5:79551298-79551443
  hypo

SEQ ID NO: 404738 - DNA, 78 bp, Homo sapiens; identical to SEQ ID NO: 254931
  chr5:79552929-79553007
  hypo

SEQ ID NO: 404739 - DNA, 39 bp, Homo sapiens; identical to SEQ ID NO: 254935
  chr5:79786095-79786134
  hypo

SEQ ID NO: 404740 - DNA, 163 bp, Homo sapiens; identical to SEQ ID NO: 210236
  chr5:79986401-79986564
  hypo

SEQ ID NO: 404741 - DNA, 80 bp, Homo sapiens; identical to SEQ ID NO: 210237
  chr5:80076659-80076739
  hypo

SEQ ID NO: 404742 - DNA, 183 bp, Homo sapiens; identical to SEQ ID NO: 210239
  chr5:80652824-80653007
  hypo

SEQ ID NO: 404743 - DNA, 101 bp, Homo sapiens; identical to SEQ ID NO: 254942
  chr5:80717292-80717393
  hypo

SEQ ID NO: 404744 - DNA, 34 bp, Homo sapiens; identical to SEQ ID NO: 254943
  chr5:80728272-80728306
  hypo

SEQ ID NO: 404745 - DNA, 152 bp, Homo sapiens; identical to SEQ ID NO: 254944
  chr5:81058593-81058745
  hypo

SEQ ID NO: 404746 - DNA, 42 bp, Homo sapiens; identical to SEQ ID NO: 254945
  chr5:81067109-81067151
  hypo

SEQ ID NO: 404747 - DNA, 75 bp, Homo sapiens; identical to SEQ ID NO: 254947
  chr5:82808025-82808100
  hypo

SEQ ID NO: 404748 - DNA, 550 bp, Homo sapiens; identical to SEQ ID NO: 254949
  chr5:86547819-86548369
  hypo

SEQ ID NO: 404749 - DNA, 38 bp, Homo sapiens; identical to SEQ ID NO: 254953
  chr5:88161980-88162018
  hypo

SEQ ID NO: 404750 - DNA, 264 bp, Homo sapiens; identical to SEQ ID NO: 254954
  chr5:88233030-88233294
  hypo

SEQ ID NO: 404751 - DNA, 34 bp, Homo sapiens; identical to SEQ ID NO: 210242
  chr5:90257315-90257349
  hypo

SEQ ID NO: 404752 - DNA, 35 bp, Homo sapiens; identical to SEQ ID NO: 254958
  chr5:93032774-93032809
  hypo

SEQ ID NO: 404753 - DNA, 100 bp, Homo sapiens; identical to SEQ ID NO: 254959
  chr5:93076896-93076996
  hypo

SEQ ID NO: 404754 - DNA, 144 bp, Homo sapiens; identical to SEQ ID NO: 210243
  chr5:93077276-93077420
  hypo

SEQ ID NO: 404755 - DNA, 37 bp, Homo sapiens; identical to SEQ ID NO: 210245
  chr5:94762731-94762768
  hypo

SEQ ID NO: 404756 - DNA, 94 bp, Homo sapiens; identical to SEQ ID NO: 210246
  chr5:94981773-94981867
  hypo

SEQ ID NO: 404757 - DNA, 32 bp, Homo sapiens; identical to SEQ ID NO: 210247
  chr5:95290421-95290453
  hypo

SEQ ID NO: 404758 - DNA, 60 bp, Homo sapiens; identical to SEQ ID NO: 254975
  chr5:96378907-96378967
  hypo

SEQ ID NO: 404759 - DNA, 55 bp, Homo sapiens; identical to SEQ ID NO: 254976
  chr5:96397786-96397841
  hypo

SEQ ID NO: 404760 - DNA, 82 bp, Homo sapiens; identical to SEQ ID NO: 254978
  chr5:97912104-97912186
  hypo

SEQ ID NO: 404761 - DNA, 368 bp, Homo sapiens; identical to SEQ ID NO: 222647
  chr5:98109213-98109581
  hypo

SEQ ID NO: 404762 - DNA, 263 bp, Homo sapiens; identical to SEQ ID NO: 222648
  chr5:98109927-98110190
  hypo

SEQ ID NO: 404763 - DNA, 76 bp, Homo sapiens; identical to SEQ ID NO: 210258
  chr5:98242969-98243045
  hypo

SEQ ID NO: 404764 - DNA, 518 bp, Homo sapiens; identical to SEQ ID NO: 222651
  chr5:102201407-102201925
  hypo

SEQ ID NO: 404765 - DNA, 80 bp, Homo sapiens; identical to SEQ ID NO: 254983
  chr5:103289777-103289857
  hypo

SEQ ID NO: 404766 - DNA, 102 bp, Homo sapiens; identical to SEQ ID NO: 199971
  chr5:107007963-107008065
  hypo

SEQ ID NO: 404767 - DNA, 215 bp, Homo sapiens; identical to SEQ ID NO: 254985
  chr5:108586386-108586601
  hypo

SEQ ID NO: 404768 - DNA, 38 bp, Homo sapiens; identical to SEQ ID NO: 210265
  chr5:108730038-108730076
  hypo

SEQ ID NO: 404769 - DNA, 42 bp, Homo sapiens; identical to SEQ ID NO: 254989
  chr5:109040408-109040450
  hypo

SEQ ID NO: 404770 - DNA, 289 bp, Homo sapiens; identical to SEQ ID NO: 210267
  chr5:109162076-109162365
  hypo

SEQ ID NO: 404771 - DNA, 110 bp, Homo sapiens; identical to SEQ ID NO: 388238
  chr5:110848376-110848486
  hypo

SEQ ID NO: 404772 - DNA, 78 bp, Homo sapiens; identical to SEQ ID NO: 283200
  chr5:111093930-111094008
  hypo

SEQ ID NO: 404773 - DNA, 123 bp, Homo sapiens; identical to SEQ ID NO: 254992
  chr5:111675709-111675832
  hypo

SEQ ID NO: 404774 - DNA, 180 bp, Homo sapiens; identical to SEQ ID NO: 283224
  chr5:114938164-114938344
  hypo

SEQ ID NO: 404775 - DNA, 42 bp, Homo sapiens; identical to SEQ ID NO: 391303
  chr5:115783684-115783726
  hypo

SEQ ID NO: 404776 - DNA, 38 bp, Homo sapiens; identical to SEQ ID NO: 254997
  chr5:116177882-116177920
  hypo

SEQ ID NO: 404777 - DNA, 33 bp, Homo sapiens; identical to SEQ ID NO: 254998
  chr5:116238695-116238728
  hypo

SEQ ID NO: 404778 - DNA, 41 bp, Homo sapiens; identical to SEQ ID NO: 255002
  chr5:119517817-119517858
  hypo

SEQ ID NO: 404779 - DNA, 131 bp, Homo sapiens; identical to SEQ ID NO: 255003
  chr5:121187431-121187562
  hypo

SEQ ID NO: 404780 - DNA, 165 bp, Homo sapiens; identical to SEQ ID NO: 255005
  chr5:121874457-121874622
  hypo

SEQ ID NO: 404781 - DNA, 41 bp, Homo sapiens; identical to SEQ ID NO: 255007
  chr5:122150760-122150801
  hypo

SEQ ID NO: 404782 - DNA, 54 bp, Homo sapiens; identical to SEQ ID NO: 210278
  chr5:122152701-122152755
  hypo

SEQ ID NO: 404783 - DNA, 38 bp, Homo sapiens; identical to SEQ ID NO: 255010
  chr5:122189087-122189125
  hypo

SEQ ID NO: 404784 - DNA, 88 bp, Homo sapiens; identical to SEQ ID NO: 255012
  chr5:123929400-123929488
  hypo

SEQ ID NO: 404785 - DNA, 200 bp, Homo sapiens; identical to SEQ ID NO: 210284
  chr5:126073559-126073759
  hypo

SEQ ID NO: 404786 - DNA, 152 bp, Homo sapiens; identical to SEQ ID NO: 210285
  chr5:126193333-126193485
  hypo

SEQ ID NO: 404787 - DNA, 42 bp, Homo sapiens; identical to SEQ ID NO: 255020
  chr5:127808517-127808559
  hypo

SEQ ID NO: 404788 - DNA, 42 bp, Homo sapiens; identical to SEQ ID NO: 210292
  chr5:130723958-130724000
  hypo

SEQ ID NO: 404789 - DNA, 55 bp, Homo sapiens; identical to SEQ ID NO: 255029
  chr5:131410606-131410661
  hypo

SEQ ID NO: 404790 - DNA, 82 bp, Homo sapiens; identical to SEQ ID NO: 255030
  chr5:131517613-131517695
  hypo

SEQ ID NO: 404791 - DNA, 57 bp, Homo sapiens; identical to SEQ ID NO: 210298
  chr5:131608260-131608317
  hypo

SEQ ID NO: 404792 - DNA, 60 bp, Homo sapiens; identical to SEQ ID NO: 255034
  chr5:131628975-131629035
  hypo

SEQ ID NO: 404793 - DNA, 52 bp, Homo sapiens; identical to SEQ ID NO: 255035
  chr5:131629083-131629135
  hypo

SEQ ID NO: 404794 - DNA, 136 bp, Homo sapiens; identical to SEQ ID NO: 255036
  chr5:131701219-131701355
  hypo

SEQ ID NO: 404795 - DNA, 131 bp, Homo sapiens; identical to SEQ ID NO: 210301
  chr5:131725264-131725395
  hypo

SEQ ID NO: 404796 - DNA, 56 bp, Homo sapiens; identical to SEQ ID NO: 304706
  chr5:131787118-131787174
  hypo

SEQ ID NO: 404797 - DNA, 91 bp, Homo sapiens; identical to SEQ ID NO: 304707
  chr5:131787204-131787295
  hypo

SEQ ID NO: 404798 - DNA, 159 bp, Homo sapiens; identical to SEQ ID NO: 210304
  chr5:132001670-132001829
  hypo

SEQ ID NO: 404799 - DNA, 316 bp, Homo sapiens; identical to SEQ ID NO: 255044
  chr5:132015482-132015798
  hypo

SEQ ID NO: 404800 - DNA, 219 bp, Homo sapiens; identical to SEQ ID NO: 255046
  chr5:132095767-132095986
  hypo

SEQ ID NO: 404801 - DNA, 42 bp, Homo sapiens; identical to SEQ ID NO: 255050
  chr5:132585271-132585313
  hypo

SEQ ID NO: 404802 - DNA, 206 bp, Homo sapiens; identical to SEQ ID NO: 255052
  chr5:132654500-132654706
  hypo

SEQ ID NO: 404803 - DNA, 92 bp, Homo sapiens; identical to SEQ ID NO: 210310
  chr5:133240405-133240497
  hypo

SEQ ID NO: 404804 - DNA, 42 bp, Homo sapiens; identical to SEQ ID NO: 255055
  chr5:133280965-133281007
  hypo

SEQ ID NO: 404805 - DNA, 90 bp, Homo sapiens; identical to SEQ ID NO: 210312
  chr5:133457288-133457378
  hypo

SEQ ID NO: 404806 - DNA, 141 bp, Homo sapiens; identical to SEQ ID NO: 255060
  chr5:133458996-133459137
  hypo

SEQ ID NO: 404807 - DNA, 207 bp, Homo sapiens; identical to SEQ ID NO: 210313
  chr5:133459375-133459582
  hypo

SEQ ID NO: 404808 - DNA, 77 bp, Homo sapiens; identical to SEQ ID NO: 210314
  chr5:133464194-133464271
  hypo

SEQ ID NO: 404809 - DNA, 207 bp, Homo sapiens; identical to SEQ ID NO: 210315
  chr5:133465710-133465917
  hypo

SEQ ID NO: 404810 - DNA, 379 bp, Homo sapiens; identical to SEQ ID NO: 255065
  chr5:133703366-133703745
  hypo

SEQ ID NO: 404811 - DNA, 32 bp, Homo sapiens; identical to SEQ ID NO: 255066
  chr5:133730848-133730880
  hypo

SEQ ID NO: 404812 - DNA, 240 bp, Homo sapiens; identical to SEQ ID NO: 255067
  chr5:133819200-133819440
  hypo

SEQ ID NO: 404813 - DNA, 266 bp, Homo sapiens; identical to SEQ ID NO: 255069
  chr5:133845348-133845614
  hypo

SEQ ID NO: 404814 - DNA, 61 bp, Homo sapiens; identical to SEQ ID NO: 255070
  chr5:133887785-133887846
  hypo

SEQ ID NO: 404815 - DNA, 318 bp, Homo sapiens; identical to SEQ ID NO: 210319
  chr5:133907414-133907732
  hypo

SEQ ID NO: 404816 - DNA, 135 bp, Homo sapiens; identical to SEQ ID NO: 255072
  chr5:133914459-133914594
  hypo

SEQ ID NO: 404817 - DNA, 91 bp, Homo sapiens; identical to SEQ ID NO: 255074
  chr5:134202026-134202117
  hypo

SEQ ID NO: 404818 - DNA, 85 bp, Homo sapiens; identical to SEQ ID NO: 255078
  chr5:134273246-134273331
  hypo

SEQ ID NO: 404819 - DNA, 166 bp, Homo sapiens; identical to SEQ ID NO: 210322
  chr5:134303558-134303724
  hypo

SEQ ID NO: 404820 - DNA, 81 bp, Homo sapiens; identical to SEQ ID NO: 255082
  chr5:134411890-134411971
  hypo

SEQ ID NO: 404821 - DNA, 223 bp, Homo sapiens; identical to SEQ ID NO: 210324
  chr5:134436703-134436926
  hypo

SEQ ID NO: 404822 - DNA, 186 bp, Homo sapiens; identical to SEQ ID NO: 210325
  chr5:134453700-134453886
  hypo

SEQ ID NO: 404823 - DNA, 42 bp, Homo sapiens; identical to SEQ ID NO: 255085
  chr5:134462416-134462458
  hypo

SEQ ID NO: 404824 - DNA, 219 bp, Homo sapiens; identical to SEQ ID NO: 200039
  chr5:134463605-134463824
  hypo

SEQ ID NO: 404825 - DNA, 154 bp, Homo sapiens; identical to SEQ ID NO: 210327
  chr5:134513710-134513864
  hypo

SEQ ID NO: 404826 - DNA, 84 bp, Homo sapiens; identical to SEQ ID NO: 210328
  chr5:134582958-134583042
  hypo

SEQ ID NO: 404827 - DNA, 76 bp, Homo sapiens; identical to SEQ ID NO: 210329
  chr5:134583162-134583238
  hypo

SEQ ID NO: 404828 - DNA, 152 bp, Homo sapiens; identical to SEQ ID NO: 255093
  chr5:134666319-134666471
  hypo

SEQ ID NO: 404829 - DNA, 38 bp, Homo sapiens; identical to SEQ ID NO: 210331
  chr5:134673488-134673526
  hypo

SEQ ID NO: 404830 - DNA, 237 bp, Homo sapiens; identical to SEQ ID NO: 255096
  chr5:135120902-135121139
  hypo

SEQ ID NO: 404831 - DNA, 749 bp, Homo sapiens; identical to SEQ ID NO: 210334
  chr5:135692313-135693062
  hypo

SEQ ID NO: 404832 - DNA, 220 bp, Homo sapiens; identical to SEQ ID NO: 255103
  chr5:137721787-137722007
  hypo

SEQ ID NO: 404833 - DNA, 77 bp, Homo sapiens; identical to SEQ ID NO: 255104
  chr5:137727077-137727154
  hypo

SEQ ID NO: 404834 - DNA, 161 bp, Homo sapiens; identical to SEQ ID NO: 283341
  chr5:137774493-137774654
  hypo

SEQ ID NO: 404835 - DNA, 141 bp, Homo sapiens; identical to SEQ ID NO: 255106
  chr5:137791022-137791163
  hypo

SEQ ID NO: 404836 - DNA, 466 bp, Homo sapiens; identical to SEQ ID NO: 210339
  chr5:137803075-137803541
  hypo

SEQ ID NO: 404837 - DNA, 42 bp, Homo sapiens; identical to SEQ ID NO: 255109
  chr5:137824665-137824707
  hypo

SEQ ID NO: 404838 - DNA, 96 bp, Homo sapiens; identical to SEQ ID NO: 210340
  chr5:137865653-137865749
  hypo

SEQ ID NO: 404839 - DNA, 252 bp, Homo sapiens; identical to SEQ ID NO: 222696
  chr5:138089667-138089919
  hypo

SEQ ID NO: 404840 - DNA, 35 bp, Homo sapiens; identical to SEQ ID NO: 255115
  chr5:138101350-138101385
  hypo

SEQ ID NO: 404841 - DNA, 33 bp, Homo sapiens; identical to SEQ ID NO: 210347
  chr5:138179955-138179988
  hypo

SEQ ID NO: 404842 - DNA, 67 bp, Homo sapiens; identical to SEQ ID NO: 255123
  chr5:138290872-138290939
  hypo

SEQ ID NO: 404843 - DNA, 251 bp, Homo sapiens; identical to SEQ ID NO: 255124
  chr5:138441364-138441615
  hypo

SEQ ID NO: 404844 - DNA, 1077 bp, Homo sapiens; identical to SEQ ID NO: 388254
  chr5:139016945-139018022
  hypo

SEQ ID NO: 404845 - DNA, 64 bp, Homo sapiens; identical to SEQ ID NO: 200058
  chr5:139039951-139040015
  hypo

SEQ ID NO: 404846 - DNA, 51 bp, Homo sapiens; identical to SEQ ID NO: 210354
  chr5:139060689-139060740
  hypo

SEQ ID NO: 404847 - DNA, 235 bp, Homo sapiens; identical to SEQ ID NO: 283363
  chr5:139143822-139144057
  hypo

SEQ ID NO: 404848 - DNA, 91 bp, Homo sapiens; identical to SEQ ID NO: 283367
  chr5:139283459-139283550
  hypo

SEQ ID NO: 404849 - DNA, 95 bp, Homo sapiens; identical to SEQ ID NO: 397135
  chr5:139284463-139284558
  hypo

SEQ ID NO: 404850 - DNA, 164 bp, Homo sapiens; identical to SEQ ID NO: 255138
  chr5:139633303-139633467
  hypo

SEQ ID NO: 404851 - DNA, 63 bp, Homo sapiens; identical to SEQ ID NO: 222706
  chr5:139725675-139725738
  hypo

SEQ ID NO: 404852 - DNA, 32 bp, Homo sapiens; identical to SEQ ID NO: 210360
  chr5:140088250-140088282
  hypo

SEQ ID NO: 404853 - DNA, 134 bp, Homo sapiens; identical to SEQ ID NO: 388260
  chr5:141030966-141031100
  hypo

SEQ ID NO: 404854 - DNA, 80 bp, Homo sapiens; identical to SEQ ID NO: 200078
  chr5:141031150-141031230
  hypo

SEQ ID NO: 404855 - DNA, 93 bp, Homo sapiens; identical to SEQ ID NO: 210367
  chr5:141052407-141052500
  hypo

SEQ ID NO: 404856 - DNA, 68 bp, Homo sapiens; identical to SEQ ID NO: 255148
  chr5:141072799-141072867
  hypo

SEQ ID NO: 404857 - DNA, 881 bp, Homo sapiens; identical to SEQ ID NO: 283402
  chr5:141257149-141258030
  hypo

SEQ ID NO: 404858 - DNA, 58 bp, Homo sapiens; identical to SEQ ID NO: 255151
  chr5:141295480-141295538
  hypo

SEQ ID NO: 404859 - DNA, 32 bp, Homo sapiens; identical to SEQ ID NO: 255153
  chr5:141468242-141468274
  hypo

SEQ ID NO: 404860 - DNA, 41 bp, Homo sapiens; identical to SEQ ID NO: 255154
  chr5:141581708-141581749
  hypo

SEQ ID NO: 404861 - DNA, 31 bp, Homo sapiens; identical to SEQ ID NO: 255155
  chr5:141610129-141610160
  hypo

SEQ ID NO: 404862 - DNA, 244 bp, Homo sapiens; identical to SEQ ID NO: 255156
  chr5:141663282-141663526
  hypo

SEQ ID NO: 404863 - DNA, 34 bp, Homo sapiens; identical to SEQ ID NO: 210370
  chr5:141674168-141674202
  hypo

SEQ ID NO: 404864 - DNA, 34 bp, Homo sapiens; identical to SEQ ID NO: 210371
  chr5:141674502-141674536
  hypo

SEQ ID NO: 404865 - DNA, 265 bp, Homo sapiens; identical to SEQ ID NO: 200082
  chr5:141704448-141704713
  hypo

SEQ ID NO: 404866 - DNA, 341 bp, Homo sapiens; identical to SEQ ID NO: 200084
  chr5:141736299-141736640
  hypo

SEQ ID NO: 404867 - DNA, 33 bp, Homo sapiens; identical to SEQ ID NO: 210375
  chr5:141803864-141803897
  hypo

SEQ ID NO: 404868 - DNA, 150 bp, Homo sapiens; identical to SEQ ID NO: 210376
  chr5:141850813-141850963
  hypo

SEQ ID NO: 404869 - DNA, 216 bp, Homo sapiens; identical to SEQ ID NO: 255166
  chr5:142552917-142553133
  hypo

SEQ ID NO: 404870 - DNA, 188 bp, Homo sapiens; identical to SEQ ID NO: 255167
  chr5:142623955-142624143
  hypo

SEQ ID NO: 404871 - DNA, 39 bp, Homo sapiens; identical to SEQ ID NO: 255169
  chr5:143182536-143182575
  hypo

SEQ ID NO: 404872 - DNA, 158 bp, Homo sapiens; identical to SEQ ID NO: 210380
  chr5:145379611-145379769
  hypo

SEQ ID NO: 404873 - DNA, 202 bp, Homo sapiens; identical to SEQ ID NO: 231499
  chr5:145718089-145718291
  hypo

SEQ ID NO: 404874 - DNA, 346 bp, Homo sapiens; identical to SEQ ID NO: 255175
  chr5:147040615-147040961
  hypo

SEQ ID NO: 404875 - DNA, 39 bp, Homo sapiens; identical to SEQ ID NO: 255178
  chr5:147439593-147439632
  hypo

SEQ ID NO: 404876 - DNA, 49 bp, Homo sapiens; identical to SEQ ID NO: 255187
  chr5:148754033-148754082
  hypo

SEQ ID NO: 404877 - DNA, 33 bp, Homo sapiens; identical to SEQ ID NO: 255188
  chr5:148772455-148772488
  hypo

SEQ ID NO: 404878 - DNA, 92 bp, Homo sapiens; identical to SEQ ID NO: 255189
  chr5:148772608-148772700
  hypo

SEQ ID NO: 404879 - DNA, 33 bp, Homo sapiens; identical to SEQ ID NO: 210388
  chr5:148868824-148868857
  hypo

SEQ ID NO: 404880 - DNA, 120 bp, Homo sapiens; identical to SEQ ID NO: 255192
  chr5:148925772-148925892
  hypo

SEQ ID NO: 404881 - DNA, 61 bp, Homo sapiens; identical to SEQ ID NO: 210389
  chr5:148980120-148980181
  hypo

SEQ ID NO: 404882 - DNA, 41 bp, Homo sapiens; identical to SEQ ID NO: 210390
  chr5:148981578-148981619
  hypo

SEQ ID NO: 404883 - DNA, 88 bp, Homo sapiens; identical to SEQ ID NO: 255196
  chr5:148982437-148982525
  hypo

SEQ ID NO: 404884 - DNA, 43 bp, Homo sapiens; identical to SEQ ID NO: 210393
  chr5:149006876-149006919
  hypo

SEQ ID NO: 404885 - DNA, 41 bp, Homo sapiens; identical to SEQ ID NO: 255203
  chr5:149262327-149262368
  hypo

SEQ ID NO: 404886 - DNA, 42 bp, Homo sapiens; identical to SEQ ID NO: 255207
  chr5:149405660-149405702
  hypo

SEQ ID NO: 404887 - DNA, 185 bp, Homo sapiens; identical to SEQ ID NO: 255209
  chr5:149497194-149497379
  hypo

SEQ ID NO: 404888 - DNA, 143 bp, Homo sapiens; identical to SEQ ID NO: 255211
  chr5:149502537-149502680
  hypo

SEQ ID NO: 404889 - DNA, 187 bp, Homo sapiens; identical to SEQ ID NO: 255214
  chr5:149573355-149573542
  hypo

SEQ ID NO: 404890 - DNA, 133 bp, Homo sapiens; identical to SEQ ID NO: 255215
  chr5:149637115-149637248
  hypo

SEQ ID NO: 404891 - DNA, 77 bp, Homo sapiens; identical to SEQ ID NO: 255220
  chr5:150014717-150014794
  hypo

SEQ ID NO: 404892 - DNA, 479 bp, Homo sapiens; identical to SEQ ID NO: 255228
  chr5:150945538-150946017
  hypo

SEQ ID NO: 404893 - DNA, 213 bp, Homo sapiens; identical to SEQ ID NO: 255232
  chr5:153734233-153734446
  hypo

SEQ ID NO: 404894 - DNA, 36 bp, Homo sapiens; identical to SEQ ID NO: 210406
  chr5:153798341-153798377
  hypo

SEQ ID NO: 404895 - DNA, 43 bp, Homo sapiens; identical to SEQ ID NO: 255239
  chr5:155438698-155438741
  hypo

SEQ ID NO: 404896 - DNA, 44 bp, Homo sapiens; identical to SEQ ID NO: 210415
  chr5:159669397-159669441
  hypo

SEQ ID NO: 404897 - DNA, 406 bp, Homo sapiens; identical to SEQ ID NO: 255255
  chr5:159686736-159687142
  hypo

SEQ ID NO: 404898 - DNA, 173 bp, Homo sapiens; identical to SEQ ID NO: 200134
  chr5:159826416-159826589
  hypo

SEQ ID NO: 404899 - DNA, 32 bp, Homo sapiens; identical to SEQ ID NO: 255259
  chr5:166374191-166374223
  hypo

SEQ ID NO: 404900 - DNA, 48 bp, Homo sapiens; identical to SEQ ID NO: 210422
  chr5:167671586-167671634
  hypo

SEQ ID NO: 404901 - DNA, 125 bp, Homo sapiens; identical to SEQ ID NO: 304981
  chr5:167689119-167689244
  hypo

SEQ ID NO: 404902 - DNA, 312 bp, Homo sapiens; identical to SEQ ID NO: 304982
  chr5:167689343-167689655
  hypo

SEQ ID NO: 404903 - DNA, 35 bp, Homo sapiens; identical to SEQ ID NO: 255267
  chr5:167698411-167698446
  hypo

SEQ ID NO: 404904 - DNA, 377 bp, Homo sapiens; identical to SEQ ID NO: 200144
  chr5:167718952-167719329
  hypo

SEQ ID NO: 404905 - DNA, 149 bp, Homo sapiens; identical to SEQ ID NO: 255268
  chr5:167729413-167729562
  hypo

SEQ ID NO: 404906 - DNA, 102 bp, Homo sapiens; identical to SEQ ID NO: 255269
  chr5:167825008-167825110
  hypo

SEQ ID NO: 404907 - DNA, 44 bp, Homo sapiens; identical to SEQ ID NO: 210427
  chr5:167897879-167897923
  hypo

SEQ ID NO: 404908 - DNA, 83 bp, Homo sapiens; identical to SEQ ID NO: 210430
  chr5:168184345-168184428
  hypo

SEQ ID NO: 404909 - DNA, 44 bp, Homo sapiens; identical to SEQ ID NO: 210431
  chr5:168189441-168189485
  hypo

SEQ ID NO: 404910 - DNA, 305 bp, Homo sapiens; identical to SEQ ID NO: 210434
  chr5:168199738-168200043
  hypo

SEQ ID NO: 404911 - DNA, 73 bp, Homo sapiens; identical to SEQ ID NO: 305000
  chr5:168250182-168250255
  hypo

SEQ ID NO: 404912 - DNA, 152 bp, Homo sapiens; identical to SEQ ID NO: 255285
  chr5:168296874-168297026
  hypo

SEQ ID NO: 404913 - DNA, 185 bp, Homo sapiens; identical to SEQ ID NO: 210441
  chr5:170883647-170883832
  hypo

SEQ ID NO: 404914 - DNA, 206 bp, Homo sapiens; identical to SEQ ID NO: 255295
  chr5:170972877-170973083
  hypo

SEQ ID NO: 404915 - DNA, 131 bp, Homo sapiens; identical to SEQ ID NO: 255296
  chr5:171095093-171095224
  hypo

SEQ ID NO: 404916 - DNA, 154 bp, Homo sapiens; identical to SEQ ID NO: 255297
  chr5:171209464-171209618
  hypo

SEQ ID NO: 404917 - DNA, 461 bp, Homo sapiens; identical to SEQ ID NO: 255298
  chr5:171351590-171352051
  hypo

SEQ ID NO: 404918 - DNA, 42 bp, Homo sapiens; identical to SEQ ID NO: 255307
  chr5:171534420-171534462
  hypo

SEQ ID NO: 404919 - DNA, 85 bp, Homo sapiens; identical to SEQ ID NO: 200154
  chr5:171541758-171541843
  hypo

SEQ ID NO: 404920 - DNA, 72 bp, Homo sapiens; identical to SEQ ID NO: 210447
  chr5:171769329-171769401
  hypo

SEQ ID NO: 404921 - DNA, 92 bp, Homo sapiens; identical to SEQ ID NO: 210448
  chr5:171777275-171777367
  hypo

SEQ ID NO: 404922 - DNA, 110 bp, Homo sapiens; identical to SEQ ID NO: 70538
  chr5:171808699-171808809
  hypo

SEQ ID NO: 404923 - DNA, 229 bp, Homo sapiens; identical to SEQ ID NO: 255314
  chr5:171846001-171846230
  hypo

SEQ ID NO: 404924 - DNA, 187 bp, Homo sapiens; identical to SEQ ID NO: 255317
  chr5:171867143-171867330
  hypo

SEQ ID NO: 404925 - DNA, 56 bp, Homo sapiens; identical to SEQ ID NO: 255318
  chr5:171890094-171890150
  hypo

SEQ ID NO: 404926 - DNA, 32 bp, Homo sapiens; identical to SEQ ID NO: 210452
  chr5:172062315-172062347
  hypo

SEQ ID NO: 404927 - DNA, 340 bp, Homo sapiens; identical to SEQ ID NO: 305048
  chr5:172074242-172074582
  hypo

SEQ ID NO: 404928 - DNA, 39 bp, Homo sapiens; identical to SEQ ID NO: 210455
  chr5:172105004-172105043
  hypo

SEQ ID NO: 404929 - DNA, 217 bp, Homo sapiens; identical to SEQ ID NO: 305053
  chr5:172123413-172123630
  hypo

SEQ ID NO: 404930 - DNA, 97 bp, Homo sapiens; identical to SEQ ID NO: 255333
  chr5:172307699-172307796
  hypo

SEQ ID NO: 404931 - DNA, 208 bp, Homo sapiens; identical to SEQ ID NO: 210458
  chr5:172346278-172346486
  hypo

SEQ ID NO: 404932 - DNA, 209 bp, Homo sapiens; identical to SEQ ID NO: 255336
  chr5:172366892-172367101
  hypo

SEQ ID NO: 404933 - DNA, 132 bp, Homo sapiens; identical to SEQ ID NO: 210459
  chr5:172367589-172367721
  hypo

SEQ ID NO: 404934 - DNA, 142 bp, Homo sapiens; identical to SEQ ID NO: 222748
  chr5:172386283-172386425
  hypo

SEQ ID NO: 404935 - DNA, 102 bp, Homo sapiens; identical to SEQ ID NO: 283553
  chr5:172444179-172444281
  hypo

SEQ ID NO: 404936 - DNA, 34 bp, Homo sapiens; identical to SEQ ID NO: 210461
  chr5:172454588-172454622
  hypo

SEQ ID NO: 404937 - DNA, 196 bp, Homo sapiens; identical to SEQ ID NO: 255342
  chr5:172765671-172765867
  hypo

SEQ ID NO: 404938 - DNA, 279 bp, Homo sapiens; identical to SEQ ID NO: 255343
  chr5:173180489-173180768
  hypo

SEQ ID NO: 404939 - DNA, 137 bp, Homo sapiens; identical to SEQ ID NO: 255344
  chr5:173383099-173383236
  hypo

SEQ ID NO: 404940 - DNA, 57 bp, Homo sapiens; identical to SEQ ID NO: 210466
  chr5:173415949-173416006
  hypo

SEQ ID NO: 404941 - DNA, 149 bp, Homo sapiens; identical to SEQ ID NO: 255352
  chr5:174350058-174350207
  hypo

SEQ ID NO: 404942 - DNA, 43 bp, Homo sapiens; identical to SEQ ID NO: 255353
  chr5:174667550-174667593
  hypo

SEQ ID NO: 404943 - DNA, 166 bp, Homo sapiens; identical to SEQ ID NO: 210469
  chr5:175139689-175139855
  hypo

SEQ ID NO: 404944 - DNA, 190 bp, Homo sapiens; identical to SEQ ID NO: 255358
  chr5:175387362-175387552
  hypo

SEQ ID NO: 404945 - DNA, 53 bp, Homo sapiens; identical to SEQ ID NO: 255359
  chr5:175559713-175559766
  hypo

SEQ ID NO: 404946 - DNA, 36 bp, Homo sapiens; identical to SEQ ID NO: 210473
  chr5:175871772-175871808
  hypo

SEQ ID NO: 404947 - DNA, 204 bp, Homo sapiens; identical to SEQ ID NO: 210474
  chr5:176003232-176003436
  hypo

SEQ ID NO: 404948 - DNA, 162 bp, Homo sapiens; identical to SEQ ID NO: 210475
  chr5:176012687-176012849
  hypo

SEQ ID NO: 404949 - DNA, 97 bp, Homo sapiens; identical to SEQ ID NO: 210478
  chr5:176066073-176066170
  hypo

SEQ ID NO: 404950 - DNA, 187 bp, Homo sapiens; identical to SEQ ID NO: 255374
  chr5:176081965-176082152
  hypo

SEQ ID NO: 404951 - DNA, 55 bp, Homo sapiens; identical to SEQ ID NO: 255375
  chr5:176175541-176175596
  hypo

SEQ ID NO: 404952 - DNA, 178 bp, Homo sapiens; identical to SEQ ID NO: 305110
  chr5:176295608-176295786
  hypo

SEQ ID NO: 404953 - DNA, 44 bp, Homo sapiens; identical to SEQ ID NO: 305111
  chr5:176295892-176295936
  hypo

SEQ ID NO: 404954 - DNA, 190 bp, Homo sapiens; identical to SEQ ID NO: 255382
  chr5:176520327-176520517
  hypo

SEQ ID NO: 404955 - DNA, 164 bp, Homo sapiens; identical to SEQ ID NO: 210481
  chr5:176544212-176544376
  hypo

SEQ ID NO: 404956 - DNA, 147 bp, Homo sapiens; identical to SEQ ID NO: 255386
  chr5:176602186-176602333
  hypo

SEQ ID NO: 404957 - DNA, 92 bp, Homo sapiens; identical to SEQ ID NO: 255388
  chr5:176613630-176613722
  hypo

SEQ ID NO: 404958 - DNA, 32 bp, Homo sapiens; identical to SEQ ID NO: 391379
  chr5:176663949-176663981
  hypo

SEQ ID NO: 404959 - DNA, 76 bp, Homo sapiens; identical to SEQ ID NO: 210485
  chr5:176674064-176674140
  hypo

SEQ ID NO: 404960 - DNA, 162 bp, Homo sapiens; identical to SEQ ID NO: 210486
  chr5:176694903-176695065
  hypo

SEQ ID NO: 404961 - DNA, 152 bp, Homo sapiens; identical to SEQ ID NO: 210487
  chr5:176757377-176757529
  hypo

SEQ ID NO: 404962 - DNA, 147 bp, Homo sapiens; identical to SEQ ID NO: 222763
  chr5:176830933-176831080
  hypo

SEQ ID NO: 404963 - DNA, 31 bp, Homo sapiens; identical to SEQ ID NO: 255397
  chr5:176865066-176865097
  hypo

SEQ ID NO: 404964 - DNA, 201 bp, Homo sapiens; identical to SEQ ID NO: 210498
  chr5:177482724-177482925
  hypo

SEQ ID NO: 404965 - DNA, 130 bp, Homo sapiens; identical to SEQ ID NO: 210499
  chr5:177548899-177549029
  hypo

SEQ ID NO: 404966 - DNA, 48 bp, Homo sapiens; identical to SEQ ID NO: 210500
  chr5:177637070-177637118
  hypo

SEQ ID NO: 404967 - DNA, 409 bp, Homo sapiens; identical to SEQ ID NO: 255416
  chr5:177651332-177651741
  hypo

SEQ ID NO: 404968 - DNA, 34 bp, Homo sapiens; identical to SEQ ID NO: 391384
  chr5:177653975-177654009
  hypo

SEQ ID NO: 404969 - DNA, 297 bp, Homo sapiens; identical to SEQ ID NO: 210503
  chr5:177708331-177708628
  hypo

SEQ ID NO: 404970 - DNA, 125 bp, Homo sapiens; identical to SEQ ID NO: 255421
  chr5:177737219-177737344
  hypo

SEQ ID NO: 404971 - DNA, 160 bp, Homo sapiens; identical to SEQ ID NO: 255424
  chr5:177778269-177778429
  hypo

SEQ ID NO: 404972 - DNA, 189 bp, Homo sapiens; identical to SEQ ID NO: 255425
  chr5:177794189-177794378
  hypo

SEQ ID NO: 404973 - DNA, 113 bp, Homo sapiens; identical to SEQ ID NO: 255430
  chr5:177853494-177853607
  hypo

SEQ ID NO: 404974 - DNA, 461 bp, Homo sapiens; identical to SEQ ID NO: 255431
  chr5:177862607-177863068
  hypo

SEQ ID NO: 404975 - DNA, 53 bp, Homo sapiens; identical to SEQ ID NO: 210506
  chr5:177875102-177875155
  hypo

SEQ ID NO: 404976 - DNA, 37 bp, Homo sapiens; identical to SEQ ID NO: 255434
  chr5:177882256-177882293
  hypo

SEQ ID NO: 404977 - DNA, 33 bp, Homo sapiens; identical to SEQ ID NO: 255436
  chr5:177883394-177883427
  hypo

SEQ ID NO: 404978 - DNA, 151 bp, Homo sapiens; identical to SEQ ID NO: 255439
  chr5:177961363-177961514
  hypo

SEQ ID NO: 404979 - DNA, 36 bp, Homo sapiens; identical to SEQ ID NO: 255440
  chr5:177964385-177964421
  hypo

SEQ ID NO: 404980 - DNA, 40 bp, Homo sapiens; identical to SEQ ID NO: 255441
  chr5:177969295-177969335
  hypo

SEQ ID NO: 404981 - DNA, 34 bp, Homo sapiens; identical to SEQ ID NO: 255447
  chr5:178113316-178113350
  hypo

SEQ ID NO: 404982 - DNA, 34 bp, Homo sapiens; identical to SEQ ID NO: 255448
  chr5:178113590-178113624
  hypo

SEQ ID NO: 404983 - DNA, 85 bp, Homo sapiens; identical to SEQ ID NO: 255451
  chr5:178196657-178196742
  hypo

SEQ ID NO: 404984 - DNA, 37 bp, Homo sapiens; identical to SEQ ID NO: 255453
  chr5:178226974-178227011
  hypo

SEQ ID NO: 404985 - DNA, 84 bp, Homo sapiens; identical to SEQ ID NO: 255456
  chr5:178292218-178292302
  hypo

SEQ ID NO: 404986 - DNA, 45 bp, Homo sapiens; identical to SEQ ID NO: 210510
  chr5:178295550-178295595
  hypo

SEQ ID NO: 404987 - DNA, 376 bp, Homo sapiens; identical to SEQ ID NO: 210511
  chr5:178295949-178296325
  hypo

SEQ ID NO: 404988 - DNA, 134 bp, Homo sapiens; identical to SEQ ID NO: 255461
  chr5:178397976-178398110
  hypo

SEQ ID NO: 404989 - DNA, 214 bp, Homo sapiens; identical to SEQ ID NO: 200197
  chr5:178423619-178423833
  hypo

SEQ ID NO: 404990 - DNA, 102 bp, Homo sapiens; identical to SEQ ID NO: 255467
  chr5:178540329-178540431
  hypo

SEQ ID NO: 404991 - DNA, 358 bp, Homo sapiens; identical to SEQ ID NO: 210513
  chr5:178551488-178551846
  hypo

SEQ ID NO: 404992 - DNA, 205 bp, Homo sapiens; identical to SEQ ID NO: 210514
  chr5:178551923-178552128
  hypo

SEQ ID NO: 404993 - DNA, 82 bp, Homo sapiens; identical to SEQ ID NO: 210515
  chr5:178564804-178564886
  hypo

SEQ ID NO: 404994 - DNA, 75 bp, Homo sapiens; identical to SEQ ID NO: 210516
  chr5:178576526-178576601
  hypo

SEQ ID NO: 404995 - DNA, 251 bp, Homo sapiens; identical to SEQ ID NO: 255488
  chr5:179004521-179004772
  hypo

SEQ ID NO: 404996 - DNA, 46 bp, Homo sapiens; identical to SEQ ID NO: 210524
  chr5:179030602-179030648
  hypo

SEQ ID NO: 404997 - DNA, 120 bp, Homo sapiens; identical to SEQ ID NO: 255492
  chr5:179064356-179064476
  hypo

SEQ ID NO: 404998 - DNA, 147 bp, Homo sapiens; identical to SEQ ID NO: 222772
  chr5:179234473-179234620
  hypo

SEQ ID NO: 404999 - DNA, 148 bp, Homo sapiens; identical to SEQ ID NO: 255499
  chr5:179343374-179343522
  hypo

SEQ ID NO: 405000 - DNA, 150 bp, Homo sapiens; identical to SEQ ID NO: 255500
  chr5:179358103-179358253
  hypo

SEQ ID NO: 405001 - DNA, 188 bp, Homo sapiens; identical to SEQ ID NO: 255507
  chr5:179503669-179503857
  hypo

SEQ ID NO: 405002 - DNA, 164 bp, Homo sapiens; identical to SEQ ID NO: 210538
  chr5:179726331-179726495
  hypo

SEQ ID NO: 405003 - DNA, 193 bp, Homo sapiens; identical to SEQ ID NO: 255517
  chr5:179731619-179731812
  hypo

SEQ ID NO: 405004 - DNA, 31 bp, Homo sapiens; identical to SEQ ID NO: 255518
  chr5:179742137-179742168
  hypo

SEQ ID NO: 405005 - DNA, 311 bp, Homo sapiens; identical to SEQ ID NO: 255520
  chr5:179762746-179763057
  hypo

SEQ ID NO: 405006 - DNA, 152 bp, Homo sapiens; identical to SEQ ID NO: 305275
  chr5:179824636-179824788
  hypo

SEQ ID NO: 405007 - DNA, 160 bp, Homo sapiens; identical to SEQ ID NO: 255525
  chr5:179855729-179855889
  hypo

SEQ ID NO: 405008 - DNA, 234 bp, Homo sapiens; identical to SEQ ID NO: 255526
  chr5:179866444-179866678
  hypo

SEQ ID NO: 405009 - DNA, 38 bp, Homo sapiens; identical to SEQ ID NO: 255528
  chr5:180030298-180030336
  hypo

SEQ ID NO: 405010 - DNA, 384 bp, Homo sapiens; identical to SEQ ID NO: 255530
  chr5:180038083-180038467
  hypo

SEQ ID NO: 405011 - DNA, 216 bp, Homo sapiens; identical to SEQ ID NO: 255531
  chr5:180039813-180040029
  hypo

SEQ ID NO: 405012 - DNA, 112 bp, Homo sapiens; identical to SEQ ID NO: 255532
  chr5:180043366-180043478
  hypo

SEQ ID NO: 405013 - DNA, 70 bp, Homo sapiens; identical to SEQ ID NO: 305287
  chr5:180047650-180047720
  hypo

SEQ ID NO: 405014 - DNA, 221 bp, Homo sapiens; identical to SEQ ID NO: 305288
  chr5:180047750-180047971
  hypo

SEQ ID NO: 405015 - DNA, 64 bp, Homo sapiens; identical to SEQ ID NO: 210542
  chr5:180057671-180057735
  hypo

SEQ ID NO: 405016 - DNA, 42 bp, Homo sapiens; identical to SEQ ID NO: 255539
  chr5:180093828-180093870
  hypo

SEQ ID NO: 405017 - DNA, 142 bp, Homo sapiens; identical to SEQ ID NO: 210545
  chr5:180255234-180255376
  hypo

SEQ ID NO: 405018 - DNA, 104 bp, Homo sapiens; identical to SEQ ID NO: 210549
  chr5:180657110-180657214
  hypo

SEQ ID NO: 405019 - DNA, 153 bp, Homo sapiens; identical to SEQ ID NO: 210550
  chr5:180661378-180661531
  hypo

SEQ ID NO: 405020 - DNA, 182 bp, Homo sapiens; identical to SEQ ID NO: 210551
  chr5:180661628-180661810
  hypo

SEQ ID NO: 405021 - DNA, 120 bp, Homo sapiens; identical to SEQ ID NO: 210553
  chr5:180681264-180681384
  hypo

SEQ ID NO: 405022 - DNA, 60 bp, Homo sapiens; identical to SEQ ID NO: 255554
  chr6:356759-356819
  hypo

SEQ ID NO: 405023 - DNA, 42 bp, Homo sapiens; identical to SEQ ID NO: 255555
  chr6:358267-358309
  hypo

SEQ ID NO: 405024 - DNA, 160 bp, Homo sapiens; identical to SEQ ID NO: 255557
  chr6:394827-394987
  hypo

SEQ ID NO: 405025 - DNA, 131 bp, Homo sapiens; identical to SEQ ID NO: 255559
  chr6:504235-504366
  hypo

SEQ ID NO: 405026 - DNA, 136 bp, Homo sapiens; identical to SEQ ID NO: 210556
  chr6:736613-736749
  hypo

SEQ ID NO: 405027 - DNA, 148 bp, Homo sapiens; identical to SEQ ID NO: 255563
  chr6:968511-968659
  hypo

SEQ ID NO: 405028 - DNA, 255 bp, Homo sapiens; identical to SEQ ID NO: 255568
  chr6:1097959-1098214
  hypo

SEQ ID NO: 405029 - DNA, 74 bp, Homo sapiens; identical to SEQ ID NO: 255573
  chr6:1574420-1574494
  hypo

SEQ ID NO: 405030 - DNA, 100 bp, Homo sapiens; identical to SEQ ID NO: 255574
  chr6:1587933-1588033
  hypo

SEQ ID NO: 405031 - DNA, 152 bp, Homo sapiens; identical to SEQ ID NO: 384116
  chr6:1610664-1610816
  hypo

SEQ ID NO: 405032 - DNA, 334 bp, Homo sapiens; identical to SEQ ID NO: 200232
  chr6:1610864-1611198
  hypo

SEQ ID NO: 405033 - DNA, 159 bp, Homo sapiens; identical to SEQ ID NO: 255577
  chr6:1679665-1679824
  hypo

SEQ ID NO: 405034 - DNA, 34 bp, Homo sapiens; identical to SEQ ID NO: 305340
  chr6:1702254-1702288
  hypo

SEQ ID NO: 405035 - DNA, 70 bp, Homo sapiens; identical to SEQ ID NO: 152413
  chr6:1702366-1702436
  hypo

SEQ ID NO: 405036 - DNA, 96 bp, Homo sapiens; identical to SEQ ID NO: 210568
  chr6:2233026-2233122
  hypo

SEQ ID NO: 405037 - DNA, 121 bp, Homo sapiens; identical to SEQ ID NO: 255587
  chr6:2377321-2377442
  hypo

SEQ ID NO: 405038 - DNA, 140 bp, Homo sapiens; identical to SEQ ID NO: 255591
  chr6:2530903-2531043
  hypo

SEQ ID NO: 405039 - DNA, 385 bp, Homo sapiens; identical to SEQ ID NO: 210569
  chr6:2559179-2559564
  hypo

SEQ ID NO: 405040 - DNA, 79 bp, Homo sapiens; identical to SEQ ID NO: 255596
  chr6:2870699-2870778
  hypo

SEQ ID NO: 405041 - DNA, 289 bp, Homo sapiens; identical to SEQ ID NO: 255597
  chr6:2891875-2892164
  hypo

SEQ ID NO: 405042 - DNA, 92 bp, Homo sapiens; identical to SEQ ID NO: 210571
  chr6:2907135-2907227
  hypo

SEQ ID NO: 405043 - DNA, 38 bp, Homo sapiens; identical to SEQ ID NO: 305372
  chr6:3053001-3053039
  hypo

SEQ ID NO: 405044 - DNA, 230 bp, Homo sapiens; identical to SEQ ID NO: 305373
  chr6:3053069-3053299
  hypo

SEQ ID NO: 405045 - DNA, 383 bp, Homo sapiens; identical to SEQ ID NO: 210574
  chr6:3115566-3115949
  hypo

SEQ ID NO: 405046 - DNA, 254 bp, Homo sapiens; identical to SEQ ID NO: 200241
  chr6:3162842-3163096
  hypo

SEQ ID NO: 405047 - DNA, 40 bp, Homo sapiens; identical to SEQ ID NO: 255609
  chr6:3177387-3177427
  hypo

SEQ ID NO: 405048 - DNA, 215 bp, Homo sapiens; identical to SEQ ID NO: 255611
  chr6:3193808-3194023
  hypo

SEQ ID NO: 405049 - DNA, 44 bp, Homo sapiens; identical to SEQ ID NO: 255612
  chr6:3194436-3194480
  hypo

SEQ ID NO: 405050 - DNA, 149 bp, Homo sapiens; identical to SEQ ID NO: 255615
  chr6:3250843-3250992
  hypo

SEQ ID NO: 405051 - DNA, 44 bp, Homo sapiens; identical to SEQ ID NO: 255617
  chr6:3263844-3263888
  hypo

SEQ ID NO: 405052 - DNA, 90 bp, Homo sapiens; identical to SEQ ID NO: 255618
  chr6:3267969-3268059
  hypo

SEQ ID NO: 405053 - DNA, 68 bp, Homo sapiens; identical to SEQ ID NO: 255619
  chr6:3269488-3269556
  hypo

SEQ ID NO: 405054 - DNA, 96 bp, Homo sapiens; identical to SEQ ID NO: 210579
  chr6:3281277-3281373
  hypo

SEQ ID NO: 405055 - DNA, 36 bp, Homo sapiens; identical to SEQ ID NO: 210581
  chr6:3289595-3289631
  hypo

SEQ ID NO: 405056 - DNA, 69 bp, Homo sapiens; identical to SEQ ID NO: 255627
  chr6:3312767-3312836
  hypo

SEQ ID NO: 405057 - DNA, 69 bp, Homo sapiens; identical to SEQ ID NO: 255628
  chr6:3315028-3315097
  hypo

SEQ ID NO: 405058 - DNA, 157 bp, Homo sapiens; identical to SEQ ID NO: 255629
  chr6:3315694-3315851
  hypo

SEQ ID NO: 405059 - DNA, 527 bp, Homo sapiens; identical to SEQ ID NO: 255633
  chr6:3328432-3328959
  hypo

SEQ ID NO: 405060 - DNA, 42 bp, Homo sapiens; identical to SEQ ID NO: 255640
  chr6:3450825-3450867
  hypo

SEQ ID NO: 405061 - DNA, 600 bp, Homo sapiens; identical to SEQ ID NO: 222801
  chr6:3456661-3457261
  hypo

SEQ ID NO: 405062 - DNA, 216 bp, Homo sapiens; identical to SEQ ID NO: 255641
  chr6:3468953-3469169
  hypo

SEQ ID NO: 405063 - DNA, 96 bp, Homo sapiens; identical to SEQ ID NO: 255642
  chr6:3471226-3471322
  hypo

SEQ ID NO: 405064 - DNA, 139 bp, Homo sapiens; identical to SEQ ID NO: 255644
  chr6:3540898-3541037
  hypo

SEQ ID NO: 405065 - DNA, 100 bp, Homo sapiens; identical to SEQ ID NO: 255645
  chr6:3543266-3543366
  hypo

SEQ ID NO: 405066 - DNA, 43 bp, Homo sapiens; identical to SEQ ID NO: 255652
  chr6:3633705-3633748
  hypo

SEQ ID NO: 405067 - DNA, 198 bp, Homo sapiens; identical to SEQ ID NO: 255656
  chr6:3711994-3712192
  hypo

SEQ ID NO: 405068 - DNA, 52 bp, Homo sapiens; identical to SEQ ID NO: 210595
  chr6:3821400-3821452
  hypo

SEQ ID NO: 405069 - DNA, 101 bp, Homo sapiens; identical to SEQ ID NO: 385642
  chr6:3880267-3880368
  hypo

SEQ ID NO: 405070 - DNA, 67 bp, Homo sapiens; identical to SEQ ID NO: 255666
  chr6:3900289-3900356
  hypo

SEQ ID NO: 405071 - DNA, 68 bp, Homo sapiens; identical to SEQ ID NO: 255675
  chr6:4563333-4563401
  hypo

SEQ ID NO: 405072 - DNA, 42 bp, Homo sapiens; identical to SEQ ID NO: 255676
  chr6:4689095-4689137
  hypo

SEQ ID NO: 405073 - DNA, 61 bp, Homo sapiens; identical to SEQ ID NO: 255678
  chr6:4782240-4782301
  hypo

SEQ ID NO: 405074 - DNA, 112 bp, Homo sapiens; identical to SEQ ID NO: 255680
  chr6:4854165-4854277
  hypo

SEQ ID NO: 405075 - DNA, 91 bp, Homo sapiens; identical to SEQ ID NO: 305457
  chr6:4858682-4858773
  hypo

SEQ ID NO: 405076 - DNA, 573 bp, Homo sapiens; identical to SEQ ID NO: 255687
  chr6:4905023-4905596
  hypo

SEQ ID NO: 405077 - DNA, 198 bp, Homo sapiens; identical to SEQ ID NO: 210609
  chr6:4909052-4909250
  hypo

SEQ ID NO: 405078 - DNA, 91 bp, Homo sapiens; identical to SEQ ID NO: 210610
  chr6:4909755-4909846
  hypo

SEQ ID NO: 405079 - DNA, 75 bp, Homo sapiens
  chr6:4910984-4911059
  hypo
gatggtttggatagaaggcatgaagtgggtagtggagtgtttctgatggtttatacacctctagaccttacctga

SEQ ID NO: 405080 - DNA, 277 bp, Homo sapiens; identical to SEQ ID NO: 210613
  chr6:4950659-4950936
  hypo

SEQ ID NO: 405081 - DNA, 154 bp, Homo sapiens; identical to SEQ ID NO: 255706
  chr6:5663764-5663918
  hypo

SEQ ID NO: 405082 - DNA, 440 bp, Homo sapiens; identical to SEQ ID NO: 255708
  chr6:5783577-5784017
  hypo

SEQ ID NO: 405083 - DNA, 73 bp, Homo sapiens; identical to SEQ ID NO: 255710
  chr6:5839914-5839987
  hypo

SEQ ID NO: 405084 - DNA, 57 bp, Homo sapiens; identical to SEQ ID NO: 255714
  chr6:6250343-6250400
  hypo

SEQ ID NO: 405085 - DNA, 92 bp, Homo sapiens; identical to SEQ ID NO: 255718
  chr6:6753685-6753777
  hypo

SEQ ID NO: 405086 - DNA, 193 bp, Homo sapiens; identical to SEQ ID NO: 255720
  chr6:6824564-6824757
  hypo

SEQ ID NO: 405087 - DNA, 130 bp, Homo sapiens; identical to SEQ ID NO: 210623
  chr6:6901361-6901491
  hypo

SEQ ID NO: 405088 - DNA, 85 bp, Homo sapiens; identical to SEQ ID NO: 210624
  chr6:6971301-6971386
  hypo

SEQ ID NO: 405089 - DNA, 93 bp, Homo sapiens; identical to SEQ ID NO: 255726
  chr6:6982819-6982912
  hypo

SEQ ID NO: 405090 - DNA, 98 bp, Homo sapiens; identical to SEQ ID NO: 255729
  chr6:7132660-7132758
  hypo

SEQ ID NO: 405091 - DNA, 117 bp, Homo sapiens; identical to SEQ ID NO: 210626
  chr6:7204766-7204883
  hypo

SEQ ID NO: 405092 - DNA, 180 bp, Homo sapiens; identical to SEQ ID NO: 255737
  chr6:7268060-7268240
  hypo

SEQ ID NO: 405093 - DNA, 102 bp, Homo sapiens; identical to SEQ ID NO: 210631
  chr6:7294551-7294653
  hypo

SEQ ID NO: 405094 - DNA, 240 bp, Homo sapiens; identical to SEQ ID NO: 222813
  chr6:7541551-7541791
  hypo

SEQ ID NO: 405095 - DNA, 37 bp, Homo sapiens; identical to SEQ ID NO: 255743
  chr6:7767221-7767258
  hypo

SEQ ID NO: 405096 - DNA, 79 bp, Homo sapiens; identical to SEQ ID NO: 255744
  chr6:7879856-7879935
  hypo

SEQ ID NO: 405097 - DNA, 322 bp, Homo sapiens; identical to SEQ ID NO: 255745
  chr6:7880271-7880593
  hypo

SEQ ID NO: 405098 - DNA, 559 bp, Homo sapiens; identical to SEQ ID NO: 210634
  chr6:7883236-7883795
  hypo

SEQ ID NO: 405099 - DNA, 90 bp, Homo sapiens; identical to SEQ ID NO: 210643
  chr6:7976897-7976987
  hypo

SEQ ID NO: 405100 - DNA, 46 bp, Homo sapiens; identical to SEQ ID NO: 210644
  chr6:7986658-7986704
  hypo

SEQ ID NO: 405101 - DNA, 43 bp, Homo sapiens; identical to SEQ ID NO: 255766
  chr6:10491329-10491372
  hypo

SEQ ID NO: 405102 - DNA, 99 bp, Homo sapiens; identical to SEQ ID NO: 255767
  chr6:10527664-10527763
  hypo

SEQ ID NO: 405103 - DNA, 35 bp, Homo sapiens; identical to SEQ ID NO: 255771
  chr6:10549001-10549036
  hypo

SEQ ID NO: 405104 - DNA, 257 bp, Homo sapiens; identical to SEQ ID NO: 255772
  chr6:10560601-10560858
  hypo

SEQ ID NO: 405105 - DNA, 83 bp, Homo sapiens; identical to SEQ ID NO: 255779
  chr6:11029460-11029543
  hypo

SEQ ID NO: 405106 - DNA, 90 bp, Homo sapiens; identical to SEQ ID NO: 255780
  chr6:11052342-11052432
  hypo

SEQ ID NO: 405107 - DNA, 65 bp, Homo sapiens; identical to SEQ ID NO: 255783
  chr6:11324665-11324730
  hypo

SEQ ID NO: 405108 - DNA, 73 bp, Homo sapiens; identical to SEQ ID NO: 255787
  chr6:11789823-11789896
  hypo

SEQ ID NO: 405109 - DNA, 593 bp, Homo sapiens; identical to SEQ ID NO: 305570
  chr6:12222894-12223487
  hypo

SEQ ID NO: 405110 - DNA, 95 bp, Homo sapiens; identical to SEQ ID NO: 210652
  chr6:12287832-12287927
  hypo

SEQ ID NO: 405111 - DNA, 82 bp, Homo sapiens; identical to SEQ ID NO: 255795
  chr6:12456683-12456765
  hypo

SEQ ID NO: 405112 - DNA, 296 bp, Homo sapiens; identical to SEQ ID NO: 255797
  chr6:13295931-13296227
  hypo

SEQ ID NO: 405113 - DNA, 83 bp, Homo sapiens; identical to SEQ ID NO: 210655
  chr6:13397453-13397536
  hypo

SEQ ID NO: 405114 - DNA, 380 bp, Homo sapiens; identical to SEQ ID NO: 305583
  chr6:13510021-13510401
  hypo

SEQ ID NO: 405115 - DNA, 146 bp, Homo sapiens; identical to SEQ ID NO: 200285
  chr6:13574018-13574164
  hypo

SEQ ID NO: 405116 - DNA, 37 bp, Homo sapiens; identical to SEQ ID NO: 210658
  chr6:13631319-13631356
  hypo

SEQ ID NO: 405117 - DNA, 126 bp, Homo sapiens; identical to SEQ ID NO: 210659
  chr6:14002319-14002445
  hypo

SEQ ID NO: 405118 - DNA, 54 bp, Homo sapiens; identical to SEQ ID NO: 210660
  chr6:14002475-14002529
  hypo

SEQ ID NO: 405119 - DNA, 100 bp, Homo sapiens; identical to SEQ ID NO: 210661
  chr6:14099382-14099482
  hypo

SEQ ID NO: 405120 - DNA, 41 bp, Homo sapiens; identical to SEQ ID NO: 255811
  chr6:14116492-14116533
  hypo

SEQ ID NO: 405121 - DNA, 40 bp, Homo sapiens; identical to SEQ ID NO: 255812
  chr6:14130664-14130704
  hypo

SEQ ID NO: 405122 - DNA, 148 bp, Homo sapiens; identical to SEQ ID NO: 210666
  chr6:14324570-14324718
  hypo

SEQ ID NO: 405123 - DNA, 136 bp, Homo sapiens; identical to SEQ ID NO: 255820
  chr6:14772274-14772410
  hypo

SEQ ID NO: 405124 - DNA, 36 bp, Homo sapiens; identical to SEQ ID NO: 255821
  chr6:14777340-14777376
  hypo

SEQ ID NO: 405125 - DNA, 36 bp, Homo sapiens; identical to SEQ ID NO: 255822
  chr6:14916087-14916123
  hypo

SEQ ID NO: 405126 - DNA, 31 bp, Homo sapiens; identical to SEQ ID NO: 255823
  chr6:14930077-14930108
  hypo

SEQ ID NO: 405127 - DNA, 81 bp, Homo sapiens; identical to SEQ ID NO: 255825
  chr6:14941362-14941443
  hypo

SEQ ID NO: 405128 - DNA, 39 bp, Homo sapiens; identical to SEQ ID NO: 210668
  chr6:15083849-15083888
  hypo

SEQ ID NO: 405129 - DNA, 209 bp, Homo sapiens; identical to SEQ ID NO: 210669
  chr6:15227670-15227879
  hypo

SEQ ID NO: 405130 - DNA, 43 bp, Homo sapiens; identical to SEQ ID NO: 210670
  chr6:15282318-15282361
  hypo

SEQ ID NO: 405131 - DNA, 43 bp, Homo sapiens; identical to SEQ ID NO: 210671
  chr6:15282481-15282524
  hypo

SEQ ID NO: 405132 - DNA, 38 bp, Homo sapiens; identical to SEQ ID NO: 255834
  chr6:15469670-15469708
  hypo

SEQ ID NO: 405133 - DNA, 53 bp, Homo sapiens; identical to SEQ ID NO: 210677
  chr6:15523495-15523548
  hypo

SEQ ID NO: 405134 - DNA, 300 bp, Homo sapiens; identical to SEQ ID NO: 255841
  chr6:15525179-15525479
  hypo

SEQ ID NO: 405135 - DNA, 31 bp, Homo sapiens; identical to SEQ ID NO: 210678
  chr6:15907074-15907105
  hypo

SEQ ID NO: 405136 - DNA, 42 bp, Homo sapiens; identical to SEQ ID NO: 255850
  chr6:16841589-16841631
  hypo

SEQ ID NO: 405137 - DNA, 204 bp, Homo sapiens; identical to SEQ ID NO: 255852
  chr6:17508425-17508629
  hypo

SEQ ID NO: 405138 - DNA, 120 bp, Homo sapiens; identical to SEQ ID NO: 255853
  chr6:17756939-17757059
  hypo

SEQ ID NO: 405139 - DNA, 67 bp, Homo sapiens; identical to SEQ ID NO: 210686
  chr6:17800168-17800235
  hypo

SEQ ID NO: 405140 - DNA, 329 bp, Homo sapiens; identical to SEQ ID NO: 210687
  chr6:17940369-17940698
  hypo

SEQ ID NO: 405141 - DNA, 38 bp, Homo sapiens; identical to SEQ ID NO: 255863
  chr6:18024631-18024669
  hypo

SEQ ID NO: 405142 - DNA, 120 bp, Homo sapiens; identical to SEQ ID NO: 210688
  chr6:18030874-18030994
  hypo

SEQ ID NO: 405143 - DNA, 104 bp, Homo sapiens; identical to SEQ ID NO: 255866
  chr6:18129286-18129390
  hypo

SEQ ID NO: 405144 - DNA, 40 bp, Homo sapiens; identical to SEQ ID NO: 255867
  chr6:18205884-18205924
  hypo

SEQ ID NO: 405145 - DNA, 76 bp, Homo sapiens; identical to SEQ ID NO: 255870
  chr6:18247862-18247938
  hypo

SEQ ID NO: 405146 - DNA, 41 bp, Homo sapiens; identical to SEQ ID NO: 210690
  chr6:18259258-18259299
  hypo

SEQ ID NO: 405147 - DNA, 33 bp, Homo sapiens; identical to SEQ ID NO: 210692
  chr6:18275933-18275966
  hypo

SEQ ID NO: 405148 - DNA, 39 bp, Homo sapiens; identical to SEQ ID NO: 200302
  chr6:18278043-18278082
  hypo

SEQ ID NO: 405149 - DNA, 43 bp, Homo sapiens; identical to SEQ ID NO: 210695
  chr6:18458440-18458483
  hypo

SEQ ID NO: 405150 - DNA, 83 bp, Homo sapiens; identical to SEQ ID NO: 255880
  chr6:19892212-19892295
  hypo

SEQ ID NO: 405151 - DNA, 35 bp, Homo sapiens; identical to SEQ ID NO: 255882
  chr6:19967405-19967440
  hypo

SEQ ID NO: 405152 - DNA, 32 bp, Homo sapiens; identical to SEQ ID NO: 255885
  chr6:20239105-20239137
  hypo

SEQ ID NO: 405153 - DNA, 141 bp, Homo sapiens; identical to SEQ ID NO: 305675
  chr6:20691377-20691518
  hypo

SEQ ID NO: 405154 - DNA, 102 bp, Homo sapiens; identical to SEQ ID NO: 305676
  chr6:20691548-20691650
  hypo

SEQ ID NO: 405155 - DNA, 181 bp, Homo sapiens; identical to SEQ ID NO: 210701
  chr6:21277794-21277975
  hypo

SEQ ID NO: 405156 - DNA, 280 bp, Homo sapiens; identical to SEQ ID NO: 255895
  chr6:21342661-21342941
  hypo

SEQ ID NO: 405157 - DNA, 95 bp, Homo sapiens; identical to SEQ ID NO: 255896
  chr6:21406919-21407014
  hypo

SEQ ID NO: 405158 - DNA, 93 bp, Homo sapiens; identical to SEQ ID NO: 210702
  chr6:21570592-21570685
  hypo

SEQ ID NO: 405159 - DNA, 120 bp, Homo sapiens; identical to SEQ ID NO: 255902
  chr6:21622714-21622834
  hypo

SEQ ID NO: 405160 - DNA, 70 bp, Homo sapiens; identical to SEQ ID NO: 255906
  chr6:22294673-22294743
  hypo

SEQ ID NO: 405161 - DNA, 36 bp, Homo sapiens; identical to SEQ ID NO: 210707
  chr6:22331079-22331115
  hypo

SEQ ID NO: 405162 - DNA, 367 bp, Homo sapiens; identical to SEQ ID NO: 255909
  chr6:22569529-22569896
  hypo

SEQ ID NO: 405163 - DNA, 32 bp, Homo sapiens; identical to SEQ ID NO: 255910
  chr6:24035312-24035344
  hypo

SEQ ID NO: 405164 - DNA, 161 bp, Homo sapiens; identical to SEQ ID NO: 210709
  chr6:24425299-24425460
  hypo

SEQ ID NO: 405165 - DNA, 230 bp, Homo sapiens; identical to SEQ ID NO: 255913
  chr6:24432978-24433208
  hypo

SEQ ID NO: 405166 - DNA, 125 bp, Homo sapiens; identical to SEQ ID NO: 210711
  chr6:24523039-24523164
  hypo

SEQ ID NO: 405167 - DNA, 138 bp, Homo sapiens; identical to SEQ ID NO: 210712
  chr6:24647204-24647342
  hypo

SEQ ID NO: 405168 - DNA, 51 bp, Homo sapiens; identical to SEQ ID NO: 305705
  chr6:24761555-24761606
  hypo

SEQ ID NO: 405169 - DNA, 79 bp, Homo sapiens; identical to SEQ ID NO: 255919
  chr6:24847769-24847848
  hypo

SEQ ID NO: 405170 - DNA, 41 bp, Homo sapiens; identical to SEQ ID NO: 255920
  chr6:25023690-25023731
  hypo

SEQ ID NO: 405171 - DNA, 173 bp, Homo sapiens; identical to SEQ ID NO: 210714
  chr6:25153408-25153581
  hypo

SEQ ID NO: 405172 - DNA, 52 bp, Homo sapiens; identical to SEQ ID NO: 305716
  chr6:26047741-26047793
  hypo

SEQ ID NO: 405173 - DNA, 36 bp, Homo sapiens; identical to SEQ ID NO: 255929
  chr6:26095303-26095339
  hypo

SEQ ID NO: 405174 - DNA, 96 bp, Homo sapiens; identical to SEQ ID NO: 255933
  chr6:26294597-26294693
  hypo

SEQ ID NO: 405175 - DNA, 110 bp, Homo sapiens; identical to SEQ ID NO: 255935
  chr6:26423339-26423449
  hypo

SEQ ID NO: 405176 - DNA, 72 bp, Homo sapiens; identical to SEQ ID NO: 210720
  chr6:26970361-26970433
  hypo

SEQ ID NO: 405177 - DNA, 34 bp, Homo sapiens; identical to SEQ ID NO: 255938
  chr6:27102663-27102697
  hypo

SEQ ID NO: 405178 - DNA, 120 bp, Homo sapiens; identical to SEQ ID NO: 222837
  chr6:27440466-27440586
  hypo

SEQ ID NO: 405179 - DNA, 159 bp, Homo sapiens; identical to SEQ ID NO: 210724
  chr6:27441962-27442121
  hypo

SEQ ID NO: 405180 - DNA, 40 bp, Homo sapiens; identical to SEQ ID NO: 397303
  chr6:27806471-27806511
  hypo

SEQ ID NO: 405181 - DNA, 43 bp, Homo sapiens; identical to SEQ ID NO: 255943
  chr6:28031402-28031445
  hypo

SEQ ID NO: 405182 - DNA, 109 bp, Homo sapiens; identical to SEQ ID NO: 255944
  chr6:28192714-28192823
  hypo

SEQ ID NO: 405183 - DNA, 289 bp, Homo sapiens; identical to SEQ ID NO: 305742
  chr6:33578945-33579234
  hypo

SEQ ID NO: 405184 - DNA, 98 bp, Homo sapiens; identical to SEQ ID NO: 305743
  chr6:33579264-33579362
  hypo

SEQ ID NO: 405185 - DNA, 40 bp, Homo sapiens; identical to SEQ ID NO: 255949
  chr6:33597878-33597918
  hypo

SEQ ID NO: 405186 - DNA, 178 bp, Homo sapiens; identical to SEQ ID NO: 210731
  chr6:33609019-33609197
  hypo

SEQ ID NO: 405187 - DNA, 38 bp, Homo sapiens; identical to SEQ ID NO: 210732
  chr6:33609227-33609265
  hypo

SEQ ID NO: 405188 - DNA, 266 bp, Homo sapiens; identical to SEQ ID NO: 210733
  chr6:33638299-33638565
  hypo

SEQ ID NO: 405189 - DNA, 37 bp, Homo sapiens; identical to SEQ ID NO: 255953
  chr6:33645952-33645989
  hypo

SEQ ID NO: 405190 - DNA, 245 bp, Homo sapiens; identical to SEQ ID NO: 210735
  chr6:33674159-33674404
  hypo

SEQ ID NO: 405191 - DNA, 139 bp, Homo sapiens; identical to SEQ ID NO: 255957
  chr6:33687282-33687421
  hypo

SEQ ID NO: 405192 - DNA, 253 bp, Homo sapiens; identical to SEQ ID NO: 255958
  chr6:33694498-33694751
  hypo

SEQ ID NO: 405193 - DNA, 41 bp, Homo sapiens; identical to SEQ ID NO: 255960
  chr6:33740514-33740555
  hypo

SEQ ID NO: 405194 - DNA, 130 bp, Homo sapiens; identical to SEQ ID NO: 210737
  chr6:33748502-33748632
  hypo

SEQ ID NO: 405195 - DNA, 83 bp, Homo sapiens; identical to SEQ ID NO: 210738
  chr6:33771001-33771084
  hypo

SEQ ID NO: 405196 - DNA, 78 bp, Homo sapiens; identical to SEQ ID NO: 255966
  chr6:33871408-33871486
  hypo

SEQ ID NO: 405197 - DNA, 107 bp, Homo sapiens; identical to SEQ ID NO: 210739
  chr6:33907853-33907960
  hypo

SEQ ID NO: 405198 - DNA, 65 bp, Homo sapiens; identical to SEQ ID NO: 305765
  chr6:33955752-33955817
  hypo

SEQ ID NO: 405199 - DNA, 49 bp, Homo sapiens
  chr6:34219881-34219930
  hypo
gatctagaatattggggaaaaaaaatctgtcaaaaacaagaaataaaga

SEQ ID NO: 405200 - DNA, 41 bp, Homo sapiens; identical to SEQ ID NO: 210746
  chr6:34231475-34231516
  hypo

SEQ ID NO: 405201 - DNA, 215 bp, Homo sapiens; identical to SEQ ID NO: 222843
  chr6:34359521-34359736
  hypo

SEQ ID NO: 405202 - DNA, 39 bp, Homo sapiens; identical to SEQ ID NO: 200414
  chr6:34405256-34405295
  hypo

SEQ ID NO: 405203 - DNA, 213 bp, Homo sapiens; identical to SEQ ID NO: 255982
  chr6:34503446-34503659
  hypo

SEQ ID NO: 405204 - DNA, 243 bp, Homo sapiens; identical to SEQ ID NO: 255983
  chr6:34507099-34507342
  hypo

SEQ ID NO: 405205 - DNA, 243 bp, Homo sapiens; identical to SEQ ID NO: 210750
  chr6:34512043-34512286
  hypo

SEQ ID NO: 405206 - DNA, 115 bp, Homo sapiens; identical to SEQ ID NO: 255990
  chr6:34524257-34524372
  hypo

SEQ ID NO: 405207 - DNA, 100 bp, Homo sapiens; identical to SEQ ID NO: 210753
  chr6:34683317-34683417
  hypo

SEQ ID NO: 405208 - DNA, 35 bp, Homo sapiens; identical to SEQ ID NO: 255999
  chr6:34870302-34870337
  hypo

SEQ ID NO: 405209 - DNA, 201 bp, Homo sapiens; identical to SEQ ID NO: 256004
  chr6:35044731-35044932
  hypo

SEQ ID NO: 405210 - DNA, 95 bp, Homo sapiens; identical to SEQ ID NO: 256005
  chr6:35045149-35045244
  hypo

SEQ ID NO: 405211 - DNA, 180 bp, Homo sapiens; identical to SEQ ID NO: 256006
  chr6:35045559-35045739
  hypo

SEQ ID NO: 405212 - DNA, 44 bp, Homo sapiens; identical to SEQ ID NO: 256007
  chr6:35048225-35048269
  hypo

SEQ ID NO: 405213 - DNA, 324 bp, Homo sapiens; identical to SEQ ID NO: 256008
  chr6:35048591-35048915
  hypo

SEQ ID NO: 405214 - DNA, 38 bp, Homo sapiens; identical to SEQ ID NO: 210760
  chr6:35944304-35944342
  hypo

SEQ ID NO: 405215 - DNA, 145 bp, Homo sapiens; identical to SEQ ID NO: 256026
  chr6:36339126-36339271
  hypo

SEQ ID NO: 405216 - DNA, 71 bp, Homo sapiens; identical to SEQ ID NO: 305823
  chr6:36344553-36344624
  hypo

SEQ ID NO: 405217 - DNA, 102 bp, Homo sapiens; identical to SEQ ID NO: 210767
  chr6:36599663-36599765
  hypo

SEQ ID NO: 405218 - DNA, 45 bp, Homo sapiens; identical to SEQ ID NO: 256037
  chr6:36897107-36897152
  hypo

SEQ ID NO: 405219 - DNA, 148 bp, Homo sapiens; identical to SEQ ID NO: 256038
  chr6:36926814-36926962
  hypo

SEQ ID NO: 405220 - DNA, 177 bp, Homo sapiens; identical to SEQ ID NO: 256039
  chr6:36936701-36936878
  hypo

SEQ ID NO: 405221 - DNA, 97 bp, Homo sapiens; identical to SEQ ID NO: 256042
  chr6:36992805-36992902
  hypo

SEQ ID NO: 405222 - DNA, 94 bp, Homo sapiens; identical to SEQ ID NO: 210771
  chr6:37033766-37033860
  hypo

SEQ ID NO: 405223 - DNA, 40 bp, Homo sapiens; identical to SEQ ID NO: 210772
  chr6:37100545-37100585
  hypo

SEQ ID NO: 405224 - DNA, 86 bp, Homo sapiens; identical to SEQ ID NO: 210774
  chr6:37352725-37352811
  hypo

SEQ ID NO: 405225 - DNA, 597 bp, Homo sapiens; identical to SEQ ID NO: 256055
  chr6:37460887-37461484
  hypo

SEQ ID NO: 405226 - DNA, 153 bp, Homo sapiens; identical to SEQ ID NO: 256056
  chr6:37605017-37605170
  hypo

SEQ ID NO: 405227 - DNA, 102 bp, Homo sapiens; identical to SEQ ID NO: 210780
  chr6:37721653-37721755
  hypo

SEQ ID NO: 405228 - DNA, 197 bp, Homo sapiens; identical to SEQ ID NO: 256062
  chr6:37841059-37841256
  hypo

SEQ ID NO: 405229 - DNA, 151 bp, Homo sapiens; identical to SEQ ID NO: 305863
  chr6:38101972-38102123
  hypo

SEQ ID NO: 405230 - DNA, 104 bp, Homo sapiens; identical to SEQ ID NO: 256067
  chr6:38121253-38121357
  hypo

SEQ ID NO: 405231 - DNA, 82 bp, Homo sapiens; identical to SEQ ID NO: 210783
  chr6:38122002-38122084
  hypo

SEQ ID NO: 405232 - DNA, 63 bp, Homo sapiens; identical to SEQ ID NO: 210784
  chr6:38134384-38134447
  hypo

SEQ ID NO: 405233 - DNA, 186 bp, Homo sapiens; identical to SEQ ID NO: 210785
  chr6:38646372-38646558
  hypo

SEQ ID NO: 405234 - DNA, 93 bp, Homo sapiens; identical to SEQ ID NO: 210786
  chr6:39127059-39127152
  hypo

SEQ ID NO: 405235 - DNA, 41 bp, Homo sapiens; identical to SEQ ID NO: 256073
  chr6:39154859-39154900
  hypo

SEQ ID NO: 405236 - DNA, 103 bp, Homo sapiens; identical to SEQ ID NO: 210788
  chr6:39162023-39162126
  hypo

SEQ ID NO: 405237 - DNA, 66 bp, Homo sapiens; identical to SEQ ID NO: 256077
  chr6:39162448-39162514
  hypo

SEQ ID NO: 405238 - DNA, 42 bp, Homo sapiens; identical to SEQ ID NO: 256078
  chr6:39185583-39185625
  hypo

SEQ ID NO: 405239 - DNA, 31 bp, Homo sapiens; identical to SEQ ID NO: 256085
  chr6:40624387-40624418
  hypo

SEQ ID NO: 405240 - DNA, 46 bp, Homo sapiens; identical to SEQ ID NO: 256088
  chr6:41303868-41303914
  hypo

SEQ ID NO: 405241 - DNA, 232 bp, Homo sapiens; identical to SEQ ID NO: 388332
  chr6:41340475-41340707
  hypo

SEQ ID NO: 405242 - DNA, 158 bp, Homo sapiens; identical to SEQ ID NO: 210796
  chr6:41511550-41511708
  hypo

SEQ ID NO: 405243 - DNA, 52 bp, Homo sapiens; identical to SEQ ID NO: 305898
  chr6:41715520-41715572
  hypo

SEQ ID NO: 405244 - DNA, 47 bp, Homo sapiens; identical to SEQ ID NO: 256099
  chr6:42017469-42017516
  hypo

SEQ ID NO: 405245 - DNA, 203 bp, Homo sapiens; identical to SEQ ID NO: 210799
  chr6:42047606-42047809
  hypo

SEQ ID NO: 405246 - DNA, 367 bp, Homo sapiens; identical to SEQ ID NO: 256102
  chr6:42073935-42074302
  hypo

SEQ ID NO: 405247 - DNA, 76 bp, Homo sapiens
  chr6:42762703-42762779
  hypo
aaaaaaaagaaacttaccataagtcatgcaagagtctatttactgatctctccaccaatactcacaaagagaatta

SEQ ID NO: 405248 - DNA, 85 bp, Homo sapiens; identical to SEQ ID NO: 210801
  chr6:43057813-43057898
  hypo

SEQ ID NO: 405249 - DNA, 125 bp, Homo sapiens; identical to SEQ ID NO: 222857
  chr6:43081636-43081761
  hypo

SEQ ID NO: 405250 - DNA, 215 bp, Homo sapiens; identical to SEQ ID NO: 256117
  chr6:43230737-43230952
  hypo

SEQ ID NO: 405251 - DNA, 101 bp, Homo sapiens; identical to SEQ ID NO: 210806
  chr6:43334539-43334640
  hypo

SEQ ID NO: 405252 - DNA, 319 bp, Homo sapiens; identical to SEQ ID NO: 210807
  chr6:43456970-43457289
  hypo

SEQ ID NO: 405253 - DNA, 92 bp, Homo sapiens; identical to SEQ ID NO: 222858
  chr6:43477369-43477461
  hypo

SEQ ID NO: 405254 - DNA, 83 bp, Homo sapiens; identical to SEQ ID NO: 256132
  chr6:43753108-43753191
  hypo

SEQ ID NO: 405255 - DNA, 76 bp, Homo sapiens; identical to SEQ ID NO: 210811
  chr6:43755593-43755669
  hypo

SEQ ID NO: 405256 - DNA, 33 bp, Homo sapiens; identical to SEQ ID NO: 256136
  chr6:43857893-43857926
  hypo

SEQ ID NO: 405257 - DNA, 189 bp, Homo sapiens; identical to SEQ ID NO: 256138
  chr6:43891389-43891578
  hypo

SEQ ID NO: 405258 - DNA, 133 bp, Homo sapiens; identical to SEQ ID NO: 256143
  chr6:43917992-43918125
  hypo

SEQ ID NO: 405259 - DNA, 192 bp, Homo sapiens; identical to SEQ ID NO: 256144
  chr6:43990914-43991106
  hypo

SEQ ID NO: 405260 - DNA, 34 bp, Homo sapiens; identical to SEQ ID NO: 256149
  chr6:44090098-44090132
  hypo

SEQ ID NO: 405261 - DNA, 75 bp, Homo sapiens; identical to SEQ ID NO: 305960
  chr6:44250124-44250199
  hypo

SEQ ID NO: 405262 - DNA, 127 bp, Homo sapiens; identical to SEQ ID NO: 256159
  chr6:44449535-44449662
  hypo

SEQ ID NO: 405263 - DNA, 254 bp, Homo sapiens; identical to SEQ ID NO: 256160
  chr6:44451224-44451478
  hypo

SEQ ID NO: 405264 - DNA, 43 bp, Homo sapiens; identical to SEQ ID NO: 232110
  chr6:45390376-45390419
  hypo

SEQ ID NO: 405265 - DNA, 39 bp, Homo sapiens; identical to SEQ ID NO: 256163
  chr6:45492176-45492215
  hypo

SEQ ID NO: 405266 - DNA, 264 bp, Homo sapiens; identical to SEQ ID NO: 305972
  chr6:45608783-45609047
  hypo

SEQ ID NO: 405267 - DNA, 152 bp, Homo sapiens; identical to SEQ ID NO: 256169
  chr6:47084373-47084525
  hypo

SEQ ID NO: 405268 - DNA, 41 bp, Homo sapiens; identical to SEQ ID NO: 210827
  chr6:47412331-47412372
  hypo

SEQ ID NO: 405269 - DNA, 42 bp, Homo sapiens; identical to SEQ ID NO: 305983
  chr6:47539956-47539998
  hypo

SEQ ID NO: 405270 - DNA, 144 bp, Homo sapiens; identical to SEQ ID NO: 256175
  chr6:49453725-49453869
  hypo

SEQ ID NO: 405271 - DNA, 98 bp, Homo sapiens; identical to SEQ ID NO: 210828
  chr6:49708447-49708545
  hypo

SEQ ID NO: 405272 - DNA, 142 bp, Homo sapiens; identical to SEQ ID NO: 256178
  chr6:52171805-52171947
  hypo

SEQ ID NO: 405273 - DNA, 199 bp, Homo sapiens; identical to SEQ ID NO: 284118
  chr6:52441278-52441477
  hypo

SEQ ID NO: 405274 - DNA, 43 bp, Homo sapiens; identical to SEQ ID NO: 256183
  chr6:52856825-52856868
  hypo

SEQ ID NO: 405275 - DNA, 80 bp, Homo sapiens; identical to SEQ ID NO: 256192
  chr6:53406020-53406100
  hypo

SEQ ID NO: 405276 - DNA, 282 bp, Homo sapiens; identical to SEQ ID NO: 222871
  chr6:53409809-53410091
  hypo

SEQ ID NO: 405277 - DNA, 422 bp, Homo sapiens; identical to SEQ ID NO: 397358
  chr6:53660452-53660874
  hypo

SEQ ID NO: 405278 - DNA, 62 bp, Homo sapiens; identical to SEQ ID NO: 113504
  chr6:53660908-53660970
  hypo

SEQ ID NO: 405279 - DNA, 112 bp, Homo sapiens; identical to SEQ ID NO: 256195
  chr6:56295532-56295644
  hypo

SEQ ID NO: 405280 - DNA, 74 bp, Homo sapiens; identical to SEQ ID NO: 256196
  chr6:56297181-56297255
  hypo

SEQ ID NO: 405281 - DNA, 144 bp, Homo sapiens; identical to SEQ ID NO: 256202
  chr6:57726146-57726290
  hypo

SEQ ID NO: 405282 - DNA, 96 bp, Homo sapiens; identical to SEQ ID NO: 256205
  chr6:64151088-64151184
  hypo

SEQ ID NO: 405283 - DNA, 100 bp, Homo sapiens; identical to SEQ ID NO: 210841
  chr6:64354747-64354847
  hypo

SEQ ID NO: 405284 - DNA, 489 bp, Homo sapiens; identical to SEQ ID NO: 256207
  chr6:66497655-66498144
  hypo

SEQ ID NO: 405285 - DNA, 62 bp, Homo sapiens; identical to SEQ ID NO: 256211
  chr6:71521663-71521725
  hypo

SEQ ID NO: 405286 - DNA, 38 bp, Homo sapiens; identical to SEQ ID NO: 256212
  chr6:71544653-71544691
  hypo

SEQ ID NO: 405287 - DNA, 183 bp, Homo sapiens; identical to SEQ ID NO: 256213
  chr6:71556091-71556274
  hypo

SEQ ID NO: 405288 - DNA, 106 bp, Homo sapiens; identical to SEQ ID NO: 210850
  chr6:72806769-72806875
  hypo

SEQ ID NO: 405289 - DNA, 93 bp, Homo sapiens; identical to SEQ ID NO: 210851
  chr6:72806905-72806998
  hypo

SEQ ID NO: 405290 - DNA, 65 bp, Homo sapiens; identical to SEQ ID NO: 256217
  chr6:73319961-73320026
  hypo

SEQ ID NO: 405291 - DNA, 42 bp, Homo sapiens; identical to SEQ ID NO: 256221
  chr6:74016436-74016478
  hypo

SEQ ID NO: 405292 - DNA, 37 bp, Homo sapiens; identical to SEQ ID NO: 256227
  chr6:75995669-75995706
  hypo

SEQ ID NO: 405293 - DNA, 41 bp, Homo sapiens; identical to SEQ ID NO: 210857
  chr6:82588584-82588625
  hypo

SEQ ID NO: 405294 - DNA, 42 bp, Homo sapiens; identical to SEQ ID NO: 256233
  chr6:82936653-82936695
  hypo

SEQ ID NO: 405295 - DNA, 43 bp, Homo sapiens; identical to SEQ ID NO: 210858
  chr6:83901419-83901462
  hypo

SEQ ID NO: 405296 - DNA, 82 bp, Homo sapiens; identical to SEQ ID NO: 256238
  chr6:86653351-86653433
  hypo

SEQ ID NO: 405297 - DNA, 81 bp, Homo sapiens; identical to SEQ ID NO: 256240
  chr6:87725863-87725944
  hypo

SEQ ID NO: 405298 - DNA, 145 bp, Homo sapiens; identical to SEQ ID NO: 222892
  chr6:87832386-87832531
  hypo

SEQ ID NO: 405299 - DNA, 101 bp, Homo sapiens; identical to SEQ ID NO: 210862
  chr6:88280033-88280134
  hypo

SEQ ID NO: 405300 - DNA, 35 bp, Homo sapiens; identical to SEQ ID NO: 256244
  chr6:88461840-88461875
  hypo

SEQ ID NO: 405301 - DNA, 120 bp, Homo sapiens; identical to SEQ ID NO: 256245
  chr6:88553999-88554119
  hypo

SEQ ID NO: 405302 - DNA, 120 bp, Homo sapiens; identical to SEQ ID NO: 210863
  chr6:89376382-89376502
  hypo

SEQ ID NO: 405303 - DNA, 332 bp, Homo sapiens; identical to SEQ ID NO: 284237
  chr6:89827121-89827453
  hypo

SEQ ID NO: 405304 - DNA, 195 bp, Homo sapiens; identical to SEQ ID NO: 256251
  chr6:89913946-89914141
  hypo

SEQ ID NO: 405305 - DNA, 337 bp, Homo sapiens; identical to SEQ ID NO: 284241
  chr6:90062614-90062951
  hypo

SEQ ID NO: 405306 - DNA, 182 bp, Homo sapiens; identical to SEQ ID NO: 256253
  chr6:90095593-90095775
  hypo

SEQ ID NO: 405307 - DNA, 35 bp, Homo sapiens; identical to SEQ ID NO: 256256
  chr6:90522085-90522120
  hypo

SEQ ID NO: 405308 - DNA, 45 bp, Homo sapiens; identical to SEQ ID NO: 256259
  chr6:91291934-91291979
  hypo

SEQ ID NO: 405309 - DNA, 44 bp, Homo sapiens; identical to SEQ ID NO: 256260
  chr6:91304006-91304050
  hypo

SEQ ID NO: 405310 - DNA, 34 bp, Homo sapiens; identical to SEQ ID NO: 256263
  chr6:96552675-96552709
  hypo

SEQ ID NO: 405311 - DNA, 66 bp, Homo sapiens; identical to SEQ ID NO: 200588
  chr6:99962859-99962925
  hypo

SEQ ID NO: 405312 - DNA, 219 bp, Homo sapiens; identical to SEQ ID NO: 232287
  chr6:99963448-99963667
  hypo

SEQ ID NO: 405313 - DNA, 32 bp, Homo sapiens; identical to SEQ ID NO: 256268
  chr6:106582673-106582705
  hypo

SEQ ID NO: 405314 - DNA, 120 bp, Homo sapiens; identical to SEQ ID NO: 210880
  chr6:107562426-107562546
  hypo

SEQ ID NO: 405315 - DNA, 36 bp, Homo sapiens; identical to SEQ ID NO: 210881
  chr6:107563806-107563842
  hypo

SEQ ID NO: 405316 - DNA, 31 bp, Homo sapiens; identical to SEQ ID NO: 256276
  chr6:108997762-108997793
  hypo

SEQ ID NO: 405317 - DNA, 429 bp, Homo sapiens; identical to SEQ ID NO: 200619
  chr6:109777177-109777606
  hypo

SEQ ID NO: 405318 - DNA, 82 bp, Homo sapiens; identical to SEQ ID NO: 256295
  chr6:110968047-110968129
  hypo

SEQ ID NO: 405319 - DNA, 86 bp, Homo sapiens; identical to SEQ ID NO: 210893
  chr6:111022042-111022128
  hypo

SEQ ID NO: 405320 - DNA, 45 bp, Homo sapiens; identical to SEQ ID NO: 210894
  chr6:111085015-111085060
  hypo

SEQ ID NO: 405321 - DNA, 177 bp, Homo sapiens; identical to SEQ ID NO: 256299
  chr6:111244972-111245149
  hypo

SEQ ID NO: 405322 - DNA, 41 bp, Homo sapiens; identical to SEQ ID NO: 256301
  chr6:111579404-111579445
  hypo

SEQ ID NO: 405323 - DNA, 195 bp, Homo sapiens; identical to SEQ ID NO: 210897
  chr6:111673961-111674156
  hypo

SEQ ID NO: 405324 - DNA, 245 bp, Homo sapiens; identical to SEQ ID NO: 256305
  chr6:111750920-111751165
  hypo

SEQ ID NO: 405325 - DNA, 153 bp, Homo sapiens; identical to SEQ ID NO: 306157
  chr6:111874474-111874627
  hypo

SEQ ID NO: 405326 - DNA, 102 bp, Homo sapiens; identical to SEQ ID NO: 256312
  chr6:111955506-111955608
  hypo

SEQ ID NO: 405327 - DNA, 186 bp, Homo sapiens; identical to SEQ ID NO: 256313
  chr6:111993235-111993421
  hypo

SEQ ID NO: 405328 - DNA, 86 bp, Homo sapiens; identical to SEQ ID NO: 256315
  chr6:112128161-112128247
  hypo

SEQ ID NO: 405329 - DNA, 40 bp, Homo sapiens; identical to SEQ ID NO: 256318
  chr6:116873934-116873974
  hypo

SEQ ID NO: 405330 - DNA, 130 bp, Homo sapiens; identical to SEQ ID NO: 256319
  chr6:116905294-116905424
  hypo

SEQ ID NO: 405331 - DNA, 34 bp, Homo sapiens; identical to SEQ ID NO: 256320
  chr6:117100692-117100726
  hypo

SEQ ID NO: 405332 - DNA, 703 bp, Homo sapiens; identical to SEQ ID NO: 222918
  chr6:117803613-117804316
  hypo

SEQ ID NO: 405333 - DNA, 62 bp, Homo sapiens; identical to SEQ ID NO: 256321
  chr6:117894655-117894717
  hypo

SEQ ID NO: 405334 - DNA, 81 bp, Homo sapiens; identical to SEQ ID NO: 256325
  chr6:119162952-119163033
  hypo

SEQ ID NO: 405335 - DNA, 92 bp, Homo sapiens; identical to SEQ ID NO: 210904
  chr6:119254299-119254391
  hypo

SEQ ID NO: 405336 - DNA, 41 bp, Homo sapiens; identical to SEQ ID NO: 256334
  chr6:119620032-119620073
  hypo

SEQ ID NO: 405337 - DNA, 40 bp, Homo sapiens; identical to SEQ ID NO: 222921
  chr6:119762016-119762056
  hypo

SEQ ID NO: 405338 - DNA, 92 bp, Homo sapiens; identical to SEQ ID NO: 256335
  chr6:119834901-119834993
  hypo

SEQ ID NO: 405339 - DNA, 105 bp, Homo sapiens; identical to SEQ ID NO: 222922
  chr6:123110275-123110380
  hypo

SEQ ID NO: 405340 - DNA, 420 bp, Homo sapiens; identical to SEQ ID NO: 222923
  chr6:123110438-123110858
  hypo

SEQ ID NO: 405341 - DNA, 39 bp, Homo sapiens; identical to SEQ ID NO: 256339
  chr6:125207462-125207501
  hypo

SEQ ID NO: 405342 - DNA, 210 bp, Homo sapiens; identical to SEQ ID NO: 256340
  chr6:125299462-125299672
  hypo

SEQ ID NO: 405343 - DNA, 78 bp, Homo sapiens; identical to SEQ ID NO: 284420
  chr6:125420731-125420809
  hypo

SEQ ID NO: 405344 - DNA, 151 bp, Homo sapiens; identical to SEQ ID NO: 210907
  chr6:126242092-126242243
  hypo

SEQ ID NO: 405345 - DNA, 57 bp, Homo sapiens; identical to SEQ ID NO: 256343
  chr6:126243892-126243949
  hypo

SEQ ID NO: 405346 - DNA, 81 bp, Homo sapiens; identical to SEQ ID NO: 256347
  chr6:129635704-129635785
  hypo

SEQ ID NO: 405347 - DNA, 193 bp, Homo sapiens; identical to SEQ ID NO: 222933
  chr6:133146628-133146821
  hypo

SEQ ID NO: 405348 - DNA, 43 bp, Homo sapiens; identical to SEQ ID NO: 256353
  chr6:134502445-134502488
  hypo

SEQ ID NO: 405349 - DNA, 32 bp, Homo sapiens; identical to SEQ ID NO: 256354
  chr6:134545871-134545903
  hypo

SEQ ID NO: 405350 - DNA, 74 bp, Homo sapiens; identical to SEQ ID NO: 256357
  chr6:134749836-134749910
  hypo

SEQ ID NO: 405351 - DNA, 82 bp, Homo sapiens; identical to SEQ ID NO: 210914
  chr6:134817633-134817715
  hypo

SEQ ID NO: 405352 - DNA, 36 bp, Homo sapiens; identical to SEQ ID NO: 256359
  chr6:135305600-135305636
  hypo

SEQ ID NO: 405353 - DNA, 44 bp, Homo sapiens; identical to SEQ ID NO: 200662
  chr6:135503608-135503652
  hypo

SEQ ID NO: 405354 - DNA, 34 bp, Homo sapiens; identical to SEQ ID NO: 256361
  chr6:135930509-135930543
  hypo

SEQ ID NO: 405355 - DNA, 535 bp, Homo sapiens; identical to SEQ ID NO: 222937
  chr6:136870742-136871277
  hypo

SEQ ID NO: 405356 - DNA, 212 bp, Homo sapiens; identical to SEQ ID NO: 256371
  chr6:137147517-137147729
  hypo

SEQ ID NO: 405357 - DNA, 227 bp, Homo sapiens; identical to SEQ ID NO: 284494
  chr6:138428363-138428590
  hypo

SEQ ID NO: 405358 - DNA, 190 bp, Homo sapiens; identical to SEQ ID NO: 256372
  chr6:138518767-138518957
  hypo

SEQ ID NO: 405359 - DNA, 41 bp, Homo sapiens; identical to SEQ ID NO: 256375
  chr6:138812078-138812119
  hypo

SEQ ID NO: 405360 - DNA, 161 bp, Homo sapiens; identical to SEQ ID NO: 210924
  chr6:138883861-138884022
  hypo

SEQ ID NO: 405361 - DNA, 154 bp, Homo sapiens; identical to SEQ ID NO: 256378
  chr6:138905937-138906091
  hypo

SEQ ID NO: 405362 - DNA, 402 bp, Homo sapiens; identical to SEQ ID NO: 397493
  chr6:139013361-139013763
  hypo

SEQ ID NO: 405363 - DNA, 379 bp, Homo sapiens; identical to SEQ ID NO: 256380
  chr6:139564048-139564427
  hypo

SEQ ID NO: 405364 - DNA, 303 bp, Homo sapiens; identical to SEQ ID NO: 397496
  chr6:139695068-139695371
  hypo

SEQ ID NO: 405365 - DNA, 31 bp, Homo sapiens; identical to SEQ ID NO: 256387
  chr6:139908685-139908716
  hypo

SEQ ID NO: 405366 - DNA, 35 bp, Homo sapiens; identical to SEQ ID NO: 256389
  chr6:141150320-141150355
  hypo

SEQ ID NO: 405367 - DNA, 32 bp, Homo sapiens; identical to SEQ ID NO: 256390
  chr6:142237865-142237897
  hypo

SEQ ID NO: 405368 - DNA, 86 bp, Homo sapiens; identical to SEQ ID NO: 256391
  chr6:142509608-142509694
  hypo

SEQ ID NO: 405369 - DNA, 54 bp, Homo sapiens; identical to SEQ ID NO: 397499
  chr6:142622529-142622583
  hypo

SEQ ID NO: 405370 - DNA, 65 bp, Homo sapiens; identical to SEQ ID NO: 210930
  chr6:143031708-143031773
  hypo

SEQ ID NO: 405371 - DNA, 38 bp, Homo sapiens; identical to SEQ ID NO: 256395
  chr6:143239181-143239219
  hypo

SEQ ID NO: 405372 - DNA, 713 bp, Homo sapiens; identical to SEQ ID NO: 222946
  chr6:143998943-143999656
  hypo

SEQ ID NO: 405373 - DNA, 173 bp, Homo sapiens; identical to SEQ ID NO: 256399
  chr6:144067584-144067757
  hypo

SEQ ID NO: 405374 - DNA, 250 bp, Homo sapiens; identical to SEQ ID NO: 256400
  chr6:144271186-144271436
  hypo

SEQ ID NO: 405375 - DNA, 72 bp, Homo sapiens; identical to SEQ ID NO: 210933
  chr6:144330175-144330247
  hypo

SEQ ID NO: 405376 - DNA, 46 bp, Homo sapiens; identical to SEQ ID NO: 200686
  chr6:144537939-144537985
  hypo

SEQ ID NO: 405377 - DNA, 69 bp, Homo sapiens; identical to SEQ ID NO: 256406
  chr6:147519322-147519391
  hypo

SEQ ID NO: 405378 - DNA, 42 bp, Homo sapiens; identical to SEQ ID NO: 256408
  chr6:148062632-148062674
  hypo

SEQ ID NO: 405379 - DNA, 137 bp, Homo sapiens; identical to SEQ ID NO: 210942
  chr6:148200360-148200497
  hypo

SEQ ID NO: 405380 - DNA, 157 bp, Homo sapiens; identical to SEQ ID NO: 256411
  chr6:148710316-148710473
  hypo

SEQ ID NO: 405381 - DNA, 210 bp, Homo sapiens; identical to SEQ ID NO: 256413
  chr6:148869356-148869566
  hypo

SEQ ID NO: 405382 - DNA, 195 bp, Homo sapiens; identical to SEQ ID NO: 256414
  chr6:149177572-149177767
  hypo

SEQ ID NO: 405383 - DNA, 92 bp, Homo sapiens; identical to SEQ ID NO: 256415
  chr6:149198424-149198516
  hypo

SEQ ID NO: 405384 - DNA, 110 bp, Homo sapiens; identical to SEQ ID NO: 256418
  chr6:149721362-149721472
  hypo

SEQ ID NO: 405385 - DNA, 55 bp, Homo sapiens; identical to SEQ ID NO: 306295
  chr6:149868387-149868442
  hypo

SEQ ID NO: 405386 - DNA, 84 bp, Homo sapiens; identical to SEQ ID NO: 210945
  chr6:150081971-150082055
  hypo

SEQ ID NO: 405387 - DNA, 122 bp, Homo sapiens; identical to SEQ ID NO: 256425
  chr6:150174429-150174551
  hypo

SEQ ID NO: 405388 - DNA, 195 bp, Homo sapiens; identical to SEQ ID NO: 222953
  chr6:150185446-150185641
  hypo

SEQ ID NO: 405389 - DNA, 210 bp, Homo sapiens; identical to SEQ ID NO: 256426
  chr6:150209155-150209365
  hypo

SEQ ID NO: 405390 - DNA, 39 bp, Homo sapiens; identical to SEQ ID NO: 256428
  chr6:150420186-150420225
  hypo

SEQ ID NO: 405391 - DNA, 120 bp, Homo sapiens; identical to SEQ ID NO: 256429
  chr6:150421767-150421887
  hypo

SEQ ID NO: 405392 - DNA, 43 bp, Homo sapiens; identical to SEQ ID NO: 256431
  chr6:150437286-150437329
  hypo

SEQ ID NO: 405393 - DNA, 118 bp, Homo sapiens; identical to SEQ ID NO: 256433
  chr6:150498913-150499031
  hypo

SEQ ID NO: 405394 - DNA, 31 bp, Homo sapiens; identical to SEQ ID NO: 256434
  chr6:150499232-150499263
  hypo

SEQ ID NO: 405395 - DNA, 169 bp, Homo sapiens; identical to SEQ ID NO: 256435
  chr6:150518591-150518760
  hypo

SEQ ID NO: 405396 - DNA, 39 bp, Homo sapiens; identical to SEQ ID NO: 210947
  chr6:150596883-150596922
  hypo

SEQ ID NO: 405397 - DNA, 66 bp, Homo sapiens; identical to SEQ ID NO: 256438
  chr6:151125834-151125900
  hypo

SEQ ID NO: 405398 - DNA, 125 bp, Homo sapiens; identical to SEQ ID NO: 256439
  chr6:151306909-151307034
  hypo

SEQ ID NO: 405399 - DNA, 369 bp, Homo sapiens; identical to SEQ ID NO: 256443
  chr6:151662637-151663006
  hypo

SEQ ID NO: 405400 - DNA, 142 bp, Homo sapiens; identical to SEQ ID NO: 210955
  chr6:152099113-152099255
  hypo

SEQ ID NO: 405401 - DNA, 73 bp, Homo sapiens; identical to SEQ ID NO: 256456
  chr6:154757104-154757177
  hypo

SEQ ID NO: 405402 - DNA, 183 bp, Homo sapiens; identical to SEQ ID NO: 256459
  chr6:154799040-154799223
  hypo

SEQ ID NO: 405403 - DNA, 152 bp, Homo sapiens; identical to SEQ ID NO: 210960
  chr6:154894708-154894860
  hypo

SEQ ID NO: 405404 - DNA, 38 bp, Homo sapiens; identical to SEQ ID NO: 210961
  chr6:154970832-154970870
  hypo

SEQ ID NO: 405405 - DNA, 41 bp, Homo sapiens; identical to SEQ ID NO: 210962
  chr6:155077849-155077890
  hypo

SEQ ID NO: 405406 - DNA, 206 bp, Homo sapiens; identical to SEQ ID NO: 256469
  chr6:155353325-155353531
  hypo

SEQ ID NO: 405407 - DNA, 40 bp, Homo sapiens; identical to SEQ ID NO: 256477
  chr6:155991045-155991085
  hypo

SEQ ID NO: 405408 - DNA, 65 bp, Homo sapiens; identical to SEQ ID NO: 256478
  chr6:156030251-156030316
  hypo

SEQ ID NO: 405409 - DNA, 32 bp, Homo sapiens; identical to SEQ ID NO: 210966
  chr6:156156136-156156168
  hypo

SEQ ID NO: 405410 - DNA, 139 bp, Homo sapiens; identical to SEQ ID NO: 256482
  chr6:156710186-156710325
  hypo

SEQ ID NO: 405411 - DNA, 117 bp, Homo sapiens; identical to SEQ ID NO: 306361
  chr6:156817580-156817697
  hypo

SEQ ID NO: 405412 - DNA, 163 bp, Homo sapiens; identical to SEQ ID NO: 256484
  chr6:156876717-156876880
  hypo

SEQ ID NO: 405413 - DNA, 244 bp, Homo sapiens; identical to SEQ ID NO: 256485
  chr6:156883161-156883405
  hypo

SEQ ID NO: 405414 - DNA, 144 bp, Homo sapiens; identical to SEQ ID NO: 256492
  chr6:157411050-157411194
  hypo

SEQ ID NO: 405415 - DNA, 45 bp, Homo sapiens; identical to SEQ ID NO: 306372
  chr6:157431600-157431645
  hypo

SEQ ID NO: 405416 - DNA, 98 bp, Homo sapiens; identical to SEQ ID NO: 306373
  chr6:157431675-157431773
  hypo

SEQ ID NO: 405417 - DNA, 86 bp, Homo sapiens; identical to SEQ ID NO: 256495
  chr6:157447664-157447750
  hypo

SEQ ID NO: 405418 - DNA, 166 bp, Homo sapiens; identical to SEQ ID NO: 256496
  chr6:157472013-157472179
  hypo

SEQ ID NO: 405419 - DNA, 180 bp, Homo sapiens; identical to SEQ ID NO: 256499
  chr6:157484363-157484543
  hypo

SEQ ID NO: 405420 - DNA, 279 bp, Homo sapiens; identical to SEQ ID NO: 256500
  chr6:157498984-157499263
  hypo

SEQ ID NO: 405421 - DNA, 66 bp, Homo sapiens; identical to SEQ ID NO: 210973
  chr6:157548327-157548393
  hypo

SEQ ID NO: 405422 - DNA, 59 bp, Homo sapiens; identical to SEQ ID NO: 200718
  chr6:157802884-157802943
  hypo

SEQ ID NO: 405423 - DNA, 168 bp, Homo sapiens; identical to SEQ ID NO: 222962
  chr6:157803299-157803467
  hypo

SEQ ID NO: 405424 - DNA, 82 bp, Homo sapiens; identical to SEQ ID NO: 256508
  chr6:157837762-157837844
  hypo

SEQ ID NO: 405425 - DNA, 547 bp, Homo sapiens; identical to SEQ ID NO: 256511
  chr6:158017916-158018463
  hypo

SEQ ID NO: 405426 - DNA, 275 bp, Homo sapiens; identical to SEQ ID NO: 256514
  chr6:158070271-158070546
  hypo

SEQ ID NO: 405427 - DNA, 276 bp, Homo sapiens; identical to SEQ ID NO: 256517
  chr6:158116417-158116693
  hypo

SEQ ID NO: 405428 - DNA, 571 bp, Homo sapiens; identical to SEQ ID NO: 284588
  chr6:158244130-158244701
  hypo

SEQ ID NO: 405429 - DNA, 302 bp, Homo sapiens; identical to SEQ ID NO: 256518
  chr6:158296042-158296344
  hypo

SEQ ID NO: 405430 - DNA, 199 bp, Homo sapiens; identical to SEQ ID NO: 210981
  chr6:158328733-158328932
  hypo

SEQ ID NO: 405431 - DNA, 165 bp, Homo sapiens; identical to SEQ ID NO: 256522
  chr6:158454488-158454653
  hypo

SEQ ID NO: 405432 - DNA, 37 bp, Homo sapiens; identical to SEQ ID NO: 256524
  chr6:158563786-158563823
  hypo

SEQ ID NO: 405433 - DNA, 35 bp, Homo sapiens; identical to SEQ ID NO: 256525
  chr6:158567710-158567745
  hypo

SEQ ID NO: 405434 - DNA, 35 bp, Homo sapiens; identical to SEQ ID NO: 210984
  chr6:158593346-158593381
  hypo

SEQ ID NO: 405435 - DNA, 41 bp, Homo sapiens; identical to SEQ ID NO: 210985
  chr6:158734071-158734112
  hypo

SEQ ID NO: 405436 - DNA, 55 bp, Homo sapiens; identical to SEQ ID NO: 256534
  chr6:158925050-158925105
  hypo

SEQ ID NO: 405437 - DNA, 79 bp, Homo sapiens; identical to SEQ ID NO: 306421
  chr6:158982652-158982731
  hypo

SEQ ID NO: 405438 - DNA, 133 bp, Homo sapiens; identical to SEQ ID NO: 210990
  chr6:159049612-159049745
  hypo

SEQ ID NO: 405439 - DNA, 212 bp, Homo sapiens; identical to SEQ ID NO: 306424
  chr6:159049883-159050095
  hypo

SEQ ID NO: 405440 - DNA, 185 bp, Homo sapiens; identical to SEQ ID NO: 210992
  chr6:159135764-159135949
  hypo

SEQ ID NO: 405441 - DNA, 92 bp, Homo sapiens; identical to SEQ ID NO: 256544
  chr6:159177387-159177479
  hypo

SEQ ID NO: 405442 - DNA, 162 bp, Homo sapiens; identical to SEQ ID NO: 256545
  chr6:159180413-159180575
  hypo

SEQ ID NO: 405443 - DNA, 112 bp, Homo sapiens; identical to SEQ ID NO: 256546
  chr6:159182970-159183082
  hypo

SEQ ID NO: 405444 - DNA, 114 bp, Homo sapiens; identical to SEQ ID NO: 256547
  chr6:159188289-159188403
  hypo

SEQ ID NO: 405445 - DNA, 178 bp, Homo sapiens; identical to SEQ ID NO: 256549
  chr6:159193321-159193499
  hypo

SEQ ID NO: 405446 - DNA, 172 bp, Homo sapiens; identical to SEQ ID NO: 256553
  chr6:159211979-159212151
  hypo

SEQ ID NO: 405447 - DNA, 35 bp, Homo sapiens; identical to SEQ ID NO: 256554
  chr6:159213572-159213607
  hypo

SEQ ID NO: 405448 - DNA, 130 bp, Homo sapiens; identical to SEQ ID NO: 256555
  chr6:159215619-159215749
  hypo

SEQ ID NO: 405449 - DNA, 143 bp, Homo sapiens; identical to SEQ ID NO: 256556
  chr6:159219542-159219685
  hypo

SEQ ID NO: 405450 - DNA, 37 bp, Homo sapiens; identical to SEQ ID NO: 256557
  chr6:159223564-159223601
  hypo

SEQ ID NO: 405451 - DNA, 37 bp, Homo sapiens; identical to SEQ ID NO: 256558
  chr6:159223841-159223878
  hypo

SEQ ID NO: 405452 - DNA, 119 bp, Homo sapiens; identical to SEQ ID NO: 256561
  chr6:159345138-159345257
  hypo

SEQ ID NO: 405453 - DNA, 105 bp, Homo sapiens
  chr6:159419499-159419604
  hypo
caaaaaaaaaaaaagaaaaaaaaaaaggcttatgttttgttttttttctttcctatgtatgtttgaatatttgcaactgttcatggatgtaaaaacacaaactgc

SEQ ID NO: 405454 - DNA, 180 bp, Homo sapiens; identical to SEQ ID NO: 256569
  chr6:160328046-160328226
  hypo

SEQ ID NO: 405455 - DNA, 263 bp, Homo sapiens; identical to SEQ ID NO: 256573
  chr6:160459515-160459778
  hypo

SEQ ID NO: 405456 - DNA, 86 bp, Homo sapiens; identical to SEQ ID NO: 211002
  chr6:160475955-160476041
  hypo

SEQ ID NO: 405457 - DNA, 71 bp, Homo sapiens; identical to SEQ ID NO: 256577
  chr6:160509961-160510032
  hypo

SEQ ID NO: 405458 - DNA, 111 bp, Homo sapiens; identical to SEQ ID NO: 256580
  chr6:160527214-160527325
  hypo

SEQ ID NO: 405459 - DNA, 195 bp, Homo sapiens; identical to SEQ ID NO: 256582
  chr6:160680141-160680336
  hypo

SEQ ID NO: 405460 - DNA, 98 bp, Homo sapiens; identical to SEQ ID NO: 256583
  chr6:161430268-161430366
  hypo

SEQ ID NO: 405461 - DNA, 75 bp, Homo sapiens; identical to SEQ ID NO: 256586
  chr6:161549953-161550028
  hypo

SEQ ID NO: 405462 - DNA, 34 bp, Homo sapiens; identical to SEQ ID NO: 256587
  chr6:161556868-161556902
  hypo

SEQ ID NO: 405463 - DNA, 128 bp, Homo sapiens; identical to SEQ ID NO: 256589
  chr6:161559035-161559163
  hypo

SEQ ID NO: 405464 - DNA, 362 bp, Homo sapiens; identical to SEQ ID NO: 256590
  chr6:161559597-161559959
  hypo

SEQ ID NO: 405465 - DNA, 99 bp, Homo sapiens; identical to SEQ ID NO: 256596
  chr6:161642104-161642203
  hypo

SEQ ID NO: 405466 - DNA, 141 bp, Homo sapiens; identical to SEQ ID NO: 256599
  chr6:161788278-161788419
  hypo

SEQ ID NO: 405467 - DNA, 221 bp, Homo sapiens; identical to SEQ ID NO: 306491
  chr6:162253713-162253934
  hypo

SEQ ID NO: 405468 - DNA, 45 bp, Homo sapiens; identical to SEQ ID NO: 256603
  chr6:163032923-163032968
  hypo

SEQ ID NO: 405469 - DNA, 290 bp, Homo sapiens; identical to SEQ ID NO: 256604
  chr6:163321044-163321334
  hypo

SEQ ID NO: 405470 - DNA, 59 bp, Homo sapiens; identical to SEQ ID NO: 306496
  chr6:163558514-163558573
  hypo

SEQ ID NO: 405471 - DNA, 153 bp, Homo sapiens; identical to SEQ ID NO: 256607
  chr6:163607798-163607951
  hypo

SEQ ID NO: 405472 - DNA, 144 bp, Homo sapiens; identical to SEQ ID NO: 256608
  chr6:163710196-163710340
  hypo

SEQ ID NO: 405473 - DNA, 50 bp, Homo sapiens; identical to SEQ ID NO: 256611
  chr6:164112161-164112211
  hypo

SEQ ID NO: 405474 - DNA, 126 bp, Homo sapiens; identical to SEQ ID NO: 306502
  chr6:164170160-164170286
  hypo

SEQ ID NO: 405475 - DNA, 56 bp, Homo sapiens; identical to SEQ ID NO: 306503
  chr6:164170324-164170380
  hypo

SEQ ID NO: 405476 - DNA, 42 bp, Homo sapiens; identical to SEQ ID NO: 306506
  chr6:164283377-164283419
  hypo

SEQ ID NO: 405477 - DNA, 41 bp, Homo sapiens; identical to SEQ ID NO: 306513
  chr6:166128526-166128567
  hypo

SEQ ID NO: 405478 - DNA, 40 bp, Homo sapiens; identical to SEQ ID NO: 306514
  chr6:166128614-166128654
  hypo

SEQ ID NO: 405479 - DNA, 445 bp, Homo sapiens; identical to SEQ ID NO: 256627
  chr6:166240451-166240896
  hypo

SEQ ID NO: 405480 - DNA, 203 bp, Homo sapiens; identical to SEQ ID NO: 256634
  chr6:166868890-166869093
  hypo

SEQ ID NO: 405481 - DNA, 354 bp, Homo sapiens; identical to SEQ ID NO: 306525
  chr6:166943992-166944346
  hypo

SEQ ID NO: 405482 - DNA, 44 bp, Homo sapiens; identical to SEQ ID NO: 256636
  chr6:166944738-166944782
  hypo

SEQ ID NO: 405483 - DNA, 96 bp, Homo sapiens; identical to SEQ ID NO: 211014
  chr6:167051700-167051796
  hypo

SEQ ID NO: 405484 - DNA, 67 bp, Homo sapiens; identical to SEQ ID NO: 256640
  chr6:167091815-167091882
  hypo

SEQ ID NO: 405485 - DNA, 115 bp, Homo sapiens; identical to SEQ ID NO: 211015
  chr6:167136191-167136306
  hypo

SEQ ID NO: 405486 - DNA, 90 bp, Homo sapiens; identical to SEQ ID NO: 306533
  chr6:167136408-167136498
  hypo

SEQ ID NO: 405487 - DNA, 55 bp, Homo sapiens; identical to SEQ ID NO: 256646
  chr6:167169077-167169132
  hypo

SEQ ID NO: 405488 - DNA, 49 bp, Homo sapiens; identical to SEQ ID NO: 284644
  chr6:167276260-167276309
  hypo

SEQ ID NO: 405489 - DNA, 65 bp, Homo sapiens; identical to SEQ ID NO: 211017
  chr6:167384339-167384404
  hypo

SEQ ID NO: 405490 - DNA, 86 bp, Homo sapiens; identical to SEQ ID NO: 256654
  chr6:167707449-167707535
  hypo

SEQ ID NO: 405491 - DNA, 138 bp, Homo sapiens; identical to SEQ ID NO: 256655
  chr6:167813214-167813352
  hypo

SEQ ID NO: 405492 - DNA, 545 bp, Homo sapiens; identical to SEQ ID NO: 211020
  chr6:167880207-167880752
  hypo

SEQ ID NO: 405493 - DNA, 36 bp, Homo sapiens; identical to SEQ ID NO: 211022
  chr6:168131201-168131237
  hypo

SEQ ID NO: 405494 - DNA, 33 bp, Homo sapiens; identical to SEQ ID NO: 200752
  chr6:168227910-168227943
  hypo

SEQ ID NO: 405495 - DNA, 84 bp, Homo sapiens; identical to SEQ ID NO: 200753
  chr6:168228222-168228306
  hypo

SEQ ID NO: 405496 - DNA, 40 bp, Homo sapiens; identical to SEQ ID NO: 256667
  chr6:168387062-168387102
  hypo

SEQ ID NO: 405497 - DNA, 305 bp, Homo sapiens; identical to SEQ ID NO: 256672
  chr6:168391271-168391576
  hypo

SEQ ID NO: 405498 - DNA, 45 bp, Homo sapiens; identical to SEQ ID NO: 211031
  chr6:168428432-168428477
  hypo

SEQ ID NO: 405499 - DNA, 210 bp, Homo sapiens; identical to SEQ ID NO: 256681
  chr6:168453027-168453237
  hypo

SEQ ID NO: 405500 - DNA, 203 bp, Homo sapiens; identical to SEQ ID NO: 256683
  chr6:168458627-168458830
  hypo

SEQ ID NO: 405501 - DNA, 66 bp, Homo sapiens; identical to SEQ ID NO: 256684
  chr6:168461832-168461898
  hypo

SEQ ID NO: 405502 - DNA, 103 bp, Homo sapiens; identical to SEQ ID NO: 256691
  chr6:168490178-168490281
  hypo

SEQ ID NO: 405503 - DNA, 209 bp, Homo sapiens; identical to SEQ ID NO: 256695
  chr6:168591119-168591328
  hypo

SEQ ID NO: 405504 - DNA, 108 bp, Homo sapiens; identical to SEQ ID NO: 211038
  chr6:168613294-168613402
  hypo

SEQ ID NO: 405505 - DNA, 252 bp, Homo sapiens; identical to SEQ ID NO: 256697
  chr6:168633686-168633938
  hypo

SEQ ID NO: 405506 - DNA, 453 bp, Homo sapiens; identical to SEQ ID NO: 256701
  chr6:168708247-168708700
  hypo

SEQ ID NO: 405507 - DNA, 575 bp, Homo sapiens; identical to SEQ ID NO: 397545
  chr6:168720072-168720647
  hypo

SEQ ID NO: 405508 - DNA, 133 bp, Homo sapiens; identical to SEQ ID NO: 211043
  chr6:168813949-168814082
  hypo

SEQ ID NO: 405509 - DNA, 354 bp, Homo sapiens; identical to SEQ ID NO: 211044
  chr6:168936432-168936786
  hypo

SEQ ID NO: 405510 - DNA, 87 bp, Homo sapiens; identical to SEQ ID NO: 256707
  chr6:169013509-169013596
  hypo

SEQ ID NO: 405511 - DNA, 185 bp, Homo sapiens; identical to SEQ ID NO: 211045
  chr6:169106757-169106942
  hypo

SEQ ID NO: 405512 - DNA, 177 bp, Homo sapiens; identical to SEQ ID NO: 256710
  chr6:169465183-169465360
  hypo

SEQ ID NO: 405513 - DNA, 240 bp, Homo sapiens; identical to SEQ ID NO: 211049
  chr6:169592278-169592518
  hypo

SEQ ID NO: 405514 - DNA, 106 bp, Homo sapiens; identical to SEQ ID NO: 211053
  chr6:169641783-169641889
  hypo

SEQ ID NO: 405515 - DNA, 193 bp, Homo sapiens; identical to SEQ ID NO: 211054
  chr6:169642005-169642198
  hypo

SEQ ID NO: 405516 - DNA, 745 bp, Homo sapiens; identical to SEQ ID NO: 211055
  chr6:169648464-169649209
  hypo

SEQ ID NO: 405517 - DNA, 193 bp, Homo sapiens; identical to SEQ ID NO: 256721
  chr6:169803235-169803428
  hypo

SEQ ID NO: 405518 - DNA, 120 bp, Homo sapiens; identical to SEQ ID NO: 256722
  chr6:169880473-169880593
  hypo

SEQ ID NO: 405519 - DNA, 103 bp, Homo sapiens; identical to SEQ ID NO: 256723
  chr6:169971578-169971681
  hypo

SEQ ID NO: 405520 - DNA, 178 bp, Homo sapiens; identical to SEQ ID NO: 211056
  chr6:170059400-170059578
  hypo

SEQ ID NO: 405521 - DNA, 113 bp, Homo sapiens; identical to SEQ ID NO: 306626
  chr6:170065254-170065367
  hypo

SEQ ID NO: 405522 - DNA, 555 bp, Homo sapiens; identical to SEQ ID NO: 306627
  chr6:170065397-170065952
  hypo

SEQ ID NO: 405523 - DNA, 47 bp, Homo sapiens; identical to SEQ ID NO: 256732
  chr6:170413530-170413577
  hypo

SEQ ID NO: 405524 - DNA, 72 bp, Homo sapiens; identical to SEQ ID NO: 306635
  chr6:170413607-170413679
  hypo

SEQ ID NO: 405525 - DNA, 42 bp, Homo sapiens; identical to SEQ ID NO: 306636
  chr6:170413793-170413835
  hypo

SEQ ID NO: 405526 - DNA, 276 bp, Homo sapiens; identical to SEQ ID NO: 256738
  chr6:170492586-170492862
  hypo

SEQ ID NO: 405527 - DNA, 120 bp, Homo sapiens; identical to SEQ ID NO: 211065
  chr6:170500862-170500982
  hypo

SEQ ID NO: 405528 - DNA, 74 bp, Homo sapiens; identical to SEQ ID NO: 256742
  chr6:170578858-170578932
  hypo

SEQ ID NO: 405529 - DNA, 56 bp, Homo sapiens; identical to SEQ ID NO: 211067
  chr6:170579426-170579482
  hypo

SEQ ID NO: 405530 - DNA, 112 bp, Homo sapiens; identical to SEQ ID NO: 256746
  chr6:170713941-170714053
  hypo

SEQ ID NO: 405531 - DNA, 120 bp, Homo sapiens; identical to SEQ ID NO: 211068
  chr6:170894913-170895033
  hypo

SEQ ID NO: 405532 - DNA, 139 bp, Homo sapiens; identical to SEQ ID NO: 211069
  chr7:85450-85589
  hypo

SEQ ID NO: 405533 - DNA, 46 bp, Homo sapiens; identical to SEQ ID NO: 256752
  chr7:118252-118298
  hypo

SEQ ID NO: 405534 - DNA, 155 bp, Homo sapiens; identical to SEQ ID NO: 256754
  chr7:153660-153815
  hypo

SEQ ID NO: 405535 - DNA, 262 bp, Homo sapiens; identical to SEQ ID NO: 256757
  chr7:161869-162131
  hypo

SEQ ID NO: 405536 - DNA, 529 bp, Homo sapiens; identical to SEQ ID NO: 256761
  chr7:175273-175802
  hypo

SEQ ID NO: 405537 - DNA, 254 bp, Homo sapiens; identical to SEQ ID NO: 256762
  chr7:178590-178844
  hypo

SEQ ID NO: 405538 - DNA, 334 bp, Homo sapiens; identical to SEQ ID NO: 256763
  chr7:181259-181593
  hypo

SEQ ID NO: 405539 - DNA, 148 bp, Homo sapiens; identical to SEQ ID NO: 256764
  chr7:199426-199574
  hypo

SEQ ID NO: 405540 - DNA, 202 bp, Homo sapiens; identical to SEQ ID NO: 256765
  chr7:204779-204981
  hypo

SEQ ID NO: 405541 - DNA, 155 bp, Homo sapiens; identical to SEQ ID NO: 256768
  chr7:217102-217257
  hypo

SEQ ID NO: 405542 - DNA, 166 bp, Homo sapiens; identical to SEQ ID NO: 256772
  chr7:228056-228222
  hypo

SEQ ID NO: 405543 - DNA, 305 bp, Homo sapiens; identical to SEQ ID NO: 256775
  chr7:284816-285121
  hypo

SEQ ID NO: 405544 - DNA, 113 bp, Homo sapiens; identical to SEQ ID NO: 256778
  chr7:289727-289840
  hypo

SEQ ID NO: 405545 - DNA, 233 bp, Homo sapiens; identical to SEQ ID NO: 256780
  chr7:291025-291258
  hypo

SEQ ID NO: 405546 - DNA, 315 bp, Homo sapiens; identical to SEQ ID NO: 256784
  chr7:297158-297473
  hypo

SEQ ID NO: 405547 - DNA, 38 bp, Homo sapiens; identical to SEQ ID NO: 256786
  chr7:299617-299655
  hypo

SEQ ID NO: 405548 - DNA, 102 bp, Homo sapiens; identical to SEQ ID NO: 306702
  chr7:312490-312592
  hypo

SEQ ID NO: 405549 - DNA, 259 bp, Homo sapiens; identical to SEQ ID NO: 306703
  chr7:312638-312897
  hypo

SEQ ID NO: 405550 - DNA, 224 bp, Homo sapiens; identical to SEQ ID NO: 306704
  chr7:322815-323039
  hypo

SEQ ID NO: 405551 - DNA, 45 bp, Homo sapiens; identical to SEQ ID NO: 211085
  chr7:328541-328586
  hypo

SEQ ID NO: 405552 - DNA, 55 bp, Homo sapiens; identical to SEQ ID NO: 211086
  chr7:328625-328680
  hypo

SEQ ID NO: 405553 - DNA, 63 bp, Homo sapiens; identical to SEQ ID NO: 256794
  chr7:337996-338059
  hypo

SEQ ID NO: 405554 - DNA, 180 bp, Homo sapiens; identical to SEQ ID NO: 256799
  chr7:367650-367830
  hypo

SEQ ID NO: 405555 - DNA, 428 bp, Homo sapiens; identical to SEQ ID NO: 256807
  chr7:418417-418845
  hypo

SEQ ID NO: 405556 - DNA, 146 bp, Homo sapiens; identical to SEQ ID NO: 211094
  chr7:429737-429883
  hypo

SEQ ID NO: 405557 - DNA, 190 bp, Homo sapiens; identical to SEQ ID NO: 256811
  chr7:438533-438723
  hypo

SEQ ID NO: 405558 - DNA, 35 bp, Homo sapiens; identical to SEQ ID NO: 256813
  chr7:453594-453629
  hypo

SEQ ID NO: 405559 - DNA, 39 bp, Homo sapiens; identical to SEQ ID NO: 306738
  chr7:466508-466547
  hypo

SEQ ID NO: 405560 - DNA, 241 bp, Homo sapiens; identical to SEQ ID NO: 306739
  chr7:466577-466818
  hypo

SEQ ID NO: 405561 - DNA, 35 bp, Homo sapiens; identical to SEQ ID NO: 211098
  chr7:485248-485283
  hypo

SEQ ID NO: 405562 - DNA, 60 bp, Homo sapiens; identical to SEQ ID NO: 256827
  chr7:531100-531160
  hypo

SEQ ID NO: 405563 - DNA, 102 bp, Homo sapiens; identical to SEQ ID NO: 256830
  chr7:533202-533304
  hypo

SEQ ID NO: 405564 - DNA, 188 bp, Homo sapiens; identical to SEQ ID NO: 256831
  chr7:534692-534880
  hypo

SEQ ID NO: 405565 - DNA, 201 bp, Homo sapiens; identical to SEQ ID NO: 211101
  chr7:545346-545547
  hypo

SEQ ID NO: 405566 - DNA, 150 bp, Homo sapiens; identical to SEQ ID NO: 256839
  chr7:577692-577842
  hypo

SEQ ID NO: 405567 - DNA, 112 bp, Homo sapiens; identical to SEQ ID NO: 211106
  chr7:578810-578922
  hypo

SEQ ID NO: 405568 - DNA, 190 bp, Homo sapiens; identical to SEQ ID NO: 306764
  chr7:579048-579238
  hypo

SEQ ID NO: 405569 - DNA, 31 bp, Homo sapiens; identical to SEQ ID NO: 210108
  chr7:587416-587447
  hypo

SEQ ID NO: 405570 - DNA, 131 bp, Homo sapiens; identical to SEQ ID NO: 256843
  chr7:593561-593692
  hypo

SEQ ID NO: 405571 - DNA, 208 bp, Homo sapiens; identical to SEQ ID NO: 211108
  chr7:601255-601463
  hypo

SEQ ID NO: 405572 - DNA, 359 bp, Homo sapiens; identical to SEQ ID NO: 20843
  chr7:601503-601862
  hypo

SEQ ID NO: 405573 - DNA, 233 bp, Homo sapiens; identical to SEQ ID NO: 306770
  chr7:612444-612677
  hypo

SEQ ID NO: 405574 - DNA, 57 bp, Homo sapiens; identical to SEQ ID NO: 306771
  chr7:612745-612802
  hypo

SEQ ID NO: 405575 - DNA, 36 bp, Homo sapiens; identical to SEQ ID NO: 211111
  chr7:636569-636605
  hypo

SEQ ID NO: 405576 - DNA, 151 bp, Homo sapiens; identical to SEQ ID NO: 211116
  chr7:675431-675582
  hypo

SEQ ID NO: 405577 - DNA, 31 bp, Homo sapiens; identical to SEQ ID NO: 256861
  chr7:744080-744111
  hypo

SEQ ID NO: 405578 - DNA, 82 bp, Homo sapiens; identical to SEQ ID NO: 211118
  chr7:799679-799761
  hypo

SEQ ID NO: 405579 - DNA, 266 bp, Homo sapiens; identical to SEQ ID NO: 256867
  chr7:807795-808061
  hypo

SEQ ID NO: 405580 - DNA, 69 bp, Homo sapiens; identical to SEQ ID NO: 256872
  chr7:825191-825260
  hypo

SEQ ID NO: 405581 - DNA, 122 bp, Homo sapiens; identical to SEQ ID NO: 211129
  chr7:882990-883112
  hypo

SEQ ID NO: 405582 - DNA, 463 bp, Homo sapiens; identical to SEQ ID NO: 256879
  chr7:899731-900194
  hypo

SEQ ID NO: 405583 - DNA, 382 bp, Homo sapiens; identical to SEQ ID NO: 256880
  chr7:902843-903225
  hypo

SEQ ID NO: 405584 - DNA, 133 bp, Homo sapiens; identical to SEQ ID NO: 211134
  chr7:920785-920918
  hypo

SEQ ID NO: 405585 - DNA, 44 bp, Homo sapiens; identical to SEQ ID NO: 211136
  chr7:921709-921753
  hypo

SEQ ID NO: 405586 - DNA, 221 bp, Homo sapiens; identical to SEQ ID NO: 256886
  chr7:923637-923858
  hypo

SEQ ID NO: 405587 - DNA, 66 bp, Homo sapiens; identical to SEQ ID NO: 256889
  chr7:931798-931864
  hypo

SEQ ID NO: 405588 - DNA, 237 bp, Homo sapiens
  chr7:933055-933292
  hypo
ggtgagtgttgggtgcaggcatggttgcaggtgagtgttgggcgcgggcgcggtggtttgtgcaggtgagtgttgggtgcgggcatggtggttgcaggtgagtgttgggtgtaggcgtggtggtgtgtgcaggtgagtgttgggcgtaggcgtggtggttgcaggtgagtgttgggcatgggcgcggtgtgtgcaggtgagtgttgggcgcgggcgtggtggtgtgtgcaggtgagt

SEQ ID NO: 405589 - DNA, 152 bp, Homo sapiens; identical to SEQ ID NO: 211141
  chr7:955105-955257
  hypo

SEQ ID NO: 405590 - DNA, 301 bp, Homo sapiens; identical to SEQ ID NO: 256894
  chr7:955484-955785
  hypo

SEQ ID NO: 405591 - DNA, 210 bp, Homo sapiens; identical to SEQ ID NO: 211143
  chr7:960104-960314
  hypo

SEQ ID NO: 405592 - DNA, 120 bp, Homo sapiens; identical to SEQ ID NO: 256900
  chr7:984884-985004
  hypo

SEQ ID NO: 405593 - DNA, 182 bp, Homo sapiens; identical to SEQ ID NO: 256901
  chr7:985370-985552
  hypo

SEQ ID NO: 405594 - DNA, 110 bp, Homo sapiens; identical to SEQ ID NO: 211146
  chr7:986124-986234
  hypo

SEQ ID NO: 405595 - DNA, 186 bp, Homo sapiens; identical to SEQ ID NO: 211147
  chr7:986336-986522
  hypo

SEQ ID NO: 405596 - DNA, 324 bp, Homo sapiens; identical to SEQ ID NO: 256908
  chr7:1007358-1007682
  hypo

SEQ ID NO: 405597 - DNA, 37 bp, Homo sapiens; identical to SEQ ID NO: 256913
  chr7:1029508-1029545
  hypo

SEQ ID NO: 405598 - DNA, 206 bp, Homo sapiens; identical to SEQ ID NO: 256915
  chr7:1045397-1045603
  hypo

SEQ ID NO: 405599 - DNA, 212 bp, Homo sapiens; identical to SEQ ID NO: 211152
  chr7:1052679-1052891
  hypo

SEQ ID NO: 405600 - DNA, 440 bp, Homo sapiens; identical to SEQ ID NO: 256917
  chr7:1059664-1060104
  hypo

SEQ ID NO: 405601 - DNA, 332 bp, Homo sapiens; identical to SEQ ID NO: 284697
  chr7:1069637-1069969
  hypo

SEQ ID NO: 405602 - DNA, 188 bp, Homo sapiens; identical to SEQ ID NO: 256926
  chr7:1103862-1104050
  hypo

SEQ ID NO: 405603 - DNA, 63 bp, Homo sapiens; identical to SEQ ID NO: 391638
  chr7:1115545-1115608
  hypo

SEQ ID NO: 405604 - DNA, 127 bp, Homo sapiens; identical to SEQ ID NO: 211160
  chr7:1132022-1132149
  hypo

SEQ ID NO: 405605 - DNA, 148 bp, Homo sapiens; identical to SEQ ID NO: 256932
  chr7:1141332-1141480
  hypo

SEQ ID NO: 405606 - DNA, 150 bp, Homo sapiens; identical to SEQ ID NO: 256935
  chr7:1164416-1164566
  hypo

SEQ ID NO: 405607 - DNA, 93 bp, Homo sapiens; identical to SEQ ID NO: 256936
  chr7:1184625-1184718
  hypo

SEQ ID NO: 405608 - DNA, 48 bp, Homo sapiens; identical to SEQ ID NO: 256939
  chr7:1220822-1220870
  hypo

SEQ ID NO: 405609 - DNA, 77 bp, Homo sapiens; identical to SEQ ID NO: 211162
  chr7:1225056-1225133
  hypo

SEQ ID NO: 405610 - DNA, 68 bp, Homo sapiens; identical to SEQ ID NO: 211163
  chr7:1225226-1225294
  hypo

SEQ ID NO: 405611 - DNA, 154 bp, Homo sapiens; identical to SEQ ID NO: 256953
  chr7:1357986-1358140
  hypo

SEQ ID NO: 405612 - DNA, 265 bp, Homo sapiens; identical to SEQ ID NO: 256954
  chr7:1358498-1358763
  hypo

SEQ ID NO: 405613 - DNA, 119 bp, Homo sapiens; identical to SEQ ID NO: 306889
  chr7:1360167-1360286
  hypo

SEQ ID NO: 405614 - DNA, 929 bp, Homo sapiens; identical to SEQ ID NO: 256963
  chr7:1478541-1479470
  hypo

SEQ ID NO: 405615 - DNA, 301 bp, Homo sapiens; identical to SEQ ID NO: 256965
  chr7:1480645-1480946
  hypo

SEQ ID NO: 405616 - DNA, 95 bp, Homo sapiens; identical to SEQ ID NO: 256969
  chr7:1493403-1493498
  hypo

SEQ ID NO: 405617 - DNA, 95 bp, Homo sapiens; identical to SEQ ID NO: 256970
  chr7:1496414-1496509
  hypo

SEQ ID NO: 405618 - DNA, 280 bp, Homo sapiens; identical to SEQ ID NO: 211184
  chr7:1519129-1519409
  hypo

SEQ ID NO: 405619 - DNA, 236 bp, Homo sapiens; identical to SEQ ID NO: 256974
  chr7:1520865-1521101
  hypo

SEQ ID NO: 405620 - DNA, 144 bp, Homo sapiens; identical to SEQ ID NO: 211187
  chr7:1534752-1534896
  hypo

SEQ ID NO: 405621 - DNA, 68 bp, Homo sapiens; identical to SEQ ID NO: 211189
  chr7:1537961-1538029
  hypo

SEQ ID NO: 405622 - DNA, 210 bp, Homo sapiens; identical to SEQ ID NO: 211192
  chr7:1575803-1576013
  hypo

SEQ ID NO: 405623 - DNA, 1040 bp, Homo sapiens; identical to SEQ ID NO: 155292
  chr7:1578254-1579294
  hypo

SEQ ID NO: 405624 - DNA, 55 bp, Homo sapiens; identical to SEQ ID NO: 211194
  chr7:1579574-1579629
  hypo

SEQ ID NO: 405625 - DNA, 63 bp, Homo sapiens; identical to SEQ ID NO: 211195
  chr7:1582574-1582637
  hypo

SEQ ID NO: 405626 - DNA, 383 bp, Homo sapiens; identical to SEQ ID NO: 256994
  chr7:1585839-1586222
  hypo

SEQ ID NO: 405627 - DNA, 590 bp, Homo sapiens; identical to SEQ ID NO: 256995
  chr7:1589281-1589871
  hypo

SEQ ID NO: 405628 - DNA, 57 bp, Homo sapiens; identical to SEQ ID NO: 211198
  chr7:1590461-1590518
  hypo

SEQ ID NO: 405629 - DNA, 144 bp, Homo sapiens; identical to SEQ ID NO: 306937
  chr7:1620359-1620503
  hypo

SEQ ID NO: 405630 - DNA, 56 bp, Homo sapiens; identical to SEQ ID NO: 306938
  chr7:1620539-1620595
  hypo

SEQ ID NO: 405631 - DNA, 254 bp, Homo sapiens; identical to SEQ ID NO: 306940
  chr7:1627150-1627404
  hypo

SEQ ID NO: 405632 - DNA, 123 bp, Homo sapiens; identical to SEQ ID NO: 306941
  chr7:1627434-1627557
  hypo

SEQ ID NO: 405633 - DNA, 76 bp, Homo sapiens; identical to SEQ ID NO: 211201
  chr7:1650398-1650474
  hypo

SEQ ID NO: 405634 - DNA, 72 bp, Homo sapiens; identical to SEQ ID NO: 211203
  chr7:1681117-1681189
  hypo

SEQ ID NO: 405635 - DNA, 38 bp, Homo sapiens; identical to SEQ ID NO: 211204
  chr7:1681239-1681277
  hypo

SEQ ID NO: 405636 - DNA, 203 bp, Homo sapiens; identical to SEQ ID NO: 257013
  chr7:1692786-1692989
  hypo

SEQ ID NO: 405637 - DNA, 72 bp, Homo sapiens; identical to SEQ ID NO: 397563
  chr7:1710370-1710442
  hypo

SEQ ID NO: 405638 - DNA, 61 bp, Homo sapiens; identical to SEQ ID NO: 306958
  chr7:1719696-1719757
  hypo

SEQ ID NO: 405639 - DNA, 160 bp, Homo sapiens; identical to SEQ ID NO: 257023
  chr7:1785930-1786090
  hypo

SEQ ID NO: 405640 - DNA, 187 bp, Homo sapiens; identical to SEQ ID NO: 257025
  chr7:1794935-1795122
  hypo

SEQ ID NO: 405641 - DNA, 154 bp, Homo sapiens; identical to SEQ ID NO: 257029
  chr7:1846092-1846246
  hypo

SEQ ID NO: 405642 - DNA, 363 bp, Homo sapiens; identical to SEQ ID NO: 211212
  chr7:1855556-1855919
  hypo

SEQ ID NO: 405643 - DNA, 283 bp, Homo sapiens; identical to SEQ ID NO: 257034
  chr7:1864266-1864549
  hypo

SEQ ID NO: 405644 - DNA, 289 bp, Homo sapiens; identical to SEQ ID NO: 211213
  chr7:1865909-1866198
  hypo

SEQ ID NO: 405645 - DNA, 72 bp, Homo sapiens; identical to SEQ ID NO: 306980
  chr7:1888787-1888859
  hypo

SEQ ID NO: 405646 - DNA, 166 bp, Homo sapiens; identical to SEQ ID NO: 306981
  chr7:1888889-1889055
  hypo

SEQ ID NO: 405647 - DNA, 235 bp, Homo sapiens; identical to SEQ ID NO: 257042
  chr7:1937725-1937960
  hypo

SEQ ID NO: 405648 - DNA, 152 bp, Homo sapiens; identical to SEQ ID NO: 211219
  chr7:1950266-1950418
  hypo

SEQ ID NO: 405649 - DNA, 180 bp, Homo sapiens; identical to SEQ ID NO: 211220
  chr7:1950693-1950873
  hypo

SEQ ID NO: 405650 - DNA, 78 bp, Homo sapiens; identical to SEQ ID NO: 257046
  chr7:1961803-1961881
  hypo

SEQ ID NO: 405651 - DNA, 147 bp, Homo sapiens; identical to SEQ ID NO: 211222
  chr7:1969179-1969326
  hypo

SEQ ID NO: 405652 - DNA, 107 bp, Homo sapiens; identical to SEQ ID NO: 257053
  chr7:1999009-1999116
  hypo

SEQ ID NO: 405653 - DNA, 223 bp, Homo sapiens; identical to SEQ ID NO: 257056
  chr7:2007846-2008069
  hypo

SEQ ID NO: 405654 - DNA, 73 bp, Homo sapiens; identical to SEQ ID NO: 211228
  chr7:2027225-2027298
  hypo

SEQ ID NO: 405655 - DNA, 217 bp, Homo sapiens; identical to SEQ ID NO: 257061
  chr7:2035958-2036175
  hypo

SEQ ID NO: 405656 - DNA, 72 bp, Homo sapiens; identical to SEQ ID NO: 257065
  chr7:2046906-2046978
  hypo

SEQ ID NO: 405657 - DNA, 300 bp, Homo sapiens; identical to SEQ ID NO: 257066
  chr7:2053261-2053561
  hypo

SEQ ID NO: 405658 - DNA, 36 bp, Homo sapiens; identical to SEQ ID NO: 307013
  chr7:2056518-2056554
  hypo

SEQ ID NO: 405659 - DNA, 42 bp, Homo sapiens; identical to SEQ ID NO: 257069
  chr7:2067734-2067776
  hypo

SEQ ID NO: 405660 - DNA, 203 bp, Homo sapiens; identical to SEQ ID NO: 257076
  chr7:2091644-2091847
  hypo

SEQ ID NO: 405661 - DNA, 31 bp, Homo sapiens; identical to SEQ ID NO: 257077
  chr7:2092074-2092105
  hypo

SEQ ID NO: 405662 - DNA, 640 bp, Homo sapiens; identical to SEQ ID NO: 72943
  chr7:2094462-2095102
  hypo

SEQ ID NO: 405663 - DNA, 47 bp, Homo sapiens; identical to SEQ ID NO: 211235
  chr7:2099514-2099561
  hypo

SEQ ID NO: 405664 - DNA, 169 bp, Homo sapiens; identical to SEQ ID NO: 257080
  chr7:2100209-2100378
  hypo

SEQ ID NO: 405665 - DNA, 46 bp, Homo sapiens; identical to SEQ ID NO: 211236
  chr7:2105354-2105400
  hypo

SEQ ID NO: 405666 - DNA, 239 bp, Homo sapiens; identical to SEQ ID NO: 257083
  chr7:2108164-2108403
  hypo

SEQ ID NO: 405667 - DNA, 94 bp, Homo sapiens; identical to SEQ ID NO: 307030
  chr7:2110060-2110154
  hypo

SEQ ID NO: 405668 - DNA, 47 bp, Homo sapiens; identical to SEQ ID NO: 257089
  chr7:2130636-2130683
  hypo

SEQ ID NO: 405669 - DNA, 79 bp, Homo sapiens; identical to SEQ ID NO: 257090
  chr7:2138295-2138374
  hypo

SEQ ID NO: 405670 - DNA, 49 bp, Homo sapiens; identical to SEQ ID NO: 211238
  chr7:2148951-2149000
  hypo

SEQ ID NO: 405671 - DNA, 34 bp, Homo sapiens
  chr7:2162966-2163000
  hypo
gctcagccagctcagggactgagatgaaactgca

SEQ ID NO: 405672 - DNA, 158 bp, Homo sapiens; identical to SEQ ID NO: 257099
  chr7:2183890-2184048
  hypo

SEQ ID NO: 405673 - DNA, 100 bp, Homo sapiens; identical to SEQ ID NO: 257111
  chr7:2256931-2257031
  hypo

SEQ ID NO: 405674 - DNA, 490 bp, Homo sapiens; identical to SEQ ID NO: 257118
  chr7:2294448-2294938
  hypo

SEQ ID NO: 405675 - DNA, 149 bp, Homo sapiens; identical to SEQ ID NO: 211264
  chr7:2300173-2300322
  hypo

SEQ ID NO: 405676 - DNA, 552 bp, Homo sapiens; identical to SEQ ID NO: 257124
  chr7:2328672-2329224
  hypo

SEQ ID NO: 405677 - DNA, 152 bp, Homo sapiens; identical to SEQ ID NO: 257126
  chr7:2360917-2361069
  hypo

SEQ ID NO: 405678 - DNA, 127 bp, Homo sapiens; identical to SEQ ID NO: 257127
  chr7:2412473-2412600
  hypo

SEQ ID NO: 405679 - DNA, 33 bp, Homo sapiens; identical to SEQ ID NO: 257133
  chr7:2476917-2476950
  hypo

SEQ ID NO: 405680 - DNA, 33 bp, Homo sapiens; identical to SEQ ID NO: 307084
  chr7:2499648-2499681
  hypo

SEQ ID NO: 405681 - DNA, 479 bp, Homo sapiens; identical to SEQ ID NO: 307085
  chr7:2499718-2500197
  hypo

SEQ ID NO: 405682 - DNA, 175 bp, Homo sapiens; identical to SEQ ID NO: 211272
  chr7:2539250-2539425
  hypo

SEQ ID NO: 405683 - DNA, 43 bp, Homo sapiens; identical to SEQ ID NO: 155554
  chr7:2540075-2540118
  hypo

SEQ ID NO: 405684 - DNA, 77 bp, Homo sapiens; identical to SEQ ID NO: 223010
  chr7:2555344-2555421
  hypo

SEQ ID NO: 405685 - DNA, 309 bp, Homo sapiens; identical to SEQ ID NO: 257142
  chr7:2583247-2583556
  hypo

SEQ ID NO: 405686 - DNA, 301 bp, Homo sapiens; identical to SEQ ID NO: 211276
  chr7:2611215-2611516
  hypo

SEQ ID NO: 405687 - DNA, 41 bp, Homo sapiens; identical to SEQ ID NO: 257146
  chr7:2611944-2611985
  hypo

SEQ ID NO: 405688 - DNA, 42 bp, Homo sapiens; identical to SEQ ID NO: 211278
  chr7:2629286-2629328
  hypo

SEQ ID NO: 405689 - DNA, 269 bp, Homo sapiens; identical to SEQ ID NO: 257150
  chr7:2632066-2632335
  hypo

SEQ ID NO: 405690 - DNA, 52 bp, Homo sapiens; identical to SEQ ID NO: 257156
  chr7:2680524-2680576
  hypo

SEQ ID NO: 405691 - DNA, 182 bp, Homo sapiens; identical to SEQ ID NO: 211285
  chr7:2698474-2698656
  hypo

SEQ ID NO: 405692 - DNA, 151 bp, Homo sapiens; identical to SEQ ID NO: 257163
  chr7:2699684-2699835
  hypo

SEQ ID NO: 405693 - DNA, 167 bp, Homo sapiens; identical to SEQ ID NO: 211286
  chr7:2731703-2731870
  hypo

SEQ ID NO: 405694 - DNA, 242 bp, Homo sapiens; identical to SEQ ID NO: 257166
  chr7:2740188-2740430
  hypo

SEQ ID NO: 405695 - DNA, 32 bp, Homo sapiens; identical to SEQ ID NO: 257171
  chr7:2783184-2783216
  hypo

SEQ ID NO: 405696 - DNA, 120 bp, Homo sapiens; identical to SEQ ID NO: 257172
  chr7:2796665-2796785
  hypo

SEQ ID NO: 405697 - DNA, 49 bp, Homo sapiens; identical to SEQ ID NO: 257173
  chr7:2796965-2797014
  hypo

SEQ ID NO: 405698 - DNA, 101 bp, Homo sapiens; identical to SEQ ID NO: 257179
  chr7:2884994-2885095
  hypo

SEQ ID NO: 405699 - DNA, 49 bp, Homo sapiens; identical to SEQ ID NO: 211293
  chr7:2946305-2946354
  hypo

SEQ ID NO: 405700 - DNA, 160 bp, Homo sapiens; identical to SEQ ID NO: 257186
  chr7:2953809-2953969
  hypo

SEQ ID NO: 405701 - DNA, 127 bp, Homo sapiens; identical to SEQ ID NO: 73097
  chr7:2958269-2958396
  hypo

SEQ ID NO: 405702 - DNA, 93 bp, Homo sapiens; identical to SEQ ID NO: 211296
  chr7:2972305-2972398
  hypo

SEQ ID NO: 405703 - DNA, 216 bp, Homo sapiens; identical to SEQ ID NO: 211297
  chr7:2976623-2976839
  hypo

SEQ ID NO: 405704 - DNA, 505 bp, Homo sapiens; identical to SEQ ID NO: 257193
  chr7:3012740-3013245
  hypo

SEQ ID NO: 405705 - DNA, 222 bp, Homo sapiens; identical to SEQ ID NO: 211299
  chr7:3026339-3026561
  hypo

SEQ ID NO: 405706 - DNA, 125 bp, Homo sapiens; identical to SEQ ID NO: 257198
  chr7:3054280-3054405
  hypo

SEQ ID NO: 405707 - DNA, 42 bp, Homo sapiens; identical to SEQ ID NO: 257200
  chr7:3150400-3150442
  hypo

SEQ ID NO: 405708 - DNA, 44 bp, Homo sapiens; identical to SEQ ID NO: 211302
  chr7:3179217-3179261
  hypo

SEQ ID NO: 405709 - DNA, 42 bp, Homo sapiens; identical to SEQ ID NO: 257207
  chr7:3624123-3624165
  hypo

SEQ ID NO: 405710 - DNA, 33 bp, Homo sapiens; identical to SEQ ID NO: 211303
  chr7:3727109-3727142
  hypo

SEQ ID NO: 405711 - DNA, 111 bp, Homo sapiens; identical to SEQ ID NO: 211304
  chr7:3727180-3727291
  hypo

SEQ ID NO: 405712 - DNA, 42 bp, Homo sapiens; identical to SEQ ID NO: 257209
  chr7:3864237-3864279
  hypo

SEQ ID NO: 405713 - DNA, 88 bp, Homo sapiens; identical to SEQ ID NO: 257212
  chr7:3982615-3982703
  hypo

SEQ ID NO: 405714 - DNA, 97 bp, Homo sapiens; identical to SEQ ID NO: 211306
  chr7:3991158-3991255
  hypo

SEQ ID NO: 405715 - DNA, 131 bp, Homo sapiens; identical to SEQ ID NO: 257214
  chr7:3991580-3991711
  hypo

SEQ ID NO: 405716 - DNA, 42 bp, Homo sapiens; identical to SEQ ID NO: 257217
  chr7:4047169-4047211
  hypo

SEQ ID NO: 405717 - DNA, 192 bp, Homo sapiens; identical to SEQ ID NO: 307172
  chr7:4056949-4057141
  hypo

SEQ ID NO: 405718 - DNA, 169 bp, Homo sapiens; identical to SEQ ID NO: 211307
  chr7:4116727-4116896
  hypo

SEQ ID NO: 405719 - DNA, 257 bp, Homo sapiens; identical to SEQ ID NO: 211309
  chr7:4152827-4153084
  hypo

SEQ ID NO: 405720 - DNA, 54 bp, Homo sapiens; identical to SEQ ID NO: 211311
  chr7:4183234-4183288
  hypo

SEQ ID NO: 405721 - DNA, 152 bp, Homo sapiens; identical to SEQ ID NO: 211312
  chr7:4183448-4183600
  hypo

SEQ ID NO: 405722 - DNA, 561 bp, Homo sapiens; identical to SEQ ID NO: 257233
  chr7:4201343-4201904
  hypo

SEQ ID NO: 405723 - DNA, 42 bp, Homo sapiens; identical to SEQ ID NO: 257239
  chr7:4230171-4230213
  hypo

SEQ ID NO: 405724 - DNA, 199 bp, Homo sapiens; identical to SEQ ID NO: 211318
  chr7:4247841-4248040
  hypo

SEQ ID NO: 405725 - DNA, 188 bp, Homo sapiens; identical to SEQ ID NO: 257243
  chr7:4249811-4249999
  hypo

SEQ ID NO: 405726 - DNA, 85 bp, Homo sapiens; identical to SEQ ID NO: 307206
  chr7:4265508-4265593
  hypo

SEQ ID NO: 405727 - DNA, 316 bp, Homo sapiens; identical to SEQ ID NO: 211321
  chr7:4272745-4273061
  hypo

SEQ ID NO: 405728 - DNA, 139 bp, Homo sapiens; identical to SEQ ID NO: 257250
  chr7:4275903-4276042
  hypo

SEQ ID NO: 405729 - DNA, 209 bp, Homo sapiens; identical to SEQ ID NO: 211323
  chr7:4277417-4277626
  hypo

SEQ ID NO: 405730 - DNA, 183 bp, Homo sapiens; identical to SEQ ID NO: 211324
  chr7:4285297-4285480
  hypo

SEQ ID NO: 405731 - DNA, 42 bp, Homo sapiens; identical to SEQ ID NO: 257254
  chr7:4299321-4299363
  hypo

SEQ ID NO: 405732 - DNA, 101 bp, Homo sapiens; identical to SEQ ID NO: 257256
  chr7:4308003-4308104
  hypo

SEQ ID NO: 405733 - DNA, 289 bp, Homo sapiens; identical to SEQ ID NO: 307216
  chr7:4308194-4308483
  hypo

SEQ ID NO: 405734 - DNA, 155 bp, Homo sapiens; identical to SEQ ID NO: 257259
  chr7:4348038-4348193
  hypo

SEQ ID NO: 405735 - DNA, 81 bp, Homo sapiens; identical to SEQ ID NO: 211326
  chr7:4540651-4540732
  hypo

SEQ ID NO: 405736 - DNA, 79 bp, Homo sapiens; identical to SEQ ID NO: 257263
  chr7:4546534-4546613
  hypo

SEQ ID NO: 405737 - DNA, 147 bp, Homo sapiens; identical to SEQ ID NO: 211329
  chr7:4754252-4754399
  hypo

SEQ ID NO: 405738 - DNA, 130 bp, Homo sapiens; identical to SEQ ID NO: 257268
  chr7:4762728-4762858
  hypo

SEQ ID NO: 405739 - DNA, 50 bp, Homo sapiens; identical to SEQ ID NO: 200795
  chr7:4770079-4770129
  hypo

SEQ ID NO: 405740 - DNA, 48 bp, Homo sapiens; identical to SEQ ID NO: 257270
  chr7:4770224-4770272
  hypo

SEQ ID NO: 405741 - DNA, 831 bp, Homo sapiens; identical to SEQ ID NO: 257277
  chr7:4806263-4807094
  hypo

SEQ ID NO: 405742 - DNA, 127 bp, Homo sapiens; identical to SEQ ID NO: 257280
  chr7:4823843-4823970
  hypo

SEQ ID NO: 405743 - DNA, 225 bp, Homo sapiens; identical to SEQ ID NO: 257282
  chr7:4825103-4825328
  hypo

SEQ ID NO: 405744 - DNA, 97 bp, Homo sapiens; identical to SEQ ID NO: 257283
  chr7:4828437-4828534
  hypo

SEQ ID NO: 405745 - DNA, 363 bp, Homo sapiens; identical to SEQ ID NO: 257289
  chr7:4861934-4862297
  hypo

SEQ ID NO: 405746 - DNA, 216 bp, Homo sapiens; identical to SEQ ID NO: 257290
  chr7:4864847-4865063
  hypo

SEQ ID NO: 405747 - DNA, 34 bp, Homo sapiens; identical to SEQ ID NO: 211341
  chr7:4867284-4867318
  hypo

SEQ ID NO: 405748 - DNA, 167 bp, Homo sapiens; identical to SEQ ID NO: 211342
  chr7:4874066-4874233
  hypo

SEQ ID NO: 405749 - DNA, 201 bp, Homo sapiens; identical to SEQ ID NO: 211343
  chr7:4874263-4874464
  hypo

SEQ ID NO: 405750 - DNA, 281 bp, Homo sapiens; identical to SEQ ID NO: 257298
  chr7:4916207-4916488
  hypo

SEQ ID NO: 405751 - DNA, 35 bp, Homo sapiens; identical to SEQ ID NO: 257301
  chr7:4932640-4932675
  hypo

SEQ ID NO: 405752 - DNA, 108 bp, Homo sapiens; identical to SEQ ID NO: 211347
  chr7:4985899-4986007
  hypo

SEQ ID NO: 405753 - DNA, 263 bp, Homo sapiens; identical to SEQ ID NO: 257307
  chr7:5237698-5237961
  hypo

SEQ ID NO: 405754 - DNA, 121 bp, Homo sapiens; identical to SEQ ID NO: 257310
  chr7:5242891-5243012
  hypo

SEQ ID NO: 405755 - DNA, 114 bp, Homo sapiens; identical to SEQ ID NO: 211350
  chr7:5253973-5254087
  hypo

SEQ ID NO: 405756 - DNA, 395 bp, Homo sapiens; identical to SEQ ID NO: 257319
  chr7:5372388-5372783
  hypo

SEQ ID NO: 405757 - DNA, 118 bp, Homo sapiens; identical to SEQ ID NO: 257321
  chr7:5384805-5384923
  hypo

SEQ ID NO: 405758 - DNA, 55 bp, Homo sapiens; identical to SEQ ID NO: 257323
  chr7:5391379-5391434
  hypo

SEQ ID NO: 405759 - DNA, 103 bp, Homo sapiens; identical to SEQ ID NO: 257325
  chr7:5398875-5398978
  hypo

SEQ ID NO: 405760 - DNA, 81 bp, Homo sapiens; identical to SEQ ID NO: 211360
  chr7:5449226-5449307
  hypo

SEQ ID NO: 405761 - DNA, 221 bp, Homo sapiens; identical to SEQ ID NO: 200801
  chr7:5462090-5462311
  hypo

SEQ ID NO: 405762 - DNA, 249 bp, Homo sapiens; identical to SEQ ID NO: 257331
  chr7:5488162-5488411
  hypo

SEQ ID NO: 405763 - DNA, 74 bp, Homo sapiens; identical to SEQ ID NO: 211364
  chr7:5521784-5521858
  hypo

SEQ ID NO: 405764 - DNA, 189 bp, Homo sapiens; identical to SEQ ID NO: 257338
  chr7:5530811-5531000
  hypo

SEQ ID NO: 405765 - DNA, 93 bp, Homo sapiens; identical to SEQ ID NO: 257342
  chr7:5655367-5655460
  hypo

SEQ ID NO: 405766 - DNA, 301 bp, Homo sapiens; identical to SEQ ID NO: 257346
  chr7:5870805-5871106
  hypo

SEQ ID NO: 405767 - DNA, 94 bp, Homo sapiens; identical to SEQ ID NO: 211368
  chr7:5920562-5920656
  hypo

SEQ ID NO: 405768 - DNA, 125 bp, Homo sapiens; identical to SEQ ID NO: 257352
  chr7:6054904-6055029
  hypo

SEQ ID NO: 405769 - DNA, 41 bp, Homo sapiens; identical to SEQ ID NO: 211369
  chr7:6059658-6059699
  hypo

SEQ ID NO: 405770 - DNA, 185 bp, Homo sapiens; identical to SEQ ID NO: 211373
  chr7:6076894-6077079
  hypo

SEQ ID NO: 405771 - DNA, 240 bp, Homo sapiens; identical to SEQ ID NO: 257358
  chr7:6099499-6099739
  hypo

SEQ ID NO: 405772 - DNA, 147 bp, Homo sapiens; identical to SEQ ID NO: 257368
  chr7:6235848-6235995
  hypo

SEQ ID NO: 405773 - DNA, 94 bp, Homo sapiens; identical to SEQ ID NO: 257372
  chr7:6405541-6405635
  hypo

SEQ ID NO: 405774 - DNA, 48 bp, Homo sapiens; identical to SEQ ID NO: 211381
  chr7:6444143-6444191
  hypo

SEQ ID NO: 405775 - DNA, 177 bp, Homo sapiens; identical to SEQ ID NO: 211384
  chr7:6500829-6501006
  hypo

SEQ ID NO: 405776 - DNA, 126 bp, Homo sapiens; identical to SEQ ID NO: 257387
  chr7:6597055-6597181
  hypo

SEQ ID NO: 405777 - DNA, 41 bp, Homo sapiens; identical to SEQ ID NO: 211385
  chr7:6619099-6619140
  hypo

SEQ ID NO: 405778 - DNA, 203 bp, Homo sapiens; identical to SEQ ID NO: 211387
  chr7:6645603-6645806
  hypo

SEQ ID NO: 405779 - DNA, 133 bp, Homo sapiens; identical to SEQ ID NO: 257395
  chr7:6662671-6662804
  hypo

SEQ ID NO: 405780 - DNA, 132 bp, Homo sapiens; identical to SEQ ID NO: 257397
  chr7:6683068-6683200
  hypo

SEQ ID NO: 405781 - DNA, 190 bp, Homo sapiens; identical to SEQ ID NO: 211390
  chr7:6686203-6686393
  hypo

SEQ ID NO: 405782 - DNA, 186 bp, Homo sapiens; identical to SEQ ID NO: 211391
  chr7:6692859-6693045
  hypo

SEQ ID NO: 405783 - DNA, 71 bp, Homo sapiens; identical to SEQ ID NO: 284782
  chr7:6966984-6967055
  hypo

SEQ ID NO: 405784 - DNA, 80 bp, Homo sapiens; identical to SEQ ID NO: 307366
  chr7:7097584-7097664
  hypo

SEQ ID NO: 405785 - DNA, 104 bp, Homo sapiens; identical to SEQ ID NO: 307369
  chr7:7099575-7099679
  hypo

SEQ ID NO: 405786 - DNA, 43 bp, Homo sapiens; identical to SEQ ID NO: 257405
  chr7:7103152-7103195
  hypo

SEQ ID NO: 405787 - DNA, 165 bp, Homo sapiens; identical to SEQ ID NO: 73410
  chr7:7621497-7621662
  hypo

SEQ ID NO: 405788 - DNA, 89 bp, Homo sapiens; identical to SEQ ID NO: 257416
  chr7:7666892-7666981
  hypo

SEQ ID NO: 405789 - DNA, 86 bp, Homo sapiens; identical to SEQ ID NO: 257417
  chr7:7799055-7799141
  hypo

SEQ ID NO: 405790 - DNA, 81 bp, Homo sapiens; identical to SEQ ID NO: 211397
  chr7:7807037-7807118
  hypo

SEQ ID NO: 405791 - DNA, 97 bp, Homo sapiens; identical to SEQ ID NO: 257421
  chr7:7880864-7880961
  hypo

SEQ ID NO: 405792 - DNA, 100 bp, Homo sapiens; identical to SEQ ID NO: 257422
  chr7:7935069-7935169
  hypo

SEQ ID NO: 405793 - DNA, 90 bp, Homo sapiens; identical to SEQ ID NO: 257423
  chr7:7998934-7999024
  hypo

SEQ ID NO: 405794 - DNA, 36 bp, Homo sapiens; identical to SEQ ID NO: 211398
  chr7:8954796-8954832
  hypo

SEQ ID NO: 405795 - DNA, 42 bp, Homo sapiens; identical to SEQ ID NO: 257425
  chr7:9707913-9707955
  hypo

SEQ ID NO: 405796 - DNA, 32 bp, Homo sapiens; identical to SEQ ID NO: 257428
  chr7:11281035-11281067
  hypo

SEQ ID NO: 405797 - DNA, 136 bp, Homo sapiens; identical to SEQ ID NO: 257429
  chr7:12510651-12510787
  hypo

SEQ ID NO: 405798 - DNA, 32 bp, Homo sapiens; identical to SEQ ID NO: 211400
  chr7:12763983-12764015
  hypo

SEQ ID NO: 405799 - DNA, 34 bp, Homo sapiens; identical to SEQ ID NO: 257433
  chr7:13761024-13761058
  hypo

SEQ ID NO: 405800 - DNA, 37 bp, Homo sapiens; identical to SEQ ID NO: 257437
  chr7:16256011-16256048
  hypo

SEQ ID NO: 405801 - DNA, 88 bp, Homo sapiens; identical to SEQ ID NO: 257438
  chr7:16313198-16313286
  hypo

SEQ ID NO: 405802 - DNA, 38 bp, Homo sapiens; identical to SEQ ID NO: 211402
  chr7:16370912-16370950
  hypo

SEQ ID NO: 405803 - DNA, 135 bp, Homo sapiens; identical to SEQ ID NO: 211404
  chr7:16438008-16438143
  hypo

SEQ ID NO: 405804 - DNA, 337 bp, Homo sapiens; identical to SEQ ID NO: 257445
  chr7:17214726-17215063
  hypo

SEQ ID NO: 405805 - DNA, 33 bp, Homo sapiens; identical to SEQ ID NO: 257447
  chr7:18041863-18041896
  hypo

SEQ ID NO: 405806 - DNA, 40 bp, Homo sapiens; identical to SEQ ID NO: 257449
  chr7:19379034-19379074
  hypo

SEQ ID NO: 405807 - DNA, 38 bp, Homo sapiens; identical to SEQ ID NO: 257452
  chr7:20719883-20719921
  hypo

SEQ ID NO: 405808 - DNA, 79 bp, Homo sapiens; identical to SEQ ID NO: 397603
  chr7:20826019-20826098
  hypo

SEQ ID NO: 405809 - DNA, 120 bp, Homo sapiens; identical to SEQ ID NO: 211418
  chr7:20855065-20855185
  hypo

SEQ ID NO: 405810 - DNA, 91 bp, Homo sapiens; identical to SEQ ID NO: 257457
  chr7:21924279-21924370
  hypo

SEQ ID NO: 405811 - DNA, 37 bp, Homo sapiens; identical to SEQ ID NO: 257459
  chr7:22083773-22083810
  hypo

SEQ ID NO: 405812 - DNA, 104 bp, Homo sapiens; identical to SEQ ID NO: 211426
  chr7:23211637-23211741
  hypo

SEQ ID NO: 405813 - DNA, 40 bp, Homo sapiens; identical to SEQ ID NO: 211429
  chr7:23550217-23550257
  hypo

SEQ ID NO: 405814 - DNA, 42 bp, Homo sapiens; identical to SEQ ID NO: 211430
  chr7:23556807-23556849
  hypo

SEQ ID NO: 405815 - DNA, 146 bp, Homo sapiens; identical to SEQ ID NO: 200870
  chr7:24323183-24323329
  hypo

SEQ ID NO: 405816 - DNA, 139 bp, Homo sapiens; identical to SEQ ID NO: 397610
  chr7:24323343-24323482
  hypo

SEQ ID NO: 405817 - DNA, 37 bp, Homo sapiens; identical to SEQ ID NO: 257474
  chr7:24990042-24990079
  hypo

SEQ ID NO: 405818 - DNA, 146 bp, Homo sapiens; identical to SEQ ID NO: 211439
  chr7:25158787-25158933
  hypo

SEQ ID NO: 405819 - DNA, 200 bp, Homo sapiens; identical to SEQ ID NO: 223050
  chr7:25219900-25220100
  hypo

SEQ ID NO: 405820 - DNA, 33 bp, Homo sapiens; identical to SEQ ID NO: 257487
  chr7:26298989-26299022
  hypo

SEQ ID NO: 405821 - DNA, 138 bp, Homo sapiens; identical to SEQ ID NO: 211446
  chr7:26439682-26439820
  hypo

SEQ ID NO: 405822 - DNA, 151 bp, Homo sapiens; identical to SEQ ID NO: 211447
  chr7:26439850-26440001
  hypo

SEQ ID NO: 405823 - DNA, 95 bp, Homo sapiens; identical to SEQ ID NO: 257491
  chr7:26687816-26687911
  hypo

SEQ ID NO: 405824 - DNA, 477 bp, Homo sapiens; identical to SEQ ID NO: 284901
  chr7:27191584-27192061
  hypo

SEQ ID NO: 405825 - DNA, 320 bp, Homo sapiens; identical to SEQ ID NO: 284902
  chr7:27192098-27192418
  hypo

SEQ ID NO: 405826 - DNA, 35 bp, Homo sapiens; identical to SEQ ID NO: 257494
  chr7:27336400-27336435
  hypo

SEQ ID NO: 405827 - DNA, 38 bp, Homo sapiens; identical to SEQ ID NO: 257495
  chr7:27514343-27514381
  hypo

SEQ ID NO: 405828 - DNA, 188 bp, Homo sapiens; identical to SEQ ID NO: 257499
  chr7:27679515-27679703
  hypo

SEQ ID NO: 405829 - DNA, 57 bp, Homo sapiens
  chr7:27686860-27686917
  hypo
gctggacaaagggatgattcacatccaggttgggacagagctggacagcacaagatt

SEQ ID NO: 405830 - DNA, 225 bp, Homo sapiens; identical to SEQ ID NO: 257503
  chr7:27882584-27882809
  hypo

SEQ ID NO: 405831 - DNA, 184 bp, Homo sapiens; identical to SEQ ID NO: 257507
  chr7:27984539-27984723
  hypo

SEQ ID NO: 405832 - DNA, 38 bp, Homo sapiens; identical to SEQ ID NO: 257510
  chr7:28176530-28176568
  hypo

SEQ ID NO: 405833 - DNA, 202 bp, Homo sapiens; identical to SEQ ID NO: 257513
  chr7:28811874-28812076
  hypo

SEQ ID NO: 405834 - DNA, 49 bp, Homo sapiens; identical to SEQ ID NO: 257515
  chr7:29105618-29105667
  hypo

SEQ ID NO: 405835 - DNA, 34 bp, Homo sapiens; identical to SEQ ID NO: 257518
  chr7:29372516-29372550
  hypo

SEQ ID NO: 405836 - DNA, 103 bp, Homo sapiens; identical to SEQ ID NO: 257523
  chr7:29682478-29682581
  hypo

SEQ ID NO: 405837 - DNA, 56 bp, Homo sapiens; identical to SEQ ID NO: 257524
  chr7:29689982-29690038
  hypo

SEQ ID NO: 405838 - DNA, 369 bp, Homo sapiens; identical to SEQ ID NO: 200920
  chr7:29724332-29724701
  hypo

SEQ ID NO: 405839 - DNA, 208 bp, Homo sapiens; identical to SEQ ID NO: 397628
  chr7:30029494-30029702
  hypo

SEQ ID NO: 405840 - DNA, 149 bp, Homo sapiens; identical to SEQ ID NO: 211472
  chr7:30516406-30516555
  hypo

SEQ ID NO: 405841 - DNA, 412 bp, Homo sapiens; identical to SEQ ID NO: 257533
  chr7:30817952-30818364
  hypo

SEQ ID NO: 405842 - DNA, 50 bp, Homo sapiens; identical to SEQ ID NO: 211477
  chr7:30921727-30921777
  hypo

SEQ ID NO: 405843 - DNA, 173 bp, Homo sapiens; identical to SEQ ID NO: 257537
  chr7:30922908-30923081
  hypo

SEQ ID NO: 405844 - DNA, 115 bp, Homo sapiens; identical to SEQ ID NO: 257542
  chr7:30946539-30946654
  hypo

SEQ ID NO: 405845 - DNA, 115 bp, Homo sapiens; identical to SEQ ID NO: 257545
  chr7:31018779-31018894
  hypo

SEQ ID NO: 405846 - DNA, 163 bp, Homo sapiens; identical to SEQ ID NO: 257547
  chr7:31068265-31068428
  hypo

SEQ ID NO: 405847 - DNA, 31 bp, Homo sapiens; identical to SEQ ID NO: 257550
  chr7:32416317-32416348
  hypo

SEQ ID NO: 405848 - DNA, 207 bp, Homo sapiens; identical to SEQ ID NO: 257556
  chr7:33542772-33542979
  hypo

SEQ ID NO: 405849 - DNA, 140 bp, Homo sapiens; identical to SEQ ID NO: 211490
  chr7:34349352-34349492
  hypo

SEQ ID NO: 405850 - DNA, 44 bp, Homo sapiens; identical to SEQ ID NO: 257563
  chr7:34526629-34526673
  hypo

SEQ ID NO: 405851 - DNA, 97 bp, Homo sapiens; identical to SEQ ID NO: 211491
  chr7:35042666-35042763
  hypo

SEQ ID NO: 405852 - DNA, 31 bp, Homo sapiens; identical to SEQ ID NO: 257565
  chr7:35066801-35066832
  hypo

SEQ ID NO: 405853 - DNA, 36 bp, Homo sapiens; identical to SEQ ID NO: 211492
  chr7:35190412-35190448
  hypo

SEQ ID NO: 405854 - DNA, 41 bp, Homo sapiens; identical to SEQ ID NO: 257573
  chr7:36134208-36134249
  hypo

SEQ ID NO: 405855 - DNA, 34 bp, Homo sapiens; identical to SEQ ID NO: 257575
  chr7:36343958-36343992
  hypo

SEQ ID NO: 405856 - DNA, 43 bp, Homo sapiens; identical to SEQ ID NO: 257579
  chr7:36823504-36823547
  hypo

SEQ ID NO: 405857 - DNA, 177 bp, Homo sapiens; identical to SEQ ID NO: 257583
  chr7:36901365-36901542
  hypo

SEQ ID NO: 405858 - DNA, 54 bp, Homo sapiens; identical to SEQ ID NO: 257585
  chr7:36985067-36985121
  hypo

SEQ ID NO: 405859 - DNA, 104 bp, Homo sapiens; identical to SEQ ID NO: 211497
  chr7:37250876-37250980
  hypo

SEQ ID NO: 405860 - DNA, 131 bp, Homo sapiens; identical to SEQ ID NO: 257595
  chr7:38974187-38974318
  hypo

SEQ ID NO: 405861 - DNA, 166 bp, Homo sapiens; identical to SEQ ID NO: 257598
  chr7:40027212-40027378
  hypo

SEQ ID NO: 405862 - DNA, 32 bp, Homo sapiens; identical to SEQ ID NO: 257599
  chr7:40156753-40156785
  hypo

SEQ ID NO: 405863 - DNA, 38 bp, Homo sapiens; identical to SEQ ID NO: 257602
  chr7:40840156-40840194
  hypo

SEQ ID NO: 405864 - DNA, 57 bp, Homo sapiens; identical to SEQ ID NO: 257609
  chr7:42142438-42142495
  hypo

SEQ ID NO: 405865 - DNA, 31 bp, Homo sapiens; identical to SEQ ID NO: 211507
  chr7:42169385-42169416
  hypo

SEQ ID NO: 405866 - DNA, 93 bp, Homo sapiens; identical to SEQ ID NO: 257624
  chr7:43594218-43594311
  hypo

SEQ ID NO: 405867 - DNA, 185 bp, Homo sapiens; identical to SEQ ID NO: 257626
  chr7:43827245-43827430
  hypo

SEQ ID NO: 405868 - DNA, 36 bp, Homo sapiens; identical to SEQ ID NO: 257631
  chr7:44250466-44250502
  hypo

SEQ ID NO: 405869 - DNA, 322 bp, Homo sapiens; identical to SEQ ID NO: 257632
  chr7:44256925-44257247
  hypo

SEQ ID NO: 405870 - DNA, 91 bp, Homo sapiens; identical to SEQ ID NO: 257634
  chr7:44279651-44279742
  hypo

SEQ ID NO: 405871 - DNA, 144 bp, Homo sapiens; identical to SEQ ID NO: 211511
  chr7:44582326-44582470
  hypo

SEQ ID NO: 405872 - DNA, 272 bp, Homo sapiens; identical to SEQ ID NO: 307655
  chr7:44582529-44582801
  hypo

SEQ ID NO: 405873 - DNA, 39 bp, Homo sapiens; identical to SEQ ID NO: 211512
  chr7:44583394-44583433
  hypo

SEQ ID NO: 405874 - DNA, 66 bp, Homo sapiens; identical to SEQ ID NO: 211514
  chr7:44612063-44612129
  hypo

SEQ ID NO: 405875 - DNA, 148 bp, Homo sapiens; identical to SEQ ID NO: 257646
  chr7:44750444-44750592
  hypo

SEQ ID NO: 405876 - DNA, 428 bp, Homo sapiens; identical to SEQ ID NO: 307664
  chr7:44801215-44801643
  hypo

SEQ ID NO: 405877 - DNA, 32 bp, Homo sapiens; identical to SEQ ID NO: 257649
  chr7:44844994-44845026
  hypo

SEQ ID NO: 405878 - DNA, 96 bp, Homo sapiens; identical to SEQ ID NO: 257650
  chr7:44912167-44912263
  hypo

SEQ ID NO: 405879 - DNA, 623 bp, Homo sapiens; identical to SEQ ID NO: 223093
  chr7:45026005-45026628
  hypo

SEQ ID NO: 405880 - DNA, 166 bp, Homo sapiens; identical to SEQ ID NO: 211522
  chr7:45125709-45125875
  hypo

SEQ ID NO: 405881 - DNA, 103 bp, Homo sapiens; identical to SEQ ID NO: 257656
  chr7:45252688-45252791
  hypo

SEQ ID NO: 405882 - DNA, 153 bp, Homo sapiens; identical to SEQ ID NO: 211525
  chr7:45262245-45262398
  hypo

SEQ ID NO: 405883 - DNA, 96 bp, Homo sapiens; identical to SEQ ID NO: 257658
  chr7:45431198-45431294
  hypo

SEQ ID NO: 405884 - DNA, 180 bp, Homo sapiens; identical to SEQ ID NO: 257660
  chr7:45632339-45632519
  hypo

SEQ ID NO: 405885 - DNA, 61 bp, Homo sapiens; identical to SEQ ID NO: 211526
  chr7:45743036-45743097
  hypo

SEQ ID NO: 405886 - DNA, 45 bp, Homo sapiens; identical to SEQ ID NO: 257662
  chr7:45809383-45809428
  hypo

SEQ ID NO: 405887 - DNA, 282 bp, Homo sapiens; identical to SEQ ID NO: 257664
  chr7:47338286-47338568
  hypo

SEQ ID NO: 405888 - DNA, 84 bp, Homo sapiens; identical to SEQ ID NO: 257665
  chr7:47340361-47340445
  hypo

SEQ ID NO: 405889 - DNA, 44 bp, Homo sapiens; identical to SEQ ID NO: 257668
  chr7:47384308-47384352
  hypo

SEQ ID NO: 405890 - DNA, 255 bp, Homo sapiens; identical to SEQ ID NO: 257670
  chr7:47410354-47410609
  hypo

SEQ ID NO: 405891 - DNA, 87 bp, Homo sapiens; identical to SEQ ID NO: 257673
  chr7:47446856-47446943
  hypo

SEQ ID NO: 405892 - DNA, 71 bp, Homo sapiens; identical to SEQ ID NO: 211533
  chr7:47581607-47581678
  hypo

SEQ ID NO: 405893 - DNA, 69 bp, Homo sapiens; identical to SEQ ID NO: 257680
  chr7:47612934-47613003
  hypo

SEQ ID NO: 405894 - DNA, 151 bp, Homo sapiens; identical to SEQ ID NO: 211537
  chr7:47679854-47680005
  hypo

SEQ ID NO: 405895 - DNA, 62 bp, Homo sapiens; identical to SEQ ID NO: 257685
  chr7:47711089-47711151
  hypo

SEQ ID NO: 405896 - DNA, 33 bp, Homo sapiens; identical to SEQ ID NO: 257686
  chr7:48093728-48093761
  hypo

SEQ ID NO: 405897 - DNA, 262 bp, Homo sapiens; identical to SEQ ID NO: 200969
  chr7:48127995-48128257
  hypo

SEQ ID NO: 405898 - DNA, 31 bp, Homo sapiens; identical to SEQ ID NO: 257688
  chr7:48212093-48212124
  hypo

SEQ ID NO: 405899 - DNA, 95 bp, Homo sapiens; identical to SEQ ID NO: 257692
  chr7:50221917-50222012
  hypo

SEQ ID NO: 405900 - DNA, 349 bp, Homo sapiens; identical to SEQ ID NO: 307715
  chr7:50341935-50342284
  hypo

SEQ ID NO: 405901 - DNA, 348 bp, Homo sapiens; identical to SEQ ID NO: 307716
  chr7:50342314-50342662
  hypo

SEQ ID NO: 405902 - DNA, 153 bp, Homo sapiens; identical to SEQ ID NO: 257698
  chr7:50415431-50415584
  hypo

SEQ ID NO: 405903 - DNA, 180 bp, Homo sapiens; identical to SEQ ID NO: 257700
  chr7:50443887-50444067
  hypo

SEQ ID NO: 405904 - DNA, 56 bp, Homo sapiens; identical to SEQ ID NO: 211543
  chr7:50447754-50447810
  hypo

SEQ ID NO: 405905 - DNA, 108 bp, Homo sapiens; identical to SEQ ID NO: 257703
  chr7:50460166-50460274
  hypo

SEQ ID NO: 405906 - DNA, 250 bp, Homo sapiens; identical to SEQ ID NO: 257707
  chr7:50611649-50611899
  hypo

SEQ ID NO: 405907 - DNA, 355 bp, Homo sapiens; identical to SEQ ID NO: 257708
  chr7:50654699-50655054
  hypo

SEQ ID NO: 405908 - DNA, 103 bp, Homo sapiens; identical to SEQ ID NO: 211550
  chr7:50659743-50659846
  hypo

SEQ ID NO: 405909 - DNA, 46 bp, Homo sapiens; identical to SEQ ID NO: 257718
  chr7:50734033-50734079
  hypo

SEQ ID NO: 405910 - DNA, 37 bp, Homo sapiens; identical to SEQ ID NO: 257719
  chr7:50740987-50741024
  hypo

SEQ ID NO: 405911 - DNA, 257 bp, Homo sapiens; identical to SEQ ID NO: 257721
  chr7:50801206-50801463
  hypo

SEQ ID NO: 405912 - DNA, 81 bp, Homo sapiens; identical to SEQ ID NO: 257723
  chr7:50821773-50821854
  hypo

SEQ ID NO: 405913 - DNA, 42 bp, Homo sapiens; identical to SEQ ID NO: 257727
  chr7:50905759-50905801
  hypo

SEQ ID NO: 405914 - DNA, 191 bp, Homo sapiens; identical to SEQ ID NO: 211554
  chr7:50935531-50935722
  hypo

SEQ ID NO: 405915 - DNA, 159 bp, Homo sapiens; identical to SEQ ID NO: 211555
  chr7:51083468-51083627
  hypo

SEQ ID NO: 405916 - DNA, 167 bp, Homo sapiens; identical to SEQ ID NO: 257734
  chr7:51126558-51126725
  hypo

SEQ ID NO: 405917 - DNA, 173 bp, Homo sapiens; identical to SEQ ID NO: 257735
  chr7:51130438-51130611
  hypo

SEQ ID NO: 405918 - DNA, 69 bp, Homo sapiens; identical to SEQ ID NO: 257736
  chr7:51323448-51323517
  hypo

SEQ ID NO: 405919 - DNA, 42 bp, Homo sapiens; identical to SEQ ID NO: 257737
  chr7:51374681-51374723
  hypo

SEQ ID NO: 405920 - DNA, 94 bp, Homo sapiens; identical to SEQ ID NO: 257740
  chr7:53071290-53071384
  hypo

SEQ ID NO: 405921 - DNA, 50 bp, Homo sapiens; identical to SEQ ID NO: 211560
  chr7:55212336-55212386
  hypo

SEQ ID NO: 405922 - DNA, 60 bp, Homo sapiens; identical to SEQ ID NO: 257750
  chr7:55312949-55313009
  hypo

SEQ ID NO: 405923 - DNA, 61 bp, Homo sapiens; identical to SEQ ID NO: 257753
  chr7:55468907-55468968
  hypo

SEQ ID NO: 405924 - DNA, 116 bp, Homo sapiens; identical to SEQ ID NO: 257758
  chr7:55541146-55541262
  hypo

SEQ ID NO: 405925 - DNA, 206 bp, Homo sapiens; identical to SEQ ID NO: 257759
  chr7:55541705-55541911
  hypo

SEQ ID NO: 405926 - DNA, 229 bp, Homo sapiens; identical to SEQ ID NO: 211562
  chr7:55552439-55552668
  hypo

SEQ ID NO: 405927 - DNA, 68 bp, Homo sapiens; identical to SEQ ID NO: 257763
  chr7:55554250-55554318
  hypo

SEQ ID NO: 405928 - DNA, 223 bp, Homo sapiens; identical to SEQ ID NO: 211564
  chr7:55557173-55557396
  hypo

SEQ ID NO: 405929 - DNA, 51 bp, Homo sapiens; identical to SEQ ID NO: 257765
  chr7:55570141-55570192
  hypo

SEQ ID NO: 405930 - DNA, 34 bp, Homo sapiens; identical to SEQ ID NO: 257771
  chr7:55638346-55638380
  hypo

SEQ ID NO: 405931 - DNA, 145 bp, Homo sapiens; identical to SEQ ID NO: 257772
  chr7:55923002-55923147
  hypo

SEQ ID NO: 405932 - DNA, 82 bp, Homo sapiens; identical to SEQ ID NO: 257773
  chr7:55960568-55960650
  hypo

SEQ ID NO: 405933 - DNA, 90 bp, Homo sapiens; identical to SEQ ID NO: 257780
  chr7:56078752-56078842
  hypo

SEQ ID NO: 405934 - DNA, 135 bp, Homo sapiens; identical to SEQ ID NO: 307801
  chr7:56144536-56144671
  hypo

SEQ ID NO: 405935 - DNA, 104 bp, Homo sapiens; identical to SEQ ID NO: 211570
  chr7:56636909-56637013
  hypo

SEQ ID NO: 405936 - DNA, 141 bp, Homo sapiens; identical to SEQ ID NO: 257791
  chr7:57711530-57711671
  hypo

SEQ ID NO: 405937 - DNA, 39 bp, Homo sapiens; identical to SEQ ID NO: 257792
  chr7:57712631-57712670
  hypo

SEQ ID NO: 405938 - DNA, 68 bp, Homo sapiens; identical to SEQ ID NO: 211575
  chr7:57878613-57878681
  hypo

SEQ ID NO: 405939 - DNA, 149 bp, Homo sapiens; identical to SEQ ID NO: 257794
  chr7:63027890-63028039
  hypo

SEQ ID NO: 405940 - DNA, 149 bp, Homo sapiens; identical to SEQ ID NO: 257795
  chr7:63392780-63392929
  hypo

SEQ ID NO: 405941 - DNA, 35 bp, Homo sapiens; identical to SEQ ID NO: 211576
  chr7:63423514-63423549
  hypo

SEQ ID NO: 405942 - DNA, 34 bp, Homo sapiens; identical to SEQ ID NO: 211577
  chr7:63423789-63423823
  hypo

SEQ ID NO: 405943 - DNA, 103 bp, Homo sapiens; identical to SEQ ID NO: 211582
  chr7:63864996-63865099
  hypo

SEQ ID NO: 405944 - DNA, 42 bp, Homo sapiens; identical to SEQ ID NO: 257804
  chr7:63867873-63867915
  hypo

SEQ ID NO: 405945 - DNA, 35 bp, Homo sapiens; identical to SEQ ID NO: 257810
  chr7:64358373-64358408
  hypo

SEQ ID NO: 405946 - DNA, 138 bp, Homo sapiens; identical to SEQ ID NO: 257815
  chr7:64478038-64478176
  hypo

SEQ ID NO: 405947 - DNA, 411 bp, Homo sapiens; identical to SEQ ID NO: 257818
  chr7:64895203-64895614
  hypo

SEQ ID NO: 405948 - DNA, 120 bp, Homo sapiens; identical to SEQ ID NO: 200991
  chr7:64974034-64974154
  hypo

SEQ ID NO: 405949 - DNA, 99 bp, Homo sapiens; identical to SEQ ID NO: 257820
  chr7:65442036-65442135
  hypo

SEQ ID NO: 405950 - DNA, 144 bp, Homo sapiens; identical to SEQ ID NO: 257821
  chr7:65474282-65474426
  hypo

SEQ ID NO: 405951 - DNA, 46 bp, Homo sapiens; identical to SEQ ID NO: 385809
  chr7:65562643-65562689
  hypo

SEQ ID NO: 405952 - DNA, 204 bp, Homo sapiens; identical to SEQ ID NO: 211596
  chr7:65939523-65939727
  hypo

SEQ ID NO: 405953 - DNA, 160 bp, Homo sapiens; identical to SEQ ID NO: 307864
  chr7:66105998-66106158
  hypo

SEQ ID NO: 405954 - DNA, 38 bp, Homo sapiens; identical to SEQ ID NO: 257835
  chr7:66150978-66151016
  hypo

SEQ ID NO: 405955 - DNA, 188 bp, Homo sapiens; identical to SEQ ID NO: 211598
  chr7:66265794-66265982
  hypo

SEQ ID NO: 405956 - DNA, 129 bp, Homo sapiens; identical to SEQ ID NO: 211600
  chr7:66369062-66369191
  hypo

SEQ ID NO: 405957 - DNA, 210 bp, Homo sapiens; identical to SEQ ID NO: 257840
  chr7:66423291-66423501
  hypo

SEQ ID NO: 405958 - DNA, 31 bp, Homo sapiens; identical to SEQ ID NO: 257843
  chr7:66694225-66694256
  hypo

SEQ ID NO: 405959 - DNA, 88 bp, Homo sapiens; identical to SEQ ID NO: 211602
  chr7:66766508-66766596
  hypo

SEQ ID NO: 405960 - DNA, 180 bp, Homo sapiens; identical to SEQ ID NO: 257845
  chr7:66847453-66847633
  hypo

SEQ ID NO: 405961 - DNA, 141 bp, Homo sapiens; identical to SEQ ID NO: 257846
  chr7:66880056-66880197
  hypo

SEQ ID NO: 405962 - DNA, 241 bp, Homo sapiens; identical to SEQ ID NO: 211603
  chr7:67006548-67006789
  hypo

SEQ ID NO: 405963 - DNA, 80 bp, Homo sapiens; identical to SEQ ID NO: 211605
  chr7:67103482-67103562
  hypo

SEQ ID NO: 405964 - DNA, 32 bp, Homo sapiens; identical to SEQ ID NO: 257856
  chr7:67252810-67252842
  hypo

SEQ ID NO: 405965 - DNA, 42 bp, Homo sapiens; identical to SEQ ID NO: 257857
  chr7:67274834-67274876
  hypo

SEQ ID NO: 405966 - DNA, 109 bp, Homo sapiens; identical to SEQ ID NO: 257860
  chr7:67323057-67323166
  hypo

SEQ ID NO: 405967 - DNA, 33 bp, Homo sapiens; identical to SEQ ID NO: 257864
  chr7:67388760-67388793
  hypo

SEQ ID NO: 405968 - DNA, 90 bp, Homo sapiens; identical to SEQ ID NO: 257866
  chr7:67417184-67417274
  hypo

SEQ ID NO: 405969 - DNA, 140 bp, Homo sapiens; identical to SEQ ID NO: 257872
  chr7:67563070-67563210
  hypo

SEQ ID NO: 405970 - DNA, 34 bp, Homo sapiens; identical to SEQ ID NO: 257873
  chr7:67579760-67579794
  hypo

SEQ ID NO: 405971 - DNA, 42 bp, Homo sapiens; identical to SEQ ID NO: 257875
  chr7:67642884-67642926
  hypo

SEQ ID NO: 405972 - DNA, 91 bp, Homo sapiens; identical to SEQ ID NO: 257878
  chr7:67659328-67659419
  hypo

SEQ ID NO: 405973 - DNA, 200 bp, Homo sapiens; identical to SEQ ID NO: 257880
  chr7:67737923-67738123
  hypo

SEQ ID NO: 405974 - DNA, 44 bp, Homo sapiens; identical to SEQ ID NO: 211608
  chr7:67812980-67813024
  hypo

SEQ ID NO: 405975 - DNA, 176 bp, Homo sapiens; identical to SEQ ID NO: 257882
  chr7:67858437-67858613
  hypo

SEQ ID NO: 405976 - DNA, 81 bp, Homo sapiens; identical to SEQ ID NO: 257885
  chr7:68008895-68008976
  hypo

SEQ ID NO: 405977 - DNA, 55 bp, Homo sapiens; identical to SEQ ID NO: 211609
  chr7:68185672-68185727
  hypo

SEQ ID NO: 405978 - DNA, 42 bp, Homo sapiens; identical to SEQ ID NO: 257890
  chr7:68263365-68263407
  hypo

SEQ ID NO: 405979 - DNA, 100 bp, Homo sapiens; identical to SEQ ID NO: 211611
  chr7:68418717-68418817
  hypo

SEQ ID NO: 405980 - DNA, 85 bp, Homo sapiens; identical to SEQ ID NO: 257895
  chr7:68912781-68912866
  hypo

SEQ ID NO: 405981 - DNA, 95 bp, Homo sapiens; identical to SEQ ID NO: 257896
  chr7:68960050-68960145
  hypo

SEQ ID NO: 405982 - DNA, 152 bp, Homo sapiens; identical to SEQ ID NO: 257899
  chr7:69501075-69501227
  hypo

SEQ ID NO: 405983 - DNA, 88 bp, Homo sapiens; identical to SEQ ID NO: 307935
  chr7:70311133-70311221
  hypo

SEQ ID NO: 405984 - DNA, 187 bp, Homo sapiens; identical to SEQ ID NO: 257905
  chr7:70378264-70378451
  hypo

SEQ ID NO: 405985 - DNA, 56 bp, Homo sapiens; identical to SEQ ID NO: 257908
  chr7:70921261-70921317
  hypo

SEQ ID NO: 405986 - DNA, 31 bp, Homo sapiens; identical to SEQ ID NO: 257909
  chr7:71048822-71048853
  hypo

SEQ ID NO: 405987 - DNA, 37 bp, Homo sapiens; identical to SEQ ID NO: 211618
  chr7:71119293-71119330
  hypo

SEQ ID NO: 405988 - DNA, 88 bp, Homo sapiens; identical to SEQ ID NO: 223123
  chr7:71198521-71198609
  hypo

SEQ ID NO: 405989 - DNA, 162 bp, Homo sapiens; identical to SEQ ID NO: 257911
  chr7:71251956-71252118
  hypo

SEQ ID NO: 405990 - DNA, 85 bp, Homo sapiens; identical to SEQ ID NO: 257912
  chr7:71276627-71276712
  hypo

SEQ ID NO: 405991 - DNA, 43 bp, Homo sapiens; identical to SEQ ID NO: 257914
  chr7:71335072-71335115
  hypo

SEQ ID NO: 405992 - DNA, 42 bp, Homo sapiens; identical to SEQ ID NO: 257915
  chr7:71396557-71396599
  hypo

SEQ ID NO: 405993 - DNA, 34 bp, Homo sapiens; identical to SEQ ID NO: 257917
  chr7:71403494-71403528
  hypo

SEQ ID NO: 405994 - DNA, 238 bp, Homo sapiens; identical to SEQ ID NO: 257919
  chr7:71656030-71656268
  hypo

SEQ ID NO: 405995 - DNA, 93 bp, Homo sapiens; identical to SEQ ID NO: 257921
  chr7:71913527-71913620
  hypo

SEQ ID NO: 405996 - DNA, 43 bp, Homo sapiens; identical to SEQ ID NO: 257922
  chr7:75935606-75935649
  hypo

SEQ ID NO: 405997 - DNA, 192 bp, Homo sapiens; identical to SEQ ID NO: 257923
  chr7:75958854-75959046
  hypo

SEQ ID NO: 405998 - DNA, 240 bp, Homo sapiens; identical to SEQ ID NO: 307962
  chr7:76604357-76604597
  hypo

SEQ ID NO: 405999 - DNA, 159 bp, Homo sapiens; identical to SEQ ID NO: 211621
  chr7:76632095-76632254
  hypo

SEQ ID NO: 406000 - DNA, 39 bp, Homo sapiens; identical to SEQ ID NO: 211622
  chr7:77184920-77184959
  hypo

SEQ ID NO: 406001 - DNA, 111 bp, Homo sapiens; identical to SEQ ID NO: 257932
  chr7:77296782-77296893
  hypo

SEQ ID NO: 406002 - DNA, 88 bp, Homo sapiens; identical to SEQ ID NO: 257939
  chr7:77459676-77459764
  hypo

SEQ ID NO: 406003 - DNA, 36 bp, Homo sapiens; identical to SEQ ID NO: 257943
  chr7:80544781-80544817
  hypo

SEQ ID NO: 406004 - DNA, 97 bp, Homo sapiens; identical to SEQ ID NO: 257944
  chr7:80572493-80572590
  hypo

SEQ ID NO: 406005 - DNA, 92 bp, Homo sapiens; identical to SEQ ID NO: 307984
  chr7:80790225-80790317
  hypo

SEQ ID NO: 406006 - DNA, 53 bp, Homo sapiens; identical to SEQ ID NO: 307985
  chr7:80896252-80896305
  hypo

SEQ ID NO: 406007 - DNA, 34 bp, Homo sapiens; identical to SEQ ID NO: 307986
  chr7:80896335-80896369
  hypo

SEQ ID NO: 406008 - DNA, 36 bp, Homo sapiens; identical to SEQ ID NO: 211630
  chr7:80917900-80917936
  hypo

SEQ ID NO: 406009 - DNA, 31 bp, Homo sapiens; identical to SEQ ID NO: 257949
  chr7:80965882-80965913
  hypo

SEQ ID NO: 406010 - DNA, 140 bp, Homo sapiens; identical to SEQ ID NO: 257950
  chr7:81066982-81067122
  hypo

SEQ ID NO: 406011 - DNA, 83 bp, Homo sapiens; identical to SEQ ID NO: 257951
  chr7:82176346-82176429
  hypo

SEQ ID NO: 406012 - DNA, 109 bp, Homo sapiens; identical to SEQ ID NO: 201027
  chr7:86849527-86849636
  hypo

SEQ ID NO: 406013 - DNA, 184 bp, Homo sapiens; identical to SEQ ID NO: 211639
  chr7:90635233-90635417
  hypo

SEQ ID NO: 406014 - DNA, 145 bp, Homo sapiens; identical to SEQ ID NO: 257955
  chr7:91531327-91531472
  hypo

SEQ ID NO: 406015 - DNA, 80 bp, Homo sapiens; identical to SEQ ID NO: 257956
  chr7:91655605-91655685
  hypo

SEQ ID NO: 406016 - DNA, 40 bp, Homo sapiens; identical to SEQ ID NO: 211641
  chr7:92075854-92075894
  hypo

SEQ ID NO: 406017 - DNA, 1229 bp, Homo sapiens; identical to SEQ ID NO: 44386
  chr7:92462187-92463416
  hypo

SEQ ID NO: 406018 - DNA, 247 bp, Homo sapiens; identical to SEQ ID NO: 201045
  chr7:92463701-92463948
  hypo

SEQ ID NO: 406019 - DNA, 205 bp, Homo sapiens; identical to SEQ ID NO: 223143
  chr7:92464934-92465139
  hypo

SEQ ID NO: 406020 - DNA, 129 bp, Homo sapiens; identical to SEQ ID NO: 211647
  chr7:92939972-92940101
  hypo

SEQ ID NO: 406021 - DNA, 63 bp, Homo sapiens; identical to SEQ ID NO: 211649
  chr7:94293684-94293747
  hypo

SEQ ID NO: 406022 - DNA, 311 bp, Homo sapiens; identical to SEQ ID NO: 397692
  chr7:95064267-95064578
  hypo

SEQ ID NO: 406023 - DNA, 43 bp, Homo sapiens; identical to SEQ ID NO: 257965
  chr7:97137338-97137381
  hypo

SEQ ID NO: 406024 - DNA, 674 bp, Homo sapiens; identical to SEQ ID NO: 223150
  chr7:97501249-97501923
  hypo

SEQ ID NO: 406025 - DNA, 186 bp, Homo sapiens; identical to SEQ ID NO: 257970
  chr7:97670351-97670537
  hypo

SEQ ID NO: 406026 - DNA, 122 bp, Homo sapiens; identical to SEQ ID NO: 211653
  chr7:97832525-97832647
  hypo

SEQ ID NO: 406027 - DNA, 301 bp, Homo sapiens; identical to SEQ ID NO: 211654
  chr7:97833194-97833495
  hypo

SEQ ID NO: 406028 - DNA, 111 bp, Homo sapiens; identical to SEQ ID NO: 257982
  chr7:97844377-97844488
  hypo

SEQ ID NO: 406029 - DNA, 94 bp, Homo sapiens; identical to SEQ ID NO: 211656
  chr7:97847038-97847132
  hypo

SEQ ID NO: 406030 - DNA, 184 bp, Homo sapiens; identical to SEQ ID NO: 257984
  chr7:97855417-97855601
  hypo

SEQ ID NO: 406031 - DNA, 165 bp, Homo sapiens; identical to SEQ ID NO: 211657
  chr7:97857342-97857507
  hypo

SEQ ID NO: 406032 - DNA, 67 bp, Homo sapiens; identical to SEQ ID NO: 308048
  chr7:97882281-97882348
  hypo

SEQ ID NO: 406033 - DNA, 224 bp, Homo sapiens; identical to SEQ ID NO: 257990
  chr7:97984208-97984432
  hypo

SEQ ID NO: 406034 - DNA, 42 bp, Homo sapiens; identical to SEQ ID NO: 211658
  chr7:97989649-97989691
  hypo

SEQ ID NO: 406035 - DNA, 343 bp, Homo sapiens; identical to SEQ ID NO: 211661
  chr7:98115911-98116254
  hypo

SEQ ID NO: 406036 - DNA, 116 bp, Homo sapiens; identical to SEQ ID NO: 257996
  chr7:98254320-98254436
  hypo

SEQ ID NO: 406037 - DNA, 530 bp, Homo sapiens; identical to SEQ ID NO: 257997
  chr7:98586157-98586687
  hypo

SEQ ID NO: 406038 - DNA, 81 bp, Homo sapiens; identical to SEQ ID NO: 258001
  chr7:98601684-98601765
  hypo

SEQ ID NO: 406039 - DNA, 397 bp, Homo sapiens; identical to SEQ ID NO: 258002
  chr7:98602532-98602929
  hypo

SEQ ID NO: 406040 - DNA, 232 bp, Homo sapiens; identical to SEQ ID NO: 258004
  chr7:98636065-98636297
  hypo

SEQ ID NO: 406041 - DNA, 221 bp, Homo sapiens; identical to SEQ ID NO: 258005
  chr7:98639038-98639259
  hypo

SEQ ID NO: 406042 - DNA, 43 bp, Homo sapiens; identical to SEQ ID NO: 211664
  chr7:98704238-98704281
  hypo

SEQ ID NO: 406043 - DNA, 162 bp, Homo sapiens; identical to SEQ ID NO: 211665
  chr7:98704341-98704503
  hypo

SEQ ID NO: 406044 - DNA, 102 bp, Homo sapiens; identical to SEQ ID NO: 258010
  chr7:98735269-98735371
  hypo

SEQ ID NO: 406045 - DNA, 41 bp, Homo sapiens; identical to SEQ ID NO: 258013
  chr7:98814530-98814571
  hypo

SEQ ID NO: 406046 - DNA, 235 bp, Homo sapiens; identical to SEQ ID NO: 258014
  chr7:98845139-98845374
  hypo

SEQ ID NO: 406047 - DNA, 222 bp, Homo sapiens; identical to SEQ ID NO: 258029
  chr7:98994224-98994446
  hypo

SEQ ID NO: 406048 - DNA, 120 bp, Homo sapiens; identical to SEQ ID NO: 258034
  chr7:99032514-99032634
  hypo

SEQ ID NO: 406049 - DNA, 70 bp, Homo sapiens; identical to SEQ ID NO: 258035
  chr7:99065118-99065188
  hypo

SEQ ID NO: 406050 - DNA, 36 bp, Homo sapiens; identical to SEQ ID NO: 258036
  chr7:99073693-99073729
  hypo

SEQ ID NO: 406051 - DNA, 59 bp, Homo sapiens; identical to SEQ ID NO: 308101
  chr7:99103806-99103865
  hypo

SEQ ID NO: 406052 - DNA, 450 bp, Homo sapiens; identical to SEQ ID NO: 258041
  chr7:99140777-99141227
  hypo

SEQ ID NO: 406053 - DNA, 189 bp, Homo sapiens; identical to SEQ ID NO: 258042
  chr7:99161482-99161671
  hypo

SEQ ID NO: 406054 - DNA, 38 bp, Homo sapiens; identical to SEQ ID NO: 258045
  chr7:99391324-99391362
  hypo

SEQ ID NO: 406055 - DNA, 93 bp, Homo sapiens; identical to SEQ ID NO: 258048
  chr7:99602415-99602508
  hypo

SEQ ID NO: 406056 - DNA, 74 bp, Homo sapiens; identical to SEQ ID NO: 223155
  chr7:99613133-99613207
  hypo

SEQ ID NO: 406057 - DNA, 269 bp, Homo sapiens; identical to SEQ ID NO: 211681
  chr7:99691590-99691859
  hypo

SEQ ID NO: 406058 - DNA, 169 bp, Homo sapiens; identical to SEQ ID NO: 285215
  chr7:99725637-99725806
  hypo

SEQ ID NO: 406059 - DNA, 87 bp, Homo sapiens; identical to SEQ ID NO: 258055
  chr7:99796109-99796196
  hypo

SEQ ID NO: 406060 - DNA, 92 bp, Homo sapiens; identical to SEQ ID NO: 258058
  chr7:99849463-99849555
  hypo

SEQ ID NO: 406061 - DNA, 76 bp, Homo sapiens; identical to SEQ ID NO: 211685
  chr7:100024904-100024980
  hypo

SEQ ID NO: 406062 - DNA, 115 bp, Homo sapiens; identical to SEQ ID NO: 211686
  chr7:100025340-100025455
  hypo

SEQ ID NO: 406063 - DNA, 37 bp, Homo sapiens; identical to SEQ ID NO: 258065
  chr7:100065387-100065424
  hypo

SEQ ID NO: 406064 - DNA, 228 bp, Homo sapiens; identical to SEQ ID NO: 258066
  chr7:100086232-100086460
  hypo

SEQ ID NO: 406065 - DNA, 180 bp, Homo sapiens; identical to SEQ ID NO: 258068
  chr7:100098054-100098234
  hypo

SEQ ID NO: 406066 - DNA, 111 bp, Homo sapiens; identical to SEQ ID NO: 258069
  chr7:100100530-100100641
  hypo

SEQ ID NO: 406067 - DNA, 36 bp, Homo sapiens; identical to SEQ ID NO: 258073
  chr7:100189309-100189345
  hypo

SEQ ID NO: 406068 - DNA, 86 bp, Homo sapiens; identical to SEQ ID NO: 211690
  chr7:100198415-100198501
  hypo

SEQ ID NO: 406069 - DNA, 291 bp, Homo sapiens; identical to SEQ ID NO: 258075
  chr7:100218441-100218732
  hypo

SEQ ID NO: 406070 - DNA, 95 bp, Homo sapiens; identical to SEQ ID NO: 258076
  chr7:100246355-100246450
  hypo

SEQ ID NO: 406071 - DNA, 32 bp, Homo sapiens; identical to SEQ ID NO: 258077
  chr7:100258217-100258249
  hypo

SEQ ID NO: 406072 - DNA, 681 bp, Homo sapiens; identical to SEQ ID NO: 258082
  chr7:100285461-100286142
  hypo

SEQ ID NO: 406073 - DNA, 49 bp, Homo sapiens; identical to SEQ ID NO: 211694
  chr7:100388725-100388774
  hypo

SEQ ID NO: 406074 - DNA, 38 bp, Homo sapiens; identical to SEQ ID NO: 391804
  chr7:100405249-100405287
  hypo

SEQ ID NO: 406075 - DNA, 514 bp, Homo sapiens; identical to SEQ ID NO: 258088
  chr7:100410407-100410921
  hypo

SEQ ID NO: 406076 - DNA, 428 bp, Homo sapiens; identical to SEQ ID NO: 397714
  chr7:100424341-100424769
  hypo

SEQ ID NO: 406077 - DNA, 240 bp, Homo sapiens; identical to SEQ ID NO: 223158
  chr7:100424796-100425036
  hypo

SEQ ID NO: 406078 - DNA, 122 bp, Homo sapiens; identical to SEQ ID NO: 211701
  chr7:100480482-100480604
  hypo

SEQ ID NO: 406079 - DNA, 91 bp, Homo sapiens; identical to SEQ ID NO: 258096
  chr7:100514709-100514800
  hypo

SEQ ID NO: 406080 - DNA, 104 bp, Homo sapiens; identical to SEQ ID NO: 223160
  chr7:100609394-100609498
  hypo

SEQ ID NO: 406081 - DNA, 38 bp, Homo sapiens; identical to SEQ ID NO: 258097
  chr7:100650571-100650609
  hypo

SEQ ID NO: 406082 - DNA, 58 bp, Homo sapiens; identical to SEQ ID NO: 258098
  chr7:100731011-100731069
  hypo

SEQ ID NO: 406083 - DNA, 36 bp, Homo sapiens; identical to SEQ ID NO: 258100
  chr7:100834973-100835009
  hypo

SEQ ID NO: 406084 - DNA, 91 bp, Homo sapiens; identical to SEQ ID NO: 258108
  chr7:100961430-100961521
  hypo

SEQ ID NO: 406085 - DNA, 159 bp, Homo sapiens; identical to SEQ ID NO: 223164
  chr7:101457610-101457769
  hypo

SEQ ID NO: 406086 - DNA, 467 bp, Homo sapiens; identical to SEQ ID NO: 201087
  chr7:101458246-101458713
  hypo

SEQ ID NO: 406087 - DNA, 190 bp, Homo sapiens; identical to SEQ ID NO: 201088
  chr7:101459183-101459373
  hypo

SEQ ID NO: 406088 - DNA, 37 bp, Homo sapiens; identical to SEQ ID NO: 211715
  chr7:101476346-101476383
  hypo

SEQ ID NO: 406089 - DNA, 152 bp, Homo sapiens; identical to SEQ ID NO: 211716
  chr7:101504316-101504468
  hypo

SEQ ID NO: 406090 - DNA, 274 bp, Homo sapiens; identical to SEQ ID NO: 258124
  chr7:101543484-101543758
  hypo

SEQ ID NO: 406091 - DNA, 50 bp, Homo sapiens; identical to SEQ ID NO: 258125
  chr7:101556168-101556218
  hypo

SEQ ID NO: 406092 - DNA, 283 bp, Homo sapiens; identical to SEQ ID NO: 211720
  chr7:101583547-101583830
  hypo

SEQ ID NO: 406093 - DNA, 121 bp, Homo sapiens; identical to SEQ ID NO: 308204
  chr7:101586046-101586167
  hypo

SEQ ID NO: 406094 - DNA, 213 bp, Homo sapiens; identical to SEQ ID NO: 258131
  chr7:101610608-101610821
  hypo

SEQ ID NO: 406095 - DNA, 215 bp, Homo sapiens; identical to SEQ ID NO: 258140
  chr7:101653175-101653390
  hypo

SEQ ID NO: 406096 - DNA, 82 bp, Homo sapiens; identical to SEQ ID NO: 308223
  chr7:101706969-101707051
  hypo

SEQ ID NO: 406097 - DNA, 40 bp, Homo sapiens; identical to SEQ ID NO: 308224
  chr7:101707081-101707121
  hypo

SEQ ID NO: 406098 - DNA, 67 bp, Homo sapiens; identical to SEQ ID NO: 201097
  chr7:101758486-101758553
  hypo

SEQ ID NO: 406099 - DNA, 189 bp, Homo sapiens; identical to SEQ ID NO: 201100
  chr7:101821748-101821937
  hypo

SEQ ID NO: 406100 - DNA, 97 bp, Homo sapiens; identical to SEQ ID NO: 201103
  chr7:101838786-101838883
  hypo

SEQ ID NO: 406101 - DNA, 672 bp, Homo sapiens; identical to SEQ ID NO: 201104
  chr7:101839913-101840585
  hypo

SEQ ID NO: 406102 - DNA, 66 bp, Homo sapiens; identical to SEQ ID NO: 201105
  chr7:101842081-101842147
  hypo

SEQ ID NO: 406103 - DNA, 102 bp, Homo sapiens; identical to SEQ ID NO: 201106
  chr7:101843350-101843452
  hypo

SEQ ID NO: 406104 - DNA, 845 bp, Homo sapiens; identical to SEQ ID NO: 201107
  chr7:101844639-101845484
  hypo

SEQ ID NO: 406105 - DNA, 57 bp, Homo sapiens; identical to SEQ ID NO: 201109
  chr7:101848393-101848450
  hypo

SEQ ID NO: 406106 - DNA, 303 bp, Homo sapiens; identical to SEQ ID NO: 201110
  chr7:101870646-101870949
  hypo

SEQ ID NO: 406107 - DNA, 189 bp, Homo sapiens; identical to SEQ ID NO: 201111
  chr7:101877331-101877520
  hypo

SEQ ID NO: 406108 - DNA, 265 bp, Homo sapiens; identical to SEQ ID NO: 201112
  chr7:101882599-101882864
  hypo

SEQ ID NO: 406109 - DNA, 67 bp, Homo sapiens; identical to SEQ ID NO: 201115
  chr7:101917514-101917581
  hypo

SEQ ID NO: 406110 - DNA, 84 bp, Homo sapiens; identical to SEQ ID NO: 201118
  chr7:101923328-101923412
  hypo

SEQ ID NO: 406111 - DNA, 57 bp, Homo sapiens; identical to SEQ ID NO: 201119
  chr7:101924095-101924152
  hypo

SEQ ID NO: 406112 - DNA, 81 bp, Homo sapiens; identical to SEQ ID NO: 201120
  chr7:101925131-101925212
  hypo

SEQ ID NO: 406113 - DNA, 65 bp, Homo sapiens; identical to SEQ ID NO: 201121
  chr7:101926003-101926068
  hypo

SEQ ID NO: 406114 - DNA, 586 bp, Homo sapiens; identical to SEQ ID NO: 258145
  chr7:102087175-102087761
  hypo

SEQ ID NO: 406115 - DNA, 66 bp, Homo sapiens; identical to SEQ ID NO: 211764
  chr7:102088066-102088132
  hypo

SEQ ID NO: 406116 - DNA, 38 bp, Homo sapiens; identical to SEQ ID NO: 258147
  chr7:102094841-102094879
  hypo

SEQ ID NO: 406117 - DNA, 544 bp, Homo sapiens; identical to SEQ ID NO: 285294
  chr7:102920838-102921382
  hypo

SEQ ID NO: 406118 - DNA, 44 bp, Homo sapiens; identical to SEQ ID NO: 258152
  chr7:103778513-103778557
  hypo

SEQ ID NO: 406119 - DNA, 84 bp, Homo sapiens; identical to SEQ ID NO: 258155
  chr7:104566592-104566676
  hypo

SEQ ID NO: 406120 - DNA, 95 bp, Homo sapiens; identical to SEQ ID NO: 258159
  chr7:104860662-104860757
  hypo

SEQ ID NO: 406121 - DNA, 141 bp, Homo sapiens; identical to SEQ ID NO: 258161
  chr7:104869939-104870080
  hypo

SEQ ID NO: 406122 - DNA, 120 bp, Homo sapiens; identical to SEQ ID NO: 258168
  chr7:105278913-105279033
  hypo

SEQ ID NO: 406123 - DNA, 189 bp, Homo sapiens; identical to SEQ ID NO: 258171
  chr7:105399236-105399425
  hypo

SEQ ID NO: 406124 - DNA, 161 bp, Homo sapiens; identical to SEQ ID NO: 258174
  chr7:105586619-105586780
  hypo

SEQ ID NO: 406125 - DNA, 38 bp, Homo sapiens; identical to SEQ ID NO: 211774
  chr7:105722825-105722863
  hypo

SEQ ID NO: 406126 - DNA, 411 bp, Homo sapiens; identical to SEQ ID NO: 201129
  chr7:106508245-106508656
  hypo

SEQ ID NO: 406127 - DNA, 85 bp, Homo sapiens; identical to SEQ ID NO: 258177
  chr7:106574561-106574646
  hypo

SEQ ID NO: 406128 - DNA, 115 bp, Homo sapiens; identical to SEQ ID NO: 258189
  chr7:107430184-107430299
  hypo

SEQ ID NO: 406129 - DNA, 201 bp, Homo sapiens; identical to SEQ ID NO: 258191
  chr7:107524448-107524649
  hypo

SEQ ID NO: 406130 - DNA, 44 bp, Homo sapiens; identical to SEQ ID NO: 211787
  chr7:107633907-107633951
  hypo

SEQ ID NO: 406131 - DNA, 57 bp, Homo sapiens; identical to SEQ ID NO: 258193
  chr7:107773016-107773073
  hypo

SEQ ID NO: 406132 - DNA, 37 bp, Homo sapiens; identical to SEQ ID NO: 258195
  chr7:108298193-108298230
  hypo

SEQ ID NO: 406133 - DNA, 81 bp, Homo sapiens; identical to SEQ ID NO: 258197
  chr7:110471985-110472066
  hypo

SEQ ID NO: 406134 - DNA, 34 bp, Homo sapiens; identical to SEQ ID NO: 258198
  chr7:112187148-112187182
  hypo

SEQ ID NO: 406135 - DNA, 43 bp, Homo sapiens; identical to SEQ ID NO: 258202
  chr7:115430130-115430173
  hypo

SEQ ID NO: 406136 - DNA, 102 bp, Homo sapiens; identical to SEQ ID NO: 258204
  chr7:116914129-116914231
  hypo

SEQ ID NO: 406137 - DNA, 130 bp, Homo sapiens; identical to SEQ ID NO: 201163
  chr7:121863466-121863596
  hypo

SEQ ID NO: 406138 - DNA, 93 bp, Homo sapiens; identical to SEQ ID NO: 258206
  chr7:123175850-123175943
  hypo

SEQ ID NO: 406139 - DNA, 38 bp, Homo sapiens; identical to SEQ ID NO: 258208
  chr7:125532056-125532094
  hypo

SEQ ID NO: 406140 - DNA, 32 bp, Homo sapiens; identical to SEQ ID NO: 258209
  chr7:126013969-126014001
  hypo

SEQ ID NO: 406141 - DNA, 36 bp, Homo sapiens; identical to SEQ ID NO: 258211
  chr7:127231013-127231049
  hypo

SEQ ID NO: 406142 - DNA, 245 bp, Homo sapiens; identical to SEQ ID NO: 258212
  chr7:127235457-127235702
  hypo

SEQ ID NO: 406143 - DNA, 100 bp, Homo sapiens; identical to SEQ ID NO: 258213
  chr7:127240011-127240111
  hypo

SEQ ID NO: 406144 - DNA, 54 bp, Homo sapiens; identical to SEQ ID NO: 258217
  chr7:127502788-127502842
  hypo

SEQ ID NO: 406145 - DNA, 125 bp, Homo sapiens; identical to SEQ ID NO: 211796
  chr7:127544866-127544991
  hypo

SEQ ID NO: 406146 - DNA, 172 bp, Homo sapiens; identical to SEQ ID NO: 258219
  chr7:127583867-127584039
  hypo

SEQ ID NO: 406147 - DNA, 83 bp, Homo sapiens; identical to SEQ ID NO: 308344
  chr7:127615838-127615921
  hypo

SEQ ID NO: 406148 - DNA, 287 bp, Homo sapiens; identical to SEQ ID NO: 211799
  chr7:127693923-127694210
  hypo

SEQ ID NO: 406149 - DNA, 46 bp, Homo sapiens; identical to SEQ ID NO: 258225
  chr7:127721780-127721826
  hypo

SEQ ID NO: 406150 - DNA, 215 bp, Homo sapiens; identical to SEQ ID NO: 258229
  chr7:128441280-128441495
  hypo

SEQ ID NO: 406151 - DNA, 46 bp, Homo sapiens; identical to SEQ ID NO: 308355
  chr7:128484885-128484931
  hypo

SEQ ID NO: 406152 - DNA, 254 bp, Homo sapiens; identical to SEQ ID NO: 308356
  chr7:128484981-128485235
  hypo

SEQ ID NO: 406153 - DNA, 381 bp, Homo sapiens; identical to SEQ ID NO: 308359
  chr7:128492721-128493102
  hypo

SEQ ID NO: 406154 - DNA, 75 bp, Homo sapiens; identical to SEQ ID NO: 308360
  chr7:128494167-128494242
  hypo

SEQ ID NO: 406155 - DNA, 275 bp, Homo sapiens; identical to SEQ ID NO: 258236
  chr7:128494588-128494863
  hypo

SEQ ID NO: 406156 - DNA, 104 bp, Homo sapiens; identical to SEQ ID NO: 223223
  chr7:128509606-128509710
  hypo

SEQ ID NO: 406157 - DNA, 42 bp, Homo sapiens; identical to SEQ ID NO: 258239
  chr7:128533896-128533938
  hypo

SEQ ID NO: 406158 - DNA, 42 bp, Homo sapiens; identical to SEQ ID NO: 258240
  chr7:128534159-128534201
  hypo

SEQ ID NO: 406159 - DNA, 81 bp, Homo sapiens; identical to SEQ ID NO: 258249
  chr7:129172367-129172448
  hypo

SEQ ID NO: 406160 - DNA, 75 bp, Homo sapiens; identical to SEQ ID NO: 258255
  chr7:129410252-129410327
  hypo

SEQ ID NO: 406161 - DNA, 330 bp, Homo sapiens; identical to SEQ ID NO: 258256
  chr7:129414553-129414883
  hypo

SEQ ID NO: 406162 - DNA, 39 bp, Homo sapiens; identical to SEQ ID NO: 258259
  chr7:129483110-129483149
  hypo

SEQ ID NO: 406163 - DNA, 143 bp, Homo sapiens; identical to SEQ ID NO: 258262
  chr7:129504689-129504832
  hypo

SEQ ID NO: 406164 - DNA, 31 bp, Homo sapiens; identical to SEQ ID NO: 258265
  chr7:129665425-129665456
  hypo

SEQ ID NO: 406165 - DNA, 240 bp, Homo sapiens; identical to SEQ ID NO: 211814
  chr7:129689710-129689950
  hypo

SEQ ID NO: 406166 - DNA, 147 bp, Homo sapiens; identical to SEQ ID NO: 211815
  chr7:129778855-129779002
  hypo

SEQ ID NO: 406167 - DNA, 74 bp, Homo sapiens; identical to SEQ ID NO: 258269
  chr7:129780114-129780188
  hypo

SEQ ID NO: 406168 - DNA, 274 bp, Homo sapiens; identical to SEQ ID NO: 211819
  chr7:129948129-129948403
  hypo

SEQ ID NO: 406169 - DNA, 249 bp, Homo sapiens; identical to SEQ ID NO: 211821
  chr7:131864448-131864697
  hypo

SEQ ID NO: 406170 - DNA, 38 bp, Homo sapiens; identical to SEQ ID NO: 285434
  chr7:132262442-132262480
  hypo

SEQ ID NO: 406171 - DNA, 31 bp, Homo sapiens; identical to SEQ ID NO: 385849
  chr7:132419108-132419139
  hypo

SEQ ID NO: 406172 - DNA, 32 bp, Homo sapiens
  chr7:132527796-132527828
  hypo
gtttttgtttatttgttttaagatggaatctc

SEQ ID NO: 406173 - DNA, 45 bp, Homo sapiens; identical to SEQ ID NO: 211823
  chr7:132527948-132527993
  hypo

SEQ ID NO: 406174 - DNA, 203 bp, Homo sapiens; identical to SEQ ID NO: 211824
  chr7:132637910-132638113
  hypo

SEQ ID NO: 406175 - DNA, 92 bp, Homo sapiens; identical to SEQ ID NO: 211825
  chr7:133234086-133234178
  hypo

SEQ ID NO: 406176 - DNA, 102 bp, Homo sapiens; identical to SEQ ID NO: 258291
  chr7:133828852-133828954
  hypo

SEQ ID NO: 406177 - DNA, 42 bp, Homo sapiens; identical to SEQ ID NO: 258292
  chr7:134135183-134135225
  hypo

SEQ ID NO: 406178 - DNA, 32 bp, Homo sapiens; identical to SEQ ID NO: 385851
  chr7:134880722-134880754
  hypo

SEQ ID NO: 406179 - DNA, 238 bp, Homo sapiens; identical to SEQ ID NO: 211833
  chr7:134890670-134890908
  hypo

SEQ ID NO: 406180 - DNA, 97 bp, Homo sapiens; identical to SEQ ID NO: 211837
  chr7:135360968-135361065
  hypo

SEQ ID NO: 406181 - DNA, 197 bp, Homo sapiens; identical to SEQ ID NO: 258307
  chr7:135390900-135391097
  hypo

SEQ ID NO: 406182 - DNA, 96 bp, Homo sapiens; identical to SEQ ID NO: 211839
  chr7:136437909-136438005
  hypo

SEQ ID NO: 406183 - DNA, 31 bp, Homo sapiens; identical to SEQ ID NO: 258315
  chr7:137107612-137107643
  hypo

SEQ ID NO: 406184 - DNA, 185 bp, Homo sapiens; identical to SEQ ID NO: 258318
  chr7:137593862-137594047
  hypo

SEQ ID NO: 406185 - DNA, 37 bp, Homo sapiens; identical to SEQ ID NO: 211841
  chr7:137637556-137637593
  hypo

SEQ ID NO: 406186 - DNA, 37 bp, Homo sapiens; identical to SEQ ID NO: 211842
  chr7:137637833-137637870
  hypo

SEQ ID NO: 406187 - DNA, 40 bp, Homo sapiens; identical to SEQ ID NO: 258321
  chr7:137658137-137658177
  hypo

SEQ ID NO: 406188 - DNA, 204 bp, Homo sapiens; identical to SEQ ID NO: 211843
  chr7:137670025-137670229
  hypo

SEQ ID NO: 406189 - DNA, 37 bp, Homo sapiens; identical to SEQ ID NO: 258325
  chr7:137742304-137742341
  hypo

SEQ ID NO: 406190 - DNA, 39 bp, Homo sapiens; identical to SEQ ID NO: 211846
  chr7:138042568-138042607
  hypo

SEQ ID NO: 406191 - DNA, 152 bp, Homo sapiens; identical to SEQ ID NO: 258331
  chr7:138125641-138125793
  hypo

SEQ ID NO: 406192 - DNA, 37 bp, Homo sapiens; identical to SEQ ID NO: 258334
  chr7:138588489-138588526
  hypo

SEQ ID NO: 406193 - DNA, 36 bp, Homo sapiens; identical to SEQ ID NO: 258335
  chr7:138588586-138588622
  hypo

SEQ ID NO: 406194 - DNA, 40 bp, Homo sapiens; identical to SEQ ID NO: 258337
  chr7:138647454-138647494
  hypo

SEQ ID NO: 406195 - DNA, 84 bp, Homo sapiens; identical to SEQ ID NO: 211850
  chr7:138721475-138721559
  hypo

SEQ ID NO: 406196 - DNA, 33 bp, Homo sapiens; identical to SEQ ID NO: 211851
  chr7:138778536-138778569
  hypo

SEQ ID NO: 406197 - DNA, 98 bp, Homo sapiens; identical to SEQ ID NO: 308476
  chr7:139112527-139112625
  hypo

SEQ ID NO: 406198 - DNA, 87 bp, Homo sapiens; identical to SEQ ID NO: 308477
  chr7:139112655-139112742
  hypo

SEQ ID NO: 406199 - DNA, 437 bp, Homo sapiens; identical to SEQ ID NO: 223234
  chr7:139478051-139478488
  hypo

SEQ ID NO: 406200 - DNA, 346 bp, Homo sapiens; identical to SEQ ID NO: 211856
  chr7:139733611-139733957
  hypo

SEQ ID NO: 406201 - DNA, 142 bp, Homo sapiens; identical to SEQ ID NO: 258357
  chr7:139763645-139763787
  hypo

SEQ ID NO: 406202 - DNA, 44 bp, Homo sapiens; identical to SEQ ID NO: 258359
  chr7:139866424-139866468
  hypo

SEQ ID NO: 406203 - DNA, 65 bp, Homo sapiens; identical to SEQ ID NO: 258360
  chr7:139897108-139897173
  hypo

SEQ ID NO: 406204 - DNA, 160 bp, Homo sapiens; identical to SEQ ID NO: 211857
  chr7:139992308-139992468
  hypo

SEQ ID NO: 406205 - DNA, 64 bp, Homo sapiens; identical to SEQ ID NO: 211858
  chr7:140026944-140027008
  hypo

SEQ ID NO: 406206 - DNA, 123 bp, Homo sapiens; identical to SEQ ID NO: 211859
  chr7:140027079-140027202
  hypo

SEQ ID NO: 406207 - DNA, 160 bp, Homo sapiens; identical to SEQ ID NO: 211860
  chr7:140027767-140027927
  hypo

SEQ ID NO: 406208 - DNA, 346 bp, Homo sapiens; identical to SEQ ID NO: 258365
  chr7:140029901-140030247
  hypo

SEQ ID NO: 406209 - DNA, 31 bp, Homo sapiens; identical to SEQ ID NO: 258366
  chr7:140045118-140045149
  hypo

SEQ ID NO: 406210 - DNA, 169 bp, Homo sapiens; identical to SEQ ID NO: 258368
  chr7:140048397-140048566
  hypo

SEQ ID NO: 406211 - DNA, 190 bp, Homo sapiens; identical to SEQ ID NO: 258369
  chr7:140050012-140050202
  hypo

SEQ ID NO: 406212 - DNA, 92 bp, Homo sapiens; identical to SEQ ID NO: 211861
  chr7:140063543-140063635
  hypo

SEQ ID NO: 406213 - DNA, 179 bp, Homo sapiens; identical to SEQ ID NO: 115791
  chr7:140098296-140098475
  hypo

SEQ ID NO: 406214 - DNA, 54 bp, Homo sapiens; identical to SEQ ID NO: 258371
  chr7:140105280-140105334
  hypo

SEQ ID NO: 406215 - DNA, 36 bp, Homo sapiens; identical to SEQ ID NO: 258372
  chr7:140105364-140105400
  hypo

SEQ ID NO: 406216 - DNA, 117 bp, Homo sapiens; identical to SEQ ID NO: 258377
  chr7:140205262-140205379
  hypo

SEQ ID NO: 406217 - DNA, 77 bp, Homo sapiens; identical to SEQ ID NO: 258378
  chr7:140217363-140217440
  hypo

SEQ ID NO: 406218 - DNA, 280 bp, Homo sapiens; identical to SEQ ID NO: 211866
  chr7:140221611-140221891
  hypo

SEQ ID NO: 406219 - DNA, 205 bp, Homo sapiens; identical to SEQ ID NO: 258382
  chr7:140402597-140402802
  hypo

SEQ ID NO: 406220 - DNA, 62 bp, Homo sapiens; identical to SEQ ID NO: 258388
  chr7:141273455-141273517
  hypo

SEQ ID NO: 406221 - DNA, 180 bp, Homo sapiens; identical to SEQ ID NO: 258389
  chr7:142906905-142907085
  hypo

SEQ ID NO: 406222 - DNA, 144 bp, Homo sapiens; identical to SEQ ID NO: 258391
  chr7:143013314-143013458
  hypo

SEQ ID NO: 406223 - DNA, 257 bp, Homo sapiens; identical to SEQ ID NO: 223241
  chr7:144100839-144101096
  hypo

SEQ ID NO: 406224 - DNA, 76 bp, Homo sapiens; identical to SEQ ID NO: 258394
  chr7:145021289-145021365
  hypo

SEQ ID NO: 406225 - DNA, 75 bp, Homo sapiens; identical to SEQ ID NO: 258395
  chr7:145021425-145021500
  hypo

SEQ ID NO: 406226 - DNA, 152 bp, Homo sapiens; identical to SEQ ID NO: 201215
  chr7:145981901-145982053
  hypo

SEQ ID NO: 406227 - DNA, 35 bp, Homo sapiens; identical to SEQ ID NO: 258397
  chr7:146228910-146228945
  hypo

SEQ ID NO: 406228 - DNA, 42 bp, Homo sapiens; identical to SEQ ID NO: 258399
  chr7:146656356-146656398
  hypo

SEQ ID NO: 406229 - DNA, 31 bp, Homo sapiens; identical to SEQ ID NO: 258401
  chr7:147216090-147216121
  hypo

SEQ ID NO: 406230 - DNA, 67 bp, Homo sapiens; identical to SEQ ID NO: 258403
  chr7:147954381-147954448
  hypo

SEQ ID NO: 406231 - DNA, 115 bp, Homo sapiens; identical to SEQ ID NO: 258405
  chr7:148077004-148077119
  hypo

SEQ ID NO: 406232 - DNA, 83 bp, Homo sapiens
  chr7:148079389-148079472
  hypo
ctcccttgaggccacctcagaaggagataccaaggggaagacagctctttaagaagtgtagactccatgttaaattgagaccc

SEQ ID NO: 406233 - DNA, 51 bp, Homo sapiens
  chr7:148079674-148079725
  hypo
gtagagagatgctggagaagaacaaggcactttatccatgtcccccacagc

SEQ ID NO: 406234 - DNA, 128 bp, Homo sapiens; identical to SEQ ID NO: 258409
  chr7:148296995-148297123
  hypo

SEQ ID NO: 406235 - DNA, 71 bp, Homo sapiens; identical to SEQ ID NO: 201219
  chr7:148508741-148508812
  hypo

SEQ ID NO: 406236 - DNA, 184 bp, Homo sapiens; identical to SEQ ID NO: 201220
  chr7:148511050-148511234
  hypo

SEQ ID NO: 406237 - DNA, 107 bp, Homo sapiens; identical to SEQ ID NO: 201221
  chr7:148512014-148512121
  hypo

SEQ ID NO: 406238 - DNA, 34 bp, Homo sapiens; identical to SEQ ID NO: 201222
  chr7:148513818-148513852
  hypo

SEQ ID NO: 406239 - DNA, 76 bp, Homo sapiens; identical to SEQ ID NO: 201224
  chr7:148515086-148515162
  hypo

SEQ ID NO: 406240 - DNA, 119 bp, Homo sapiens; identical to SEQ ID NO: 201226
  chr7:148526816-148526935
  hypo

SEQ ID NO: 406241 - DNA, 225 bp, Homo sapiens; identical to SEQ ID NO: 211892
  chr7:148703454-148703679
  hypo

SEQ ID NO: 406242 - DNA, 127 bp, Homo sapiens; identical to SEQ ID NO: 211893
  chr7:148846224-148846351
  hypo

SEQ ID NO: 406243 - DNA, 48 bp, Homo sapiens
  chr7:148884147-148884195
  hypo
gaaggtgttgtgaagatcaaatgaggaaagtttttttttttttttgag

SEQ ID NO: 406244 - DNA, 84 bp, Homo sapiens; identical to SEQ ID NO: 211895
  chr7:148901648-148901732
  hypo

SEQ ID NO: 406245 - DNA, 246 bp, Homo sapiens; identical to SEQ ID NO: 258424
  chr7:148921396-148921642
  hypo

SEQ ID NO: 406246 - DNA, 266 bp, Homo sapiens; identical to SEQ ID NO: 285502
  chr7:148959355-148959621
  hypo

SEQ ID NO: 406247 - DNA, 394 bp, Homo sapiens; identical to SEQ ID NO: 258427
  chr7:148984552-148984946
  hypo

SEQ ID NO: 406248 - DNA, 319 bp, Homo sapiens; identical to SEQ ID NO: 258428
  chr7:148992084-148992403
  hypo

SEQ ID NO: 406249 - DNA, 178 bp, Homo sapiens; identical to SEQ ID NO: 258429
  chr7:149005005-149005183
  hypo

SEQ ID NO: 406250 - DNA, 105 bp, Homo sapiens; identical to SEQ ID NO: 258430
  chr7:149084384-149084489
  hypo

SEQ ID NO: 406251 - DNA, 32 bp, Homo sapiens; identical to SEQ ID NO: 211900
  chr7:149114320-149114352
  hypo

SEQ ID NO: 406252 - DNA, 430 bp, Homo sapiens; identical to SEQ ID NO: 258433
  chr7:149171587-149172017
  hypo

SEQ ID NO: 406253 - DNA, 77 bp, Homo sapiens; identical to SEQ ID NO: 258434
  chr7:149257399-149257476
  hypo

SEQ ID NO: 406254 - DNA, 131 bp, Homo sapiens; identical to SEQ ID NO: 258442
  chr7:149516460-149516591
  hypo

SEQ ID NO: 406255 - DNA, 43 bp, Homo sapiens; identical to SEQ ID NO: 258449
  chr7:150079846-150079889
  hypo

SEQ ID NO: 406256 - DNA, 154 bp, Homo sapiens; identical to SEQ ID NO: 211911
  chr7:150104947-150105101
  hypo

SEQ ID NO: 406257 - DNA, 53 bp, Homo sapiens; identical to SEQ ID NO: 211912
  chr7:150105548-150105601
  hypo

SEQ ID NO: 406258 - DNA, 105 bp, Homo sapiens; identical to SEQ ID NO: 223258
  chr7:150497095-150497200
  hypo

SEQ ID NO: 406259 - DNA, 188 bp, Homo sapiens; identical to SEQ ID NO: 258459
  chr7:150720588-150720776
  hypo

SEQ ID NO: 406260 - DNA, 50 bp, Homo sapiens; identical to SEQ ID NO: 258460
  chr7:150745459-150745509
  hypo

SEQ ID NO: 406261 - DNA, 54 bp, Homo sapiens; identical to SEQ ID NO: 211918
  chr7:150773442-150773496
  hypo

SEQ ID NO: 406262 - DNA, 53 bp, Homo sapiens
  chr7:150774213-150774266
  hypo
gctagaggcagcctggccctgtgggcaggaccttggtgggtatggcaggaagg

SEQ ID NO: 406263 - DNA, 61 bp, Homo sapiens; identical to SEQ ID NO: 211921
  chr7:150776689-150776750
  hypo

SEQ ID NO: 406264 - DNA, 209 bp, Homo sapiens; identical to SEQ ID NO: 258471
  chr7:150817629-150817838
  hypo

SEQ ID NO: 406265 - DNA, 33 bp, Homo sapiens; identical to SEQ ID NO: 201242
  chr7:150869804-150869837
  hypo

SEQ ID NO: 406266 - DNA, 64 bp, Homo sapiens; identical to SEQ ID NO: 223266
  chr7:150948746-150948810
  hypo

SEQ ID NO: 406267 - DNA, 217 bp, Homo sapiens; identical to SEQ ID NO: 258478
  chr7:151073504-151073721
  hypo

SEQ ID NO: 406268 - DNA, 51 bp, Homo sapiens; identical to SEQ ID NO: 258479
  chr7:151074139-151074190
  hypo

SEQ ID NO: 406269 - DNA, 237 bp, Homo sapiens; identical to SEQ ID NO: 258481
  chr7:151124256-151124493
  hypo

SEQ ID NO: 406270 - DNA, 173 bp, Homo sapiens; identical to SEQ ID NO: 258483
  chr7:151133222-151133395
  hypo

SEQ ID NO: 406271 - DNA, 33 bp, Homo sapiens; identical to SEQ ID NO: 211932
  chr7:151134320-151134353
  hypo

SEQ ID NO: 406272 - DNA, 36 bp, Homo sapiens; identical to SEQ ID NO: 211934
  chr7:151214439-151214475
  hypo

SEQ ID NO: 406273 - DNA, 152 bp, Homo sapiens; identical to SEQ ID NO: 223269
  chr7:151217153-151217305
  hypo

SEQ ID NO: 406274 - DNA, 304 bp, Homo sapiens; identical to SEQ ID NO: 211935
  chr7:151358568-151358872
  hypo

SEQ ID NO: 406275 - DNA, 207 bp, Homo sapiens; identical to SEQ ID NO: 258492
  chr7:151412757-151412964
  hypo

SEQ ID NO: 406276 - DNA, 94 bp, Homo sapiens; identical to SEQ ID NO: 258494
  chr7:151423343-151423437
  hypo

SEQ ID NO: 406277 - DNA, 147 bp, Homo sapiens; identical to SEQ ID NO: 258497
  chr7:151476539-151476686
  hypo

SEQ ID NO: 406278 - DNA, 35 bp, Homo sapiens; identical to SEQ ID NO: 258498
  chr7:151496736-151496771
  hypo

SEQ ID NO: 406279 - DNA, 248 bp, Homo sapiens; identical to SEQ ID NO: 258499
  chr7:151505823-151506071
  hypo

SEQ ID NO: 406280 - DNA, 206 bp, Homo sapiens; identical to SEQ ID NO: 258502
  chr7:151556275-151556481
  hypo

SEQ ID NO: 406281 - DNA, 86 bp, Homo sapiens; identical to SEQ ID NO: 211940
  chr7:151712356-151712442
  hypo

SEQ ID NO: 406282 - DNA, 131 bp, Homo sapiens; identical to SEQ ID NO: 258509
  chr7:151781606-151781737
  hypo

SEQ ID NO: 406283 - DNA, 205 bp, Homo sapiens; identical to SEQ ID NO: 258513
  chr7:151826350-151826555
  hypo

SEQ ID NO: 406284 - DNA, 80 bp, Homo sapiens; identical to SEQ ID NO: 258517
  chr7:152159225-152159305
  hypo

SEQ ID NO: 406285 - DNA, 31 bp, Homo sapiens
  chr7:152273472-152273503
  hypo
gcaattctttttttgtttttttgtttttttg

SEQ ID NO: 406286 - DNA, 75 bp, Homo sapiens; identical to SEQ ID NO: 211949
  chr7:152374303-152374378
  hypo

SEQ ID NO: 406287 - DNA, 47 bp, Homo sapiens; identical to SEQ ID NO: 211950
  chr7:152374397-152374444
  hypo

SEQ ID NO: 406288 - DNA, 78 bp, Homo sapiens; identical to SEQ ID NO: 211952
  chr7:152543573-152543651
  hypo

SEQ ID NO: 406289 - DNA, 173 bp, Homo sapiens; identical to SEQ ID NO: 211954
  chr7:152555646-152555819
  hypo

SEQ ID NO: 406290 - DNA, 39 bp, Homo sapiens; identical to SEQ ID NO: 211955
  chr7:152647711-152647750
  hypo

SEQ ID NO: 406291 - DNA, 235 bp, Homo sapiens; identical to SEQ ID NO: 258534
  chr7:152716533-152716768
  hypo

SEQ ID NO: 406292 - DNA, 42 bp, Homo sapiens; identical to SEQ ID NO: 258535
  chr7:152738787-152738829
  hypo

SEQ ID NO: 406293 - DNA, 447 bp, Homo sapiens; identical to SEQ ID NO: 258539
  chr7:153110538-153110985
  hypo

SEQ ID NO: 406294 - DNA, 86 bp, Homo sapiens; identical to SEQ ID NO: 258540
  chr7:153111045-153111131
  hypo

SEQ ID NO: 406295 - DNA, 336 bp, Homo sapiens; identical to SEQ ID NO: 308712
  chr7:154087908-154088244
  hypo

SEQ ID NO: 406296 - DNA, 34 bp, Homo sapiens; identical to SEQ ID NO: 308713
  chr7:154088284-154088318
  hypo

SEQ ID NO: 406297 - DNA, 69 bp, Homo sapiens; identical to SEQ ID NO: 258545
  chr7:154128040-154128109
  hypo

SEQ ID NO: 406298 - DNA, 35 bp, Homo sapiens; identical to SEQ ID NO: 258547
  chr7:154382567-154382602
  hypo

SEQ ID NO: 406299 - DNA, 233 bp, Homo sapiens; identical to SEQ ID NO: 258550
  chr7:154646528-154646761
  hypo

SEQ ID NO: 406300 - DNA, 276 bp, Homo sapiens; identical to SEQ ID NO: 258551
  chr7:154673974-154674250
  hypo

SEQ ID NO: 406301 - DNA, 211 bp, Homo sapiens; identical to SEQ ID NO: 258552
  chr7:154875881-154876092
  hypo

SEQ ID NO: 406302 - DNA, 68 bp, Homo sapiens; identical to SEQ ID NO: 258553
  chr7:154922371-154922439
  hypo

SEQ ID NO: 406303 - DNA, 95 bp, Homo sapiens; identical to SEQ ID NO: 258555
  chr7:155016945-155017040
  hypo

SEQ ID NO: 406304 - DNA, 359 bp, Homo sapiens; identical to SEQ ID NO: 211959
  chr7:155130273-155130632
  hypo

SEQ ID NO: 406305 - DNA, 83 bp, Homo sapiens; identical to SEQ ID NO: 308729
  chr7:155130794-155130877
  hypo

SEQ ID NO: 406306 - DNA, 35 bp, Homo sapiens; identical to SEQ ID NO: 201251
  chr7:155170943-155170978
  hypo

SEQ ID NO: 406307 - DNA, 94 bp, Homo sapiens; identical to SEQ ID NO: 258560
  chr7:155274563-155274657
  hypo

SEQ ID NO: 406308 - DNA, 79 bp, Homo sapiens; identical to SEQ ID NO: 211962
  chr7:155352613-155352692
  hypo

SEQ ID NO: 406309 - DNA, 155 bp, Homo sapiens; identical to SEQ ID NO: 258566
  chr7:155503998-155504153
  hypo

SEQ ID NO: 406310 - DNA, 195 bp, Homo sapiens; identical to SEQ ID NO: 211966
  chr7:155532479-155532674
  hypo

SEQ ID NO: 406311 - DNA, 126 bp, Homo sapiens; identical to SEQ ID NO: 211967
  chr7:155559943-155560069
  hypo

SEQ ID NO: 406312 - DNA, 213 bp, Homo sapiens; identical to SEQ ID NO: 258571
  chr7:155573670-155573883
  hypo

SEQ ID NO: 406313 - DNA, 57 bp, Homo sapiens; identical to SEQ ID NO: 285567
  chr7:155580355-155580412
  hypo

SEQ ID NO: 406314 - DNA, 256 bp, Homo sapiens; identical to SEQ ID NO: 258574
  chr7:155582651-155582907
  hypo

SEQ ID NO: 406315 - DNA, 169 bp, Homo sapiens; identical to SEQ ID NO: 258579
  chr7:155706980-155707149
  hypo

SEQ ID NO: 406316 - DNA, 97 bp, Homo sapiens; identical to SEQ ID NO: 211974
  chr7:155828366-155828463
  hypo

SEQ ID NO: 406317 - DNA, 318 bp, Homo sapiens; identical to SEQ ID NO: 258584
  chr7:155855975-155856293
  hypo

SEQ ID NO: 406318 - DNA, 311 bp, Homo sapiens; identical to SEQ ID NO: 258586
  chr7:155868045-155868356
  hypo

SEQ ID NO: 406319 - DNA, 166 bp, Homo sapiens; identical to SEQ ID NO: 258588
  chr7:155897787-155897953
  hypo

SEQ ID NO: 406320 - DNA, 206 bp, Homo sapiens; identical to SEQ ID NO: 211976
  chr7:155900805-155901011
  hypo

SEQ ID NO: 406321 - DNA, 286 bp, Homo sapiens; identical to SEQ ID NO: 211980
  chr7:155935866-155936152
  hypo

SEQ ID NO: 406322 - DNA, 52 bp, Homo sapiens; identical to SEQ ID NO: 258599
  chr7:156154858-156154910
  hypo

SEQ ID NO: 406323 - DNA, 168 bp, Homo sapiens; identical to SEQ ID NO: 258601
  chr7:156255129-156255297
  hypo

SEQ ID NO: 406324 - DNA, 50 bp, Homo sapiens; identical to SEQ ID NO: 308774
  chr7:156290627-156290677
  hypo

SEQ ID NO: 406325 - DNA, 306 bp, Homo sapiens; identical to SEQ ID NO: 258605
  chr7:156371322-156371628
  hypo

SEQ ID NO: 406326 - DNA, 187 bp, Homo sapiens; identical to SEQ ID NO: 258610
  chr7:156613330-156613517
  hypo

SEQ ID NO: 406327 - DNA, 163 bp, Homo sapiens; identical to SEQ ID NO: 258611
  chr7:156733207-156733370
  hypo

SEQ ID NO: 406328 - DNA, 120 bp, Homo sapiens; identical to SEQ ID NO: 211986
  chr7:156733810-156733930
  hypo

SEQ ID NO: 406329 - DNA, 37 bp, Homo sapiens; identical to SEQ ID NO: 211987
  chr7:156733990-156734027
  hypo

SEQ ID NO: 406330 - DNA, 972 bp, Homo sapiens; identical to SEQ ID NO: 397839
  chr7:156802750-156803722
  hypo

SEQ ID NO: 406331 - DNA, 197 bp, Homo sapiens; identical to SEQ ID NO: 258622
  chr7:156918515-156918712
  hypo

SEQ ID NO: 406332 - DNA, 86 bp, Homo sapiens; identical to SEQ ID NO: 211992
  chr7:156937634-156937720
  hypo

SEQ ID NO: 406333 - DNA, 222 bp, Homo sapiens; identical to SEQ ID NO: 258628
  chr7:157072934-157073156
  hypo

SEQ ID NO: 406334 - DNA, 326 bp, Homo sapiens; identical to SEQ ID NO: 308803
  chr7:157074072-157074398
  hypo

SEQ ID NO: 406335 - DNA, 61 bp, Homo sapiens; identical to SEQ ID NO: 308804
  chr7:157074428-157074489
  hypo

SEQ ID NO: 406336 - DNA, 311 bp, Homo sapiens; identical to SEQ ID NO: 308806
  chr7:157084099-157084410
  hypo

SEQ ID NO: 406337 - DNA, 402 bp, Homo sapiens; identical to SEQ ID NO: 308807
  chr7:157084622-157085024
  hypo

SEQ ID NO: 406338 - DNA, 57 bp, Homo sapiens; identical to SEQ ID NO: 258636
  chr7:157102726-157102783
  hypo

SEQ ID NO: 406339 - DNA, 149 bp, Homo sapiens; identical to SEQ ID NO: 258639
  chr7:157122530-157122679
  hypo

SEQ ID NO: 406340 - DNA, 60 bp, Homo sapiens; identical to SEQ ID NO: 308821
  chr7:157220412-157220472
  hypo

SEQ ID NO: 406341 - DNA, 154 bp, Homo sapiens; identical to SEQ ID NO: 258654
  chr7:157332354-157332508
  hypo

SEQ ID NO: 406342 - DNA, 123 bp, Homo sapiens; identical to SEQ ID NO: 308829
  chr7:157332825-157332948
  hypo

SEQ ID NO: 406343 - DNA, 115 bp, Homo sapiens; identical to SEQ ID NO: 308830
  chr7:157332978-157333093
  hypo

SEQ ID NO: 406344 - DNA, 520 bp, Homo sapiens; identical to SEQ ID NO: 258661
  chr7:157344958-157345478
  hypo

SEQ ID NO: 406345 - DNA, 109 bp, Homo sapiens; identical to SEQ ID NO: 258664
  chr7:157364282-157364391
  hypo

SEQ ID NO: 406346 - DNA, 99 bp, Homo sapiens; identical to SEQ ID NO: 258667
  chr7:157372247-157372346
  hypo

SEQ ID NO: 406347 - DNA, 134 bp, Homo sapiens; identical to SEQ ID NO: 258668
  chr7:157372651-157372785
  hypo

SEQ ID NO: 406348 - DNA, 239 bp, Homo sapiens; identical to SEQ ID NO: 212009
  chr7:157387164-157387403
  hypo

SEQ ID NO: 406349 - DNA, 378 bp, Homo sapiens; identical to SEQ ID NO: 308850
  chr7:157402241-157402619
  hypo

SEQ ID NO: 406350 - DNA, 83 bp, Homo sapiens; identical to SEQ ID NO: 308851
  chr7:157402654-157402737
  hypo

SEQ ID NO: 406351 - DNA, 249 bp, Homo sapiens; identical to SEQ ID NO: 258678
  chr7:157413023-157413272
  hypo

SEQ ID NO: 406352 - DNA, 42 bp, Homo sapiens; identical to SEQ ID NO: 258680
  chr7:157434605-157434647
  hypo

SEQ ID NO: 406353 - DNA, 54 bp, Homo sapiens; identical to SEQ ID NO: 258685
  chr7:157447781-157447835
  hypo

SEQ ID NO: 406354 - DNA, 216 bp, Homo sapiens; identical to SEQ ID NO: 212018
  chr7:157448958-157449174
  hypo

SEQ ID NO: 406355 - DNA, 50 bp, Homo sapiens; identical to SEQ ID NO: 212019
  chr7:157449405-157449455
  hypo

SEQ ID NO: 406356 - DNA, 452 bp, Homo sapiens; identical to SEQ ID NO: 258690
  chr7:157467102-157467554
  hypo

SEQ ID NO: 406357 - DNA, 193 bp, Homo sapiens; identical to SEQ ID NO: 258691
  chr7:157502240-157502433
  hypo

SEQ ID NO: 406358 - DNA, 541 bp, Homo sapiens; identical to SEQ ID NO: 308878
  chr7:157544023-157544564
  hypo

SEQ ID NO: 406359 - DNA, 342 bp, Homo sapiens; identical to SEQ ID NO: 212026
  chr7:157549923-157550265
  hypo

SEQ ID NO: 406360 - DNA, 61 bp, Homo sapiens; identical to SEQ ID NO: 308882
  chr7:157565439-157565500
  hypo

SEQ ID NO: 406361 - DNA, 155 bp, Homo sapiens; identical to SEQ ID NO: 212027
  chr7:157567209-157567364
  hypo

SEQ ID NO: 406362 - DNA, 47 bp, Homo sapiens; identical to SEQ ID NO: 212028
  chr7:157568321-157568368
  hypo

SEQ ID NO: 406363 - DNA, 138 bp, Homo sapiens; identical to SEQ ID NO: 258704
  chr7:157570973-157571111
  hypo

SEQ ID NO: 406364 - DNA, 151 bp, Homo sapiens; identical to SEQ ID NO: 308890
  chr7:157602964-157603115
  hypo

SEQ ID NO: 406365 - DNA, 314 bp, Homo sapiens; identical to SEQ ID NO: 308891
  chr7:157603148-157603462
  hypo

SEQ ID NO: 406366 - DNA, 406 bp, Homo sapiens; identical to SEQ ID NO: 212030
  chr7:157606033-157606439
  hypo

SEQ ID NO: 406367 - DNA, 123 bp, Homo sapiens; identical to SEQ ID NO: 258714
  chr7:157620461-157620584
  hypo

SEQ ID NO: 406368 - DNA, 153 bp, Homo sapiens; identical to SEQ ID NO: 258717
  chr7:157630455-157630608
  hypo

SEQ ID NO: 406369 - DNA, 94 bp, Homo sapiens; identical to SEQ ID NO: 212037
  chr7:157646590-157646684
  hypo

SEQ ID NO: 406370 - DNA, 115 bp, Homo sapiens; identical to SEQ ID NO: 258728
  chr7:157658676-157658791
  hypo

SEQ ID NO: 406371 - DNA, 40 bp, Homo sapiens; identical to SEQ ID NO: 308913
  chr7:157660158-157660198
  hypo

SEQ ID NO: 406372 - DNA, 259 bp, Homo sapiens; identical to SEQ ID NO: 258731
  chr7:157660637-157660896
  hypo

SEQ ID NO: 406373 - DNA, 65 bp, Homo sapiens; identical to SEQ ID NO: 258737
  chr7:157731890-157731955
  hypo

SEQ ID NO: 406374 - DNA, 324 bp, Homo sapiens; identical to SEQ ID NO: 258738
  chr7:157734698-157735022
  hypo

SEQ ID NO: 406375 - DNA, 41 bp, Homo sapiens; identical to SEQ ID NO: 308925
  chr7:157776962-157777003
  hypo

SEQ ID NO: 406376 - DNA, 239 bp, Homo sapiens; identical to SEQ ID NO: 212045
  chr7:157794264-157794503
  hypo

SEQ ID NO: 406377 - DNA, 456 bp, Homo sapiens; identical to SEQ ID NO: 308928
  chr7:157794648-157795104
  hypo

SEQ ID NO: 406378 - DNA, 182 bp, Homo sapiens; identical to SEQ ID NO: 212049
  chr7:157847115-157847297
  hypo

SEQ ID NO: 406379 - DNA, 50 bp, Homo sapiens; identical to SEQ ID NO: 258754
  chr7:157903545-157903595
  hypo

SEQ ID NO: 406380 - DNA, 104 bp, Homo sapiens; identical to SEQ ID NO: 258755
  chr7:157903815-157903919
  hypo

SEQ ID NO: 406381 - DNA, 51 bp, Homo sapiens
  chr7:157949122-157949173
  hypo
aggtaagaccagaagagaaaatgttttacagatgtcagagggttgggactt

SEQ ID NO: 406382 - DNA, 55 bp, Homo sapiens; identical to SEQ ID NO: 258772
  chr7:157980855-157980910
  hypo

SEQ ID NO: 406383 - DNA, 151 bp, Homo sapiens; identical to SEQ ID NO: 212062
  chr7:157981292-157981443
  hypo

SEQ ID NO: 406384 - DNA, 122 bp, Homo sapiens; identical to SEQ ID NO: 212063
  chr7:157987148-157987270
  hypo

SEQ ID NO: 406385 - DNA, 290 bp, Homo sapiens; identical to SEQ ID NO: 258778
  chr7:158044818-158045108
  hypo

SEQ ID NO: 406386 - DNA, 127 bp, Homo sapiens; identical to SEQ ID NO: 258780
  chr7:158060880-158061007
  hypo

SEQ ID NO: 406387 - DNA, 499 bp, Homo sapiens; identical to SEQ ID NO: 258781
  chr7:158061260-158061759
  hypo

SEQ ID NO: 406388 - DNA, 175 bp, Homo sapiens; identical to SEQ ID NO: 258785
  chr7:158087289-158087464
  hypo

SEQ ID NO: 406389 - DNA, 96 bp, Homo sapiens; identical to SEQ ID NO: 212071
  chr7:158109478-158109574
  hypo

SEQ ID NO: 406390 - DNA, 89 bp, Homo sapiens; identical to SEQ ID NO: 212072
  chr7:158113046-158113135
  hypo

SEQ ID NO: 406391 - DNA, 151 bp, Homo sapiens; identical to SEQ ID NO: 258793
  chr7:158185087-158185238
  hypo

SEQ ID NO: 406392 - DNA, 41 bp, Homo sapiens; identical to SEQ ID NO: 308982
  chr7:158188491-158188532
  hypo

SEQ ID NO: 406393 - DNA, 54 bp, Homo sapiens; identical to SEQ ID NO: 308983
  chr7:158188577-158188631
  hypo

SEQ ID NO: 406394 - DNA, 482 bp, Homo sapiens; identical to SEQ ID NO: 258799
  chr7:158240243-158240725
  hypo

SEQ ID NO: 406395 - DNA, 130 bp, Homo sapiens; identical to SEQ ID NO: 258801
  chr7:158267715-158267845
  hypo

SEQ ID NO: 406396 - DNA, 153 bp, Homo sapiens
  chr7:158283035-158283188
  hypo
gggcaggaaaggccagcgcggctgggccaggccctggaggagacgcggggcagaggcagcgcctcagtccccacccaggaaggggctccagaagctccgcggtgcctgggtggccaggcgaccccaagccacgcatcccccgcggccgagcag

SEQ ID NO: 406397 - DNA, 224 bp, Homo sapiens; identical to SEQ ID NO: 212083
  chr7:158283236-158283460
  hypo

SEQ ID NO: 406398 - DNA, 117 bp, Homo sapiens; identical to SEQ ID NO: 258807
  chr7:158307739-158307856
  hypo

SEQ ID NO: 406399 - DNA, 141 bp, Homo sapiens; identical to SEQ ID NO: 258808
  chr7:158315944-158316085
  hypo

SEQ ID NO: 406400 - DNA, 109 bp, Homo sapiens; identical to SEQ ID NO: 258809
  chr7:158330971-158331080
  hypo

SEQ ID NO: 406401 - DNA, 231 bp, Homo sapiens; identical to SEQ ID NO: 212084
  chr7:158331366-158331597
  hypo

SEQ ID NO: 406402 - DNA, 236 bp, Homo sapiens; identical to SEQ ID NO: 212091
  chr7:158564138-158564374
  hypo

SEQ ID NO: 406403 - DNA, 113 bp, Homo sapiens; identical to SEQ ID NO: 212092
  chr7:158564404-158564517
  hypo

SEQ ID NO: 406404 - DNA, 34 bp, Homo sapiens
  chr7:158584041-158584075
  hypo
gccttgtagctattgtaaaaaatgctgctaagaa

SEQ ID NO: 406405 - DNA, 43 bp, Homo sapiens; identical to SEQ ID NO: 258823
  chr7:158598841-158598884
  hypo

SEQ ID NO: 406406 - DNA, 33 bp, Homo sapiens; identical to SEQ ID NO: 212095
  chr7:158624108-158624141
  hypo

SEQ ID NO: 406407 - DNA, 196 bp, Homo sapiens; identical to SEQ ID NO: 212098
  chr7:158792183-158792379
  hypo

SEQ ID NO: 406408 - DNA, 186 bp, Homo sapiens; identical to SEQ ID NO: 258831
  chr7:158820419-158820605
  hypo

SEQ ID NO: 406409 - DNA, 222 bp, Homo sapiens; identical to SEQ ID NO: 258832
  chr7:158856804-158857026
  hypo

SEQ ID NO: 406410 - DNA, 179 bp, Homo sapiens; identical to SEQ ID NO: 258835
  chr7:158933386-158933565
  hypo

SEQ ID NO: 406411 - DNA, 114 bp, Homo sapiens; identical to SEQ ID NO: 258836
  chr7:158940025-158940139
  hypo

SEQ ID NO: 406412 - DNA, 187 bp, Homo sapiens; identical to SEQ ID NO: 258838
  chr7:158951178-158951365
  hypo

SEQ ID NO: 406413 - DNA, 106 bp, Homo sapiens; identical to SEQ ID NO: 258840
  chr8:287940-288046
  hypo

SEQ ID NO: 406414 - DNA, 93 bp, Homo sapiens; identical to SEQ ID NO: 285610
  chr8:495072-495165
  hypo

SEQ ID NO: 406415 - DNA, 33 bp, Homo sapiens; identical to SEQ ID NO: 309040
  chr8:566474-566507
  hypo

SEQ ID NO: 406416 - DNA, 150 bp, Homo sapiens; identical to SEQ ID NO: 258850
  chr8:716398-716548
  hypo

SEQ ID NO: 406417 - DNA, 85 bp, Homo sapiens; identical to SEQ ID NO: 212104
  chr8:833589-833674
  hypo

SEQ ID NO: 406418 - DNA, 324 bp, Homo sapiens; identical to SEQ ID NO: 212105
  chr8:893356-893680
  hypo

SEQ ID NO: 406419 - DNA, 231 bp, Homo sapiens; identical to SEQ ID NO: 309054
  chr8:976028-976259
  hypo

SEQ ID NO: 406420 - DNA, 76 bp, Homo sapiens; identical to SEQ ID NO: 258857
  chr8:978468-978544
  hypo

SEQ ID NO: 406421 - DNA, 268 bp, Homo sapiens; identical to SEQ ID NO: 212107
  chr8:1047978-1048246
  hypo

SEQ ID NO: 406422 - DNA, 74 bp, Homo sapiens; identical to SEQ ID NO: 212108
  chr8:1048772-1048846
  hypo

SEQ ID NO: 406423 - DNA, 226 bp, Homo sapiens; identical to SEQ ID NO: 258870
  chr8:1251026-1251252
  hypo

SEQ ID NO: 406424 - DNA, 135 bp, Homo sapiens; identical to SEQ ID NO: 212112
  chr8:1308186-1308321
  hypo

SEQ ID NO: 406425 - DNA, 128 bp, Homo sapiens; identical to SEQ ID NO: 309071
  chr8:1308368-1308496
  hypo

SEQ ID NO: 406426 - DNA, 298 bp, Homo sapiens; identical to SEQ ID NO: 258882
  chr8:1475085-1475383
  hypo

SEQ ID NO: 406427 - DNA, 213 bp, Homo sapiens; identical to SEQ ID NO: 309084
  chr8:1501387-1501600
  hypo

SEQ ID NO: 406428 - DNA, 263 bp, Homo sapiens; identical to SEQ ID NO: 309085
  chr8:1578880-1579143
  hypo

SEQ ID NO: 406429 - DNA, 79 bp, Homo sapiens; identical to SEQ ID NO: 212118
  chr8:1579182-1579261
  hypo

SEQ ID NO: 406430 - DNA, 243 bp, Homo sapiens; identical to SEQ ID NO: 309088
  chr8:1615950-1616193
  hypo

SEQ ID NO: 406431 - DNA, 121 bp, Homo sapiens; identical to SEQ ID NO: 258887
  chr8:1616694-1616815
  hypo

SEQ ID NO: 406432 - DNA, 44 bp, Homo sapiens; identical to SEQ ID NO: 258892
  chr8:1759476-1759520
  hypo

SEQ ID NO: 406433 - DNA, 235 bp, Homo sapiens; identical to SEQ ID NO: 212119
  chr8:1777141-1777376
  hypo

SEQ ID NO: 406434 - DNA, 382 bp, Homo sapiens; identical to SEQ ID NO: 258896
  chr8:1791891-1792273
  hypo

SEQ ID NO: 406435 - DNA, 162 bp, Homo sapiens; identical to SEQ ID NO: 212121
  chr8:1797380-1797542
  hypo

SEQ ID NO: 406436 - DNA, 42 bp, Homo sapiens; identical to SEQ ID NO: 258900
  chr8:1798701-1798743
  hypo

SEQ ID NO: 406437 - DNA, 201 bp, Homo sapiens; identical to SEQ ID NO: 258901
  chr8:1801273-1801474
  hypo

SEQ ID NO: 406438 - DNA, 189 bp, Homo sapiens; identical to SEQ ID NO: 258905
  chr8:1821224-1821413
  hypo

SEQ ID NO: 406439 - DNA, 54 bp, Homo sapiens; identical to SEQ ID NO: 212123
  chr8:1826001-1826055
  hypo

SEQ ID NO: 406440 - DNA, 727 bp, Homo sapiens; identical to SEQ ID NO: 258910
  chr8:1877722-1878449
  hypo

SEQ ID NO: 406441 - DNA, 109 bp, Homo sapiens; identical to SEQ ID NO: 258911
  chr8:1879662-1879771
  hypo

SEQ ID NO: 406442 - DNA, 151 bp, Homo sapiens; identical to SEQ ID NO: 258913
  chr8:1902126-1902277
  hypo

SEQ ID NO: 406443 - DNA, 33 bp, Homo sapiens; identical to SEQ ID NO: 212126
  chr8:1926963-1926996
  hypo

SEQ ID NO: 406444 - DNA, 283 bp, Homo sapiens; identical to SEQ ID NO: 258915
  chr8:1942393-1942676
  hypo

SEQ ID NO: 406445 - DNA, 91 bp, Homo sapiens; identical to SEQ ID NO: 258916
  chr8:2522805-2522896
  hypo

SEQ ID NO: 406446 - DNA, 38 bp, Homo sapiens; identical to SEQ ID NO: 258918
  chr8:2609653-2609691
  hypo

SEQ ID NO: 406447 - DNA, 42 bp, Homo sapiens; identical to SEQ ID NO: 258921
  chr8:4123574-4123616
  hypo

SEQ ID NO: 406448 - DNA, 31 bp, Homo sapiens; identical to SEQ ID NO: 258922
  chr8:4218294-4218325
  hypo

SEQ ID NO: 406449 - DNA, 253 bp, Homo sapiens; identical to SEQ ID NO: 258924
  chr8:5829440-5829693
  hypo

SEQ ID NO: 406450 - DNA, 134 bp, Homo sapiens; identical to SEQ ID NO: 258925
  chr8:5909951-5910085
  hypo

SEQ ID NO: 406451 - DNA, 272 bp, Homo sapiens; identical to SEQ ID NO: 258929
  chr8:6323187-6323459
  hypo

SEQ ID NO: 406452 - DNA, 102 bp, Homo sapiens; identical to SEQ ID NO: 212129
  chr8:6456168-6456270
  hypo

SEQ ID NO: 406453 - DNA, 90 bp, Homo sapiens; identical to SEQ ID NO: 258939
  chr8:6590044-6590134
  hypo

SEQ ID NO: 406454 - DNA, 69 bp, Homo sapiens; identical to SEQ ID NO: 258944
  chr8:6664120-6664189
  hypo

SEQ ID NO: 406455 - DNA, 209 bp, Homo sapiens; identical to SEQ ID NO: 212135
  chr8:6756662-6756871
  hypo

SEQ ID NO: 406456 - DNA, 36 bp, Homo sapiens; identical to SEQ ID NO: 258948
  chr8:8122017-8122053
  hypo

SEQ ID NO: 406457 - DNA, 328 bp, Homo sapiens; identical to SEQ ID NO: 258951
  chr8:8471121-8471449
  hypo

SEQ ID NO: 406458 - DNA, 39 bp, Homo sapiens; identical to SEQ ID NO: 212139
  chr8:8634316-8634355
  hypo

SEQ ID NO: 406459 - DNA, 155 bp, Homo sapiens; identical to SEQ ID NO: 258958
  chr8:8642145-8642300
  hypo

SEQ ID NO: 406460 - DNA, 159 bp, Homo sapiens; identical to SEQ ID NO: 212146
  chr8:8690237-8690396
  hypo

SEQ ID NO: 406461 - DNA, 105 bp, Homo sapiens; identical to SEQ ID NO: 212148
  chr8:8698610-8698715
  hypo

SEQ ID NO: 406462 - DNA, 252 bp, Homo sapiens; identical to SEQ ID NO: 309172
  chr8:8709481-8709733
  hypo

SEQ ID NO: 406463 - DNA, 120 bp, Homo sapiens; identical to SEQ ID NO: 212150
  chr8:8712566-8712686
  hypo

SEQ ID NO: 406464 - DNA, 167 bp, Homo sapiens; identical to SEQ ID NO: 223304
  chr8:8750284-8750451
  hypo

SEQ ID NO: 406465 - DNA, 139 bp, Homo sapiens; identical to SEQ ID NO: 223305
  chr8:8750520-8750659
  hypo

SEQ ID NO: 406466 - DNA, 39 bp, Homo sapiens; identical to SEQ ID NO: 258977
  chr8:8803669-8803708
  hypo

SEQ ID NO: 406467 - DNA, 462 bp, Homo sapiens; identical to SEQ ID NO: 223306
  chr8:8820810-8821272
  hypo

SEQ ID NO: 406468 - DNA, 31 bp, Homo sapiens; identical to SEQ ID NO: 258978
  chr8:8850535-8850566
  hypo

SEQ ID NO: 406469 - DNA, 141 bp, Homo sapiens; identical to SEQ ID NO: 309189
  chr8:10192957-10193098
  hypo

SEQ ID NO: 406470 - DNA, 176 bp, Homo sapiens; identical to SEQ ID NO: 212161
  chr8:10261662-10261838
  hypo

SEQ ID NO: 406471 - DNA, 188 bp, Homo sapiens; identical to SEQ ID NO: 212162
  chr8:10261986-10262174
  hypo

SEQ ID NO: 406472 - DNA, 141 bp, Homo sapiens; identical to SEQ ID NO: 258984
  chr8:10283196-10283337
  hypo

SEQ ID NO: 406473 - DNA, 232 bp, Homo sapiens; identical to SEQ ID NO: 258985
  chr8:10466917-10467149
  hypo

SEQ ID NO: 406474 - DNA, 202 bp, Homo sapiens; identical to SEQ ID NO: 212164
  chr8:10683500-10683702
  hypo

SEQ ID NO: 406475 - DNA, 42 bp, Homo sapiens; identical to SEQ ID NO: 258988
  chr8:10798364-10798406
  hypo

SEQ ID NO: 406476 - DNA, 136 bp, Homo sapiens; identical to SEQ ID NO: 258992
  chr8:11182858-11182994
  hypo

SEQ ID NO: 406477 - DNA, 332 bp, Homo sapiens; identical to SEQ ID NO: 258993
  chr8:11218929-11219261
  hypo

SEQ ID NO: 406478 - DNA, 66 bp, Homo sapiens; identical to SEQ ID NO: 212167
  chr8:11612347-11612413
  hypo

SEQ ID NO: 406479 - DNA, 179 bp, Homo sapiens; identical to SEQ ID NO: 258997
  chr8:11645475-11645654
  hypo

SEQ ID NO: 406480 - DNA, 75 bp, Homo sapiens; identical to SEQ ID NO: 258998
  chr8:11646750-11646825
  hypo

SEQ ID NO: 406481 - DNA, 54 bp, Homo sapiens; identical to SEQ ID NO: 259002
  chr8:11704225-11704279
  hypo

SEQ ID NO: 406482 - DNA, 72 bp, Homo sapiens; identical to SEQ ID NO: 212168
  chr8:11706508-11706580
  hypo

SEQ ID NO: 406483 - DNA, 120 bp, Homo sapiens; identical to SEQ ID NO: 212169
  chr8:11706613-11706733
  hypo

SEQ ID NO: 406484 - DNA, 151 bp, Homo sapiens; identical to SEQ ID NO: 259007
  chr8:11711013-11711164
  hypo

SEQ ID NO: 406485 - DNA, 35 bp, Homo sapiens; identical to SEQ ID NO: 259009
  chr8:11883053-11883088
  hypo

SEQ ID NO: 406486 - DNA, 225 bp, Homo sapiens; identical to SEQ ID NO: 212171
  chr8:12623675-12623900
  hypo

SEQ ID NO: 406487 - DNA, 211 bp, Homo sapiens; identical to SEQ ID NO: 259012
  chr8:12950150-12950361
  hypo

SEQ ID NO: 406488 - DNA, 34 bp, Homo sapiens; identical to SEQ ID NO: 259016
  chr8:16459748-16459782
  hypo

SEQ ID NO: 406489 - DNA, 101 bp, Homo sapiens; identical to SEQ ID NO: 259018
  chr8:17360874-17360975
  hypo

SEQ ID NO: 406490 - DNA, 363 bp, Homo sapiens; identical to SEQ ID NO: 388527
  chr8:17434563-17434926
  hypo

SEQ ID NO: 406491 - DNA, 122 bp, Homo sapiens; identical to SEQ ID NO: 259019
  chr8:17478545-17478667
  hypo

SEQ ID NO: 406492 - DNA, 34 bp, Homo sapiens; identical to SEQ ID NO: 259020
  chr8:17574339-17574373
  hypo

SEQ ID NO: 406493 - DNA, 100 bp, Homo sapiens; identical to SEQ ID NO: 259021
  chr8:17648492-17648592
  hypo

SEQ ID NO: 406494 - DNA, 210 bp, Homo sapiens; identical to SEQ ID NO: 259022
  chr8:17767556-17767766
  hypo

SEQ ID NO: 406495 - DNA, 335 bp, Homo sapiens; identical to SEQ ID NO: 259028
  chr8:19094994-19095329
  hypo

SEQ ID NO: 406496 - DNA, 38 bp, Homo sapiens; identical to SEQ ID NO: 259030
  chr8:19335638-19335676
  hypo

SEQ ID NO: 406497 - DNA, 62 bp, Homo sapiens; identical to SEQ ID NO: 212181
  chr8:19706754-19706816
  hypo

SEQ ID NO: 406498 - DNA, 64 bp, Homo sapiens; identical to SEQ ID NO: 259034
  chr8:19715650-19715714
  hypo

SEQ ID NO: 406499 - DNA, 58 bp, Homo sapiens; identical to SEQ ID NO: 397873
  chr8:19798019-19798077
  hypo

SEQ ID NO: 406500 - DNA, 358 bp, Homo sapiens; identical to SEQ ID NO: 259035
  chr8:20107412-20107770
  hypo

SEQ ID NO: 406501 - DNA, 195 bp, Homo sapiens; identical to SEQ ID NO: 259038
  chr8:21590921-21591116
  hypo

SEQ ID NO: 406502 - DNA, 82 bp, Homo sapiens; identical to SEQ ID NO: 212186
  chr8:21608213-21608295
  hypo

SEQ ID NO: 406503 - DNA, 232 bp, Homo sapiens; identical to SEQ ID NO: 259042
  chr8:21769765-21769997
  hypo

SEQ ID NO: 406504 - DNA, 82 bp, Homo sapiens; identical to SEQ ID NO: 285701
  chr8:21868699-21868781
  hypo

SEQ ID NO: 406505 - DNA, 124 bp, Homo sapiens; identical to SEQ ID NO: 201326
  chr8:21906319-21906443
  hypo

SEQ ID NO: 406506 - DNA, 166 bp, Homo sapiens; identical to SEQ ID NO: 212189
  chr8:21960397-21960563
  hypo

SEQ ID NO: 406507 - DNA, 87 bp, Homo sapiens; identical to SEQ ID NO: 259049
  chr8:21977140-21977227
  hypo

SEQ ID NO: 406508 - DNA, 379 bp, Homo sapiens; identical to SEQ ID NO: 259050
  chr8:21977566-21977945
  hypo

SEQ ID NO: 406509 - DNA, 70 bp, Homo sapiens; identical to SEQ ID NO: 212192
  chr8:21981256-21981326
  hypo

SEQ ID NO: 406510 - DNA, 95 bp, Homo sapiens; identical to SEQ ID NO: 259053
  chr8:22005942-22006037
  hypo

SEQ ID NO: 406511 - DNA, 40 bp, Homo sapiens; identical to SEQ ID NO: 259056
  chr8:22073146-22073186
  hypo

SEQ ID NO: 406512 - DNA, 297 bp, Homo sapiens; identical to SEQ ID NO: 259061
  chr8:22255560-22255857
  hypo

SEQ ID NO: 406513 - DNA, 70 bp, Homo sapiens; identical to SEQ ID NO: 259062
  chr8:22256253-22256323
  hypo

SEQ ID NO: 406514 - DNA, 78 bp, Homo sapiens; identical to SEQ ID NO: 384230
  chr8:22408681-22408759
  hypo

SEQ ID NO: 406515 - DNA, 44 bp, Homo sapiens; identical to SEQ ID NO: 388535
  chr8:22409076-22409120
  hypo

SEQ ID NO: 406516 - DNA, 75 bp, Homo sapiens; identical to SEQ ID NO: 259066
  chr8:22477223-22477298
  hypo

SEQ ID NO: 406517 - DNA, 83 bp, Homo sapiens; identical to SEQ ID NO: 259067
  chr8:22479976-22480059
  hypo

SEQ ID NO: 406518 - DNA, 145 bp, Homo sapiens; identical to SEQ ID NO: 212196
  chr8:22485267-22485412
  hypo

SEQ ID NO: 406519 - DNA, 217 bp, Homo sapiens; identical to SEQ ID NO: 223331
  chr8:22550331-22550548
  hypo

SEQ ID NO: 406520 - DNA, 54 bp, Homo sapiens; identical to SEQ ID NO: 259072
  chr8:22773287-22773341
  hypo

SEQ ID NO: 406521 - DNA, 196 bp, Homo sapiens; identical to SEQ ID NO: 259074
  chr8:22864845-22865041
  hypo

SEQ ID NO: 406522 - DNA, 309 bp, Homo sapiens; identical to SEQ ID NO: 223333
  chr8:22925472-22925781
  hypo

SEQ ID NO: 406523 - DNA, 53 bp, Homo sapiens; identical to SEQ ID NO: 259076
  chr8:22984120-22984173
  hypo

SEQ ID NO: 406524 - DNA, 41 bp, Homo sapiens; identical to SEQ ID NO: 159495
  chr8:23201725-23201766
  hypo

SEQ ID NO: 406525 - DNA, 151 bp, Homo sapiens
  chr8:23399724-23399875
  hypo
gtgtttgggatgatgctggtgtaaacctactatgctgccagtcatgtaaaagtatagcacacacaattagtaggtaatgcttgcaaataataatgaaagactctgctactggtttatgtatttactatgctatactttttgtcattacttt

SEQ ID NO: 406526 - DNA, 172 bp, Homo sapiens; identical to SEQ ID NO: 309313
  chr8:23430698-23430870
  hypo

SEQ ID NO: 406527 - DNA, 117 bp, Homo sapiens; identical to SEQ ID NO: 309314
  chr8:23430923-23431040
  hypo

SEQ ID NO: 406528 - DNA, 102 bp, Homo sapiens; identical to SEQ ID NO: 259086
  chr8:25084011-25084113
  hypo

SEQ ID NO: 406529 - DNA, 202 bp, Homo sapiens; identical to SEQ ID NO: 259088
  chr8:25107887-25108089
  hypo

SEQ ID NO: 406530 - DNA, 179 bp, Homo sapiens; identical to SEQ ID NO: 259089
  chr8:25174516-25174695
  hypo

SEQ ID NO: 406531 - DNA, 84 bp, Homo sapiens; identical to SEQ ID NO: 212207
  chr8:25249436-25249520
  hypo

SEQ ID NO: 406532 - DNA, 257 bp, Homo sapiens; identical to SEQ ID NO: 259093
  chr8:25336999-25337256
  hypo

SEQ ID NO: 406533 - DNA, 147 bp, Homo sapiens; identical to SEQ ID NO: 259095
  chr8:25376165-25376312
  hypo

SEQ ID NO: 406534 - DNA, 144 bp, Homo sapiens; identical to SEQ ID NO: 285758
  chr8:25902185-25902329
  hypo

SEQ ID NO: 406535 - DNA, 270 bp, Homo sapiens; identical to SEQ ID NO: 201360
  chr8:26372150-26372420
  hypo

SEQ ID NO: 406536 - DNA, 64 bp, Homo sapiens; identical to SEQ ID NO: 223345
  chr8:26435020-26435084
  hypo

SEQ ID NO: 406537 - DNA, 54 bp, Homo sapiens; identical to SEQ ID NO: 259107
  chr8:27279918-27279972
  hypo

SEQ ID NO: 406538 - DNA, 33 bp, Homo sapiens; identical to SEQ ID NO: 259109
  chr8:27327202-27327235
  hypo

SEQ ID NO: 406539 - DNA, 66 bp, Homo sapiens; identical to SEQ ID NO: 259113
  chr8:27530312-27530378
  hypo

SEQ ID NO: 406540 - DNA, 124 bp, Homo sapiens; identical to SEQ ID NO: 212220
  chr8:27845168-27845292
  hypo

SEQ ID NO: 406541 - DNA, 353 bp, Homo sapiens; identical to SEQ ID NO: 259117
  chr8:28206805-28207158
  hypo

SEQ ID NO: 406542 - DNA, 612 bp, Homo sapiens; identical to SEQ ID NO: 259120
  chr8:28208626-28209238
  hypo

SEQ ID NO: 406543 - DNA, 226 bp, Homo sapiens; identical to SEQ ID NO: 285789
  chr8:28242659-28242885
  hypo

SEQ ID NO: 406544 - DNA, 38 bp, Homo sapiens; identical to SEQ ID NO: 259123
  chr8:28266309-28266347
  hypo

SEQ ID NO: 406545 - DNA, 61 bp, Homo sapiens; identical to SEQ ID NO: 259124
  chr8:28269021-28269082
  hypo

SEQ ID NO: 406546 - DNA, 208 bp, Homo sapiens; identical to SEQ ID NO: 259126
  chr8:28610787-28610995
  hypo

SEQ ID NO: 406547 - DNA, 288 bp, Homo sapiens; identical to SEQ ID NO: 223352
  chr8:28748909-28749197
  hypo

SEQ ID NO: 406548 - DNA, 168 bp, Homo sapiens; identical to SEQ ID NO: 259129
  chr8:28928119-28928287
  hypo

SEQ ID NO: 406549 - DNA, 142 bp, Homo sapiens; identical to SEQ ID NO: 259134
  chr8:29127380-29127522
  hypo

SEQ ID NO: 406550 - DNA, 98 bp, Homo sapiens; identical to SEQ ID NO: 259135
  chr8:29160770-29160868
  hypo

SEQ ID NO: 406551 - DNA, 149 bp, Homo sapiens; identical to SEQ ID NO: 259136
  chr8:29212822-29212971
  hypo

SEQ ID NO: 406552 - DNA, 331 bp, Homo sapiens; identical to SEQ ID NO: 259137
  chr8:29926952-29927283
  hypo

SEQ ID NO: 406553 - DNA, 210 bp, Homo sapiens; identical to SEQ ID NO: 212232
  chr8:29949204-29949414
  hypo

SEQ ID NO: 406554 - DNA, 41 bp, Homo sapiens; identical to SEQ ID NO: 212233
  chr8:29951802-29951843
  hypo

SEQ ID NO: 406555 - DNA, 99 bp, Homo sapiens; identical to SEQ ID NO: 212234
  chr8:29958255-29958354
  hypo

SEQ ID NO: 406556 - DNA, 43 bp, Homo sapiens; identical to SEQ ID NO: 212235
  chr8:29962165-29962208
  hypo

SEQ ID NO: 406557 - DNA, 1018 bp, Homo sapiens; identical to SEQ ID NO: 201376
  chr8:30241612-30242630
  hypo

SEQ ID NO: 406558 - DNA, 361 bp, Homo sapiens; identical to SEQ ID NO: 201377
  chr8:30242697-30243058
  hypo

SEQ ID NO: 406559 - DNA, 154 bp, Homo sapiens; identical to SEQ ID NO: 397921
  chr8:30243175-30243329
  hypo

SEQ ID NO: 406560 - DNA, 160 bp, Homo sapiens; identical to SEQ ID NO: 259142
  chr8:30419851-30420011
  hypo

SEQ ID NO: 406561 - DNA, 49 bp, Homo sapiens; identical to SEQ ID NO: 259144
  chr8:30432995-30433044
  hypo

SEQ ID NO: 406562 - DNA, 32 bp, Homo sapiens; identical to SEQ ID NO: 259150
  chr8:36636712-36636744
  hypo

SEQ ID NO: 406563 - DNA, 120 bp, Homo sapiens; identical to SEQ ID NO: 259151
  chr8:36636804-36636924
  hypo

SEQ ID NO: 406564 - DNA, 120 bp, Homo sapiens; identical to SEQ ID NO: 259152
  chr8:36636984-36637104
  hypo

SEQ ID NO: 406565 - DNA, 91 bp, Homo sapiens; identical to SEQ ID NO: 397928
  chr8:37552811-37552902
  hypo

SEQ ID NO: 406566 - DNA, 182 bp, Homo sapiens; identical to SEQ ID NO: 259159
  chr8:37946122-37946304
  hypo

SEQ ID NO: 406567 - DNA, 32 bp, Homo sapiens; identical to SEQ ID NO: 212243
  chr8:38032247-38032279
  hypo

SEQ ID NO: 406568 - DNA, 97 bp, Homo sapiens; identical to SEQ ID NO: 309411
  chr8:38274864-38274961
  hypo

SEQ ID NO: 406569 - DNA, 70 bp, Homo sapiens; identical to SEQ ID NO: 259169
  chr8:38280652-38280722
  hypo

SEQ ID NO: 406570 - DNA, 135 bp, Homo sapiens; identical to SEQ ID NO: 259170
  chr8:38282093-38282228
  hypo

SEQ ID NO: 406571 - DNA, 42 bp, Homo sapiens; identical to SEQ ID NO: 259171
  chr8:38361680-38361722
  hypo

SEQ ID NO: 406572 - DNA, 103 bp, Homo sapiens; identical to SEQ ID NO: 285838
  chr8:38615060-38615163
  hypo

SEQ ID NO: 406573 - DNA, 143 bp, Homo sapiens; identical to SEQ ID NO: 212247
  chr8:38643832-38643975
  hypo

SEQ ID NO: 406574 - DNA, 104 bp, Homo sapiens; identical to SEQ ID NO: 259179
  chr8:38859453-38859557
  hypo

SEQ ID NO: 406575 - DNA, 86 bp, Homo sapiens; identical to SEQ ID NO: 259181
  chr8:39978288-39978374
  hypo

SEQ ID NO: 406576 - DNA, 393 bp, Homo sapiens; identical to SEQ ID NO: 259182
  chr8:40790349-40790742
  hypo

SEQ ID NO: 406577 - DNA, 63 bp, Homo sapiens; identical to SEQ ID NO: 212253
  chr8:41325383-41325446
  hypo

SEQ ID NO: 406578 - DNA, 46 bp, Homo sapiens; identical to SEQ ID NO: 309436
  chr8:41582866-41582912
  hypo

SEQ ID NO: 406579 - DNA, 275 bp, Homo sapiens; identical to SEQ ID NO: 259192
  chr8:41590545-41590820
  hypo

SEQ ID NO: 406580 - DNA, 192 bp, Homo sapiens; identical to SEQ ID NO: 259196
  chr8:41688593-41688785
  hypo

SEQ ID NO: 406581 - DNA, 205 bp, Homo sapiens; identical to SEQ ID NO: 259200
  chr8:42011673-42011878
  hypo

SEQ ID NO: 406582 - DNA, 34 bp, Homo sapiens; identical to SEQ ID NO: 201399
  chr8:42040329-42040363
  hypo

SEQ ID NO: 406583 - DNA, 275 bp, Homo sapiens; identical to SEQ ID NO: 259201
  chr8:42053906-42054181
  hypo

SEQ ID NO: 406584 - DNA, 138 bp, Homo sapiens; identical to SEQ ID NO: 309449
  chr8:42144494-42144632
  hypo

SEQ ID NO: 406585 - DNA, 142 bp, Homo sapiens; identical to SEQ ID NO: 259205
  chr8:42145510-42145652
  hypo

SEQ ID NO: 406586 - DNA, 43 bp, Homo sapiens; identical to SEQ ID NO: 212261
  chr8:42255793-42255836
  hypo

SEQ ID NO: 406587 - DNA, 42 bp, Homo sapiens; identical to SEQ ID NO: 212262
  chr8:42256016-42256058
  hypo

SEQ ID NO: 406588 - DNA, 297 bp, Homo sapiens; identical to SEQ ID NO: 259212
  chr8:42293859-42294156
  hypo

SEQ ID NO: 406589 - DNA, 42 bp, Homo sapiens; identical to SEQ ID NO: 259214
  chr8:42315266-42315308
  hypo

SEQ ID NO: 406590 - DNA, 102 bp, Homo sapiens
  chr8:42316750-42316852
  hypo
ctcaaaaaaaaaaaaaaaaaaaaaaaacataaaaaataacaacaaaatccatgagaatgacaaggaaaggagtaattcagcaaagaaaatcatcattggctt

SEQ ID NO: 406591 - DNA, 120 bp, Homo sapiens; identical to SEQ ID NO: 259220
  chr8:42544829-42544949
  hypo

SEQ ID NO: 406592 - DNA, 82 bp, Homo sapiens; identical to SEQ ID NO: 259222
  chr8:42651995-42652077
  hypo

SEQ ID NO: 406593 - DNA, 380 bp, Homo sapiens; identical to SEQ ID NO: 223369
  chr8:42996735-42997115
  hypo

SEQ ID NO: 406594 - DNA, 297 bp, Homo sapiens; identical to SEQ ID NO: 259228
  chr8:48172269-48172566
  hypo

SEQ ID NO: 406595 - DNA, 40 bp, Homo sapiens; identical to SEQ ID NO: 212272
  chr8:48593635-48593675
  hypo

SEQ ID NO: 406596 - DNA, 662 bp, Homo sapiens; identical to SEQ ID NO: 397943
  chr8:48649775-48650437
  hypo

SEQ ID NO: 406597 - DNA, 240 bp, Homo sapiens; identical to SEQ ID NO: 223372
  chr8:48650853-48651093
  hypo

SEQ ID NO: 406598 - DNA, 116 bp, Homo sapiens; identical to SEQ ID NO: 259239
  chr8:48694944-48695060
  hypo

SEQ ID NO: 406599 - DNA, 180 bp, Homo sapiens; identical to SEQ ID NO: 212277
  chr8:48711778-48711958
  hypo

SEQ ID NO: 406600 - DNA, 179 bp, Homo sapiens; identical to SEQ ID NO: 259242
  chr8:48793718-48793897
  hypo

SEQ ID NO: 406601 - DNA, 161 bp, Homo sapiens; identical to SEQ ID NO: 259244
  chr8:48854509-48854670
  hypo

SEQ ID NO: 406602 - DNA, 75 bp, Homo sapiens; identical to SEQ ID NO: 212279
  chr8:48854908-48854983
  hypo

SEQ ID NO: 406603 - DNA, 83 bp, Homo sapiens; identical to SEQ ID NO: 259246
  chr8:48985104-48985187
  hypo

SEQ ID NO: 406604 - DNA, 169 bp, Homo sapiens; identical to SEQ ID NO: 212280
  chr8:49055453-49055622
  hypo

SEQ ID NO: 406605 - DNA, 162 bp, Homo sapiens; identical to SEQ ID NO: 309493
  chr8:49172622-49172784
  hypo

SEQ ID NO: 406606 - DNA, 509 bp, Homo sapiens; identical to SEQ ID NO: 309494
  chr8:49172814-49173323
  hypo

SEQ ID NO: 406607 - DNA, 275 bp, Homo sapiens; identical to SEQ ID NO: 159868
  chr8:49493912-49494187
  hypo

SEQ ID NO: 406608 - DNA, 157 bp, Homo sapiens; identical to SEQ ID NO: 309506
  chr8:49546882-49547039
  hypo

SEQ ID NO: 406609 - DNA, 240 bp, Homo sapiens; identical to SEQ ID NO: 309507
  chr8:49547084-49547324
  hypo

SEQ ID NO: 406610 - DNA, 80 bp, Homo sapiens; identical to SEQ ID NO: 259261
  chr8:49588260-49588340
  hypo

SEQ ID NO: 406611 - DNA, 160 bp, Homo sapiens; identical to SEQ ID NO: 259267
  chr8:49803111-49803271
  hypo

SEQ ID NO: 406612 - DNA, 104 bp, Homo sapiens; identical to SEQ ID NO: 259269
  chr8:49809397-49809501
  hypo

SEQ ID NO: 406613 - DNA, 71 bp, Homo sapiens; identical to SEQ ID NO: 309520
  chr8:49959159-49959230
  hypo

SEQ ID NO: 406614 - DNA, 87 bp, Homo sapiens; identical to SEQ ID NO: 259272
  chr8:49983880-49983967
  hypo

SEQ ID NO: 406615 - DNA, 31 bp, Homo sapiens; identical to SEQ ID NO: 259275
  chr8:50053019-50053050
  hypo

SEQ ID NO: 406616 - DNA, 82 bp, Homo sapiens; identical to SEQ ID NO: 259281
  chr8:50740531-50740613
  hypo

SEQ ID NO: 406617 - DNA, 143 bp, Homo sapiens; identical to SEQ ID NO: 259284
  chr8:50987383-50987526
  hypo

SEQ ID NO: 406618 - DNA, 120 bp, Homo sapiens; identical to SEQ ID NO: 259286
  chr8:52184041-52184161
  hypo

SEQ ID NO: 406619 - DNA, 51 bp, Homo sapiens; identical to SEQ ID NO: 259287
  chr8:52191721-52191772
  hypo

SEQ ID NO: 406620 - DNA, 34 bp, Homo sapiens; identical to SEQ ID NO: 212297
  chr8:53657305-53657339
  hypo

SEQ ID NO: 406621 - DNA, 41 bp, Homo sapiens; identical to SEQ ID NO: 309542
  chr8:53805566-53805607
  hypo

SEQ ID NO: 406622 - DNA, 76 bp, Homo sapiens; identical to SEQ ID NO: 309543
  chr8:53805637-53805713
  hypo

SEQ ID NO: 406623 - DNA, 265 bp, Homo sapiens; identical to SEQ ID NO: 212299
  chr8:54154411-54154676
  hypo

SEQ ID NO: 406624 - DNA, 250 bp, Homo sapiens; identical to SEQ ID NO: 259297
  chr8:54507104-54507354
  hypo

SEQ ID NO: 406625 - DNA, 121 bp, Homo sapiens; identical to SEQ ID NO: 212301
  chr8:54640632-54640753
  hypo

SEQ ID NO: 406626 - DNA, 257 bp, Homo sapiens; identical to SEQ ID NO: 259299
  chr8:54645359-54645616
  hypo

SEQ ID NO: 406627 - DNA, 98 bp, Homo sapiens; identical to SEQ ID NO: 259301
  chr8:54647243-54647341
  hypo

SEQ ID NO: 406628 - DNA, 191 bp, Homo sapiens; identical to SEQ ID NO: 212303
  chr8:54750268-54750459
  hypo

SEQ ID NO: 406629 - DNA, 102 bp, Homo sapiens; identical to SEQ ID NO: 259306
  chr8:54925425-54925527
  hypo

SEQ ID NO: 406630 - DNA, 38 bp, Homo sapiens; identical to SEQ ID NO: 212304
  chr8:54956722-54956760
  hypo

SEQ ID NO: 406631 - DNA, 31 bp, Homo sapiens; identical to SEQ ID NO: 259310
  chr8:55229407-55229438
  hypo

SEQ ID NO: 406632 - DNA, 68 bp, Homo sapiens; identical to SEQ ID NO: 212306
  chr8:56361773-56361841
  hypo

SEQ ID NO: 406633 - DNA, 225 bp, Homo sapiens; identical to SEQ ID NO: 309565
  chr8:56362075-56362300
  hypo

SEQ ID NO: 406634 - DNA, 398 bp, Homo sapiens; identical to SEQ ID NO: 259321
  chr8:57079620-57080018
  hypo

SEQ ID NO: 406635 - DNA, 65 bp, Homo sapiens; identical to SEQ ID NO: 212311
  chr8:57390711-57390776
  hypo

SEQ ID NO: 406636 - DNA, 80 bp, Homo sapiens; identical to SEQ ID NO: 212312
  chr8:58044529-58044609
  hypo

SEQ ID NO: 406637 - DNA, 48 bp, Homo sapiens; identical to SEQ ID NO: 309583
  chr8:58117079-58117127
  hypo

SEQ ID NO: 406638 - DNA, 250 bp, Homo sapiens; identical to SEQ ID NO: 259326
  chr8:58117447-58117697
  hypo

SEQ ID NO: 406639 - DNA, 222 bp, Homo sapiens; identical to SEQ ID NO: 212313
  chr8:58122848-58123070
  hypo

SEQ ID NO: 406640 - DNA, 87 bp, Homo sapiens; identical to SEQ ID NO: 212314
  chr8:58991411-58991498
  hypo

SEQ ID NO: 406641 - DNA, 152 bp, Homo sapiens; identical to SEQ ID NO: 212317
  chr8:60506003-60506155
  hypo

SEQ ID NO: 406642 - DNA, 54 bp, Homo sapiens; identical to SEQ ID NO: 212318
  chr8:60506185-60506239
  hypo

SEQ ID NO: 406643 - DNA, 93 bp, Homo sapiens; identical to SEQ ID NO: 212319
  chr8:61034762-61034855
  hypo

SEQ ID NO: 406644 - DNA, 81 bp, Homo sapiens; identical to SEQ ID NO: 259338
  chr8:61189328-61189409
  hypo

SEQ ID NO: 406645 - DNA, 59 bp, Homo sapiens; identical to SEQ ID NO: 259341
  chr8:61590513-61590572
  hypo

SEQ ID NO: 406646 - DNA, 85 bp, Homo sapiens; identical to SEQ ID NO: 259342
  chr8:61627786-61627871
  hypo

SEQ ID NO: 406647 - DNA, 154 bp, Homo sapiens; identical to SEQ ID NO: 309604
  chr8:61789712-61789866
  hypo

SEQ ID NO: 406648 - DNA, 105 bp, Homo sapiens; identical to SEQ ID NO: 259345
  chr8:62221611-62221716
  hypo

SEQ ID NO: 406649 - DNA, 1143 bp, Homo sapiens; identical to SEQ ID NO: 285898
  chr8:62626290-62627433
  hypo

SEQ ID NO: 406650 - DNA, 82 bp, Homo sapiens; identical to SEQ ID NO: 259346
  chr8:62745086-62745168
  hypo

SEQ ID NO: 406651 - DNA, 99 bp, Homo sapiens; identical to SEQ ID NO: 259347
  chr8:64037106-64037205
  hypo

SEQ ID NO: 406652 - DNA, 33 bp, Homo sapiens; identical to SEQ ID NO: 259348
  chr8:64642939-64642972
  hypo

SEQ ID NO: 406653 - DNA, 38 bp, Homo sapiens; identical to SEQ ID NO: 212325
  chr8:65757970-65758008
  hypo

SEQ ID NO: 406654 - DNA, 213 bp, Homo sapiens; identical to SEQ ID NO: 212327
  chr8:66548504-66548717
  hypo

SEQ ID NO: 406655 - DNA, 34 bp, Homo sapiens; identical to SEQ ID NO: 259365
  chr8:67867314-67867348
  hypo

SEQ ID NO: 406656 - DNA, 154 bp, Homo sapiens; identical to SEQ ID NO: 259367
  chr8:68236303-68236457
  hypo

SEQ ID NO: 406657 - DNA, 45 bp, Homo sapiens; identical to SEQ ID NO: 201443
  chr8:68863998-68864043
  hypo

SEQ ID NO: 406658 - DNA, 60 bp, Homo sapiens; identical to SEQ ID NO: 201444
  chr8:68864119-68864179
  hypo

SEQ ID NO: 406659 - DNA, 276 bp, Homo sapiens; identical to SEQ ID NO: 201445
  chr8:68864195-68864471
  hypo

SEQ ID NO: 406660 - DNA, 318 bp, Homo sapiens; identical to SEQ ID NO: 116751
  chr8:68864942-68865260
  hypo

SEQ ID NO: 406661 - DNA, 142 bp, Homo sapiens; identical to SEQ ID NO: 259368
  chr8:69169577-69169719
  hypo

SEQ ID NO: 406662 - DNA, 37 bp, Homo sapiens; identical to SEQ ID NO: 259376
  chr8:73922264-73922301
  hypo

SEQ ID NO: 406663 - DNA, 131 bp, Homo sapiens; identical to SEQ ID NO: 259378
  chr8:73989477-73989608
  hypo

SEQ ID NO: 406664 - DNA, 235 bp, Homo sapiens; identical to SEQ ID NO: 212342
  chr8:73999532-73999767
  hypo

SEQ ID NO: 406665 - DNA, 235 bp, Homo sapiens; identical to SEQ ID NO: 212343
  chr8:74004014-74004249
  hypo

SEQ ID NO: 406666 - DNA, 454 bp, Homo sapiens; identical to SEQ ID NO: 259383
  chr8:74197777-74198231
  hypo

SEQ ID NO: 406667 - DNA, 45 bp, Homo sapiens; identical to SEQ ID NO: 259384
  chr8:74203780-74203825
  hypo

SEQ ID NO: 406668 - DNA, 59 bp, Homo sapiens; identical to SEQ ID NO: 259387
  chr8:74673152-74673211
  hypo

SEQ ID NO: 406669 - DNA, 141 bp, Homo sapiens; identical to SEQ ID NO: 212346
  chr8:75737615-75737756
  hypo

SEQ ID NO: 406670 - DNA, 81 bp, Homo sapiens; identical to SEQ ID NO: 259394
  chr8:80844671-80844752
  hypo

SEQ ID NO: 406671 - DNA, 37 bp, Homo sapiens; identical to SEQ ID NO: 212350
  chr8:80998635-80998672
  hypo

SEQ ID NO: 406672 - DNA, 246 bp, Homo sapiens; identical to SEQ ID NO: 259396
  chr8:81084473-81084719
  hypo

SEQ ID NO: 406673 - DNA, 36 bp, Homo sapiens; identical to SEQ ID NO: 259400
  chr8:81338705-81338741
  hypo

SEQ ID NO: 406674 - DNA, 287 bp, Homo sapiens; identical to SEQ ID NO: 398000
  chr8:81490259-81490546
  hypo

SEQ ID NO: 406675 - DNA, 85 bp, Homo sapiens; identical to SEQ ID NO: 259401
  chr8:81785030-81785115
  hypo

SEQ ID NO: 406676 - DNA, 178 bp, Homo sapiens; identical to SEQ ID NO: 223429
  chr8:81785467-81785645
  hypo

SEQ ID NO: 406677 - DNA, 38 bp, Homo sapiens; identical to SEQ ID NO: 259402
  chr8:81820451-81820489
  hypo

SEQ ID NO: 406678 - DNA, 34 bp, Homo sapiens; identical to SEQ ID NO: 212360
  chr8:82680449-82680483
  hypo

SEQ ID NO: 406679 - DNA, 40 bp, Homo sapiens; identical to SEQ ID NO: 212361
  chr8:83135626-83135666
  hypo

SEQ ID NO: 406680 - DNA, 250 bp, Homo sapiens; identical to SEQ ID NO: 286014
  chr8:86132759-86133009
  hypo

SEQ ID NO: 406681 - DNA, 35 bp, Homo sapiens; identical to SEQ ID NO: 259408
  chr8:86431840-86431875
  hypo

SEQ ID NO: 406682 - DNA, 86 bp, Homo sapiens; identical to SEQ ID NO: 259413
  chr8:87257024-87257110
  hypo

SEQ ID NO: 406683 - DNA, 161 bp, Homo sapiens; identical to SEQ ID NO: 259414
  chr8:87425719-87425880
  hypo

SEQ ID NO: 406684 - DNA, 32 bp, Homo sapiens; identical to SEQ ID NO: 212365
  chr8:92433536-92433568
  hypo

SEQ ID NO: 406685 - DNA, 104 bp, Homo sapiens; identical to SEQ ID NO: 259426
  chr8:94683868-94683972
  hypo

SEQ ID NO: 406686 - DNA, 209 bp, Homo sapiens; identical to SEQ ID NO: 201506
  chr8:94929137-94929346
  hypo

SEQ ID NO: 406687 - DNA, 44 bp, Homo sapiens; identical to SEQ ID NO: 259432
  chr8:94941365-94941409
  hypo

SEQ ID NO: 406688 - DNA, 163 bp, Homo sapiens; identical to SEQ ID NO: 201513
  chr8:95653853-95654016
  hypo

SEQ ID NO: 406689 - DNA, 416 bp, Homo sapiens; identical to SEQ ID NO: 286045
  chr8:95654337-95654753
  hypo

SEQ ID NO: 406690 - DNA, 157 bp, Homo sapiens; identical to SEQ ID NO: 212374
  chr8:95865517-95865674
  hypo

SEQ ID NO: 406691 - DNA, 187 bp, Homo sapiens; identical to SEQ ID NO: 212377
  chr8:96145224-96145411
  hypo

SEQ ID NO: 406692 - DNA, 38 bp, Homo sapiens; identical to SEQ ID NO: 212379
  chr8:96229505-96229543
  hypo

SEQ ID NO: 406693 - DNA, 56 bp, Homo sapiens; identical to SEQ ID NO: 309735
  chr8:96285364-96285420
  hypo

SEQ ID NO: 406694 - DNA, 120 bp, Homo sapiens; identical to SEQ ID NO: 259448
  chr8:97128826-97128946
  hypo

SEQ ID NO: 406695 - DNA, 159 bp, Homo sapiens; identical to SEQ ID NO: 259449
  chr8:97265370-97265529
  hypo

SEQ ID NO: 406696 - DNA, 258 bp, Homo sapiens; identical to SEQ ID NO: 259450
  chr8:97333717-97333975
  hypo

SEQ ID NO: 406697 - DNA, 154 bp, Homo sapiens; identical to SEQ ID NO: 259452
  chr8:97414934-97415088
  hypo

SEQ ID NO: 406698 - DNA, 198 bp, Homo sapiens; identical to SEQ ID NO: 259453
  chr8:98289305-98289503
  hypo

SEQ ID NO: 406699 - DNA, 41 bp, Homo sapiens; identical to SEQ ID NO: 212381
  chr8:98307803-98307844
  hypo

SEQ ID NO: 406700 - DNA, 36 bp, Homo sapiens; identical to SEQ ID NO: 212382
  chr8:98798632-98798668
  hypo

SEQ ID NO: 406701 - DNA, 35 bp, Homo sapiens; identical to SEQ ID NO: 212383
  chr8:98798908-98798943
  hypo

SEQ ID NO: 406702 - DNA, 132 bp, Homo sapiens; identical to SEQ ID NO: 259458
  chr8:99166496-99166628
  hypo

SEQ ID NO: 406703 - DNA, 65 bp, Homo sapiens; identical to SEQ ID NO: 259459
  chr8:99376415-99376480
  hypo

SEQ ID NO: 406704 - DNA, 56 bp, Homo sapiens; identical to SEQ ID NO: 259460
  chr8:99411607-99411663
  hypo

SEQ ID NO: 406705 - DNA, 101 bp, Homo sapiens; identical to SEQ ID NO: 259461
  chr8:99626612-99626713
  hypo

SEQ ID NO: 406706 - DNA, 54 bp, Homo sapiens; identical to SEQ ID NO: 223447
  chr8:99837477-99837531
  hypo

SEQ ID NO: 406707 - DNA, 155 bp, Homo sapiens; identical to SEQ ID NO: 212388
  chr8:100245163-100245318
  hypo

SEQ ID NO: 406708 - DNA, 174 bp, Homo sapiens; identical to SEQ ID NO: 212389
  chr8:100353992-100354166
  hypo

SEQ ID NO: 406709 - DNA, 79 bp, Homo sapiens; identical to SEQ ID NO: 212393
  chr8:100900796-100900875
  hypo

SEQ ID NO: 406710 - DNA, 92 bp, Homo sapiens; identical to SEQ ID NO: 309765
  chr8:100904089-100904181
  hypo

SEQ ID NO: 406711 - DNA, 39 bp, Homo sapiens; identical to SEQ ID NO: 259472
  chr8:101297999-101298038
  hypo

SEQ ID NO: 406712 - DNA, 379 bp, Homo sapiens; identical to SEQ ID NO: 259476
  chr8:101730421-101730800
  hypo

SEQ ID NO: 406713 - DNA, 68 bp, Homo sapiens; identical to SEQ ID NO: 309774
  chr8:101872279-101872347
  hypo

SEQ ID NO: 406714 - DNA, 39 bp, Homo sapiens; identical to SEQ ID NO: 259488
  chr8:102524933-102524972
  hypo

SEQ ID NO: 406715 - DNA, 38 bp, Homo sapiens; identical to SEQ ID NO: 259495
  chr8:103588277-103588315
  hypo

SEQ ID NO: 406716 - DNA, 33 bp, Homo sapiens; identical to SEQ ID NO: 212403
  chr8:103629516-103629549
  hypo

SEQ ID NO: 406717 - DNA, 156 bp, Homo sapiens; identical to SEQ ID NO: 259498
  chr8:103728517-103728673
  hypo

SEQ ID NO: 406718 - DNA, 362 bp, Homo sapiens; identical to SEQ ID NO: 259499
  chr8:103728893-103729255
  hypo

SEQ ID NO: 406719 - DNA, 37 bp, Homo sapiens; identical to SEQ ID NO: 259502
  chr8:103833090-103833127
  hypo

SEQ ID NO: 406720 - DNA, 33 bp, Homo sapiens; identical to SEQ ID NO: 212404
  chr8:103878119-103878152
  hypo

SEQ ID NO: 406721 - DNA, 37 bp, Homo sapiens; identical to SEQ ID NO: 212405
  chr8:103916556-103916593
  hypo

SEQ ID NO: 406722 - DNA, 154 bp, Homo sapiens; identical to SEQ ID NO: 259509
  chr8:104054117-104054271
  hypo

SEQ ID NO: 406723 - DNA, 148 bp, Homo sapiens; identical to SEQ ID NO: 259512
  chr8:104431399-104431547
  hypo

SEQ ID NO: 406724 - DNA, 79 bp, Homo sapiens; identical to SEQ ID NO: 259513
  chr8:105645133-105645212
  hypo

SEQ ID NO: 406725 - DNA, 32 bp, Homo sapiens; identical to SEQ ID NO: 259515
  chr8:106458435-106458467
  hypo

SEQ ID NO: 406726 - DNA, 77 bp, Homo sapiens; identical to SEQ ID NO: 309815
  chr8:108581068-108581145
  hypo

SEQ ID NO: 406727 - DNA, 48 bp, Homo sapiens; identical to SEQ ID NO: 309816
  chr8:108581175-108581223
  hypo

SEQ ID NO: 406728 - DNA, 44 bp, Homo sapiens; identical to SEQ ID NO: 259519
  chr8:109255556-109255600
  hypo

SEQ ID NO: 406729 - DNA, 120 bp, Homo sapiens; identical to SEQ ID NO: 259521
  chr8:110083307-110083427
  hypo

SEQ ID NO: 406730 - DNA, 59 bp, Homo sapiens; identical to SEQ ID NO: 309822
  chr8:110274931-110274990
  hypo

SEQ ID NO: 406731 - DNA, 161 bp, Homo sapiens; identical to SEQ ID NO: 259523
  chr8:110643645-110643806
  hypo

SEQ ID NO: 406732 - DNA, 45 bp, Homo sapiens; identical to SEQ ID NO: 201564
  chr8:110704144-110704189
  hypo

SEQ ID NO: 406733 - DNA, 242 bp, Homo sapiens; identical to SEQ ID NO: 259526
  chr8:112482647-112482889
  hypo

SEQ ID NO: 406734 - DNA, 79 bp, Homo sapiens; identical to SEQ ID NO: 212420
  chr8:114691130-114691209
  hypo

SEQ ID NO: 406735 - DNA, 34 bp, Homo sapiens; identical to SEQ ID NO: 212421
  chr8:114888155-114888189
  hypo

SEQ ID NO: 406736 - DNA, 31 bp, Homo sapiens; identical to SEQ ID NO: 259529
  chr8:115222084-115222115
  hypo

SEQ ID NO: 406737 - DNA, 84 bp, Homo sapiens; identical to SEQ ID NO: 201572
  chr8:117861184-117861268
  hypo

SEQ ID NO: 406738 - DNA, 161 bp, Homo sapiens; identical to SEQ ID NO: 201573
  chr8:117862856-117863017
  hypo

SEQ ID NO: 406739 - DNA, 149 bp, Homo sapiens; identical to SEQ ID NO: 201574
  chr8:117864186-117864335
  hypo

SEQ ID NO: 406740 - DNA, 224 bp, Homo sapiens; identical to SEQ ID NO: 201576
  chr8:117866483-117866707
  hypo

SEQ ID NO: 406741 - DNA, 123 bp, Homo sapiens; identical to SEQ ID NO: 201577
  chr8:117868404-117868527
  hypo

SEQ ID NO: 406742 - DNA, 107 bp, Homo sapiens; identical to SEQ ID NO: 201580
  chr8:117870590-117870697
  hypo

SEQ ID NO: 406743 - DNA, 112 bp, Homo sapiens; identical to SEQ ID NO: 201581
  chr8:117874067-117874179
  hypo

SEQ ID NO: 406744 - DNA, 130 bp, Homo sapiens; identical to SEQ ID NO: 201582
  chr8:117875368-117875498
  hypo

SEQ ID NO: 406745 - DNA, 114 bp, Homo sapiens; identical to SEQ ID NO: 201584
  chr8:117886849-117886963
  hypo

SEQ ID NO: 406746 - DNA, 121 bp, Homo sapiens; identical to SEQ ID NO: 398049
  chr8:117887066-117887187
  hypo

SEQ ID NO: 406747 - DNA, 212 bp, Homo sapiens; identical to SEQ ID NO: 259540
  chr8:118958836-118959048
  hypo

SEQ ID NO: 406748 - DNA, 88 bp, Homo sapiens; identical to SEQ ID NO: 259541
  chr8:119024390-119024478
  hypo

SEQ ID NO: 406749 - DNA, 70 bp, Homo sapiens; identical to SEQ ID NO: 309858
  chr8:119057249-119057319
  hypo

SEQ ID NO: 406750 - DNA, 170 bp, Homo sapiens; identical to SEQ ID NO: 259545
  chr8:119611614-119611784
  hypo

SEQ ID NO: 406751 - DNA, 67 bp, Homo sapiens; identical to SEQ ID NO: 259548
  chr8:121624349-121624416
  hypo

SEQ ID NO: 406752 - DNA, 180 bp, Homo sapiens; identical to SEQ ID NO: 259551
  chr8:122454961-122455141
  hypo

SEQ ID NO: 406753 - DNA, 259 bp, Homo sapiens; identical to SEQ ID NO: 259552
  chr8:122731385-122731644
  hypo

SEQ ID NO: 406754 - DNA, 76 bp, Homo sapiens; identical to SEQ ID NO: 212446
  chr8:123508181-123508257
  hypo

SEQ ID NO: 406755 - DNA, 55 bp, Homo sapiens; identical to SEQ ID NO: 212447
  chr8:123695434-123695489
  hypo

SEQ ID NO: 406756 - DNA, 35 bp, Homo sapiens; identical to SEQ ID NO: 259558
  chr8:123872985-123873020
  hypo

SEQ ID NO: 406757 - DNA, 331 bp, Homo sapiens; identical to SEQ ID NO: 259560
  chr8:123874762-123875093
  hypo

SEQ ID NO: 406758 - DNA, 50 bp, Homo sapiens; identical to SEQ ID NO: 259561
  chr8:123875756-123875806
  hypo

SEQ ID NO: 406759 - DNA, 438 bp, Homo sapiens; identical to SEQ ID NO: 259565
  chr8:124014019-124014457
  hypo

SEQ ID NO: 406760 - DNA, 78 bp, Homo sapiens; identical to SEQ ID NO: 259567
  chr8:124161306-124161384
  hypo

SEQ ID NO: 406761 - DNA, 306 bp, Homo sapiens; identical to SEQ ID NO: 259569
  chr8:124178878-124179184
  hypo

SEQ ID NO: 406762 - DNA, 61 bp, Homo sapiens; identical to SEQ ID NO: 385975
  chr8:124187226-124187287
  hypo

SEQ ID NO: 406763 - DNA, 225 bp, Homo sapiens; identical to SEQ ID NO: 259571
  chr8:124195483-124195708
  hypo

SEQ ID NO: 406764 - DNA, 31 bp, Homo sapiens; identical to SEQ ID NO: 385976
  chr8:124238850-124238881
  hypo

SEQ ID NO: 406765 - DNA, 141 bp, Homo sapiens; identical to SEQ ID NO: 259575
  chr8:124247665-124247806
  hypo

SEQ ID NO: 406766 - DNA, 331 bp, Homo sapiens; identical to SEQ ID NO: 259577
  chr8:124249061-124249392
  hypo

SEQ ID NO: 406767 - DNA, 82 bp, Homo sapiens; identical to SEQ ID NO: 212453
  chr8:124254706-124254788
  hypo

SEQ ID NO: 406768 - DNA, 42 bp, Homo sapiens; identical to SEQ ID NO: 212455
  chr8:124412835-124412877
  hypo

SEQ ID NO: 406769 - DNA, 60 bp, Homo sapiens; identical to SEQ ID NO: 259583
  chr8:124453586-124453646
  hypo

SEQ ID NO: 406770 - DNA, 51 bp, Homo sapiens; identical to SEQ ID NO: 309900
  chr8:124552151-124552202
  hypo

SEQ ID NO: 406771 - DNA, 58 bp, Homo sapiens; identical to SEQ ID NO: 160621
  chr8:124552287-124552345
  hypo

SEQ ID NO: 406772 - DNA, 366 bp, Homo sapiens; identical to SEQ ID NO: 259590
  chr8:124965500-124965866
  hypo

SEQ ID NO: 406773 - DNA, 36 bp, Homo sapiens; identical to SEQ ID NO: 259597
  chr8:125507236-125507272
  hypo

SEQ ID NO: 406774 - DNA, 87 bp, Homo sapiens; identical to SEQ ID NO: 212460
  chr8:125553022-125553109
  hypo

SEQ ID NO: 406775 - DNA, 106 bp, Homo sapiens; identical to SEQ ID NO: 259604
  chr8:125682590-125682696
  hypo

SEQ ID NO: 406776 - DNA, 59 bp, Homo sapiens; identical to SEQ ID NO: 259605
  chr8:125739079-125739138
  hypo

SEQ ID NO: 406777 - DNA, 38 bp, Homo sapiens; identical to SEQ ID NO: 259607
  chr8:125992005-125992043
  hypo

SEQ ID NO: 406778 - DNA, 204 bp, Homo sapiens; identical to SEQ ID NO: 212467
  chr8:126238678-126238882
  hypo

SEQ ID NO: 406779 - DNA, 40 bp, Homo sapiens; identical to SEQ ID NO: 259614
  chr8:126321193-126321233
  hypo

SEQ ID NO: 406780 - DNA, 171 bp, Homo sapiens; identical to SEQ ID NO: 259615
  chr8:126374237-126374408
  hypo

SEQ ID NO: 406781 - DNA, 37 bp, Homo sapiens; identical to SEQ ID NO: 259618
  chr8:127412850-127412887
  hypo

SEQ ID NO: 406782 - DNA, 104 bp, Homo sapiens; identical to SEQ ID NO: 212468
  chr8:127464658-127464762
  hypo

SEQ ID NO: 406783 - DNA, 44 bp, Homo sapiens; identical to SEQ ID NO: 212469
  chr8:127465002-127465046
  hypo

SEQ ID NO: 406784 - DNA, 54 bp, Homo sapiens; identical to SEQ ID NO: 259623
  chr8:128235796-128235850
  hypo

SEQ ID NO: 406785 - DNA, 159 bp, Homo sapiens; identical to SEQ ID NO: 259624
  chr8:128699512-128699671
  hypo

SEQ ID NO: 406786 - DNA, 125 bp, Homo sapiens; identical to SEQ ID NO: 259625
  chr8:128735792-128735917
  hypo

SEQ ID NO: 406787 - DNA, 276 bp, Homo sapiens; identical to SEQ ID NO: 259627
  chr8:128831868-128832144
  hypo

SEQ ID NO: 406788 - DNA, 41 bp, Homo sapiens; identical to SEQ ID NO: 212477
  chr8:128896287-128896328
  hypo

SEQ ID NO: 406789 - DNA, 34 bp, Homo sapiens; identical to SEQ ID NO: 259643
  chr8:129893541-129893575
  hypo

SEQ ID NO: 406790 - DNA, 85 bp, Homo sapiens; identical to SEQ ID NO: 259644
  chr8:129909748-129909833
  hypo

SEQ ID NO: 406791 - DNA, 34 bp, Homo sapiens; identical to SEQ ID NO: 259645
  chr8:129996835-129996869
  hypo

SEQ ID NO: 406792 - DNA, 146 bp, Homo sapiens; identical to SEQ ID NO: 259646
  chr8:130368693-130368839
  hypo

SEQ ID NO: 406793 - DNA, 319 bp, Homo sapiens; identical to SEQ ID NO: 259648
  chr8:131070005-131070324
  hypo

SEQ ID NO: 406794 - DNA, 211 bp, Homo sapiens; identical to SEQ ID NO: 259651
  chr8:131098481-131098692
  hypo

SEQ ID NO: 406795 - DNA, 77 bp, Homo sapiens; identical to SEQ ID NO: 259655
  chr8:133906404-133906481
  hypo

SEQ ID NO: 406796 - DNA, 364 bp, Homo sapiens; identical to SEQ ID NO: 201605
  chr8:134232709-134233073
  hypo

SEQ ID NO: 406797 - DNA, 483 bp, Homo sapiens; identical to SEQ ID NO: 259661
  chr8:134278414-134278897
  hypo

SEQ ID NO: 406798 - DNA, 155 bp, Homo sapiens; identical to SEQ ID NO: 259662
  chr8:134297710-134297865
  hypo

SEQ ID NO: 406799 - DNA, 213 bp, Homo sapiens; identical to SEQ ID NO: 259664
  chr8:134462495-134462708
  hypo

SEQ ID NO: 406800 - DNA, 46 bp, Homo sapiens; identical to SEQ ID NO: 212497
  chr8:134470075-134470121
  hypo

SEQ ID NO: 406801 - DNA, 161 bp, Homo sapiens; identical to SEQ ID NO: 259675
  chr8:135348405-135348566
  hypo

SEQ ID NO: 406802 - DNA, 104 bp, Homo sapiens; identical to SEQ ID NO: 259679
  chr8:135950261-135950365
  hypo

SEQ ID NO: 406803 - DNA, 98 bp, Homo sapiens; identical to SEQ ID NO: 259681
  chr8:136577245-136577343
  hypo

SEQ ID NO: 406804 - DNA, 42 bp, Homo sapiens; identical to SEQ ID NO: 259684
  chr8:139096093-139096135
  hypo

SEQ ID NO: 406805 - DNA, 36 bp, Homo sapiens; identical to SEQ ID NO: 259686
  chr8:139357085-139357121
  hypo

SEQ ID NO: 406806 - DNA, 251 bp, Homo sapiens; identical to SEQ ID NO: 259687
  chr8:139833381-139833632
  hypo

SEQ ID NO: 406807 - DNA, 319 bp, Homo sapiens; identical to SEQ ID NO: 212505
  chr8:140630637-140630956
  hypo

SEQ ID NO: 406808 - DNA, 298 bp, Homo sapiens; identical to SEQ ID NO: 212506
  chr8:140630986-140631284
  hypo

SEQ ID NO: 406809 - DNA, 167 bp, Homo sapiens; identical to SEQ ID NO: 259694
  chr8:140744186-140744353
  hypo

SEQ ID NO: 406810 - DNA, 84 bp, Homo sapiens; identical to SEQ ID NO: 259698
  chr8:140757362-140757446
  hypo

SEQ ID NO: 406811 - DNA, 44 bp, Homo sapiens; identical to SEQ ID NO: 259699
  chr8:140757750-140757794
  hypo

SEQ ID NO: 406812 - DNA, 265 bp, Homo sapiens; identical to SEQ ID NO: 259702
  chr8:140774448-140774713
  hypo

SEQ ID NO: 406813 - DNA, 356 bp, Homo sapiens; identical to SEQ ID NO: 259703
  chr8:140775903-140776259
  hypo

SEQ ID NO: 406814 - DNA, 122 bp, Homo sapiens; identical to SEQ ID NO: 212509
  chr8:140802163-140802285
  hypo

SEQ ID NO: 406815 - DNA, 249 bp, Homo sapiens; identical to SEQ ID NO: 259708
  chr8:140807902-140808151
  hypo

SEQ ID NO: 406816 - DNA, 113 bp, Homo sapiens; identical to SEQ ID NO: 310039
  chr8:140834002-140834115
  hypo

SEQ ID NO: 406817 - DNA, 92 bp, Homo sapiens; identical to SEQ ID NO: 212510
  chr8:140834749-140834841
  hypo

SEQ ID NO: 406818 - DNA, 85 bp, Homo sapiens; identical to SEQ ID NO: 259715
  chr8:140844598-140844683
  hypo

SEQ ID NO: 406819 - DNA, 164 bp, Homo sapiens; identical to SEQ ID NO: 259718
  chr8:140871034-140871198
  hypo

SEQ ID NO: 406820 - DNA, 69 bp, Homo sapiens; identical to SEQ ID NO: 259725
  chr8:140968327-140968396
  hypo

SEQ ID NO: 406821 - DNA, 76 bp, Homo sapiens; identical to SEQ ID NO: 310057
  chr8:141054769-141054845
  hypo

SEQ ID NO: 406822 - DNA, 141 bp, Homo sapiens; identical to SEQ ID NO: 310058
  chr8:141054875-141055016
  hypo

SEQ ID NO: 406823 - DNA, 72 bp, Homo sapiens; identical to SEQ ID NO: 212518
  chr8:141159287-141159359
  hypo

SEQ ID NO: 406824 - DNA, 38 bp, Homo sapiens; identical to SEQ ID NO: 259736
  chr8:141185739-141185777
  hypo

SEQ ID NO: 406825 - DNA, 160 bp, Homo sapiens; identical to SEQ ID NO: 259738
  chr8:141213695-141213855
  hypo

SEQ ID NO: 406826 - DNA, 119 bp, Homo sapiens; identical to SEQ ID NO: 212520
  chr8:141231524-141231643
  hypo

SEQ ID NO: 406827 - DNA, 285 bp, Homo sapiens; identical to SEQ ID NO: 259743
  chr8:141265017-141265302
  hypo

SEQ ID NO: 406828 - DNA, 135 bp, Homo sapiens; identical to SEQ ID NO: 259744
  chr8:141267397-141267532
  hypo

SEQ ID NO: 406829 - DNA, 347 bp, Homo sapiens; identical to SEQ ID NO: 212522
  chr8:141268122-141268469
  hypo

SEQ ID NO: 406830 - DNA, 35 bp, Homo sapiens; identical to SEQ ID NO: 310080
  chr8:141347684-141347719
  hypo

SEQ ID NO: 406831 - DNA, 77 bp, Homo sapiens; identical to SEQ ID NO: 259750
  chr8:141436007-141436084
  hypo

SEQ ID NO: 406832 - DNA, 198 bp, Homo sapiens; identical to SEQ ID NO: 259751
  chr8:141455583-141455781
  hypo

SEQ ID NO: 406833 - DNA, 31 bp, Homo sapiens; identical to SEQ ID NO: 67308
  chr8:141466495-141466526
  hypo

SEQ ID NO: 406834 - DNA, 34 bp, Homo sapiens; identical to SEQ ID NO: 259754
  chr8:141523825-141523859
  hypo

SEQ ID NO: 406835 - DNA, 501 bp, Homo sapiens; identical to SEQ ID NO: 259758
  chr8:141543887-141544388
  hypo

SEQ ID NO: 406836 - DNA, 66 bp, Homo sapiens; identical to SEQ ID NO: 212529
  chr8:141587942-141588008
  hypo

SEQ ID NO: 406837 - DNA, 102 bp, Homo sapiens; identical to SEQ ID NO: 212532
  chr8:141594755-141594857
  hypo

SEQ ID NO: 406838 - DNA, 50 bp, Homo sapiens; identical to SEQ ID NO: 212533
  chr8:141594912-141594962
  hypo

SEQ ID NO: 406839 - DNA, 218 bp, Homo sapiens; identical to SEQ ID NO: 259771
  chr8:141603917-141604135
  hypo

SEQ ID NO: 406840 - DNA, 49 bp, Homo sapiens; identical to SEQ ID NO: 259775
  chr8:141633674-141633723
  hypo

SEQ ID NO: 406841 - DNA, 152 bp, Homo sapiens; identical to SEQ ID NO: 212539
  chr8:141636160-141636312
  hypo

SEQ ID NO: 406842 - DNA, 81 bp, Homo sapiens; identical to SEQ ID NO: 201611
  chr8:141644414-141644495
  hypo

SEQ ID NO: 406843 - DNA, 91 bp, Homo sapiens; identical to SEQ ID NO: 212543
  chr8:141741358-141741449
  hypo

SEQ ID NO: 406844 - DNA, 176 bp, Homo sapiens; identical to SEQ ID NO: 259782
  chr8:141745321-141745497
  hypo

SEQ ID NO: 406845 - DNA, 622 bp, Homo sapiens; identical to SEQ ID NO: 388619
  chr8:142010302-142010924
  hypo

SEQ ID NO: 406846 - DNA, 210 bp, Homo sapiens; identical to SEQ ID NO: 212548
  chr8:142157057-142157267
  hypo

SEQ ID NO: 406847 - DNA, 53 bp, Homo sapiens; identical to SEQ ID NO: 212549
  chr8:142178200-142178253
  hypo

SEQ ID NO: 406848 - DNA, 76 bp, Homo sapiens; identical to SEQ ID NO: 259791
  chr8:142188438-142188514
  hypo

SEQ ID NO: 406849 - DNA, 235 bp, Homo sapiens; identical to SEQ ID NO: 259792
  chr8:142190007-142190242
  hypo

SEQ ID NO: 406850 - DNA, 214 bp, Homo sapiens; identical to SEQ ID NO: 310131
  chr8:142190625-142190839
  hypo

SEQ ID NO: 406851 - DNA, 356 bp, Homo sapiens; identical to SEQ ID NO: 310132
  chr8:142190869-142191225
  hypo

SEQ ID NO: 406852 - DNA, 86 bp, Homo sapiens; identical to SEQ ID NO: 212554
  chr8:142226699-142226785
  hypo

SEQ ID NO: 406853 - DNA, 511 bp, Homo sapiens; identical to SEQ ID NO: 212555
  chr8:142228300-142228811
  hypo

SEQ ID NO: 406854 - DNA, 71 bp, Homo sapiens; identical to SEQ ID NO: 259802
  chr8:142236532-142236603
  hypo

SEQ ID NO: 406855 - DNA, 381 bp, Homo sapiens; identical to SEQ ID NO: 392128
  chr8:142241020-142241401
  hypo

SEQ ID NO: 406856 - DNA, 77 bp, Homo sapiens; identical to SEQ ID NO: 259807
  chr8:142247722-142247799
  hypo

SEQ ID NO: 406857 - DNA, 367 bp, Homo sapiens; identical to SEQ ID NO: 212564
  chr8:142264058-142264425
  hypo

SEQ ID NO: 406858 - DNA, 117 bp, Homo sapiens; identical to SEQ ID NO: 259817
  chr8:142278840-142278957
  hypo

SEQ ID NO: 406859 - DNA, 155 bp, Homo sapiens; identical to SEQ ID NO: 212567
  chr8:142280196-142280351
  hypo

SEQ ID NO: 406860 - DNA, 200 bp, Homo sapiens; identical to SEQ ID NO: 259820
  chr8:142283871-142284071
  hypo

SEQ ID NO: 406861 - DNA, 241 bp, Homo sapiens; identical to SEQ ID NO: 212568
  chr8:142290886-142291127
  hypo

SEQ ID NO: 406862 - DNA, 481 bp, Homo sapiens; identical to SEQ ID NO: 259823
  chr8:142294981-142295462
  hypo

SEQ ID NO: 406863 - DNA, 105 bp, Homo sapiens; identical to SEQ ID NO: 223505
  chr8:142297652-142297757
  hypo

SEQ ID NO: 406864 - DNA, 83 bp, Homo sapiens; identical to SEQ ID NO: 259829
  chr8:142310045-142310128
  hypo

SEQ ID NO: 406865 - DNA, 222 bp, Homo sapiens; identical to SEQ ID NO: 212572
  chr8:142312689-142312911
  hypo

SEQ ID NO: 406866 - DNA, 174 bp, Homo sapiens; identical to SEQ ID NO: 259836
  chr8:142383101-142383275
  hypo

SEQ ID NO: 406867 - DNA, 137 bp, Homo sapiens; identical to SEQ ID NO: 223508
  chr8:142425663-142425800
  hypo

SEQ ID NO: 406868 - DNA, 298 bp, Homo sapiens; identical to SEQ ID NO: 259837
  chr8:142435197-142435495
  hypo

SEQ ID NO: 406869 - DNA, 94 bp, Homo sapiens; identical to SEQ ID NO: 310187
  chr8:142452392-142452486
  hypo

SEQ ID NO: 406870 - DNA, 239 bp, Homo sapiens; identical to SEQ ID NO: 212584
  chr8:142537302-142537541
  hypo

SEQ ID NO: 406871 - DNA, 148 bp, Homo sapiens; identical to SEQ ID NO: 259846
  chr8:142544218-142544366
  hypo

SEQ ID NO: 406872 - DNA, 119 bp, Homo sapiens; identical to SEQ ID NO: 259852
  chr8:142734866-142734985
  hypo

SEQ ID NO: 406873 - DNA, 184 bp, Homo sapiens; identical to SEQ ID NO: 259854
  chr8:142863058-142863242
  hypo

SEQ ID NO: 406874 - DNA, 207 bp, Homo sapiens; identical to SEQ ID NO: 259856
  chr8:142898503-142898710
  hypo

SEQ ID NO: 406875 - DNA, 563 bp, Homo sapiens; identical to SEQ ID NO: 212591
  chr8:143152592-143153155
  hypo

SEQ ID NO: 406876 - DNA, 124 bp, Homo sapiens; identical to SEQ ID NO: 212594
  chr8:143269916-143270040
  hypo

SEQ ID NO: 406877 - DNA, 59 bp, Homo sapiens; identical to SEQ ID NO: 212595
  chr8:143270070-143270129
  hypo

SEQ ID NO: 406878 - DNA, 47 bp, Homo sapiens; identical to SEQ ID NO: 310220
  chr8:143368469-143368516
  hypo

SEQ ID NO: 406879 - DNA, 159 bp, Homo sapiens; identical to SEQ ID NO: 259877
  chr8:143373004-143373163
  hypo

SEQ ID NO: 406880 - DNA, 168 bp, Homo sapiens; identical to SEQ ID NO: 259879
  chr8:143379124-143379292
  hypo

SEQ ID NO: 406881 - DNA, 42 bp, Homo sapiens; identical to SEQ ID NO: 212600
  chr8:143398749-143398791
  hypo

SEQ ID NO: 406882 - DNA, 315 bp, Homo sapiens; identical to SEQ ID NO: 259885
  chr8:143406189-143406504
  hypo

SEQ ID NO: 406883 - DNA, 307 bp, Homo sapiens; identical to SEQ ID NO: 259886
  chr8:143410616-143410923
  hypo

SEQ ID NO: 406884 - DNA, 42 bp, Homo sapiens; identical to SEQ ID NO: 259888
  chr8:143414784-143414826
  hypo

SEQ ID NO: 406885 - DNA, 45 bp, Homo sapiens; identical to SEQ ID NO: 259890
  chr8:143421174-143421219
  hypo

SEQ ID NO: 406886 - DNA, 221 bp, Homo sapiens; identical to SEQ ID NO: 212603
  chr8:143424645-143424866
  hypo

SEQ ID NO: 406887 - DNA, 43 bp, Homo sapiens; identical to SEQ ID NO: 259899
  chr8:143550866-143550909
  hypo

SEQ ID NO: 406888 - DNA, 102 bp, Homo sapiens; identical to SEQ ID NO: 259900
  chr8:143550969-143551071
  hypo

SEQ ID NO: 406889 - DNA, 142 bp, Homo sapiens; identical to SEQ ID NO: 310254
  chr8:143599430-143599572
  hypo

SEQ ID NO: 406890 - DNA, 174 bp, Homo sapiens; identical to SEQ ID NO: 259912
  chr8:143667142-143667316
  hypo

SEQ ID NO: 406891 - DNA, 688 bp, Homo sapiens; identical to SEQ ID NO: 259915
  chr8:143868761-143869449
  hypo

SEQ ID NO: 406892 - DNA, 35 bp, Homo sapiens; identical to SEQ ID NO: 259918
  chr8:143983233-143983268
  hypo

SEQ ID NO: 406893 - DNA, 37 bp, Homo sapiens; identical to SEQ ID NO: 259920
  chr8:143994804-143994841
  hypo

SEQ ID NO: 406894 - DNA, 263 bp, Homo sapiens; identical to SEQ ID NO: 259931
  chr8:144187580-144187843
  hypo

SEQ ID NO: 406895 - DNA, 66 bp, Homo sapiens; identical to SEQ ID NO: 310280
  chr8:144190246-144190312
  hypo

SEQ ID NO: 406896 - DNA, 76 bp, Homo sapiens; identical to SEQ ID NO: 259933
  chr8:144203023-144203099
  hypo

SEQ ID NO: 406897 - DNA, 185 bp, Homo sapiens; identical to SEQ ID NO: 212620
  chr8:144203468-144203653
  hypo

SEQ ID NO: 406898 - DNA, 35 bp, Homo sapiens; identical to SEQ ID NO: 212621
  chr8:144203942-144203977
  hypo

SEQ ID NO: 406899 - DNA, 418 bp, Homo sapiens; identical to SEQ ID NO: 212622
  chr8:144204021-144204439
  hypo

SEQ ID NO: 406900 - DNA, 200 bp, Homo sapiens; identical to SEQ ID NO: 259938
  chr8:144236385-144236585
  hypo

SEQ ID NO: 406901 - DNA, 67 bp, Homo sapiens; identical to SEQ ID NO: 310296
  chr8:144330418-144330485
  hypo

SEQ ID NO: 406902 - DNA, 42 bp, Homo sapiens; identical to SEQ ID NO: 259948
  chr8:144335407-144335449
  hypo

SEQ ID NO: 406903 - DNA, 105 bp, Homo sapiens; identical to SEQ ID NO: 212627
  chr8:144347176-144347281
  hypo

SEQ ID NO: 406904 - DNA, 66 bp, Homo sapiens; identical to SEQ ID NO: 310303
  chr8:144347740-144347806
  hypo

SEQ ID NO: 406905 - DNA, 46 bp, Homo sapiens; identical to SEQ ID NO: 259959
  chr8:144386880-144386926
  hypo

SEQ ID NO: 406906 - DNA, 79 bp, Homo sapiens; identical to SEQ ID NO: 259960
  chr8:144387632-144387711
  hypo

SEQ ID NO: 406907 - DNA, 95 bp, Homo sapiens; identical to SEQ ID NO: 259961
  chr8:144390545-144390640
  hypo

SEQ ID NO: 406908 - DNA, 54 bp, Homo sapiens; identical to SEQ ID NO: 259963
  chr8:144398063-144398117
  hypo

SEQ ID NO: 406909 - DNA, 303 bp, Homo sapiens; identical to SEQ ID NO: 384271
  chr8:144512510-144512813
  hypo

SEQ ID NO: 406910 - DNA, 126 bp, Homo sapiens; identical to SEQ ID NO: 259972
  chr8:144519592-144519718
  hypo

SEQ ID NO: 406911 - DNA, 99 bp, Homo sapiens; identical to SEQ ID NO: 212640
  chr8:144519748-144519847
  hypo

SEQ ID NO: 406912 - DNA, 232 bp, Homo sapiens; identical to SEQ ID NO: 212641
  chr8:144521390-144521622
  hypo

SEQ ID NO: 406913 - DNA, 198 bp, Homo sapiens; identical to SEQ ID NO: 212645
  chr8:144559235-144559433
  hypo

SEQ ID NO: 406914 - DNA, 37 bp, Homo sapiens; identical to SEQ ID NO: 259982
  chr8:144567459-144567496
  hypo

SEQ ID NO: 406915 - DNA, 147 bp, Homo sapiens; identical to SEQ ID NO: 259984
  chr8:144577123-144577270
  hypo

SEQ ID NO: 406916 - DNA, 33 bp, Homo sapiens; identical to SEQ ID NO: 212646
  chr8:144589672-144589705
  hypo

SEQ ID NO: 406917 - DNA, 56 bp, Homo sapiens; identical to SEQ ID NO: 310354
  chr8:144661845-144661901
  hypo

SEQ ID NO: 406918 - DNA, 141 bp, Homo sapiens; identical to SEQ ID NO: 310355
  chr8:144661931-144662072
  hypo

SEQ ID NO: 406919 - DNA, 88 bp, Homo sapiens; identical to SEQ ID NO: 212653
  chr8:144676812-144676900
  hypo

SEQ ID NO: 406920 - DNA, 60 bp, Homo sapiens; identical to SEQ ID NO: 260001
  chr8:145163871-145163931
  hypo

SEQ ID NO: 406921 - DNA, 83 bp, Homo sapiens; identical to SEQ ID NO: 260002
  chr8:145214941-145215024
  hypo

SEQ ID NO: 406922 - DNA, 67 bp, Homo sapiens; identical to SEQ ID NO: 212656
  chr8:145223205-145223272
  hypo

SEQ ID NO: 406923 - DNA, 148 bp, Homo sapiens; identical to SEQ ID NO: 212659
  chr8:145679540-145679688
  hypo

SEQ ID NO: 406924 - DNA, 64 bp, Homo sapiens; identical to SEQ ID NO: 212660
  chr8:145680955-145681019
  hypo

SEQ ID NO: 406925 - DNA, 477 bp, Homo sapiens; identical to SEQ ID NO: 223529
  chr8:145726121-145726598
  hypo

SEQ ID NO: 406926 - DNA, 211 bp, Homo sapiens; identical to SEQ ID NO: 260014
  chr8:145736700-145736911
  hypo

SEQ ID NO: 406927 - DNA, 151 bp, Homo sapiens; identical to SEQ ID NO: 260015
  chr8:145737564-145737715
  hypo

SEQ ID NO: 406928 - DNA, 295 bp, Homo sapiens; identical to SEQ ID NO: 260020
  chr8:145745870-145746165
  hypo

SEQ ID NO: 406929 - DNA, 566 bp, Homo sapiens; identical to SEQ ID NO: 260025
  chr8:145772641-145773207
  hypo

SEQ ID NO: 406930 - DNA, 121 bp, Homo sapiens; identical to SEQ ID NO: 260027
  chr8:145780880-145781001
  hypo

SEQ ID NO: 406931 - DNA, 188 bp, Homo sapiens; identical to SEQ ID NO: 260028
  chr8:145804872-145805060
  hypo

SEQ ID NO: 406932 - DNA, 170 bp, Homo sapiens; identical to SEQ ID NO: 212670
  chr8:145811091-145811261
  hypo

SEQ ID NO: 406933 - DNA, 175 bp, Homo sapiens; identical to SEQ ID NO: 260033
  chr8:145815417-145815592
  hypo

SEQ ID NO: 406934 - DNA, 36 bp, Homo sapiens; identical to SEQ ID NO: 212673
  chr8:145826579-145826615
  hypo

SEQ ID NO: 406935 - DNA, 306 bp, Homo sapiens; identical to SEQ ID NO: 212674
  chr8:145828364-145828670
  hypo

SEQ ID NO: 406936 - DNA, 64 bp, Homo sapiens; identical to SEQ ID NO: 212675
  chr8:145844223-145844287
  hypo

SEQ ID NO: 406937 - DNA, 167 bp, Homo sapiens; identical to SEQ ID NO: 212678
  chr8:145849042-145849209
  hypo

SEQ ID NO: 406938 - DNA, 42 bp, Homo sapiens; identical to SEQ ID NO: 260044
  chr8:145849872-145849914
  hypo

SEQ ID NO: 406939 - DNA, 69 bp, Homo sapiens; identical to SEQ ID NO: 260046
  chr8:145854282-145854351
  hypo

SEQ ID NO: 406940 - DNA, 104 bp, Homo sapiens; identical to SEQ ID NO: 223531
  chr8:145910677-145910781
  hypo

SEQ ID NO: 406941 - DNA, 99 bp, Homo sapiens; identical to SEQ ID NO: 212681
  chr8:145978673-145978772
  hypo

SEQ ID NO: 406942 - DNA, 36 bp, Homo sapiens; identical to SEQ ID NO: 201641
  chr8:146078071-146078107
  hypo

SEQ ID NO: 406943 - DNA, 82 bp, Homo sapiens; identical to SEQ ID NO: 260056
  chr8:146301130-146301212
  hypo

SEQ ID NO: 406944 - DNA, 99 bp, Homo sapiens; identical to SEQ ID NO: 260059
  chr9:573570-573669
  hypo

SEQ ID NO: 406945 - DNA, 138 bp, Homo sapiens; identical to SEQ ID NO: 286284
  chr9:706973-707111
  hypo

SEQ ID NO: 406946 - DNA, 239 bp, Homo sapiens; identical to SEQ ID NO: 45981
  chr9:707165-707404
  hypo

SEQ ID NO: 406947 - DNA, 79 bp, Homo sapiens; identical to SEQ ID NO: 310435
  chr9:738242-738321
  hypo

SEQ ID NO: 406948 - DNA, 95 bp, Homo sapiens; identical to SEQ ID NO: 161534
  chr9:738429-738524
  hypo

SEQ ID NO: 406949 - DNA, 149 bp, Homo sapiens; identical to SEQ ID NO: 260063
  chr9:2086730-2086879
  hypo

SEQ ID NO: 406950 - DNA, 231 bp, Homo sapiens; identical to SEQ ID NO: 260065
  chr9:2170356-2170587
  hypo

SEQ ID NO: 406951 - DNA, 98 bp, Homo sapiens; identical to SEQ ID NO: 260066
  chr9:2170837-2170935
  hypo

SEQ ID NO: 406952 - DNA, 93 bp, Homo sapiens; identical to SEQ ID NO: 260068
  chr9:2272286-2272379
  hypo

SEQ ID NO: 406953 - DNA, 133 bp, Homo sapiens; identical to SEQ ID NO: 212693
  chr9:2718724-2718857
  hypo

SEQ ID NO: 406954 - DNA, 78 bp, Homo sapiens; identical to SEQ ID NO: 212696
  chr9:4714888-4714966
  hypo

SEQ ID NO: 406955 - DNA, 160 bp, Homo sapiens; identical to SEQ ID NO: 260077
  chr9:4804634-4804794
  hypo

SEQ ID NO: 406956 - DNA, 99 bp, Homo sapiens; identical to SEQ ID NO: 201655
  chr9:5022028-5022127
  hypo

SEQ ID NO: 406957 - DNA, 248 bp, Homo sapiens; identical to SEQ ID NO: 201656
  chr9:5054640-5054888
  hypo

SEQ ID NO: 406958 - DNA, 82 bp, Homo sapiens; identical to SEQ ID NO: 201657
  chr9:5069924-5070006
  hypo

SEQ ID NO: 406959 - DNA, 99 bp, Homo sapiens; identical to SEQ ID NO: 201659
  chr9:5081712-5081811
  hypo

SEQ ID NO: 406960 - DNA, 41 bp, Homo sapiens; identical to SEQ ID NO: 260080
  chr9:5418576-5418617
  hypo

SEQ ID NO: 406961 - DNA, 34 bp, Homo sapiens; identical to SEQ ID NO: 250599
  chr9:6183187-6183221
  hypo

SEQ ID NO: 406962 - DNA, 98 bp, Homo sapiens; identical to SEQ ID NO: 212705
  chr9:6868604-6868702
  hypo

SEQ ID NO: 406963 - DNA, 142 bp, Homo sapiens; identical to SEQ ID NO: 260085
  chr9:6883915-6884057
  hypo

SEQ ID NO: 406964 - DNA, 113 bp, Homo sapiens; identical to SEQ ID NO: 260089
  chr9:7032961-7033074
  hypo

SEQ ID NO: 406965 - DNA, 37 bp, Homo sapiens; identical to SEQ ID NO: 212708
  chr9:7164555-7164592
  hypo

SEQ ID NO: 406966 - DNA, 138 bp, Homo sapiens; identical to SEQ ID NO: 212711
  chr9:7785325-7785463
  hypo

SEQ ID NO: 406967 - DNA, 150 bp, Homo sapiens; identical to SEQ ID NO: 388631
  chr9:12776013-12776163
  hypo

SEQ ID NO: 406968 - DNA, 369 bp, Homo sapiens; identical to SEQ ID NO: 286321
  chr9:12776216-12776585
  hypo

SEQ ID NO: 406969 - DNA, 50 bp, Homo sapiens; identical to SEQ ID NO: 234051
  chr9:14322293-14322343
  hypo

SEQ ID NO: 406970 - DNA, 96 bp, Homo sapiens; identical to SEQ ID NO: 260098
  chr9:14355600-14355696
  hypo

SEQ ID NO: 406971 - DNA, 206 bp, Homo sapiens; identical to SEQ ID NO: 212719
  chr9:14607839-14608045
  hypo

SEQ ID NO: 406972 - DNA, 180 bp, Homo sapiens; identical to SEQ ID NO: 260101
  chr9:14796912-14797092
  hypo

SEQ ID NO: 406973 - DNA, 63 bp, Homo sapiens; identical to SEQ ID NO: 212722
  chr9:15527748-15527811
  hypo

SEQ ID NO: 406974 - DNA, 36 bp, Homo sapiens; identical to SEQ ID NO: 212724
  chr9:16886662-16886698
  hypo

SEQ ID NO: 406975 - DNA, 38 bp, Homo sapiens; identical to SEQ ID NO: 286341
  chr9:17134993-17135031
  hypo

SEQ ID NO: 406976 - DNA, 87 bp, Homo sapiens; identical to SEQ ID NO: 260111
  chr9:17223003-17223090
  hypo

SEQ ID NO: 406977 - DNA, 62 bp, Homo sapiens; identical to SEQ ID NO: 286342
  chr9:17579748-17579810
  hypo

SEQ ID NO: 406978 - DNA, 1125 bp, Homo sapiens; identical to SEQ ID NO: 260112
  chr9:18776738-18777863
  hypo

SEQ ID NO: 406979 - DNA, 180 bp, Homo sapiens; identical to SEQ ID NO: 260113
  chr9:19103984-19104164
  hypo

SEQ ID NO: 406980 - DNA, 32 bp, Homo sapiens; identical to SEQ ID NO: 260115
  chr9:19414878-19414910
  hypo

SEQ ID NO: 406981 - DNA, 44 bp, Homo sapiens; identical to SEQ ID NO: 212726
  chr9:19431391-19431435
  hypo

SEQ ID NO: 406982 - DNA, 44 bp, Homo sapiens; identical to SEQ ID NO: 260117
  chr9:20778484-20778528
  hypo

SEQ ID NO: 406983 - DNA, 35 bp, Homo sapiens; identical to SEQ ID NO: 223568
  chr9:21032003-21032038
  hypo

SEQ ID NO: 406984 - DNA, 92 bp, Homo sapiens; identical to SEQ ID NO: 286373
  chr9:25677513-25677605
  hypo

SEQ ID NO: 406985 - DNA, 206 bp, Homo sapiens; identical to SEQ ID NO: 388641
  chr9:25677627-25677833
  hypo

SEQ ID NO: 406986 - DNA, 150 bp, Homo sapiens; identical to SEQ ID NO: 384275
  chr9:25677903-25678053
  hypo

SEQ ID NO: 406987 - DNA, 386 bp, Homo sapiens; identical to SEQ ID NO: 398128
  chr9:25678127-25678513
  hypo

SEQ ID NO: 406988 - DNA, 84 bp, Homo sapiens; identical to SEQ ID NO: 260118
  chr9:26936774-26936858
  hypo

SEQ ID NO: 406989 - DNA, 44 bp, Homo sapiens; identical to SEQ ID NO: 212735
  chr9:32481580-32481624
  hypo

SEQ ID NO: 406990 - DNA, 42 bp, Homo sapiens; identical to SEQ ID NO: 260124
  chr9:32516784-32516826
  hypo

SEQ ID NO: 406991 - DNA, 109 bp, Homo sapiens; identical to SEQ ID NO: 260125
  chr9:32632958-32633067
  hypo

SEQ ID NO: 406992 - DNA, 43 bp, Homo sapiens; identical to SEQ ID NO: 212736
  chr9:32999674-32999717
  hypo

SEQ ID NO: 406993 - DNA, 120 bp, Homo sapiens; identical to SEQ ID NO: 260131
  chr9:33077545-33077665
  hypo

SEQ ID NO: 406994 - DNA, 123 bp, Homo sapiens; identical to SEQ ID NO: 212738
  chr9:33136435-33136558
  hypo

SEQ ID NO: 406995 - DNA, 56 bp, Homo sapiens; identical to SEQ ID NO: 212739
  chr9:33136588-33136644
  hypo

SEQ ID NO: 406996 - DNA, 809 bp, Homo sapiens; identical to SEQ ID NO: 260137
  chr9:33442163-33442972
  hypo

SEQ ID NO: 406997 - DNA, 32 bp, Homo sapiens; identical to SEQ ID NO: 212742
  chr9:33834158-33834190
  hypo

SEQ ID NO: 406998 - DNA, 33 bp, Homo sapiens; identical to SEQ ID NO: 260140
  chr9:33862121-33862154
  hypo

SEQ ID NO: 406999 - DNA, 39 bp, Homo sapiens; identical to SEQ ID NO: 212743
  chr9:34050561-34050600
  hypo

SEQ ID NO: 407000 - DNA, 180 bp, Homo sapiens; identical to SEQ ID NO: 260144
  chr9:34062783-34062963
  hypo

SEQ ID NO: 407001 - DNA, 43 bp, Homo sapiens; identical to SEQ ID NO: 260146
  chr9:34148342-34148385
  hypo

SEQ ID NO: 407002 - DNA, 40 bp, Homo sapiens; identical to SEQ ID NO: 260148
  chr9:34230332-34230372
  hypo

SEQ ID NO: 407003 - DNA, 35 bp, Homo sapiens; identical to SEQ ID NO: 212746
  chr9:34276112-34276147
  hypo

SEQ ID NO: 407004 - DNA, 81 bp, Homo sapiens; identical to SEQ ID NO: 212747
  chr9:34316317-34316398
  hypo

SEQ ID NO: 407005 - DNA, 118 bp, Homo sapiens; identical to SEQ ID NO: 310555
  chr9:34574690-34574808
  hypo

SEQ ID NO: 407006 - DNA, 77 bp, Homo sapiens; identical to SEQ ID NO: 201697
  chr9:34646925-34647002
  hypo

SEQ ID NO: 407007 - DNA, 85 bp, Homo sapiens; identical to SEQ ID NO: 212751
  chr9:34971556-34971641
  hypo

SEQ ID NO: 407008 - DNA, 145 bp, Homo sapiens; identical to SEQ ID NO: 260158
  chr9:35649869-35650014
  hypo

SEQ ID NO: 407009 - DNA, 192 bp, Homo sapiens; identical to SEQ ID NO: 260159
  chr9:35689364-35689556
  hypo

SEQ ID NO: 407010 - DNA, 112 bp, Homo sapiens; identical to SEQ ID NO: 260163
  chr9:36118828-36118940
  hypo

SEQ ID NO: 407011 - DNA, 81 bp, Homo sapiens; identical to SEQ ID NO: 260167
  chr9:36320468-36320549
  hypo

SEQ ID NO: 407012 - DNA, 142 bp, Homo sapiens; identical to SEQ ID NO: 260175
  chr9:37409148-37409290
  hypo

SEQ ID NO: 407013 - DNA, 490 bp, Homo sapiens; identical to SEQ ID NO: 212764
  chr9:37414524-37415014
  hypo

SEQ ID NO: 407014 - DNA, 98 bp, Homo sapiens; identical to SEQ ID NO: 212767
  chr9:37778484-37778582
  hypo

SEQ ID NO: 407015 - DNA, 45 bp, Homo sapiens; identical to SEQ ID NO: 260189
  chr9:37965536-37965581
  hypo

SEQ ID NO: 407016 - DNA, 34 bp, Homo sapiens; identical to SEQ ID NO: 212771
  chr9:37985465-37985499
  hypo

SEQ ID NO: 407017 - DNA, 258 bp, Homo sapiens; identical to SEQ ID NO: 260194
  chr9:38022309-38022567
  hypo

SEQ ID NO: 407018 - DNA, 80 bp, Homo sapiens; identical to SEQ ID NO: 260195
  chr9:38033536-38033616
  hypo

SEQ ID NO: 407019 - DNA, 413 bp, Homo sapiens; identical to SEQ ID NO: 201713
  chr9:38067708-38068121
  hypo

SEQ ID NO: 407020 - DNA, 749 bp, Homo sapiens; identical to SEQ ID NO: 201714
  chr9:38068158-38068907
  hypo

SEQ ID NO: 407021 - DNA, 92 bp, Homo sapiens; identical to SEQ ID NO: 260199
  chr9:38075105-38075197
  hypo

SEQ ID NO: 407022 - DNA, 154 bp, Homo sapiens; identical to SEQ ID NO: 260202
  chr9:38397125-38397279
  hypo

SEQ ID NO: 407023 - DNA, 36 bp, Homo sapiens; identical to SEQ ID NO: 260203
  chr9:38695225-38695261
  hypo

SEQ ID NO: 407024 - DNA, 36 bp, Homo sapiens; identical to SEQ ID NO: 260204
  chr9:38695501-38695537
  hypo

SEQ ID NO: 407025 - DNA, 63 bp, Homo sapiens; identical to SEQ ID NO: 260210
  chr9:71482150-71482213
  hypo

SEQ ID NO: 407026 - DNA, 43 bp, Homo sapiens; identical to SEQ ID NO: 260211
  chr9:71495144-71495187
  hypo

SEQ ID NO: 407027 - DNA, 102 bp, Homo sapiens; identical to SEQ ID NO: 260216
  chr9:71664072-71664174
  hypo

SEQ ID NO: 407028 - DNA, 42 bp, Homo sapiens; identical to SEQ ID NO: 223596
  chr9:71736563-71736605
  hypo

SEQ ID NO: 407029 - DNA, 35 bp, Homo sapiens; identical to SEQ ID NO: 260220
  chr9:71800810-71800845
  hypo

SEQ ID NO: 407030 - DNA, 111 bp, Homo sapiens; identical to SEQ ID NO: 260223
  chr9:72832133-72832244
  hypo

SEQ ID NO: 407031 - DNA, 733 bp, Homo sapiens; identical to SEQ ID NO: 201726
  chr9:73028305-73029038
  hypo

SEQ ID NO: 407032 - DNA, 60 bp, Homo sapiens; identical to SEQ ID NO: 260225
  chr9:73152153-73152213
  hypo

SEQ ID NO: 407033 - DNA, 213 bp, Homo sapiens; identical to SEQ ID NO: 212782
  chr9:74853849-74854062
  hypo

SEQ ID NO: 407034 - DNA, 162 bp, Homo sapiens; identical to SEQ ID NO: 260231
  chr9:75005076-75005238
  hypo

SEQ ID NO: 407035 - DNA, 100 bp, Homo sapiens; identical to SEQ ID NO: 260234
  chr9:75136042-75136142
  hypo

SEQ ID NO: 407036 - DNA, 34 bp, Homo sapiens; identical to SEQ ID NO: 260241
  chr9:76744464-76744498
  hypo

SEQ ID NO: 407037 - DNA, 31 bp, Homo sapiens; identical to SEQ ID NO: 260244
  chr9:78017959-78017990
  hypo

SEQ ID NO: 407038 - DNA, 135 bp, Homo sapiens; identical to SEQ ID NO: 212785
  chr9:78686691-78686826
  hypo

SEQ ID NO: 407039 - DNA, 39 bp, Homo sapiens; identical to SEQ ID NO: 212787
  chr9:78866884-78866923
  hypo

SEQ ID NO: 407040 - DNA, 66 bp, Homo sapiens; identical to SEQ ID NO: 260251
  chr9:78989902-78989968
  hypo

SEQ ID NO: 407041 - DNA, 41 bp, Homo sapiens; identical to SEQ ID NO: 212788
  chr9:79230962-79231003
  hypo

SEQ ID NO: 407042 - DNA, 43 bp, Homo sapiens; identical to SEQ ID NO: 260263
  chr9:80269586-80269629
  hypo

SEQ ID NO: 407043 - DNA, 37 bp, Homo sapiens; identical to SEQ ID NO: 212796
  chr9:80304150-80304187
  hypo

SEQ ID NO: 407044 - DNA, 34 bp, Homo sapiens; identical to SEQ ID NO: 212797
  chr9:80315386-80315420
  hypo

SEQ ID NO: 407045 - DNA, 41 bp, Homo sapiens; identical to SEQ ID NO: 212798
  chr9:80343172-80343213
  hypo

SEQ ID NO: 407046 - DNA, 180 bp, Homo sapiens; identical to SEQ ID NO: 212799
  chr9:80390584-80390764
  hypo

SEQ ID NO: 407047 - DNA, 87 bp, Homo sapiens; identical to SEQ ID NO: 260273
  chr9:80544725-80544812
  hypo

SEQ ID NO: 407048 - DNA, 158 bp, Homo sapiens; identical to SEQ ID NO: 212802
  chr9:80546076-80546234
  hypo

SEQ ID NO: 407049 - DNA, 203 bp, Homo sapiens; identical to SEQ ID NO: 260275
  chr9:80563224-80563427
  hypo

SEQ ID NO: 407050 - DNA, 88 bp, Homo sapiens; identical to SEQ ID NO: 212803
  chr9:80570363-80570451
  hypo

SEQ ID NO: 407051 - DNA, 79 bp, Homo sapiens; identical to SEQ ID NO: 260277
  chr9:80591582-80591661
  hypo

SEQ ID NO: 407052 - DNA, 76 bp, Homo sapiens; identical to SEQ ID NO: 260280
  chr9:81897888-81897964
  hypo

SEQ ID NO: 407053 - DNA, 37 bp, Homo sapiens; identical to SEQ ID NO: 260281
  chr9:82082370-82082407
  hypo

SEQ ID NO: 407054 - DNA, 505 bp, Homo sapiens; identical to SEQ ID NO: 398170
  chr9:82186172-82186677
  hypo

SEQ ID NO: 407055 - DNA, 387 bp, Homo sapiens; identical to SEQ ID NO: 388659
  chr9:82187860-82188247
  hypo

SEQ ID NO: 407056 - DNA, 49 bp, Homo sapiens; identical to SEQ ID NO: 260283
  chr9:82282622-82282671
  hypo

SEQ ID NO: 407057 - DNA, 120 bp, Homo sapiens; identical to SEQ ID NO: 260284
  chr9:84130018-84130138
  hypo

SEQ ID NO: 407058 - DNA, 140 bp, Homo sapiens; identical to SEQ ID NO: 398172
  chr9:84303026-84303166
  hypo

SEQ ID NO: 407059 - DNA, 222 bp, Homo sapiens; identical to SEQ ID NO: 260288
  chr9:84441561-84441783
  hypo

SEQ ID NO: 407060 - DNA, 339 bp, Homo sapiens; identical to SEQ ID NO: 201757
  chr9:86238306-86238645
  hypo

SEQ ID NO: 407061 - DNA, 33 bp, Homo sapiens; identical to SEQ ID NO: 260295
  chr9:87655019-87655052
  hypo

SEQ ID NO: 407062 - DNA, 81 bp, Homo sapiens; identical to SEQ ID NO: 260297
  chr9:88490935-88491016
  hypo

SEQ ID NO: 407063 - DNA, 185 bp, Homo sapiens; identical to SEQ ID NO: 260298
  chr9:88651536-88651721
  hypo

SEQ ID NO: 407064 - DNA, 41 bp, Homo sapiens; identical to SEQ ID NO: 260300
  chr9:88672701-88672742
  hypo

SEQ ID NO: 407065 - DNA, 248 bp, Homo sapiens; identical to SEQ ID NO: 212818
  chr9:88694097-88694345
  hypo

SEQ ID NO: 407066 - DNA, 108 bp, Homo sapiens; identical to SEQ ID NO: 212819
  chr9:88694438-88694546
  hypo

SEQ ID NO: 407067 - DNA, 45 bp, Homo sapiens; identical to SEQ ID NO: 260303
  chr9:88977773-88977818
  hypo

SEQ ID NO: 407068 - DNA, 405 bp, Homo sapiens; identical to SEQ ID NO: 212824
  chr9:89699972-89700377
  hypo

SEQ ID NO: 407069 - DNA, 51 bp, Homo sapiens; identical to SEQ ID NO: 260306
  chr9:90112283-90112334
  hypo

SEQ ID NO: 407070 - DNA, 137 bp, Homo sapiens; identical to SEQ ID NO: 260312
  chr9:90472237-90472374
  hypo

SEQ ID NO: 407071 - DNA, 300 bp, Homo sapiens; identical to SEQ ID NO: 260313
  chr9:90472434-90472734
  hypo

SEQ ID NO: 407072 - DNA, 224 bp, Homo sapiens; identical to SEQ ID NO: 260317
  chr9:90483167-90483391
  hypo

SEQ ID NO: 407073 - DNA, 36 bp, Homo sapiens; identical to SEQ ID NO: 260318
  chr9:90485107-90485143
  hypo

SEQ ID NO: 407074 - DNA, 216 bp, Homo sapiens; identical to SEQ ID NO: 260319
  chr9:90485383-90485599
  hypo

SEQ ID NO: 407075 - DNA, 203 bp, Homo sapiens; identical to SEQ ID NO: 260320
  chr9:90499879-90500082
  hypo

SEQ ID NO: 407076 - DNA, 169 bp, Homo sapiens; identical to SEQ ID NO: 260321
  chr9:90500553-90500722
  hypo

SEQ ID NO: 407077 - DNA, 291 bp, Homo sapiens; identical to SEQ ID NO: 212830
  chr9:91119034-91119325
  hypo

SEQ ID NO: 407078 - DNA, 47 bp, Homo sapiens; identical to SEQ ID NO: 260327
  chr9:91140238-91140285
  hypo

SEQ ID NO: 407079 - DNA, 94 bp, Homo sapiens; identical to SEQ ID NO: 260329
  chr9:91187465-91187559
  hypo

SEQ ID NO: 407080 - DNA, 96 bp, Homo sapiens; identical to SEQ ID NO: 260334
  chr9:91666527-91666623
  hypo

SEQ ID NO: 407081 - DNA, 134 bp, Homo sapiens; identical to SEQ ID NO: 212835
  chr9:91997068-91997202
  hypo

SEQ ID NO: 407082 - DNA, 249 bp, Homo sapiens; identical to SEQ ID NO: 212836
  chr9:91997531-91997780
  hypo

SEQ ID NO: 407083 - DNA, 247 bp, Homo sapiens; identical to SEQ ID NO: 260339
  chr9:92049177-92049424
  hypo

SEQ ID NO: 407084 - DNA, 321 bp, Homo sapiens; identical to SEQ ID NO: 260340
  chr9:92053270-92053591
  hypo

SEQ ID NO: 407085 - DNA, 51 bp, Homo sapiens; identical to SEQ ID NO: 212839
  chr9:92140641-92140692
  hypo

SEQ ID NO: 407086 - DNA, 40 bp, Homo sapiens; identical to SEQ ID NO: 260347
  chr9:92231503-92231543
  hypo

SEQ ID NO: 407087 - DNA, 167 bp, Homo sapiens; identical to SEQ ID NO: 212842
  chr9:92237959-92238126
  hypo

SEQ ID NO: 407088 - DNA, 212 bp, Homo sapiens; identical to SEQ ID NO: 260350
  chr9:92249014-92249226
  hypo

SEQ ID NO: 407089 - DNA, 67 bp, Homo sapiens; identical to SEQ ID NO: 310789
  chr9:92277577-92277644
  hypo

SEQ ID NO: 407090 - DNA, 98 bp, Homo sapiens; identical to SEQ ID NO: 162229
  chr9:92277734-92277832
  hypo

SEQ ID NO: 407091 - DNA, 200 bp, Homo sapiens; identical to SEQ ID NO: 260352
  chr9:92725474-92725674
  hypo

SEQ ID NO: 407092 - DNA, 78 bp, Homo sapiens; identical to SEQ ID NO: 260353
  chr9:92776739-92776817
  hypo

SEQ ID NO: 407093 - DNA, 239 bp, Homo sapiens; identical to SEQ ID NO: 260355
  chr9:93156039-93156278
  hypo

SEQ ID NO: 407094 - DNA, 158 bp, Homo sapiens; identical to SEQ ID NO: 260358
  chr9:93727466-93727624
  hypo

SEQ ID NO: 407095 - DNA, 223 bp, Homo sapiens; identical to SEQ ID NO: 212845
  chr9:94124707-94124930
  hypo

SEQ ID NO: 407096 - DNA, 75 bp, Homo sapiens; identical to SEQ ID NO: 260363
  chr9:94475885-94475960
  hypo

SEQ ID NO: 407097 - DNA, 210 bp, Homo sapiens; identical to SEQ ID NO: 260367
  chr9:94904617-94904827
  hypo

SEQ ID NO: 407098 - DNA, 100 bp, Homo sapiens; identical to SEQ ID NO: 212848
  chr9:95003570-95003670
  hypo

SEQ ID NO: 407099 - DNA, 38 bp, Homo sapiens; identical to SEQ ID NO: 212849
  chr9:95010672-95010710
  hypo

SEQ ID NO: 407100 - DNA, 226 bp, Homo sapiens; identical to SEQ ID NO: 260371
  chr9:95376169-95376395
  hypo

SEQ ID NO: 407101 - DNA, 96 bp, Homo sapiens; identical to SEQ ID NO: 260372
  chr9:95380371-95380467
  hypo

SEQ ID NO: 407102 - DNA, 231 bp, Homo sapiens; identical to SEQ ID NO: 260374
  chr9:95403858-95404089
  hypo

SEQ ID NO: 407103 - DNA, 65 bp, Homo sapiens; identical to SEQ ID NO: 212851
  chr9:95417140-95417205
  hypo

SEQ ID NO: 407104 - DNA, 50 bp, Homo sapiens; identical to SEQ ID NO: 310822
  chr9:95501276-95501326
  hypo

SEQ ID NO: 407105 - DNA, 99 bp, Homo sapiens; identical to SEQ ID NO: 310823
  chr9:95501356-95501455
  hypo

SEQ ID NO: 407106 - DNA, 85 bp, Homo sapiens; identical to SEQ ID NO: 260383
  chr9:95676050-95676135
  hypo

SEQ ID NO: 407107 - DNA, 203 bp, Homo sapiens; identical to SEQ ID NO: 260384
  chr9:95687862-95688065
  hypo

SEQ ID NO: 407108 - DNA, 396 bp, Homo sapiens; identical to SEQ ID NO: 260389
  chr9:96054920-96055316
  hypo

SEQ ID NO: 407109 - DNA, 36 bp, Homo sapiens; identical to SEQ ID NO: 212859
  chr9:96230446-96230482
  hypo

SEQ ID NO: 407110 - DNA, 178 bp, Homo sapiens; identical to SEQ ID NO: 212860
  chr9:96256151-96256329
  hypo

SEQ ID NO: 407111 - DNA, 410 bp, Homo sapiens; identical to SEQ ID NO: 212861
  chr9:96275710-96276120
  hypo

SEQ ID NO: 407112 - DNA, 187 bp, Homo sapiens; identical to SEQ ID NO: 212862
  chr9:96294481-96294668
  hypo

SEQ ID NO: 407113 - DNA, 246 bp, Homo sapiens; identical to SEQ ID NO: 260400
  chr9:96308695-96308941
  hypo

SEQ ID NO: 407114 - DNA, 119 bp, Homo sapiens; identical to SEQ ID NO: 310844
  chr9:96361906-96362025
  hypo

SEQ ID NO: 407115 - DNA, 171 bp, Homo sapiens; identical to SEQ ID NO: 260405
  chr9:96446747-96446918
  hypo

SEQ ID NO: 407116 - DNA, 36 bp, Homo sapiens; identical to SEQ ID NO: 260408
  chr9:96687053-96687089
  hypo

SEQ ID NO: 407117 - DNA, 100 bp, Homo sapiens; identical to SEQ ID NO: 260409
  chr9:96910020-96910120
  hypo

SEQ ID NO: 407118 - DNA, 120 bp, Homo sapiens; identical to SEQ ID NO: 212867
  chr9:96945448-96945568
  hypo

SEQ ID NO: 407119 - DNA, 36 bp, Homo sapiens; identical to SEQ ID NO: 260413
  chr9:97010560-97010596
  hypo

SEQ ID NO: 407120 - DNA, 35 bp, Homo sapiens; identical to SEQ ID NO: 260414
  chr9:97010716-97010751
  hypo

SEQ ID NO: 407121 - DNA, 266 bp, Homo sapiens; identical to SEQ ID NO: 260415
  chr9:97062633-97062899
  hypo

SEQ ID NO: 407122 - DNA, 41 bp, Homo sapiens; identical to SEQ ID NO: 260416
  chr9:97107980-97108021
  hypo

SEQ ID NO: 407123 - DNA, 313 bp, Homo sapiens; identical to SEQ ID NO: 260421
  chr9:97384560-97384873
  hypo

SEQ ID NO: 407124 - DNA, 37 bp, Homo sapiens; identical to SEQ ID NO: 260422
  chr9:97469746-97469783
  hypo

SEQ ID NO: 407125 - DNA, 42 bp, Homo sapiens; identical to SEQ ID NO: 260424
  chr9:97488328-97488370
  hypo

SEQ ID NO: 407126 - DNA, 37 bp, Homo sapiens; identical to SEQ ID NO: 260425
  chr9:97506389-97506426
  hypo

SEQ ID NO: 407127 - DNA, 131 bp, Homo sapiens; identical to SEQ ID NO: 260426
  chr9:97563055-97563186
  hypo

SEQ ID NO: 407128 - DNA, 85 bp, Homo sapiens; identical to SEQ ID NO: 310872
  chr9:97674974-97675059
  hypo

SEQ ID NO: 407129 - DNA, 168 bp, Homo sapiens; identical to SEQ ID NO: 310874
  chr9:97679314-97679482
  hypo

SEQ ID NO: 407130 - DNA, 39 bp, Homo sapiens; identical to SEQ ID NO: 260433
  chr9:97682280-97682319
  hypo

SEQ ID NO: 407131 - DNA, 337 bp, Homo sapiens; identical to SEQ ID NO: 212870
  chr9:97719171-97719508
  hypo

SEQ ID NO: 407132 - DNA, 405 bp, Homo sapiens; identical to SEQ ID NO: 223634
  chr9:97810932-97811337
  hypo

SEQ ID NO: 407133 - DNA, 216 bp, Homo sapiens; identical to SEQ ID NO: 260438
  chr9:97847400-97847616
  hypo

SEQ ID NO: 407134 - DNA, 168 bp, Homo sapiens; identical to SEQ ID NO: 260445
  chr9:97868960-97869128
  hypo

SEQ ID NO: 407135 - DNA, 77 bp, Homo sapiens; identical to SEQ ID NO: 260446
  chr9:97887433-97887510
  hypo

SEQ ID NO: 407136 - DNA, 127 bp, Homo sapiens; identical to SEQ ID NO: 310894
  chr9:97891756-97891883
  hypo

SEQ ID NO: 407137 - DNA, 206 bp, Homo sapiens; identical to SEQ ID NO: 212879
  chr9:97913297-97913503
  hypo

SEQ ID NO: 407138 - DNA, 81 bp, Homo sapiens; identical to SEQ ID NO: 260449
  chr9:98145032-98145113
  hypo

SEQ ID NO: 407139 - DNA, 60 bp, Homo sapiens; identical to SEQ ID NO: 223636
  chr9:98189305-98189365
  hypo

SEQ ID NO: 407140 - DNA, 207 bp, Homo sapiens; identical to SEQ ID NO: 260453
  chr9:98490544-98490751
  hypo

SEQ ID NO: 407141 - DNA, 491 bp, Homo sapiens; identical to SEQ ID NO: 286578
  chr9:99145529-99146020
  hypo

SEQ ID NO: 407142 - DNA, 37 bp, Homo sapiens; identical to SEQ ID NO: 260459
  chr9:99214487-99214524
  hypo

SEQ ID NO: 407143 - DNA, 122 bp, Homo sapiens; identical to SEQ ID NO: 260460
  chr9:99256191-99256313
  hypo

SEQ ID NO: 407144 - DNA, 196 bp, Homo sapiens; identical to SEQ ID NO: 260462
  chr9:99267708-99267904
  hypo

SEQ ID NO: 407145 - DNA, 409 bp, Homo sapiens; identical to SEQ ID NO: 201804
  chr9:99417397-99417806
  hypo

SEQ ID NO: 407146 - DNA, 45 bp, Homo sapiens; identical to SEQ ID NO: 260465
  chr9:99641471-99641516
  hypo

SEQ ID NO: 407147 - DNA, 76 bp, Homo sapiens; identical to SEQ ID NO: 260471
  chr9:100308892-100308968
  hypo

SEQ ID NO: 407148 - DNA, 35 bp, Homo sapiens; identical to SEQ ID NO: 260476
  chr9:100820491-100820526
  hypo

SEQ ID NO: 407149 - DNA, 128 bp, Homo sapiens; identical to SEQ ID NO: 212891
  chr9:100890703-100890831
  hypo

SEQ ID NO: 407150 - DNA, 210 bp, Homo sapiens; identical to SEQ ID NO: 260481
  chr9:100924970-100925180
  hypo

SEQ ID NO: 407151 - DNA, 182 bp, Homo sapiens; identical to SEQ ID NO: 260482
  chr9:100933034-100933216
  hypo

SEQ ID NO: 407152 - DNA, 225 bp, Homo sapiens; identical to SEQ ID NO: 260483
  chr9:100935909-100936134
  hypo

SEQ ID NO: 407153 - DNA, 79 bp, Homo sapiens; identical to SEQ ID NO: 392252
  chr9:101009639-101009718
  hypo

SEQ ID NO: 407154 - DNA, 196 bp, Homo sapiens; identical to SEQ ID NO: 212893
  chr9:101216242-101216438
  hypo

SEQ ID NO: 407155 - DNA, 110 bp, Homo sapiens; identical to SEQ ID NO: 212894
  chr9:101216476-101216586
  hypo

SEQ ID NO: 407156 - DNA, 156 bp, Homo sapiens; identical to SEQ ID NO: 212895
  chr9:101280572-101280728
  hypo

SEQ ID NO: 407157 - DNA, 98 bp, Homo sapiens; identical to SEQ ID NO: 260490
  chr9:101445882-101445980
  hypo

SEQ ID NO: 407158 - DNA, 224 bp, Homo sapiens; identical to SEQ ID NO: 260491
  chr9:101499001-101499225
  hypo

SEQ ID NO: 407159 - DNA, 165 bp, Homo sapiens; identical to SEQ ID NO: 310947
  chr9:101557774-101557939
  hypo

SEQ ID NO: 407160 - DNA, 39 bp, Homo sapiens; identical to SEQ ID NO: 260496
  chr9:101949974-101950013
  hypo

SEQ ID NO: 407161 - DNA, 74 bp, Homo sapiens; identical to SEQ ID NO: 201819
  chr9:103190036-103190110
  hypo

SEQ ID NO: 407162 - DNA, 96 bp, Homo sapiens; identical to SEQ ID NO: 260501
  chr9:104138073-104138169
  hypo

SEQ ID NO: 407163 - DNA, 84 bp, Homo sapiens; identical to SEQ ID NO: 260503
  chr9:104238668-104238752
  hypo

SEQ ID NO: 407164 - DNA, 35 bp, Homo sapiens; identical to SEQ ID NO: 260509
  chr9:107260232-107260267
  hypo

SEQ ID NO: 407165 - DNA, 34 bp, Homo sapiens; identical to SEQ ID NO: 260510
  chr9:107260507-107260541
  hypo

SEQ ID NO: 407166 - DNA, 48 bp, Homo sapiens; identical to SEQ ID NO: 212904
  chr9:107396338-107396386
  hypo

SEQ ID NO: 407167 - DNA, 110 bp, Homo sapiens; identical to SEQ ID NO: 212905
  chr9:107396494-107396604
  hypo

SEQ ID NO: 407168 - DNA, 51 bp, Homo sapiens; identical to SEQ ID NO: 260512
  chr9:107528626-107528677
  hypo

SEQ ID NO: 407169 - DNA, 86 bp, Homo sapiens; identical to SEQ ID NO: 260513
  chr9:107554120-107554206
  hypo

SEQ ID NO: 407170 - DNA, 153 bp, Homo sapiens; identical to SEQ ID NO: 212906
  chr9:107729489-107729642
  hypo

SEQ ID NO: 407171 - DNA, 120 bp, Homo sapiens; identical to SEQ ID NO: 260515
  chr9:108257889-108258009
  hypo

SEQ ID NO: 407172 - DNA, 185 bp, Homo sapiens; identical to SEQ ID NO: 260520
  chr9:109691303-109691488
  hypo

SEQ ID NO: 407173 - DNA, 37 bp, Homo sapiens; identical to SEQ ID NO: 212909
  chr9:109865317-109865354
  hypo

SEQ ID NO: 407174 - DNA, 41 bp, Homo sapiens; identical to SEQ ID NO: 212910
  chr9:109894935-109894976
  hypo

SEQ ID NO: 407175 - DNA, 40 bp, Homo sapiens; identical to SEQ ID NO: 260524
  chr9:109895276-109895316
  hypo

SEQ ID NO: 407176 - DNA, 265 bp, Homo sapiens; identical to SEQ ID NO: 212911
  chr9:110096156-110096421
  hypo

SEQ ID NO: 407177 - DNA, 34 bp, Homo sapiens; identical to SEQ ID NO: 212912
  chr9:110160588-110160622
  hypo

SEQ ID NO: 407178 - DNA, 44 bp, Homo sapiens; identical to SEQ ID NO: 260536
  chr9:110861945-110861989
  hypo

SEQ ID NO: 407179 - DNA, 32 bp, Homo sapiens; identical to SEQ ID NO: 260537
  chr9:111446306-111446338
  hypo

SEQ ID NO: 407180 - DNA, 66 bp, Homo sapiens; identical to SEQ ID NO: 260540
  chr9:111617924-111617990
  hypo

SEQ ID NO: 407181 - DNA, 33 bp, Homo sapiens; identical to SEQ ID NO: 260542
  chr9:111876331-111876364
  hypo

SEQ ID NO: 407182 - DNA, 43 bp, Homo sapiens
  chr9:112040522-112040565
  hypo
gaggaggacagtttgaggaggacacagtttgggggtggggtgg

SEQ ID NO: 407183 - DNA, 78 bp, Homo sapiens; identical to SEQ ID NO: 260546
  chr9:112295751-112295829
  hypo

SEQ ID NO: 407184 - DNA, 84 bp, Homo sapiens; identical to SEQ ID NO: 260547
  chr9:112847321-112847405
  hypo

SEQ ID NO: 407185 - DNA, 203 bp, Homo sapiens; identical to SEQ ID NO: 212923
  chr9:113592870-113593073
  hypo

SEQ ID NO: 407186 - DNA, 120 bp, Homo sapiens; identical to SEQ ID NO: 260552
  chr9:114319645-114319765
  hypo

SEQ ID NO: 407187 - DNA, 240 bp, Homo sapiens; identical to SEQ ID NO: 212924
  chr9:114619240-114619480
  hypo

SEQ ID NO: 407188 - DNA, 37 bp, Homo sapiens; identical to SEQ ID NO: 212925
  chr9:114701511-114701548
  hypo

SEQ ID NO: 407189 - DNA, 157 bp, Homo sapiens; identical to SEQ ID NO: 212926
  chr9:114750309-114750466
  hypo

SEQ ID NO: 407190 - DNA, 181 bp, Homo sapiens; identical to SEQ ID NO: 260559
  chr9:114823149-114823330
  hypo

SEQ ID NO: 407191 - DNA, 137 bp, Homo sapiens; identical to SEQ ID NO: 212928
  chr9:114832553-114832690
  hypo

SEQ ID NO: 407192 - DNA, 82 bp, Homo sapiens; identical to SEQ ID NO: 260568
  chr9:115445176-115445258
  hypo

SEQ ID NO: 407193 - DNA, 94 bp, Homo sapiens; identical to SEQ ID NO: 212929
  chr9:115479262-115479356
  hypo

SEQ ID NO: 407194 - DNA, 78 bp, Homo sapiens; identical to SEQ ID NO: 260571
  chr9:115519017-115519095
  hypo

SEQ ID NO: 407195 - DNA, 199 bp, Homo sapiens; identical to SEQ ID NO: 260572
  chr9:115550632-115550831
  hypo

SEQ ID NO: 407196 - DNA, 38 bp, Homo sapiens; identical to SEQ ID NO: 311035
  chr9:115599335-115599373
  hypo

SEQ ID NO: 407197 - DNA, 273 bp, Homo sapiens; identical to SEQ ID NO: 260575
  chr9:115630952-115631225
  hypo

SEQ ID NO: 407198 - DNA, 64 bp, Homo sapiens; identical to SEQ ID NO: 260578
  chr9:116047380-116047444
  hypo

SEQ ID NO: 407199 - DNA, 233 bp, Homo sapiens; identical to SEQ ID NO: 212932
  chr9:116061763-116061996
  hypo

SEQ ID NO: 407200 - DNA, 71 bp, Homo sapiens; identical to SEQ ID NO: 386070
  chr9:116066129-116066200
  hypo

SEQ ID NO: 407201 - DNA, 37 bp, Homo sapiens; identical to SEQ ID NO: 260585
  chr9:116076765-116076802
  hypo

SEQ ID NO: 407202 - DNA, 55 bp, Homo sapiens; identical to SEQ ID NO: 311054
  chr9:116331386-116331441
  hypo

SEQ ID NO: 407203 - DNA, 233 bp, Homo sapiens; identical to SEQ ID NO: 260593
  chr9:116663446-116663679
  hypo

SEQ ID NO: 407204 - DNA, 81 bp, Homo sapiens; identical to SEQ ID NO: 212936
  chr9:116671457-116671538
  hypo

SEQ ID NO: 407205 - DNA, 137 bp, Homo sapiens; identical to SEQ ID NO: 212937
  chr9:116671888-116672025
  hypo

SEQ ID NO: 407206 - DNA, 151 bp, Homo sapiens; identical to SEQ ID NO: 78056
  chr9:116681838-116681989
  hypo

SEQ ID NO: 407207 - DNA, 35 bp, Homo sapiens; identical to SEQ ID NO: 260601
  chr9:116750067-116750102
  hypo

SEQ ID NO: 407208 - DNA, 150 bp, Homo sapiens; identical to SEQ ID NO: 260603
  chr9:116760431-116760581
  hypo

SEQ ID NO: 407209 - DNA, 279 bp, Homo sapiens; identical to SEQ ID NO: 260605
  chr9:116762418-116762697
  hypo

SEQ ID NO: 407210 - DNA, 323 bp, Homo sapiens; identical to SEQ ID NO: 212944
  chr9:116798287-116798610
  hypo

SEQ ID NO: 407211 - DNA, 201 bp, Homo sapiens; identical to SEQ ID NO: 260615
  chr9:116823662-116823863
  hypo

SEQ ID NO: 407212 - DNA, 43 bp, Homo sapiens; identical to SEQ ID NO: 260616
  chr9:116832918-116832961
  hypo

SEQ ID NO: 407213 - DNA, 175 bp, Homo sapiens; identical to SEQ ID NO: 212953
  chr9:116973314-116973489
  hypo

SEQ ID NO: 407214 - DNA, 49 bp, Homo sapiens; identical to SEQ ID NO: 260623
  chr9:117179587-117179636
  hypo

SEQ ID NO: 407215 - DNA, 60 bp, Homo sapiens; identical to SEQ ID NO: 260627
  chr9:123139935-123139995
  hypo

SEQ ID NO: 407216 - DNA, 203 bp, Homo sapiens; identical to SEQ ID NO: 260628
  chr9:123140239-123140442
  hypo

SEQ ID NO: 407217 - DNA, 55 bp, Homo sapiens; identical to SEQ ID NO: 260631
  chr9:123162810-123162865
  hypo

SEQ ID NO: 407218 - DNA, 77 bp, Homo sapiens; identical to SEQ ID NO: 260640
  chr9:123650230-123650307
  hypo

SEQ ID NO: 407219 - DNA, 104 bp, Homo sapiens; identical to SEQ ID NO: 212957
  chr9:123965022-123965126
  hypo

SEQ ID NO: 407220 - DNA, 64 bp, Homo sapiens; identical to SEQ ID NO: 260644
  chr9:124095120-124095184
  hypo

SEQ ID NO: 407221 - DNA, 222 bp, Homo sapiens; identical to SEQ ID NO: 260646
  chr9:124339602-124339824
  hypo

SEQ ID NO: 407222 - DNA, 184 bp, Homo sapiens; identical to SEQ ID NO: 212963
  chr9:124548590-124548774
  hypo

SEQ ID NO: 407223 - DNA, 179 bp, Homo sapiens; identical to SEQ ID NO: 260655
  chr9:124549335-124549514
  hypo

SEQ ID NO: 407224 - DNA, 386 bp, Homo sapiens; identical to SEQ ID NO: 260658
  chr9:124666054-124666440
  hypo

SEQ ID NO: 407225 - DNA, 166 bp, Homo sapiens; identical to SEQ ID NO: 260659
  chr9:124736303-124736469
  hypo

SEQ ID NO: 407226 - DNA, 65 bp, Homo sapiens; identical to SEQ ID NO: 260662
  chr9:124967430-124967495
  hypo

SEQ ID NO: 407227 - DNA, 63 bp, Homo sapiens; identical to SEQ ID NO: 286691
  chr9:124981571-124981634
  hypo

SEQ ID NO: 407228 - DNA, 140 bp, Homo sapiens; identical to SEQ ID NO: 118090
  chr9:124981877-124982017
  hypo

SEQ ID NO: 407229 - DNA, 42 bp, Homo sapiens; identical to SEQ ID NO: 260664
  chr9:125573936-125573978
  hypo

SEQ ID NO: 407230 - DNA, 57 bp, Homo sapiens; identical to SEQ ID NO: 212967
  chr9:125870568-125870625
  hypo

SEQ ID NO: 407231 - DNA, 42 bp, Homo sapiens; identical to SEQ ID NO: 260669
  chr9:125878079-125878121
  hypo

SEQ ID NO: 407232 - DNA, 44 bp, Homo sapiens; identical to SEQ ID NO: 260670
  chr9:125927262-125927306
  hypo

SEQ ID NO: 407233 - DNA, 195 bp, Homo sapiens; identical to SEQ ID NO: 212969
  chr9:126100875-126101070
  hypo

SEQ ID NO: 407234 - DNA, 125 bp, Homo sapiens; identical to SEQ ID NO: 311146
  chr9:126110175-126110300
  hypo

SEQ ID NO: 407235 - DNA, 34 bp, Homo sapiens; identical to SEQ ID NO: 260681
  chr9:126168860-126168894
  hypo

SEQ ID NO: 407236 - DNA, 348 bp, Homo sapiens; identical to SEQ ID NO: 260683
  chr9:126169851-126170199
  hypo

SEQ ID NO: 407237 - DNA, 134 bp, Homo sapiens; identical to SEQ ID NO: 260686
  chr9:126198542-126198676
  hypo

SEQ ID NO: 407238 - DNA, 80 bp, Homo sapiens; identical to SEQ ID NO: 260688
  chr9:126243636-126243716
  hypo

SEQ ID NO: 407239 - DNA, 167 bp, Homo sapiens; identical to SEQ ID NO: 212975
  chr9:126323416-126323583
  hypo

SEQ ID NO: 407240 - DNA, 78 bp, Homo sapiens; identical to SEQ ID NO: 260695
  chr9:126403904-126403982
  hypo

SEQ ID NO: 407241 - DNA, 87 bp, Homo sapiens; identical to SEQ ID NO: 212979
  chr9:126442151-126442238
  hypo

SEQ ID NO: 407242 - DNA, 260 bp, Homo sapiens; identical to SEQ ID NO: 260699
  chr9:126487964-126488224
  hypo

SEQ ID NO: 407243 - DNA, 101 bp, Homo sapiens; identical to SEQ ID NO: 260700
  chr9:126707416-126707517
  hypo

SEQ ID NO: 407244 - DNA, 165 bp, Homo sapiens; identical to SEQ ID NO: 286698
  chr9:126762044-126762209
  hypo

SEQ ID NO: 407245 - DNA, 299 bp, Homo sapiens; identical to SEQ ID NO: 286699
  chr9:126762231-126762530
  hypo

SEQ ID NO: 407246 - DNA, 67 bp, Homo sapiens; identical to SEQ ID NO: 286700
  chr9:126762606-126762673
  hypo

SEQ ID NO: 407247 - DNA, 291 bp, Homo sapiens; identical to SEQ ID NO: 260703
  chr9:127071988-127072279
  hypo

SEQ ID NO: 407248 - DNA, 200 bp, Homo sapiens; identical to SEQ ID NO: 260705
  chr9:127214765-127214965
  hypo

SEQ ID NO: 407249 - DNA, 278 bp, Homo sapiens; identical to SEQ ID NO: 286720
  chr9:127215312-127215590
  hypo

SEQ ID NO: 407250 - DNA, 124 bp, Homo sapiens; identical to SEQ ID NO: 286721
  chr9:127215678-127215802
  hypo

SEQ ID NO: 407251 - DNA, 171 bp, Homo sapiens; identical to SEQ ID NO: 260708
  chr9:127241721-127241892
  hypo

SEQ ID NO: 407252 - DNA, 39 bp, Homo sapiens; identical to SEQ ID NO: 212982
  chr9:127420645-127420684
  hypo

SEQ ID NO: 407253 - DNA, 127 bp, Homo sapiens; identical to SEQ ID NO: 201874
  chr9:127534416-127534543
  hypo

SEQ ID NO: 407254 - DNA, 85 bp, Homo sapiens; identical to SEQ ID NO: 260718
  chr9:127538088-127538173
  hypo

SEQ ID NO: 407255 - DNA, 336 bp, Homo sapiens; identical to SEQ ID NO: 212985
  chr9:127572288-127572624
  hypo

SEQ ID NO: 407256 - DNA, 39 bp, Homo sapiens; identical to SEQ ID NO: 260722
  chr9:127577754-127577793
  hypo

SEQ ID NO: 407257 - DNA, 39 bp, Homo sapiens; identical to SEQ ID NO: 260723
  chr9:127577913-127577952
  hypo

SEQ ID NO: 407258 - DNA, 37 bp, Homo sapiens; identical to SEQ ID NO: 260729
  chr9:128032923-128032960
  hypo

SEQ ID NO: 407259 - DNA, 138 bp, Homo sapiens; identical to SEQ ID NO: 212989
  chr9:128135749-128135887
  hypo

SEQ ID NO: 407260 - DNA, 159 bp, Homo sapiens; identical to SEQ ID NO: 260733
  chr9:128168027-128168186
  hypo

SEQ ID NO: 407261 - DNA, 116 bp, Homo sapiens; identical to SEQ ID NO: 311217
  chr9:128189978-128190094
  hypo

SEQ ID NO: 407262 - DNA, 158 bp, Homo sapiens; identical to SEQ ID NO: 311218
  chr9:128190140-128190298
  hypo

SEQ ID NO: 407263 - DNA, 245 bp, Homo sapiens; identical to SEQ ID NO: 260736
  chr9:128263221-128263466
  hypo

SEQ ID NO: 407264 - DNA, 93 bp, Homo sapiens; identical to SEQ ID NO: 212991
  chr9:128399989-128400082
  hypo

SEQ ID NO: 407265 - DNA, 159 bp, Homo sapiens; identical to SEQ ID NO: 212992
  chr9:128407606-128407765
  hypo

SEQ ID NO: 407266 - DNA, 50 bp, Homo sapiens; identical to SEQ ID NO: 260743
  chr9:128672789-128672839
  hypo

SEQ ID NO: 407267 - DNA, 105 bp, Homo sapiens; identical to SEQ ID NO: 260746
  chr9:128718758-128718863
  hypo

SEQ ID NO: 407268 - DNA, 40 bp, Homo sapiens; identical to SEQ ID NO: 260747
  chr9:128752498-128752538
  hypo

SEQ ID NO: 407269 - DNA, 35 bp, Homo sapiens; identical to SEQ ID NO: 260755
  chr9:128926861-128926896
  hypo

SEQ ID NO: 407270 - DNA, 440 bp, Homo sapiens; identical to SEQ ID NO: 260756
  chr9:128997999-128998439
  hypo

SEQ ID NO: 407271 - DNA, 295 bp, Homo sapiens; identical to SEQ ID NO: 260757
  chr9:129038608-129038903
  hypo

SEQ ID NO: 407272 - DNA, 79 bp, Homo sapiens; identical to SEQ ID NO: 260759
  chr9:129316510-129316589
  hypo

SEQ ID NO: 407273 - DNA, 119 bp, Homo sapiens; identical to SEQ ID NO: 260760
  chr9:129454751-129454870
  hypo

SEQ ID NO: 407274 - DNA, 224 bp, Homo sapiens; identical to SEQ ID NO: 311247
  chr9:129517389-129517613
  hypo

SEQ ID NO: 407275 - DNA, 97 bp, Homo sapiens; identical to SEQ ID NO: 260765
  chr9:129562214-129562311
  hypo

SEQ ID NO: 407276 - DNA, 148 bp, Homo sapiens; identical to SEQ ID NO: 260771
  chr9:129644774-129644922
  hypo

SEQ ID NO: 407277 - DNA, 38 bp, Homo sapiens; identical to SEQ ID NO: 260773
  chr9:129648781-129648819
  hypo

SEQ ID NO: 407278 - DNA, 36 bp, Homo sapiens; identical to SEQ ID NO: 260775
  chr9:130172835-130172871
  hypo

SEQ ID NO: 407279 - DNA, 167 bp, Homo sapiens; identical to SEQ ID NO: 213002
  chr9:130266739-130266906
  hypo

SEQ ID NO: 407280 - DNA, 317 bp, Homo sapiens; identical to SEQ ID NO: 260780
  chr9:130270528-130270845
  hypo

SEQ ID NO: 407281 - DNA, 198 bp, Homo sapiens; identical to SEQ ID NO: 213004
  chr9:130271243-130271441
  hypo

SEQ ID NO: 407282 - DNA, 71 bp, Homo sapiens; identical to SEQ ID NO: 260783
  chr9:130278830-130278901
  hypo

SEQ ID NO: 407283 - DNA, 69 bp, Homo sapiens; identical to SEQ ID NO: 213006
  chr9:130279231-130279300
  hypo

SEQ ID NO: 407284 - DNA, 37 bp, Homo sapiens; identical to SEQ ID NO: 260786
  chr9:130282274-130282311
  hypo

SEQ ID NO: 407285 - DNA, 34 bp, Homo sapiens; identical to SEQ ID NO: 260787
  chr9:130296359-130296393
  hypo

SEQ ID NO: 407286 - DNA, 203 bp, Homo sapiens; identical to SEQ ID NO: 260788
  chr9:130297782-130297985
  hypo

SEQ ID NO: 407287 - DNA, 300 bp, Homo sapiens; identical to SEQ ID NO: 260790
  chr9:130327523-130327823
  hypo

SEQ ID NO: 407288 - DNA, 36 bp, Homo sapiens; identical to SEQ ID NO: 223681
  chr9:130374657-130374693
  hypo

SEQ ID NO: 407289 - DNA, 180 bp, Homo sapiens; identical to SEQ ID NO: 260791
  chr9:130388085-130388265
  hypo

SEQ ID NO: 407290 - DNA, 199 bp, Homo sapiens; identical to SEQ ID NO: 260792
  chr9:130438945-130439144
  hypo

SEQ ID NO: 407291 - DNA, 191 bp, Homo sapiens; identical to SEQ ID NO: 260794
  chr9:130442501-130442692
  hypo

SEQ ID NO: 407292 - DNA, 162 bp, Homo sapiens; identical to SEQ ID NO: 213009
  chr9:130444669-130444831
  hypo

SEQ ID NO: 407293 - DNA, 191 bp, Homo sapiens; identical to SEQ ID NO: 213010
  chr9:130446345-130446536
  hypo

SEQ ID NO: 407294 - DNA, 154 bp, Homo sapiens; identical to SEQ ID NO: 260801
  chr9:130536485-130536639
  hypo

SEQ ID NO: 407295 - DNA, 345 bp, Homo sapiens; identical to SEQ ID NO: 213012
  chr9:130550821-130551166
  hypo

SEQ ID NO: 407296 - DNA, 36 bp, Homo sapiens; identical to SEQ ID NO: 260803
  chr9:130561820-130561856
  hypo

SEQ ID NO: 407297 - DNA, 141 bp, Homo sapiens; identical to SEQ ID NO: 286753
  chr9:130616612-130616753
  hypo

SEQ ID NO: 407298 - DNA, 215 bp, Homo sapiens; identical to SEQ ID NO: 260808
  chr9:130633162-130633377
  hypo

SEQ ID NO: 407299 - DNA, 185 bp, Homo sapiens; identical to SEQ ID NO: 213015
  chr9:130635124-130635309
  hypo

SEQ ID NO: 407300 - DNA, 107 bp, Homo sapiens; identical to SEQ ID NO: 260815
  chr9:130716085-130716192
  hypo

SEQ ID NO: 407301 - DNA, 104 bp, Homo sapiens; identical to SEQ ID NO: 213020
  chr9:130737468-130737572
  hypo

SEQ ID NO: 407302 - DNA, 31 bp, Homo sapiens; identical to SEQ ID NO: 260817
  chr9:130744755-130744786
  hypo

SEQ ID NO: 407303 - DNA, 48 bp, Homo sapiens; identical to SEQ ID NO: 260819
  chr9:130877183-130877231
  hypo

SEQ ID NO: 407304 - DNA, 104 bp, Homo sapiens; identical to SEQ ID NO: 260820
  chr9:130878928-130879032
  hypo

SEQ ID NO: 407305 - DNA, 142 bp, Homo sapiens; identical to SEQ ID NO: 260821
  chr9:130906607-130906749
  hypo

SEQ ID NO: 407306 - DNA, 317 bp, Homo sapiens; identical to SEQ ID NO: 260823
  chr9:130914350-130914667
  hypo

SEQ ID NO: 407307 - DNA, 163 bp, Homo sapiens; identical to SEQ ID NO: 260825
  chr9:131048963-131049126
  hypo

SEQ ID NO: 407308 - DNA, 40 bp, Homo sapiens; identical to SEQ ID NO: 213024
  chr9:131060967-131061007
  hypo

SEQ ID NO: 407309 - DNA, 82 bp, Homo sapiens; identical to SEQ ID NO: 260829
  chr9:131145992-131146074
  hypo

SEQ ID NO: 407310 - DNA, 220 bp, Homo sapiens; identical to SEQ ID NO: 286764
  chr9:131183034-131183254
  hypo

SEQ ID NO: 407311 - DNA, 147 bp, Homo sapiens; identical to SEQ ID NO: 213026
  chr9:131411426-131411573
  hypo

SEQ ID NO: 407312 - DNA, 174 bp, Homo sapiens; identical to SEQ ID NO: 260839
  chr9:131600339-131600513
  hypo

SEQ ID NO: 407313 - DNA, 135 bp, Homo sapiens; identical to SEQ ID NO: 260840
  chr9:131607624-131607759
  hypo

SEQ ID NO: 407314 - DNA, 155 bp, Homo sapiens; identical to SEQ ID NO: 260841
  chr9:131647361-131647516
  hypo

SEQ ID NO: 407315 - DNA, 155 bp, Homo sapiens; identical to SEQ ID NO: 311333
  chr9:131652561-131652716
  hypo

SEQ ID NO: 407316 - DNA, 395 bp, Homo sapiens; identical to SEQ ID NO: 311334
  chr9:131652746-131653141
  hypo

SEQ ID NO: 407317 - DNA, 112 bp, Homo sapiens; identical to SEQ ID NO: 213033
  chr9:131776674-131776786
  hypo

SEQ ID NO: 407318 - DNA, 125 bp, Homo sapiens; identical to SEQ ID NO: 260852
  chr9:131870880-131871005
  hypo

SEQ ID NO: 407319 - DNA, 36 bp, Homo sapiens; identical to SEQ ID NO: 260853
  chr9:131897374-131897410
  hypo

SEQ ID NO: 407320 - DNA, 227 bp, Homo sapiens; identical to SEQ ID NO: 260855
  chr9:132004480-132004707
  hypo

SEQ ID NO: 407321 - DNA, 196 bp, Homo sapiens; identical to SEQ ID NO: 213038
  chr9:132112539-132112735
  hypo

SEQ ID NO: 407322 - DNA, 240 bp, Homo sapiens; identical to SEQ ID NO: 260858
  chr9:132123266-132123506
  hypo

SEQ ID NO: 407323 - DNA, 271 bp, Homo sapiens; identical to SEQ ID NO: 260861
  chr9:132166918-132167189
  hypo

SEQ ID NO: 407324 - DNA, 34 bp, Homo sapiens; identical to SEQ ID NO: 223691
  chr9:132222864-132222898
  hypo

SEQ ID NO: 407325 - DNA, 36 bp, Homo sapiens; identical to SEQ ID NO: 260865
  chr9:132285635-132285671
  hypo

SEQ ID NO: 407326 - DNA, 551 bp, Homo sapiens; identical to SEQ ID NO: 286787
  chr9:132330680-132331231
  hypo

SEQ ID NO: 407327 - DNA, 217 bp, Homo sapiens; identical to SEQ ID NO: 388691
  chr9:132331336-132331553
  hypo

SEQ ID NO: 407328 - DNA, 42 bp, Homo sapiens; identical to SEQ ID NO: 260866
  chr9:132356355-132356397
  hypo

SEQ ID NO: 407329 - DNA, 199 bp, Homo sapiens; identical to SEQ ID NO: 260867
  chr9:132370722-132370921
  hypo

SEQ ID NO: 407330 - DNA, 101 bp, Homo sapiens; identical to SEQ ID NO: 260871
  chr9:132409736-132409837
  hypo

SEQ ID NO: 407331 - DNA, 137 bp, Homo sapiens; identical to SEQ ID NO: 260873
  chr9:132411887-132412024
  hypo

SEQ ID NO: 407332 - DNA, 37 bp, Homo sapiens; identical to SEQ ID NO: 260874
  chr9:132412333-132412370
  hypo

SEQ ID NO: 407333 - DNA, 42 bp, Homo sapiens; identical to SEQ ID NO: 260875
  chr9:132448117-132448159
  hypo

SEQ ID NO: 407334 - DNA, 84 bp, Homo sapiens; identical to SEQ ID NO: 260876
  chr9:132451960-132452044
  hypo

SEQ ID NO: 407335 - DNA, 209 bp, Homo sapiens; identical to SEQ ID NO: 260878
  chr9:132495391-132495600
  hypo

SEQ ID NO: 407336 - DNA, 96 bp, Homo sapiens; identical to SEQ ID NO: 213046
  chr9:132509434-132509530
  hypo

SEQ ID NO: 407337 - DNA, 202 bp, Homo sapiens; identical to SEQ ID NO: 260882
  chr9:132631149-132631351
  hypo

SEQ ID NO: 407338 - DNA, 202 bp, Homo sapiens; identical to SEQ ID NO: 213049
  chr9:132636600-132636802
  hypo

SEQ ID NO: 407339 - DNA, 58 bp, Homo sapiens; identical to SEQ ID NO: 213059
  chr9:132881756-132881814
  hypo

SEQ ID NO: 407340 - DNA, 63 bp, Homo sapiens; identical to SEQ ID NO: 213060
  chr9:133223968-133224031
  hypo

SEQ ID NO: 407341 - DNA, 104 bp, Homo sapiens; identical to SEQ ID NO: 260897
  chr9:133264434-133264538
  hypo

SEQ ID NO: 407342 - DNA, 309 bp, Homo sapiens; identical to SEQ ID NO: 260899
  chr9:133266378-133266687
  hypo

SEQ ID NO: 407343 - DNA, 104 bp, Homo sapiens; identical to SEQ ID NO: 213062
  chr9:133304439-133304543
  hypo

SEQ ID NO: 407344 - DNA, 235 bp, Homo sapiens; identical to SEQ ID NO: 260905
  chr9:133305757-133305992
  hypo

SEQ ID NO: 407345 - DNA, 251 bp, Homo sapiens; identical to SEQ ID NO: 260906
  chr9:133306770-133307021
  hypo

SEQ ID NO: 407346 - DNA, 43 bp, Homo sapiens; identical to SEQ ID NO: 260908
  chr9:133345459-133345502
  hypo

SEQ ID NO: 407347 - DNA, 515 bp, Homo sapiens; identical to SEQ ID NO: 260913
  chr9:133426643-133427158
  hypo

SEQ ID NO: 407348 - DNA, 39 bp, Homo sapiens; identical to SEQ ID NO: 260914
  chr9:133433441-133433480
  hypo

SEQ ID NO: 407349 - DNA, 331 bp, Homo sapiens; identical to SEQ ID NO: 260918
  chr9:133527218-133527549
  hypo

SEQ ID NO: 407350 - DNA, 33 bp, Homo sapiens; identical to SEQ ID NO: 260919
  chr9:133580976-133581009
  hypo

SEQ ID NO: 407351 - DNA, 88 bp, Homo sapiens; identical to SEQ ID NO: 260920
  chr9:133583814-133583902
  hypo

SEQ ID NO: 407352 - DNA, 120 bp, Homo sapiens; identical to SEQ ID NO: 213065
  chr9:133585240-133585360
  hypo

SEQ ID NO: 407353 - DNA, 69 bp, Homo sapiens; identical to SEQ ID NO: 386097
  chr9:133593031-133593100
  hypo

SEQ ID NO: 407354 - DNA, 40 bp, Homo sapiens; identical to SEQ ID NO: 213067
  chr9:133606663-133606703
  hypo

SEQ ID NO: 407355 - DNA, 82 bp, Homo sapiens; identical to SEQ ID NO: 213068
  chr9:133609268-133609350
  hypo

SEQ ID NO: 407356 - DNA, 34 bp, Homo sapiens; identical to SEQ ID NO: 260927
  chr9:133755899-133755933
  hypo

SEQ ID NO: 407357 - DNA, 120 bp, Homo sapiens; identical to SEQ ID NO: 311442
  chr9:133773572-133773692
  hypo

SEQ ID NO: 407358 - DNA, 211 bp, Homo sapiens; identical to SEQ ID NO: 260935
  chr9:133802158-133802369
  hypo

SEQ ID NO: 407359 - DNA, 107 bp, Homo sapiens; identical to SEQ ID NO: 213076
  chr9:133911551-133911658
  hypo

SEQ ID NO: 407360 - DNA, 85 bp, Homo sapiens; identical to SEQ ID NO: 311450
  chr9:133911723-133911808
  hypo

SEQ ID NO: 407361 - DNA, 113 bp, Homo sapiens; identical to SEQ ID NO: 260937
  chr9:133926312-133926425
  hypo

SEQ ID NO: 407362 - DNA, 94 bp, Homo sapiens; identical to SEQ ID NO: 260943
  chr9:133982140-133982234
  hypo

SEQ ID NO: 407363 - DNA, 154 bp, Homo sapiens; identical to SEQ ID NO: 260953
  chr9:134195896-134196050
  hypo

SEQ ID NO: 407364 - DNA, 112 bp, Homo sapiens; identical to SEQ ID NO: 260954
  chr9:134200644-134200756
  hypo

SEQ ID NO: 407365 - DNA, 42 bp, Homo sapiens; identical to SEQ ID NO: 311468
  chr9:134207874-134207916
  hypo

SEQ ID NO: 407366 - DNA, 32 bp, Homo sapiens; identical to SEQ ID NO: 260956
  chr9:134279022-134279054
  hypo

SEQ ID NO: 407367 - DNA, 184 bp, Homo sapiens; identical to SEQ ID NO: 213082
  chr9:134400291-134400475
  hypo

SEQ ID NO: 407368 - DNA, 31 bp, Homo sapiens; identical to SEQ ID NO: 260960
  chr9:134509059-134509090
  hypo

SEQ ID NO: 407369 - DNA, 38 bp, Homo sapiens; identical to SEQ ID NO: 213083
  chr9:134688853-134688891
  hypo

SEQ ID NO: 407370 - DNA, 370 bp, Homo sapiens; identical to SEQ ID NO: 260962
  chr9:134731512-134731882
  hypo

SEQ ID NO: 407371 - DNA, 249 bp, Homo sapiens; identical to SEQ ID NO: 260966
  chr9:134836480-134836729
  hypo

SEQ ID NO: 407372 - DNA, 97 bp, Homo sapiens; identical to SEQ ID NO: 260969
  chr9:134929560-134929657
  hypo

SEQ ID NO: 407373 - DNA, 45 bp, Homo sapiens; identical to SEQ ID NO: 260971
  chr9:135084416-135084461
  hypo

SEQ ID NO: 407374 - DNA, 144 bp, Homo sapiens; identical to SEQ ID NO: 213091
  chr9:135196474-135196618
  hypo

SEQ ID NO: 407375 - DNA, 157 bp, Homo sapiens; identical to SEQ ID NO: 260980
  chr9:135360968-135361125
  hypo

SEQ ID NO: 407376 - DNA, 234 bp, Homo sapiens; identical to SEQ ID NO: 213095
  chr9:135384263-135384497
  hypo

SEQ ID NO: 407377 - DNA, 34 bp, Homo sapiens; identical to SEQ ID NO: 260982
  chr9:135447836-135447870
  hypo

SEQ ID NO: 407378 - DNA, 83 bp, Homo sapiens; identical to SEQ ID NO: 260983
  chr9:135479250-135479333
  hypo

SEQ ID NO: 407379 - DNA, 236 bp, Homo sapiens; identical to SEQ ID NO: 260987
  chr9:135520063-135520299
  hypo

SEQ ID NO: 407380 - DNA, 112 bp, Homo sapiens; identical to SEQ ID NO: 260989
  chr9:135537995-135538107
  hypo

SEQ ID NO: 407381 - DNA, 245 bp, Homo sapiens; identical to SEQ ID NO: 260990
  chr9:135538541-135538786
  hypo

SEQ ID NO: 407382 - DNA, 334 bp, Homo sapiens; identical to SEQ ID NO: 260993
  chr9:135600616-135600950
  hypo

SEQ ID NO: 407383 - DNA, 153 bp, Homo sapiens; identical to SEQ ID NO: 213098
  chr9:135624734-135624887
  hypo

SEQ ID NO: 407384 - DNA, 203 bp, Homo sapiens; identical to SEQ ID NO: 213100
  chr9:135626043-135626246
  hypo

SEQ ID NO: 407385 - DNA, 387 bp, Homo sapiens; identical to SEQ ID NO: 261000
  chr9:135712695-135713082
  hypo

SEQ ID NO: 407386 - DNA, 45 bp, Homo sapiens; identical to SEQ ID NO: 261001
  chr9:135714354-135714399
  hypo

SEQ ID NO: 407387 - DNA, 138 bp, Homo sapiens; identical to SEQ ID NO: 261013
  chr9:135922416-135922554
  hypo

SEQ ID NO: 407388 - DNA, 45 bp, Homo sapiens; identical to SEQ ID NO: 213108
  chr9:135962412-135962457
  hypo

SEQ ID NO: 407389 - DNA, 126 bp, Homo sapiens; identical to SEQ ID NO: 261018
  chr9:135979097-135979223
  hypo

SEQ ID NO: 407390 - DNA, 39 bp, Homo sapiens; identical to SEQ ID NO: 261023
  chr9:136375448-136375487
  hypo

SEQ ID NO: 407391 - DNA, 313 bp, Homo sapiens; identical to SEQ ID NO: 261026
  chr9:136377539-136377852
  hypo

SEQ ID NO: 407392 - DNA, 226 bp, Homo sapiens; identical to SEQ ID NO: 311542
  chr9:136378203-136378429
  hypo

SEQ ID NO: 407393 - DNA, 50 bp, Homo sapiens; identical to SEQ ID NO: 311543
  chr9:136378519-136378569
  hypo

SEQ ID NO: 407394 - DNA, 176 bp, Homo sapiens; identical to SEQ ID NO: 213114
  chr9:136382777-136382953
  hypo

SEQ ID NO: 407395 - DNA, 41 bp, Homo sapiens; identical to SEQ ID NO: 213120
  chr9:136501758-136501799
  hypo

SEQ ID NO: 407396 - DNA, 495 bp, Homo sapiens; identical to SEQ ID NO: 261043
  chr9:136537810-136538305
  hypo

SEQ ID NO: 407397 - DNA, 210 bp, Homo sapiens; identical to SEQ ID NO: 261045
  chr9:136549274-136549484
  hypo

SEQ ID NO: 407398 - DNA, 81 bp, Homo sapiens; identical to SEQ ID NO: 261049
  chr9:136575502-136575583
  hypo

SEQ ID NO: 407399 - DNA, 133 bp, Homo sapiens; identical to SEQ ID NO: 261050
  chr9:136575613-136575746
  hypo

SEQ ID NO: 407400 - DNA, 155 bp, Homo sapiens; identical to SEQ ID NO: 261051
  chr9:136575776-136575931
  hypo

SEQ ID NO: 407401 - DNA, 103 bp, Homo sapiens; identical to SEQ ID NO: 261054
  chr9:136621773-136621876
  hypo

SEQ ID NO: 407402 - DNA, 74 bp, Homo sapiens; identical to SEQ ID NO: 213121
  chr9:136641169-136641243
  hypo

SEQ ID NO: 407403 - DNA, 172 bp, Homo sapiens; identical to SEQ ID NO: 213122
  chr9:136648156-136648328
  hypo

SEQ ID NO: 407404 - DNA, 135 bp, Homo sapiens; identical to SEQ ID NO: 261058
  chr9:136649606-136649741
  hypo

SEQ ID NO: 407405 - DNA, 208 bp, Homo sapiens; identical to SEQ ID NO: 213123
  chr9:136651136-136651344
  hypo

SEQ ID NO: 407406 - DNA, 344 bp, Homo sapiens; identical to SEQ ID NO: 261065
  chr9:136669406-136669750
  hypo

SEQ ID NO: 407407 - DNA, 153 bp, Homo sapiens; identical to SEQ ID NO: 261066
  chr9:136670534-136670687
  hypo

SEQ ID NO: 407408 - DNA, 179 bp, Homo sapiens; identical to SEQ ID NO: 261069
  chr9:136676092-136676271
  hypo

SEQ ID NO: 407409 - DNA, 510 bp, Homo sapiens; identical to SEQ ID NO: 261073
  chr9:136689993-136690503
  hypo

SEQ ID NO: 407410 - DNA, 236 bp, Homo sapiens; identical to SEQ ID NO: 261075
  chr9:136693624-136693860
  hypo

SEQ ID NO: 407411 - DNA, 174 bp, Homo sapiens; identical to SEQ ID NO: 213133
  chr9:136699684-136699858
  hypo

SEQ ID NO: 407412 - DNA, 308 bp, Homo sapiens; identical to SEQ ID NO: 261079
  chr9:136714185-136714493
  hypo

SEQ ID NO: 407413 - DNA, 434 bp, Homo sapiens; identical to SEQ ID NO: 261081
  chr9:136722069-136722503
  hypo

SEQ ID NO: 407414 - DNA, 179 bp, Homo sapiens; identical to SEQ ID NO: 213137
  chr9:136723290-136723469
  hypo

SEQ ID NO: 407415 - DNA, 47 bp, Homo sapiens; identical to SEQ ID NO: 261086
  chr9:136729989-136730036
  hypo

SEQ ID NO: 407416 - DNA, 455 bp, Homo sapiens; identical to SEQ ID NO: 261089
  chr9:136733334-136733789
  hypo

SEQ ID NO: 407417 - DNA, 114 bp, Homo sapiens; identical to SEQ ID NO: 261091
  chr9:136739160-136739274
  hypo

SEQ ID NO: 407418 - DNA, 47 bp, Homo sapiens; identical to SEQ ID NO: 213143
  chr9:136743950-136743997
  hypo

SEQ ID NO: 407419 - DNA, 59 bp, Homo sapiens; identical to SEQ ID NO: 261099
  chr9:136763773-136763832
  hypo

SEQ ID NO: 407420 - DNA, 39 bp, Homo sapiens; identical to SEQ ID NO: 261104
  chr9:136786010-136786049
  hypo

SEQ ID NO: 407421 - DNA, 193 bp, Homo sapiens; identical to SEQ ID NO: 261105
  chr9:136795959-136796152
  hypo

SEQ ID NO: 407422 - DNA, 138 bp, Homo sapiens; identical to SEQ ID NO: 261108
  chr9:136834267-136834405
  hypo

SEQ ID NO: 407423 - DNA, 281 bp, Homo sapiens; identical to SEQ ID NO: 261110
  chr9:136836266-136836547
  hypo

SEQ ID NO: 407424 - DNA, 196 bp, Homo sapiens; identical to SEQ ID NO: 261111
  chr9:136852629-136852825
  hypo

SEQ ID NO: 407425 - DNA, 191 bp, Homo sapiens; identical to SEQ ID NO: 213151
  chr9:136905412-136905603
  hypo

SEQ ID NO: 407426 - DNA, 230 bp, Homo sapiens; identical to SEQ ID NO: 261114
  chr9:136920306-136920536
  hypo

SEQ ID NO: 407427 - DNA, 44 bp, Homo sapiens; identical to SEQ ID NO: 261118
  chr9:137280523-137280567
  hypo

SEQ ID NO: 407428 - DNA, 64 bp, Homo sapiens; identical to SEQ ID NO: 311636
  chr9:137280948-137281012
  hypo

SEQ ID NO: 407429 - DNA, 217 bp, Homo sapiens; identical to SEQ ID NO: 261120
  chr9:137281713-137281930
  hypo

SEQ ID NO: 407430 - DNA, 182 bp, Homo sapiens; identical to SEQ ID NO: 261121
  chr9:137282423-137282605
  hypo

SEQ ID NO: 407431 - DNA, 82 bp, Homo sapiens; identical to SEQ ID NO: 261124
  chr9:137314810-137314892
  hypo

SEQ ID NO: 407432 - DNA, 34 bp, Homo sapiens; identical to SEQ ID NO: 213152
  chr9:137330715-137330749
  hypo

SEQ ID NO: 407433 - DNA, 60 bp, Homo sapiens; identical to SEQ ID NO: 261126
  chr9:137352256-137352316
  hypo

SEQ ID NO: 407434 - DNA, 250 bp, Homo sapiens; identical to SEQ ID NO: 261127
  chr9:137360364-137360614
  hypo

SEQ ID NO: 407435 - DNA, 140 bp, Homo sapiens; identical to SEQ ID NO: 261131
  chr9:137474607-137474747
  hypo

SEQ ID NO: 407436 - DNA, 99 bp, Homo sapiens; identical to SEQ ID NO: 261132
  chr9:137497208-137497307
  hypo

SEQ ID NO: 407437 - DNA, 264 bp, Homo sapiens; identical to SEQ ID NO: 261133
  chr9:137515857-137516121
  hypo

SEQ ID NO: 407438 - DNA, 81 bp, Homo sapiens; identical to SEQ ID NO: 311653
  chr9:137575945-137576026
  hypo

SEQ ID NO: 407439 - DNA, 132 bp, Homo sapiens; identical to SEQ ID NO: 261136
  chr9:137580163-137580295
  hypo

SEQ ID NO: 407440 - DNA, 106 bp, Homo sapiens; identical to SEQ ID NO: 261138
  chr9:137601996-137602102
  hypo

SEQ ID NO: 407441 - DNA, 253 bp, Homo sapiens; identical to SEQ ID NO: 261144
  chr9:137622810-137623063
  hypo

SEQ ID NO: 407442 - DNA, 109 bp, Homo sapiens; identical to SEQ ID NO: 261146
  chr9:137632038-137632147
  hypo

SEQ ID NO: 407443 - DNA, 40 bp, Homo sapiens; identical to SEQ ID NO: 213155
  chr9:137709404-137709444
  hypo

SEQ ID NO: 407444 - DNA, 227 bp, Homo sapiens; identical to SEQ ID NO: 261157
  chr9:137709949-137710176
  hypo

SEQ ID NO: 407445 - DNA, 79 bp, Homo sapiens; identical to SEQ ID NO: 261158
  chr9:137710620-137710699
  hypo

SEQ ID NO: 407446 - DNA, 90 bp, Homo sapiens; identical to SEQ ID NO: 261159
  chr9:137716485-137716575
  hypo

SEQ ID NO: 407447 - DNA, 82 bp, Homo sapiens; identical to SEQ ID NO: 261165
  chr9:137926909-137926991
  hypo

SEQ ID NO: 407448 - DNA, 186 bp, Homo sapiens; identical to SEQ ID NO: 261167
  chr9:138060951-138061137
  hypo

SEQ ID NO: 407449 - DNA, 37 bp, Homo sapiens; identical to SEQ ID NO: 213158
  chr9:138106859-138106896
  hypo

SEQ ID NO: 407450 - DNA, 43 bp, Homo sapiens; identical to SEQ ID NO: 261173
  chr9:138150429-138150472
  hypo

SEQ ID NO: 407451 - DNA, 109 bp, Homo sapiens; identical to SEQ ID NO: 261175
  chr9:138163500-138163609
  hypo

SEQ ID NO: 407452 - DNA, 298 bp, Homo sapiens; identical to SEQ ID NO: 311699
  chr9:138289054-138289352
  hypo

SEQ ID NO: 407453 - DNA, 177 bp, Homo sapiens; identical to SEQ ID NO: 213161
  chr9:138289790-138289967
  hypo

SEQ ID NO: 407454 - DNA, 89 bp, Homo sapiens; identical to SEQ ID NO: 213163
  chr9:138297097-138297186
  hypo

SEQ ID NO: 407455 - DNA, 42 bp, Homo sapiens; identical to SEQ ID NO: 261183
  chr9:138339188-138339230
  hypo

SEQ ID NO: 407456 - DNA, 56 bp, Homo sapiens; identical to SEQ ID NO: 311704
  chr9:138353991-138354047
  hypo

SEQ ID NO: 407457 - DNA, 42 bp, Homo sapiens; identical to SEQ ID NO: 261191
  chr9:138603672-138603714
  hypo

SEQ ID NO: 407458 - DNA, 181 bp, Homo sapiens; identical to SEQ ID NO: 311711
  chr9:138637700-138637881
  hypo

SEQ ID NO: 407459 - DNA, 39 bp, Homo sapiens; identical to SEQ ID NO: 311712
  chr9:138638049-138638088
  hypo

SEQ ID NO: 407460 - DNA, 198 bp, Homo sapiens; identical to SEQ ID NO: 213166
  chr9:138649885-138650083
  hypo

SEQ ID NO: 407461 - DNA, 206 bp, Homo sapiens; identical to SEQ ID NO: 311716
  chr9:138650227-138650433
  hypo

SEQ ID NO: 407462 - DNA, 37 bp, Homo sapiens; identical to SEQ ID NO: 213168
  chr9:138654778-138654815
  hypo

SEQ ID NO: 407463 - DNA, 203 bp, Homo sapiens; identical to SEQ ID NO: 213171
  chr9:138718007-138718210
  hypo

SEQ ID NO: 407464 - DNA, 246 bp, Homo sapiens; identical to SEQ ID NO: 261208
  chr9:138770462-138770708
  hypo

SEQ ID NO: 407465 - DNA, 77 bp, Homo sapiens; identical to SEQ ID NO: 261212
  chr9:138796491-138796568
  hypo

SEQ ID NO: 407466 - DNA, 77 bp, Homo sapiens; identical to SEQ ID NO: 213175
  chr9:138796808-138796885
  hypo

SEQ ID NO: 407467 - DNA, 40 bp, Homo sapiens; identical to SEQ ID NO: 213176
  chr9:138824557-138824597
  hypo

SEQ ID NO: 407468 - DNA, 308 bp, Homo sapiens; identical to SEQ ID NO: 213177
  chr9:138836303-138836611
  hypo

SEQ ID NO: 407469 - DNA, 60 bp, Homo sapiens; identical to SEQ ID NO: 261218
  chr9:138867841-138867901
  hypo

SEQ ID NO: 407470 - DNA, 154 bp, Homo sapiens; identical to SEQ ID NO: 261219
  chr9:138871837-138871991
  hypo

SEQ ID NO: 407471 - DNA, 51 bp, Homo sapiens; identical to SEQ ID NO: 261223
  chr9:138875479-138875530
  hypo

SEQ ID NO: 407472 - DNA, 690 bp, Homo sapiens; identical to SEQ ID NO: 261227
  chr9:138887921-138888611
  hypo

SEQ ID NO: 407473 - DNA, 55 bp, Homo sapiens; identical to SEQ ID NO: 213183
  chr9:138907131-138907186
  hypo

SEQ ID NO: 407474 - DNA, 39 bp, Homo sapiens; identical to SEQ ID NO: 261233
  chr9:138909964-138910003
  hypo

SEQ ID NO: 407475 - DNA, 184 bp, Homo sapiens; identical to SEQ ID NO: 213184
  chr9:138910983-138911167
  hypo

SEQ ID NO: 407476 - DNA, 569 bp, Homo sapiens; identical to SEQ ID NO: 261235
  chr9:138911434-138912003
  hypo

SEQ ID NO: 407477 - DNA, 31 bp, Homo sapiens; identical to SEQ ID NO: 261236
  chr9:138922161-138922192
  hypo

SEQ ID NO: 407478 - DNA, 239 bp, Homo sapiens; identical to SEQ ID NO: 261237
  chr9:138948881-138949120
  hypo

SEQ ID NO: 407479 - DNA, 432 bp, Homo sapiens; identical to SEQ ID NO: 261238
  chr9:138950492-138950924
  hypo

SEQ ID NO: 407480 - DNA, 85 bp, Homo sapiens; identical to SEQ ID NO: 261239
  chr9:138954964-138955049
  hypo

SEQ ID NO: 407481 - DNA, 36 bp, Homo sapiens; identical to SEQ ID NO: 213187
  chr9:138970475-138970511
  hypo

SEQ ID NO: 407482 - DNA, 172 bp, Homo sapiens; identical to SEQ ID NO: 261241
  chr9:138974809-138974981
  hypo

SEQ ID NO: 407483 - DNA, 192 bp, Homo sapiens; identical to SEQ ID NO: 261242
  chr9:138975400-138975592
  hypo

SEQ ID NO: 407484 - DNA, 258 bp, Homo sapiens; identical to SEQ ID NO: 261243
  chr9:138976374-138976632
  hypo

SEQ ID NO: 407485 - DNA, 212 bp, Homo sapiens; identical to SEQ ID NO: 261244
  chr9:138979354-138979566
  hypo

SEQ ID NO: 407486 - DNA, 122 bp, Homo sapiens; identical to SEQ ID NO: 261246
  chr9:139006538-139006660
  hypo

SEQ ID NO: 407487 - DNA, 184 bp, Homo sapiens; identical to SEQ ID NO: 261249
  chr9:139041469-139041653
  hypo

SEQ ID NO: 407488 - DNA, 59 bp, Homo sapiens; identical to SEQ ID NO: 261250
  chr9:139043908-139043967
  hypo

SEQ ID NO: 407489 - DNA, 814 bp, Homo sapiens; identical to SEQ ID NO: 213192
  chr9:139051193-139052007
  hypo

SEQ ID NO: 407490 - DNA, 70 bp, Homo sapiens; identical to SEQ ID NO: 261256
  chr9:139071634-139071704
  hypo

SEQ ID NO: 407491 - DNA, 207 bp, Homo sapiens; identical to SEQ ID NO: 213195
  chr9:139079780-139079987
  hypo

SEQ ID NO: 407492 - DNA, 105 bp, Homo sapiens; identical to SEQ ID NO: 213196
  chr9:139101084-139101189
  hypo

SEQ ID NO: 407493 - DNA, 34 bp, Homo sapiens; identical to SEQ ID NO: 213197
  chr9:139103914-139103948
  hypo

SEQ ID NO: 407494 - DNA, 52 bp, Homo sapiens; identical to SEQ ID NO: 311785
  chr9:139114399-139114451
  hypo

SEQ ID NO: 407495 - DNA, 848 bp, Homo sapiens; identical to SEQ ID NO: 311786
  chr9:139114481-139115329
  hypo

SEQ ID NO: 407496 - DNA, 138 bp, Homo sapiens; identical to SEQ ID NO: 261266
  chr9:139121427-139121565
  hypo

SEQ ID NO: 407497 - DNA, 80 bp, Homo sapiens; identical to SEQ ID NO: 213208
  chr9:139264125-139264205
  hypo

SEQ ID NO: 407498 - DNA, 34 bp, Homo sapiens; identical to SEQ ID NO: 213210
  chr9:139272165-139272199
  hypo

SEQ ID NO: 407499 - DNA, 148 bp, Homo sapiens; identical to SEQ ID NO: 213212
  chr9:139300480-139300628
  hypo

SEQ ID NO: 407500 - DNA, 289 bp, Homo sapiens; identical to SEQ ID NO: 261277
  chr9:139302051-139302340
  hypo

SEQ ID NO: 407501 - DNA, 489 bp, Homo sapiens; identical to SEQ ID NO: 261280
  chr9:139330350-139330839
  hypo

SEQ ID NO: 407502 - DNA, 365 bp, Homo sapiens; identical to SEQ ID NO: 213217
  chr9:139345460-139345825
  hypo

SEQ ID NO: 407503 - DNA, 249 bp, Homo sapiens; identical to SEQ ID NO: 261285
  chr9:139360042-139360291
  hypo

SEQ ID NO: 407504 - DNA, 80 bp, Homo sapiens; identical to SEQ ID NO: 311815
  chr9:139367958-139368038
  hypo

SEQ ID NO: 407505 - DNA, 76 bp, Homo sapiens; identical to SEQ ID NO: 261294
  chr9:139389075-139389151
  hypo

SEQ ID NO: 407506 - DNA, 104 bp, Homo sapiens; identical to SEQ ID NO: 261300
  chr9:139490202-139490306
  hypo

SEQ ID NO: 407507 - DNA, 92 bp, Homo sapiens; identical to SEQ ID NO: 261308
  chr9:139571844-139571936
  hypo

SEQ ID NO: 407508 - DNA, 105 bp, Homo sapiens; identical to SEQ ID NO: 223731
  chr9:139580674-139580779
  hypo

SEQ ID NO: 407509 - DNA, 321 bp, Homo sapiens; identical to SEQ ID NO: 213233
  chr9:139585994-139586315
  hypo

SEQ ID NO: 407510 - DNA, 243 bp, Homo sapiens; identical to SEQ ID NO: 286857
  chr9:139606720-139606963
  hypo

SEQ ID NO: 407511 - DNA, 474 bp, Homo sapiens; identical to SEQ ID NO: 261314
  chr9:139617709-139618183
  hypo

SEQ ID NO: 407512 - DNA, 60 bp, Homo sapiens; identical to SEQ ID NO: 311851
  chr9:139638538-139638598
  hypo

SEQ ID NO: 407513 - DNA, 100 bp, Homo sapiens; identical to SEQ ID NO: 261324
  chr9:139724685-139724785
  hypo

SEQ ID NO: 407514 - DNA, 434 bp, Homo sapiens; identical to SEQ ID NO: 311861
  chr9:139735098-139735532
  hypo

SEQ ID NO: 407515 - DNA, 41 bp, Homo sapiens; identical to SEQ ID NO: 261330
  chr9:139782896-139782937
  hypo

SEQ ID NO: 407516 - DNA, 139 bp, Homo sapiens; identical to SEQ ID NO: 261335
  chr9:139803483-139803622
  hypo

SEQ ID NO: 407517 - DNA, 142 bp, Homo sapiens; identical to SEQ ID NO: 213245
  chr9:139814740-139814882
  hypo

SEQ ID NO: 407518 - DNA, 69 bp, Homo sapiens; identical to SEQ ID NO: 261343
  chr9:139822247-139822316
  hypo

SEQ ID NO: 407519 - DNA, 92 bp, Homo sapiens
  chr9:139847558-139847650
  hypo
gccatgggccctgtcccagcacaggcagcttcatgactctgcctgccaatgaccaaacccagctggggagtatacaaaaaagtgtgggcagc

SEQ ID NO: 407520 - DNA, 54 bp, Homo sapiens; identical to SEQ ID NO: 213252
  chr9:139903847-139903901
  hypo

SEQ ID NO: 407521 - DNA, 97 bp, Homo sapiens; identical to SEQ ID NO: 261354
  chr9:139906300-139906397
  hypo

SEQ ID NO: 407522 - DNA, 712 bp, Homo sapiens; identical to SEQ ID NO: 213254
  chr9:139934675-139935387
  hypo

SEQ ID NO: 407523 - DNA, 265 bp, Homo sapiens; identical to SEQ ID NO: 261360
  chr9:139990642-139990907
  hypo

SEQ ID NO: 407524 - DNA, 150 bp, Homo sapiens; identical to SEQ ID NO: 261368
  chr9:140106339-140106489
  hypo

SEQ ID NO: 407525 - DNA, 347 bp, Homo sapiens; identical to SEQ ID NO: 261372
  chr9:140125871-140126218
  hypo

SEQ ID NO: 407526 - DNA, 46 bp, Homo sapiens; identical to SEQ ID NO: 213258
  chr9:140137588-140137634
  hypo

SEQ ID NO: 407527 - DNA, 72 bp, Homo sapiens; identical to SEQ ID NO: 261376
  chr9:140140640-140140712
  hypo

SEQ ID NO: 407528 - DNA, 168 bp, Homo sapiens; identical to SEQ ID NO: 213259
  chr9:140157484-140157652
  hypo

SEQ ID NO: 407529 - DNA, 290 bp, Homo sapiens; identical to SEQ ID NO: 398280
  chr9:140196196-140196486
  hypo

SEQ ID NO: 407530 - DNA, 155 bp, Homo sapiens; identical to SEQ ID NO: 213265
  chr9:140198185-140198340
  hypo

SEQ ID NO: 407531 - DNA, 208 bp, Homo sapiens; identical to SEQ ID NO: 261383
  chr9:140206332-140206540
  hypo

SEQ ID NO: 407532 - DNA, 108 bp, Homo sapiens; identical to SEQ ID NO: 311924
  chr9:140208418-140208526
  hypo

SEQ ID NO: 407533 - DNA, 426 bp, Homo sapiens; identical to SEQ ID NO: 311925
  chr9:140208564-140208990
  hypo

SEQ ID NO: 407534 - DNA, 68 bp, Homo sapiens; identical to SEQ ID NO: 213266
  chr9:140216162-140216230
  hypo

SEQ ID NO: 407535 - DNA, 102 bp, Homo sapiens; identical to SEQ ID NO: 213267
  chr9:140216260-140216362
  hypo

SEQ ID NO: 407536 - DNA, 32 bp, Homo sapiens; identical to SEQ ID NO: 261386
  chr9:140216846-140216878
  hypo

SEQ ID NO: 407537 - DNA, 65 bp, Homo sapiens; identical to SEQ ID NO: 311936
  chr9:140273999-140274064
  hypo

SEQ ID NO: 407538 - DNA, 354 bp, Homo sapiens; identical to SEQ ID NO: 311937
  chr9:140274262-140274616
  hypo

SEQ ID NO: 407539 - DNA, 236 bp, Homo sapiens; identical to SEQ ID NO: 311939
  chr9:140325645-140325881
  hypo

SEQ ID NO: 407540 - DNA, 259 bp, Homo sapiens; identical to SEQ ID NO: 311943
  chr9:140351846-140352105
  hypo

SEQ ID NO: 407541 - DNA, 180 bp, Homo sapiens; identical to SEQ ID NO: 213274
  chr9:140352153-140352333
  hypo

SEQ ID NO: 407542 - DNA, 625 bp, Homo sapiens; identical to SEQ ID NO: 261401
  chr9:140358867-140359492
  hypo

SEQ ID NO: 407543 - DNA, 37 bp, Homo sapiens; identical to SEQ ID NO: 261408
  chr9:140418788-140418825
  hypo

SEQ ID NO: 407544 - DNA, 387 bp, Homo sapiens; identical to SEQ ID NO: 223741
  chr9:140445746-140446133
  hypo

SEQ ID NO: 407545 - DNA, 122 bp, Homo sapiens; identical to SEQ ID NO: 201948
  chr9:140473437-140473559
  hypo

SEQ ID NO: 407546 - DNA, 42 bp, Homo sapiens; identical to SEQ ID NO: 213286
  chr9:140576167-140576209
  hypo

SEQ ID NO: 407547 - DNA, 700 bp, Homo sapiens; identical to SEQ ID NO: 213288
  chr9:140587006-140587706
  hypo

SEQ ID NO: 407548 - DNA, 333 bp, Homo sapiens; identical to SEQ ID NO: 261416
  chr9:140592377-140592710
  hypo

SEQ ID NO: 407549 - DNA, 544 bp, Homo sapiens; identical to SEQ ID NO: 213291
  chr9:140606073-140606617
  hypo

SEQ ID NO: 407550 - DNA, 151 bp, Homo sapiens; identical to SEQ ID NO: 261419
  chr9:140612587-140612738
  hypo

SEQ ID NO: 407551 - DNA, 381 bp, Homo sapiens; identical to SEQ ID NO: 213293
  chr9:140615063-140615444
  hypo

SEQ ID NO: 407552 - DNA, 79 bp, Homo sapiens; identical to SEQ ID NO: 213294
  chr9:140615492-140615571
  hypo

SEQ ID NO: 407553 - DNA, 861 bp, Homo sapiens; identical to SEQ ID NO: 261422
  chr9:140620043-140620904
  hypo

SEQ ID NO: 407554 - DNA, 328 bp, Homo sapiens; identical to SEQ ID NO: 261423
  chr9:140622680-140623008
  hypo

SEQ ID NO: 407555 - DNA, 40 bp, Homo sapiens; identical to SEQ ID NO: 213299
  chr9:140633524-140633564
  hypo

SEQ ID NO: 407556 - DNA, 208 bp, Homo sapiens; identical to SEQ ID NO: 261426
  chr9:140636513-140636721
  hypo

SEQ ID NO: 407557 - DNA, 674 bp, Homo sapiens; identical to SEQ ID NO: 213302
  chr9:140653937-140654611
  hypo

SEQ ID NO: 407558 - DNA, 188 bp, Homo sapiens; identical to SEQ ID NO: 311987
  chr9:140664660-140664848
  hypo

SEQ ID NO: 407559 - DNA, 88 bp, Homo sapiens; identical to SEQ ID NO: 213305
  chr9:140680232-140680320
  hypo

SEQ ID NO: 407560 - DNA, 177 bp, Homo sapiens; identical to SEQ ID NO: 311989
  chr9:140680365-140680542
  hypo

SEQ ID NO: 407561 - DNA, 106 bp, Homo sapiens; identical to SEQ ID NO: 261436
  chr9:140691709-140691815
  hypo

SEQ ID NO: 407562 - DNA, 257 bp, Homo sapiens; identical to SEQ ID NO: 261439
  chr9:140697268-140697525
  hypo

SEQ ID NO: 407563 - DNA, 456 bp, Homo sapiens; identical to SEQ ID NO: 261452
  chr9:141015968-141016424
  hypo

SEQ ID NO: 407564 - DNA, 206 bp, Homo sapiens; identical to SEQ ID NO: 213319
  chr9:141069527-141069733
  hypo

SEQ ID NO: 407565 - DNA, 74 bp, Homo sapiens; identical to SEQ ID NO: 261459
  chr10:397174-397248
  hypo

SEQ ID NO: 407566 - DNA, 123 bp, Homo sapiens; identical to SEQ ID NO: 261460
  chr10:415397-415520
  hypo

SEQ ID NO: 407567 - DNA, 85 bp, Homo sapiens; identical to SEQ ID NO: 261461
  chr10:416218-416303
  hypo

SEQ ID NO: 407568 - DNA, 44 bp, Homo sapiens; identical to SEQ ID NO: 261464
  chr10:463657-463701
  hypo

SEQ ID NO: 407569 - DNA, 158 bp, Homo sapiens; identical to SEQ ID NO: 213328
  chr10:545443-545601
  hypo

SEQ ID NO: 407570 - DNA, 180 bp, Homo sapiens; identical to SEQ ID NO: 261472
  chr10:603006-603186
  hypo

SEQ ID NO: 407571 - DNA, 335 bp, Homo sapiens; identical to SEQ ID NO: 261473
  chr10:606109-606444
  hypo

SEQ ID NO: 407572 - DNA, 219 bp, Homo sapiens; identical to SEQ ID NO: 213331
  chr10:669947-670166
  hypo

SEQ ID NO: 407573 - DNA, 217 bp, Homo sapiens; identical to SEQ ID NO: 261479
  chr10:673213-673430
  hypo

SEQ ID NO: 407574 - DNA, 92 bp, Homo sapiens; identical to SEQ ID NO: 312041
  chr10:673704-673796
  hypo

SEQ ID NO: 407575 - DNA, 213 bp, Homo sapiens; identical to SEQ ID NO: 213333
  chr10:679150-679363
  hypo

SEQ ID NO: 407576 - DNA, 105 bp, Homo sapiens; identical to SEQ ID NO: 213334
  chr10:679402-679507
  hypo

SEQ ID NO: 407577 - DNA, 40 bp, Homo sapiens; identical to SEQ ID NO: 213335
  chr10:685212-685252
  hypo

SEQ ID NO: 407578 - DNA, 90 bp, Homo sapiens; identical to SEQ ID NO: 213336
  chr10:685282-685372
  hypo

SEQ ID NO: 407579 - DNA, 79 bp, Homo sapiens; identical to SEQ ID NO: 261492
  chr10:818533-818612
  hypo

SEQ ID NO: 407580 - DNA, 194 bp, Homo sapiens; identical to SEQ ID NO: 213343
  chr10:863715-863909
  hypo

SEQ ID NO: 407581 - DNA, 108 bp, Homo sapiens; identical to SEQ ID NO: 213347
  chr10:986578-986686
  hypo

SEQ ID NO: 407582 - DNA, 45 bp, Homo sapiens; identical to SEQ ID NO: 261507
  chr10:1031930-1031975
  hypo

SEQ ID NO: 407583 - DNA, 210 bp, Homo sapiens; identical to SEQ ID NO: 261511
  chr10:1106060-1106270
  hypo

SEQ ID NO: 407584 - DNA, 90 bp, Homo sapiens; identical to SEQ ID NO: 213351
  chr10:1148461-1148551
  hypo

SEQ ID NO: 407585 - DNA, 55 bp, Homo sapiens; identical to SEQ ID NO: 261516
  chr10:1163782-1163837
  hypo

SEQ ID NO: 407586 - DNA, 308 bp, Homo sapiens; identical to SEQ ID NO: 261521
  chr10:1219203-1219511
  hypo

SEQ ID NO: 407587 - DNA, 137 bp, Homo sapiens; identical to SEQ ID NO: 261523
  chr10:1230982-1231119
  hypo

SEQ ID NO: 407588 - DNA, 38 bp, Homo sapiens; identical to SEQ ID NO: 312086
  chr10:1233052-1233090
  hypo

SEQ ID NO: 407589 - DNA, 81 bp, Homo sapiens; identical to SEQ ID NO: 312087
  chr10:1233240-1233321
  hypo

SEQ ID NO: 407590 - DNA, 235 bp, Homo sapiens; identical to SEQ ID NO: 213357
  chr10:1252355-1252590
  hypo

SEQ ID NO: 407591 - DNA, 128 bp, Homo sapiens; identical to SEQ ID NO: 213358
  chr10:1252620-1252748
  hypo

SEQ ID NO: 407592 - DNA, 363 bp, Homo sapiens; identical to SEQ ID NO: 213359
  chr10:1260018-1260381
  hypo

SEQ ID NO: 407593 - DNA, 117 bp, Homo sapiens; identical to SEQ ID NO: 213360
  chr10:1260416-1260533
  hypo

SEQ ID NO: 407594 - DNA, 724 bp, Homo sapiens; identical to SEQ ID NO: 261532
  chr10:1283790-1284514
  hypo

SEQ ID NO: 407595 - DNA, 211 bp, Homo sapiens; identical to SEQ ID NO: 261533
  chr10:1286699-1286910
  hypo

SEQ ID NO: 407596 - DNA, 389 bp, Homo sapiens; identical to SEQ ID NO: 261547
  chr10:1574918-1575307
  hypo

SEQ ID NO: 407597 - DNA, 96 bp, Homo sapiens; identical to SEQ ID NO: 261549
  chr10:1607155-1607251
  hypo

SEQ ID NO: 407598 - DNA, 187 bp, Homo sapiens; identical to SEQ ID NO: 261552
  chr10:1701552-1701739
  hypo

SEQ ID NO: 407599 - DNA, 67 bp, Homo sapiens; identical to SEQ ID NO: 261556
  chr10:1814098-1814165
  hypo

SEQ ID NO: 407600 - DNA, 169 bp, Homo sapiens; identical to SEQ ID NO: 261557
  chr10:1828704-1828873
  hypo

SEQ ID NO: 407601 - DNA, 107 bp, Homo sapiens; identical to SEQ ID NO: 213371
  chr10:1994802-1994909
  hypo

SEQ ID NO: 407602 - DNA, 190 bp, Homo sapiens; identical to SEQ ID NO: 312132
  chr10:1995298-1995488
  hypo

SEQ ID NO: 407603 - DNA, 63 bp, Homo sapiens; identical to SEQ ID NO: 261563
  chr10:2140551-2140614
  hypo

SEQ ID NO: 407604 - DNA, 79 bp, Homo sapiens; identical to SEQ ID NO: 261565
  chr10:2364622-2364701
  hypo

SEQ ID NO: 407605 - DNA, 185 bp, Homo sapiens; identical to SEQ ID NO: 213375
  chr10:2610008-2610193
  hypo

SEQ ID NO: 407606 - DNA, 221 bp, Homo sapiens; identical to SEQ ID NO: 213376
  chr10:2620065-2620286
  hypo

SEQ ID NO: 407607 - DNA, 64 bp, Homo sapiens; identical to SEQ ID NO: 213377
  chr10:2620526-2620590
  hypo

SEQ ID NO: 407608 - DNA, 42 bp, Homo sapiens; identical to SEQ ID NO: 261570
  chr10:2782246-2782288
  hypo

SEQ ID NO: 407609 - DNA, 110 bp, Homo sapiens; identical to SEQ ID NO: 261572
  chr10:2936339-2936449
  hypo

SEQ ID NO: 407610 - DNA, 54 bp, Homo sapiens; identical to SEQ ID NO: 261575
  chr10:3146043-3146097
  hypo

SEQ ID NO: 407611 - DNA, 275 bp, Homo sapiens; identical to SEQ ID NO: 261576
  chr10:3150860-3151135
  hypo

SEQ ID NO: 407612 - DNA, 55 bp, Homo sapiens; identical to SEQ ID NO: 261582
  chr10:3171106-3171161
  hypo

SEQ ID NO: 407613 - DNA, 39 bp, Homo sapiens; identical to SEQ ID NO: 213389
  chr10:3192934-3192973
  hypo

SEQ ID NO: 407614 - DNA, 81 bp, Homo sapiens; identical to SEQ ID NO: 261591
  chr10:3206323-3206404
  hypo

SEQ ID NO: 407615 - DNA, 69 bp, Homo sapiens; identical to SEQ ID NO: 261596
  chr10:3284260-3284329
  hypo

SEQ ID NO: 407616 - DNA, 46 bp, Homo sapiens; identical to SEQ ID NO: 261597
  chr10:3285012-3285058
  hypo

SEQ ID NO: 407617 - DNA, 52 bp, Homo sapiens; identical to SEQ ID NO: 261602
  chr10:3365239-3365291
  hypo

SEQ ID NO: 407618 - DNA, 50 bp, Homo sapiens; identical to SEQ ID NO: 261603
  chr10:3438497-3438547
  hypo

SEQ ID NO: 407619 - DNA, 230 bp, Homo sapiens; identical to SEQ ID NO: 261604
  chr10:3512565-3512795
  hypo

SEQ ID NO: 407620 - DNA, 122 bp, Homo sapiens; identical to SEQ ID NO: 261610
  chr10:3712903-3713025
  hypo

SEQ ID NO: 407621 - DNA, 197 bp, Homo sapiens; identical to SEQ ID NO: 261611
  chr10:3862733-3862930
  hypo

SEQ ID NO: 407622 - DNA, 138 bp, Homo sapiens; identical to SEQ ID NO: 261614
  chr10:4191045-4191183
  hypo

SEQ ID NO: 407623 - DNA, 160 bp, Homo sapiens; identical to SEQ ID NO: 261616
  chr10:4867812-4867972
  hypo

SEQ ID NO: 407624 - DNA, 37 bp, Homo sapiens; identical to SEQ ID NO: 261617
  chr10:4872906-4872943
  hypo

SEQ ID NO: 407625 - DNA, 175 bp, Homo sapiens; identical to SEQ ID NO: 261622
  chr10:5527430-5527605
  hypo

SEQ ID NO: 407626 - DNA, 182 bp, Homo sapiens; identical to SEQ ID NO: 261625
  chr10:5535380-5535562
  hypo

SEQ ID NO: 407627 - DNA, 138 bp, Homo sapiens; identical to SEQ ID NO: 261626
  chr10:5536521-5536659
  hypo

SEQ ID NO: 407628 - DNA, 102 bp, Homo sapiens; identical to SEQ ID NO: 261627
  chr10:5537076-5537178
  hypo

SEQ ID NO: 407629 - DNA, 64 bp, Homo sapiens; identical to SEQ ID NO: 312206
  chr10:5551897-5551961
  hypo

SEQ ID NO: 407630 - DNA, 215 bp, Homo sapiens; identical to SEQ ID NO: 312207
  chr10:5566908-5567123
  hypo

SEQ ID NO: 407631 - DNA, 326 bp, Homo sapiens; identical to SEQ ID NO: 213408
  chr10:5567210-5567536
  hypo

SEQ ID NO: 407632 - DNA, 103 bp, Homo sapiens; identical to SEQ ID NO: 213409
  chr10:5567566-5567669
  hypo

SEQ ID NO: 407633 - DNA, 189 bp, Homo sapiens; identical to SEQ ID NO: 261634
  chr10:5574191-5574380
  hypo

SEQ ID NO: 407634 - DNA, 40 bp, Homo sapiens; identical to SEQ ID NO: 261638
  chr10:5680699-5680739
  hypo

SEQ ID NO: 407635 - DNA, 36 bp, Homo sapiens; identical to SEQ ID NO: 213413
  chr10:5796177-5796213
  hypo

SEQ ID NO: 407636 - DNA, 82 bp, Homo sapiens; identical to SEQ ID NO: 213415
  chr10:5863290-5863372
  hypo

SEQ ID NO: 407637 - DNA, 78 bp, Homo sapiens; identical to SEQ ID NO: 261647
  chr10:5902471-5902549
  hypo

SEQ ID NO: 407638 - DNA, 631 bp, Homo sapiens; identical to SEQ ID NO: 213417
  chr10:5953029-5953660
  hypo

SEQ ID NO: 407639 - DNA, 168 bp, Homo sapiens; identical to SEQ ID NO: 213419
  chr10:5962672-5962840
  hypo

SEQ ID NO: 407640 - DNA, 138 bp, Homo sapiens; identical to SEQ ID NO: 261652
  chr10:5979160-5979298
  hypo

SEQ ID NO: 407641 - DNA, 103 bp, Homo sapiens; identical to SEQ ID NO: 312232
  chr10:6024478-6024581
  hypo

SEQ ID NO: 407642 - DNA, 62 bp, Homo sapiens; identical to SEQ ID NO: 261657
  chr10:6055609-6055671
  hypo

SEQ ID NO: 407643 - DNA, 150 bp, Homo sapiens; identical to SEQ ID NO: 261658
  chr10:6065692-6065842
  hypo

SEQ ID NO: 407644 - DNA, 46 bp, Homo sapiens; identical to SEQ ID NO: 261660
  chr10:6089449-6089495
  hypo

SEQ ID NO: 407645 - DNA, 256 bp, Homo sapiens; identical to SEQ ID NO: 261662
  chr10:6151972-6152228
  hypo

SEQ ID NO: 407646 - DNA, 264 bp, Homo sapiens; identical to SEQ ID NO: 261666
  chr10:6211184-6211448
  hypo

SEQ ID NO: 407647 - DNA, 207 bp, Homo sapiens; identical to SEQ ID NO: 213423
  chr10:6531176-6531383
  hypo

SEQ ID NO: 407648 - DNA, 82 bp, Homo sapiens; identical to SEQ ID NO: 261670
  chr10:6547162-6547244
  hypo

SEQ ID NO: 407649 - DNA, 218 bp, Homo sapiens; identical to SEQ ID NO: 261671
  chr10:6578876-6579094
  hypo

SEQ ID NO: 407650 - DNA, 44 bp, Homo sapiens; identical to SEQ ID NO: 213424
  chr10:6647894-6647938
  hypo

SEQ ID NO: 407651 - DNA, 195 bp, Homo sapiens; identical to SEQ ID NO: 261674
  chr10:6852535-6852730
  hypo

SEQ ID NO: 407652 - DNA, 70 bp, Homo sapiens; identical to SEQ ID NO: 261677
  chr10:6975463-6975533
  hypo

SEQ ID NO: 407653 - DNA, 42 bp, Homo sapiens; identical to SEQ ID NO: 261679
  chr10:7083317-7083359
  hypo

SEQ ID NO: 407654 - DNA, 82 bp, Homo sapiens; identical to SEQ ID NO: 261680
  chr10:7138552-7138634
  hypo

SEQ ID NO: 407655 - DNA, 37 bp, Homo sapiens; identical to SEQ ID NO: 312257
  chr10:7156189-7156226
  hypo

SEQ ID NO: 407656 - DNA, 264 bp, Homo sapiens; identical to SEQ ID NO: 261685
  chr10:7204511-7204775
  hypo

SEQ ID NO: 407657 - DNA, 296 bp, Homo sapiens; identical to SEQ ID NO: 312262
  chr10:7205787-7206083
  hypo

SEQ ID NO: 407658 - DNA, 84 bp, Homo sapiens; identical to SEQ ID NO: 261687
  chr10:7209416-7209500
  hypo

SEQ ID NO: 407659 - DNA, 95 bp, Homo sapiens; identical to SEQ ID NO: 261692
  chr10:7235749-7235844
  hypo

SEQ ID NO: 407660 - DNA, 318 bp, Homo sapiens; identical to SEQ ID NO: 312267
  chr10:7236245-7236563
  hypo

SEQ ID NO: 407661 - DNA, 138 bp, Homo sapiens; identical to SEQ ID NO: 261694
  chr10:7238964-7239102
  hypo

SEQ ID NO: 407662 - DNA, 152 bp, Homo sapiens; identical to SEQ ID NO: 213430
  chr10:7290536-7290688
  hypo

SEQ ID NO: 407663 - DNA, 105 bp, Homo sapiens; identical to SEQ ID NO: 261704
  chr10:7304466-7304571
  hypo

SEQ ID NO: 407664 - DNA, 78 bp, Homo sapiens; identical to SEQ ID NO: 261708
  chr10:7367242-7367320
  hypo

SEQ ID NO: 407665 - DNA, 133 bp, Homo sapiens; identical to SEQ ID NO: 261709
  chr10:7381915-7382048
  hypo

SEQ ID NO: 407666 - DNA, 138 bp, Homo sapiens; identical to SEQ ID NO: 261715
  chr10:7426168-7426306
  hypo

SEQ ID NO: 407667 - DNA, 36 bp, Homo sapiens; identical to SEQ ID NO: 261717
  chr10:7442791-7442827
  hypo

SEQ ID NO: 407668 - DNA, 32 bp, Homo sapiens; identical to SEQ ID NO: 261730
  chr10:8024999-8025031
  hypo

SEQ ID NO: 407669 - DNA, 48 bp, Homo sapiens; identical to SEQ ID NO: 312314
  chr10:8556148-8556196
  hypo

SEQ ID NO: 407670 - DNA, 43 bp, Homo sapiens; identical to SEQ ID NO: 261737
  chr10:9141899-9141942
  hypo

SEQ ID NO: 407671 - DNA, 444 bp, Homo sapiens; identical to SEQ ID NO: 261738
  chr10:9919835-9920279
  hypo

SEQ ID NO: 407672 - DNA, 41 bp, Homo sapiens; identical to SEQ ID NO: 213446
  chr10:11184680-11184721
  hypo

SEQ ID NO: 407673 - DNA, 121 bp, Homo sapiens; identical to SEQ ID NO: 312332
  chr10:11381580-11381701
  hypo

SEQ ID NO: 407674 - DNA, 228 bp, Homo sapiens; identical to SEQ ID NO: 213451
  chr10:11381731-11381959
  hypo

SEQ ID NO: 407675 - DNA, 174 bp, Homo sapiens; identical to SEQ ID NO: 213452
  chr10:11472668-11472842
  hypo

SEQ ID NO: 407676 - DNA, 169 bp, Homo sapiens; identical to SEQ ID NO: 261760
  chr10:11761571-11761740
  hypo

SEQ ID NO: 407677 - DNA, 78 bp, Homo sapiens; identical to SEQ ID NO: 261761
  chr10:11830180-11830258
  hypo

SEQ ID NO: 407678 - DNA, 75 bp, Homo sapiens; identical to SEQ ID NO: 261763
  chr10:11847448-11847523
  hypo

SEQ ID NO: 407679 - DNA, 870 bp, Homo sapiens; identical to SEQ ID NO: 286943
  chr10:11865127-11865997
  hypo

SEQ ID NO: 407680 - DNA, 193 bp, Homo sapiens; identical to SEQ ID NO: 213454
  chr10:11870932-11871125
  hypo

SEQ ID NO: 407681 - DNA, 35 bp, Homo sapiens; identical to SEQ ID NO: 261765
  chr10:11878794-11878829
  hypo

SEQ ID NO: 407682 - DNA, 46 bp, Homo sapiens; identical to SEQ ID NO: 213456
  chr10:11898439-11898485
  hypo

SEQ ID NO: 407683 - DNA, 78 bp, Homo sapiens; identical to SEQ ID NO: 261768
  chr10:11911399-11911477
  hypo

SEQ ID NO: 407684 - DNA, 32 bp, Homo sapiens; identical to SEQ ID NO: 261769
  chr10:11914996-11915028
  hypo

SEQ ID NO: 407685 - DNA, 151 bp, Homo sapiens; identical to SEQ ID NO: 261771
  chr10:11923032-11923183
  hypo

SEQ ID NO: 407686 - DNA, 50 bp, Homo sapiens; identical to SEQ ID NO: 261772
  chr10:11941266-11941316
  hypo

SEQ ID NO: 407687 - DNA, 158 bp, Homo sapiens; identical to SEQ ID NO: 261773
  chr10:11952452-11952610
  hypo

SEQ ID NO: 407688 - DNA, 181 bp, Homo sapiens; identical to SEQ ID NO: 261774
  chr10:11972974-11973155
  hypo

SEQ ID NO: 407689 - DNA, 42 bp, Homo sapiens; identical to SEQ ID NO: 261779
  chr10:12346516-12346558
  hypo

SEQ ID NO: 407690 - DNA, 134 bp, Homo sapiens; identical to SEQ ID NO: 312366
  chr10:12531842-12531976
  hypo

SEQ ID NO: 407691 - DNA, 147 bp, Homo sapiens; identical to SEQ ID NO: 261785
  chr10:12548783-12548930
  hypo

SEQ ID NO: 407692 - DNA, 59 bp, Homo sapiens; identical to SEQ ID NO: 261786
  chr10:12553847-12553906
  hypo

SEQ ID NO: 407693 - DNA, 117 bp, Homo sapiens; identical to SEQ ID NO: 261787
  chr10:12554254-12554371
  hypo

SEQ ID NO: 407694 - DNA, 54 bp, Homo sapiens; identical to SEQ ID NO: 261789
  chr10:12595203-12595257
  hypo

SEQ ID NO: 407695 - DNA, 177 bp, Homo sapiens; identical to SEQ ID NO: 213462
  chr10:12707812-12707989
  hypo

SEQ ID NO: 407696 - DNA, 181 bp, Homo sapiens; identical to SEQ ID NO: 261794
  chr10:12768863-12769044
  hypo

SEQ ID NO: 407697 - DNA, 90 bp, Homo sapiens; identical to SEQ ID NO: 261798
  chr10:12875520-12875610
  hypo

SEQ ID NO: 407698 - DNA, 95 bp, Homo sapiens; identical to SEQ ID NO: 261799
  chr10:12940456-12940551
  hypo

SEQ ID NO: 407699 - DNA, 201 bp, Homo sapiens; identical to SEQ ID NO: 213465
  chr10:13263527-13263728
  hypo

SEQ ID NO: 407700 - DNA, 241 bp, Homo sapiens; identical to SEQ ID NO: 201985
  chr10:13341387-13341628
  hypo

SEQ ID NO: 407701 - DNA, 172 bp, Homo sapiens; identical to SEQ ID NO: 261807
  chr10:13480544-13480716
  hypo

SEQ ID NO: 407702 - DNA, 35 bp, Homo sapiens; identical to SEQ ID NO: 261808
  chr10:13516622-13516657
  hypo

SEQ ID NO: 407703 - DNA, 78 bp, Homo sapiens; identical to SEQ ID NO: 261814
  chr10:13725168-13725246
  hypo

SEQ ID NO: 407704 - DNA, 263 bp, Homo sapiens; identical to SEQ ID NO: 261815
  chr10:13735188-13735451
  hypo

SEQ ID NO: 407705 - DNA, 333 bp, Homo sapiens; identical to SEQ ID NO: 261818
  chr10:13769492-13769825
  hypo

SEQ ID NO: 407706 - DNA, 32 bp, Homo sapiens; identical to SEQ ID NO: 261819
  chr10:13769885-13769917
  hypo

SEQ ID NO: 407707 - DNA, 138 bp, Homo sapiens; identical to SEQ ID NO: 261822
  chr10:14195996-14196134
  hypo

SEQ ID NO: 407708 - DNA, 81 bp, Homo sapiens; identical to SEQ ID NO: 261833
  chr10:15009625-15009706
  hypo

SEQ ID NO: 407709 - DNA, 101 bp, Homo sapiens; identical to SEQ ID NO: 261834
  chr10:15022595-15022696
  hypo

SEQ ID NO: 407710 - DNA, 167 bp, Homo sapiens; identical to SEQ ID NO: 261836
  chr10:15154756-15154923
  hypo

SEQ ID NO: 407711 - DNA, 35 bp, Homo sapiens; identical to SEQ ID NO: 261840
  chr10:15261860-15261895
  hypo

SEQ ID NO: 407712 - DNA, 291 bp, Homo sapiens; identical to SEQ ID NO: 261841
  chr10:15264100-15264391
  hypo

SEQ ID NO: 407713 - DNA, 83 bp, Homo sapiens; identical to SEQ ID NO: 261842
  chr10:15273618-15273701
  hypo

SEQ ID NO: 407714 - DNA, 60 bp, Homo sapiens; identical to SEQ ID NO: 213478
  chr10:15345843-15345903
  hypo

SEQ ID NO: 407715 - DNA, 40 bp, Homo sapiens; identical to SEQ ID NO: 261844
  chr10:15355003-15355043
  hypo

SEQ ID NO: 407716 - DNA, 167 bp, Homo sapiens; identical to SEQ ID NO: 213482
  chr10:16715632-16715799
  hypo

SEQ ID NO: 407717 - DNA, 47 bp, Homo sapiens; identical to SEQ ID NO: 261852
  chr10:16866978-16867025
  hypo

SEQ ID NO: 407718 - DNA, 32 bp, Homo sapiens; identical to SEQ ID NO: 261853
  chr10:16915427-16915459
  hypo

SEQ ID NO: 407719 - DNA, 50 bp, Homo sapiens; identical to SEQ ID NO: 261854
  chr10:16916365-16916415
  hypo

SEQ ID NO: 407720 - DNA, 97 bp, Homo sapiens; identical to SEQ ID NO: 261855
  chr10:16955825-16955922
  hypo

SEQ ID NO: 407721 - DNA, 39 bp, Homo sapiens; identical to SEQ ID NO: 386155
  chr10:17157575-17157614
  hypo

SEQ ID NO: 407722 - DNA, 32 bp, Homo sapiens; identical to SEQ ID NO: 261859
  chr10:17331810-17331842
  hypo

SEQ ID NO: 407723 - DNA, 39 bp, Homo sapiens; identical to SEQ ID NO: 261861
  chr10:17378259-17378298
  hypo

SEQ ID NO: 407724 - DNA, 113 bp, Homo sapiens; identical to SEQ ID NO: 261863
  chr10:17507084-17507197
  hypo

SEQ ID NO: 407725 - DNA, 44 bp, Homo sapiens; identical to SEQ ID NO: 261865
  chr10:17512861-17512905
  hypo

SEQ ID NO: 407726 - DNA, 190 bp, Homo sapiens; identical to SEQ ID NO: 261867
  chr10:18579867-18580057
  hypo

SEQ ID NO: 407727 - DNA, 146 bp, Homo sapiens; identical to SEQ ID NO: 261869
  chr10:20538375-20538521
  hypo

SEQ ID NO: 407728 - DNA, 34 bp, Homo sapiens; identical to SEQ ID NO: 261870
  chr10:21606054-21606088
  hypo

SEQ ID NO: 407729 - DNA, 38 bp, Homo sapiens; identical to SEQ ID NO: 261871
  chr10:21623890-21623928
  hypo

SEQ ID NO: 407730 - DNA, 153 bp, Homo sapiens; identical to SEQ ID NO: 223775
  chr10:21805907-21806060
  hypo

SEQ ID NO: 407731 - DNA, 60 bp, Homo sapiens; identical to SEQ ID NO: 261875
  chr10:22004067-22004127
  hypo

SEQ ID NO: 407732 - DNA, 240 bp, Homo sapiens; identical to SEQ ID NO: 286993
  chr10:22032716-22032956
  hypo

SEQ ID NO: 407733 - DNA, 36 bp, Homo sapiens; identical to SEQ ID NO: 261884
  chr10:22477766-22477802
  hypo

SEQ ID NO: 407734 - DNA, 966 bp, Homo sapiens; identical to SEQ ID NO: 287001
  chr10:22614079-22615045
  hypo

SEQ ID NO: 407735 - DNA, 161 bp, Homo sapiens; identical to SEQ ID NO: 261893
  chr10:23294127-23294288
  hypo

SEQ ID NO: 407736 - DNA, 77 bp, Homo sapiens; identical to SEQ ID NO: 261894
  chr10:24839342-24839419
  hypo

SEQ ID NO: 407737 - DNA, 37 bp, Homo sapiens; identical to SEQ ID NO: 261898
  chr10:24966120-24966157
  hypo

SEQ ID NO: 407738 - DNA, 96 bp, Homo sapiens; identical to SEQ ID NO: 213501
  chr10:24988619-24988715
  hypo

SEQ ID NO: 407739 - DNA, 180 bp, Homo sapiens; identical to SEQ ID NO: 223789
  chr10:25011198-25011378
  hypo

SEQ ID NO: 407740 - DNA, 112 bp, Homo sapiens; identical to SEQ ID NO: 287016
  chr10:25463329-25463441
  hypo

SEQ ID NO: 407741 - DNA, 33 bp, Homo sapiens; identical to SEQ ID NO: 261902
  chr10:26819343-26819376
  hypo

SEQ ID NO: 407742 - DNA, 289 bp, Homo sapiens; identical to SEQ ID NO: 261904
  chr10:26868625-26868914
  hypo

SEQ ID NO: 407743 - DNA, 275 bp, Homo sapiens; identical to SEQ ID NO: 213505
  chr10:27020878-27021153
  hypo

SEQ ID NO: 407744 - DNA, 89 bp, Homo sapiens; identical to SEQ ID NO: 213506
  chr10:27089296-27089385
  hypo

SEQ ID NO: 407745 - DNA, 36 bp, Homo sapiens; identical to SEQ ID NO: 213507
  chr10:27096989-27097025
  hypo

SEQ ID NO: 407746 - DNA, 42 bp, Homo sapiens; identical to SEQ ID NO: 261910
  chr10:27233078-27233120
  hypo

SEQ ID NO: 407747 - DNA, 281 bp, Homo sapiens; identical to SEQ ID NO: 261911
  chr10:27233410-27233691
  hypo

SEQ ID NO: 407748 - DNA, 102 bp, Homo sapiens; identical to SEQ ID NO: 213510
  chr10:27478219-27478321
  hypo

SEQ ID NO: 407749 - DNA, 59 bp, Homo sapiens; identical to SEQ ID NO: 213513
  chr10:28824511-28824570
  hypo

SEQ ID NO: 407750 - DNA, 87 bp, Homo sapiens; identical to SEQ ID NO: 261921
  chr10:28833066-28833153
  hypo

SEQ ID NO: 407751 - DNA, 420 bp, Homo sapiens; identical to SEQ ID NO: 287037
  chr10:28965881-28966301
  hypo

SEQ ID NO: 407752 - DNA, 86 bp, Homo sapiens; identical to SEQ ID NO: 213516
  chr10:29300155-29300241
  hypo

SEQ ID NO: 407753 - DNA, 78 bp, Homo sapiens; identical to SEQ ID NO: 202031
  chr10:29738055-29738133
  hypo

SEQ ID NO: 407754 - DNA, 171 bp, Homo sapiens; identical to SEQ ID NO: 261932
  chr10:29805522-29805693
  hypo

SEQ ID NO: 407755 - DNA, 145 bp, Homo sapiens; identical to SEQ ID NO: 261933
  chr10:29815841-29815986
  hypo

SEQ ID NO: 407756 - DNA, 158 bp, Homo sapiens; identical to SEQ ID NO: 261934
  chr10:29821666-29821824
  hypo

SEQ ID NO: 407757 - DNA, 207 bp, Homo sapiens; identical to SEQ ID NO: 261937
  chr10:29884472-29884679
  hypo

SEQ ID NO: 407758 - DNA, 43 bp, Homo sapiens; identical to SEQ ID NO: 261938
  chr10:30270177-30270220
  hypo

SEQ ID NO: 407759 - DNA, 47 bp, Homo sapiens; identical to SEQ ID NO: 261939
  chr10:30280769-30280816
  hypo

SEQ ID NO: 407760 - DNA, 240 bp, Homo sapiens; identical to SEQ ID NO: 261941
  chr10:30454426-30454666
  hypo

SEQ ID NO: 407761 - DNA, 34 bp, Homo sapiens; identical to SEQ ID NO: 261943
  chr10:30692599-30692633
  hypo

SEQ ID NO: 407762 - DNA, 81 bp, Homo sapiens; identical to SEQ ID NO: 261945
  chr10:30798127-30798208
  hypo

SEQ ID NO: 407763 - DNA, 34 bp, Homo sapiens; identical to SEQ ID NO: 213520
  chr10:30981747-30981781
  hypo

SEQ ID NO: 407764 - DNA, 42 bp, Homo sapiens; identical to SEQ ID NO: 261950
  chr10:31389890-31389932
  hypo

SEQ ID NO: 407765 - DNA, 186 bp, Homo sapiens; identical to SEQ ID NO: 261953
  chr10:32038297-32038483
  hypo

SEQ ID NO: 407766 - DNA, 33 bp, Homo sapiens; identical to SEQ ID NO: 261954
  chr10:32080305-32080338
  hypo

SEQ ID NO: 407767 - DNA, 155 bp, Homo sapiens; identical to SEQ ID NO: 213524
  chr10:32205149-32205304
  hypo

SEQ ID NO: 407768 - DNA, 36 bp, Homo sapiens; identical to SEQ ID NO: 213525
  chr10:32333609-32333645
  hypo

SEQ ID NO: 407769 - DNA, 47 bp, Homo sapiens; identical to SEQ ID NO: 261964
  chr10:34151694-34151741
  hypo

SEQ ID NO: 407770 - DNA, 182 bp, Homo sapiens; identical to SEQ ID NO: 213528
  chr10:34276837-34277019
  hypo

SEQ ID NO: 407771 - DNA, 76 bp, Homo sapiens; identical to SEQ ID NO: 261967
  chr10:34345647-34345723
  hypo

SEQ ID NO: 407772 - DNA, 160 bp, Homo sapiens; identical to SEQ ID NO: 261968
  chr10:34472412-34472572
  hypo

SEQ ID NO: 407773 - DNA, 167 bp, Homo sapiens; identical to SEQ ID NO: 261970
  chr10:34558597-34558764
  hypo

SEQ ID NO: 407774 - DNA, 78 bp, Homo sapiens; identical to SEQ ID NO: 261971
  chr10:34845266-34845344
  hypo

SEQ ID NO: 407775 - DNA, 77 bp, Homo sapiens; identical to SEQ ID NO: 261972
  chr10:34845584-34845661
  hypo

SEQ ID NO: 407776 - DNA, 35 bp, Homo sapiens; identical to SEQ ID NO: 384311
  chr10:35105213-35105248
  hypo

SEQ ID NO: 407777 - DNA, 31 bp, Homo sapiens; identical to SEQ ID NO: 261975
  chr10:35243813-35243844
  hypo

SEQ ID NO: 407778 - DNA, 81 bp, Homo sapiens; identical to SEQ ID NO: 213531
  chr10:35254596-35254677
  hypo

SEQ ID NO: 407779 - DNA, 34 bp, Homo sapiens; identical to SEQ ID NO: 213533
  chr10:35621534-35621568
  hypo

SEQ ID NO: 407780 - DNA, 33 bp, Homo sapiens; identical to SEQ ID NO: 261980
  chr10:35621808-35621841
  hypo

SEQ ID NO: 407781 - DNA, 198 bp, Homo sapiens; identical to SEQ ID NO: 213534
  chr10:36639323-36639521
  hypo

SEQ ID NO: 407782 - DNA, 34 bp, Homo sapiens; identical to SEQ ID NO: 213536
  chr10:43131976-43132010
  hypo

SEQ ID NO: 407783 - DNA, 300 bp, Homo sapiens; identical to SEQ ID NO: 261984
  chr10:43185746-43186046
  hypo

SEQ ID NO: 407784 - DNA, 285 bp, Homo sapiens; identical to SEQ ID NO: 261985
  chr10:43186655-43186940
  hypo

SEQ ID NO: 407785 - DNA, 49 bp, Homo sapiens; identical to SEQ ID NO: 261987
  chr10:43584498-43584547
  hypo

SEQ ID NO: 407786 - DNA, 77 bp, Homo sapiens; identical to SEQ ID NO: 213538
  chr10:43605405-43605482
  hypo

SEQ ID NO: 407787 - DNA, 53 bp, Homo sapiens; identical to SEQ ID NO: 261991
  chr10:43626346-43626399
  hypo

SEQ ID NO: 407788 - DNA, 168 bp, Homo sapiens; identical to SEQ ID NO: 261992
  chr10:43626884-43627052
  hypo

SEQ ID NO: 407789 - DNA, 239 bp, Homo sapiens; identical to SEQ ID NO: 261993
  chr10:43701717-43701956
  hypo

SEQ ID NO: 407790 - DNA, 326 bp, Homo sapiens; identical to SEQ ID NO: 261995
  chr10:43872976-43873302
  hypo

SEQ ID NO: 407791 - DNA, 57 bp, Homo sapiens
  chr10:44163603-44163660
  hypo
gaccccttcttggtgaattctgccaagttagtcacttctcagtcatgttaattaatt

SEQ ID NO: 407792 - DNA, 34 bp, Homo sapiens; identical to SEQ ID NO: 262005
  chr10:45986735-45986769
  hypo

SEQ ID NO: 407793 - DNA, 50 bp, Homo sapiens; identical to SEQ ID NO: 202066
  chr10:49514479-49514529
  hypo

SEQ ID NO: 407794 - DNA, 40 bp, Homo sapiens; identical to SEQ ID NO: 213549
  chr10:49592262-49592302
  hypo

SEQ ID NO: 407795 - DNA, 283 bp, Homo sapiens; identical to SEQ ID NO: 262011
  chr10:49658306-49658589
  hypo

SEQ ID NO: 407796 - DNA, 153 bp, Homo sapiens; identical to SEQ ID NO: 262012
  chr10:50099026-50099179
  hypo

SEQ ID NO: 407797 - DNA, 42 bp, Homo sapiens; identical to SEQ ID NO: 262013
  chr10:50158397-50158439
  hypo

SEQ ID NO: 407798 - DNA, 118 bp, Homo sapiens; identical to SEQ ID NO: 262014
  chr10:50178208-50178326
  hypo

SEQ ID NO: 407799 - DNA, 86 bp, Homo sapiens; identical to SEQ ID NO: 213550
  chr10:50340033-50340119
  hypo

SEQ ID NO: 407800 - DNA, 39 bp, Homo sapiens; identical to SEQ ID NO: 213551
  chr10:50340149-50340188
  hypo

SEQ ID NO: 407801 - DNA, 313 bp, Homo sapiens; identical to SEQ ID NO: 262020
  chr10:50854541-50854854
  hypo

SEQ ID NO: 407802 - DNA, 52 bp, Homo sapiens; identical to SEQ ID NO: 262026
  chr10:61552788-61552840
  hypo

SEQ ID NO: 407803 - DNA, 43 bp, Homo sapiens; identical to SEQ ID NO: 213563
  chr10:63669383-63669426
  hypo

SEQ ID NO: 407804 - DNA, 41 bp, Homo sapiens; identical to SEQ ID NO: 213564
  chr10:63757869-63757910
  hypo

SEQ ID NO: 407805 - DNA, 206 bp, Homo sapiens; identical to SEQ ID NO: 223828
  chr10:64028003-64028209
  hypo

SEQ ID NO: 407806 - DNA, 103 bp, Homo sapiens; identical to SEQ ID NO: 213565
  chr10:64945157-64945260
  hypo

SEQ ID NO: 407807 - DNA, 82 bp, Homo sapiens; identical to SEQ ID NO: 262033
  chr10:64997098-64997180
  hypo

SEQ ID NO: 407808 - DNA, 33 bp, Homo sapiens; identical to SEQ ID NO: 262035
  chr10:69253021-69253054
  hypo

SEQ ID NO: 407809 - DNA, 41 bp, Homo sapiens; identical to SEQ ID NO: 262036
  chr10:69578804-69578845
  hypo

SEQ ID NO: 407810 - DNA, 42 bp, Homo sapiens; identical to SEQ ID NO: 262037
  chr10:69606878-69606920
  hypo

SEQ ID NO: 407811 - DNA, 79 bp, Homo sapiens; identical to SEQ ID NO: 262038
  chr10:69646548-69646627
  hypo

SEQ ID NO: 407812 - DNA, 120 bp, Homo sapiens; identical to SEQ ID NO: 213566
  chr10:69853849-69853969
  hypo

SEQ ID NO: 407813 - DNA, 35 bp, Homo sapiens; identical to SEQ ID NO: 262045
  chr10:70472770-70472805
  hypo

SEQ ID NO: 407814 - DNA, 51 bp, Homo sapiens; identical to SEQ ID NO: 262050
  chr10:70993020-70993071
  hypo

SEQ ID NO: 407815 - DNA, 159 bp, Homo sapiens; identical to SEQ ID NO: 262051
  chr10:71007178-71007337
  hypo

SEQ ID NO: 407816 - DNA, 196 bp, Homo sapiens; identical to SEQ ID NO: 262052
  chr10:71097944-71098140
  hypo

SEQ ID NO: 407817 - DNA, 42 bp, Homo sapiens; identical to SEQ ID NO: 262055
  chr10:71144262-71144304
  hypo

SEQ ID NO: 407818 - DNA, 48 bp, Homo sapiens; identical to SEQ ID NO: 262057
  chr10:71154729-71154777
  hypo

SEQ ID NO: 407819 - DNA, 106 bp, Homo sapiens; identical to SEQ ID NO: 262060
  chr10:71218535-71218641
  hypo

SEQ ID NO: 407820 - DNA, 190 bp, Homo sapiens; identical to SEQ ID NO: 213574
  chr10:71245588-71245778
  hypo

SEQ ID NO: 407821 - DNA, 183 bp, Homo sapiens; identical to SEQ ID NO: 262065
  chr10:71703276-71703459
  hypo

SEQ ID NO: 407822 - DNA, 93 bp, Homo sapiens; identical to SEQ ID NO: 262066
  chr10:71706826-71706919
  hypo

SEQ ID NO: 407823 - DNA, 53 bp, Homo sapiens; identical to SEQ ID NO: 213576
  chr10:71871350-71871403
  hypo

SEQ ID NO: 407824 - DNA, 58 bp, Homo sapiens; identical to SEQ ID NO: 398379
  chr10:71892801-71892859
  hypo

SEQ ID NO: 407825 - DNA, 37 bp, Homo sapiens; identical to SEQ ID NO: 262073
  chr10:72503444-72503481
  hypo

SEQ ID NO: 407826 - DNA, 56 bp, Homo sapiens; identical to SEQ ID NO: 262074
  chr10:72509555-72509611
  hypo

SEQ ID NO: 407827 - DNA, 261 bp, Homo sapiens; identical to SEQ ID NO: 262075
  chr10:72695180-72695441
  hypo

SEQ ID NO: 407828 - DNA, 175 bp, Homo sapiens; identical to SEQ ID NO: 262081
  chr10:72847942-72848117
  hypo

SEQ ID NO: 407829 - DNA, 99 bp, Homo sapiens; identical to SEQ ID NO: 262083
  chr10:73036106-73036205
  hypo

SEQ ID NO: 407830 - DNA, 34 bp, Homo sapiens; identical to SEQ ID NO: 262085
  chr10:73326700-73326734
  hypo

SEQ ID NO: 407831 - DNA, 123 bp, Homo sapiens; identical to SEQ ID NO: 213584
  chr10:73455053-73455176
  hypo

SEQ ID NO: 407832 - DNA, 53 bp, Homo sapiens; identical to SEQ ID NO: 213586
  chr10:73553163-73553216
  hypo

SEQ ID NO: 407833 - DNA, 92 bp, Homo sapiens; identical to SEQ ID NO: 213587
  chr10:73574841-73574933
  hypo

SEQ ID NO: 407834 - DNA, 100 bp, Homo sapiens; identical to SEQ ID NO: 384319
  chr10:73848222-73848322
  hypo

SEQ ID NO: 407835 - DNA, 38 bp, Homo sapiens; identical to SEQ ID NO: 262096
  chr10:73929856-73929894
  hypo

SEQ ID NO: 407836 - DNA, 294 bp, Homo sapiens; identical to SEQ ID NO: 223842
  chr10:74032607-74032901
  hypo

SEQ ID NO: 407837 - DNA, 252 bp, Homo sapiens; identical to SEQ ID NO: 262105
  chr10:74684078-74684330
  hypo

SEQ ID NO: 407838 - DNA, 33 bp, Homo sapiens; identical to SEQ ID NO: 262107
  chr10:75128352-75128385
  hypo

SEQ ID NO: 407839 - DNA, 222 bp, Homo sapiens; identical to SEQ ID NO: 262108
  chr10:75184111-75184333
  hypo

SEQ ID NO: 407840 - DNA, 141 bp, Homo sapiens; identical to SEQ ID NO: 223844
  chr10:75408169-75408310
  hypo

SEQ ID NO: 407841 - DNA, 143 bp, Homo sapiens; identical to SEQ ID NO: 262112
  chr10:75491399-75491542
  hypo

SEQ ID NO: 407842 - DNA, 34 bp, Homo sapiens; identical to SEQ ID NO: 213594
  chr10:75493101-75493135
  hypo

SEQ ID NO: 407843 - DNA, 96 bp, Homo sapiens; identical to SEQ ID NO: 312743
  chr10:75832593-75832689
  hypo

SEQ ID NO: 407844 - DNA, 86 bp, Homo sapiens; identical to SEQ ID NO: 262122
  chr10:75966600-75966686
  hypo

SEQ ID NO: 407845 - DNA, 146 bp, Homo sapiens; identical to SEQ ID NO: 262128
  chr10:76588593-76588739
  hypo

SEQ ID NO: 407846 - DNA, 366 bp, Homo sapiens; identical to SEQ ID NO: 262130
  chr10:76780147-76780513
  hypo

SEQ ID NO: 407847 - DNA, 173 bp, Homo sapiens; identical to SEQ ID NO: 213599
  chr10:76796613-76796786
  hypo

SEQ ID NO: 407848 - DNA, 187 bp, Homo sapiens; identical to SEQ ID NO: 213601
  chr10:76818035-76818222
  hypo

SEQ ID NO: 407849 - DNA, 35 bp, Homo sapiens; identical to SEQ ID NO: 262135
  chr10:76845053-76845088
  hypo

SEQ ID NO: 407850 - DNA, 44 bp, Homo sapiens; identical to SEQ ID NO: 262141
  chr10:76992470-76992514
  hypo

SEQ ID NO: 407851 - DNA, 31 bp, Homo sapiens; identical to SEQ ID NO: 262143
  chr10:77003406-77003437
  hypo

SEQ ID NO: 407852 - DNA, 294 bp, Homo sapiens; identical to SEQ ID NO: 223845
  chr10:77054513-77054807
  hypo

SEQ ID NO: 407853 - DNA, 221 bp, Homo sapiens; identical to SEQ ID NO: 262146
  chr10:77794551-77794772
  hypo

SEQ ID NO: 407854 - DNA, 44 bp, Homo sapiens; identical to SEQ ID NO: 262148
  chr10:79540286-79540330
  hypo

SEQ ID NO: 407855 - DNA, 469 bp, Homo sapiens; identical to SEQ ID NO: 223850
  chr10:79686575-79687044
  hypo

SEQ ID NO: 407856 - DNA, 101 bp, Homo sapiens; identical to SEQ ID NO: 262156
  chr10:80061832-80061933
  hypo

SEQ ID NO: 407857 - DNA, 212 bp, Homo sapiens; identical to SEQ ID NO: 262158
  chr10:80540448-80540660
  hypo

SEQ ID NO: 407858 - DNA, 115 bp, Homo sapiens; identical to SEQ ID NO: 202151
  chr10:80733746-80733861
  hypo

SEQ ID NO: 407859 - DNA, 63 bp, Homo sapiens; identical to SEQ ID NO: 213610
  chr10:80739956-80740019
  hypo

SEQ ID NO: 407860 - DNA, 77 bp, Homo sapiens; identical to SEQ ID NO: 262162
  chr10:80763042-80763119
  hypo

SEQ ID NO: 407861 - DNA, 189 bp, Homo sapiens; identical to SEQ ID NO: 287268
  chr10:80830746-80830935
  hypo

SEQ ID NO: 407862 - DNA, 75 bp, Homo sapiens; identical to SEQ ID NO: 213613
  chr10:80840369-80840444
  hypo

SEQ ID NO: 407863 - DNA, 167 bp, Homo sapiens; identical to SEQ ID NO: 262170
  chr10:80879966-80880133
  hypo

SEQ ID NO: 407864 - DNA, 316 bp, Homo sapiens; identical to SEQ ID NO: 262175
  chr10:80953306-80953622
  hypo

SEQ ID NO: 407865 - DNA, 128 bp, Homo sapiens; identical to SEQ ID NO: 262176
  chr10:80954541-80954669
  hypo

SEQ ID NO: 407866 - DNA, 336 bp, Homo sapiens; identical to SEQ ID NO: 262177
  chr10:80955982-80956318
  hypo

SEQ ID NO: 407867 - DNA, 239 bp, Homo sapiens; identical to SEQ ID NO: 262180
  chr10:80961348-80961587
  hypo

SEQ ID NO: 407868 - DNA, 57 bp, Homo sapiens; identical to SEQ ID NO: 262181
  chr10:80962989-80963046
  hypo

SEQ ID NO: 407869 - DNA, 546 bp, Homo sapiens; identical to SEQ ID NO: 262182
  chr10:80966388-80966934
  hypo

SEQ ID NO: 407870 - DNA, 171 bp, Homo sapiens; identical to SEQ ID NO: 213622
  chr10:80971586-80971757
  hypo

SEQ ID NO: 407871 - DNA, 50 bp, Homo sapiens; identical to SEQ ID NO: 262188
  chr10:81020970-81021020
  hypo

SEQ ID NO: 407872 - DNA, 47 bp, Homo sapiens; identical to SEQ ID NO: 262190
  chr10:81029634-81029681
  hypo

SEQ ID NO: 407873 - DNA, 433 bp, Homo sapiens; identical to SEQ ID NO: 213630
  chr10:81036657-81037090
  hypo

SEQ ID NO: 407874 - DNA, 187 bp, Homo sapiens; identical to SEQ ID NO: 213632
  chr10:81058000-81058187
  hypo

SEQ ID NO: 407875 - DNA, 42 bp, Homo sapiens; identical to SEQ ID NO: 262201
  chr10:81072192-81072234
  hypo

SEQ ID NO: 407876 - DNA, 181 bp, Homo sapiens; identical to SEQ ID NO: 213637
  chr10:81073340-81073521
  hypo

SEQ ID NO: 407877 - DNA, 263 bp, Homo sapiens; identical to SEQ ID NO: 213639
  chr10:81145945-81146208
  hypo

SEQ ID NO: 407878 - DNA, 162 bp, Homo sapiens; identical to SEQ ID NO: 262205
  chr10:81861006-81861168
  hypo

SEQ ID NO: 407879 - DNA, 146 bp, Homo sapiens; identical to SEQ ID NO: 202156
  chr10:82213597-82213743
  hypo

SEQ ID NO: 407880 - DNA, 62 bp, Homo sapiens; identical to SEQ ID NO: 312847
  chr10:82573991-82574053
  hypo

SEQ ID NO: 407881 - DNA, 162 bp, Homo sapiens; identical to SEQ ID NO: 213643
  chr10:84618971-84619133
  hypo

SEQ ID NO: 407882 - DNA, 33 bp, Homo sapiens; identical to SEQ ID NO: 213644
  chr10:86016117-86016150
  hypo

SEQ ID NO: 407883 - DNA, 42 bp, Homo sapiens; identical to SEQ ID NO: 202161
  chr10:86088147-86088189
  hypo

SEQ ID NO: 407884 - DNA, 177 bp, Homo sapiens; identical to SEQ ID NO: 262214
  chr10:86175509-86175686
  hypo

SEQ ID NO: 407885 - DNA, 178 bp, Homo sapiens; identical to SEQ ID NO: 213646
  chr10:86306481-86306659
  hypo

SEQ ID NO: 407886 - DNA, 266 bp, Homo sapiens; identical to SEQ ID NO: 262216
  chr10:86361898-86362164
  hypo

SEQ ID NO: 407887 - DNA, 56 bp, Homo sapiens; identical to SEQ ID NO: 223859
  chr10:87493570-87493626
  hypo

SEQ ID NO: 407888 - DNA, 147 bp, Homo sapiens; identical to SEQ ID NO: 262217
  chr10:87965994-87966141
  hypo

SEQ ID NO: 407889 - DNA, 82 bp, Homo sapiens; identical to SEQ ID NO: 287290
  chr10:88224575-88224657
  hypo

SEQ ID NO: 407890 - DNA, 52 bp, Homo sapiens; identical to SEQ ID NO: 312859
  chr10:88280113-88280165
  hypo

SEQ ID NO: 407891 - DNA, 33 bp, Homo sapiens; identical to SEQ ID NO: 262222
  chr10:88286949-88286982
  hypo

SEQ ID NO: 407892 - DNA, 224 bp, Homo sapiens; identical to SEQ ID NO: 262226
  chr10:88470510-88470734
  hypo

SEQ ID NO: 407893 - DNA, 35 bp, Homo sapiens; identical to SEQ ID NO: 262227
  chr10:88587611-88587646
  hypo

SEQ ID NO: 407894 - DNA, 39 bp, Homo sapiens; identical to SEQ ID NO: 262230
  chr10:89362124-89362163
  hypo

SEQ ID NO: 407895 - DNA, 116 bp, Homo sapiens; identical to SEQ ID NO: 262231
  chr10:89892095-89892211
  hypo

SEQ ID NO: 407896 - DNA, 277 bp, Homo sapiens; identical to SEQ ID NO: 213650
  chr10:90029772-90030049
  hypo

SEQ ID NO: 407897 - DNA, 31 bp, Homo sapiens; identical to SEQ ID NO: 262233
  chr10:91589220-91589251
  hypo

SEQ ID NO: 407898 - DNA, 42 bp, Homo sapiens; identical to SEQ ID NO: 262237
  chr10:93744096-93744138
  hypo

SEQ ID NO: 407899 - DNA, 85 bp, Homo sapiens; identical to SEQ ID NO: 262240
  chr10:94156009-94156094
  hypo

SEQ ID NO: 407900 - DNA, 1229 bp, Homo sapiens; identical to SEQ ID NO: 398429
  chr10:96162374-96163603
  hypo

SEQ ID NO: 407901 - DNA, 44 bp, Homo sapiens; identical to SEQ ID NO: 213665
  chr10:97617586-97617630
  hypo

SEQ ID NO: 407902 - DNA, 95 bp, Homo sapiens; identical to SEQ ID NO: 262263
  chr10:98482590-98482685
  hypo

SEQ ID NO: 407903 - DNA, 34 bp, Homo sapiens; identical to SEQ ID NO: 262266
  chr10:98676070-98676104
  hypo

SEQ ID NO: 407904 - DNA, 251 bp, Homo sapiens; identical to SEQ ID NO: 262272
  chr10:99240758-99241009
  hypo

SEQ ID NO: 407905 - DNA, 336 bp, Homo sapiens; identical to SEQ ID NO: 223881
  chr10:99259373-99259709
  hypo

SEQ ID NO: 407906 - DNA, 191 bp, Homo sapiens; identical to SEQ ID NO: 213670
  chr10:99626199-99626390
  hypo

SEQ ID NO: 407907 - DNA, 174 bp, Homo sapiens; identical to SEQ ID NO: 213671
  chr10:100170637-100170811
  hypo

SEQ ID NO: 407908 - DNA, 426 bp, Homo sapiens; identical to SEQ ID NO: 213673
  chr10:100178510-100178936
  hypo

SEQ ID NO: 407909 - DNA, 211 bp, Homo sapiens; identical to SEQ ID NO: 262281
  chr10:100194215-100194426
  hypo

SEQ ID NO: 407910 - DNA, 264 bp, Homo sapiens; identical to SEQ ID NO: 287389
  chr10:101296800-101297064
  hypo

SEQ ID NO: 407911 - DNA, 236 bp, Homo sapiens; identical to SEQ ID NO: 287390
  chr10:101297130-101297366
  hypo

SEQ ID NO: 407912 - DNA, 239 bp, Homo sapiens; identical to SEQ ID NO: 213674
  chr10:101493074-101493313
  hypo

SEQ ID NO: 407913 - DNA, 37 bp, Homo sapiens; identical to SEQ ID NO: 262286
  chr10:101769082-101769119
  hypo

SEQ ID NO: 407914 - DNA, 262 bp, Homo sapiens; identical to SEQ ID NO: 262291
  chr10:102770159-102770421
  hypo

SEQ ID NO: 407915 - DNA, 381 bp, Homo sapiens; identical to SEQ ID NO: 287423
  chr10:102802620-102803001
  hypo

SEQ ID NO: 407916 - DNA, 120 bp, Homo sapiens; identical to SEQ ID NO: 202233
  chr10:102973524-102973644
  hypo

SEQ ID NO: 407917 - DNA, 34 bp, Homo sapiens; identical to SEQ ID NO: 262295
  chr10:103259007-103259041
  hypo

SEQ ID NO: 407918 - DNA, 73 bp, Homo sapiens; identical to SEQ ID NO: 213684
  chr10:103553397-103553470
  hypo

SEQ ID NO: 407919 - DNA, 129 bp, Homo sapiens; identical to SEQ ID NO: 262300
  chr10:103588893-103589022
  hypo

SEQ ID NO: 407920 - DNA, 61 bp, Homo sapiens; identical to SEQ ID NO: 312968
  chr10:104161594-104161655
  hypo

SEQ ID NO: 407921 - DNA, 42 bp, Homo sapiens; identical to SEQ ID NO: 262306
  chr10:104198522-104198564
  hypo

SEQ ID NO: 407922 - DNA, 34 bp, Homo sapiens; identical to SEQ ID NO: 213685
  chr10:104230570-104230604
  hypo

SEQ ID NO: 407923 - DNA, 199 bp, Homo sapiens; identical to SEQ ID NO: 213686
  chr10:104239074-104239273
  hypo

SEQ ID NO: 407924 - DNA, 129 bp, Homo sapiens; identical to SEQ ID NO: 262309
  chr10:104384282-104384411
  hypo

SEQ ID NO: 407925 - DNA, 57 bp, Homo sapiens; identical to SEQ ID NO: 262311
  chr10:104456328-104456385
  hypo

SEQ ID NO: 407926 - DNA, 85 bp, Homo sapiens; identical to SEQ ID NO: 312981
  chr10:105127076-105127161
  hypo

SEQ ID NO: 407927 - DNA, 33 bp, Homo sapiens; identical to SEQ ID NO: 213691
  chr10:105238592-105238625
  hypo

SEQ ID NO: 407928 - DNA, 321 bp, Homo sapiens; identical to SEQ ID NO: 262320
  chr10:105345023-105345344
  hypo

SEQ ID NO: 407929 - DNA, 42 bp, Homo sapiens; identical to SEQ ID NO: 262324
  chr10:105440561-105440603
  hypo

SEQ ID NO: 407930 - DNA, 38 bp, Homo sapiens; identical to SEQ ID NO: 262325
  chr10:105487458-105487496
  hypo

SEQ ID NO: 407931 - DNA, 65 bp, Homo sapiens; identical to SEQ ID NO: 262326
  chr10:105639324-105639389
  hypo

SEQ ID NO: 407932 - DNA, 33 bp, Homo sapiens; identical to SEQ ID NO: 213692
  chr10:105725850-105725883
  hypo

SEQ ID NO: 407933 - DNA, 76 bp, Homo sapiens; identical to SEQ ID NO: 262328
  chr10:106029646-106029722
  hypo

SEQ ID NO: 407934 - DNA, 75 bp, Homo sapiens; identical to SEQ ID NO: 262329
  chr10:106030047-106030122
  hypo

SEQ ID NO: 407935 - DNA, 35 bp, Homo sapiens; identical to SEQ ID NO: 262330
  chr10:106032651-106032686
  hypo

SEQ ID NO: 407936 - DNA, 55 bp, Homo sapiens; identical to SEQ ID NO: 213693
  chr10:106075696-106075751
  hypo

SEQ ID NO: 407937 - DNA, 93 bp, Homo sapiens; identical to SEQ ID NO: 262332
  chr10:106094618-106094711
  hypo

SEQ ID NO: 407938 - DNA, 102 bp, Homo sapiens; identical to SEQ ID NO: 223913
  chr10:106098946-106099048
  hypo

SEQ ID NO: 407939 - DNA, 94 bp, Homo sapiens; identical to SEQ ID NO: 262333
  chr10:106174643-106174737
  hypo

SEQ ID NO: 407940 - DNA, 32 bp, Homo sapiens; identical to SEQ ID NO: 262338
  chr10:111696450-111696482
  hypo

SEQ ID NO: 407941 - DNA, 76 bp, Homo sapiens; identical to SEQ ID NO: 202262
  chr10:112328695-112328771
  hypo

SEQ ID NO: 407942 - DNA, 39 bp, Homo sapiens; identical to SEQ ID NO: 202263
  chr10:112333464-112333503
  hypo

SEQ ID NO: 407943 - DNA, 80 bp, Homo sapiens; identical to SEQ ID NO: 202266
  chr10:112337592-112337672
  hypo

SEQ ID NO: 407944 - DNA, 81 bp, Homo sapiens; identical to SEQ ID NO: 202270
  chr10:112342319-112342400
  hypo

SEQ ID NO: 407945 - DNA, 214 bp, Homo sapiens; identical to SEQ ID NO: 202273
  chr10:112343940-112344154
  hypo

SEQ ID NO: 407946 - DNA, 387 bp, Homo sapiens; identical to SEQ ID NO: 202274
  chr10:112349362-112349749
  hypo

SEQ ID NO: 407947 - DNA, 151 bp, Homo sapiens; identical to SEQ ID NO: 202277
  chr10:112352830-112352981
  hypo

SEQ ID NO: 407948 - DNA, 153 bp, Homo sapiens; identical to SEQ ID NO: 202278
  chr10:112356155-112356308
  hypo

SEQ ID NO: 407949 - DNA, 152 bp, Homo sapiens; identical to SEQ ID NO: 202279
  chr10:112357896-112358048
  hypo

SEQ ID NO: 407950 - DNA, 159 bp, Homo sapiens; identical to SEQ ID NO: 202280
  chr10:112359411-112359570
  hypo

SEQ ID NO: 407951 - DNA, 109 bp, Homo sapiens; identical to SEQ ID NO: 202282
  chr10:112360779-112360888
  hypo

SEQ ID NO: 407952 - DNA, 542 bp, Homo sapiens; identical to SEQ ID NO: 202283
  chr10:112361394-112361936
  hypo

SEQ ID NO: 407953 - DNA, 817 bp, Homo sapiens; identical to SEQ ID NO: 202284
  chr10:112362231-112363048
  hypo

SEQ ID NO: 407954 - DNA, 404 bp, Homo sapiens; identical to SEQ ID NO: 202285
  chr10:112363988-112364392
  hypo

SEQ ID NO: 407955 - DNA, 43 bp, Homo sapiens; identical to SEQ ID NO: 262348
  chr10:112595366-112595409
  hypo

SEQ ID NO: 407956 - DNA, 35 bp, Homo sapiens; identical to SEQ ID NO: 262349
  chr10:112761502-112761537
  hypo

SEQ ID NO: 407957 - DNA, 96 bp, Homo sapiens; identical to SEQ ID NO: 262353
  chr10:114410445-114410541
  hypo

SEQ ID NO: 407958 - DNA, 232 bp, Homo sapiens; identical to SEQ ID NO: 262355
  chr10:114542054-114542286
  hypo

SEQ ID NO: 407959 - DNA, 250 bp, Homo sapiens; identical to SEQ ID NO: 262358
  chr10:114591112-114591362
  hypo

SEQ ID NO: 407960 - DNA, 33 bp, Homo sapiens; identical to SEQ ID NO: 202295
  chr10:114709864-114709897
  hypo

SEQ ID NO: 407961 - DNA, 56 bp, Homo sapiens; identical to SEQ ID NO: 223949
  chr10:114710115-114710171
  hypo

SEQ ID NO: 407962 - DNA, 262 bp, Homo sapiens; identical to SEQ ID NO: 313057
  chr10:114752107-114752369
  hypo

SEQ ID NO: 407963 - DNA, 102 bp, Homo sapiens; identical to SEQ ID NO: 213730
  chr10:114867548-114867650
  hypo

SEQ ID NO: 407964 - DNA, 138 bp, Homo sapiens; identical to SEQ ID NO: 262364
  chr10:114868048-114868186
  hypo

SEQ ID NO: 407965 - DNA, 109 bp, Homo sapiens; identical to SEQ ID NO: 262365
  chr10:114868454-114868563
  hypo

SEQ ID NO: 407966 - DNA, 41 bp, Homo sapiens; identical to SEQ ID NO: 262369
  chr10:114913258-114913299
  hypo

SEQ ID NO: 407967 - DNA, 237 bp, Homo sapiens; identical to SEQ ID NO: 262370
  chr10:114925528-114925765
  hypo

SEQ ID NO: 407968 - DNA, 83 bp, Homo sapiens; identical to SEQ ID NO: 262372
  chr10:115548281-115548364
  hypo

SEQ ID NO: 407969 - DNA, 85 bp, Homo sapiens; identical to SEQ ID NO: 313070
  chr10:115585200-115585285
  hypo

SEQ ID NO: 407970 - DNA, 112 bp, Homo sapiens; identical to SEQ ID NO: 388803
  chr10:115804427-115804539
  hypo

SEQ ID NO: 407971 - DNA, 40 bp, Homo sapiens; identical to SEQ ID NO: 388804
  chr10:115805287-115805327
  hypo

SEQ ID NO: 407972 - DNA, 92 bp, Homo sapiens; identical to SEQ ID NO: 313075
  chr10:115844855-115844947
  hypo

SEQ ID NO: 407973 - DNA, 33 bp, Homo sapiens; identical to SEQ ID NO: 213733
  chr10:115925581-115925614
  hypo

SEQ ID NO: 407974 - DNA, 95 bp, Homo sapiens; identical to SEQ ID NO: 262378
  chr10:115940180-115940275
  hypo

SEQ ID NO: 407975 - DNA, 81 bp, Homo sapiens; identical to SEQ ID NO: 213734
  chr10:116011528-116011609
  hypo

SEQ ID NO: 407976 - DNA, 105 bp, Homo sapiens; identical to SEQ ID NO: 213735
  chr10:116028357-116028462
  hypo

SEQ ID NO: 407977 - DNA, 38 bp, Homo sapiens; identical to SEQ ID NO: 262385
  chr10:116188468-116188506
  hypo

SEQ ID NO: 407978 - DNA, 95 bp, Homo sapiens; identical to SEQ ID NO: 262389
  chr10:116304716-116304811
  hypo

SEQ ID NO: 407979 - DNA, 117 bp, Homo sapiens; identical to SEQ ID NO: 313090
  chr10:116331009-116331126
  hypo

SEQ ID NO: 407980 - DNA, 74 bp, Homo sapiens; identical to SEQ ID NO: 287572
  chr10:116852172-116852246
  hypo

SEQ ID NO: 407981 - DNA, 185 bp, Homo sapiens; identical to SEQ ID NO: 398541
  chr10:116852441-116852626
  hypo

SEQ ID NO: 407982 - DNA, 33 bp, Homo sapiens; identical to SEQ ID NO: 262392
  chr10:118742173-118742206
  hypo

SEQ ID NO: 407983 - DNA, 295 bp, Homo sapiens; identical to SEQ ID NO: 388809
  chr10:118764187-118764482
  hypo

SEQ ID NO: 407984 - DNA, 141 bp, Homo sapiens; identical to SEQ ID NO: 223957
  chr10:118764980-118765121
  hypo

SEQ ID NO: 407985 - DNA, 308 bp, Homo sapiens; identical to SEQ ID NO: 202311
  chr10:119256046-119256354
  hypo

SEQ ID NO: 407986 - DNA, 75 bp, Homo sapiens; identical to SEQ ID NO: 262396
  chr10:119680912-119680987
  hypo

SEQ ID NO: 407987 - DNA, 189 bp, Homo sapiens; identical to SEQ ID NO: 262400
  chr10:120170438-120170627
  hypo

SEQ ID NO: 407988 - DNA, 418 bp, Homo sapiens; identical to SEQ ID NO: 223964
  chr10:120514800-120515218
  hypo

SEQ ID NO: 407989 - DNA, 93 bp, Homo sapiens; identical to SEQ ID NO: 213748
  chr10:120822534-120822627
  hypo

SEQ ID NO: 407990 - DNA, 35 bp, Homo sapiens; identical to SEQ ID NO: 262408
  chr10:120996576-120996611
  hypo

SEQ ID NO: 407991 - DNA, 174 bp, Homo sapiens; identical to SEQ ID NO: 262413
  chr10:121264282-121264456
  hypo

SEQ ID NO: 407992 - DNA, 80 bp, Homo sapiens; identical to SEQ ID NO: 262414
  chr10:121264730-121264810
  hypo

SEQ ID NO: 407993 - DNA, 131 bp, Homo sapiens; identical to SEQ ID NO: 213750
  chr10:121265440-121265571
  hypo

SEQ ID NO: 407994 - DNA, 174 bp, Homo sapiens; identical to SEQ ID NO: 213756
  chr10:121550361-121550535
  hypo

SEQ ID NO: 407995 - DNA, 34 bp, Homo sapiens; identical to SEQ ID NO: 213759
  chr10:123037854-123037888
  hypo

SEQ ID NO: 407996 - DNA, 77 bp, Homo sapiens; identical to SEQ ID NO: 262427
  chr10:123335738-123335815
  hypo

SEQ ID NO: 407997 - DNA, 137 bp, Homo sapiens; identical to SEQ ID NO: 262428
  chr10:123492975-123493112
  hypo

SEQ ID NO: 407998 - DNA, 103 bp, Homo sapiens; identical to SEQ ID NO: 262430
  chr10:123837325-123837428
  hypo

SEQ ID NO: 407999 - DNA, 334 bp, Homo sapiens; identical to SEQ ID NO: 262432
  chr10:123879960-123880294
  hypo

SEQ ID NO: 408000 - DNA, 237 bp, Homo sapiens; identical to SEQ ID NO: 262433
  chr10:123910181-123910418
  hypo

SEQ ID NO: 408001 - DNA, 39 bp, Homo sapiens; identical to SEQ ID NO: 213764
  chr10:123977732-123977771
  hypo

SEQ ID NO: 408002 - DNA, 87 bp, Homo sapiens; identical to SEQ ID NO: 262438
  chr10:124028462-124028549
  hypo

SEQ ID NO: 408003 - DNA, 373 bp, Homo sapiens; identical to SEQ ID NO: 398567
  chr10:124134589-124134962
  hypo

SEQ ID NO: 408004 - DNA, 189 bp, Homo sapiens; identical to SEQ ID NO: 262440
  chr10:124609891-124610080
  hypo

SEQ ID NO: 408005 - DNA, 45 bp, Homo sapiens; identical to SEQ ID NO: 213766
  chr10:124712595-124712640
  hypo

SEQ ID NO: 408006 - DNA, 120 bp, Homo sapiens; identical to SEQ ID NO: 262442
  chr10:124738944-124739064
  hypo

SEQ ID NO: 408007 - DNA, 78 bp, Homo sapiens; identical to SEQ ID NO: 262443
  chr10:124922178-124922256
  hypo

SEQ ID NO: 408008 - DNA, 31 bp, Homo sapiens; identical to SEQ ID NO: 262444
  chr10:124931354-124931385
  hypo

SEQ ID NO: 408009 - DNA, 58 bp, Homo sapiens; identical to SEQ ID NO: 262448
  chr10:125769654-125769712
  hypo

SEQ ID NO: 408010 - DNA, 80 bp, Homo sapiens; identical to SEQ ID NO: 262449
  chr10:125984183-125984263
  hypo

SEQ ID NO: 408011 - DNA, 45 bp, Homo sapiens; identical to SEQ ID NO: 262451
  chr10:126102246-126102291
  hypo

SEQ ID NO: 408012 - DNA, 81 bp, Homo sapiens; identical to SEQ ID NO: 262454
  chr10:126186174-126186255
  hypo

SEQ ID NO: 408013 - DNA, 39 bp, Homo sapiens; identical to SEQ ID NO: 313173
  chr10:126254748-126254787
  hypo

SEQ ID NO: 408014 - DNA, 240 bp, Homo sapiens; identical to SEQ ID NO: 262466
  chr10:126309753-126309993
  hypo

SEQ ID NO: 408015 - DNA, 119 bp, Homo sapiens; identical to SEQ ID NO: 262467
  chr10:126311518-126311637
  hypo

SEQ ID NO: 408016 - DNA, 184 bp, Homo sapiens; identical to SEQ ID NO: 213776
  chr10:126312314-126312498
  hypo

SEQ ID NO: 408017 - DNA, 331 bp, Homo sapiens; identical to SEQ ID NO: 262474
  chr10:126321123-126321454
  hypo

SEQ ID NO: 408018 - DNA, 328 bp, Homo sapiens; identical to SEQ ID NO: 262478
  chr10:126367644-126367972
  hypo

SEQ ID NO: 408019 - DNA, 310 bp, Homo sapiens; identical to SEQ ID NO: 213782
  chr10:126370268-126370578
  hypo

SEQ ID NO: 408020 - DNA, 256 bp, Homo sapiens; identical to SEQ ID NO: 262480
  chr10:126386075-126386331
  hypo

SEQ ID NO: 408021 - DNA, 79 bp, Homo sapiens; identical to SEQ ID NO: 262482
  chr10:126435116-126435195
  hypo

SEQ ID NO: 408022 - DNA, 238 bp, Homo sapiens; identical to SEQ ID NO: 262484
  chr10:126694641-126694879
  hypo

SEQ ID NO: 408023 - DNA, 80 bp, Homo sapiens; identical to SEQ ID NO: 262487
  chr10:126701135-126701215
  hypo

SEQ ID NO: 408024 - DNA, 105 bp, Homo sapiens; identical to SEQ ID NO: 262491
  chr10:126710674-126710779
  hypo

SEQ ID NO: 408025 - DNA, 42 bp, Homo sapiens; identical to SEQ ID NO: 262497
  chr10:126738868-126738910
  hypo

SEQ ID NO: 408026 - DNA, 89 bp, Homo sapiens; identical to SEQ ID NO: 213787
  chr10:126751063-126751152
  hypo

SEQ ID NO: 408027 - DNA, 181 bp, Homo sapiens; identical to SEQ ID NO: 262499
  chr10:126763482-126763663
  hypo

SEQ ID NO: 408028 - DNA, 92 bp, Homo sapiens; identical to SEQ ID NO: 262507
  chr10:126787572-126787664
  hypo

SEQ ID NO: 408029 - DNA, 291 bp, Homo sapiens; identical to SEQ ID NO: 262508
  chr10:126789760-126790051
  hypo

SEQ ID NO: 408030 - DNA, 50 bp, Homo sapiens; identical to SEQ ID NO: 262511
  chr10:126809817-126809867
  hypo

SEQ ID NO: 408031 - DNA, 229 bp, Homo sapiens; identical to SEQ ID NO: 262512
  chr10:126811107-126811336
  hypo

SEQ ID NO: 408032 - DNA, 120 bp, Homo sapiens; identical to SEQ ID NO: 262516
  chr10:126839532-126839652
  hypo

SEQ ID NO: 408033 - DNA, 149 bp, Homo sapiens; identical to SEQ ID NO: 262518
  chr10:127263257-127263406
  hypo

SEQ ID NO: 408034 - DNA, 274 bp, Homo sapiens; identical to SEQ ID NO: 262520
  chr10:127314344-127314618
  hypo

SEQ ID NO: 408035 - DNA, 85 bp, Homo sapiens; identical to SEQ ID NO: 262526
  chr10:127659356-127659441
  hypo

SEQ ID NO: 408036 - DNA, 34 bp, Homo sapiens; identical to SEQ ID NO: 213800
  chr10:128767590-128767624
  hypo

SEQ ID NO: 408037 - DNA, 115 bp, Homo sapiens; identical to SEQ ID NO: 262537
  chr10:128819000-128819115
  hypo

SEQ ID NO: 408038 - DNA, 89 bp, Homo sapiens; identical to SEQ ID NO: 313256
  chr10:128888487-128888576
  hypo

SEQ ID NO: 408039 - DNA, 203 bp, Homo sapiens; identical to SEQ ID NO: 262545
  chr10:128904395-128904598
  hypo

SEQ ID NO: 408040 - DNA, 62 bp, Homo sapiens; identical to SEQ ID NO: 262546
  chr10:128930828-128930890
  hypo

SEQ ID NO: 408041 - DNA, 194 bp, Homo sapiens; identical to SEQ ID NO: 262547
  chr10:128936062-128936256
  hypo

SEQ ID NO: 408042 - DNA, 418 bp, Homo sapiens; identical to SEQ ID NO: 262548
  chr10:128973759-128974177
  hypo

SEQ ID NO: 408043 - DNA, 41 bp, Homo sapiens; identical to SEQ ID NO: 262550
  chr10:129057988-129058029
  hypo

SEQ ID NO: 408044 - DNA, 91 bp, Homo sapiens; identical to SEQ ID NO: 262554
  chr10:129156702-129156793
  hypo

SEQ ID NO: 408045 - DNA, 159 bp, Homo sapiens; identical to SEQ ID NO: 262560
  chr10:129218388-129218547
  hypo

SEQ ID NO: 408046 - DNA, 196 bp, Homo sapiens; identical to SEQ ID NO: 213811
  chr10:129236892-129237088
  hypo

SEQ ID NO: 408047 - DNA, 200 bp, Homo sapiens; identical to SEQ ID NO: 213812
  chr10:129237715-129237915
  hypo

SEQ ID NO: 408048 - DNA, 205 bp, Homo sapiens; identical to SEQ ID NO: 262564
  chr10:129239688-129239893
  hypo

SEQ ID NO: 408049 - DNA, 48 bp, Homo sapiens; identical to SEQ ID NO: 213814
  chr10:129245980-129246028
  hypo

SEQ ID NO: 408050 - DNA, 90 bp, Homo sapiens; identical to SEQ ID NO: 262569
  chr10:129249788-129249878
  hypo

SEQ ID NO: 408051 - DNA, 99 bp, Homo sapiens; identical to SEQ ID NO: 262570
  chr10:129721602-129721701
  hypo

SEQ ID NO: 408052 - DNA, 52 bp, Homo sapiens; identical to SEQ ID NO: 262577
  chr10:130259851-130259903
  hypo

SEQ ID NO: 408053 - DNA, 122 bp, Homo sapiens; identical to SEQ ID NO: 262578
  chr10:130265103-130265225
  hypo

SEQ ID NO: 408054 - DNA, 40 bp, Homo sapiens; identical to SEQ ID NO: 262582
  chr10:130828604-130828644
  hypo

SEQ ID NO: 408055 - DNA, 71 bp, Homo sapiens; identical to SEQ ID NO: 262585
  chr10:131301187-131301258
  hypo

SEQ ID NO: 408056 - DNA, 191 bp, Homo sapiens; identical to SEQ ID NO: 213820
  chr10:131577565-131577756
  hypo

SEQ ID NO: 408057 - DNA, 218 bp, Homo sapiens; identical to SEQ ID NO: 313309
  chr10:131592426-131592644
  hypo

SEQ ID NO: 408058 - DNA, 54 bp, Homo sapiens; identical to SEQ ID NO: 262597
  chr10:131660294-131660348
  hypo

SEQ ID NO: 408059 - DNA, 140 bp, Homo sapiens; identical to SEQ ID NO: 262598
  chr10:131660570-131660710
  hypo

SEQ ID NO: 408060 - DNA, 86 bp, Homo sapiens; identical to SEQ ID NO: 313315
  chr10:131694682-131694768
  hypo

SEQ ID NO: 408061 - DNA, 161 bp, Homo sapiens; identical to SEQ ID NO: 80897
  chr10:131694792-131694953
  hypo

SEQ ID NO: 408062 - DNA, 120 bp, Homo sapiens; identical to SEQ ID NO: 262601
  chr10:131713787-131713907
  hypo

SEQ ID NO: 408063 - DNA, 132 bp, Homo sapiens; identical to SEQ ID NO: 262603
  chr10:131811606-131811738
  hypo

SEQ ID NO: 408064 - DNA, 152 bp, Homo sapiens; identical to SEQ ID NO: 262605
  chr10:131826126-131826278
  hypo

SEQ ID NO: 408065 - DNA, 128 bp, Homo sapiens; identical to SEQ ID NO: 313322
  chr10:131937484-131937612
  hypo

SEQ ID NO: 408066 - DNA, 73 bp, Homo sapiens; identical to SEQ ID NO: 262609
  chr10:131975644-131975717
  hypo

SEQ ID NO: 408067 - DNA, 36 bp, Homo sapiens; identical to SEQ ID NO: 262613
  chr10:132284135-132284171
  hypo

SEQ ID NO: 408068 - DNA, 54 bp, Homo sapiens; identical to SEQ ID NO: 313329
  chr10:132365917-132365971
  hypo

SEQ ID NO: 408069 - DNA, 78 bp, Homo sapiens; identical to SEQ ID NO: 262618
  chr10:132933678-132933756
  hypo

SEQ ID NO: 408070 - DNA, 163 bp, Homo sapiens; identical to SEQ ID NO: 262620
  chr10:132958985-132959148
  hypo

SEQ ID NO: 408071 - DNA, 154 bp, Homo sapiens; identical to SEQ ID NO: 313336
  chr10:132977235-132977389
  hypo

SEQ ID NO: 408072 - DNA, 192 bp, Homo sapiens; identical to SEQ ID NO: 213824
  chr10:132992257-132992449
  hypo

SEQ ID NO: 408073 - DNA, 34 bp, Homo sapiens; identical to SEQ ID NO: 262624
  chr10:133146661-133146695
  hypo

SEQ ID NO: 408074 - DNA, 83 bp, Homo sapiens; identical to SEQ ID NO: 262625
  chr10:133218245-133218328
  hypo

SEQ ID NO: 408075 - DNA, 32 bp, Homo sapiens; identical to SEQ ID NO: 262626
  chr10:133229420-133229452
  hypo

SEQ ID NO: 408076 - DNA, 89 bp, Homo sapiens; identical to SEQ ID NO: 213826
  chr10:133557718-133557807
  hypo

SEQ ID NO: 408077 - DNA, 158 bp, Homo sapiens; identical to SEQ ID NO: 262629
  chr10:133572409-133572567
  hypo

SEQ ID NO: 408078 - DNA, 41 bp, Homo sapiens; identical to SEQ ID NO: 313345
  chr10:133590168-133590209
  hypo

SEQ ID NO: 408079 - DNA, 72 bp, Homo sapiens; identical to SEQ ID NO: 213831
  chr10:133955513-133955585
  hypo

SEQ ID NO: 408080 - DNA, 143 bp, Homo sapiens; identical to SEQ ID NO: 313353
  chr10:133979227-133979370
  hypo

SEQ ID NO: 408081 - DNA, 291 bp, Homo sapiens; identical to SEQ ID NO: 262640
  chr10:133981379-133981670
  hypo

SEQ ID NO: 408082 - DNA, 219 bp, Homo sapiens; identical to SEQ ID NO: 213834
  chr10:133983713-133983932
  hypo

SEQ ID NO: 408083 - DNA, 138 bp, Homo sapiens; identical to SEQ ID NO: 262644
  chr10:134013835-134013973
  hypo

SEQ ID NO: 408084 - DNA, 134 bp, Homo sapiens; identical to SEQ ID NO: 262645
  chr10:134014003-134014137
  hypo

SEQ ID NO: 408085 - DNA, 40 bp, Homo sapiens; identical to SEQ ID NO: 313361
  chr10:134019294-134019334
  hypo

SEQ ID NO: 408086 - DNA, 408 bp, Homo sapiens; identical to SEQ ID NO: 313362
  chr10:134019364-134019772
  hypo

SEQ ID NO: 408087 - DNA, 349 bp, Homo sapiens; identical to SEQ ID NO: 262650
  chr10:134035687-134036036
  hypo

SEQ ID NO: 408088 - DNA, 301 bp, Homo sapiens; identical to SEQ ID NO: 262651
  chr10:134036086-134036387
  hypo

SEQ ID NO: 408089 - DNA, 301 bp, Homo sapiens; identical to SEQ ID NO: 262652
  chr10:134038775-134039076
  hypo

SEQ ID NO: 408090 - DNA, 333 bp, Homo sapiens; identical to SEQ ID NO: 213836
  chr10:134053690-134054023
  hypo

SEQ ID NO: 408091 - DNA, 115 bp, Homo sapiens; identical to SEQ ID NO: 262658
  chr10:134058332-134058447
  hypo

SEQ ID NO: 408092 - DNA, 280 bp, Homo sapiens; identical to SEQ ID NO: 262663
  chr10:134106506-134106786
  hypo

SEQ ID NO: 408093 - DNA, 104 bp, Homo sapiens; identical to SEQ ID NO: 213840
  chr10:134164631-134164735
  hypo

SEQ ID NO: 408094 - DNA, 44 bp, Homo sapiens; identical to SEQ ID NO: 262666
  chr10:134168482-134168526
  hypo

SEQ ID NO: 408095 - DNA, 44 bp, Homo sapiens; identical to SEQ ID NO: 262667
  chr10:134171806-134171850
  hypo

SEQ ID NO: 408096 - DNA, 384 bp, Homo sapiens; identical to SEQ ID NO: 262668
  chr10:134188501-134188885
  hypo

SEQ ID NO: 408097 - DNA, 687 bp, Homo sapiens; identical to SEQ ID NO: 262670
  chr10:134217026-134217713
  hypo

SEQ ID NO: 408098 - DNA, 201 bp, Homo sapiens; identical to SEQ ID NO: 262671
  chr10:134269926-134270127
  hypo

SEQ ID NO: 408099 - DNA, 105 bp, Homo sapiens; identical to SEQ ID NO: 213847
  chr10:134279498-134279603
  hypo

SEQ ID NO: 408100 - DNA, 53 bp, Homo sapiens; identical to SEQ ID NO: 213849
  chr10:134302492-134302545
  hypo

SEQ ID NO: 408101 - DNA, 122 bp, Homo sapiens; identical to SEQ ID NO: 262682
  chr10:134346519-134346641
  hypo

SEQ ID NO: 408102 - DNA, 274 bp, Homo sapiens; identical to SEQ ID NO: 262683
  chr10:134370565-134370839
  hypo

SEQ ID NO: 408103 - DNA, 55 bp, Homo sapiens; identical to SEQ ID NO: 213851
  chr10:134421293-134421348
  hypo

SEQ ID NO: 408104 - DNA, 55 bp, Homo sapiens; identical to SEQ ID NO: 262686
  chr10:134427568-134427623
  hypo

SEQ ID NO: 408105 - DNA, 201 bp, Homo sapiens; identical to SEQ ID NO: 262688
  chr10:134459516-134459717
  hypo

SEQ ID NO: 408106 - DNA, 58 bp, Homo sapiens; identical to SEQ ID NO: 262694
  chr10:134492043-134492101
  hypo

SEQ ID NO: 408107 - DNA, 32 bp, Homo sapiens; identical to SEQ ID NO: 313413
  chr10:134499296-134499328
  hypo

SEQ ID NO: 408108 - DNA, 240 bp, Homo sapiens; identical to SEQ ID NO: 313414
  chr10:134499533-134499773
  hypo

SEQ ID NO: 408109 - DNA, 350 bp, Homo sapiens; identical to SEQ ID NO: 262698
  chr10:134517971-134518321
  hypo

SEQ ID NO: 408110 - DNA, 124 bp, Homo sapiens; identical to SEQ ID NO: 262701
  chr10:134528539-134528663
  hypo

SEQ ID NO: 408111 - DNA, 67 bp, Homo sapiens; identical to SEQ ID NO: 262705
  chr10:134546239-134546306
  hypo

SEQ ID NO: 408112 - DNA, 400 bp, Homo sapiens; identical to SEQ ID NO: 262706
  chr10:134556147-134556547
  hypo

SEQ ID NO: 408113 - DNA, 172 bp, Homo sapiens; identical to SEQ ID NO: 213858
  chr10:134559539-134559711
  hypo

SEQ ID NO: 408114 - DNA, 84 bp, Homo sapiens; identical to SEQ ID NO: 167033
  chr10:134567165-134567249
  hypo

SEQ ID NO: 408115 - DNA, 58 bp, Homo sapiens; identical to SEQ ID NO: 262712
  chr10:134575252-134575310
  hypo

SEQ ID NO: 408116 - DNA, 100 bp, Homo sapiens; identical to SEQ ID NO: 262714
  chr10:134583322-134583422
  hypo

SEQ ID NO: 408117 - DNA, 208 bp, Homo sapiens; identical to SEQ ID NO: 262715
  chr10:134588784-134588992
  hypo

SEQ ID NO: 408118 - DNA, 535 bp, Homo sapiens; identical to SEQ ID NO: 262717
  chr10:134589801-134590336
  hypo

SEQ ID NO: 408119 - DNA, 262 bp, Homo sapiens; identical to SEQ ID NO: 262720
  chr10:134606292-134606554
  hypo

SEQ ID NO: 408120 - DNA, 50 bp, Homo sapiens; identical to SEQ ID NO: 213867
  chr10:134620149-134620199
  hypo

SEQ ID NO: 408121 - DNA, 33 bp, Homo sapiens
  chr10:134639960-134639993
  hypo
ggagccacagagacctgccacagagccaggcag

SEQ ID NO: 408122 - DNA, 362 bp, Homo sapiens; identical to SEQ ID NO: 313451
  chr10:134651401-134651763
  hypo

SEQ ID NO: 408123 - DNA, 417 bp, Homo sapiens; identical to SEQ ID NO: 313452
  chr10:134651793-134652210
  hypo

SEQ ID NO: 408124 - DNA, 114 bp, Homo sapiens; identical to SEQ ID NO: 262733
  chr10:134680625-134680739
  hypo

SEQ ID NO: 408125 - DNA, 257 bp, Homo sapiens; identical to SEQ ID NO: 262736
  chr10:134683320-134683577
  hypo

SEQ ID NO: 408126 - DNA, 277 bp, Homo sapiens; identical to SEQ ID NO: 262739
  chr10:134698448-134698725
  hypo

SEQ ID NO: 408127 - DNA, 365 bp, Homo sapiens; identical to SEQ ID NO: 262741
  chr10:134716710-134717075
  hypo

SEQ ID NO: 408128 - DNA, 669 bp, Homo sapiens; identical to SEQ ID NO: 262742
  chr10:134722154-134722823
  hypo

SEQ ID NO: 408129 - DNA, 178 bp, Homo sapiens; identical to SEQ ID NO: 262744
  chr10:134724608-134724786
  hypo

SEQ ID NO: 408130 - DNA, 154 bp, Homo sapiens; identical to SEQ ID NO: 213874
  chr10:134736024-134736178
  hypo

SEQ ID NO: 408131 - DNA, 180 bp, Homo sapiens; identical to SEQ ID NO: 392614
  chr10:134738986-134739166
  hypo

SEQ ID NO: 408132 - DNA, 188 bp, Homo sapiens; identical to SEQ ID NO: 313475
  chr10:134739760-134739948
  hypo

SEQ ID NO: 408133 - DNA, 345 bp, Homo sapiens; identical to SEQ ID NO: 262761
  chr10:134803434-134803779
  hypo

SEQ ID NO: 408134 - DNA, 222 bp, Homo sapiens; identical to SEQ ID NO: 262763
  chr10:134817170-134817392
  hypo

SEQ ID NO: 408135 - DNA, 95 bp, Homo sapiens; identical to SEQ ID NO: 313497
  chr10:134833358-134833453
  hypo

SEQ ID NO: 408136 - DNA, 51 bp, Homo sapiens; identical to SEQ ID NO: 313498
  chr10:134833483-134833534
  hypo

SEQ ID NO: 408137 - DNA, 50 bp, Homo sapiens; identical to SEQ ID NO: 262768
  chr10:134833860-134833910
  hypo

SEQ ID NO: 408138 - DNA, 249 bp, Homo sapiens; identical to SEQ ID NO: 313504
  chr10:134894586-134894835
  hypo

SEQ ID NO: 408139 - DNA, 156 bp, Homo sapiens; identical to SEQ ID NO: 313506
  chr10:134911962-134912118
  hypo

SEQ ID NO: 408140 - DNA, 46 bp, Homo sapiens; identical to SEQ ID NO: 213890
  chr10:134912336-134912382
  hypo

SEQ ID NO: 408141 - DNA, 258 bp, Homo sapiens; identical to SEQ ID NO: 262778
  chr10:134920248-134920506
  hypo

SEQ ID NO: 408142 - DNA, 96 bp, Homo sapiens; identical to SEQ ID NO: 262779
  chr10:134926796-134926892
  hypo

SEQ ID NO: 408143 - DNA, 115 bp, Homo sapiens; identical to SEQ ID NO: 262784
  chr10:134945553-134945668
  hypo

SEQ ID NO: 408144 - DNA, 158 bp, Homo sapiens; identical to SEQ ID NO: 213895
  chr10:135002833-135002991
  hypo

SEQ ID NO: 408145 - DNA, 83 bp, Homo sapiens; identical to SEQ ID NO: 313521
  chr10:135008714-135008797
  hypo

SEQ ID NO: 408146 - DNA, 116 bp, Homo sapiens; identical to SEQ ID NO: 313522
  chr10:135008833-135008949
  hypo

SEQ ID NO: 408147 - DNA, 146 bp, Homo sapiens; identical to SEQ ID NO: 262801
  chr10:135026335-135026481
  hypo

SEQ ID NO: 408148 - DNA, 134 bp, Homo sapiens; identical to SEQ ID NO: 262804
  chr10:135067365-135067499
  hypo

SEQ ID NO: 408149 - DNA, 99 bp, Homo sapiens; identical to SEQ ID NO: 262805
  chr10:135069286-135069385
  hypo

SEQ ID NO: 408150 - DNA, 114 bp, Homo sapiens; identical to SEQ ID NO: 313540
  chr10:135076254-135076368
  hypo

SEQ ID NO: 408151 - DNA, 146 bp, Homo sapiens; identical to SEQ ID NO: 213904
  chr10:135081994-135082140
  hypo

SEQ ID NO: 408152 - DNA, 192 bp, Homo sapiens; identical to SEQ ID NO: 262810
  chr10:135085113-135085305
  hypo

SEQ ID NO: 408153 - DNA, 37 bp, Homo sapiens; identical to SEQ ID NO: 262816
  chr10:135113437-135113474
  hypo

SEQ ID NO: 408154 - DNA, 202 bp, Homo sapiens; identical to SEQ ID NO: 262820
  chr10:135128535-135128737
  hypo

SEQ ID NO: 408155 - DNA, 456 bp, Homo sapiens; identical to SEQ ID NO: 287708
  chr10:135149869-135150325
  hypo

SEQ ID NO: 408156 - DNA, 201 bp, Homo sapiens; identical to SEQ ID NO: 213911
  chr10:135204811-135205012
  hypo

SEQ ID NO: 408157 - DNA, 86 bp, Homo sapiens; identical to SEQ ID NO: 262827
  chr10:135381780-135381866
  hypo

SEQ ID NO: 408158 - DNA, 138 bp, Homo sapiens; identical to SEQ ID NO: 262829
  chr11:251677-251815
  hypo

SEQ ID NO: 408159 - DNA, 38 bp, Homo sapiens; identical to SEQ ID NO: 262830
  chr11:367112-367150
  hypo

SEQ ID NO: 408160 - DNA, 155 bp, Homo sapiens; identical to SEQ ID NO: 262831
  chr11:372118-372273
  hypo

SEQ ID NO: 408161 - DNA, 830 bp, Homo sapiens
  chr11:375766-376596
  hypo
ttcctcagtgagagggggcccgcgcgggggcgagggcgggggtgcctgccccagccaccctgtgaccgcacctcctgcagctccacgcatggaatcttcgagcctggagaacgtgctggagccctgcgcctacgcccccacctacgtggtcaaggacttcccgatcgccagataccagggcctgcaatttgtgagtgcggctggagaccccgtctcccgtccgggactccgcggagccttctccagccccttgggaggccgccccgggaggtccgcgccctgagccctgcgcccccccaccccccaggtgtacctgtccttcgtttatcccaacgactacactcgcctcacccacatggagacggacaacaagtgcttctaccgcgagtctccgctgtatctggagaggtgggcgcgcggccgggctaatgcggggcggggtgggcggggcgggactcggctctgatgccccgccgcgccccaggtttgggttctataaatacatgaagatggacaaggaggagggggatgaggatgaagaagacgaggtgcagcgccgagccttcctcttcctcaacccggacggtgagtgtccgcagcgcccctggcccgcacccacctgcgcagggagcttctaacccgcgtttcccgcagacttcctggacgacgaggacgagggggagctgctcgacagcctggagcccaccgaggcggccccgcccaggagcggcccccagtcccccgccccagcagcccccgcccagcccggagccaccctcgccccgccgacccctccccgcccccgggacggggggacccccaggcactcc

SEQ ID NO: 408162 - DNA, 39 bp, Homo sapiens; identical to SEQ ID NO: 262841
  chr11:404582-404621
  hypo

SEQ ID NO: 408163 - DNA, 153 bp, Homo sapiens; identical to SEQ ID NO: 262843
  chr11:419276-419429
  hypo

SEQ ID NO: 408164 - DNA, 177 bp, Homo sapiens; identical to SEQ ID NO: 213919
  chr11:429289-429466
  hypo

SEQ ID NO: 408165 - DNA, 51 bp, Homo sapiens; identical to SEQ ID NO: 213920
  chr11:429759-429810
  hypo

SEQ ID NO: 408166 - DNA, 134 bp, Homo sapiens; identical to SEQ ID NO: 262847
  chr11:438117-438251
  hypo

SEQ ID NO: 408167 - DNA, 137 bp, Homo sapiens; identical to SEQ ID NO: 213922
  chr11:449377-449514
  hypo

SEQ ID NO: 408168 - DNA, 138 bp, Homo sapiens; identical to SEQ ID NO: 224009
  chr11:450011-450149
  hypo

SEQ ID NO: 408169 - DNA, 107 bp, Homo sapiens; identical to SEQ ID NO: 224010
  chr11:450172-450279
  hypo

SEQ ID NO: 408170 - DNA, 101 bp, Homo sapiens; identical to SEQ ID NO: 213925
  chr11:464468-464569
  hypo

SEQ ID NO: 408171 - DNA, 49 bp, Homo sapiens; identical to SEQ ID NO: 262855
  chr11:476445-476494
  hypo

SEQ ID NO: 408172 - DNA, 64 bp, Homo sapiens; identical to SEQ ID NO: 262856
  chr11:486110-486174
  hypo

SEQ ID NO: 408173 - DNA, 182 bp, Homo sapiens; identical to SEQ ID NO: 202391
  chr11:518712-518894
  hypo

SEQ ID NO: 408174 - DNA, 61 bp, Homo sapiens; identical to SEQ ID NO: 287725
  chr11:518933-518994
  hypo

SEQ ID NO: 408175 - DNA, 38 bp, Homo sapiens; identical to SEQ ID NO: 262862
  chr11:532700-532738
  hypo

SEQ ID NO: 408176 - DNA, 37 bp, Homo sapiens; identical to SEQ ID NO: 213934
  chr11:534210-534247
  hypo

SEQ ID NO: 408177 - DNA, 36 bp, Homo sapiens; identical to SEQ ID NO: 262865
  chr11:539725-539761
  hypo

SEQ ID NO: 408178 - DNA, 31 bp, Homo sapiens; identical to SEQ ID NO: 313609
  chr11:548735-548766
  hypo

SEQ ID NO: 408179 - DNA, 177 bp, Homo sapiens; identical to SEQ ID NO: 313610
  chr11:548800-548977
  hypo

SEQ ID NO: 408180 - DNA, 65 bp, Homo sapiens; identical to SEQ ID NO: 313611
  chr11:549007-549072
  hypo

SEQ ID NO: 408181 - DNA, 159 bp, Homo sapiens; identical to SEQ ID NO: 213937
  chr11:563846-564005
  hypo

SEQ ID NO: 408182 - DNA, 122 bp, Homo sapiens; identical to SEQ ID NO: 213944
  chr11:601646-601768
  hypo

SEQ ID NO: 408183 - DNA, 129 bp, Homo sapiens; identical to SEQ ID NO: 262875
  chr11:605030-605159
  hypo

SEQ ID NO: 408184 - DNA, 302 bp, Homo sapiens; identical to SEQ ID NO: 262878
  chr11:625775-626077
  hypo

SEQ ID NO: 408185 - DNA, 152 bp, Homo sapiens; identical to SEQ ID NO: 213948
  chr11:700514-700666
  hypo

SEQ ID NO: 408186 - DNA, 68 bp, Homo sapiens; identical to SEQ ID NO: 262882
  chr11:702894-702962
  hypo

SEQ ID NO: 408187 - DNA, 310 bp, Homo sapiens; identical to SEQ ID NO: 262884
  chr11:733218-733528
  hypo

SEQ ID NO: 408188 - DNA, 143 bp, Homo sapiens; identical to SEQ ID NO: 262895
  chr11:826059-826202
  hypo

SEQ ID NO: 408189 - DNA, 43 bp, Homo sapiens; identical to SEQ ID NO: 262897
  chr11:858811-858854
  hypo

SEQ ID NO: 408190 - DNA, 70 bp, Homo sapiens; identical to SEQ ID NO: 262903
  chr11:873624-873694
  hypo

SEQ ID NO: 408191 - DNA, 61 bp, Homo sapiens; identical to SEQ ID NO: 262904
  chr11:873724-873785
  hypo

SEQ ID NO: 408192 - DNA, 206 bp, Homo sapiens; identical to SEQ ID NO: 262906
  chr11:898338-898544
  hypo

SEQ ID NO: 408193 - DNA, 79 bp, Homo sapiens; identical to SEQ ID NO: 213955
  chr11:907472-907551
  hypo

SEQ ID NO: 408194 - DNA, 98 bp, Homo sapiens; identical to SEQ ID NO: 313664
  chr11:971727-971825
  hypo

SEQ ID NO: 408195 - DNA, 129 bp, Homo sapiens; identical to SEQ ID NO: 313665
  chr11:971860-971989
  hypo

SEQ ID NO: 408196 - DNA, 101 bp, Homo sapiens; identical to SEQ ID NO: 262914
  chr11:986394-986495
  hypo

SEQ ID NO: 408197 - DNA, 294 bp, Homo sapiens; identical to SEQ ID NO: 213957
  chr11:991642-991936
  hypo

SEQ ID NO: 408198 - DNA, 169 bp, Homo sapiens; identical to SEQ ID NO: 213964
  chr11:1006970-1007139
  hypo

SEQ ID NO: 408199 - DNA, 59 bp, Homo sapiens; identical to SEQ ID NO: 262924
  chr11:1008941-1009000
  hypo

SEQ ID NO: 408200 - DNA, 268 bp, Homo sapiens; identical to SEQ ID NO: 262930
  chr11:1035491-1035759
  hypo

SEQ ID NO: 408201 - DNA, 45 bp, Homo sapiens; identical to SEQ ID NO: 262934
  chr11:1060630-1060675
  hypo

SEQ ID NO: 408202 - DNA, 502 bp, Homo sapiens; identical to SEQ ID NO: 262938
  chr11:1088802-1089304
  hypo

SEQ ID NO: 408203 - DNA, 43 bp, Homo sapiens; identical to SEQ ID NO: 262947
  chr11:1161745-1161788
  hypo

SEQ ID NO: 408204 - DNA, 260 bp, Homo sapiens; identical to SEQ ID NO: 262948
  chr11:1162084-1162344
  hypo

SEQ ID NO: 408205 - DNA, 251 bp, Homo sapiens; identical to SEQ ID NO: 262949
  chr11:1213296-1213547
  hypo

SEQ ID NO: 408206 - DNA, 140 bp, Homo sapiens
  chr11:1275398-1275538
  hypo
tatgtcctcatgagagagatccatgcacgctttgggaatctcagcctctacctggacaaccactactgcacggcctctgccactgccgctgccgcccgctgcccccgcgccctcagcatccactacaagtccatggatat

SEQ ID NO: 408207 - DNA, 139 bp, Homo sapiens; identical to SEQ ID NO: 213979
  chr11:1307128-1307267
  hypo

SEQ ID NO: 408208 - DNA, 55 bp, Homo sapiens; identical to SEQ ID NO: 262967
  chr11:1312883-1312938
  hypo

SEQ ID NO: 408209 - DNA, 278 bp, Homo sapiens; identical to SEQ ID NO: 262968
  chr11:1360071-1360349
  hypo

SEQ ID NO: 408210 - DNA, 277 bp, Homo sapiens; identical to SEQ ID NO: 313727
  chr11:1374621-1374898
  hypo

SEQ ID NO: 408211 - DNA, 178 bp, Homo sapiens; identical to SEQ ID NO: 262970
  chr11:1375494-1375672
  hypo

SEQ ID NO: 408212 - DNA, 58 bp, Homo sapiens; identical to SEQ ID NO: 262971
  chr11:1390811-1390869
  hypo

SEQ ID NO: 408213 - DNA, 284 bp, Homo sapiens; identical to SEQ ID NO: 313733
  chr11:1431201-1431485
  hypo

SEQ ID NO: 408214 - DNA, 87 bp, Homo sapiens; identical to SEQ ID NO: 262975
  chr11:1433176-1433263
  hypo

SEQ ID NO: 408215 - DNA, 71 bp, Homo sapiens; identical to SEQ ID NO: 313746
  chr11:1472058-1472129
  hypo

SEQ ID NO: 408216 - DNA, 162 bp, Homo sapiens; identical to SEQ ID NO: 262992
  chr11:1508342-1508504
  hypo

SEQ ID NO: 408217 - DNA, 482 bp, Homo sapiens; identical to SEQ ID NO: 262993
  chr11:1509374-1509856
  hypo

SEQ ID NO: 408218 - DNA, 197 bp, Homo sapiens; identical to SEQ ID NO: 262997
  chr11:1553266-1553463
  hypo

SEQ ID NO: 408219 - DNA, 39 bp, Homo sapiens; identical to SEQ ID NO: 213995
  chr11:1584969-1585008
  hypo

SEQ ID NO: 408220 - DNA, 498 bp, Homo sapiens; identical to SEQ ID NO: 224022
  chr11:1592747-1593245
  hypo

SEQ ID NO: 408221 - DNA, 613 bp, Homo sapiens; identical to SEQ ID NO: 263002
  chr11:1602581-1603194
  hypo

SEQ ID NO: 408222 - DNA, 212 bp, Homo sapiens; identical to SEQ ID NO: 213999
  chr11:1749039-1749251
  hypo

SEQ ID NO: 408223 - DNA, 224 bp, Homo sapiens; identical to SEQ ID NO: 263004
  chr11:1759618-1759842
  hypo

SEQ ID NO: 408224 - DNA, 94 bp, Homo sapiens; identical to SEQ ID NO: 263007
  chr11:1801339-1801433
  hypo

SEQ ID NO: 408225 - DNA, 222 bp, Homo sapiens; identical to SEQ ID NO: 263009
  chr11:1806143-1806365
  hypo

SEQ ID NO: 408226 - DNA, 31 bp, Homo sapiens; identical to SEQ ID NO: 263010
  chr11:1811101-1811132
  hypo

SEQ ID NO: 408227 - DNA, 38 bp, Homo sapiens; identical to SEQ ID NO: 263011
  chr11:1819538-1819576
  hypo

SEQ ID NO: 408228 - DNA, 328 bp, Homo sapiens; identical to SEQ ID NO: 313785
  chr11:1857545-1857873
  hypo

SEQ ID NO: 408229 - DNA, 129 bp, Homo sapiens; identical to SEQ ID NO: 313786
  chr11:1857933-1858062
  hypo

SEQ ID NO: 408230 - DNA, 54 bp, Homo sapiens; identical to SEQ ID NO: 313787
  chr11:1858535-1858589
  hypo

SEQ ID NO: 408231 - DNA, 128 bp, Homo sapiens; identical to SEQ ID NO: 313788
  chr11:1858652-1858780
  hypo

SEQ ID NO: 408232 - DNA, 49 bp, Homo sapiens; identical to SEQ ID NO: 263022
  chr11:1858842-1858891
  hypo

SEQ ID NO: 408233 - DNA, 66 bp, Homo sapiens; identical to SEQ ID NO: 313792
  chr11:1950284-1950350
  hypo

SEQ ID NO: 408234 - DNA, 589 bp, Homo sapiens; identical to SEQ ID NO: 313793
  chr11:1950634-1951223
  hypo

SEQ ID NO: 408235 - DNA, 53 bp, Homo sapiens; identical to SEQ ID NO: 313794
  chr11:1955098-1955151
  hypo

SEQ ID NO: 408236 - DNA, 89 bp, Homo sapiens; identical to SEQ ID NO: 263034
  chr11:1962757-1962846
  hypo

SEQ ID NO: 408237 - DNA, 34 bp, Homo sapiens; identical to SEQ ID NO: 263035
  chr11:1975868-1975902
  hypo

SEQ ID NO: 408238 - DNA, 50 bp, Homo sapiens; identical to SEQ ID NO: 263037
  chr11:1980680-1980730
  hypo

SEQ ID NO: 408239 - DNA, 99 bp, Homo sapiens; identical to SEQ ID NO: 214009
  chr11:1985748-1985847
  hypo

SEQ ID NO: 408240 - DNA, 333 bp, Homo sapiens; identical to SEQ ID NO: 263040
  chr11:2005410-2005743
  hypo

SEQ ID NO: 408241 - DNA, 54 bp, Homo sapiens; identical to SEQ ID NO: 263042
  chr11:2013555-2013609
  hypo

SEQ ID NO: 408242 - DNA, 146 bp, Homo sapiens; identical to SEQ ID NO: 263044
  chr11:2027241-2027387
  hypo

SEQ ID NO: 408243 - DNA, 191 bp, Homo sapiens; identical to SEQ ID NO: 263047
  chr11:2051191-2051382
  hypo

SEQ ID NO: 408244 - DNA, 305 bp, Homo sapiens; identical to SEQ ID NO: 263049
  chr11:2055187-2055492
  hypo

SEQ ID NO: 408245 - DNA, 152 bp, Homo sapiens; identical to SEQ ID NO: 263051
  chr11:2107097-2107249
  hypo

SEQ ID NO: 408246 - DNA, 32 bp, Homo sapiens; identical to SEQ ID NO: 313818
  chr11:2109250-2109282
  hypo

SEQ ID NO: 408247 - DNA, 84 bp, Homo sapiens; identical to SEQ ID NO: 313819
  chr11:2109312-2109396
  hypo

SEQ ID NO: 408248 - DNA, 171 bp, Homo sapiens; identical to SEQ ID NO: 263062
  chr11:2136032-2136203
  hypo

SEQ ID NO: 408249 - DNA, 57 bp, Homo sapiens; identical to SEQ ID NO: 263063
  chr11:2136427-2136484
  hypo

SEQ ID NO: 408250 - DNA, 190 bp, Homo sapiens; identical to SEQ ID NO: 263066
  chr11:2176341-2176531
  hypo

SEQ ID NO: 408251 - DNA, 200 bp, Homo sapiens; identical to SEQ ID NO: 263067
  chr11:2183694-2183894
  hypo

SEQ ID NO: 408252 - DNA, 204 bp, Homo sapiens; identical to SEQ ID NO: 263069
  chr11:2210733-2210937
  hypo

SEQ ID NO: 408253 - DNA, 411 bp, Homo sapiens; identical to SEQ ID NO: 263070
  chr11:2221258-2221669
  hypo

SEQ ID NO: 408254 - DNA, 70 bp, Homo sapiens; identical to SEQ ID NO: 263073
  chr11:2229025-2229095
  hypo

SEQ ID NO: 408255 - DNA, 182 bp, Homo sapiens; identical to SEQ ID NO: 263074
  chr11:2229125-2229307
  hypo

SEQ ID NO: 408256 - DNA, 202 bp, Homo sapiens; identical to SEQ ID NO: 263075
  chr11:2235851-2236053
  hypo

SEQ ID NO: 408257 - DNA, 180 bp, Homo sapiens; identical to SEQ ID NO: 263077
  chr11:2237500-2237680
  hypo

SEQ ID NO: 408258 - DNA, 92 bp, Homo sapiens; identical to SEQ ID NO: 263079
  chr11:2277665-2277757
  hypo

SEQ ID NO: 408259 - DNA, 41 bp, Homo sapiens; identical to SEQ ID NO: 263082
  chr11:2294016-2294057
  hypo

SEQ ID NO: 408260 - DNA, 106 bp, Homo sapiens; identical to SEQ ID NO: 214011
  chr11:2294685-2294791
  hypo

SEQ ID NO: 408261 - DNA, 142 bp, Homo sapiens; identical to SEQ ID NO: 263089
  chr11:2348407-2348549
  hypo

SEQ ID NO: 408262 - DNA, 197 bp, Homo sapiens; identical to SEQ ID NO: 263096
  chr11:2423833-2424030
  hypo

SEQ ID NO: 408263 - DNA, 160 bp, Homo sapiens; identical to SEQ ID NO: 263097
  chr11:2428378-2428538
  hypo

SEQ ID NO: 408264 - DNA, 33 bp, Homo sapiens; identical to SEQ ID NO: 263100
  chr11:2441826-2441859
  hypo

SEQ ID NO: 408265 - DNA, 57 bp, Homo sapiens; identical to SEQ ID NO: 263102
  chr11:2448567-2448624
  hypo

SEQ ID NO: 408266 - DNA, 65 bp, Homo sapiens; identical to SEQ ID NO: 224026
  chr11:2554360-2554425
  hypo

SEQ ID NO: 408267 - DNA, 64 bp, Homo sapiens; identical to SEQ ID NO: 202409
  chr11:2554454-2554518
  hypo

SEQ ID NO: 408268 - DNA, 41 bp, Homo sapiens; identical to SEQ ID NO: 263108
  chr11:2579781-2579822
  hypo

SEQ ID NO: 408269 - DNA, 43 bp, Homo sapiens; identical to SEQ ID NO: 263109
  chr11:2581754-2581797
  hypo

SEQ ID NO: 408270 - DNA, 130 bp, Homo sapiens; identical to SEQ ID NO: 214021
  chr11:2594826-2594956
  hypo

SEQ ID NO: 408271 - DNA, 63 bp, Homo sapiens; identical to SEQ ID NO: 263111
  chr11:2595670-2595733
  hypo

SEQ ID NO: 408272 - DNA, 149 bp, Homo sapiens; identical to SEQ ID NO: 214022
  chr11:2596284-2596433
  hypo

SEQ ID NO: 408273 - DNA, 143 bp, Homo sapiens; identical to SEQ ID NO: 263115
  chr11:2720203-2720346
  hypo

SEQ ID NO: 408274 - DNA, 493 bp, Homo sapiens; identical to SEQ ID NO: 263118
  chr11:2757685-2758178
  hypo

SEQ ID NO: 408275 - DNA, 385 bp, Homo sapiens; identical to SEQ ID NO: 214024
  chr11:2772656-2773041
  hypo

SEQ ID NO: 408276 - DNA, 131 bp, Homo sapiens; identical to SEQ ID NO: 263126
  chr11:2864467-2864598
  hypo

SEQ ID NO: 408277 - DNA, 218 bp, Homo sapiens; identical to SEQ ID NO: 263127
  chr11:2865183-2865401
  hypo

SEQ ID NO: 408278 - DNA, 215 bp, Homo sapiens; identical to SEQ ID NO: 263129
  chr11:2874227-2874442
  hypo

SEQ ID NO: 408279 - DNA, 160 bp, Homo sapiens; identical to SEQ ID NO: 263130
  chr11:2874823-2874983
  hypo

SEQ ID NO: 408280 - DNA, 54 bp, Homo sapiens; identical to SEQ ID NO: 263131
  chr11:2885741-2885795
  hypo

SEQ ID NO: 408281 - DNA, 102 bp, Homo sapiens; identical to SEQ ID NO: 263132
  chr11:2910403-2910505
  hypo

SEQ ID NO: 408282 - DNA, 201 bp, Homo sapiens; identical to SEQ ID NO: 263133
  chr11:2934242-2934443
  hypo

SEQ ID NO: 408283 - DNA, 197 bp, Homo sapiens; identical to SEQ ID NO: 214033
  chr11:2939101-2939298
  hypo

SEQ ID NO: 408284 - DNA, 304 bp, Homo sapiens; identical to SEQ ID NO: 214034
  chr11:2942534-2942838
  hypo

SEQ ID NO: 408285 - DNA, 433 bp, Homo sapiens; identical to SEQ ID NO: 224029
  chr11:2951691-2952124
  hypo

SEQ ID NO: 408286 - DNA, 385 bp, Homo sapiens; identical to SEQ ID NO: 263138
  chr11:2965737-2966122
  hypo

SEQ ID NO: 408287 - DNA, 107 bp, Homo sapiens; identical to SEQ ID NO: 263141
  chr11:3031444-3031551
  hypo

SEQ ID NO: 408288 - DNA, 59 bp, Homo sapiens; identical to SEQ ID NO: 263148
  chr11:3122919-3122978
  hypo

SEQ ID NO: 408289 - DNA, 393 bp, Homo sapiens; identical to SEQ ID NO: 263157
  chr11:3167019-3167412
  hypo

SEQ ID NO: 408290 - DNA, 63 bp, Homo sapiens; identical to SEQ ID NO: 263158
  chr11:3168979-3169042
  hypo

SEQ ID NO: 408291 - DNA, 123 bp, Homo sapiens; identical to SEQ ID NO: 263160
  chr11:3172032-3172155
  hypo

SEQ ID NO: 408292 - DNA, 54 bp, Homo sapiens; identical to SEQ ID NO: 263161
  chr11:3179502-3179556
  hypo

SEQ ID NO: 408293 - DNA, 35 bp, Homo sapiens; identical to SEQ ID NO: 263164
  chr11:3212863-3212898
  hypo

SEQ ID NO: 408294 - DNA, 272 bp, Homo sapiens; identical to SEQ ID NO: 263166
  chr11:3246365-3246637
  hypo

SEQ ID NO: 408295 - DNA, 34 bp, Homo sapiens; identical to SEQ ID NO: 263167
  chr11:3247717-3247751
  hypo

SEQ ID NO: 408296 - DNA, 154 bp, Homo sapiens; identical to SEQ ID NO: 214048
  chr11:3254282-3254436
  hypo

SEQ ID NO: 408297 - DNA, 50 bp, Homo sapiens; identical to SEQ ID NO: 214050
  chr11:3688971-3689021
  hypo

SEQ ID NO: 408298 - DNA, 37 bp, Homo sapiens; identical to SEQ ID NO: 263180
  chr11:4494114-4494151
  hypo

SEQ ID NO: 408299 - DNA, 158 bp, Homo sapiens; identical to SEQ ID NO: 263183
  chr11:5687849-5688007
  hypo

SEQ ID NO: 408300 - DNA, 46 bp, Homo sapiens; identical to SEQ ID NO: 313959
  chr11:5951401-5951447
  hypo

SEQ ID NO: 408301 - DNA, 236 bp, Homo sapiens; identical to SEQ ID NO: 263187
  chr11:6477624-6477860
  hypo

SEQ ID NO: 408302 - DNA, 105 bp, Homo sapiens; identical to SEQ ID NO: 202421
  chr11:6502787-6502892
  hypo

SEQ ID NO: 408303 - DNA, 113 bp, Homo sapiens; identical to SEQ ID NO: 263191
  chr11:6585065-6585178
  hypo

SEQ ID NO: 408304 - DNA, 40 bp, Homo sapiens; identical to SEQ ID NO: 202425
  chr11:8103155-8103195
  hypo

SEQ ID NO: 408305 - DNA, 533 bp, Homo sapiens; identical to SEQ ID NO: 263196
  chr11:8336904-8337437
  hypo

SEQ ID NO: 408306 - DNA, 214 bp, Homo sapiens; identical to SEQ ID NO: 263197
  chr11:8358361-8358575
  hypo

SEQ ID NO: 408307 - DNA, 366 bp, Homo sapiens; identical to SEQ ID NO: 263202
  chr11:8752347-8752713
  hypo

SEQ ID NO: 408308 - DNA, 179 bp, Homo sapiens; identical to SEQ ID NO: 214060
  chr11:8759790-8759969
  hypo

SEQ ID NO: 408309 - DNA, 35 bp, Homo sapiens; identical to SEQ ID NO: 263204
  chr11:8791120-8791155
  hypo

SEQ ID NO: 408310 - DNA, 190 bp, Homo sapiens; identical to SEQ ID NO: 263206
  chr11:9074512-9074702
  hypo

SEQ ID NO: 408311 - DNA, 42 bp, Homo sapiens; identical to SEQ ID NO: 263208
  chr11:9343803-9343845
  hypo

SEQ ID NO: 408312 - DNA, 105 bp, Homo sapiens; identical to SEQ ID NO: 214068
  chr11:9567905-9568010
  hypo

SEQ ID NO: 408313 - DNA, 69 bp, Homo sapiens; identical to SEQ ID NO: 263219
  chr11:9596898-9596967
  hypo

SEQ ID NO: 408314 - DNA, 49 bp, Homo sapiens; identical to SEQ ID NO: 263220
  chr11:9620658-9620707
  hypo

SEQ ID NO: 408315 - DNA, 577 bp, Homo sapiens; identical to SEQ ID NO: 224046
  chr11:9685464-9686041
  hypo

SEQ ID NO: 408316 - DNA, 84 bp, Homo sapiens; identical to SEQ ID NO: 263222
  chr11:10004724-10004808
  hypo

SEQ ID NO: 408317 - DNA, 112 bp, Homo sapiens; identical to SEQ ID NO: 263224
  chr11:10512606-10512718
  hypo

SEQ ID NO: 408318 - DNA, 267 bp, Homo sapiens; identical to SEQ ID NO: 263226
  chr11:10522099-10522366
  hypo

SEQ ID NO: 408319 - DNA, 34 bp, Homo sapiens; identical to SEQ ID NO: 214074
  chr11:10811103-10811137
  hypo

SEQ ID NO: 408320 - DNA, 42 bp, Homo sapiens; identical to SEQ ID NO: 263231
  chr11:11178003-11178045
  hypo

SEQ ID NO: 408321 - DNA, 74 bp, Homo sapiens
  chr11:11833403-11833477
  hypo
gttaagttaccagtattgtgcttattttataattgggagactgagacataggttggttaaaaagtttaagactt

SEQ ID NO: 408322 - DNA, 245 bp, Homo sapiens; identical to SEQ ID NO: 263237
  chr11:11991422-11991667
  hypo

SEQ ID NO: 408323 - DNA, 262 bp, Homo sapiens; identical to SEQ ID NO: 263240
  chr11:12115688-12115950
  hypo

SEQ ID NO: 408324 - DNA, 102 bp, Homo sapiens; identical to SEQ ID NO: 263241
  chr11:12145846-12145948
  hypo

SEQ ID NO: 408325 - DNA, 86 bp, Homo sapiens; identical to SEQ ID NO: 263242
  chr11:12158740-12158826
  hypo

SEQ ID NO: 408326 - DNA, 50 bp, Homo sapiens; identical to SEQ ID NO: 263243
  chr11:12172361-12172411
  hypo

SEQ ID NO: 408327 - DNA, 69 bp, Homo sapiens; identical to SEQ ID NO: 263244
  chr11:12172441-12172510
  hypo

SEQ ID NO: 408328 - DNA, 427 bp, Homo sapiens; identical to SEQ ID NO: 214082
  chr11:12209618-12210045
  hypo

SEQ ID NO: 408329 - DNA, 41 bp, Homo sapiens; identical to SEQ ID NO: 214083
  chr11:12214008-12214049
  hypo

SEQ ID NO: 408330 - DNA, 59 bp, Homo sapiens
  chr11:12248494-12248553
  hypo
cagccaacacctccttgttatagccatacttcccagagccaggttccaaatcacagttg

SEQ ID NO: 408331 - DNA, 131 bp, Homo sapiens; identical to SEQ ID NO: 263255
  chr11:12250137-12250268
  hypo

SEQ ID NO: 408332 - DNA, 118 bp, Homo sapiens; identical to SEQ ID NO: 214090
  chr11:12260726-12260844
  hypo

SEQ ID NO: 408333 - DNA, 218 bp, Homo sapiens; identical to SEQ ID NO: 263260
  chr11:12276133-12276351
  hypo

SEQ ID NO: 408334 - DNA, 317 bp, Homo sapiens; identical to SEQ ID NO: 214091
  chr11:12276763-12277080
  hypo

SEQ ID NO: 408335 - DNA, 198 bp, Homo sapiens; identical to SEQ ID NO: 263267
  chr11:12296625-12296823
  hypo

SEQ ID NO: 408336 - DNA, 33 bp, Homo sapiens; identical to SEQ ID NO: 214098
  chr11:12554120-12554153
  hypo

SEQ ID NO: 408337 - DNA, 104 bp, Homo sapiens; identical to SEQ ID NO: 263275
  chr11:12990320-12990424
  hypo

SEQ ID NO: 408338 - DNA, 304 bp, Homo sapiens; identical to SEQ ID NO: 287846
  chr11:13298519-13298823
  hypo

SEQ ID NO: 408339 - DNA, 92 bp, Homo sapiens; identical to SEQ ID NO: 314071
  chr11:14520358-14520450
  hypo

SEQ ID NO: 408340 - DNA, 120 bp, Homo sapiens; identical to SEQ ID NO: 214107
  chr11:14542801-14542921
  hypo

SEQ ID NO: 408341 - DNA, 45 bp, Homo sapiens; identical to SEQ ID NO: 263285
  chr11:14674976-14675021
  hypo

SEQ ID NO: 408342 - DNA, 251 bp, Homo sapiens; identical to SEQ ID NO: 202457
  chr11:15671676-15671927
  hypo

SEQ ID NO: 408343 - DNA, 42 bp, Homo sapiens; identical to SEQ ID NO: 263287
  chr11:16050846-16050888
  hypo

SEQ ID NO: 408344 - DNA, 42 bp, Homo sapiens; identical to SEQ ID NO: 263288
  chr11:16051188-16051230
  hypo

SEQ ID NO: 408345 - DNA, 37 bp, Homo sapiens; identical to SEQ ID NO: 263289
  chr11:16790662-16790699
  hypo

SEQ ID NO: 408346 - DNA, 123 bp, Homo sapiens; identical to SEQ ID NO: 263291
  chr11:16863137-16863260
  hypo

SEQ ID NO: 408347 - DNA, 32 bp, Homo sapiens; identical to SEQ ID NO: 314082
  chr11:17037344-17037376
  hypo

SEQ ID NO: 408348 - DNA, 151 bp, Homo sapiens; identical to SEQ ID NO: 398632
  chr11:17498265-17498416
  hypo

SEQ ID NO: 408349 - DNA, 260 bp, Homo sapiens; identical to SEQ ID NO: 224059
  chr11:17498486-17498746
  hypo

SEQ ID NO: 408350 - DNA, 58 bp, Homo sapiens; identical to SEQ ID NO: 314088
  chr11:17653729-17653787
  hypo

SEQ ID NO: 408351 - DNA, 81 bp, Homo sapiens; identical to SEQ ID NO: 287886
  chr11:17741598-17741679
  hypo

SEQ ID NO: 408352 - DNA, 158 bp, Homo sapiens; identical to SEQ ID NO: 263298
  chr11:17905736-17905894
  hypo

SEQ ID NO: 408353 - DNA, 98 bp, Homo sapiens; identical to SEQ ID NO: 263304
  chr11:18657233-18657331
  hypo

SEQ ID NO: 408354 - DNA, 229 bp, Homo sapiens; identical to SEQ ID NO: 263305
  chr11:18978176-18978405
  hypo

SEQ ID NO: 408355 - DNA, 97 bp, Homo sapiens; identical to SEQ ID NO: 263313
  chr11:27380960-27381057
  hypo

SEQ ID NO: 408356 - DNA, 36 bp, Homo sapiens; identical to SEQ ID NO: 263314
  chr11:27381177-27381213
  hypo

SEQ ID NO: 408357 - DNA, 44 bp, Homo sapiens; identical to SEQ ID NO: 314119
  chr11:31533857-31533901
  hypo

SEQ ID NO: 408358 - DNA, 83 bp, Homo sapiens; identical to SEQ ID NO: 263321
  chr11:31760147-31760230
  hypo

SEQ ID NO: 408359 - DNA, 54 bp, Homo sapiens; identical to SEQ ID NO: 263326
  chr11:32912159-32912213
  hypo

SEQ ID NO: 408360 - DNA, 127 bp, Homo sapiens; identical to SEQ ID NO: 263331
  chr11:33667398-33667525
  hypo

SEQ ID NO: 408361 - DNA, 279 bp, Homo sapiens; identical to SEQ ID NO: 398660
  chr11:33890957-33891236
  hypo

SEQ ID NO: 408362 - DNA, 61 bp, Homo sapiens; identical to SEQ ID NO: 263336
  chr11:34190350-34190411
  hypo

SEQ ID NO: 408363 - DNA, 111 bp, Homo sapiens; identical to SEQ ID NO: 263337
  chr11:34190793-34190904
  hypo

SEQ ID NO: 408364 - DNA, 38 bp, Homo sapiens; identical to SEQ ID NO: 214130
  chr11:34192314-34192352
  hypo

SEQ ID NO: 408365 - DNA, 34 bp, Homo sapiens; identical to SEQ ID NO: 263339
  chr11:34264829-34264863
  hypo

SEQ ID NO: 408366 - DNA, 393 bp, Homo sapiens; identical to SEQ ID NO: 263340
  chr11:34264983-34265376
  hypo

SEQ ID NO: 408367 - DNA, 75 bp, Homo sapiens; identical to SEQ ID NO: 263341
  chr11:34270689-34270764
  hypo

SEQ ID NO: 408368 - DNA, 101 bp, Homo sapiens; identical to SEQ ID NO: 263342
  chr11:34407511-34407612
  hypo

SEQ ID NO: 408369 - DNA, 44 bp, Homo sapiens; identical to SEQ ID NO: 263347
  chr11:34592834-34592878
  hypo

SEQ ID NO: 408370 - DNA, 169 bp, Homo sapiens; identical to SEQ ID NO: 263348
  chr11:34631595-34631764
  hypo

SEQ ID NO: 408371 - DNA, 103 bp, Homo sapiens; identical to SEQ ID NO: 263351
  chr11:35016467-35016570
  hypo

SEQ ID NO: 408372 - DNA, 56 bp, Homo sapiens; identical to SEQ ID NO: 398663
  chr11:35641617-35641673
  hypo

SEQ ID NO: 408373 - DNA, 74 bp, Homo sapiens; identical to SEQ ID NO: 214138
  chr11:35661156-35661230
  hypo

SEQ ID NO: 408374 - DNA, 38 bp, Homo sapiens; identical to SEQ ID NO: 214139
  chr11:36060520-36060558
  hypo

SEQ ID NO: 408375 - DNA, 37 bp, Homo sapiens; identical to SEQ ID NO: 214140
  chr11:36060798-36060835
  hypo

SEQ ID NO: 408376 - DNA, 49 bp, Homo sapiens; identical to SEQ ID NO: 214141
  chr11:36248992-36249041
  hypo

SEQ ID NO: 408377 - DNA, 42 bp, Homo sapiens; identical to SEQ ID NO: 263362
  chr11:36292455-36292497
  hypo

SEQ ID NO: 408378 - DNA, 183 bp, Homo sapiens; identical to SEQ ID NO: 263363
  chr11:36300631-36300814
  hypo

SEQ ID NO: 408379 - DNA, 42 bp, Homo sapiens; identical to SEQ ID NO: 263364
  chr11:36419756-36419798
  hypo

SEQ ID NO: 408380 - DNA, 82 bp, Homo sapiens; identical to SEQ ID NO: 214143
  chr11:40039796-40039878
  hypo

SEQ ID NO: 408381 - DNA, 140 bp, Homo sapiens; identical to SEQ ID NO: 263375
  chr11:44594534-44594674
  hypo

SEQ ID NO: 408382 - DNA, 41 bp, Homo sapiens; identical to SEQ ID NO: 214147
  chr11:44611373-44611414
  hypo

SEQ ID NO: 408383 - DNA, 86 bp, Homo sapiens; identical to SEQ ID NO: 214153
  chr11:44944309-44944395
  hypo

SEQ ID NO: 408384 - DNA, 33 bp, Homo sapiens; identical to SEQ ID NO: 263388
  chr11:44993090-44993123
  hypo

SEQ ID NO: 408385 - DNA, 371 bp, Homo sapiens; identical to SEQ ID NO: 263389
  chr11:45011418-45011789
  hypo

SEQ ID NO: 408386 - DNA, 191 bp, Homo sapiens; identical to SEQ ID NO: 263394
  chr11:45417059-45417250
  hypo

SEQ ID NO: 408387 - DNA, 42 bp, Homo sapiens; identical to SEQ ID NO: 263395
  chr11:45773610-45773652
  hypo

SEQ ID NO: 408388 - DNA, 195 bp, Homo sapiens; identical to SEQ ID NO: 214157
  chr11:45951099-45951294
  hypo

SEQ ID NO: 408389 - DNA, 499 bp, Homo sapiens; identical to SEQ ID NO: 214158
  chr11:45953589-45954088
  hypo

SEQ ID NO: 408390 - DNA, 189 bp, Homo sapiens; identical to SEQ ID NO: 263399
  chr11:45955789-45955978
  hypo

SEQ ID NO: 408391 - DNA, 62 bp, Homo sapiens; identical to SEQ ID NO: 202540
  chr11:46264958-46265020
  hypo

SEQ ID NO: 408392 - DNA, 34 bp, Homo sapiens; identical to SEQ ID NO: 392723
  chr11:46338449-46338483
  hypo

SEQ ID NO: 408393 - DNA, 41 bp, Homo sapiens; identical to SEQ ID NO: 263404
  chr11:46390759-46390800
  hypo

SEQ ID NO: 408394 - DNA, 32 bp, Homo sapiens; identical to SEQ ID NO: 263406
  chr11:46483754-46483786
  hypo

SEQ ID NO: 408395 - DNA, 333 bp, Homo sapiens; identical to SEQ ID NO: 224102
  chr11:46564032-46564365
  hypo

SEQ ID NO: 408396 - DNA, 32 bp, Homo sapiens; identical to SEQ ID NO: 214168
  chr11:46844005-46844037
  hypo

SEQ ID NO: 408397 - DNA, 182 bp, Homo sapiens; identical to SEQ ID NO: 224103
  chr11:46848281-46848463
  hypo

SEQ ID NO: 408398 - DNA, 34 bp, Homo sapiens; identical to SEQ ID NO: 214169
  chr11:46959101-46959135
  hypo

SEQ ID NO: 408399 - DNA, 31 bp, Homo sapiens; identical to SEQ ID NO: 263416
  chr11:47081353-47081384
  hypo

SEQ ID NO: 408400 - DNA, 186 bp, Homo sapiens; identical to SEQ ID NO: 214170
  chr11:47169578-47169764
  hypo

SEQ ID NO: 408401 - DNA, 611 bp, Homo sapiens; identical to SEQ ID NO: 263419
  chr11:47264239-47264850
  hypo

SEQ ID NO: 408402 - DNA, 251 bp, Homo sapiens; identical to SEQ ID NO: 263420
  chr11:47348746-47348997
  hypo

SEQ ID NO: 408403 - DNA, 80 bp, Homo sapiens; identical to SEQ ID NO: 263422
  chr11:47431265-47431345
  hypo

SEQ ID NO: 408404 - DNA, 180 bp, Homo sapiens; identical to SEQ ID NO: 263423
  chr11:47479675-47479855
  hypo

SEQ ID NO: 408405 - DNA, 78 bp, Homo sapiens; identical to SEQ ID NO: 214174
  chr11:47599039-47599117
  hypo

SEQ ID NO: 408406 - DNA, 50 bp, Homo sapiens; identical to SEQ ID NO: 263433
  chr11:49124076-49124126
  hypo

SEQ ID NO: 408407 - DNA, 43 bp, Homo sapiens; identical to SEQ ID NO: 314248
  chr11:49212565-49212608
  hypo

SEQ ID NO: 408408 - DNA, 58 bp, Homo sapiens; identical to SEQ ID NO: 263436
  chr11:55940876-55940934
  hypo

SEQ ID NO: 408409 - DNA, 158 bp, Homo sapiens; identical to SEQ ID NO: 263437
  chr11:57010762-57010920
  hypo

SEQ ID NO: 408410 - DNA, 72 bp, Homo sapiens; identical to SEQ ID NO: 263438
  chr11:57069626-57069698
  hypo

SEQ ID NO: 408411 - DNA, 147 bp, Homo sapiens; identical to SEQ ID NO: 263440
  chr11:57072387-57072534
  hypo

SEQ ID NO: 408412 - DNA, 84 bp, Homo sapiens; identical to SEQ ID NO: 314264
  chr11:57373338-57373422
  hypo

SEQ ID NO: 408413 - DNA, 51 bp, Homo sapiens; identical to SEQ ID NO: 202551
  chr11:57434928-57434979
  hypo

SEQ ID NO: 408414 - DNA, 120 bp, Homo sapiens; identical to SEQ ID NO: 263454
  chr11:58437898-58438018
  hypo

SEQ ID NO: 408415 - DNA, 42 bp, Homo sapiens; identical to SEQ ID NO: 214183
  chr11:58949204-58949246
  hypo

SEQ ID NO: 408416 - DNA, 42 bp, Homo sapiens; identical to SEQ ID NO: 263457
  chr11:59031094-59031136
  hypo

SEQ ID NO: 408417 - DNA, 66 bp, Homo sapiens; identical to SEQ ID NO: 314273
  chr11:59312681-59312747
  hypo

SEQ ID NO: 408418 - DNA, 176 bp, Homo sapiens; identical to SEQ ID NO: 214184
  chr11:59423038-59423214
  hypo

SEQ ID NO: 408419 - DNA, 272 bp, Homo sapiens; identical to SEQ ID NO: 214186
  chr11:59665529-59665801
  hypo

SEQ ID NO: 408420 - DNA, 321 bp, Homo sapiens; identical to SEQ ID NO: 214191
  chr11:60514866-60515187
  hypo

SEQ ID NO: 408421 - DNA, 83 bp, Homo sapiens; identical to SEQ ID NO: 392734
  chr11:60648733-60648816
  hypo

SEQ ID NO: 408422 - DNA, 93 bp, Homo sapiens; identical to SEQ ID NO: 263472
  chr11:60680209-60680302
  hypo

SEQ ID NO: 408423 - DNA, 33 bp, Homo sapiens; identical to SEQ ID NO: 263473
  chr11:60680362-60680395
  hypo

SEQ ID NO: 408424 - DNA, 230 bp, Homo sapiens; identical to SEQ ID NO: 214192
  chr11:60689401-60689631
  hypo

SEQ ID NO: 408425 - DNA, 32 bp, Homo sapiens; identical to SEQ ID NO: 263479
  chr11:60754318-60754350
  hypo

SEQ ID NO: 408426 - DNA, 155 bp, Homo sapiens; identical to SEQ ID NO: 48499
  chr11:60775226-60775381
  hypo

SEQ ID NO: 408427 - DNA, 153 bp, Homo sapiens; identical to SEQ ID NO: 263480
  chr11:60850614-60850767
  hypo

SEQ ID NO: 408428 - DNA, 173 bp, Homo sapiens; identical to SEQ ID NO: 214195
  chr11:60880738-60880911
  hypo

SEQ ID NO: 408429 - DNA, 103 bp, Homo sapiens; identical to SEQ ID NO: 263484
  chr11:60920711-60920814
  hypo

SEQ ID NO: 408430 - DNA, 32 bp, Homo sapiens; identical to SEQ ID NO: 214197
  chr11:60926976-60927008
  hypo

SEQ ID NO: 408431 - DNA, 66 bp, Homo sapiens; identical to SEQ ID NO: 214198
  chr11:60927368-60927434
  hypo

SEQ ID NO: 408432 - DNA, 100 bp, Homo sapiens; identical to SEQ ID NO: 214204
  chr11:61108987-61109087
  hypo

SEQ ID NO: 408433 - DNA, 169 bp, Homo sapiens; identical to SEQ ID NO: 263494
  chr11:61110433-61110602
  hypo

SEQ ID NO: 408434 - DNA, 260 bp, Homo sapiens; identical to SEQ ID NO: 214208
  chr11:61305393-61305653
  hypo

SEQ ID NO: 408435 - DNA, 50 bp, Homo sapiens; identical to SEQ ID NO: 214209
  chr11:61474397-61474447
  hypo

SEQ ID NO: 408436 - DNA, 52 bp, Homo sapiens; identical to SEQ ID NO: 263504
  chr11:61475156-61475208
  hypo

SEQ ID NO: 408437 - DNA, 189 bp, Homo sapiens; identical to SEQ ID NO: 214213
  chr11:61479892-61480081
  hypo

SEQ ID NO: 408438 - DNA, 213 bp, Homo sapiens; identical to SEQ ID NO: 263513
  chr11:61495640-61495853
  hypo

SEQ ID NO: 408439 - DNA, 320 bp, Homo sapiens; identical to SEQ ID NO: 263514
  chr11:61498684-61499004
  hypo

SEQ ID NO: 408440 - DNA, 174 bp, Homo sapiens; identical to SEQ ID NO: 263515
  chr11:61502322-61502496
  hypo

SEQ ID NO: 408441 - DNA, 342 bp, Homo sapiens; identical to SEQ ID NO: 398698
  chr11:61520025-61520367
  hypo

SEQ ID NO: 408442 - DNA, 458 bp, Homo sapiens; identical to SEQ ID NO: 214219
  chr11:61522483-61522941
  hypo

SEQ ID NO: 408443 - DNA, 99 bp, Homo sapiens; identical to SEQ ID NO: 214220
  chr11:61525593-61525692
  hypo

SEQ ID NO: 408444 - DNA, 407 bp, Homo sapiens; identical to SEQ ID NO: 214223
  chr11:61632399-61632806
  hypo

SEQ ID NO: 408445 - DNA, 42 bp, Homo sapiens; identical to SEQ ID NO: 214225
  chr11:61635271-61635313
  hypo

SEQ ID NO: 408446 - DNA, 155 bp, Homo sapiens; identical to SEQ ID NO: 314353
  chr11:61641255-61641410
  hypo

SEQ ID NO: 408447 - DNA, 215 bp, Homo sapiens; identical to SEQ ID NO: 214226
  chr11:61644863-61645078
  hypo

SEQ ID NO: 408448 - DNA, 42 bp, Homo sapiens; identical to SEQ ID NO: 263530
  chr11:61653516-61653558
  hypo

SEQ ID NO: 408449 - DNA, 63 bp, Homo sapiens; identical to SEQ ID NO: 314360
  chr11:61666025-61666088
  hypo

SEQ ID NO: 408450 - DNA, 66 bp, Homo sapiens; identical to SEQ ID NO: 214236
  chr11:61688731-61688797
  hypo

SEQ ID NO: 408451 - DNA, 94 bp, Homo sapiens; identical to SEQ ID NO: 263542
  chr11:61713860-61713954
  hypo

SEQ ID NO: 408452 - DNA, 221 bp, Homo sapiens; identical to SEQ ID NO: 214237
  chr11:61717670-61717891
  hypo

SEQ ID NO: 408453 - DNA, 148 bp, Homo sapiens; identical to SEQ ID NO: 214240
  chr11:61770721-61770869
  hypo

SEQ ID NO: 408454 - DNA, 31 bp, Homo sapiens; identical to SEQ ID NO: 214241
  chr11:61811795-61811826
  hypo

SEQ ID NO: 408455 - DNA, 44 bp, Homo sapiens; identical to SEQ ID NO: 214242
  chr11:61825693-61825737
  hypo

SEQ ID NO: 408456 - DNA, 55 bp, Homo sapiens; identical to SEQ ID NO: 263553
  chr11:61889939-61889994
  hypo

SEQ ID NO: 408457 - DNA, 129 bp, Homo sapiens; identical to SEQ ID NO: 263554
  chr11:61912296-61912425
  hypo

SEQ ID NO: 408458 - DNA, 164 bp, Homo sapiens; identical to SEQ ID NO: 224119
  chr11:62192262-62192426
  hypo

SEQ ID NO: 408459 - DNA, 468 bp, Homo sapiens; identical to SEQ ID NO: 202568
  chr11:62313646-62314114
  hypo

SEQ ID NO: 408460 - DNA, 187 bp, Homo sapiens; identical to SEQ ID NO: 263559
  chr11:62361980-62362167
  hypo

SEQ ID NO: 408461 - DNA, 105 bp, Homo sapiens; identical to SEQ ID NO: 214245
  chr11:62387277-62387382
  hypo

SEQ ID NO: 408462 - DNA, 49 bp, Homo sapiens; identical to SEQ ID NO: 314392
  chr11:62450079-62450128
  hypo

SEQ ID NO: 408463 - DNA, 239 bp, Homo sapiens; identical to SEQ ID NO: 224123
  chr11:62473884-62474123
  hypo

SEQ ID NO: 408464 - DNA, 197 bp, Homo sapiens; identical to SEQ ID NO: 214247
  chr11:62474896-62475093
  hypo

SEQ ID NO: 408465 - DNA, 51 bp, Homo sapiens; identical to SEQ ID NO: 314396
  chr11:62484466-62484517
  hypo

SEQ ID NO: 408466 - DNA, 102 bp, Homo sapiens; identical to SEQ ID NO: 314397
  chr11:62484547-62484649
  hypo

SEQ ID NO: 408467 - DNA, 66 bp, Homo sapiens; identical to SEQ ID NO: 214248
  chr11:62532994-62533060
  hypo

SEQ ID NO: 408468 - DNA, 296 bp, Homo sapiens; identical to SEQ ID NO: 263571
  chr11:62581077-62581373
  hypo

SEQ ID NO: 408469 - DNA, 120 bp, Homo sapiens; identical to SEQ ID NO: 263573
  chr11:62658210-62658330
  hypo

SEQ ID NO: 408470 - DNA, 206 bp, Homo sapiens; identical to SEQ ID NO: 202576
  chr11:63258404-63258610
  hypo

SEQ ID NO: 408471 - DNA, 54 bp, Homo sapiens; identical to SEQ ID NO: 202577
  chr11:63258770-63258824
  hypo

SEQ ID NO: 408472 - DNA, 69 bp, Homo sapiens; identical to SEQ ID NO: 214260
  chr11:63764163-63764232
  hypo

SEQ ID NO: 408473 - DNA, 150 bp, Homo sapiens; identical to SEQ ID NO: 263591
  chr11:63764790-63764940
  hypo

SEQ ID NO: 408474 - DNA, 31 bp, Homo sapiens; identical to SEQ ID NO: 263596
  chr11:63814029-63814060
  hypo

SEQ ID NO: 408475 - DNA, 437 bp, Homo sapiens; identical to SEQ ID NO: 214263
  chr11:63832549-63832986
  hypo

SEQ ID NO: 408476 - DNA, 280 bp, Homo sapiens; identical to SEQ ID NO: 263602
  chr11:63864923-63865203
  hypo

SEQ ID NO: 408477 - DNA, 258 bp, Homo sapiens; identical to SEQ ID NO: 263604
  chr11:63883405-63883663
  hypo

SEQ ID NO: 408478 - DNA, 254 bp, Homo sapiens; identical to SEQ ID NO: 263606
  chr11:63888534-63888788
  hypo

SEQ ID NO: 408479 - DNA, 33 bp, Homo sapiens; identical to SEQ ID NO: 263607
  chr11:63889204-63889237
  hypo

SEQ ID NO: 408480 - DNA, 144 bp, Homo sapiens; identical to SEQ ID NO: 263608
  chr11:63892468-63892612
  hypo

SEQ ID NO: 408481 - DNA, 252 bp, Homo sapiens; identical to SEQ ID NO: 263613
  chr11:63916439-63916691
  hypo

SEQ ID NO: 408482 - DNA, 80 bp, Homo sapiens; identical to SEQ ID NO: 214270
  chr11:63934619-63934699
  hypo

SEQ ID NO: 408483 - DNA, 215 bp, Homo sapiens; identical to SEQ ID NO: 214272
  chr11:63988354-63988569
  hypo

SEQ ID NO: 408484 - DNA, 31 bp, Homo sapiens; identical to SEQ ID NO: 263620
  chr11:64011977-64012008
  hypo

SEQ ID NO: 408485 - DNA, 88 bp, Homo sapiens; identical to SEQ ID NO: 263622
  chr11:64034944-64035032
  hypo

SEQ ID NO: 408486 - DNA, 115 bp, Homo sapiens; identical to SEQ ID NO: 214277
  chr11:64081531-64081646
  hypo

SEQ ID NO: 408487 - DNA, 159 bp, Homo sapiens; identical to SEQ ID NO: 263631
  chr11:64089708-64089867
  hypo

SEQ ID NO: 408488 - DNA, 158 bp, Homo sapiens; identical to SEQ ID NO: 214280
  chr11:64118936-64119094
  hypo

SEQ ID NO: 408489 - DNA, 229 bp, Homo sapiens; identical to SEQ ID NO: 214281
  chr11:64120593-64120822
  hypo

SEQ ID NO: 408490 - DNA, 171 bp, Homo sapiens; identical to SEQ ID NO: 214282
  chr11:64120948-64121119
  hypo

SEQ ID NO: 408491 - DNA, 42 bp, Homo sapiens; identical to SEQ ID NO: 214288
  chr11:64335474-64335516
  hypo

SEQ ID NO: 408492 - DNA, 87 bp, Homo sapiens; identical to SEQ ID NO: 214289
  chr11:64347188-64347275
  hypo

SEQ ID NO: 408493 - DNA, 222 bp, Homo sapiens; identical to SEQ ID NO: 263650
  chr11:64367275-64367497
  hypo

SEQ ID NO: 408494 - DNA, 101 bp, Homo sapiens; identical to SEQ ID NO: 263651
  chr11:64367837-64367938
  hypo

SEQ ID NO: 408495 - DNA, 202 bp, Homo sapiens; identical to SEQ ID NO: 288163
  chr11:64410436-64410638
  hypo

SEQ ID NO: 408496 - DNA, 58 bp, Homo sapiens; identical to SEQ ID NO: 214291
  chr11:64418855-64418913
  hypo

SEQ ID NO: 408497 - DNA, 153 bp, Homo sapiens; identical to SEQ ID NO: 398730
  chr11:64512196-64512349
  hypo

SEQ ID NO: 408498 - DNA, 65 bp, Homo sapiens; identical to SEQ ID NO: 263655
  chr11:64521038-64521103
  hypo

SEQ ID NO: 408499 - DNA, 83 bp, Homo sapiens; identical to SEQ ID NO: 214294
  chr11:64607057-64607140
  hypo

SEQ ID NO: 408500 - DNA, 78 bp, Homo sapiens; identical to SEQ ID NO: 314501
  chr11:64631090-64631168
  hypo

SEQ ID NO: 408501 - DNA, 59 bp, Homo sapiens; identical to SEQ ID NO: 263666
  chr11:64646831-64646890
  hypo

SEQ ID NO: 408502 - DNA, 198 bp, Homo sapiens; identical to SEQ ID NO: 224132
  chr11:64698945-64699143
  hypo

SEQ ID NO: 408503 - DNA, 156 bp, Homo sapiens; identical to SEQ ID NO: 263675
  chr11:64833875-64834031
  hypo

SEQ ID NO: 408504 - DNA, 99 bp, Homo sapiens; identical to SEQ ID NO: 314526
  chr11:64975361-64975460
  hypo

SEQ ID NO: 408505 - DNA, 329 bp, Homo sapiens; identical to SEQ ID NO: 314527
  chr11:64975532-64975861
  hypo

SEQ ID NO: 408506 - DNA, 133 bp, Homo sapiens; identical to SEQ ID NO: 263691
  chr11:65145405-65145538
  hypo

SEQ ID NO: 408507 - DNA, 91 bp, Homo sapiens; identical to SEQ ID NO: 224135
  chr11:65147933-65148024
  hypo

SEQ ID NO: 408508 - DNA, 98 bp, Homo sapiens; identical to SEQ ID NO: 202592
  chr11:65189906-65190004
  hypo

SEQ ID NO: 408509 - DNA, 120 bp, Homo sapiens; identical to SEQ ID NO: 263693
  chr11:65276490-65276610
  hypo

SEQ ID NO: 408510 - DNA, 168 bp, Homo sapiens; identical to SEQ ID NO: 214312
  chr11:65306213-65306381
  hypo

SEQ ID NO: 408511 - DNA, 350 bp, Homo sapiens; identical to SEQ ID NO: 214313
  chr11:65306425-65306775
  hypo

SEQ ID NO: 408512 - DNA, 299 bp, Homo sapiens; identical to SEQ ID NO: 386310
  chr11:65306805-65307104
  hypo

SEQ ID NO: 408513 - DNA, 224 bp, Homo sapiens; identical to SEQ ID NO: 214315
  chr11:65353078-65353302
  hypo

SEQ ID NO: 408514 - DNA, 201 bp, Homo sapiens; identical to SEQ ID NO: 263704
  chr11:65402722-65402923
  hypo

SEQ ID NO: 408515 - DNA, 144 bp, Homo sapiens; identical to SEQ ID NO: 202602
  chr11:65419839-65419983
  hypo

SEQ ID NO: 408516 - DNA, 49 bp, Homo sapiens; identical to SEQ ID NO: 214321
  chr11:65425914-65425963
  hypo

SEQ ID NO: 408517 - DNA, 37 bp, Homo sapiens; identical to SEQ ID NO: 214322
  chr11:65524510-65524547
  hypo

SEQ ID NO: 408518 - DNA, 108 bp, Homo sapiens; identical to SEQ ID NO: 263712
  chr11:65561324-65561432
  hypo

SEQ ID NO: 408519 - DNA, 32 bp, Homo sapiens; identical to SEQ ID NO: 263713
  chr11:65577928-65577960
  hypo

SEQ ID NO: 408520 - DNA, 226 bp, Homo sapiens; identical to SEQ ID NO: 314567
  chr11:65629224-65629450
  hypo

SEQ ID NO: 408521 - DNA, 92 bp, Homo sapiens; identical to SEQ ID NO: 214328
  chr11:65634006-65634098
  hypo

SEQ ID NO: 408522 - DNA, 65 bp, Homo sapiens; identical to SEQ ID NO: 214332
  chr11:65733942-65734007
  hypo

SEQ ID NO: 408523 - DNA, 314 bp, Homo sapiens; identical to SEQ ID NO: 214333
  chr11:65743837-65744151
  hypo

SEQ ID NO: 408524 - DNA, 55 bp, Homo sapiens; identical to SEQ ID NO: 263725
  chr11:65746343-65746398
  hypo

SEQ ID NO: 408525 - DNA, 56 bp, Homo sapiens
  chr11:65761070-65761126
  hypo
aaaaaacttgagctttctacagaaaacatctgtaggagggaaagaaattaatcagc

SEQ ID NO: 408526 - DNA, 41 bp, Homo sapiens; identical to SEQ ID NO: 214336
  chr11:65810130-65810171
  hypo

SEQ ID NO: 408527 - DNA, 78 bp, Homo sapiens; identical to SEQ ID NO: 214337
  chr11:65817722-65817800
  hypo

SEQ ID NO: 408528 - DNA, 241 bp, Homo sapiens; identical to SEQ ID NO: 263731
  chr11:65935759-65936000
  hypo

SEQ ID NO: 408529 - DNA, 59 bp, Homo sapiens; identical to SEQ ID NO: 263737
  chr11:66101899-66101958
  hypo

SEQ ID NO: 408530 - DNA, 63 bp, Homo sapiens; identical to SEQ ID NO: 214342
  chr11:66113950-66114013
  hypo

SEQ ID NO: 408531 - DNA, 214 bp, Homo sapiens; identical to SEQ ID NO: 314593
  chr11:66114043-66114257
  hypo

SEQ ID NO: 408532 - DNA, 163 bp, Homo sapiens; identical to SEQ ID NO: 263741
  chr11:66243063-66243226
  hypo

SEQ ID NO: 408533 - DNA, 233 bp, Homo sapiens; identical to SEQ ID NO: 263743
  chr11:66373085-66373318
  hypo

SEQ ID NO: 408534 - DNA, 36 bp, Homo sapiens; identical to SEQ ID NO: 214348
  chr11:66453719-66453755
  hypo

SEQ ID NO: 408535 - DNA, 265 bp, Homo sapiens; identical to SEQ ID NO: 263748
  chr11:66457265-66457530
  hypo

SEQ ID NO: 408536 - DNA, 119 bp, Homo sapiens; identical to SEQ ID NO: 263749
  chr11:66461612-66461731
  hypo

SEQ ID NO: 408537 - DNA, 130 bp, Homo sapiens; identical to SEQ ID NO: 263750
  chr11:66475123-66475253
  hypo

SEQ ID NO: 408538 - DNA, 80 bp, Homo sapiens; identical to SEQ ID NO: 214350
  chr11:66510746-66510826
  hypo

SEQ ID NO: 408539 - DNA, 88 bp, Homo sapiens; identical to SEQ ID NO: 214352
  chr11:66557750-66557838
  hypo

SEQ ID NO: 408540 - DNA, 34 bp, Homo sapiens; identical to SEQ ID NO: 263761
  chr11:66602481-66602515
  hypo

SEQ ID NO: 408541 - DNA, 97 bp, Homo sapiens; identical to SEQ ID NO: 263768
  chr11:66637738-66637835
  hypo

SEQ ID NO: 408542 - DNA, 40 bp, Homo sapiens; identical to SEQ ID NO: 263769
  chr11:66639553-66639593
  hypo

SEQ ID NO: 408543 - DNA, 91 bp, Homo sapiens; identical to SEQ ID NO: 314624
  chr11:66649105-66649196
  hypo

SEQ ID NO: 408544 - DNA, 298 bp, Homo sapiens; identical to SEQ ID NO: 214361
  chr11:66676020-66676318
  hypo

SEQ ID NO: 408545 - DNA, 223 bp, Homo sapiens; identical to SEQ ID NO: 263780
  chr11:66676878-66677101
  hypo

SEQ ID NO: 408546 - DNA, 199 bp, Homo sapiens; identical to SEQ ID NO: 263782
  chr11:66683036-66683235
  hypo

SEQ ID NO: 408547 - DNA, 86 bp, Homo sapiens; identical to SEQ ID NO: 214362
  chr11:66683850-66683936
  hypo

SEQ ID NO: 408548 - DNA, 346 bp, Homo sapiens; identical to SEQ ID NO: 214364
  chr11:66701354-66701700
  hypo

SEQ ID NO: 408549 - DNA, 44 bp, Homo sapiens; identical to SEQ ID NO: 214365
  chr11:66710160-66710204
  hypo

SEQ ID NO: 408550 - DNA, 87 bp, Homo sapiens; identical to SEQ ID NO: 263789
  chr11:66807525-66807612
  hypo

SEQ ID NO: 408551 - DNA, 33 bp, Homo sapiens; identical to SEQ ID NO: 263790
  chr11:66867270-66867303
  hypo

SEQ ID NO: 408552 - DNA, 31 bp, Homo sapiens; identical to SEQ ID NO: 214369
  chr11:67002080-67002111
  hypo

SEQ ID NO: 408553 - DNA, 84 bp, Homo sapiens; identical to SEQ ID NO: 263795
  chr11:67021693-67021777
  hypo

SEQ ID NO: 408554 - DNA, 77 bp, Homo sapiens; identical to SEQ ID NO: 214370
  chr11:67051193-67051270
  hypo

SEQ ID NO: 408555 - DNA, 49 bp, Homo sapiens; identical to SEQ ID NO: 214371
  chr11:67059786-67059835
  hypo

SEQ ID NO: 408556 - DNA, 209 bp, Homo sapiens; identical to SEQ ID NO: 263799
  chr11:67073281-67073490
  hypo

SEQ ID NO: 408557 - DNA, 99 bp, Homo sapiens; identical to SEQ ID NO: 263800
  chr11:67076905-67077004
  hypo

SEQ ID NO: 408558 - DNA, 170 bp, Homo sapiens; identical to SEQ ID NO: 263801
  chr11:67077277-67077447
  hypo

SEQ ID NO: 408559 - DNA, 41 bp, Homo sapiens; identical to SEQ ID NO: 214375
  chr11:67091662-67091703
  hypo

SEQ ID NO: 408560 - DNA, 105 bp, Homo sapiens; identical to SEQ ID NO: 224150
  chr11:67141093-67141198
  hypo

SEQ ID NO: 408561 - DNA, 76 bp, Homo sapiens; identical to SEQ ID NO: 263806
  chr11:67145532-67145608
  hypo

SEQ ID NO: 408562 - DNA, 442 bp, Homo sapiens; identical to SEQ ID NO: 263809
  chr11:67186967-67187409
  hypo

SEQ ID NO: 408563 - DNA, 235 bp, Homo sapiens; identical to SEQ ID NO: 263810
  chr11:67201983-67202218
  hypo

SEQ ID NO: 408564 - DNA, 213 bp, Homo sapiens; identical to SEQ ID NO: 263813
  chr11:67206219-67206432
  hypo

SEQ ID NO: 408565 - DNA, 234 bp, Homo sapiens; identical to SEQ ID NO: 202629
  chr11:67210770-67211004
  hypo

SEQ ID NO: 408566 - DNA, 289 bp, Homo sapiens; identical to SEQ ID NO: 263819
  chr11:67257336-67257625
  hypo

SEQ ID NO: 408567 - DNA, 383 bp, Homo sapiens; identical to SEQ ID NO: 214382
  chr11:67259386-67259769
  hypo

SEQ ID NO: 408568 - DNA, 110 bp, Homo sapiens; identical to SEQ ID NO: 263827
  chr11:67406911-67407021
  hypo

SEQ ID NO: 408569 - DNA, 37 bp, Homo sapiens; identical to SEQ ID NO: 263828
  chr11:67425589-67425626
  hypo

SEQ ID NO: 408570 - DNA, 184 bp, Homo sapiens; identical to SEQ ID NO: 263829
  chr11:67430155-67430339
  hypo

SEQ ID NO: 408571 - DNA, 95 bp, Homo sapiens; identical to SEQ ID NO: 202634
  chr11:67777602-67777697
  hypo

SEQ ID NO: 408572 - DNA, 180 bp, Homo sapiens; identical to SEQ ID NO: 263835
  chr11:67785446-67785626
  hypo

SEQ ID NO: 408573 - DNA, 257 bp, Homo sapiens; identical to SEQ ID NO: 263836
  chr11:67786112-67786369
  hypo

SEQ ID NO: 408574 - DNA, 64 bp, Homo sapiens; identical to SEQ ID NO: 214390
  chr11:67810254-67810318
  hypo

SEQ ID NO: 408575 - DNA, 326 bp, Homo sapiens; identical to SEQ ID NO: 314693
  chr11:67811379-67811705
  hypo

SEQ ID NO: 408576 - DNA, 77 bp, Homo sapiens; identical to SEQ ID NO: 214395
  chr11:67864777-67864854
  hypo

SEQ ID NO: 408577 - DNA, 172 bp, Homo sapiens; identical to SEQ ID NO: 263849
  chr11:67926119-67926291
  hypo

SEQ ID NO: 408578 - DNA, 155 bp, Homo sapiens; identical to SEQ ID NO: 263851
  chr11:67949302-67949457
  hypo

SEQ ID NO: 408579 - DNA, 216 bp, Homo sapiens; identical to SEQ ID NO: 263852
  chr11:67970707-67970923
  hypo

SEQ ID NO: 408580 - DNA, 257 bp, Homo sapiens; identical to SEQ ID NO: 214398
  chr11:67984063-67984320
  hypo

SEQ ID NO: 408581 - DNA, 44 bp, Homo sapiens; identical to SEQ ID NO: 314706
  chr11:67984388-67984432
  hypo

SEQ ID NO: 408582 - DNA, 110 bp, Homo sapiens; identical to SEQ ID NO: 224156
  chr11:68080104-68080214
  hypo

SEQ ID NO: 408583 - DNA, 192 bp, Homo sapiens; identical to SEQ ID NO: 214401
  chr11:68142591-68142783
  hypo

SEQ ID NO: 408584 - DNA, 76 bp, Homo sapiens; identical to SEQ ID NO: 263858
  chr11:68153340-68153416
  hypo

SEQ ID NO: 408585 - DNA, 94 bp, Homo sapiens; identical to SEQ ID NO: 214402
  chr11:68158724-68158818
  hypo

SEQ ID NO: 408586 - DNA, 145 bp, Homo sapiens; identical to SEQ ID NO: 214404
  chr11:68162351-68162496
  hypo

SEQ ID NO: 408587 - DNA, 99 bp, Homo sapiens; identical to SEQ ID NO: 214405
  chr11:68172056-68172155
  hypo

SEQ ID NO: 408588 - DNA, 68 bp, Homo sapiens; identical to SEQ ID NO: 263867
  chr11:68189965-68190033
  hypo

SEQ ID NO: 408589 - DNA, 362 bp, Homo sapiens; identical to SEQ ID NO: 263868
  chr11:68190242-68190604
  hypo

SEQ ID NO: 408590 - DNA, 263 bp, Homo sapiens; identical to SEQ ID NO: 263870
  chr11:68191537-68191800
  hypo

SEQ ID NO: 408591 - DNA, 253 bp, Homo sapiens; identical to SEQ ID NO: 214411
  chr11:68192497-68192750
  hypo

SEQ ID NO: 408592 - DNA, 136 bp, Homo sapiens; identical to SEQ ID NO: 263872
  chr11:68192960-68193096
  hypo

SEQ ID NO: 408593 - DNA, 192 bp, Homo sapiens; identical to SEQ ID NO: 214415
  chr11:68201117-68201309
  hypo

SEQ ID NO: 408594 - DNA, 140 bp, Homo sapiens; identical to SEQ ID NO: 214416
  chr11:68203449-68203589
  hypo

SEQ ID NO: 408595 - DNA, 194 bp, Homo sapiens; identical to SEQ ID NO: 214420
  chr11:68207880-68208074
  hypo

SEQ ID NO: 408596 - DNA, 218 bp, Homo sapiens; identical to SEQ ID NO: 263884
  chr11:68225539-68225757
  hypo

SEQ ID NO: 408597 - DNA, 156 bp, Homo sapiens; identical to SEQ ID NO: 263886
  chr11:68341483-68341639
  hypo

SEQ ID NO: 408598 - DNA, 33 bp, Homo sapiens; identical to SEQ ID NO: 263890
  chr11:68408313-68408346
  hypo

SEQ ID NO: 408599 - DNA, 137 bp, Homo sapiens; identical to SEQ ID NO: 263892
  chr11:68442013-68442150
  hypo

SEQ ID NO: 408600 - DNA, 37 bp, Homo sapiens; identical to SEQ ID NO: 214423
  chr11:68505095-68505132
  hypo

SEQ ID NO: 408601 - DNA, 113 bp, Homo sapiens; identical to SEQ ID NO: 214424
  chr11:68549945-68550058
  hypo

SEQ ID NO: 408602 - DNA, 203 bp, Homo sapiens; identical to SEQ ID NO: 263903
  chr11:68701352-68701555
  hypo

SEQ ID NO: 408603 - DNA, 48 bp, Homo sapiens; identical to SEQ ID NO: 263905
  chr11:68728254-68728302
  hypo

SEQ ID NO: 408604 - DNA, 176 bp, Homo sapiens; identical to SEQ ID NO: 214428
  chr11:68838712-68838888
  hypo

SEQ ID NO: 408605 - DNA, 71 bp, Homo sapiens; identical to SEQ ID NO: 214429
  chr11:68853901-68853972
  hypo

SEQ ID NO: 408606 - DNA, 76 bp, Homo sapiens; identical to SEQ ID NO: 263912
  chr11:68856610-68856686
  hypo

SEQ ID NO: 408607 - DNA, 196 bp, Homo sapiens; identical to SEQ ID NO: 263913
  chr11:68968788-68968984
  hypo

SEQ ID NO: 408608 - DNA, 250 bp, Homo sapiens; identical to SEQ ID NO: 263917
  chr11:69056019-69056269
  hypo

SEQ ID NO: 408609 - DNA, 45 bp, Homo sapiens; identical to SEQ ID NO: 263918
  chr11:69192163-69192208
  hypo

SEQ ID NO: 408610 - DNA, 193 bp, Homo sapiens; identical to SEQ ID NO: 214430
  chr11:69193143-69193336
  hypo

SEQ ID NO: 408611 - DNA, 217 bp, Homo sapiens; identical to SEQ ID NO: 263923
  chr11:69244619-69244836
  hypo

SEQ ID NO: 408612 - DNA, 52 bp, Homo sapiens; identical to SEQ ID NO: 263930
  chr11:69458859-69458911
  hypo

SEQ ID NO: 408613 - DNA, 89 bp, Homo sapiens; identical to SEQ ID NO: 263933
  chr11:69525488-69525577
  hypo

SEQ ID NO: 408614 - DNA, 33 bp, Homo sapiens; identical to SEQ ID NO: 263938
  chr11:69947852-69947885
  hypo

SEQ ID NO: 408615 - DNA, 183 bp, Homo sapiens; identical to SEQ ID NO: 263940
  chr11:69953589-69953772
  hypo

SEQ ID NO: 408616 - DNA, 77 bp, Homo sapiens; identical to SEQ ID NO: 263943
  chr11:69971958-69972035
  hypo

SEQ ID NO: 408617 - DNA, 49 bp, Homo sapiens; identical to SEQ ID NO: 263945
  chr11:69972882-69972931
  hypo

SEQ ID NO: 408618 - DNA, 127 bp, Homo sapiens; identical to SEQ ID NO: 263946
  chr11:69973147-69973274
  hypo

SEQ ID NO: 408619 - DNA, 362 bp, Homo sapiens; identical to SEQ ID NO: 263948
  chr11:69977943-69978305
  hypo

SEQ ID NO: 408620 - DNA, 163 bp, Homo sapiens; identical to SEQ ID NO: 263950
  chr11:69985998-69986161
  hypo

SEQ ID NO: 408621 - DNA, 224 bp, Homo sapiens; identical to SEQ ID NO: 263952
  chr11:70002957-70003181
  hypo

SEQ ID NO: 408622 - DNA, 106 bp, Homo sapiens; identical to SEQ ID NO: 263953
  chr11:70008172-70008278
  hypo

SEQ ID NO: 408623 - DNA, 484 bp, Homo sapiens; identical to SEQ ID NO: 263956
  chr11:70021160-70021644
  hypo

SEQ ID NO: 408624 - DNA, 182 bp, Homo sapiens; identical to SEQ ID NO: 263962
  chr11:70080115-70080297
  hypo

SEQ ID NO: 408625 - DNA, 74 bp, Homo sapiens; identical to SEQ ID NO: 263963
  chr11:70125200-70125274
  hypo

SEQ ID NO: 408626 - DNA, 31 bp, Homo sapiens; identical to SEQ ID NO: 263964
  chr11:70139604-70139635
  hypo

SEQ ID NO: 408627 - DNA, 95 bp, Homo sapiens; identical to SEQ ID NO: 263966
  chr11:70177350-70177445
  hypo

SEQ ID NO: 408628 - DNA, 141 bp, Homo sapiens; identical to SEQ ID NO: 214448
  chr11:70268911-70269052
  hypo

SEQ ID NO: 408629 - DNA, 77 bp, Homo sapiens; identical to SEQ ID NO: 214449
  chr11:70281167-70281244
  hypo

SEQ ID NO: 408630 - DNA, 68 bp, Homo sapiens; identical to SEQ ID NO: 214450
  chr11:70282721-70282789
  hypo

SEQ ID NO: 408631 - DNA, 202 bp, Homo sapiens; identical to SEQ ID NO: 263974
  chr11:71146644-71146846
  hypo

SEQ ID NO: 408632 - DNA, 33 bp, Homo sapiens; identical to SEQ ID NO: 214451
  chr11:71184882-71184915
  hypo

SEQ ID NO: 408633 - DNA, 153 bp, Homo sapiens; identical to SEQ ID NO: 263981
  chr11:71193408-71193561
  hypo

SEQ ID NO: 408634 - DNA, 90 bp, Homo sapiens; identical to SEQ ID NO: 214456
  chr11:71282211-71282301
  hypo

SEQ ID NO: 408635 - DNA, 120 bp, Homo sapiens; identical to SEQ ID NO: 263984
  chr11:71296339-71296459
  hypo

SEQ ID NO: 408636 - DNA, 82 bp, Homo sapiens; identical to SEQ ID NO: 214457
  chr11:71321043-71321125
  hypo

SEQ ID NO: 408637 - DNA, 35 bp, Homo sapiens; identical to SEQ ID NO: 263988
  chr11:71647721-71647756
  hypo

SEQ ID NO: 408638 - DNA, 241 bp, Homo sapiens; identical to SEQ ID NO: 288300
  chr11:72301342-72301583
  hypo

SEQ ID NO: 408639 - DNA, 581 bp, Homo sapiens; identical to SEQ ID NO: 263999
  chr11:72407946-72408527
  hypo

SEQ ID NO: 408640 - DNA, 330 bp, Homo sapiens; identical to SEQ ID NO: 314863
  chr11:72413650-72413980
  hypo

SEQ ID NO: 408641 - DNA, 45 bp, Homo sapiens; identical to SEQ ID NO: 314864
  chr11:72414010-72414055
  hypo

SEQ ID NO: 408642 - DNA, 107 bp, Homo sapiens; identical to SEQ ID NO: 214465
  chr11:72437783-72437890
  hypo

SEQ ID NO: 408643 - DNA, 80 bp, Homo sapiens; identical to SEQ ID NO: 264005
  chr11:72907831-72907911
  hypo

SEQ ID NO: 408644 - DNA, 139 bp, Homo sapiens; identical to SEQ ID NO: 224163
  chr11:73088003-73088142
  hypo

SEQ ID NO: 408645 - DNA, 92 bp, Homo sapiens; identical to SEQ ID NO: 214470
  chr11:73093212-73093304
  hypo

SEQ ID NO: 408646 - DNA, 42 bp, Homo sapiens; identical to SEQ ID NO: 214471
  chr11:73464045-73464087
  hypo

SEQ ID NO: 408647 - DNA, 157 bp, Homo sapiens; identical to SEQ ID NO: 264013
  chr11:73476967-73477124
  hypo

SEQ ID NO: 408648 - DNA, 87 bp, Homo sapiens
  chr11:73492622-73492709
  hypo
ggctgggtggtgttgatttttgctgttgttgtttttacttttctgtattttccaaatgttttatagttaattatgcctccctacttt

SEQ ID NO: 408649 - DNA, 35 bp, Homo sapiens; identical to SEQ ID NO: 264018
  chr11:73662698-73662733
  hypo

SEQ ID NO: 408650 - DNA, 145 bp, Homo sapiens; identical to SEQ ID NO: 314886
  chr11:73883535-73883680
  hypo

SEQ ID NO: 408651 - DNA, 96 bp, Homo sapiens; identical to SEQ ID NO: 264025
  chr11:74100758-74100854
  hypo

SEQ ID NO: 408652 - DNA, 74 bp, Homo sapiens; identical to SEQ ID NO: 264034
  chr11:74998668-74998742
  hypo

SEQ ID NO: 408653 - DNA, 67 bp, Homo sapiens; identical to SEQ ID NO: 264035
  chr11:75001250-75001317
  hypo

SEQ ID NO: 408654 - DNA, 95 bp, Homo sapiens; identical to SEQ ID NO: 214479
  chr11:75026127-75026222
  hypo

SEQ ID NO: 408655 - DNA, 452 bp, Homo sapiens; identical to SEQ ID NO: 264037
  chr11:75035341-75035793
  hypo

SEQ ID NO: 408656 - DNA, 44 bp, Homo sapiens; identical to SEQ ID NO: 264038
  chr11:75053731-75053775
  hypo

SEQ ID NO: 408657 - DNA, 714 bp, Homo sapiens; identical to SEQ ID NO: 202664
  chr11:75062273-75062987
  hypo

SEQ ID NO: 408658 - DNA, 203 bp, Homo sapiens; identical to SEQ ID NO: 264039
  chr11:75088468-75088671
  hypo

SEQ ID NO: 408659 - DNA, 87 bp, Homo sapiens; identical to SEQ ID NO: 264040
  chr11:75101269-75101356
  hypo

SEQ ID NO: 408660 - DNA, 120 bp, Homo sapiens; identical to SEQ ID NO: 214484
  chr11:75303123-75303243
  hypo

SEQ ID NO: 408661 - DNA, 43 bp, Homo sapiens; identical to SEQ ID NO: 214485
  chr11:75303273-75303316
  hypo

SEQ ID NO: 408662 - DNA, 141 bp, Homo sapiens; identical to SEQ ID NO: 264051
  chr11:75315461-75315602
  hypo

SEQ ID NO: 408663 - DNA, 92 bp, Homo sapiens; identical to SEQ ID NO: 264052
  chr11:75389093-75389185
  hypo

SEQ ID NO: 408664 - DNA, 180 bp, Homo sapiens; identical to SEQ ID NO: 214488
  chr11:75536035-75536215
  hypo

SEQ ID NO: 408665 - DNA, 31 bp, Homo sapiens; identical to SEQ ID NO: 264057
  chr11:75748469-75748500
  hypo

SEQ ID NO: 408666 - DNA, 36 bp, Homo sapiens; identical to SEQ ID NO: 264058
  chr11:75799383-75799419
  hypo

SEQ ID NO: 408667 - DNA, 253 bp, Homo sapiens; identical to SEQ ID NO: 224171
  chr11:75921931-75922184
  hypo

SEQ ID NO: 408668 - DNA, 86 bp, Homo sapiens; identical to SEQ ID NO: 264063
  chr11:75993075-75993161
  hypo

SEQ ID NO: 408669 - DNA, 35 bp, Homo sapiens; identical to SEQ ID NO: 214492
  chr11:76077428-76077463
  hypo

SEQ ID NO: 408670 - DNA, 183 bp, Homo sapiens; identical to SEQ ID NO: 214494
  chr11:76339359-76339542
  hypo

SEQ ID NO: 408671 - DNA, 436 bp, Homo sapiens; identical to SEQ ID NO: 264070
  chr11:76407635-76408071
  hypo

SEQ ID NO: 408672 - DNA, 192 bp, Homo sapiens; identical to SEQ ID NO: 214498
  chr11:76408273-76408465
  hypo

SEQ ID NO: 408673 - DNA, 166 bp, Homo sapiens; identical to SEQ ID NO: 264080
  chr11:76905510-76905676
  hypo

SEQ ID NO: 408674 - DNA, 73 bp, Homo sapiens; identical to SEQ ID NO: 264087
  chr11:78497977-78498050
  hypo

SEQ ID NO: 408675 - DNA, 103 bp, Homo sapiens; identical to SEQ ID NO: 264090
  chr11:82843543-82843646
  hypo

SEQ ID NO: 408676 - DNA, 42 bp, Homo sapiens; identical to SEQ ID NO: 264093
  chr11:85319011-85319053
  hypo

SEQ ID NO: 408677 - DNA, 169 bp, Homo sapiens; identical to SEQ ID NO: 214506
  chr11:85692740-85692909
  hypo

SEQ ID NO: 408678 - DNA, 180 bp, Homo sapiens; identical to SEQ ID NO: 264096
  chr11:85749362-85749542
  hypo

SEQ ID NO: 408679 - DNA, 174 bp, Homo sapiens; identical to SEQ ID NO: 264100
  chr11:86408236-86408410
  hypo

SEQ ID NO: 408680 - DNA, 662 bp, Homo sapiens; identical to SEQ ID NO: 224180
  chr11:86511379-86512041
  hypo

SEQ ID NO: 408681 - DNA, 283 bp, Homo sapiens; identical to SEQ ID NO: 224181
  chr11:86513414-86513697
  hypo

SEQ ID NO: 408682 - DNA, 185 bp, Homo sapiens; identical to SEQ ID NO: 214514
  chr11:91435729-91435914
  hypo

SEQ ID NO: 408683 - DNA, 481 bp, Homo sapiens; identical to SEQ ID NO: 264105
  chr11:92648642-92649123
  hypo

SEQ ID NO: 408684 - DNA, 101 bp, Homo sapiens; identical to SEQ ID NO: 264106
  chr11:93065699-93065800
  hypo

SEQ ID NO: 408685 - DNA, 79 bp, Homo sapiens; identical to SEQ ID NO: 264114
  chr11:94390523-94390602
  hypo

SEQ ID NO: 408686 - DNA, 34 bp, Homo sapiens; identical to SEQ ID NO: 214518
  chr11:94952098-94952132
  hypo

SEQ ID NO: 408687 - DNA, 203 bp, Homo sapiens; identical to SEQ ID NO: 264120
  chr11:95526175-95526378
  hypo

SEQ ID NO: 408688 - DNA, 144 bp, Homo sapiens; identical to SEQ ID NO: 264123
  chr11:96117187-96117331
  hypo

SEQ ID NO: 408689 - DNA, 429 bp, Homo sapiens; identical to SEQ ID NO: 388916
  chr11:96123256-96123685
  hypo

SEQ ID NO: 408690 - DNA, 37 bp, Homo sapiens; identical to SEQ ID NO: 264126
  chr11:97936947-97936984
  hypo

SEQ ID NO: 408691 - DNA, 43 bp, Homo sapiens; identical to SEQ ID NO: 214522
  chr11:102245881-102245924
  hypo

SEQ ID NO: 408692 - DNA, 77 bp, Homo sapiens; identical to SEQ ID NO: 264128
  chr11:102246147-102246224
  hypo

SEQ ID NO: 408693 - DNA, 705 bp, Homo sapiens; identical to SEQ ID NO: 214523
  chr11:103907385-103908090
  hypo

SEQ ID NO: 408694 - DNA, 644 bp, Homo sapiens; identical to SEQ ID NO: 288429
  chr11:108368605-108369249
  hypo

SEQ ID NO: 408695 - DNA, 61 bp, Homo sapiens; identical to SEQ ID NO: 315018
  chr11:108603172-108603233
  hypo

SEQ ID NO: 408696 - DNA, 86 bp, Homo sapiens; identical to SEQ ID NO: 315019
  chr11:108603263-108603349
  hypo

SEQ ID NO: 408697 - DNA, 140 bp, Homo sapiens; identical to SEQ ID NO: 264141
  chr11:111558643-111558783
  hypo

SEQ ID NO: 408698 - DNA, 222 bp, Homo sapiens; identical to SEQ ID NO: 264142
  chr11:111574699-111574921
  hypo

SEQ ID NO: 408699 - DNA, 43 bp, Homo sapiens; identical to SEQ ID NO: 264143
  chr11:112066436-112066479
  hypo

SEQ ID NO: 408700 - DNA, 34 bp, Homo sapiens; identical to SEQ ID NO: 214530
  chr11:113747597-113747631
  hypo

SEQ ID NO: 408701 - DNA, 63 bp, Homo sapiens; identical to SEQ ID NO: 264152
  chr11:114013829-114013892
  hypo

SEQ ID NO: 408702 - DNA, 285 bp, Homo sapiens; identical to SEQ ID NO: 264155
  chr11:114103481-114103766
  hypo

SEQ ID NO: 408703 - DNA, 31 bp, Homo sapiens; identical to SEQ ID NO: 264163
  chr11:116256383-116256414
  hypo

SEQ ID NO: 408704 - DNA, 37 bp, Homo sapiens; identical to SEQ ID NO: 264164
  chr11:116365360-116365397
  hypo

SEQ ID NO: 408705 - DNA, 288 bp, Homo sapiens; identical to SEQ ID NO: 288458
  chr11:116450735-116451023
  hypo

SEQ ID NO: 408706 - DNA, 123 bp, Homo sapiens; identical to SEQ ID NO: 288459
  chr11:116451190-116451313
  hypo

SEQ ID NO: 408707 - DNA, 33 bp, Homo sapiens; identical to SEQ ID NO: 214539
  chr11:116959822-116959855
  hypo

SEQ ID NO: 408708 - DNA, 35 bp, Homo sapiens; identical to SEQ ID NO: 264171
  chr11:116960726-116960761
  hypo

SEQ ID NO: 408709 - DNA, 255 bp, Homo sapiens; identical to SEQ ID NO: 264173
  chr11:117054572-117054827
  hypo

SEQ ID NO: 408710 - DNA, 104 bp, Homo sapiens; identical to SEQ ID NO: 214541
  chr11:117056079-117056183
  hypo

SEQ ID NO: 408711 - DNA, 100 bp, Homo sapiens; identical to SEQ ID NO: 315063
  chr11:117068432-117068532
  hypo

SEQ ID NO: 408712 - DNA, 526 bp, Homo sapiens; identical to SEQ ID NO: 398843
  chr11:117186458-117186984
  hypo

SEQ ID NO: 408713 - DNA, 150 bp, Homo sapiens; identical to SEQ ID NO: 214550
  chr11:117267876-117268026
  hypo

SEQ ID NO: 408714 - DNA, 250 bp, Homo sapiens; identical to SEQ ID NO: 224203
  chr11:117352704-117352954
  hypo

SEQ ID NO: 408715 - DNA, 93 bp, Homo sapiens; identical to SEQ ID NO: 315076
  chr11:117376345-117376438
  hypo

SEQ ID NO: 408716 - DNA, 381 bp, Homo sapiens; identical to SEQ ID NO: 214553
  chr11:117389166-117389547
  hypo

SEQ ID NO: 408717 - DNA, 114 bp, Homo sapiens; identical to SEQ ID NO: 264192
  chr11:117403090-117403204
  hypo

SEQ ID NO: 408718 - DNA, 206 bp, Homo sapiens; identical to SEQ ID NO: 264193
  chr11:117488134-117488340
  hypo

SEQ ID NO: 408719 - DNA, 82 bp, Homo sapiens; identical to SEQ ID NO: 264194
  chr11:117497923-117498005
  hypo

SEQ ID NO: 408720 - DNA, 243 bp, Homo sapiens; identical to SEQ ID NO: 264195
  chr11:117498035-117498278
  hypo

SEQ ID NO: 408721 - DNA, 100 bp, Homo sapiens; identical to SEQ ID NO: 264196
  chr11:117949567-117949667
  hypo

SEQ ID NO: 408722 - DNA, 32 bp, Homo sapiens; identical to SEQ ID NO: 214555
  chr11:117977482-117977514
  hypo

SEQ ID NO: 408723 - DNA, 44 bp, Homo sapiens; identical to SEQ ID NO: 264202
  chr11:118772066-118772110
  hypo

SEQ ID NO: 408724 - DNA, 511 bp, Homo sapiens; identical to SEQ ID NO: 264203
  chr11:118773643-118774154
  hypo

SEQ ID NO: 408725 - DNA, 85 bp, Homo sapiens; identical to SEQ ID NO: 264204
  chr11:118780943-118781028
  hypo

SEQ ID NO: 408726 - DNA, 261 bp, Homo sapiens; identical to SEQ ID NO: 214557
  chr11:119044183-119044444
  hypo

SEQ ID NO: 408727 - DNA, 54 bp, Homo sapiens; identical to SEQ ID NO: 264207
  chr11:119052936-119052990
  hypo

SEQ ID NO: 408728 - DNA, 83 bp, Homo sapiens; identical to SEQ ID NO: 202737
  chr11:119142431-119142514
  hypo

SEQ ID NO: 408729 - DNA, 106 bp, Homo sapiens; identical to SEQ ID NO: 202738
  chr11:119144575-119144681
  hypo

SEQ ID NO: 408730 - DNA, 291 bp, Homo sapiens; identical to SEQ ID NO: 202742
  chr11:119148945-119149236
  hypo

SEQ ID NO: 408731 - DNA, 158 bp, Homo sapiens; identical to SEQ ID NO: 202743
  chr11:119149265-119149423
  hypo

SEQ ID NO: 408732 - DNA, 492 bp, Homo sapiens; identical to SEQ ID NO: 202744
  chr11:119155748-119156240
  hypo

SEQ ID NO: 408733 - DNA, 86 bp, Homo sapiens; identical to SEQ ID NO: 202746
  chr11:119168098-119168184
  hypo

SEQ ID NO: 408734 - DNA, 90 bp, Homo sapiens; identical to SEQ ID NO: 214573
  chr11:119405812-119405902
  hypo

SEQ ID NO: 408735 - DNA, 85 bp, Homo sapiens; identical to SEQ ID NO: 214574
  chr11:119493220-119493305
  hypo

SEQ ID NO: 408736 - DNA, 217 bp, Homo sapiens; identical to SEQ ID NO: 315124
  chr11:119523963-119524180
  hypo

SEQ ID NO: 408737 - DNA, 39 bp, Homo sapiens; identical to SEQ ID NO: 214578
  chr11:119524226-119524265
  hypo

SEQ ID NO: 408738 - DNA, 149 bp, Homo sapiens; identical to SEQ ID NO: 264220
  chr11:119531882-119532031
  hypo

SEQ ID NO: 408739 - DNA, 122 bp, Homo sapiens; identical to SEQ ID NO: 214579
  chr11:119532474-119532596
  hypo

SEQ ID NO: 408740 - DNA, 186 bp, Homo sapiens; identical to SEQ ID NO: 264223
  chr11:119536817-119537003
  hypo

SEQ ID NO: 408741 - DNA, 99 bp, Homo sapiens; identical to SEQ ID NO: 214581
  chr11:119541630-119541729
  hypo

SEQ ID NO: 408742 - DNA, 73 bp, Homo sapiens; identical to SEQ ID NO: 214585
  chr11:119576250-119576323
  hypo

SEQ ID NO: 408743 - DNA, 269 bp, Homo sapiens; identical to SEQ ID NO: 202753
  chr11:119598243-119598512
  hypo

SEQ ID NO: 408744 - DNA, 57 bp, Homo sapiens; identical to SEQ ID NO: 202755
  chr11:119600032-119600089
  hypo

SEQ ID NO: 408745 - DNA, 40 bp, Homo sapiens; identical to SEQ ID NO: 264236
  chr11:119602212-119602252
  hypo

SEQ ID NO: 408746 - DNA, 142 bp, Homo sapiens; identical to SEQ ID NO: 202758
  chr11:120206447-120206589
  hypo

SEQ ID NO: 408747 - DNA, 40 bp, Homo sapiens; identical to SEQ ID NO: 264246
  chr11:120221759-120221799
  hypo

SEQ ID NO: 408748 - DNA, 271 bp, Homo sapiens; identical to SEQ ID NO: 288522
  chr11:120382097-120382368
  hypo

SEQ ID NO: 408749 - DNA, 206 bp, Homo sapiens; identical to SEQ ID NO: 288523
  chr11:120382448-120382654
  hypo

SEQ ID NO: 408750 - DNA, 35 bp, Homo sapiens; identical to SEQ ID NO: 214602
  chr11:120950504-120950539
  hypo

SEQ ID NO: 408751 - DNA, 348 bp, Homo sapiens; identical to SEQ ID NO: 315172
  chr11:121000556-121000904
  hypo

SEQ ID NO: 408752 - DNA, 216 bp, Homo sapiens; identical to SEQ ID NO: 264258
  chr11:121348737-121348953
  hypo

SEQ ID NO: 408753 - DNA, 147 bp, Homo sapiens; identical to SEQ ID NO: 264262
  chr11:122621690-122621837
  hypo

SEQ ID NO: 408754 - DNA, 104 bp, Homo sapiens; identical to SEQ ID NO: 214609
  chr11:122632802-122632906
  hypo

SEQ ID NO: 408755 - DNA, 120 bp, Homo sapiens; identical to SEQ ID NO: 264265
  chr11:122945970-122946090
  hypo

SEQ ID NO: 408756 - DNA, 39 bp, Homo sapiens; identical to SEQ ID NO: 264266
  chr11:123027337-123027376
  hypo

SEQ ID NO: 408757 - DNA, 42 bp, Homo sapiens; identical to SEQ ID NO: 384411
  chr11:124709075-124709117
  hypo

SEQ ID NO: 408758 - DNA, 249 bp, Homo sapiens; identical to SEQ ID NO: 202775
  chr11:124709233-124709482
  hypo

SEQ ID NO: 408759 - DNA, 210 bp, Homo sapiens; identical to SEQ ID NO: 202776
  chr11:124709856-124710066
  hypo

SEQ ID NO: 408760 - DNA, 141 bp, Homo sapiens; identical to SEQ ID NO: 264271
  chr11:124792306-124792447
  hypo

SEQ ID NO: 408761 - DNA, 81 bp, Homo sapiens; identical to SEQ ID NO: 264275
  chr11:125758706-125758787
  hypo

SEQ ID NO: 408762 - DNA, 178 bp, Homo sapiens; identical to SEQ ID NO: 264278
  chr11:125824157-125824335
  hypo

SEQ ID NO: 408763 - DNA, 31 bp, Homo sapiens; identical to SEQ ID NO: 214619
  chr11:125836034-125836065
  hypo

SEQ ID NO: 408764 - DNA, 56 bp, Homo sapiens; identical to SEQ ID NO: 202779
  chr11:125932494-125932550
  hypo

SEQ ID NO: 408765 - DNA, 436 bp, Homo sapiens; identical to SEQ ID NO: 8456
  chr11:125932556-125932992
  hypo

SEQ ID NO: 408766 - DNA, 105 bp, Homo sapiens; identical to SEQ ID NO: 224241
  chr11:125933223-125933328
  hypo

SEQ ID NO: 408767 - DNA, 124 bp, Homo sapiens; identical to SEQ ID NO: 214626
  chr11:125988689-125988813
  hypo

SEQ ID NO: 408768 - DNA, 182 bp, Homo sapiens; identical to SEQ ID NO: 83335
  chr11:126030295-126030477
  hypo

SEQ ID NO: 408769 - DNA, 206 bp, Homo sapiens; identical to SEQ ID NO: 214629
  chr11:126619095-126619301
  hypo

SEQ ID NO: 408770 - DNA, 32 bp, Homo sapiens; identical to SEQ ID NO: 264294
  chr11:127323962-127323994
  hypo

SEQ ID NO: 408771 - DNA, 79 bp, Homo sapiens; identical to SEQ ID NO: 214635
  chr11:129207798-129207877
  hypo

SEQ ID NO: 408772 - DNA, 184 bp, Homo sapiens; identical to SEQ ID NO: 264303
  chr11:129575147-129575331
  hypo

SEQ ID NO: 408773 - DNA, 94 bp, Homo sapiens; identical to SEQ ID NO: 264304
  chr11:129686910-129687004
  hypo

SEQ ID NO: 408774 - DNA, 41 bp, Homo sapiens; identical to SEQ ID NO: 264313
  chr11:129897979-129898020
  hypo

SEQ ID NO: 408775 - DNA, 36 bp, Homo sapiens; identical to SEQ ID NO: 264315
  chr11:129968002-129968038
  hypo

SEQ ID NO: 408776 - DNA, 36 bp, Homo sapiens; identical to SEQ ID NO: 264316
  chr11:129968278-129968314
  hypo

SEQ ID NO: 408777 - DNA, 84 bp, Homo sapiens; identical to SEQ ID NO: 264323
  chr11:130074709-130074793
  hypo

SEQ ID NO: 408778 - DNA, 200 bp, Homo sapiens; identical to SEQ ID NO: 214656
  chr11:131648918-131649118
  hypo

SEQ ID NO: 408779 - DNA, 157 bp, Homo sapiens; identical to SEQ ID NO: 288602
  chr11:132864209-132864366
  hypo

SEQ ID NO: 408780 - DNA, 33 bp, Homo sapiens; identical to SEQ ID NO: 264337
  chr11:133704391-133704424
  hypo

SEQ ID NO: 408781 - DNA, 79 bp, Homo sapiens; identical to SEQ ID NO: 264339
  chr11:133771363-133771442
  hypo

SEQ ID NO: 408782 - DNA, 113 bp, Homo sapiens; identical to SEQ ID NO: 214659
  chr11:133777670-133777783
  hypo

SEQ ID NO: 408783 - DNA, 294 bp, Homo sapiens; identical to SEQ ID NO: 214660
  chr11:133777845-133778139
  hypo

SEQ ID NO: 408784 - DNA, 259 bp, Homo sapiens; identical to SEQ ID NO: 264345
  chr11:133800161-133800420
  hypo

SEQ ID NO: 408785 - DNA, 138 bp, Homo sapiens; identical to SEQ ID NO: 214670
  chr11:134023320-134023458
  hypo

SEQ ID NO: 408786 - DNA, 52 bp, Homo sapiens; identical to SEQ ID NO: 264352
  chr11:134027875-134027927
  hypo

SEQ ID NO: 408787 - DNA, 35 bp, Homo sapiens; identical to SEQ ID NO: 214671
  chr11:134071993-134072028
  hypo

SEQ ID NO: 408788 - DNA, 94 bp, Homo sapiens; identical to SEQ ID NO: 264354
  chr11:134075571-134075665
  hypo

SEQ ID NO: 408789 - DNA, 97 bp, Homo sapiens; identical to SEQ ID NO: 214672
  chr11:134083475-134083572
  hypo

SEQ ID NO: 408790 - DNA, 37 bp, Homo sapiens; identical to SEQ ID NO: 264357
  chr11:134152957-134152994
  hypo

SEQ ID NO: 408791 - DNA, 62 bp, Homo sapiens; identical to SEQ ID NO: 264359
  chr11:134182296-134182358
  hypo

SEQ ID NO: 408792 - DNA, 386 bp, Homo sapiens; identical to SEQ ID NO: 214674
  chr11:134212673-134213059
  hypo

SEQ ID NO: 408793 - DNA, 32 bp, Homo sapiens; identical to SEQ ID NO: 264361
  chr11:134222550-134222582
  hypo

SEQ ID NO: 408794 - DNA, 32 bp, Homo sapiens; identical to SEQ ID NO: 264362
  chr11:134222822-134222854
  hypo

SEQ ID NO: 408795 - DNA, 168 bp, Homo sapiens; identical to SEQ ID NO: 264363
  chr11:134227491-134227659
  hypo

SEQ ID NO: 408796 - DNA, 386 bp, Homo sapiens; identical to SEQ ID NO: 214675
  chr11:134228005-134228391
  hypo

SEQ ID NO: 408797 - DNA, 233 bp, Homo sapiens; identical to SEQ ID NO: 264365
  chr11:134232150-134232383
  hypo

SEQ ID NO: 408798 - DNA, 180 bp, Homo sapiens; identical to SEQ ID NO: 224260
  chr11:134282478-134282658
  hypo

SEQ ID NO: 408799 - DNA, 57 bp, Homo sapiens; identical to SEQ ID NO: 264368
  chr11:134356383-134356440
  hypo

SEQ ID NO: 408800 - DNA, 196 bp, Homo sapiens; identical to SEQ ID NO: 264369
  chr11:134378732-134378928
  hypo

SEQ ID NO: 408801 - DNA, 33 bp, Homo sapiens; identical to SEQ ID NO: 264373
  chr11:134534372-134534405
  hypo

SEQ ID NO: 408802 - DNA, 234 bp, Homo sapiens; identical to SEQ ID NO: 264374
  chr11:134571549-134571783
  hypo

SEQ ID NO: 408803 - DNA, 32 bp, Homo sapiens; identical to SEQ ID NO: 264376
  chr11:134831337-134831369
  hypo

SEQ ID NO: 408804 - DNA, 40 bp, Homo sapiens; identical to SEQ ID NO: 264379
  chr12:287644-287684
  hypo

SEQ ID NO: 408805 - DNA, 169 bp, Homo sapiens; identical to SEQ ID NO: 264381
  chr12:334115-334284
  hypo

SEQ ID NO: 408806 - DNA, 148 bp, Homo sapiens; identical to SEQ ID NO: 264384
  chr12:563165-563313
  hypo

SEQ ID NO: 408807 - DNA, 220 bp, Homo sapiens; identical to SEQ ID NO: 398902
  chr12:569750-569970
  hypo

SEQ ID NO: 408808 - DNA, 108 bp, Homo sapiens; identical to SEQ ID NO: 214682
  chr12:658733-658841
  hypo

SEQ ID NO: 408809 - DNA, 95 bp, Homo sapiens; identical to SEQ ID NO: 315334
  chr12:665735-665830
  hypo

SEQ ID NO: 408810 - DNA, 123 bp, Homo sapiens; identical to SEQ ID NO: 315335
  chr12:665901-666024
  hypo

SEQ ID NO: 408811 - DNA, 217 bp, Homo sapiens; identical to SEQ ID NO: 264388
  chr12:666656-666873
  hypo

SEQ ID NO: 408812 - DNA, 91 bp, Homo sapiens; identical to SEQ ID NO: 214683
  chr12:667201-667292
  hypo

SEQ ID NO: 408813 - DNA, 799 bp, Homo sapiens; identical to SEQ ID NO: 264391
  chr12:674438-675237
  hypo

SEQ ID NO: 408814 - DNA, 209 bp, Homo sapiens; identical to SEQ ID NO: 202807
  chr12:694940-695149
  hypo

SEQ ID NO: 408815 - DNA, 71 bp, Homo sapiens; identical to SEQ ID NO: 264394
  chr12:724161-724232
  hypo

SEQ ID NO: 408816 - DNA, 38 bp, Homo sapiens; identical to SEQ ID NO: 214686
  chr12:750707-750745
  hypo

SEQ ID NO: 408817 - DNA, 39 bp, Homo sapiens; identical to SEQ ID NO: 264397
  chr12:885896-885935
  hypo

SEQ ID NO: 408818 - DNA, 236 bp, Homo sapiens; identical to SEQ ID NO: 264400
  chr12:974283-974519
  hypo

SEQ ID NO: 408819 - DNA, 69 bp, Homo sapiens; identical to SEQ ID NO: 264401
  chr12:1005679-1005748
  hypo

SEQ ID NO: 408820 - DNA, 319 bp, Homo sapiens; identical to SEQ ID NO: 264402
  chr12:1026088-1026407
  hypo

SEQ ID NO: 408821 - DNA, 84 bp, Homo sapiens; identical to SEQ ID NO: 264405
  chr12:1353962-1354046
  hypo

SEQ ID NO: 408822 - DNA, 99 bp, Homo sapiens; identical to SEQ ID NO: 214691
  chr12:1411786-1411885
  hypo

SEQ ID NO: 408823 - DNA, 69 bp, Homo sapiens; identical to SEQ ID NO: 264407
  chr12:1476691-1476760
  hypo

SEQ ID NO: 408824 - DNA, 157 bp, Homo sapiens; identical to SEQ ID NO: 264412
  chr12:1656342-1656499
  hypo

SEQ ID NO: 408825 - DNA, 218 bp, Homo sapiens; identical to SEQ ID NO: 264413
  chr12:1711558-1711776
  hypo

SEQ ID NO: 408826 - DNA, 222 bp, Homo sapiens; identical to SEQ ID NO: 264416
  chr12:1766124-1766346
  hypo

SEQ ID NO: 408827 - DNA, 120 bp, Homo sapiens; identical to SEQ ID NO: 214697
  chr12:1840409-1840529
  hypo

SEQ ID NO: 408828 - DNA, 203 bp, Homo sapiens; identical to SEQ ID NO: 315369
  chr12:1948662-1948865
  hypo

SEQ ID NO: 408829 - DNA, 233 bp, Homo sapiens; identical to SEQ ID NO: 264422
  chr12:1980082-1980315
  hypo

SEQ ID NO: 408830 - DNA, 133 bp, Homo sapiens; identical to SEQ ID NO: 264423
  chr12:1987522-1987655
  hypo

SEQ ID NO: 408831 - DNA, 88 bp, Homo sapiens; identical to SEQ ID NO: 214704
  chr12:2046016-2046104
  hypo

SEQ ID NO: 408832 - DNA, 111 bp, Homo sapiens; identical to SEQ ID NO: 315379
  chr12:2046134-2046245
  hypo

SEQ ID NO: 408833 - DNA, 212 bp, Homo sapiens; identical to SEQ ID NO: 264430
  chr12:2048775-2048987
  hypo

SEQ ID NO: 408834 - DNA, 73 bp, Homo sapiens; identical to SEQ ID NO: 202820
  chr12:2163510-2163583
  hypo

SEQ ID NO: 408835 - DNA, 90 bp, Homo sapiens; identical to SEQ ID NO: 214709
  chr12:2595422-2595512
  hypo

SEQ ID NO: 408836 - DNA, 36 bp, Homo sapiens; identical to SEQ ID NO: 264439
  chr12:2654536-2654572
  hypo

SEQ ID NO: 408837 - DNA, 426 bp, Homo sapiens; identical to SEQ ID NO: 264440
  chr12:2664072-2664498
  hypo

SEQ ID NO: 408838 - DNA, 83 bp, Homo sapiens; identical to SEQ ID NO: 214712
  chr12:2778072-2778155
  hypo

SEQ ID NO: 408839 - DNA, 83 bp, Homo sapiens; identical to SEQ ID NO: 264446
  chr12:2798044-2798127
  hypo

SEQ ID NO: 408840 - DNA, 82 bp, Homo sapiens; identical to SEQ ID NO: 264447
  chr12:2846932-2847014
  hypo

SEQ ID NO: 408841 - DNA, 142 bp, Homo sapiens; identical to SEQ ID NO: 202827
  chr12:3129463-3129605
  hypo

SEQ ID NO: 408842 - DNA, 46 bp, Homo sapiens; identical to SEQ ID NO: 214722
  chr12:3215227-3215273
  hypo

SEQ ID NO: 408843 - DNA, 178 bp, Homo sapiens; identical to SEQ ID NO: 214723
  chr12:3302735-3302913
  hypo

SEQ ID NO: 408844 - DNA, 129 bp, Homo sapiens; identical to SEQ ID NO: 264459
  chr12:3316845-3316974
  hypo

SEQ ID NO: 408845 - DNA, 45 bp, Homo sapiens; identical to SEQ ID NO: 264461
  chr12:3333941-3333986
  hypo

SEQ ID NO: 408846 - DNA, 111 bp, Homo sapiens; identical to SEQ ID NO: 214725
  chr12:3390417-3390528
  hypo

SEQ ID NO: 408847 - DNA, 205 bp, Homo sapiens; identical to SEQ ID NO: 315423
  chr12:3562709-3562914
  hypo

SEQ ID NO: 408848 - DNA, 72 bp, Homo sapiens; identical to SEQ ID NO: 384418
  chr12:3601270-3601342
  hypo

SEQ ID NO: 408849 - DNA, 101 bp, Homo sapiens; identical to SEQ ID NO: 202831
  chr12:3601377-3601478
  hypo

SEQ ID NO: 408850 - DNA, 36 bp, Homo sapiens; identical to SEQ ID NO: 264471
  chr12:3998558-3998594
  hypo

SEQ ID NO: 408851 - DNA, 92 bp, Homo sapiens; identical to SEQ ID NO: 264472
  chr12:4033270-4033362
  hypo

SEQ ID NO: 408852 - DNA, 153 bp, Homo sapiens; identical to SEQ ID NO: 214737
  chr12:4433845-4433998
  hypo

SEQ ID NO: 408853 - DNA, 101 bp, Homo sapiens; identical to SEQ ID NO: 264484
  chr12:4872384-4872485
  hypo

SEQ ID NO: 408854 - DNA, 125 bp, Homo sapiens; identical to SEQ ID NO: 202847
  chr12:4918558-4918683
  hypo

SEQ ID NO: 408855 - DNA, 176 bp, Homo sapiens; identical to SEQ ID NO: 202848
  chr12:4918713-4918889
  hypo

SEQ ID NO: 408856 - DNA, 44 bp, Homo sapiens; identical to SEQ ID NO: 264486
  chr12:5087446-5087490
  hypo

SEQ ID NO: 408857 - DNA, 120 bp, Homo sapiens; identical to SEQ ID NO: 264490
  chr12:5252653-5252773
  hypo

SEQ ID NO: 408858 - DNA, 86 bp, Homo sapiens; identical to SEQ ID NO: 264496
  chr12:5435949-5436035
  hypo

SEQ ID NO: 408859 - DNA, 85 bp, Homo sapiens; identical to SEQ ID NO: 264497
  chr12:5437112-5437197
  hypo

SEQ ID NO: 408860 - DNA, 321 bp, Homo sapiens; identical to SEQ ID NO: 264503
  chr12:5632712-5633033
  hypo

SEQ ID NO: 408861 - DNA, 119 bp, Homo sapiens; identical to SEQ ID NO: 264504
  chr12:5672755-5672874
  hypo

SEQ ID NO: 408862 - DNA, 47 bp, Homo sapiens; identical to SEQ ID NO: 264514
  chr12:6172072-6172119
  hypo

SEQ ID NO: 408863 - DNA, 95 bp, Homo sapiens; identical to SEQ ID NO: 264515
  chr12:6199649-6199744
  hypo

SEQ ID NO: 408864 - DNA, 83 bp, Homo sapiens; identical to SEQ ID NO: 264517
  chr12:6284864-6284947
  hypo

SEQ ID NO: 408865 - DNA, 85 bp, Homo sapiens; identical to SEQ ID NO: 214749
  chr12:6294432-6294517
  hypo

SEQ ID NO: 408866 - DNA, 317 bp, Homo sapiens; identical to SEQ ID NO: 224284
  chr12:6309398-6309715
  hypo

SEQ ID NO: 408867 - DNA, 306 bp, Homo sapiens; identical to SEQ ID NO: 264523
  chr12:6373751-6374057
  hypo

SEQ ID NO: 408868 - DNA, 35 bp, Homo sapiens; identical to SEQ ID NO: 264525
  chr12:6381467-6381502
  hypo

SEQ ID NO: 408869 - DNA, 184 bp, Homo sapiens; identical to SEQ ID NO: 202855
  chr12:6387950-6388134
  hypo

SEQ ID NO: 408870 - DNA, 187 bp, Homo sapiens; identical to SEQ ID NO: 214753
  chr12:6388701-6388888
  hypo

SEQ ID NO: 408871 - DNA, 43 bp, Homo sapiens; identical to SEQ ID NO: 392916
  chr12:6391153-6391196
  hypo

SEQ ID NO: 408872 - DNA, 50 bp, Homo sapiens; identical to SEQ ID NO: 214757
  chr12:6422991-6423041
  hypo

SEQ ID NO: 408873 - DNA, 245 bp, Homo sapiens; identical to SEQ ID NO: 264531
  chr12:6425447-6425692
  hypo

SEQ ID NO: 408874 - DNA, 214 bp, Homo sapiens; identical to SEQ ID NO: 214759
  chr12:6438303-6438517
  hypo

SEQ ID NO: 408875 - DNA, 158 bp, Homo sapiens; identical to SEQ ID NO: 214760
  chr12:6464388-6464546
  hypo

SEQ ID NO: 408876 - DNA, 38 bp, Homo sapiens; identical to SEQ ID NO: 264534
  chr12:6481166-6481204
  hypo

SEQ ID NO: 408877 - DNA, 120 bp, Homo sapiens; identical to SEQ ID NO: 264537
  chr12:6531710-6531830
  hypo

SEQ ID NO: 408878 - DNA, 38 bp, Homo sapiens; identical to SEQ ID NO: 264544
  chr12:6749347-6749385
  hypo

SEQ ID NO: 408879 - DNA, 44 bp, Homo sapiens; identical to SEQ ID NO: 214765
  chr12:6831877-6831921
  hypo

SEQ ID NO: 408880 - DNA, 45 bp, Homo sapiens; identical to SEQ ID NO: 264549
  chr12:6871063-6871108
  hypo

SEQ ID NO: 408881 - DNA, 55 bp, Homo sapiens; identical to SEQ ID NO: 264550
  chr12:7249425-7249480
  hypo

SEQ ID NO: 408882 - DNA, 48 bp, Homo sapiens; identical to SEQ ID NO: 264551
  chr12:7351759-7351807
  hypo

SEQ ID NO: 408883 - DNA, 37 bp, Homo sapiens; identical to SEQ ID NO: 264555
  chr12:7910484-7910521
  hypo

SEQ ID NO: 408884 - DNA, 32 bp, Homo sapiens; identical to SEQ ID NO: 214768
  chr12:8009570-8009602
  hypo

SEQ ID NO: 408885 - DNA, 32 bp, Homo sapiens; identical to SEQ ID NO: 214769
  chr12:8017218-8017250
  hypo

SEQ ID NO: 408886 - DNA, 64 bp, Homo sapiens; identical to SEQ ID NO: 264562
  chr12:8022094-8022158
  hypo

SEQ ID NO: 408887 - DNA, 31 bp, Homo sapiens; identical to SEQ ID NO: 264563
  chr12:8071329-8071360
  hypo

SEQ ID NO: 408888 - DNA, 38 bp, Homo sapiens; identical to SEQ ID NO: 264565
  chr12:8072297-8072335
  hypo

SEQ ID NO: 408889 - DNA, 31 bp, Homo sapiens; identical to SEQ ID NO: 214771
  chr12:8147088-8147119
  hypo

SEQ ID NO: 408890 - DNA, 98 bp, Homo sapiens; identical to SEQ ID NO: 264568
  chr12:8178281-8178379
  hypo

SEQ ID NO: 408891 - DNA, 120 bp, Homo sapiens; identical to SEQ ID NO: 264574
  chr12:8597879-8597999
  hypo

SEQ ID NO: 408892 - DNA, 47 bp, Homo sapiens; identical to SEQ ID NO: 264575
  chr12:8601976-8602023
  hypo

SEQ ID NO: 408893 - DNA, 33 bp, Homo sapiens; identical to SEQ ID NO: 214779
  chr12:8808923-8808956
  hypo

SEQ ID NO: 408894 - DNA, 180 bp, Homo sapiens; identical to SEQ ID NO: 214781
  chr12:8893949-8894129
  hypo

SEQ ID NO: 408895 - DNA, 42 bp, Homo sapiens; identical to SEQ ID NO: 264583
  chr12:8936109-8936151
  hypo

SEQ ID NO: 408896 - DNA, 120 bp, Homo sapiens; identical to SEQ ID NO: 264584
  chr12:8936631-8936751
  hypo

SEQ ID NO: 408897 - DNA, 199 bp, Homo sapiens; identical to SEQ ID NO: 214783
  chr12:9585208-9585407
  hypo

SEQ ID NO: 408898 - DNA, 214 bp, Homo sapiens; identical to SEQ ID NO: 264593
  chr12:10073226-10073440
  hypo

SEQ ID NO: 408899 - DNA, 36 bp, Homo sapiens; identical to SEQ ID NO: 315568
  chr12:10823868-10823904
  hypo

SEQ ID NO: 408900 - DNA, 198 bp, Homo sapiens; identical to SEQ ID NO: 202872
  chr12:11905383-11905581
  hypo

SEQ ID NO: 408901 - DNA, 165 bp, Homo sapiens; identical to SEQ ID NO: 202873
  chr12:11992073-11992238
  hypo

SEQ ID NO: 408902 - DNA, 217 bp, Homo sapiens; identical to SEQ ID NO: 224295
  chr12:12006278-12006495
  hypo

SEQ ID NO: 408903 - DNA, 546 bp, Homo sapiens; identical to SEQ ID NO: 202875
  chr12:12022357-12022903
  hypo

SEQ ID NO: 408904 - DNA, 2801 bp, Homo sapiens; identical to SEQ ID NO: 202878
  chr12:12043874-12046675
  hypo

SEQ ID NO: 408905 - DNA, 1481 bp, Homo sapiens; identical to SEQ ID NO: 202879
  chr12:12046855-12048336
  hypo

SEQ ID NO: 408906 - DNA, 188 bp, Homo sapiens; identical to SEQ ID NO: 214797
  chr12:12184633-12184821
  hypo

SEQ ID NO: 408907 - DNA, 302 bp, Homo sapiens; identical to SEQ ID NO: 264602
  chr12:12476519-12476821
  hypo

SEQ ID NO: 408908 - DNA, 90 bp, Homo sapiens; identical to SEQ ID NO: 264608
  chr12:12656416-12656506
  hypo

SEQ ID NO: 408909 - DNA, 59 bp, Homo sapiens; identical to SEQ ID NO: 288740
  chr12:12869129-12869188
  hypo

SEQ ID NO: 408910 - DNA, 82 bp, Homo sapiens; identical to SEQ ID NO: 264612
  chr12:12902967-12903049
  hypo

SEQ ID NO: 408911 - DNA, 31 bp, Homo sapiens; identical to SEQ ID NO: 264613
  chr12:12923066-12923097
  hypo

SEQ ID NO: 408912 - DNA, 176 bp, Homo sapiens; identical to SEQ ID NO: 214801
  chr12:12989449-12989625
  hypo

SEQ ID NO: 408913 - DNA, 89 bp, Homo sapiens; identical to SEQ ID NO: 264616
  chr12:12990618-12990707
  hypo

SEQ ID NO: 408914 - DNA, 37 bp, Homo sapiens; identical to SEQ ID NO: 264617
  chr12:13003128-13003165
  hypo

SEQ ID NO: 408915 - DNA, 86 bp, Homo sapiens; identical to SEQ ID NO: 264621
  chr12:13056218-13056304
  hypo

SEQ ID NO: 408916 - DNA, 93 bp, Homo sapiens; identical to SEQ ID NO: 224308
  chr12:13154241-13154334
  hypo

SEQ ID NO: 408917 - DNA, 174 bp, Homo sapiens; identical to SEQ ID NO: 214805
  chr12:13222376-13222550
  hypo

SEQ ID NO: 408918 - DNA, 191 bp, Homo sapiens; identical to SEQ ID NO: 264626
  chr12:13237737-13237928
  hypo

SEQ ID NO: 408919 - DNA, 36 bp, Homo sapiens; identical to SEQ ID NO: 264630
  chr12:14469618-14469654
  hypo

SEQ ID NO: 408920 - DNA, 36 bp, Homo sapiens; identical to SEQ ID NO: 214807
  chr12:14721513-14721549
  hypo

SEQ ID NO: 408921 - DNA, 197 bp, Homo sapiens; identical to SEQ ID NO: 264633
  chr12:14743808-14744005
  hypo

SEQ ID NO: 408922 - DNA, 75 bp, Homo sapiens; identical to SEQ ID NO: 214810
  chr12:14818749-14818824
  hypo

SEQ ID NO: 408923 - DNA, 165 bp, Homo sapiens; identical to SEQ ID NO: 214811
  chr12:14818867-14819032
  hypo

SEQ ID NO: 408924 - DNA, 240 bp, Homo sapiens; identical to SEQ ID NO: 214812
  chr12:14819092-14819332
  hypo

SEQ ID NO: 408925 - DNA, 72 bp, Homo sapiens; identical to SEQ ID NO: 264637
  chr12:15057301-15057373
  hypo

SEQ ID NO: 408926 - DNA, 120 bp, Homo sapiens; identical to SEQ ID NO: 264638
  chr12:15095459-15095579
  hypo

SEQ ID NO: 408927 - DNA, 151 bp, Homo sapiens; identical to SEQ ID NO: 264643
  chr12:19512469-19512620
  hypo

SEQ ID NO: 408928 - DNA, 36 bp, Homo sapiens; identical to SEQ ID NO: 214819
  chr12:19539887-19539923
  hypo

SEQ ID NO: 408929 - DNA, 35 bp, Homo sapiens; identical to SEQ ID NO: 264646
  chr12:19636459-19636494
  hypo

SEQ ID NO: 408930 - DNA, 43 bp, Homo sapiens; identical to SEQ ID NO: 264647
  chr12:19928383-19928426
  hypo

SEQ ID NO: 408931 - DNA, 137 bp, Homo sapiens; identical to SEQ ID NO: 226549
  chr12:22529506-22529643
  hypo

SEQ ID NO: 408932 - DNA, 87 bp, Homo sapiens; identical to SEQ ID NO: 315641
  chr12:22698196-22698283
  hypo

SEQ ID NO: 408933 - DNA, 115 bp, Homo sapiens; identical to SEQ ID NO: 264654
  chr12:24323135-24323250
  hypo

SEQ ID NO: 408934 - DNA, 54 bp, Homo sapiens; identical to SEQ ID NO: 264656
  chr12:24679251-24679305
  hypo

SEQ ID NO: 408935 - DNA, 120 bp, Homo sapiens; identical to SEQ ID NO: 264657
  chr12:25203074-25203194
  hypo

SEQ ID NO: 408936 - DNA, 259 bp, Homo sapiens; identical to SEQ ID NO: 202917
  chr12:25404339-25404598
  hypo

SEQ ID NO: 408937 - DNA, 142 bp, Homo sapiens; identical to SEQ ID NO: 224326
  chr12:25538253-25538395
  hypo

SEQ ID NO: 408938 - DNA, 165 bp, Homo sapiens; identical to SEQ ID NO: 214829
  chr12:26492034-26492199
  hypo

SEQ ID NO: 408939 - DNA, 34 bp, Homo sapiens; identical to SEQ ID NO: 264663
  chr12:26949667-26949701
  hypo

SEQ ID NO: 408940 - DNA, 199 bp, Homo sapiens; identical to SEQ ID NO: 214830
  chr12:26966974-26967173
  hypo

SEQ ID NO: 408941 - DNA, 106 bp, Homo sapiens; identical to SEQ ID NO: 288808
  chr12:27486689-27486795
  hypo

SEQ ID NO: 408942 - DNA, 87 bp, Homo sapiens; identical to SEQ ID NO: 264666
  chr12:27600853-27600940
  hypo

SEQ ID NO: 408943 - DNA, 153 bp, Homo sapiens; identical to SEQ ID NO: 264667
  chr12:27671115-27671268
  hypo

SEQ ID NO: 408944 - DNA, 78 bp, Homo sapiens; identical to SEQ ID NO: 214832
  chr12:27742381-27742459
  hypo

SEQ ID NO: 408945 - DNA, 138 bp, Homo sapiens; identical to SEQ ID NO: 264670
  chr12:27842659-27842797
  hypo

SEQ ID NO: 408946 - DNA, 210 bp, Homo sapiens; identical to SEQ ID NO: 288812
  chr12:28123786-28123996
  hypo

SEQ ID NO: 408947 - DNA, 105 bp, Homo sapiens; identical to SEQ ID NO: 224329
  chr12:29301531-29301636
  hypo

SEQ ID NO: 408948 - DNA, 159 bp, Homo sapiens; identical to SEQ ID NO: 264675
  chr12:29945371-29945530
  hypo

SEQ ID NO: 408949 - DNA, 108 bp, Homo sapiens; identical to SEQ ID NO: 264682
  chr12:31399695-31399803
  hypo

SEQ ID NO: 408950 - DNA, 35 bp, Homo sapiens; identical to SEQ ID NO: 264683
  chr12:31663419-31663454
  hypo

SEQ ID NO: 408951 - DNA, 39 bp, Homo sapiens; identical to SEQ ID NO: 214838
  chr12:32140933-32140972
  hypo

SEQ ID NO: 408952 - DNA, 142 bp, Homo sapiens; identical to SEQ ID NO: 214840
  chr12:32155239-32155381
  hypo

SEQ ID NO: 408953 - DNA, 34 bp, Homo sapiens; identical to SEQ ID NO: 214841
  chr12:32831180-32831214
  hypo

SEQ ID NO: 408954 - DNA, 87 bp, Homo sapiens; identical to SEQ ID NO: 264695
  chr12:33034690-33034777
  hypo

SEQ ID NO: 408955 - DNA, 136 bp, Homo sapiens; identical to SEQ ID NO: 202937
  chr12:33592092-33592228
  hypo

SEQ ID NO: 408956 - DNA, 58 bp, Homo sapiens; identical to SEQ ID NO: 398975
  chr12:33592320-33592378
  hypo

SEQ ID NO: 408957 - DNA, 682 bp, Homo sapiens; identical to SEQ ID NO: 214848
  chr12:34319319-34320001
  hypo

SEQ ID NO: 408958 - DNA, 122 bp, Homo sapiens; identical to SEQ ID NO: 264697
  chr12:34357282-34357404
  hypo

SEQ ID NO: 408959 - DNA, 572 bp, Homo sapiens; identical to SEQ ID NO: 214851
  chr12:38548366-38548938
  hypo

SEQ ID NO: 408960 - DNA, 123 bp, Homo sapiens; identical to SEQ ID NO: 214852
  chr12:38548968-38549091
  hypo

SEQ ID NO: 408961 - DNA, 196 bp, Homo sapiens; identical to SEQ ID NO: 315705
  chr12:38550957-38551153
  hypo

SEQ ID NO: 408962 - DNA, 60 bp, Homo sapiens; identical to SEQ ID NO: 214854
  chr12:38551305-38551365
  hypo

SEQ ID NO: 408963 - DNA, 587 bp, Homo sapiens; identical to SEQ ID NO: 315709
  chr12:38553243-38553830
  hypo

SEQ ID NO: 408964 - DNA, 338 bp, Homo sapiens; identical to SEQ ID NO: 214856
  chr12:38553866-38554204
  hypo

SEQ ID NO: 408965 - DNA, 371 bp, Homo sapiens; identical to SEQ ID NO: 315711
  chr12:38554258-38554629
  hypo

SEQ ID NO: 408966 - DNA, 120 bp, Homo sapiens; identical to SEQ ID NO: 264710
  chr12:41967350-41967470
  hypo

SEQ ID NO: 408967 - DNA, 32 bp, Homo sapiens; identical to SEQ ID NO: 264713
  chr12:42504945-42504977
  hypo

SEQ ID NO: 408968 - DNA, 183 bp, Homo sapiens; identical to SEQ ID NO: 264715
  chr12:42836274-42836457
  hypo

SEQ ID NO: 408969 - DNA, 89 bp, Homo sapiens; identical to SEQ ID NO: 214863
  chr12:42857519-42857608
  hypo

SEQ ID NO: 408970 - DNA, 38 bp, Homo sapiens; identical to SEQ ID NO: 264720
  chr12:43159470-43159508
  hypo

SEQ ID NO: 408971 - DNA, 43 bp, Homo sapiens; identical to SEQ ID NO: 264723
  chr12:45344717-45344760
  hypo

SEQ ID NO: 408972 - DNA, 133 bp, Homo sapiens; identical to SEQ ID NO: 264725
  chr12:45862284-45862417
  hypo

SEQ ID NO: 408973 - DNA, 149 bp, Homo sapiens; identical to SEQ ID NO: 264733
  chr12:47699297-47699446
  hypo

SEQ ID NO: 408974 - DNA, 120 bp, Homo sapiens; identical to SEQ ID NO: 264734
  chr12:47799205-47799325
  hypo

SEQ ID NO: 408975 - DNA, 48 bp, Homo sapiens; identical to SEQ ID NO: 264736
  chr12:48218921-48218969
  hypo

SEQ ID NO: 408976 - DNA, 39 bp, Homo sapiens; identical to SEQ ID NO: 264737
  chr12:48226920-48226959
  hypo

SEQ ID NO: 408977 - DNA, 90 bp, Homo sapiens; identical to SEQ ID NO: 264738
  chr12:48238689-48238779
  hypo

SEQ ID NO: 408978 - DNA, 119 bp, Homo sapiens; identical to SEQ ID NO: 315755
  chr12:48347939-48348058
  hypo

SEQ ID NO: 408979 - DNA, 481 bp, Homo sapiens; identical to SEQ ID NO: 202963
  chr12:49351242-49351723
  hypo

SEQ ID NO: 408980 - DNA, 527 bp, Homo sapiens; identical to SEQ ID NO: 288887
  chr12:49371614-49372141
  hypo

SEQ ID NO: 408981 - DNA, 76 bp, Homo sapiens; identical to SEQ ID NO: 288888
  chr12:49372236-49372312
  hypo

SEQ ID NO: 408982 - DNA, 48 bp, Homo sapiens; identical to SEQ ID NO: 214882
  chr12:49436025-49436073
  hypo

SEQ ID NO: 408983 - DNA, 44 bp, Homo sapiens; identical to SEQ ID NO: 264751
  chr12:49520524-49520568
  hypo

SEQ ID NO: 408984 - DNA, 154 bp, Homo sapiens; identical to SEQ ID NO: 214883
  chr12:49620906-49621060
  hypo

SEQ ID NO: 408985 - DNA, 85 bp, Homo sapiens; identical to SEQ ID NO: 264753
  chr12:49647106-49647191
  hypo

SEQ ID NO: 408986 - DNA, 301 bp, Homo sapiens; identical to SEQ ID NO: 202975
  chr12:49761541-49761842
  hypo

SEQ ID NO: 408987 - DNA, 383 bp, Homo sapiens; identical to SEQ ID NO: 264755
  chr12:49927213-49927596
  hypo

SEQ ID NO: 408988 - DNA, 247 bp, Homo sapiens; identical to SEQ ID NO: 214885
  chr12:49935483-49935730
  hypo

SEQ ID NO: 408989 - DNA, 182 bp, Homo sapiens; identical to SEQ ID NO: 214887
  chr12:50185746-50185928
  hypo

SEQ ID NO: 408990 - DNA, 151 bp, Homo sapiens; identical to SEQ ID NO: 264761
  chr12:50237319-50237470
  hypo

SEQ ID NO: 408991 - DNA, 46 bp, Homo sapiens; identical to SEQ ID NO: 264764
  chr12:50282793-50282839
  hypo

SEQ ID NO: 408992 - DNA, 184 bp, Homo sapiens; identical to SEQ ID NO: 264765
  chr12:50296427-50296611
  hypo

SEQ ID NO: 408993 - DNA, 307 bp, Homo sapiens; identical to SEQ ID NO: 214889
  chr12:50366185-50366492
  hypo

SEQ ID NO: 408994 - DNA, 233 bp, Homo sapiens; identical to SEQ ID NO: 214890
  chr12:50400184-50400417
  hypo

SEQ ID NO: 408995 - DNA, 180 bp, Homo sapiens; identical to SEQ ID NO: 264771
  chr12:50602878-50603058
  hypo

SEQ ID NO: 408996 - DNA, 80 bp, Homo sapiens; identical to SEQ ID NO: 264772
  chr12:50785992-50786072
  hypo

SEQ ID NO: 408997 - DNA, 136 bp, Homo sapiens; identical to SEQ ID NO: 214892
  chr12:51116977-51117113
  hypo

SEQ ID NO: 408998 - DNA, 120 bp, Homo sapiens; identical to SEQ ID NO: 264778
  chr12:51407288-51407408
  hypo

SEQ ID NO: 408999 - DNA, 120 bp, Homo sapiens; identical to SEQ ID NO: 264779
  chr12:51407528-51407648
  hypo

SEQ ID NO: 409000 - DNA, 120 bp, Homo sapiens; identical to SEQ ID NO: 264782
  chr12:51478095-51478215
  hypo

SEQ ID NO: 409001 - DNA, 151 bp, Homo sapiens; identical to SEQ ID NO: 214897
  chr12:51479055-51479206
  hypo

SEQ ID NO: 409002 - DNA, 32 bp, Homo sapiens; identical to SEQ ID NO: 224358
  chr12:51610959-51610991
  hypo

SEQ ID NO: 409003 - DNA, 120 bp, Homo sapiens; identical to SEQ ID NO: 264786
  chr12:51615467-51615587
  hypo

SEQ ID NO: 409004 - DNA, 81 bp, Homo sapiens; identical to SEQ ID NO: 264788
  chr12:51795224-51795305
  hypo

SEQ ID NO: 409005 - DNA, 309 bp, Homo sapiens; identical to SEQ ID NO: 399003
  chr12:51818792-51819101
  hypo

SEQ ID NO: 409006 - DNA, 149 bp, Homo sapiens; identical to SEQ ID NO: 288943
  chr12:52416804-52416953
  hypo

SEQ ID NO: 409007 - DNA, 179 bp, Homo sapiens; identical to SEQ ID NO: 288944
  chr12:52416985-52417164
  hypo

SEQ ID NO: 409008 - DNA, 82 bp, Homo sapiens; identical to SEQ ID NO: 315829
  chr12:52490992-52491074
  hypo

SEQ ID NO: 409009 - DNA, 44 bp, Homo sapiens; identical to SEQ ID NO: 315830
  chr12:52491127-52491171
  hypo

SEQ ID NO: 409010 - DNA, 308 bp, Homo sapiens; identical to SEQ ID NO: 264799
  chr12:52567344-52567652
  hypo

SEQ ID NO: 409011 - DNA, 98 bp, Homo sapiens; identical to SEQ ID NO: 264800
  chr12:52647005-52647103
  hypo

SEQ ID NO: 409012 - DNA, 59 bp, Homo sapiens; identical to SEQ ID NO: 264803
  chr12:52750116-52750175
  hypo

SEQ ID NO: 409013 - DNA, 348 bp, Homo sapiens; identical to SEQ ID NO: 264805
  chr12:52793641-52793989
  hypo

SEQ ID NO: 409014 - DNA, 95 bp, Homo sapiens; identical to SEQ ID NO: 264806
  chr12:52906094-52906189
  hypo

SEQ ID NO: 409015 - DNA, 72 bp, Homo sapiens; identical to SEQ ID NO: 264808
  chr12:52911390-52911462
  hypo

SEQ ID NO: 409016 - DNA, 293 bp, Homo sapiens; identical to SEQ ID NO: 315850
  chr12:53068868-53069161
  hypo

SEQ ID NO: 409017 - DNA, 421 bp, Homo sapiens; identical to SEQ ID NO: 264816
  chr12:53183249-53183670
  hypo

SEQ ID NO: 409018 - DNA, 203 bp, Homo sapiens; identical to SEQ ID NO: 264818
  chr12:53214328-53214531
  hypo

SEQ ID NO: 409019 - DNA, 33 bp, Homo sapiens; identical to SEQ ID NO: 264820
  chr12:53345414-53345447
  hypo

SEQ ID NO: 409020 - DNA, 75 bp, Homo sapiens; identical to SEQ ID NO: 264822
  chr12:53454239-53454314
  hypo

SEQ ID NO: 409021 - DNA, 81 bp, Homo sapiens; identical to SEQ ID NO: 264823
  chr12:53463204-53463285
  hypo

SEQ ID NO: 409022 - DNA, 86 bp, Homo sapiens; identical to SEQ ID NO: 214909
  chr12:53467253-53467339
  hypo

SEQ ID NO: 409023 - DNA, 40 bp, Homo sapiens; identical to SEQ ID NO: 214910
  chr12:53517536-53517576
  hypo

SEQ ID NO: 409024 - DNA, 58 bp, Homo sapiens; identical to SEQ ID NO: 264828
  chr12:53547966-53548024
  hypo

SEQ ID NO: 409025 - DNA, 59 bp, Homo sapiens; identical to SEQ ID NO: 214912
  chr12:53686627-53686686
  hypo

SEQ ID NO: 409026 - DNA, 240 bp, Homo sapiens; identical to SEQ ID NO: 264834
  chr12:53778351-53778591
  hypo

SEQ ID NO: 409027 - DNA, 57 bp, Homo sapiens; identical to SEQ ID NO: 315870
  chr12:53785410-53785467
  hypo

SEQ ID NO: 409028 - DNA, 92 bp, Homo sapiens; identical to SEQ ID NO: 264836
  chr12:53796833-53796925
  hypo

SEQ ID NO: 409029 - DNA, 43 bp, Homo sapiens; identical to SEQ ID NO: 264838
  chr12:53823277-53823320
  hypo

SEQ ID NO: 409030 - DNA, 53 bp, Homo sapiens; identical to SEQ ID NO: 315874
  chr12:53832417-53832470
  hypo

SEQ ID NO: 409031 - DNA, 157 bp, Homo sapiens; identical to SEQ ID NO: 264842
  chr12:53898408-53898565
  hypo

SEQ ID NO: 409032 - DNA, 404 bp, Homo sapiens; identical to SEQ ID NO: 264844
  chr12:53994392-53994796
  hypo

SEQ ID NO: 409033 - DNA, 36 bp, Homo sapiens; identical to SEQ ID NO: 264845
  chr12:54023346-54023382
  hypo

SEQ ID NO: 409034 - DNA, 44 bp, Homo sapiens; identical to SEQ ID NO: 264846
  chr12:54031206-54031250
  hypo

SEQ ID NO: 409035 - DNA, 59 bp, Homo sapiens
  chr12:54651287-54651346
  hypo
aggaacttactcagaaaagcctttccacttcagtagatattccacttgtcccttaacca

SEQ ID NO: 409036 - DNA, 41 bp, Homo sapiens; identical to SEQ ID NO: 203030
  chr12:54686414-54686455
  hypo

SEQ ID NO: 409037 - DNA, 38 bp, Homo sapiens; identical to SEQ ID NO: 264852
  chr12:54718115-54718153
  hypo

SEQ ID NO: 409038 - DNA, 56 bp, Homo sapiens; identical to SEQ ID NO: 315894
  chr12:54767804-54767860
  hypo

SEQ ID NO: 409039 - DNA, 277 bp, Homo sapiens; identical to SEQ ID NO: 289049
  chr12:54812879-54813156
  hypo

SEQ ID NO: 409040 - DNA, 31 bp, Homo sapiens; identical to SEQ ID NO: 264855
  chr12:54890476-54890507
  hypo

SEQ ID NO: 409041 - DNA, 91 bp, Homo sapiens; identical to SEQ ID NO: 264856
  chr12:55310066-55310157
  hypo

SEQ ID NO: 409042 - DNA, 278 bp, Homo sapiens; identical to SEQ ID NO: 264859
  chr12:56078877-56079155
  hypo

SEQ ID NO: 409043 - DNA, 33 bp, Homo sapiens; identical to SEQ ID NO: 264860
  chr12:56108936-56108969
  hypo

SEQ ID NO: 409044 - DNA, 88 bp, Homo sapiens; identical to SEQ ID NO: 214927
  chr12:56182547-56182635
  hypo

SEQ ID NO: 409045 - DNA, 42 bp, Homo sapiens; identical to SEQ ID NO: 224382
  chr12:56326151-56326193
  hypo

SEQ ID NO: 409046 - DNA, 137 bp, Homo sapiens; identical to SEQ ID NO: 264867
  chr12:56329173-56329310
  hypo

SEQ ID NO: 409047 - DNA, 120 bp, Homo sapiens; identical to SEQ ID NO: 264869
  chr12:56354598-56354718
  hypo

SEQ ID NO: 409048 - DNA, 151 bp, Homo sapiens; identical to SEQ ID NO: 203036
  chr12:56390556-56390707
  hypo

SEQ ID NO: 409049 - DNA, 174 bp, Homo sapiens; identical to SEQ ID NO: 264871
  chr12:56480248-56480422
  hypo

SEQ ID NO: 409050 - DNA, 56 bp, Homo sapiens; identical to SEQ ID NO: 264872
  chr12:56504406-56504462
  hypo

SEQ ID NO: 409051 - DNA, 200 bp, Homo sapiens; identical to SEQ ID NO: 214936
  chr12:56993681-56993881
  hypo

SEQ ID NO: 409052 - DNA, 62 bp, Homo sapiens; identical to SEQ ID NO: 315922
  chr12:57054418-57054480
  hypo

SEQ ID NO: 409053 - DNA, 108 bp, Homo sapiens; identical to SEQ ID NO: 264880
  chr12:57431637-57431745
  hypo

SEQ ID NO: 409054 - DNA, 32 bp, Homo sapiens; identical to SEQ ID NO: 214937
  chr12:57446184-57446216
  hypo

SEQ ID NO: 409055 - DNA, 172 bp, Homo sapiens; identical to SEQ ID NO: 214938
  chr12:57489924-57490096
  hypo

SEQ ID NO: 409056 - DNA, 91 bp, Homo sapiens; identical to SEQ ID NO: 264884
  chr12:57559573-57559664
  hypo

SEQ ID NO: 409057 - DNA, 356 bp, Homo sapiens; identical to SEQ ID NO: 264886
  chr12:57570816-57571172
  hypo

SEQ ID NO: 409058 - DNA, 35 bp, Homo sapiens; identical to SEQ ID NO: 264887
  chr12:57572148-57572183
  hypo

SEQ ID NO: 409059 - DNA, 38 bp, Homo sapiens; identical to SEQ ID NO: 264888
  chr12:57577265-57577303
  hypo

SEQ ID NO: 409060 - DNA, 71 bp, Homo sapiens; identical to SEQ ID NO: 214941
  chr12:57584915-57584986
  hypo

SEQ ID NO: 409061 - DNA, 197 bp, Homo sapiens; identical to SEQ ID NO: 264891
  chr12:57593155-57593352
  hypo

SEQ ID NO: 409062 - DNA, 56 bp, Homo sapiens; identical to SEQ ID NO: 264898
  chr12:57868221-57868277
  hypo

SEQ ID NO: 409063 - DNA, 105 bp, Homo sapiens; identical to SEQ ID NO: 214944
  chr12:57982779-57982884
  hypo

SEQ ID NO: 409064 - DNA, 86 bp, Homo sapiens; identical to SEQ ID NO: 264904
  chr12:58068674-58068760
  hypo

SEQ ID NO: 409065 - DNA, 36 bp, Homo sapiens; identical to SEQ ID NO: 264906
  chr12:58124644-58124680
  hypo

SEQ ID NO: 409066 - DNA, 166 bp, Homo sapiens; identical to SEQ ID NO: 214945
  chr12:58152861-58153027
  hypo

SEQ ID NO: 409067 - DNA, 251 bp, Homo sapiens; identical to SEQ ID NO: 203054
  chr12:58159038-58159289
  hypo

SEQ ID NO: 409068 - DNA, 147 bp, Homo sapiens; identical to SEQ ID NO: 203055
  chr12:58159346-58159493
  hypo

SEQ ID NO: 409069 - DNA, 102 bp, Homo sapiens; identical to SEQ ID NO: 214948
  chr12:58241599-58241701
  hypo

SEQ ID NO: 409070 - DNA, 41 bp, Homo sapiens; identical to SEQ ID NO: 264911
  chr12:58274994-58275035
  hypo

SEQ ID NO: 409071 - DNA, 188 bp, Homo sapiens; identical to SEQ ID NO: 203059
  chr12:59313474-59313662
  hypo

SEQ ID NO: 409072 - DNA, 180 bp, Homo sapiens; identical to SEQ ID NO: 224390
  chr12:59989688-59989868
  hypo

SEQ ID NO: 409073 - DNA, 189 bp, Homo sapiens; identical to SEQ ID NO: 264915
  chr12:61582596-61582785
  hypo

SEQ ID NO: 409074 - DNA, 121 bp, Homo sapiens; identical to SEQ ID NO: 264916
  chr12:62266114-62266235
  hypo

SEQ ID NO: 409075 - DNA, 42 bp, Homo sapiens; identical to SEQ ID NO: 264919
  chr12:63126532-63126574
  hypo

SEQ ID NO: 409076 - DNA, 266 bp, Homo sapiens; identical to SEQ ID NO: 264922
  chr12:63397171-63397437
  hypo

SEQ ID NO: 409077 - DNA, 110 bp, Homo sapiens; identical to SEQ ID NO: 203073
  chr12:64238195-64238305
  hypo

SEQ ID NO: 409078 - DNA, 98 bp, Homo sapiens; identical to SEQ ID NO: 264925
  chr12:64373753-64373851
  hypo

SEQ ID NO: 409079 - DNA, 269 bp, Homo sapiens; identical to SEQ ID NO: 315979
  chr12:64782916-64783185
  hypo

SEQ ID NO: 409080 - DNA, 144 bp, Homo sapiens; identical to SEQ ID NO: 264930
  chr12:64993418-64993562
  hypo

SEQ ID NO: 409081 - DNA, 272 bp, Homo sapiens; identical to SEQ ID NO: 289145
  chr12:65564381-65564653
  hypo

SEQ ID NO: 409082 - DNA, 50 bp, Homo sapiens; identical to SEQ ID NO: 49821
  chr12:65564722-65564772
  hypo

SEQ ID NO: 409083 - DNA, 41 bp, Homo sapiens; identical to SEQ ID NO: 214967
  chr12:66213996-66214037
  hypo

SEQ ID NO: 409084 - DNA, 92 bp, Homo sapiens; identical to SEQ ID NO: 264940
  chr12:66843698-66843790
  hypo

SEQ ID NO: 409085 - DNA, 94 bp, Homo sapiens; identical to SEQ ID NO: 264941
  chr12:66889676-66889770
  hypo

SEQ ID NO: 409086 - DNA, 33 bp, Homo sapiens; identical to SEQ ID NO: 264945
  chr12:69002754-69002787
  hypo

SEQ ID NO: 409087 - DNA, 64 bp, Homo sapiens; identical to SEQ ID NO: 224404
  chr12:69080591-69080655
  hypo

SEQ ID NO: 409088 - DNA, 209 bp, Homo sapiens; identical to SEQ ID NO: 214969
  chr12:69190343-69190552
  hypo

SEQ ID NO: 409089 - DNA, 137 bp, Homo sapiens; identical to SEQ ID NO: 264951
  chr12:69219402-69219539
  hypo

SEQ ID NO: 409090 - DNA, 114 bp, Homo sapiens; identical to SEQ ID NO: 264956
  chr12:69461743-69461857
  hypo

SEQ ID NO: 409091 - DNA, 98 bp, Homo sapiens; identical to SEQ ID NO: 264959
  chr12:69799148-69799246
  hypo

SEQ ID NO: 409092 - DNA, 33 bp, Homo sapiens; identical to SEQ ID NO: 264960
  chr12:69820434-69820467
  hypo

SEQ ID NO: 409093 - DNA, 33 bp, Homo sapiens; identical to SEQ ID NO: 264967
  chr12:70435915-70435948
  hypo

SEQ ID NO: 409094 - DNA, 171 bp, Homo sapiens; identical to SEQ ID NO: 214974
  chr12:70648187-70648358
  hypo

SEQ ID NO: 409095 - DNA, 76 bp, Homo sapiens; identical to SEQ ID NO: 316022
  chr12:70651452-70651528
  hypo

SEQ ID NO: 409096 - DNA, 42 bp, Homo sapiens; identical to SEQ ID NO: 214975
  chr12:72098321-72098363
  hypo

SEQ ID NO: 409097 - DNA, 102 bp, Homo sapiens; identical to SEQ ID NO: 264977
  chr12:73130929-73131031
  hypo

SEQ ID NO: 409098 - DNA, 166 bp, Homo sapiens; identical to SEQ ID NO: 264978
  chr12:74564711-74564877
  hypo

SEQ ID NO: 409099 - DNA, 237 bp, Homo sapiens; identical to SEQ ID NO: 264979
  chr12:75699403-75699640
  hypo

SEQ ID NO: 409100 - DNA, 44 bp, Homo sapiens; identical to SEQ ID NO: 264980
  chr12:75702602-75702646
  hypo

SEQ ID NO: 409101 - DNA, 31 bp, Homo sapiens; identical to SEQ ID NO: 264981
  chr12:76706641-76706672
  hypo

SEQ ID NO: 409102 - DNA, 70 bp, Homo sapiens; identical to SEQ ID NO: 264984
  chr12:77002013-77002083
  hypo

SEQ ID NO: 409103 - DNA, 48 bp, Homo sapiens
  chr12:77216280-77216328
  hypo
gtccttccttagaaagctgaaagctgataaggtaaactcataactgaa

SEQ ID NO: 409104 - DNA, 164 bp, Homo sapiens; identical to SEQ ID NO: 214984
  chr12:79926688-79926852
  hypo

SEQ ID NO: 409105 - DNA, 334 bp, Homo sapiens; identical to SEQ ID NO: 399096
  chr12:83080990-83081324
  hypo

SEQ ID NO: 409106 - DNA, 38 bp, Homo sapiens; identical to SEQ ID NO: 264993
  chr12:86216675-86216713
  hypo

SEQ ID NO: 409107 - DNA, 40 bp, Homo sapiens; identical to SEQ ID NO: 214988
  chr12:89020039-89020079
  hypo

SEQ ID NO: 409108 - DNA, 158 bp, Homo sapiens; identical to SEQ ID NO: 264995
  chr12:89772134-89772292
  hypo

SEQ ID NO: 409109 - DNA, 157 bp, Homo sapiens; identical to SEQ ID NO: 264998
  chr12:89916944-89917101
  hypo

SEQ ID NO: 409110 - DNA, 39 bp, Homo sapiens; identical to SEQ ID NO: 265004
  chr12:93476370-93476409
  hypo

SEQ ID NO: 409111 - DNA, 96 bp, Homo sapiens; identical to SEQ ID NO: 265007
  chr12:93738883-93738979
  hypo

SEQ ID NO: 409112 - DNA, 64 bp, Homo sapiens; identical to SEQ ID NO: 203132
  chr12:93985620-93985684
  hypo

SEQ ID NO: 409113 - DNA, 141 bp, Homo sapiens; identical to SEQ ID NO: 265008
  chr12:94093737-94093878
  hypo

SEQ ID NO: 409114 - DNA, 40 bp, Homo sapiens; identical to SEQ ID NO: 265011
  chr12:94203995-94204035
  hypo

SEQ ID NO: 409115 - DNA, 56 bp, Homo sapiens; identical to SEQ ID NO: 265012
  chr12:94233300-94233356
  hypo

SEQ ID NO: 409116 - DNA, 104 bp, Homo sapiens; identical to SEQ ID NO: 265013
  chr12:94235585-94235689
  hypo

SEQ ID NO: 409117 - DNA, 251 bp, Homo sapiens; identical to SEQ ID NO: 265014
  chr12:94658439-94658690
  hypo

SEQ ID NO: 409118 - DNA, 89 bp, Homo sapiens; identical to SEQ ID NO: 265017
  chr12:95492921-95493010
  hypo

SEQ ID NO: 409119 - DNA, 209 bp, Homo sapiens; identical to SEQ ID NO: 265020
  chr12:95676257-95676466
  hypo

SEQ ID NO: 409120 - DNA, 37 bp, Homo sapiens; identical to SEQ ID NO: 265021
  chr12:95900348-95900385
  hypo

SEQ ID NO: 409121 - DNA, 94 bp, Homo sapiens; identical to SEQ ID NO: 265023
  chr12:96131819-96131913
  hypo

SEQ ID NO: 409122 - DNA, 32 bp, Homo sapiens; identical to SEQ ID NO: 265025
  chr12:96437261-96437293
  hypo

SEQ ID NO: 409123 - DNA, 92 bp, Homo sapiens; identical to SEQ ID NO: 265026
  chr12:96437413-96437505
  hypo

SEQ ID NO: 409124 - DNA, 59 bp, Homo sapiens; identical to SEQ ID NO: 265028
  chr12:96613304-96613363
  hypo

SEQ ID NO: 409125 - DNA, 33 bp, Homo sapiens; identical to SEQ ID NO: 224420
  chr12:96618052-96618085
  hypo

SEQ ID NO: 409126 - DNA, 77 bp, Homo sapiens; identical to SEQ ID NO: 265029
  chr12:96633652-96633729
  hypo

SEQ ID NO: 409127 - DNA, 83 bp, Homo sapiens; identical to SEQ ID NO: 265030
  chr12:96641021-96641104
  hypo

SEQ ID NO: 409128 - DNA, 62 bp, Homo sapiens; identical to SEQ ID NO: 215005
  chr12:97339536-97339598
  hypo

SEQ ID NO: 409129 - DNA, 200 bp, Homo sapiens; identical to SEQ ID NO: 215006
  chr12:98947901-98948101
  hypo

SEQ ID NO: 409130 - DNA, 85 bp, Homo sapiens; identical to SEQ ID NO: 215008
  chr12:98983724-98983809
  hypo

SEQ ID NO: 409131 - DNA, 120 bp, Homo sapiens; identical to SEQ ID NO: 265036
  chr12:100624655-100624775
  hypo

SEQ ID NO: 409132 - DNA, 169 bp, Homo sapiens; identical to SEQ ID NO: 215009
  chr12:101711200-101711369
  hypo

SEQ ID NO: 409133 - DNA, 36 bp, Homo sapiens; identical to SEQ ID NO: 265041
  chr12:101962172-101962208
  hypo

SEQ ID NO: 409134 - DNA, 56 bp, Homo sapiens; identical to SEQ ID NO: 215012
  chr12:102133325-102133381
  hypo

SEQ ID NO: 409135 - DNA, 150 bp, Homo sapiens; identical to SEQ ID NO: 265049
  chr12:102457339-102457489
  hypo

SEQ ID NO: 409136 - DNA, 126 bp, Homo sapiens; identical to SEQ ID NO: 265052
  chr12:104169295-104169421
  hypo

SEQ ID NO: 409137 - DNA, 35 bp, Homo sapiens; identical to SEQ ID NO: 215019
  chr12:104691424-104691459
  hypo

SEQ ID NO: 409138 - DNA, 36 bp, Homo sapiens; identical to SEQ ID NO: 215020
  chr12:104702054-104702090
  hypo

SEQ ID NO: 409139 - DNA, 143 bp, Homo sapiens; identical to SEQ ID NO: 265063
  chr12:104799424-104799567
  hypo

SEQ ID NO: 409140 - DNA, 175 bp, Homo sapiens; identical to SEQ ID NO: 215023
  chr12:105096586-105096761
  hypo

SEQ ID NO: 409141 - DNA, 131 bp, Homo sapiens; identical to SEQ ID NO: 265065
  chr12:105097266-105097397
  hypo

SEQ ID NO: 409142 - DNA, 49 bp, Homo sapiens; identical to SEQ ID NO: 215024
  chr12:105132876-105132925
  hypo

SEQ ID NO: 409143 - DNA, 146 bp, Homo sapiens; identical to SEQ ID NO: 265069
  chr12:105607980-105608126
  hypo

SEQ ID NO: 409144 - DNA, 180 bp, Homo sapiens; identical to SEQ ID NO: 224429
  chr12:106532708-106532888
  hypo

SEQ ID NO: 409145 - DNA, 264 bp, Homo sapiens; identical to SEQ ID NO: 203162
  chr12:106640992-106641256
  hypo

SEQ ID NO: 409146 - DNA, 189 bp, Homo sapiens; identical to SEQ ID NO: 215028
  chr12:106881472-106881661
  hypo

SEQ ID NO: 409147 - DNA, 142 bp, Homo sapiens; identical to SEQ ID NO: 224433
  chr12:107167936-107168078
  hypo

SEQ ID NO: 409148 - DNA, 41 bp, Homo sapiens; identical to SEQ ID NO: 226552
  chr12:108298348-108298389
  hypo

SEQ ID NO: 409149 - DNA, 32 bp, Homo sapiens; identical to SEQ ID NO: 215032
  chr12:108963690-108963722
  hypo

SEQ ID NO: 409150 - DNA, 43 bp, Homo sapiens; identical to SEQ ID NO: 265086
  chr12:109014134-109014177
  hypo

SEQ ID NO: 409151 - DNA, 169 bp, Homo sapiens; identical to SEQ ID NO: 265088
  chr12:109181383-109181552
  hypo

SEQ ID NO: 409152 - DNA, 80 bp, Homo sapiens; identical to SEQ ID NO: 265089
  chr12:109195703-109195783
  hypo

SEQ ID NO: 409153 - DNA, 180 bp, Homo sapiens; identical to SEQ ID NO: 265090
  chr12:109204591-109204771
  hypo

SEQ ID NO: 409154 - DNA, 589 bp, Homo sapiens; identical to SEQ ID NO: 289331
  chr12:109746919-109747508
  hypo

SEQ ID NO: 409155 - DNA, 39 bp, Homo sapiens; identical to SEQ ID NO: 265101
  chr12:109878129-109878168
  hypo

SEQ ID NO: 409156 - DNA, 195 bp, Homo sapiens; identical to SEQ ID NO: 265102
  chr12:109881228-109881423
  hypo

SEQ ID NO: 409157 - DNA, 175 bp, Homo sapiens; identical to SEQ ID NO: 215038
  chr12:109887568-109887743
  hypo

SEQ ID NO: 409158 - DNA, 199 bp, Homo sapiens; identical to SEQ ID NO: 265105
  chr12:109887946-109888145
  hypo

SEQ ID NO: 409159 - DNA, 46 bp, Homo sapiens; identical to SEQ ID NO: 265108
  chr12:109935639-109935685
  hypo

SEQ ID NO: 409160 - DNA, 159 bp, Homo sapiens; identical to SEQ ID NO: 265110
  chr12:109936815-109936974
  hypo

SEQ ID NO: 409161 - DNA, 43 bp, Homo sapiens; identical to SEQ ID NO: 265115
  chr12:110170347-110170390
  hypo

SEQ ID NO: 409162 - DNA, 34 bp, Homo sapiens; identical to SEQ ID NO: 265117
  chr12:110250928-110250962
  hypo

SEQ ID NO: 409163 - DNA, 192 bp, Homo sapiens; identical to SEQ ID NO: 215041
  chr12:110378869-110379061
  hypo

SEQ ID NO: 409164 - DNA, 37 bp, Homo sapiens; identical to SEQ ID NO: 265127
  chr12:110563479-110563516
  hypo

SEQ ID NO: 409165 - DNA, 63 bp, Homo sapiens; identical to SEQ ID NO: 316202
  chr12:110563722-110563785
  hypo

SEQ ID NO: 409166 - DNA, 31 bp, Homo sapiens; identical to SEQ ID NO: 265130
  chr12:110767512-110767543
  hypo

SEQ ID NO: 409167 - DNA, 155 bp, Homo sapiens; identical to SEQ ID NO: 316205
  chr12:110782524-110782679
  hypo

SEQ ID NO: 409168 - DNA, 54 bp, Homo sapiens
  chr12:110783925-110783979
  hypo
aagtggttgggtggggcttgggaccagccacctccttccaggggaggctggagg

SEQ ID NO: 409169 - DNA, 303 bp, Homo sapiens; identical to SEQ ID NO: 265136
  chr12:110785458-110785761
  hypo

SEQ ID NO: 409170 - DNA, 148 bp, Homo sapiens; identical to SEQ ID NO: 215046
  chr12:110806697-110806845
  hypo

SEQ ID NO: 409171 - DNA, 201 bp, Homo sapiens; identical to SEQ ID NO: 215047
  chr12:110808573-110808774
  hypo

SEQ ID NO: 409172 - DNA, 37 bp, Homo sapiens; identical to SEQ ID NO: 215050
  chr12:110916994-110917031
  hypo

SEQ ID NO: 409173 - DNA, 316 bp, Homo sapiens; identical to SEQ ID NO: 215051
  chr12:111083708-111084024
  hypo

SEQ ID NO: 409174 - DNA, 120 bp, Homo sapiens; identical to SEQ ID NO: 215053
  chr12:111195775-111195895
  hypo

SEQ ID NO: 409175 - DNA, 242 bp, Homo sapiens; identical to SEQ ID NO: 265149
  chr12:111501288-111501530
  hypo

SEQ ID NO: 409176 - DNA, 61 bp, Homo sapiens; identical to SEQ ID NO: 265154
  chr12:111855883-111855944
  hypo

SEQ ID NO: 409177 - DNA, 42 bp, Homo sapiens; identical to SEQ ID NO: 265156
  chr12:112015341-112015383
  hypo

SEQ ID NO: 409178 - DNA, 81 bp, Homo sapiens; identical to SEQ ID NO: 215060
  chr12:112082472-112082553
  hypo

SEQ ID NO: 409179 - DNA, 86 bp, Homo sapiens; identical to SEQ ID NO: 265159
  chr12:112110965-112111051
  hypo

SEQ ID NO: 409180 - DNA, 120 bp, Homo sapiens; identical to SEQ ID NO: 265160
  chr12:112126606-112126726
  hypo

SEQ ID NO: 409181 - DNA, 54 bp, Homo sapiens; identical to SEQ ID NO: 215061
  chr12:112194070-112194124
  hypo

SEQ ID NO: 409182 - DNA, 91 bp, Homo sapiens; identical to SEQ ID NO: 265164
  chr12:112218335-112218426
  hypo

SEQ ID NO: 409183 - DNA, 90 bp, Homo sapiens; identical to SEQ ID NO: 215063
  chr12:112574643-112574733
  hypo

SEQ ID NO: 409184 - DNA, 70 bp, Homo sapiens; identical to SEQ ID NO: 215070
  chr12:112616770-112616840
  hypo

SEQ ID NO: 409185 - DNA, 382 bp, Homo sapiens; identical to SEQ ID NO: 215071
  chr12:112657024-112657406
  hypo

SEQ ID NO: 409186 - DNA, 53 bp, Homo sapiens; identical to SEQ ID NO: 265183
  chr12:112753046-112753099
  hypo

SEQ ID NO: 409187 - DNA, 35 bp, Homo sapiens; identical to SEQ ID NO: 203186
  chr12:112884177-112884212
  hypo

SEQ ID NO: 409188 - DNA, 481 bp, Homo sapiens; identical to SEQ ID NO: 265184
  chr12:112893631-112894112
  hypo

SEQ ID NO: 409189 - DNA, 58 bp, Homo sapiens; identical to SEQ ID NO: 203187
  chr12:112915451-112915509
  hypo

SEQ ID NO: 409190 - DNA, 49 bp, Homo sapiens; identical to SEQ ID NO: 203189
  chr12:112926827-112926876
  hypo

SEQ ID NO: 409191 - DNA, 65 bp, Homo sapiens; identical to SEQ ID NO: 203190
  chr12:112926914-112926979
  hypo

SEQ ID NO: 409192 - DNA, 61 bp, Homo sapiens; identical to SEQ ID NO: 215085
  chr12:114254876-114254937
  hypo

SEQ ID NO: 409193 - DNA, 197 bp, Homo sapiens; identical to SEQ ID NO: 215089
  chr12:114282867-114283064
  hypo

SEQ ID NO: 409194 - DNA, 199 bp, Homo sapiens; identical to SEQ ID NO: 316286
  chr12:114295304-114295503
  hypo

SEQ ID NO: 409195 - DNA, 151 bp, Homo sapiens; identical to SEQ ID NO: 265205
  chr12:114349904-114350055
  hypo

SEQ ID NO: 409196 - DNA, 283 bp, Homo sapiens; identical to SEQ ID NO: 265206
  chr12:114399937-114400220
  hypo

SEQ ID NO: 409197 - DNA, 147 bp, Homo sapiens; identical to SEQ ID NO: 203201
  chr12:114841493-114841640
  hypo

SEQ ID NO: 409198 - DNA, 117 bp, Homo sapiens; identical to SEQ ID NO: 265207
  chr12:114982647-114982764
  hypo

SEQ ID NO: 409199 - DNA, 43 bp, Homo sapiens; identical to SEQ ID NO: 265214
  chr12:116040841-116040884
  hypo

SEQ ID NO: 409200 - DNA, 138 bp, Homo sapiens; identical to SEQ ID NO: 265216
  chr12:116401202-116401340
  hypo

SEQ ID NO: 409201 - DNA, 34 bp, Homo sapiens; identical to SEQ ID NO: 265220
  chr12:116678614-116678648
  hypo

SEQ ID NO: 409202 - DNA, 66 bp, Homo sapiens; identical to SEQ ID NO: 316310
  chr12:116756739-116756805
  hypo

SEQ ID NO: 409203 - DNA, 69 bp, Homo sapiens; identical to SEQ ID NO: 265225
  chr12:116757111-116757180
  hypo

SEQ ID NO: 409204 - DNA, 92 bp, Homo sapiens; identical to SEQ ID NO: 265227
  chr12:116804026-116804118
  hypo

SEQ ID NO: 409205 - DNA, 34 bp, Homo sapiens; identical to SEQ ID NO: 265229
  chr12:116936895-116936929
  hypo

SEQ ID NO: 409206 - DNA, 54 bp, Homo sapiens; identical to SEQ ID NO: 215099
  chr12:116941370-116941424
  hypo

SEQ ID NO: 409207 - DNA, 40 bp, Homo sapiens; identical to SEQ ID NO: 265232
  chr12:116981481-116981521
  hypo

SEQ ID NO: 409208 - DNA, 100 bp, Homo sapiens; identical to SEQ ID NO: 215102
  chr12:117150587-117150687
  hypo

SEQ ID NO: 409209 - DNA, 194 bp, Homo sapiens; identical to SEQ ID NO: 265238
  chr12:117157435-117157629
  hypo

SEQ ID NO: 409210 - DNA, 84 bp, Homo sapiens; identical to SEQ ID NO: 265239
  chr12:117160857-117160941
  hypo

SEQ ID NO: 409211 - DNA, 41 bp, Homo sapiens; identical to SEQ ID NO: 265241
  chr12:117162195-117162236
  hypo

SEQ ID NO: 409212 - DNA, 116 bp, Homo sapiens; identical to SEQ ID NO: 265245
  chr12:117461716-117461832
  hypo

SEQ ID NO: 409213 - DNA, 134 bp, Homo sapiens; identical to SEQ ID NO: 215109
  chr12:117476986-117477120
  hypo

SEQ ID NO: 409214 - DNA, 287 bp, Homo sapiens; identical to SEQ ID NO: 265252
  chr12:117484911-117485198
  hypo

SEQ ID NO: 409215 - DNA, 40 bp, Homo sapiens; identical to SEQ ID NO: 215112
  chr12:117529341-117529381
  hypo

SEQ ID NO: 409216 - DNA, 180 bp, Homo sapiens; identical to SEQ ID NO: 265259
  chr12:117586330-117586510
  hypo

SEQ ID NO: 409217 - DNA, 43 bp, Homo sapiens; identical to SEQ ID NO: 215113
  chr12:117588696-117588739
  hypo

SEQ ID NO: 409218 - DNA, 103 bp, Homo sapiens; identical to SEQ ID NO: 215114
  chr12:117588799-117588902
  hypo

SEQ ID NO: 409219 - DNA, 289 bp, Homo sapiens; identical to SEQ ID NO: 215115
  chr12:117593454-117593743
  hypo

SEQ ID NO: 409220 - DNA, 87 bp, Homo sapiens; identical to SEQ ID NO: 215118
  chr12:117788578-117788665
  hypo

SEQ ID NO: 409221 - DNA, 59 bp, Homo sapiens; identical to SEQ ID NO: 265272
  chr12:118313383-118313442
  hypo

SEQ ID NO: 409222 - DNA, 57 bp, Homo sapiens; identical to SEQ ID NO: 265273
  chr12:118318419-118318476
  hypo

SEQ ID NO: 409223 - DNA, 32 bp, Homo sapiens; identical to SEQ ID NO: 265276
  chr12:118361967-118361999
  hypo

SEQ ID NO: 409224 - DNA, 120 bp, Homo sapiens; identical to SEQ ID NO: 215122
  chr12:118481549-118481669
  hypo

SEQ ID NO: 409225 - DNA, 48 bp, Homo sapiens; identical to SEQ ID NO: 265280
  chr12:118533281-118533329
  hypo

SEQ ID NO: 409226 - DNA, 325 bp, Homo sapiens; identical to SEQ ID NO: 215123
  chr12:118583595-118583920
  hypo

SEQ ID NO: 409227 - DNA, 99 bp, Homo sapiens; identical to SEQ ID NO: 215126
  chr12:119626324-119626423
  hypo

SEQ ID NO: 409228 - DNA, 153 bp, Homo sapiens; identical to SEQ ID NO: 265289
  chr12:120127978-120128131
  hypo

SEQ ID NO: 409229 - DNA, 196 bp, Homo sapiens; identical to SEQ ID NO: 215129
  chr12:120134818-120135014
  hypo

SEQ ID NO: 409230 - DNA, 35 bp, Homo sapiens; identical to SEQ ID NO: 265303
  chr12:120241909-120241944
  hypo

SEQ ID NO: 409231 - DNA, 75 bp, Homo sapiens; identical to SEQ ID NO: 265317
  chr12:120662007-120662082
  hypo

SEQ ID NO: 409232 - DNA, 89 bp, Homo sapiens; identical to SEQ ID NO: 265318
  chr12:120725460-120725549
  hypo

SEQ ID NO: 409233 - DNA, 83 bp, Homo sapiens; identical to SEQ ID NO: 215143
  chr12:120758714-120758797
  hypo

SEQ ID NO: 409234 - DNA, 36 bp, Homo sapiens; identical to SEQ ID NO: 265323
  chr12:120927818-120927854
  hypo

SEQ ID NO: 409235 - DNA, 36 bp, Homo sapiens; identical to SEQ ID NO: 215145
  chr12:120956375-120956411
  hypo

SEQ ID NO: 409236 - DNA, 31 bp, Homo sapiens; identical to SEQ ID NO: 215146
  chr12:120991484-120991515
  hypo

SEQ ID NO: 409237 - DNA, 94 bp, Homo sapiens; identical to SEQ ID NO: 215147
  chr12:121166589-121166683
  hypo

SEQ ID NO: 409238 - DNA, 179 bp, Homo sapiens; identical to SEQ ID NO: 265330
  chr12:121198381-121198560
  hypo

SEQ ID NO: 409239 - DNA, 39 bp, Homo sapiens; identical to SEQ ID NO: 265332
  chr12:121199754-121199793
  hypo

SEQ ID NO: 409240 - DNA, 149 bp, Homo sapiens; identical to SEQ ID NO: 265336
  chr12:121212805-121212954
  hypo

SEQ ID NO: 409241 - DNA, 37 bp, Homo sapiens; identical to SEQ ID NO: 215150
  chr12:121352799-121352836
  hypo

SEQ ID NO: 409242 - DNA, 279 bp, Homo sapiens; identical to SEQ ID NO: 265340
  chr12:121363905-121364184
  hypo

SEQ ID NO: 409243 - DNA, 135 bp, Homo sapiens; identical to SEQ ID NO: 265347
  chr12:121693277-121693412
  hypo

SEQ ID NO: 409244 - DNA, 178 bp, Homo sapiens; identical to SEQ ID NO: 215155
  chr12:121711833-121712011
  hypo

SEQ ID NO: 409245 - DNA, 169 bp, Homo sapiens; identical to SEQ ID NO: 215166
  chr12:122218793-122218962
  hypo

SEQ ID NO: 409246 - DNA, 79 bp, Homo sapiens; identical to SEQ ID NO: 265365
  chr12:122255282-122255361
  hypo

SEQ ID NO: 409247 - DNA, 110 bp, Homo sapiens; identical to SEQ ID NO: 265368
  chr12:122268640-122268750
  hypo

SEQ ID NO: 409248 - DNA, 41 bp, Homo sapiens; identical to SEQ ID NO: 215172
  chr12:122282339-122282380
  hypo

SEQ ID NO: 409249 - DNA, 78 bp, Homo sapiens; identical to SEQ ID NO: 265372
  chr12:122353722-122353800
  hypo

SEQ ID NO: 409250 - DNA, 117 bp, Homo sapiens; identical to SEQ ID NO: 265373
  chr12:122396582-122396699
  hypo

SEQ ID NO: 409251 - DNA, 34 bp, Homo sapiens; identical to SEQ ID NO: 215173
  chr12:122425316-122425350
  hypo

SEQ ID NO: 409252 - DNA, 56 bp, Homo sapiens
  chr12:122439787-122439843
  hypo
gtagaggatccagtttgacagctgtttcaggagaataggtatgtaaagagagactt

SEQ ID NO: 409253 - DNA, 160 bp, Homo sapiens; identical to SEQ ID NO: 215174
  chr12:122444435-122444595
  hypo

SEQ ID NO: 409254 - DNA, 85 bp, Homo sapiens; identical to SEQ ID NO: 215175
  chr12:122455990-122456075
  hypo

SEQ ID NO: 409255 - DNA, 384 bp, Homo sapiens; identical to SEQ ID NO: 265381
  chr12:122471978-122472362
  hypo

SEQ ID NO: 409256 - DNA, 84 bp, Homo sapiens; identical to SEQ ID NO: 265382
  chr12:122472662-122472746
  hypo

SEQ ID NO: 409257 - DNA, 213 bp, Homo sapiens; identical to SEQ ID NO: 215178
  chr12:122479007-122479220
  hypo

SEQ ID NO: 409258 - DNA, 449 bp, Homo sapiens; identical to SEQ ID NO: 265401
  chr12:122712004-122712453
  hypo

SEQ ID NO: 409259 - DNA, 176 bp, Homo sapiens; identical to SEQ ID NO: 265402
  chr12:122734927-122735103
  hypo

SEQ ID NO: 409260 - DNA, 31 bp, Homo sapiens; identical to SEQ ID NO: 265403
  chr12:122752535-122752566
  hypo

SEQ ID NO: 409261 - DNA, 59 bp, Homo sapiens; identical to SEQ ID NO: 265404
  chr12:122877152-122877211
  hypo

SEQ ID NO: 409262 - DNA, 36 bp, Homo sapiens; identical to SEQ ID NO: 265405
  chr12:122878701-122878737
  hypo

SEQ ID NO: 409263 - DNA, 95 bp, Homo sapiens; identical to SEQ ID NO: 224473
  chr12:122907734-122907829
  hypo

SEQ ID NO: 409264 - DNA, 44 bp, Homo sapiens; identical to SEQ ID NO: 265407
  chr12:122908028-122908072
  hypo

SEQ ID NO: 409265 - DNA, 34 bp, Homo sapiens; identical to SEQ ID NO: 265409
  chr12:122908260-122908294
  hypo

SEQ ID NO: 409266 - DNA, 103 bp, Homo sapiens; identical to SEQ ID NO: 215189
  chr12:122952405-122952508
  hypo

SEQ ID NO: 409267 - DNA, 133 bp, Homo sapiens; identical to SEQ ID NO: 215190
  chr12:122958416-122958549
  hypo

SEQ ID NO: 409268 - DNA, 124 bp, Homo sapiens; identical to SEQ ID NO: 316517
  chr12:122958579-122958703
  hypo

SEQ ID NO: 409269 - DNA, 120 bp, Homo sapiens; identical to SEQ ID NO: 265414
  chr12:123031662-123031782
  hypo

SEQ ID NO: 409270 - DNA, 164 bp, Homo sapiens; identical to SEQ ID NO: 215193
  chr12:123044412-123044576
  hypo

SEQ ID NO: 409271 - DNA, 36 bp, Homo sapiens; identical to SEQ ID NO: 265417
  chr12:123097245-123097281
  hypo

SEQ ID NO: 409272 - DNA, 36 bp, Homo sapiens; identical to SEQ ID NO: 215195
  chr12:123120922-123120958
  hypo

SEQ ID NO: 409273 - DNA, 931 bp, Homo sapiens; identical to SEQ ID NO: 265421
  chr12:123213913-123214844
  hypo

SEQ ID NO: 409274 - DNA, 143 bp, Homo sapiens; identical to SEQ ID NO: 316529
  chr12:123333079-123333222
  hypo

SEQ ID NO: 409275 - DNA, 207 bp, Homo sapiens; identical to SEQ ID NO: 316530
  chr12:123333393-123333600
  hypo

SEQ ID NO: 409276 - DNA, 336 bp, Homo sapiens; identical to SEQ ID NO: 265426
  chr12:123340660-123340996
  hypo

SEQ ID NO: 409277 - DNA, 77 bp, Homo sapiens; identical to SEQ ID NO: 265427
  chr12:123359583-123359660
  hypo

SEQ ID NO: 409278 - DNA, 325 bp, Homo sapiens; identical to SEQ ID NO: 265429
  chr12:123416625-123416950
  hypo

SEQ ID NO: 409279 - DNA, 157 bp, Homo sapiens; identical to SEQ ID NO: 215201
  chr12:123542055-123542212
  hypo

SEQ ID NO: 409280 - DNA, 42 bp, Homo sapiens; identical to SEQ ID NO: 265437
  chr12:123563306-123563348
  hypo

SEQ ID NO: 409281 - DNA, 163 bp, Homo sapiens; identical to SEQ ID NO: 265441
  chr12:123618851-123619014
  hypo

SEQ ID NO: 409282 - DNA, 41 bp, Homo sapiens; identical to SEQ ID NO: 265443
  chr12:123736871-123736912
  hypo

SEQ ID NO: 409283 - DNA, 152 bp, Homo sapiens; identical to SEQ ID NO: 265445
  chr12:123757399-123757551
  hypo

SEQ ID NO: 409284 - DNA, 537 bp, Homo sapiens; identical to SEQ ID NO: 265446
  chr12:123773444-123773981
  hypo

SEQ ID NO: 409285 - DNA, 42 bp, Homo sapiens; identical to SEQ ID NO: 265448
  chr12:123881965-123882007
  hypo

SEQ ID NO: 409286 - DNA, 43 bp, Homo sapiens; identical to SEQ ID NO: 265450
  chr12:123894663-123894706
  hypo

SEQ ID NO: 409287 - DNA, 364 bp, Homo sapiens; identical to SEQ ID NO: 265451
  chr12:123959873-123960237
  hypo

SEQ ID NO: 409288 - DNA, 319 bp, Homo sapiens; identical to SEQ ID NO: 289485
  chr12:124017664-124017983
  hypo

SEQ ID NO: 409289 - DNA, 125 bp, Homo sapiens; identical to SEQ ID NO: 215207
  chr12:124111672-124111797
  hypo

SEQ ID NO: 409290 - DNA, 142 bp, Homo sapiens; identical to SEQ ID NO: 265459
  chr12:124152494-124152636
  hypo

SEQ ID NO: 409291 - DNA, 48 bp, Homo sapiens; identical to SEQ ID NO: 265461
  chr12:124175161-124175209
  hypo

SEQ ID NO: 409292 - DNA, 167 bp, Homo sapiens; identical to SEQ ID NO: 215209
  chr12:124272114-124272281
  hypo

SEQ ID NO: 409293 - DNA, 41 bp, Homo sapiens; identical to SEQ ID NO: 215212
  chr12:124338459-124338500
  hypo

SEQ ID NO: 409294 - DNA, 81 bp, Homo sapiens; identical to SEQ ID NO: 215213
  chr12:124404099-124404180
  hypo

SEQ ID NO: 409295 - DNA, 68 bp, Homo sapiens; identical to SEQ ID NO: 215214
  chr12:124404272-124404340
  hypo

SEQ ID NO: 409296 - DNA, 114 bp, Homo sapiens; identical to SEQ ID NO: 265473
  chr12:124562301-124562415
  hypo

SEQ ID NO: 409297 - DNA, 50 bp, Homo sapiens; identical to SEQ ID NO: 265474
  chr12:124582793-124582843
  hypo

SEQ ID NO: 409298 - DNA, 82 bp, Homo sapiens; identical to SEQ ID NO: 316584
  chr12:124651851-124651933
  hypo

SEQ ID NO: 409299 - DNA, 145 bp, Homo sapiens; identical to SEQ ID NO: 265476
  chr12:124668398-124668543
  hypo

SEQ ID NO: 409300 - DNA, 323 bp, Homo sapiens; identical to SEQ ID NO: 265477
  chr12:124669010-124669333
  hypo

SEQ ID NO: 409301 - DNA, 103 bp, Homo sapiens; identical to SEQ ID NO: 265478
  chr12:124693754-124693857
  hypo

SEQ ID NO: 409302 - DNA, 252 bp, Homo sapiens; identical to SEQ ID NO: 265479
  chr12:124716386-124716638
  hypo

SEQ ID NO: 409303 - DNA, 225 bp, Homo sapiens; identical to SEQ ID NO: 265482
  chr12:124798801-124799026
  hypo

SEQ ID NO: 409304 - DNA, 123 bp, Homo sapiens; identical to SEQ ID NO: 265485
  chr12:124827621-124827744
  hypo

SEQ ID NO: 409305 - DNA, 184 bp, Homo sapiens; identical to SEQ ID NO: 265486
  chr12:124829274-124829458
  hypo

SEQ ID NO: 409306 - DNA, 100 bp, Homo sapiens; identical to SEQ ID NO: 265487
  chr12:124831187-124831287
  hypo

SEQ ID NO: 409307 - DNA, 33 bp, Homo sapiens; identical to SEQ ID NO: 215230
  chr12:124894790-124894823
  hypo

SEQ ID NO: 409308 - DNA, 71 bp, Homo sapiens; identical to SEQ ID NO: 265503
  chr12:124915171-124915242
  hypo

SEQ ID NO: 409309 - DNA, 592 bp, Homo sapiens; identical to SEQ ID NO: 265504
  chr12:124929576-124930168
  hypo

SEQ ID NO: 409310 - DNA, 230 bp, Homo sapiens; identical to SEQ ID NO: 265509
  chr12:124966043-124966273
  hypo

SEQ ID NO: 409311 - DNA, 165 bp, Homo sapiens; identical to SEQ ID NO: 215235
  chr12:124971726-124971891
  hypo

SEQ ID NO: 409312 - DNA, 134 bp, Homo sapiens; identical to SEQ ID NO: 215237
  chr12:124980537-124980671
  hypo

SEQ ID NO: 409313 - DNA, 883 bp, Homo sapiens; identical to SEQ ID NO: 316627
  chr12:125000464-125001347
  hypo

SEQ ID NO: 409314 - DNA, 430 bp, Homo sapiens; identical to SEQ ID NO: 265519
  chr12:125042262-125042692
  hypo

SEQ ID NO: 409315 - DNA, 53 bp, Homo sapiens; identical to SEQ ID NO: 215242
  chr12:125062418-125062471
  hypo

SEQ ID NO: 409316 - DNA, 153 bp, Homo sapiens; identical to SEQ ID NO: 316639
  chr12:125119170-125119323
  hypo

SEQ ID NO: 409317 - DNA, 51 bp, Homo sapiens; identical to SEQ ID NO: 265533
  chr12:125223362-125223413
  hypo

SEQ ID NO: 409318 - DNA, 83 bp, Homo sapiens; identical to SEQ ID NO: 265537
  chr12:125257116-125257199
  hypo

SEQ ID NO: 409319 - DNA, 518 bp, Homo sapiens; identical to SEQ ID NO: 265538
  chr12:125277444-125277962
  hypo

SEQ ID NO: 409320 - DNA, 226 bp, Homo sapiens; identical to SEQ ID NO: 265539
  chr12:125299402-125299628
  hypo

SEQ ID NO: 409321 - DNA, 70 bp, Homo sapiens; identical to SEQ ID NO: 265540
  chr12:125301969-125302039
  hypo

SEQ ID NO: 409322 - DNA, 153 bp, Homo sapiens; identical to SEQ ID NO: 215253
  chr12:125447387-125447540
  hypo

SEQ ID NO: 409323 - DNA, 38 bp, Homo sapiens; identical to SEQ ID NO: 215255
  chr12:125565910-125565948
  hypo

SEQ ID NO: 409324 - DNA, 274 bp, Homo sapiens; identical to SEQ ID NO: 316662
  chr12:125566139-125566413
  hypo

SEQ ID NO: 409325 - DNA, 216 bp, Homo sapiens; identical to SEQ ID NO: 215257
  chr12:125578190-125578406
  hypo

SEQ ID NO: 409326 - DNA, 43 bp, Homo sapiens; identical to SEQ ID NO: 215258
  chr12:125578565-125578608
  hypo

SEQ ID NO: 409327 - DNA, 93 bp, Homo sapiens; identical to SEQ ID NO: 265553
  chr12:128310534-128310627
  hypo

SEQ ID NO: 409328 - DNA, 108 bp, Homo sapiens; identical to SEQ ID NO: 265554
  chr12:128313387-128313495
  hypo

SEQ ID NO: 409329 - DNA, 69 bp, Homo sapiens; identical to SEQ ID NO: 265555
  chr12:128386219-128386288
  hypo

SEQ ID NO: 409330 - DNA, 37 bp, Homo sapiens; identical to SEQ ID NO: 265556
  chr12:128439870-128439907
  hypo

SEQ ID NO: 409331 - DNA, 56 bp, Homo sapiens; identical to SEQ ID NO: 215263
  chr12:129148670-129148726
  hypo

SEQ ID NO: 409332 - DNA, 206 bp, Homo sapiens; identical to SEQ ID NO: 265565
  chr12:129298024-129298230
  hypo

SEQ ID NO: 409333 - DNA, 31 bp, Homo sapiens; identical to SEQ ID NO: 265567
  chr12:129806103-129806134
  hypo

SEQ ID NO: 409334 - DNA, 35 bp, Homo sapiens; identical to SEQ ID NO: 265571
  chr12:130326761-130326796
  hypo

SEQ ID NO: 409335 - DNA, 138 bp, Homo sapiens; identical to SEQ ID NO: 265573
  chr12:130628827-130628965
  hypo

SEQ ID NO: 409336 - DNA, 55 bp, Homo sapiens; identical to SEQ ID NO: 265575
  chr12:130744952-130745007
  hypo

SEQ ID NO: 409337 - DNA, 38 bp, Homo sapiens; identical to SEQ ID NO: 265577
  chr12:130828450-130828488
  hypo

SEQ ID NO: 409338 - DNA, 42 bp, Homo sapiens; identical to SEQ ID NO: 265579
  chr12:130883021-130883063
  hypo

SEQ ID NO: 409339 - DNA, 224 bp, Homo sapiens; identical to SEQ ID NO: 215274
  chr12:130906937-130907161
  hypo

SEQ ID NO: 409340 - DNA, 36 bp, Homo sapiens; identical to SEQ ID NO: 265584
  chr12:130907881-130907917
  hypo

SEQ ID NO: 409341 - DNA, 258 bp, Homo sapiens; identical to SEQ ID NO: 265587
  chr12:130915750-130916008
  hypo

SEQ ID NO: 409342 - DNA, 580 bp, Homo sapiens; identical to SEQ ID NO: 316714
  chr12:130921383-130921963
  hypo

SEQ ID NO: 409343 - DNA, 436 bp, Homo sapiens; identical to SEQ ID NO: 265593
  chr12:130926606-130927042
  hypo

SEQ ID NO: 409344 - DNA, 102 bp, Homo sapiens; identical to SEQ ID NO: 265594
  chr12:130929720-130929822
  hypo

SEQ ID NO: 409345 - DNA, 415 bp, Homo sapiens; identical to SEQ ID NO: 265598
  chr12:130939634-130940049
  hypo

SEQ ID NO: 409346 - DNA, 190 bp, Homo sapiens; identical to SEQ ID NO: 265600
  chr12:130954679-130954869
  hypo

SEQ ID NO: 409347 - DNA, 175 bp, Homo sapiens; identical to SEQ ID NO: 265601
  chr12:130958396-130958571
  hypo

SEQ ID NO: 409348 - DNA, 143 bp, Homo sapiens; identical to SEQ ID NO: 265602
  chr12:130963328-130963471
  hypo

SEQ ID NO: 409349 - DNA, 141 bp, Homo sapiens; identical to SEQ ID NO: 265611
  chr12:131111477-131111618
  hypo

SEQ ID NO: 409350 - DNA, 57 bp, Homo sapiens; identical to SEQ ID NO: 265616
  chr12:131157701-131157758
  hypo

SEQ ID NO: 409351 - DNA, 42 bp, Homo sapiens; identical to SEQ ID NO: 265624
  chr12:131186211-131186253
  hypo

SEQ ID NO: 409352 - DNA, 154 bp, Homo sapiens; identical to SEQ ID NO: 265627
  chr12:131249877-131250031
  hypo

SEQ ID NO: 409353 - DNA, 80 bp, Homo sapiens; identical to SEQ ID NO: 265628
  chr12:131264841-131264921
  hypo

SEQ ID NO: 409354 - DNA, 40 bp, Homo sapiens; identical to SEQ ID NO: 215294
  chr12:131294422-131294462
  hypo

SEQ ID NO: 409355 - DNA, 385 bp, Homo sapiens; identical to SEQ ID NO: 265638
  chr12:131443181-131443566
  hypo

SEQ ID NO: 409356 - DNA, 222 bp, Homo sapiens; identical to SEQ ID NO: 265639
  chr12:131478126-131478348
  hypo

SEQ ID NO: 409357 - DNA, 73 bp, Homo sapiens; identical to SEQ ID NO: 265644
  chr12:131513785-131513858
  hypo

SEQ ID NO: 409358 - DNA, 216 bp, Homo sapiens; identical to SEQ ID NO: 265645
  chr12:131515098-131515314
  hypo

SEQ ID NO: 409359 - DNA, 183 bp, Homo sapiens; identical to SEQ ID NO: 215296
  chr12:131573235-131573418
  hypo

SEQ ID NO: 409360 - DNA, 330 bp, Homo sapiens; identical to SEQ ID NO: 265650
  chr12:131581012-131581342
  hypo

SEQ ID NO: 409361 - DNA, 151 bp, Homo sapiens; identical to SEQ ID NO: 265659
  chr12:131872313-131872464
  hypo

SEQ ID NO: 409362 - DNA, 60 bp, Homo sapiens; identical to SEQ ID NO: 316794
  chr12:131978695-131978755
  hypo

SEQ ID NO: 409363 - DNA, 76 bp, Homo sapiens; identical to SEQ ID NO: 265670
  chr12:132158658-132158734
  hypo

SEQ ID NO: 409364 - DNA, 32 bp, Homo sapiens; identical to SEQ ID NO: 316806
  chr12:132197245-132197277
  hypo

SEQ ID NO: 409365 - DNA, 64 bp, Homo sapiens; identical to SEQ ID NO: 215302
  chr12:132205019-132205083
  hypo

SEQ ID NO: 409366 - DNA, 81 bp, Homo sapiens; identical to SEQ ID NO: 265681
  chr12:132242312-132242393
  hypo

SEQ ID NO: 409367 - DNA, 75 bp, Homo sapiens; identical to SEQ ID NO: 215307
  chr12:132243979-132244054
  hypo

SEQ ID NO: 409368 - DNA, 39 bp, Homo sapiens
  chr12:132249402-132249441
  hypo
gaatgagctctgctcttcactgagcctcaaatgcagtgc

SEQ ID NO: 409369 - DNA, 325 bp, Homo sapiens; identical to SEQ ID NO: 215308
  chr12:132259528-132259853
  hypo

SEQ ID NO: 409370 - DNA, 226 bp, Homo sapiens; identical to SEQ ID NO: 215309
  chr12:132259883-132260109
  hypo

SEQ ID NO: 409371 - DNA, 111 bp, Homo sapiens; identical to SEQ ID NO: 215310
  chr12:132263619-132263730
  hypo

SEQ ID NO: 409372 - DNA, 61 bp, Homo sapiens; identical to SEQ ID NO: 215312
  chr12:132284638-132284699
  hypo

SEQ ID NO: 409373 - DNA, 165 bp, Homo sapiens; identical to SEQ ID NO: 316827
  chr12:132324904-132325069
  hypo

SEQ ID NO: 409374 - DNA, 75 bp, Homo sapiens; identical to SEQ ID NO: 316828
  chr12:132325390-132325465
  hypo

SEQ ID NO: 409375 - DNA, 247 bp, Homo sapiens; identical to SEQ ID NO: 265694
  chr12:132328364-132328611
  hypo

SEQ ID NO: 409376 - DNA, 34 bp, Homo sapiens; identical to SEQ ID NO: 265701
  chr12:132397845-132397879
  hypo

SEQ ID NO: 409377 - DNA, 130 bp, Homo sapiens; identical to SEQ ID NO: 215316
  chr12:132400435-132400565
  hypo

SEQ ID NO: 409378 - DNA, 292 bp, Homo sapiens; identical to SEQ ID NO: 265703
  chr12:132406594-132406886
  hypo

SEQ ID NO: 409379 - DNA, 50 bp, Homo sapiens; identical to SEQ ID NO: 224491
  chr12:132480346-132480396
  hypo

SEQ ID NO: 409380 - DNA, 271 bp, Homo sapiens; identical to SEQ ID NO: 215320
  chr12:132514252-132514523
  hypo

SEQ ID NO: 409381 - DNA, 73 bp, Homo sapiens; identical to SEQ ID NO: 215321
  chr12:132529444-132529517
  hypo

SEQ ID NO: 409382 - DNA, 175 bp, Homo sapiens; identical to SEQ ID NO: 215324
  chr12:132541957-132542132
  hypo

SEQ ID NO: 409383 - DNA, 206 bp, Homo sapiens; identical to SEQ ID NO: 215325
  chr12:132546645-132546851
  hypo

SEQ ID NO: 409384 - DNA, 371 bp, Homo sapiens; identical to SEQ ID NO: 215328
  chr12:132556450-132556821
  hypo

SEQ ID NO: 409385 - DNA, 225 bp, Homo sapiens; identical to SEQ ID NO: 265719
  chr12:132561923-132562148
  hypo

SEQ ID NO: 409386 - DNA, 38 bp, Homo sapiens; identical to SEQ ID NO: 265721
  chr12:132567750-132567788
  hypo

SEQ ID NO: 409387 - DNA, 38 bp, Homo sapiens; identical to SEQ ID NO: 215329
  chr12:132581294-132581332
  hypo

SEQ ID NO: 409388 - DNA, 100 bp, Homo sapiens; identical to SEQ ID NO: 215332
  chr12:132630793-132630893
  hypo

SEQ ID NO: 409389 - DNA, 252 bp, Homo sapiens; identical to SEQ ID NO: 265733
  chr12:132665276-132665528
  hypo

SEQ ID NO: 409390 - DNA, 193 bp, Homo sapiens; identical to SEQ ID NO: 215341
  chr12:133009778-133009971
  hypo

SEQ ID NO: 409391 - DNA, 398 bp, Homo sapiens; identical to SEQ ID NO: 265747
  chr12:133018848-133019246
  hypo

SEQ ID NO: 409392 - DNA, 41 bp, Homo sapiens; identical to SEQ ID NO: 215342
  chr12:133019660-133019701
  hypo

SEQ ID NO: 409393 - DNA, 504 bp, Homo sapiens; identical to SEQ ID NO: 265749
  chr12:133088531-133089035
  hypo

SEQ ID NO: 409394 - DNA, 221 bp, Homo sapiens; identical to SEQ ID NO: 265751
  chr12:133099878-133100099
  hypo

SEQ ID NO: 409395 - DNA, 608 bp, Homo sapiens; identical to SEQ ID NO: 265756
  chr12:133123360-133123968
  hypo

SEQ ID NO: 409396 - DNA, 147 bp, Homo sapiens; identical to SEQ ID NO: 265757
  chr12:133129458-133129605
  hypo

SEQ ID NO: 409397 - DNA, 214 bp, Homo sapiens; identical to SEQ ID NO: 215351
  chr12:133131957-133132171
  hypo

SEQ ID NO: 409398 - DNA, 94 bp, Homo sapiens; identical to SEQ ID NO: 265762
  chr12:133148941-133149035
  hypo

SEQ ID NO: 409399 - DNA, 60 bp, Homo sapiens; identical to SEQ ID NO: 265763
  chr12:133149549-133149609
  hypo

SEQ ID NO: 409400 - DNA, 148 bp, Homo sapiens; identical to SEQ ID NO: 215354
  chr12:133156531-133156679
  hypo

SEQ ID NO: 409401 - DNA, 150 bp, Homo sapiens; identical to SEQ ID NO: 316906
  chr12:133168795-133168945
  hypo

SEQ ID NO: 409402 - DNA, 59 bp, Homo sapiens; identical to SEQ ID NO: 215361
  chr12:133220203-133220262
  hypo

SEQ ID NO: 409403 - DNA, 44 bp, Homo sapiens; identical to SEQ ID NO: 215363
  chr12:133225533-133225577
  hypo

SEQ ID NO: 409404 - DNA, 64 bp, Homo sapiens; identical to SEQ ID NO: 316918
  chr12:133262782-133262846
  hypo

SEQ ID NO: 409405 - DNA, 61 bp, Homo sapiens; identical to SEQ ID NO: 215365
  chr12:133277669-133277730
  hypo

SEQ ID NO: 409406 - DNA, 86 bp, Homo sapiens; identical to SEQ ID NO: 215367
  chr12:133308293-133308379
  hypo

SEQ ID NO: 409407 - DNA, 305 bp, Homo sapiens; identical to SEQ ID NO: 215368
  chr12:133312071-133312376
  hypo

SEQ ID NO: 409408 - DNA, 392 bp, Homo sapiens; identical to SEQ ID NO: 215370
  chr12:133351310-133351702
  hypo

SEQ ID NO: 409409 - DNA, 513 bp, Homo sapiens; identical to SEQ ID NO: 215372
  chr12:133356750-133357263
  hypo

SEQ ID NO: 409410 - DNA, 127 bp, Homo sapiens; identical to SEQ ID NO: 265788
  chr12:133381358-133381485
  hypo

SEQ ID NO: 409411 - DNA, 179 bp, Homo sapiens; identical to SEQ ID NO: 265789
  chr12:133383641-133383820
  hypo

SEQ ID NO: 409412 - DNA, 200 bp, Homo sapiens; identical to SEQ ID NO: 215374
  chr12:133384551-133384751
  hypo

SEQ ID NO: 409413 - DNA, 581 bp, Homo sapiens; identical to SEQ ID NO: 265792
  chr12:133403534-133404115
  hypo

SEQ ID NO: 409414 - DNA, 69 bp, Homo sapiens; identical to SEQ ID NO: 215376
  chr12:133414280-133414349
  hypo

SEQ ID NO: 409415 - DNA, 108 bp, Homo sapiens; identical to SEQ ID NO: 265795
  chr12:133417245-133417353
  hypo

SEQ ID NO: 409416 - DNA, 41 bp, Homo sapiens; identical to SEQ ID NO: 265796
  chr12:133421487-133421528
  hypo

SEQ ID NO: 409417 - DNA, 98 bp, Homo sapiens; identical to SEQ ID NO: 265800
  chr12:133441852-133441950
  hypo

SEQ ID NO: 409418 - DNA, 442 bp, Homo sapiens; identical to SEQ ID NO: 226553
  chr12:133443618-133444060
  hypo

SEQ ID NO: 409419 - DNA, 74 bp, Homo sapiens; identical to SEQ ID NO: 215380
  chr12:133448788-133448862
  hypo

SEQ ID NO: 409420 - DNA, 125 bp, Homo sapiens; identical to SEQ ID NO: 215381
  chr12:133449100-133449225
  hypo

SEQ ID NO: 409421 - DNA, 172 bp, Homo sapiens; identical to SEQ ID NO: 265804
  chr12:133450372-133450544
  hypo

SEQ ID NO: 409422 - DNA, 136 bp, Homo sapiens; identical to SEQ ID NO: 265805
  chr12:133716926-133717062
  hypo

SEQ ID NO: 409423 - DNA, 102 bp, Homo sapiens; identical to SEQ ID NO: 265807
  chr13:19239973-19240075
  hypo

SEQ ID NO: 409424 - DNA, 179 bp, Homo sapiens; identical to SEQ ID NO: 265808
  chr13:19664765-19664944
  hypo

SEQ ID NO: 409425 - DNA, 38 bp, Homo sapiens; identical to SEQ ID NO: 265813
  chr13:20496685-20496723
  hypo

SEQ ID NO: 409426 - DNA, 85 bp, Homo sapiens; identical to SEQ ID NO: 215387
  chr13:20521929-20522014
  hypo

SEQ ID NO: 409427 - DNA, 104 bp, Homo sapiens; identical to SEQ ID NO: 265816
  chr13:20969540-20969644
  hypo

SEQ ID NO: 409428 - DNA, 321 bp, Homo sapiens; identical to SEQ ID NO: 265817
  chr13:20975930-20976251
  hypo

SEQ ID NO: 409429 - DNA, 313 bp, Homo sapiens; identical to SEQ ID NO: 265820
  chr13:21047373-21047686
  hypo

SEQ ID NO: 409430 - DNA, 420 bp, Homo sapiens; identical to SEQ ID NO: 224500
  chr13:21099646-21100066
  hypo

SEQ ID NO: 409431 - DNA, 105 bp, Homo sapiens; identical to SEQ ID NO: 224501
  chr13:21141668-21141773
  hypo

SEQ ID NO: 409432 - DNA, 318 bp, Homo sapiens; identical to SEQ ID NO: 215393
  chr13:21572946-21573264
  hypo

SEQ ID NO: 409433 - DNA, 120 bp, Homo sapiens; identical to SEQ ID NO: 265828
  chr13:21633733-21633853
  hypo

SEQ ID NO: 409434 - DNA, 113 bp, Homo sapiens; identical to SEQ ID NO: 399220
  chr13:21635643-21635756
  hypo

SEQ ID NO: 409435 - DNA, 228 bp, Homo sapiens; identical to SEQ ID NO: 9203
  chr13:21635777-21636005
  hypo

SEQ ID NO: 409436 - DNA, 46 bp, Homo sapiens; identical to SEQ ID NO: 215397
  chr13:21809435-21809481
  hypo

SEQ ID NO: 409437 - DNA, 147 bp, Homo sapiens; identical to SEQ ID NO: 265835
  chr13:22021309-22021456
  hypo

SEQ ID NO: 409438 - DNA, 135 bp, Homo sapiens; identical to SEQ ID NO: 265838
  chr13:22058108-22058243
  hypo

SEQ ID NO: 409439 - DNA, 400 bp, Homo sapiens; identical to SEQ ID NO: 289563
  chr13:22244999-22245399
  hypo

SEQ ID NO: 409440 - DNA, 31 bp, Homo sapiens; identical to SEQ ID NO: 215405
  chr13:22392838-22392869
  hypo

SEQ ID NO: 409441 - DNA, 187 bp, Homo sapiens; identical to SEQ ID NO: 265846
  chr13:22417569-22417756
  hypo

SEQ ID NO: 409442 - DNA, 157 bp, Homo sapiens; identical to SEQ ID NO: 265849
  chr13:22511719-22511876
  hypo

SEQ ID NO: 409443 - DNA, 199 bp, Homo sapiens; identical to SEQ ID NO: 265851
  chr13:22785989-22786188
  hypo

SEQ ID NO: 409444 - DNA, 91 bp, Homo sapiens; identical to SEQ ID NO: 265852
  chr13:22786757-22786848
  hypo

SEQ ID NO: 409445 - DNA, 369 bp, Homo sapiens; identical to SEQ ID NO: 265853
  chr13:23508831-23509200
  hypo

SEQ ID NO: 409446 - DNA, 140 bp, Homo sapiens; identical to SEQ ID NO: 265854
  chr13:23629553-23629693
  hypo

SEQ ID NO: 409447 - DNA, 32 bp, Homo sapiens; identical to SEQ ID NO: 265855
  chr13:23654298-23654330
  hypo

SEQ ID NO: 409448 - DNA, 201 bp, Homo sapiens; identical to SEQ ID NO: 215409
  chr13:23897356-23897557
  hypo

SEQ ID NO: 409449 - DNA, 252 bp, Homo sapiens; identical to SEQ ID NO: 265860
  chr13:24408049-24408301
  hypo

SEQ ID NO: 409450 - DNA, 35 bp, Homo sapiens; identical to SEQ ID NO: 265861
  chr13:24527676-24527711
  hypo

SEQ ID NO: 409451 - DNA, 358 bp, Homo sapiens; identical to SEQ ID NO: 215411
  chr13:24718516-24718874
  hypo

SEQ ID NO: 409452 - DNA, 38 bp, Homo sapiens; identical to SEQ ID NO: 265864
  chr13:24720491-24720529
  hypo

SEQ ID NO: 409453 - DNA, 45 bp, Homo sapiens; identical to SEQ ID NO: 265865
  chr13:24720559-24720604
  hypo

SEQ ID NO: 409454 - DNA, 43 bp, Homo sapiens; identical to SEQ ID NO: 265866
  chr13:24781502-24781545
  hypo

SEQ ID NO: 409455 - DNA, 89 bp, Homo sapiens; identical to SEQ ID NO: 215413
  chr13:24797623-24797712
  hypo

SEQ ID NO: 409456 - DNA, 51 bp, Homo sapiens; identical to SEQ ID NO: 265869
  chr13:24819243-24819294
  hypo

SEQ ID NO: 409457 - DNA, 70 bp, Homo sapiens; identical to SEQ ID NO: 215414
  chr13:25026104-25026174
  hypo

SEQ ID NO: 409458 - DNA, 33 bp, Homo sapiens; identical to SEQ ID NO: 265874
  chr13:25463715-25463748
  hypo

SEQ ID NO: 409459 - DNA, 164 bp, Homo sapiens; identical to SEQ ID NO: 215418
  chr13:25932257-25932421
  hypo

SEQ ID NO: 409460 - DNA, 292 bp, Homo sapiens; identical to SEQ ID NO: 265880
  chr13:25939930-25940222
  hypo

SEQ ID NO: 409461 - DNA, 93 bp, Homo sapiens; identical to SEQ ID NO: 203290
  chr13:25946858-25946951
  hypo

SEQ ID NO: 409462 - DNA, 59 bp, Homo sapiens; identical to SEQ ID NO: 317034
  chr13:26354975-26355034
  hypo

SEQ ID NO: 409463 - DNA, 37 bp, Homo sapiens; identical to SEQ ID NO: 215421
  chr13:27556411-27556448
  hypo

SEQ ID NO: 409464 - DNA, 178 bp, Homo sapiens; identical to SEQ ID NO: 317038
  chr13:27610258-27610436
  hypo

SEQ ID NO: 409465 - DNA, 399 bp, Homo sapiens; identical to SEQ ID NO: 215423
  chr13:27690601-27691000
  hypo

SEQ ID NO: 409466 - DNA, 275 bp, Homo sapiens; identical to SEQ ID NO: 203294
  chr13:27744759-27745034
  hypo

SEQ ID NO: 409467 - DNA, 111 bp, Homo sapiens; identical to SEQ ID NO: 265888
  chr13:27786256-27786367
  hypo

SEQ ID NO: 409468 - DNA, 31 bp, Homo sapiens; identical to SEQ ID NO: 215426
  chr13:27914840-27914871
  hypo

SEQ ID NO: 409469 - DNA, 210 bp, Homo sapiens; identical to SEQ ID NO: 203312
  chr13:28608023-28608233
  hypo

SEQ ID NO: 409470 - DNA, 167 bp, Homo sapiens; identical to SEQ ID NO: 203313
  chr13:28608355-28608522
  hypo

SEQ ID NO: 409471 - DNA, 106 bp, Homo sapiens; identical to SEQ ID NO: 203314
  chr13:28636040-28636146
  hypo

SEQ ID NO: 409472 - DNA, 38 bp, Homo sapiens; identical to SEQ ID NO: 265897
  chr13:28662983-28663021
  hypo

SEQ ID NO: 409473 - DNA, 120 bp, Homo sapiens
  chr13:28745728-28745848
  hypo
ttgcttgactggtttattacaaaggatacagatgaacagtcagatgaaaaggtagaacaaggatcttttttctctgtggagttggggtgtgccaccctcctggctcataaatgtgttcac

SEQ ID NO: 409474 - DNA, 56 bp, Homo sapiens; identical to SEQ ID NO: 265900
  chr13:28838072-28838128
  hypo

SEQ ID NO: 409475 - DNA, 204 bp, Homo sapiens; identical to SEQ ID NO: 215440
  chr13:29920653-29920857
  hypo

SEQ ID NO: 409476 - DNA, 242 bp, Homo sapiens; identical to SEQ ID NO: 265907
  chr13:30082638-30082880
  hypo

SEQ ID NO: 409477 - DNA, 149 bp, Homo sapiens; identical to SEQ ID NO: 215442
  chr13:30087251-30087400
  hypo

SEQ ID NO: 409478 - DNA, 54 bp, Homo sapiens; identical to SEQ ID NO: 265909
  chr13:30088601-30088655
  hypo

SEQ ID NO: 409479 - DNA, 118 bp, Homo sapiens; identical to SEQ ID NO: 317075
  chr13:30141718-30141836
  hypo

SEQ ID NO: 409480 - DNA, 200 bp, Homo sapiens; identical to SEQ ID NO: 265917
  chr13:30163603-30163803
  hypo

SEQ ID NO: 409481 - DNA, 43 bp, Homo sapiens; identical to SEQ ID NO: 215450
  chr13:31185329-31185372
  hypo

SEQ ID NO: 409482 - DNA, 206 bp, Homo sapiens; identical to SEQ ID NO: 215451
  chr13:31208407-31208613
  hypo

SEQ ID NO: 409483 - DNA, 35 bp, Homo sapiens; identical to SEQ ID NO: 265929
  chr13:31259579-31259614
  hypo

SEQ ID NO: 409484 - DNA, 52 bp, Homo sapiens; identical to SEQ ID NO: 265930
  chr13:31259644-31259696
  hypo

SEQ ID NO: 409485 - DNA, 274 bp, Homo sapiens; identical to SEQ ID NO: 224533
  chr13:32889530-32889804
  hypo

SEQ ID NO: 409486 - DNA, 115 bp, Homo sapiens; identical to SEQ ID NO: 224538
  chr13:32900635-32900750
  hypo

SEQ ID NO: 409487 - DNA, 146 bp, Homo sapiens; identical to SEQ ID NO: 224540
  chr13:32905055-32905201
  hypo

SEQ ID NO: 409488 - DNA, 1116 bp, Homo sapiens; identical to SEQ ID NO: 224541
  chr13:32906408-32907524
  hypo

SEQ ID NO: 409489 - DNA, 96 bp, Homo sapiens; identical to SEQ ID NO: 224543
  chr13:32918694-32918790
  hypo

SEQ ID NO: 409490 - DNA, 70 bp, Homo sapiens; identical to SEQ ID NO: 224544
  chr13:32920963-32921033
  hypo

SEQ ID NO: 409491 - DNA, 182 bp, Homo sapiens; identical to SEQ ID NO: 224546
  chr13:32930564-32930746
  hypo

SEQ ID NO: 409492 - DNA, 188 bp, Homo sapiens; identical to SEQ ID NO: 224547
  chr13:32931878-32932066
  hypo

SEQ ID NO: 409493 - DNA, 171 bp, Homo sapiens; identical to SEQ ID NO: 224548
  chr13:32936659-32936830
  hypo

SEQ ID NO: 409494 - DNA, 355 bp, Homo sapiens; identical to SEQ ID NO: 224549
  chr13:32937315-32937670
  hypo

SEQ ID NO: 409495 - DNA, 199 bp, Homo sapiens; identical to SEQ ID NO: 224553
  chr13:32953453-32953652
  hypo

SEQ ID NO: 409496 - DNA, 396 bp, Homo sapiens; identical to SEQ ID NO: 224554
  chr13:32953886-32954282
  hypo

SEQ ID NO: 409497 - DNA, 515 bp, Homo sapiens; identical to SEQ ID NO: 224558
  chr13:32973294-32973809
  hypo

SEQ ID NO: 409498 - DNA, 122 bp, Homo sapiens; identical to SEQ ID NO: 265939
  chr13:33266483-33266605
  hypo

SEQ ID NO: 409499 - DNA, 56 bp, Homo sapiens; identical to SEQ ID NO: 265940
  chr13:33510409-33510465
  hypo

SEQ ID NO: 409500 - DNA, 52 bp, Homo sapiens; identical to SEQ ID NO: 265942
  chr13:33687132-33687184
  hypo

SEQ ID NO: 409501 - DNA, 77 bp, Homo sapiens; identical to SEQ ID NO: 265945
  chr13:36789490-36789567
  hypo

SEQ ID NO: 409502 - DNA, 171 bp, Homo sapiens; identical to SEQ ID NO: 317135
  chr13:36909035-36909206
  hypo

SEQ ID NO: 409503 - DNA, 162 bp, Homo sapiens; identical to SEQ ID NO: 265947
  chr13:37453825-37453987
  hypo

SEQ ID NO: 409504 - DNA, 60 bp, Homo sapiens; identical to SEQ ID NO: 265950
  chr13:37838971-37839031
  hypo

SEQ ID NO: 409505 - DNA, 77 bp, Homo sapiens; identical to SEQ ID NO: 265951
  chr13:39358216-39358293
  hypo

SEQ ID NO: 409506 - DNA, 224 bp, Homo sapiens; identical to SEQ ID NO: 265953
  chr13:40762416-40762640
  hypo

SEQ ID NO: 409507 - DNA, 85 bp, Homo sapiens; identical to SEQ ID NO: 265954
  chr13:41450220-41450305
  hypo

SEQ ID NO: 409508 - DNA, 146 bp, Homo sapiens; identical to SEQ ID NO: 265957
  chr13:41567499-41567645
  hypo

SEQ ID NO: 409509 - DNA, 271 bp, Homo sapiens; identical to SEQ ID NO: 224568
  chr13:41767821-41768092
  hypo

SEQ ID NO: 409510 - DNA, 162 bp, Homo sapiens; identical to SEQ ID NO: 224571
  chr13:42615145-42615307
  hypo

SEQ ID NO: 409511 - DNA, 180 bp, Homo sapiens; identical to SEQ ID NO: 224572
  chr13:42615560-42615740
  hypo

SEQ ID NO: 409512 - DNA, 42 bp, Homo sapiens; identical to SEQ ID NO: 215467
  chr13:43217491-43217533
  hypo

SEQ ID NO: 409513 - DNA, 41 bp, Homo sapiens; identical to SEQ ID NO: 265965
  chr13:43598748-43598789
  hypo

SEQ ID NO: 409514 - DNA, 79 bp, Homo sapiens; identical to SEQ ID NO: 317166
  chr13:43728071-43728150
  hypo

SEQ ID NO: 409515 - DNA, 177 bp, Homo sapiens; identical to SEQ ID NO: 265968
  chr13:44543798-44543975
  hypo

SEQ ID NO: 409516 - DNA, 103 bp, Homo sapiens; identical to SEQ ID NO: 265970
  chr13:44947061-44947164
  hypo

SEQ ID NO: 409517 - DNA, 205 bp, Homo sapiens; identical to SEQ ID NO: 224576
  chr13:44991619-44991824
  hypo

SEQ ID NO: 409518 - DNA, 252 bp, Homo sapiens; identical to SEQ ID NO: 265972
  chr13:45003134-45003386
  hypo

SEQ ID NO: 409519 - DNA, 319 bp, Homo sapiens; identical to SEQ ID NO: 265974
  chr13:45383495-45383814
  hypo

SEQ ID NO: 409520 - DNA, 101 bp, Homo sapiens; identical to SEQ ID NO: 265976
  chr13:45493229-45493330
  hypo

SEQ ID NO: 409521 - DNA, 192 bp, Homo sapiens; identical to SEQ ID NO: 265977
  chr13:45500374-45500566
  hypo

SEQ ID NO: 409522 - DNA, 78 bp, Homo sapiens; identical to SEQ ID NO: 317179
  chr13:45564803-45564881
  hypo

SEQ ID NO: 409523 - DNA, 137 bp, Homo sapiens; identical to SEQ ID NO: 265979
  chr13:45741238-45741375
  hypo

SEQ ID NO: 409524 - DNA, 129 bp, Homo sapiens; identical to SEQ ID NO: 393185
  chr13:45926492-45926621
  hypo

SEQ ID NO: 409525 - DNA, 64 bp, Homo sapiens; identical to SEQ ID NO: 265984
  chr13:45939385-45939449
  hypo

SEQ ID NO: 409526 - DNA, 136 bp, Homo sapiens; identical to SEQ ID NO: 215477
  chr13:46037882-46038018
  hypo

SEQ ID NO: 409527 - DNA, 87 bp, Homo sapiens; identical to SEQ ID NO: 215478
  chr13:46287705-46287792
  hypo

SEQ ID NO: 409528 - DNA, 77 bp, Homo sapiens; identical to SEQ ID NO: 215479
  chr13:46288451-46288528
  hypo

SEQ ID NO: 409529 - DNA, 87 bp, Homo sapiens; identical to SEQ ID NO: 265991
  chr13:46318163-46318250
  hypo

SEQ ID NO: 409530 - DNA, 44 bp, Homo sapiens; identical to SEQ ID NO: 386495
  chr13:46948591-46948635
  hypo

SEQ ID NO: 409531 - DNA, 36 bp, Homo sapiens; identical to SEQ ID NO: 265997
  chr13:47349768-47349804
  hypo

SEQ ID NO: 409532 - DNA, 76 bp, Homo sapiens; identical to SEQ ID NO: 265998
  chr13:48318851-48318927
  hypo

SEQ ID NO: 409533 - DNA, 159 bp, Homo sapiens; identical to SEQ ID NO: 266000
  chr13:49076869-49077028
  hypo

SEQ ID NO: 409534 - DNA, 36 bp, Homo sapiens; identical to SEQ ID NO: 215484
  chr13:49848524-49848560
  hypo

SEQ ID NO: 409535 - DNA, 67 bp, Homo sapiens; identical to SEQ ID NO: 266004
  chr13:49883683-49883750
  hypo

SEQ ID NO: 409536 - DNA, 278 bp, Homo sapiens; identical to SEQ ID NO: 266005
  chr13:49884960-49885238
  hypo

SEQ ID NO: 409537 - DNA, 32 bp, Homo sapiens; identical to SEQ ID NO: 266011
  chr13:51568863-51568895
  hypo

SEQ ID NO: 409538 - DNA, 291 bp, Homo sapiens; identical to SEQ ID NO: 224578
  chr13:52585269-52585560
  hypo

SEQ ID NO: 409539 - DNA, 545 bp, Homo sapiens; identical to SEQ ID NO: 289760
  chr13:52702767-52703312
  hypo

SEQ ID NO: 409540 - DNA, 32 bp, Homo sapiens; identical to SEQ ID NO: 215492
  chr13:52770512-52770544
  hypo

SEQ ID NO: 409541 - DNA, 124 bp, Homo sapiens; identical to SEQ ID NO: 266023
  chr13:60232278-60232402
  hypo

SEQ ID NO: 409542 - DNA, 243 bp, Homo sapiens; identical to SEQ ID NO: 224584
  chr13:67799457-67799700
  hypo

SEQ ID NO: 409543 - DNA, 32 bp, Homo sapiens; identical to SEQ ID NO: 224585
  chr13:67801107-67801139
  hypo

SEQ ID NO: 409544 - DNA, 74 bp, Homo sapiens; identical to SEQ ID NO: 317238
  chr13:73619519-73619593
  hypo

SEQ ID NO: 409545 - DNA, 37 bp, Homo sapiens; identical to SEQ ID NO: 317239
  chr13:73619623-73619660
  hypo

SEQ ID NO: 409546 - DNA, 34 bp, Homo sapiens; identical to SEQ ID NO: 215495
  chr13:73619752-73619786
  hypo

SEQ ID NO: 409547 - DNA, 157 bp, Homo sapiens; identical to SEQ ID NO: 266030
  chr13:73636133-73636290
  hypo

SEQ ID NO: 409548 - DNA, 51 bp, Homo sapiens; identical to SEQ ID NO: 215496
  chr13:73636846-73636897
  hypo

SEQ ID NO: 409549 - DNA, 50 bp, Homo sapiens; identical to SEQ ID NO: 266032
  chr13:73640031-73640081
  hypo

SEQ ID NO: 409550 - DNA, 38 bp, Homo sapiens; identical to SEQ ID NO: 266033
  chr13:73642917-73642955
  hypo

SEQ ID NO: 409551 - DNA, 203 bp, Homo sapiens; identical to SEQ ID NO: 266035
  chr13:73824308-73824511
  hypo

SEQ ID NO: 409552 - DNA, 101 bp, Homo sapiens; identical to SEQ ID NO: 266036
  chr13:73972455-73972556
  hypo

SEQ ID NO: 409553 - DNA, 143 bp, Homo sapiens; identical to SEQ ID NO: 266037
  chr13:74248145-74248288
  hypo

SEQ ID NO: 409554 - DNA, 35 bp, Homo sapiens; identical to SEQ ID NO: 215505
  chr13:79993208-79993243
  hypo

SEQ ID NO: 409555 - DNA, 499 bp, Homo sapiens; identical to SEQ ID NO: 203402
  chr13:80916947-80917446
  hypo

SEQ ID NO: 409556 - DNA, 40 bp, Homo sapiens; identical to SEQ ID NO: 266049
  chr13:83206248-83206288
  hypo

SEQ ID NO: 409557 - DNA, 40 bp, Homo sapiens; identical to SEQ ID NO: 266050
  chr13:83206528-83206568
  hypo

SEQ ID NO: 409558 - DNA, 108 bp, Homo sapiens; identical to SEQ ID NO: 266051
  chr13:84107123-84107231
  hypo

SEQ ID NO: 409559 - DNA, 201 bp, Homo sapiens; identical to SEQ ID NO: 266055
  chr13:86086568-86086769
  hypo

SEQ ID NO: 409560 - DNA, 51 bp, Homo sapiens; identical to SEQ ID NO: 266056
  chr13:87732415-87732466
  hypo

SEQ ID NO: 409561 - DNA, 150 bp, Homo sapiens; identical to SEQ ID NO: 266060
  chr13:95061643-95061793
  hypo

SEQ ID NO: 409562 - DNA, 149 bp, Homo sapiens; identical to SEQ ID NO: 215509
  chr13:95238872-95239021
  hypo

SEQ ID NO: 409563 - DNA, 114 bp, Homo sapiens; identical to SEQ ID NO: 399331
  chr13:95354726-95354840
  hypo

SEQ ID NO: 409564 - DNA, 166 bp, Homo sapiens; identical to SEQ ID NO: 399332
  chr13:95355116-95355282
  hypo

SEQ ID NO: 409565 - DNA, 159 bp, Homo sapiens; identical to SEQ ID NO: 266063
  chr13:95683564-95683723
  hypo

SEQ ID NO: 409566 - DNA, 108 bp, Homo sapiens; identical to SEQ ID NO: 215510
  chr13:95751946-95752054
  hypo

SEQ ID NO: 409567 - DNA, 137 bp, Homo sapiens; identical to SEQ ID NO: 215511
  chr13:95852551-95852688
  hypo

SEQ ID NO: 409568 - DNA, 46 bp, Homo sapiens; identical to SEQ ID NO: 266071
  chr13:95869960-95870006
  hypo

SEQ ID NO: 409569 - DNA, 209 bp, Homo sapiens; identical to SEQ ID NO: 215512
  chr13:96061946-96062155
  hypo

SEQ ID NO: 409570 - DNA, 292 bp, Homo sapiens; identical to SEQ ID NO: 266080
  chr13:97980686-97980978
  hypo

SEQ ID NO: 409571 - DNA, 111 bp, Homo sapiens; identical to SEQ ID NO: 266083
  chr13:98528398-98528509
  hypo

SEQ ID NO: 409572 - DNA, 39 bp, Homo sapiens; identical to SEQ ID NO: 266086
  chr13:98695035-98695074
  hypo

SEQ ID NO: 409573 - DNA, 92 bp, Homo sapiens; identical to SEQ ID NO: 266087
  chr13:98761016-98761108
  hypo

SEQ ID NO: 409574 - DNA, 44 bp, Homo sapiens; identical to SEQ ID NO: 266090
  chr13:98851326-98851370
  hypo

SEQ ID NO: 409575 - DNA, 43 bp, Homo sapiens; identical to SEQ ID NO: 215523
  chr13:98917861-98917904
  hypo

SEQ ID NO: 409576 - DNA, 187 bp, Homo sapiens; identical to SEQ ID NO: 266095
  chr13:98981025-98981212
  hypo

SEQ ID NO: 409577 - DNA, 376 bp, Homo sapiens; identical to SEQ ID NO: 266099
  chr13:99068034-99068410
  hypo

SEQ ID NO: 409578 - DNA, 108 bp, Homo sapiens; identical to SEQ ID NO: 266101
  chr13:99095616-99095724
  hypo

SEQ ID NO: 409579 - DNA, 444 bp, Homo sapiens; identical to SEQ ID NO: 266102
  chr13:99101263-99101707
  hypo

SEQ ID NO: 409580 - DNA, 194 bp, Homo sapiens; identical to SEQ ID NO: 289858
  chr13:99128923-99129117
  hypo

SEQ ID NO: 409581 - DNA, 95 bp, Homo sapiens; identical to SEQ ID NO: 266105
  chr13:99141397-99141492
  hypo

SEQ ID NO: 409582 - DNA, 113 bp, Homo sapiens; identical to SEQ ID NO: 266106
  chr13:99157093-99157206
  hypo

SEQ ID NO: 409583 - DNA, 33 bp, Homo sapiens; identical to SEQ ID NO: 266111
  chr13:99235379-99235412
  hypo

SEQ ID NO: 409584 - DNA, 70 bp, Homo sapiens; identical to SEQ ID NO: 266115
  chr13:99376081-99376151
  hypo

SEQ ID NO: 409585 - DNA, 42 bp, Homo sapiens; identical to SEQ ID NO: 266117
  chr13:99427801-99427843
  hypo

SEQ ID NO: 409586 - DNA, 101 bp, Homo sapiens; identical to SEQ ID NO: 215531
  chr13:99851316-99851417
  hypo

SEQ ID NO: 409587 - DNA, 124 bp, Homo sapiens; identical to SEQ ID NO: 266123
  chr13:100005097-100005221
  hypo

SEQ ID NO: 409588 - DNA, 99 bp, Homo sapiens; identical to SEQ ID NO: 266124
  chr13:100020047-100020146
  hypo

SEQ ID NO: 409589 - DNA, 108 bp, Homo sapiens; identical to SEQ ID NO: 266126
  chr13:100033196-100033304
  hypo

SEQ ID NO: 409590 - DNA, 160 bp, Homo sapiens; identical to SEQ ID NO: 215534
  chr13:100035864-100036024
  hypo

SEQ ID NO: 409591 - DNA, 129 bp, Homo sapiens; identical to SEQ ID NO: 266128
  chr13:100036956-100037085
  hypo

SEQ ID NO: 409592 - DNA, 319 bp, Homo sapiens; identical to SEQ ID NO: 266129
  chr13:100067888-100068207
  hypo

SEQ ID NO: 409593 - DNA, 192 bp, Homo sapiens; identical to SEQ ID NO: 215536
  chr13:100068977-100069169
  hypo

SEQ ID NO: 409594 - DNA, 185 bp, Homo sapiens; identical to SEQ ID NO: 266133
  chr13:100482066-100482251
  hypo

SEQ ID NO: 409595 - DNA, 45 bp, Homo sapiens; identical to SEQ ID NO: 399339
  chr13:100622177-100622222
  hypo

SEQ ID NO: 409596 - DNA, 91 bp, Homo sapiens; identical to SEQ ID NO: 266137
  chr13:101091896-101091987
  hypo

SEQ ID NO: 409597 - DNA, 112 bp, Homo sapiens; identical to SEQ ID NO: 215544
  chr13:101184480-101184592
  hypo

SEQ ID NO: 409598 - DNA, 167 bp, Homo sapiens; identical to SEQ ID NO: 215545
  chr13:101297851-101298018
  hypo

SEQ ID NO: 409599 - DNA, 58 bp, Homo sapiens; identical to SEQ ID NO: 27185
  chr13:101302821-101302879
  hypo

SEQ ID NO: 409600 - DNA, 32 bp, Homo sapiens; identical to SEQ ID NO: 215549
  chr13:103262164-103262196
  hypo

SEQ ID NO: 409601 - DNA, 38 bp, Homo sapiens; identical to SEQ ID NO: 266147
  chr13:103456537-103456575
  hypo

SEQ ID NO: 409602 - DNA, 44 bp, Homo sapiens; identical to SEQ ID NO: 215552
  chr13:103568843-103568887
  hypo

SEQ ID NO: 409603 - DNA, 38 bp, Homo sapiens; identical to SEQ ID NO: 317384
  chr13:103569193-103569231
  hypo

SEQ ID NO: 409604 - DNA, 33 bp, Homo sapiens; identical to SEQ ID NO: 266153
  chr13:106718244-106718277
  hypo

SEQ ID NO: 409605 - DNA, 168 bp, Homo sapiens; identical to SEQ ID NO: 266155
  chr13:106788564-106788732
  hypo

SEQ ID NO: 409606 - DNA, 268 bp, Homo sapiens; identical to SEQ ID NO: 266157
  chr13:107078199-107078467
  hypo

SEQ ID NO: 409607 - DNA, 42 bp, Homo sapiens; identical to SEQ ID NO: 266159
  chr13:107128750-107128792
  hypo

SEQ ID NO: 409608 - DNA, 40 bp, Homo sapiens; identical to SEQ ID NO: 266162
  chr13:108816275-108816315
  hypo

SEQ ID NO: 409609 - DNA, 267 bp, Homo sapiens; identical to SEQ ID NO: 399347
  chr13:110438956-110439223
  hypo

SEQ ID NO: 409610 - DNA, 221 bp, Homo sapiens; identical to SEQ ID NO: 266177
  chr13:110831442-110831663
  hypo

SEQ ID NO: 409611 - DNA, 42 bp, Homo sapiens; identical to SEQ ID NO: 266181
  chr13:111087191-111087233
  hypo

SEQ ID NO: 409612 - DNA, 589 bp, Homo sapiens; identical to SEQ ID NO: 266184
  chr13:111127026-111127615
  hypo

SEQ ID NO: 409613 - DNA, 170 bp, Homo sapiens; identical to SEQ ID NO: 215570
  chr13:111135308-111135478
  hypo

SEQ ID NO: 409614 - DNA, 195 bp, Homo sapiens; identical to SEQ ID NO: 266187
  chr13:111145418-111145613
  hypo

SEQ ID NO: 409615 - DNA, 481 bp, Homo sapiens; identical to SEQ ID NO: 399351
  chr13:111213552-111214033
  hypo

SEQ ID NO: 409616 - DNA, 130 bp, Homo sapiens; identical to SEQ ID NO: 317429
  chr13:111277664-111277794
  hypo

SEQ ID NO: 409617 - DNA, 186 bp, Homo sapiens; identical to SEQ ID NO: 266191
  chr13:111279860-111280046
  hypo

SEQ ID NO: 409618 - DNA, 174 bp, Homo sapiens; identical to SEQ ID NO: 215576
  chr13:111288424-111288598
  hypo

SEQ ID NO: 409619 - DNA, 289 bp, Homo sapiens; identical to SEQ ID NO: 215581
  chr13:111305194-111305483
  hypo

SEQ ID NO: 409620 - DNA, 79 bp, Homo sapiens; identical to SEQ ID NO: 266206
  chr13:111589026-111589105
  hypo

SEQ ID NO: 409621 - DNA, 355 bp, Homo sapiens; identical to SEQ ID NO: 215586
  chr13:111682505-111682860
  hypo

SEQ ID NO: 409622 - DNA, 102 bp, Homo sapiens; identical to SEQ ID NO: 266209
  chr13:111747877-111747979
  hypo

SEQ ID NO: 409623 - DNA, 167 bp, Homo sapiens; identical to SEQ ID NO: 266210
  chr13:111773929-111774096
  hypo

SEQ ID NO: 409624 - DNA, 357 bp, Homo sapiens; identical to SEQ ID NO: 393227
  chr13:111881497-111881854
  hypo

SEQ ID NO: 409625 - DNA, 137 bp, Homo sapiens; identical to SEQ ID NO: 266212
  chr13:111884809-111884946
  hypo

SEQ ID NO: 409626 - DNA, 101 bp, Homo sapiens; identical to SEQ ID NO: 317456
  chr13:111932740-111932841
  hypo

SEQ ID NO: 409627 - DNA, 109 bp, Homo sapiens; identical to SEQ ID NO: 317457
  chr13:111932871-111932980
  hypo

SEQ ID NO: 409628 - DNA, 253 bp, Homo sapiens; identical to SEQ ID NO: 215589
  chr13:111935987-111936240
  hypo

SEQ ID NO: 409629 - DNA, 150 bp, Homo sapiens; identical to SEQ ID NO: 266218
  chr13:111937757-111937907
  hypo

SEQ ID NO: 409630 - DNA, 105 bp, Homo sapiens; identical to SEQ ID NO: 215590
  chr13:111940174-111940279
  hypo

SEQ ID NO: 409631 - DNA, 32 bp, Homo sapiens; identical to SEQ ID NO: 266223
  chr13:111980235-111980267
  hypo

SEQ ID NO: 409632 - DNA, 56 bp, Homo sapiens; identical to SEQ ID NO: 215593
  chr13:112051223-112051279
  hypo

SEQ ID NO: 409633 - DNA, 111 bp, Homo sapiens; identical to SEQ ID NO: 317468
  chr13:112062637-112062748
  hypo

SEQ ID NO: 409634 - DNA, 68 bp, Homo sapiens; identical to SEQ ID NO: 317469
  chr13:112062778-112062846
  hypo

SEQ ID NO: 409635 - DNA, 651 bp, Homo sapiens; identical to SEQ ID NO: 215594
  chr13:112199983-112200634
  hypo

SEQ ID NO: 409636 - DNA, 85 bp, Homo sapiens; identical to SEQ ID NO: 215595
  chr13:112200906-112200991
  hypo

SEQ ID NO: 409637 - DNA, 198 bp, Homo sapiens; identical to SEQ ID NO: 266232
  chr13:112274814-112275012
  hypo

SEQ ID NO: 409638 - DNA, 106 bp, Homo sapiens; identical to SEQ ID NO: 317476
  chr13:112320937-112321043
  hypo

SEQ ID NO: 409639 - DNA, 247 bp, Homo sapiens; identical to SEQ ID NO: 317477
  chr13:112321075-112321322
  hypo

SEQ ID NO: 409640 - DNA, 179 bp, Homo sapiens; identical to SEQ ID NO: 266238
  chr13:112334238-112334417
  hypo

SEQ ID NO: 409641 - DNA, 87 bp, Homo sapiens; identical to SEQ ID NO: 266239
  chr13:112336761-112336848
  hypo

SEQ ID NO: 409642 - DNA, 433 bp, Homo sapiens; identical to SEQ ID NO: 266242
  chr13:112610839-112611272
  hypo

SEQ ID NO: 409643 - DNA, 45 bp, Homo sapiens; identical to SEQ ID NO: 215598
  chr13:112618854-112618899
  hypo

SEQ ID NO: 409644 - DNA, 149 bp, Homo sapiens; identical to SEQ ID NO: 215599
  chr13:112618980-112619129
  hypo

SEQ ID NO: 409645 - DNA, 121 bp, Homo sapiens; identical to SEQ ID NO: 266245
  chr13:112620245-112620366
  hypo

SEQ ID NO: 409646 - DNA, 174 bp, Homo sapiens; identical to SEQ ID NO: 266247
  chr13:112668109-112668283
  hypo

SEQ ID NO: 409647 - DNA, 90 bp, Homo sapiens; identical to SEQ ID NO: 266249
  chr13:112682967-112683057
  hypo

SEQ ID NO: 409648 - DNA, 114 bp, Homo sapiens; identical to SEQ ID NO: 266254
  chr13:112804837-112804951
  hypo

SEQ ID NO: 409649 - DNA, 478 bp, Homo sapiens; identical to SEQ ID NO: 266258
  chr13:112885758-112886236
  hypo

SEQ ID NO: 409650 - DNA, 52 bp, Homo sapiens; identical to SEQ ID NO: 266260
  chr13:112887814-112887866
  hypo

SEQ ID NO: 409651 - DNA, 52 bp, Homo sapiens; identical to SEQ ID NO: 215602
  chr13:112998006-112998058
  hypo

SEQ ID NO: 409652 - DNA, 33 bp, Homo sapiens; identical to SEQ ID NO: 215603
  chr13:112998135-112998168
  hypo

SEQ ID NO: 409653 - DNA, 45 bp, Homo sapiens; identical to SEQ ID NO: 266266
  chr13:113008186-113008231
  hypo

SEQ ID NO: 409654 - DNA, 52 bp, Homo sapiens; identical to SEQ ID NO: 266267
  chr13:113086508-113086560
  hypo

SEQ ID NO: 409655 - DNA, 42 bp, Homo sapiens; identical to SEQ ID NO: 266271
  chr13:113111904-113111946
  hypo

SEQ ID NO: 409656 - DNA, 106 bp, Homo sapiens; identical to SEQ ID NO: 266272
  chr13:113120931-113121037
  hypo

SEQ ID NO: 409657 - DNA, 55 bp, Homo sapiens; identical to SEQ ID NO: 266273
  chr13:113121067-113121122
  hypo

SEQ ID NO: 409658 - DNA, 122 bp, Homo sapiens; identical to SEQ ID NO: 266274
  chr13:113163202-113163324
  hypo

SEQ ID NO: 409659 - DNA, 40 bp, Homo sapiens; identical to SEQ ID NO: 266275
  chr13:113174159-113174199
  hypo

SEQ ID NO: 409660 - DNA, 52 bp, Homo sapiens
  chr13:113274868-113274920
  hypo
gcatgttaaaagcttggactaggccaggtgtggtggctcatgcctgtaatct

SEQ ID NO: 409661 - DNA, 67 bp, Homo sapiens; identical to SEQ ID NO: 266281
  chr13:113301705-113301772
  hypo

SEQ ID NO: 409662 - DNA, 241 bp, Homo sapiens; identical to SEQ ID NO: 266282
  chr13:113312401-113312642
  hypo

SEQ ID NO: 409663 - DNA, 98 bp, Homo sapiens; identical to SEQ ID NO: 266283
  chr13:113342679-113342777
  hypo

SEQ ID NO: 409664 - DNA, 450 bp, Homo sapiens; identical to SEQ ID NO: 393240
  chr13:113351290-113351740
  hypo

SEQ ID NO: 409665 - DNA, 241 bp, Homo sapiens; identical to SEQ ID NO: 266291
  chr13:113368823-113369064
  hypo

SEQ ID NO: 409666 - DNA, 370 bp, Homo sapiens; identical to SEQ ID NO: 266293
  chr13:113371106-113371476
  hypo

SEQ ID NO: 409667 - DNA, 125 bp, Homo sapiens; identical to SEQ ID NO: 266294
  chr13:113375330-113375455
  hypo

SEQ ID NO: 409668 - DNA, 90 bp, Homo sapiens; identical to SEQ ID NO: 266296
  chr13:113382140-113382230
  hypo

SEQ ID NO: 409669 - DNA, 205 bp, Homo sapiens; identical to SEQ ID NO: 266299
  chr13:113391636-113391841
  hypo

SEQ ID NO: 409670 - DNA, 391 bp, Homo sapiens; identical to SEQ ID NO: 215617
  chr13:113398309-113398700
  hypo

SEQ ID NO: 409671 - DNA, 113 bp, Homo sapiens; identical to SEQ ID NO: 317551
  chr13:113401317-113401430
  hypo

SEQ ID NO: 409672 - DNA, 121 bp, Homo sapiens; identical to SEQ ID NO: 215621
  chr13:113401469-113401590
  hypo

SEQ ID NO: 409673 - DNA, 248 bp, Homo sapiens; identical to SEQ ID NO: 266320
  chr13:113474180-113474428
  hypo

SEQ ID NO: 409674 - DNA, 35 bp, Homo sapiens; identical to SEQ ID NO: 266325
  chr13:113493552-113493587
  hypo

SEQ ID NO: 409675 - DNA, 95 bp, Homo sapiens; identical to SEQ ID NO: 27306
  chr13:113498378-113498473
  hypo

SEQ ID NO: 409676 - DNA, 54 bp, Homo sapiens; identical to SEQ ID NO: 266328
  chr13:113499309-113499363
  hypo

SEQ ID NO: 409677 - DNA, 75 bp, Homo sapiens; identical to SEQ ID NO: 215639
  chr13:113516326-113516401
  hypo

SEQ ID NO: 409678 - DNA, 180 bp, Homo sapiens; identical to SEQ ID NO: 215641
  chr13:113537191-113537371
  hypo

SEQ ID NO: 409679 - DNA, 99 bp, Homo sapiens; identical to SEQ ID NO: 266337
  chr13:113537723-113537822
  hypo

SEQ ID NO: 409680 - DNA, 208 bp, Homo sapiens; identical to SEQ ID NO: 215642
  chr13:113539438-113539646
  hypo

SEQ ID NO: 409681 - DNA, 84 bp, Homo sapiens; identical to SEQ ID NO: 266339
  chr13:113543111-113543195
  hypo

SEQ ID NO: 409682 - DNA, 45 bp, Homo sapiens; identical to SEQ ID NO: 215644
  chr13:113555445-113555490
  hypo

SEQ ID NO: 409683 - DNA, 242 bp, Homo sapiens; identical to SEQ ID NO: 266346
  chr13:113565660-113565902
  hypo

SEQ ID NO: 409684 - DNA, 182 bp, Homo sapiens; identical to SEQ ID NO: 266347
  chr13:113570827-113571009
  hypo

SEQ ID NO: 409685 - DNA, 132 bp, Homo sapiens; identical to SEQ ID NO: 266348
  chr13:113571418-113571550
  hypo

SEQ ID NO: 409686 - DNA, 31 bp, Homo sapiens; identical to SEQ ID NO: 266350
  chr13:113599072-113599103
  hypo

SEQ ID NO: 409687 - DNA, 184 bp, Homo sapiens; identical to SEQ ID NO: 266351
  chr13:113622064-113622248
  hypo

SEQ ID NO: 409688 - DNA, 118 bp, Homo sapiens; identical to SEQ ID NO: 266353
  chr13:113631096-113631214
  hypo

SEQ ID NO: 409689 - DNA, 100 bp, Homo sapiens; identical to SEQ ID NO: 266358
  chr13:113650921-113651021
  hypo

SEQ ID NO: 409690 - DNA, 38 bp, Homo sapiens; identical to SEQ ID NO: 266359
  chr13:113654369-113654407
  hypo

SEQ ID NO: 409691 - DNA, 119 bp, Homo sapiens; identical to SEQ ID NO: 266360
  chr13:113661971-113662090
  hypo

SEQ ID NO: 409692 - DNA, 187 bp, Homo sapiens; identical to SEQ ID NO: 266364
  chr13:113672313-113672500
  hypo

SEQ ID NO: 409693 - DNA, 62 bp, Homo sapiens; identical to SEQ ID NO: 215651
  chr13:113718439-113718501
  hypo

SEQ ID NO: 409694 - DNA, 115 bp, Homo sapiens; identical to SEQ ID NO: 317621
  chr13:113718649-113718764
  hypo

SEQ ID NO: 409695 - DNA, 62 bp, Homo sapiens; identical to SEQ ID NO: 215652
  chr13:113719023-113719085
  hypo

SEQ ID NO: 409696 - DNA, 786 bp, Homo sapiens; identical to SEQ ID NO: 317623
  chr13:113719189-113719975
  hypo

SEQ ID NO: 409697 - DNA, 96 bp, Homo sapiens; identical to SEQ ID NO: 266374
  chr13:113739496-113739592
  hypo

SEQ ID NO: 409698 - DNA, 103 bp, Homo sapiens; identical to SEQ ID NO: 266379
  chr13:113866200-113866303
  hypo

SEQ ID NO: 409699 - DNA, 115 bp, Homo sapiens; identical to SEQ ID NO: 215662
  chr13:113887885-113888000
  hypo

SEQ ID NO: 409700 - DNA, 87 bp, Homo sapiens; identical to SEQ ID NO: 203465
  chr13:113951225-113951312
  hypo

SEQ ID NO: 409701 - DNA, 290 bp, Homo sapiens; identical to SEQ ID NO: 266384
  chr13:113980176-113980466
  hypo

SEQ ID NO: 409702 - DNA, 258 bp, Homo sapiens; identical to SEQ ID NO: 266385
  chr13:113983361-113983619
  hypo

SEQ ID NO: 409703 - DNA, 37 bp, Homo sapiens; identical to SEQ ID NO: 266389
  chr13:113990086-113990123
  hypo

SEQ ID NO: 409704 - DNA, 83 bp, Homo sapiens; identical to SEQ ID NO: 266390
  chr13:114002279-114002362
  hypo

SEQ ID NO: 409705 - DNA, 97 bp, Homo sapiens; identical to SEQ ID NO: 266391
  chr13:114003076-114003173
  hypo

SEQ ID NO: 409706 - DNA, 362 bp, Homo sapiens; identical to SEQ ID NO: 266393
  chr13:114004970-114005332
  hypo

SEQ ID NO: 409707 - DNA, 84 bp, Homo sapiens; identical to SEQ ID NO: 266395
  chr13:114032122-114032206
  hypo

SEQ ID NO: 409708 - DNA, 220 bp, Homo sapiens; identical to SEQ ID NO: 266399
  chr13:114063699-114063919
  hypo

SEQ ID NO: 409709 - DNA, 154 bp, Homo sapiens; identical to SEQ ID NO: 215674
  chr13:114115142-114115296
  hypo

SEQ ID NO: 409710 - DNA, 60 bp, Homo sapiens; identical to SEQ ID NO: 215676
  chr13:114185957-114186017
  hypo

SEQ ID NO: 409711 - DNA, 149 bp, Homo sapiens; identical to SEQ ID NO: 215683
  chr13:114202335-114202484
  hypo

SEQ ID NO: 409712 - DNA, 300 bp, Homo sapiens; identical to SEQ ID NO: 215684
  chr13:114202514-114202814
  hypo

SEQ ID NO: 409713 - DNA, 104 bp, Homo sapiens; identical to SEQ ID NO: 215685
  chr13:114202853-114202957
  hypo

SEQ ID NO: 409714 - DNA, 76 bp, Homo sapiens; identical to SEQ ID NO: 215686
  chr13:114203747-114203823
  hypo

SEQ ID NO: 409715 - DNA, 94 bp, Homo sapiens; identical to SEQ ID NO: 317681
  chr13:114204000-114204094
  hypo

SEQ ID NO: 409716 - DNA, 296 bp, Homo sapiens; identical to SEQ ID NO: 266421
  chr13:114204953-114205249
  hypo

SEQ ID NO: 409717 - DNA, 31 bp, Homo sapiens; identical to SEQ ID NO: 266423
  chr13:114221386-114221417
  hypo

SEQ ID NO: 409718 - DNA, 50 bp, Homo sapiens; identical to SEQ ID NO: 215688
  chr13:114237564-114237614
  hypo

SEQ ID NO: 409719 - DNA, 42 bp, Homo sapiens; identical to SEQ ID NO: 215689
  chr13:114244325-114244367
  hypo

SEQ ID NO: 409720 - DNA, 145 bp, Homo sapiens; identical to SEQ ID NO: 215690
  chr13:114246191-114246336
  hypo

SEQ ID NO: 409721 - DNA, 85 bp, Homo sapiens; identical to SEQ ID NO: 266429
  chr13:114258210-114258295
  hypo

SEQ ID NO: 409722 - DNA, 114 bp, Homo sapiens; identical to SEQ ID NO: 266432
  chr13:114283432-114283546
  hypo

SEQ ID NO: 409723 - DNA, 234 bp, Homo sapiens; identical to SEQ ID NO: 399362
  chr13:114285627-114285861
  hypo

SEQ ID NO: 409724 - DNA, 71 bp, Homo sapiens; identical to SEQ ID NO: 266435
  chr13:114286281-114286352
  hypo

SEQ ID NO: 409725 - DNA, 157 bp, Homo sapiens; identical to SEQ ID NO: 266438
  chr13:114290658-114290815
  hypo

SEQ ID NO: 409726 - DNA, 42 bp, Homo sapiens; identical to SEQ ID NO: 266443
  chr13:114296440-114296482
  hypo

SEQ ID NO: 409727 - DNA, 47 bp, Homo sapiens; identical to SEQ ID NO: 393270
  chr13:114302558-114302605
  hypo

SEQ ID NO: 409728 - DNA, 263 bp, Homo sapiens; identical to SEQ ID NO: 317709
  chr13:114318243-114318506
  hypo

SEQ ID NO: 409729 - DNA, 57 bp, Homo sapiens; identical to SEQ ID NO: 317712
  chr13:114492851-114492908
  hypo

SEQ ID NO: 409730 - DNA, 142 bp, Homo sapiens; identical to SEQ ID NO: 317713
  chr13:114497267-114497409
  hypo

SEQ ID NO: 409731 - DNA, 31 bp, Homo sapiens; identical to SEQ ID NO: 317714
  chr13:114497439-114497470
  hypo

SEQ ID NO: 409732 - DNA, 69 bp, Homo sapiens; identical to SEQ ID NO: 317720
  chr13:114517613-114517682
  hypo

SEQ ID NO: 409733 - DNA, 51 bp, Homo sapiens; identical to SEQ ID NO: 317721
  chr13:114517712-114517763
  hypo

SEQ ID NO: 409734 - DNA, 229 bp, Homo sapiens; identical to SEQ ID NO: 266468
  chr13:114741916-114742145
  hypo

SEQ ID NO: 409735 - DNA, 56 bp, Homo sapiens; identical to SEQ ID NO: 317733
  chr13:114760878-114760934
  hypo

SEQ ID NO: 409736 - DNA, 168 bp, Homo sapiens; identical to SEQ ID NO: 215709
  chr13:114764876-114765044
  hypo

SEQ ID NO: 409737 - DNA, 172 bp, Homo sapiens; identical to SEQ ID NO: 215710
  chr13:114771065-114771237
  hypo

SEQ ID NO: 409738 - DNA, 144 bp, Homo sapiens; identical to SEQ ID NO: 215715
  chr13:114791748-114791892
  hypo

SEQ ID NO: 409739 - DNA, 48 bp, Homo sapiens; identical to SEQ ID NO: 266494
  chr13:114804554-114804602
  hypo

SEQ ID NO: 409740 - DNA, 65 bp, Homo sapiens; identical to SEQ ID NO: 266495
  chr13:114804861-114804926
  hypo

SEQ ID NO: 409741 - DNA, 43 bp, Homo sapiens; identical to SEQ ID NO: 215720
  chr13:114855701-114855744
  hypo

SEQ ID NO: 409742 - DNA, 89 bp, Homo sapiens; identical to SEQ ID NO: 266515
  chr13:115025097-115025186
  hypo

SEQ ID NO: 409743 - DNA, 119 bp, Homo sapiens; identical to SEQ ID NO: 289965
  chr14:21121460-21121579
  hypo

SEQ ID NO: 409744 - DNA, 198 bp, Homo sapiens; identical to SEQ ID NO: 399372
  chr14:21150255-21150453
  hypo

SEQ ID NO: 409745 - DNA, 42 bp, Homo sapiens; identical to SEQ ID NO: 266519
  chr14:21304102-21304144
  hypo

SEQ ID NO: 409746 - DNA, 274 bp, Homo sapiens; identical to SEQ ID NO: 266521
  chr14:21464749-21465023
  hypo

SEQ ID NO: 409747 - DNA, 32 bp, Homo sapiens; identical to SEQ ID NO: 266522
  chr14:21549738-21549770
  hypo

SEQ ID NO: 409748 - DNA, 41 bp, Homo sapiens; identical to SEQ ID NO: 215730
  chr14:21688656-21688697
  hypo

SEQ ID NO: 409749 - DNA, 82 bp, Homo sapiens; identical to SEQ ID NO: 266527
  chr14:21752061-21752143
  hypo

SEQ ID NO: 409750 - DNA, 72 bp, Homo sapiens; identical to SEQ ID NO: 266531
  chr14:21971445-21971517
  hypo

SEQ ID NO: 409751 - DNA, 161 bp, Homo sapiens; identical to SEQ ID NO: 317792
  chr14:21980069-21980230
  hypo

SEQ ID NO: 409752 - DNA, 120 bp, Homo sapiens; identical to SEQ ID NO: 266534
  chr14:23183246-23183366
  hypo

SEQ ID NO: 409753 - DNA, 63 bp, Homo sapiens; identical to SEQ ID NO: 266538
  chr14:23400229-23400292
  hypo

SEQ ID NO: 409754 - DNA, 88 bp, Homo sapiens; identical to SEQ ID NO: 266545
  chr14:23530469-23530557
  hypo

SEQ ID NO: 409755 - DNA, 41 bp, Homo sapiens; identical to SEQ ID NO: 266546
  chr14:23537841-23537882
  hypo

SEQ ID NO: 409756 - DNA, 154 bp, Homo sapiens; identical to SEQ ID NO: 215735
  chr14:23757712-23757866
  hypo

SEQ ID NO: 409757 - DNA, 188 bp, Homo sapiens; identical to SEQ ID NO: 203499
  chr14:23776071-23776259
  hypo

SEQ ID NO: 409758 - DNA, 94 bp, Homo sapiens; identical to SEQ ID NO: 215738
  chr14:23793466-23793560
  hypo

SEQ ID NO: 409759 - DNA, 63 bp, Homo sapiens; identical to SEQ ID NO: 266560
  chr14:24081962-24082025
  hypo

SEQ ID NO: 409760 - DNA, 502 bp, Homo sapiens; identical to SEQ ID NO: 266566
  chr14:24731055-24731557
  hypo

SEQ ID NO: 409761 - DNA, 31 bp, Homo sapiens; identical to SEQ ID NO: 266569
  chr14:24859466-24859497
  hypo

SEQ ID NO: 409762 - DNA, 109 bp, Homo sapiens; identical to SEQ ID NO: 266570
  chr14:25113297-25113406
  hypo

SEQ ID NO: 409763 - DNA, 84 bp, Homo sapiens; identical to SEQ ID NO: 266574
  chr14:31035127-31035211
  hypo

SEQ ID NO: 409764 - DNA, 100 bp, Homo sapiens; identical to SEQ ID NO: 215747
  chr14:31456881-31456981
  hypo

SEQ ID NO: 409765 - DNA, 61 bp, Homo sapiens; identical to SEQ ID NO: 215748
  chr14:31478679-31478740
  hypo

SEQ ID NO: 409766 - DNA, 205 bp, Homo sapiens; identical to SEQ ID NO: 215749
  chr14:31484306-31484511
  hypo

SEQ ID NO: 409767 - DNA, 91 bp, Homo sapiens; identical to SEQ ID NO: 266583
  chr14:31632735-31632826
  hypo

SEQ ID NO: 409768 - DNA, 33 bp, Homo sapiens; identical to SEQ ID NO: 215751
  chr14:31648025-31648058
  hypo

SEQ ID NO: 409769 - DNA, 87 bp, Homo sapiens; identical to SEQ ID NO: 266585
  chr14:31671012-31671099
  hypo

SEQ ID NO: 409770 - DNA, 41 bp, Homo sapiens; identical to SEQ ID NO: 266586
  chr14:31847700-31847741
  hypo

SEQ ID NO: 409771 - DNA, 79 bp, Homo sapiens; identical to SEQ ID NO: 215752
  chr14:31925274-31925353
  hypo

SEQ ID NO: 409772 - DNA, 84 bp, Homo sapiens; identical to SEQ ID NO: 266591
  chr14:32413188-32413272
  hypo

SEQ ID NO: 409773 - DNA, 44 bp, Homo sapiens; identical to SEQ ID NO: 215753
  chr14:32597576-32597620
  hypo

SEQ ID NO: 409774 - DNA, 73 bp, Homo sapiens; identical to SEQ ID NO: 266595
  chr14:34165621-34165694
  hypo

SEQ ID NO: 409775 - DNA, 99 bp, Homo sapiens; identical to SEQ ID NO: 266596
  chr14:34308655-34308754
  hypo

SEQ ID NO: 409776 - DNA, 36 bp, Homo sapiens; identical to SEQ ID NO: 266597
  chr14:34334928-34334964
  hypo

SEQ ID NO: 409777 - DNA, 37 bp, Homo sapiens; identical to SEQ ID NO: 215755
  chr14:34415281-34415318
  hypo

SEQ ID NO: 409778 - DNA, 161 bp, Homo sapiens; identical to SEQ ID NO: 266602
  chr14:35022415-35022576
  hypo

SEQ ID NO: 409779 - DNA, 37 bp, Homo sapiens; identical to SEQ ID NO: 266608
  chr14:35266883-35266920
  hypo

SEQ ID NO: 409780 - DNA, 48 bp, Homo sapiens; identical to SEQ ID NO: 266610
  chr14:35331322-35331370
  hypo

SEQ ID NO: 409781 - DNA, 97 bp, Homo sapiens; identical to SEQ ID NO: 215758
  chr14:35578168-35578265
  hypo

SEQ ID NO: 409782 - DNA, 393 bp, Homo sapiens; identical to SEQ ID NO: 215760
  chr14:36288873-36289266
  hypo

SEQ ID NO: 409783 - DNA, 34 bp, Homo sapiens; identical to SEQ ID NO: 215761
  chr14:37174263-37174297
  hypo

SEQ ID NO: 409784 - DNA, 43 bp, Homo sapiens; identical to SEQ ID NO: 266622
  chr14:37665913-37665956
  hypo

SEQ ID NO: 409785 - DNA, 97 bp, Homo sapiens; identical to SEQ ID NO: 266625
  chr14:39648716-39648813
  hypo

SEQ ID NO: 409786 - DNA, 213 bp, Homo sapiens; identical to SEQ ID NO: 224682
  chr14:39735565-39735778
  hypo

SEQ ID NO: 409787 - DNA, 37 bp, Homo sapiens; identical to SEQ ID NO: 215767
  chr14:40470106-40470143
  hypo

SEQ ID NO: 409788 - DNA, 32 bp, Homo sapiens; identical to SEQ ID NO: 266631
  chr14:45437464-45437496
  hypo

SEQ ID NO: 409789 - DNA, 31 bp, Homo sapiens; identical to SEQ ID NO: 266632
  chr14:45437736-45437767
  hypo

SEQ ID NO: 409790 - DNA, 156 bp, Homo sapiens; identical to SEQ ID NO: 317904
  chr14:50333499-50333655
  hypo

SEQ ID NO: 409791 - DNA, 32 bp, Homo sapiens; identical to SEQ ID NO: 266642
  chr14:50540507-50540539
  hypo

SEQ ID NO: 409792 - DNA, 40 bp, Homo sapiens; identical to SEQ ID NO: 266644
  chr14:50589170-50589210
  hypo

SEQ ID NO: 409793 - DNA, 39 bp, Homo sapiens; identical to SEQ ID NO: 266646
  chr14:50777877-50777916
  hypo

SEQ ID NO: 409794 - DNA, 266 bp, Homo sapiens; identical to SEQ ID NO: 266648
  chr14:50903479-50903745
  hypo

SEQ ID NO: 409795 - DNA, 42 bp, Homo sapiens; identical to SEQ ID NO: 266651
  chr14:51148375-51148417
  hypo

SEQ ID NO: 409796 - DNA, 41 bp, Homo sapiens; identical to SEQ ID NO: 215778
  chr14:51836280-51836321
  hypo

SEQ ID NO: 409797 - DNA, 1663 bp, Homo sapiens; identical to SEQ ID NO: 290168
  chr14:52117843-52119506
  hypo

SEQ ID NO: 409798 - DNA, 84 bp, Homo sapiens; identical to SEQ ID NO: 266660
  chr14:53196020-53196104
  hypo

SEQ ID NO: 409799 - DNA, 44 bp, Homo sapiens; identical to SEQ ID NO: 290201
  chr14:55032358-55032402
  hypo

SEQ ID NO: 409800 - DNA, 31 bp, Homo sapiens; identical to SEQ ID NO: 266664
  chr14:55035161-55035192
  hypo

SEQ ID NO: 409801 - DNA, 201 bp, Homo sapiens; identical to SEQ ID NO: 215785
  chr14:55590026-55590227
  hypo

SEQ ID NO: 409802 - DNA, 214 bp, Homo sapiens; identical to SEQ ID NO: 266668
  chr14:55731632-55731846
  hypo

SEQ ID NO: 409803 - DNA, 86 bp, Homo sapiens; identical to SEQ ID NO: 215786
  chr14:55740426-55740512
  hypo

SEQ ID NO: 409804 - DNA, 164 bp, Homo sapiens; identical to SEQ ID NO: 215790
  chr14:55819829-55819993
  hypo

SEQ ID NO: 409805 - DNA, 31 bp, Homo sapiens; identical to SEQ ID NO: 215791
  chr14:55894600-55894631
  hypo

SEQ ID NO: 409806 - DNA, 180 bp, Homo sapiens; identical to SEQ ID NO: 215792
  chr14:55894691-55894871
  hypo

SEQ ID NO: 409807 - DNA, 155 bp, Homo sapiens; identical to SEQ ID NO: 224693
  chr14:56047824-56047979
  hypo

SEQ ID NO: 409808 - DNA, 96 bp, Homo sapiens; identical to SEQ ID NO: 266677
  chr14:56608021-56608117
  hypo

SEQ ID NO: 409809 - DNA, 52 bp, Homo sapiens; identical to SEQ ID NO: 266680
  chr14:57052072-57052124
  hypo

SEQ ID NO: 409810 - DNA, 77 bp, Homo sapiens; identical to SEQ ID NO: 215794
  chr14:57073649-57073726
  hypo

SEQ ID NO: 409811 - DNA, 258 bp, Homo sapiens; identical to SEQ ID NO: 266684
  chr14:58761578-58761836
  hypo

SEQ ID NO: 409812 - DNA, 97 bp, Homo sapiens; identical to SEQ ID NO: 266685
  chr14:58863447-58863544
  hypo

SEQ ID NO: 409813 - DNA, 243 bp, Homo sapiens; identical to SEQ ID NO: 215798
  chr14:59112403-59112646
  hypo

SEQ ID NO: 409814 - DNA, 34 bp, Homo sapiens; identical to SEQ ID NO: 266691
  chr14:59715783-59715817
  hypo

SEQ ID NO: 409815 - DNA, 34 bp, Homo sapiens; identical to SEQ ID NO: 266692
  chr14:59734888-59734922
  hypo

SEQ ID NO: 409816 - DNA, 306 bp, Homo sapiens; identical to SEQ ID NO: 266693
  chr14:59809360-59809666
  hypo

SEQ ID NO: 409817 - DNA, 145 bp, Homo sapiens; identical to SEQ ID NO: 215799
  chr14:59810623-59810768
  hypo

SEQ ID NO: 409818 - DNA, 164 bp, Homo sapiens; identical to SEQ ID NO: 215800
  chr14:59821078-59821242
  hypo

SEQ ID NO: 409819 - DNA, 719 bp, Homo sapiens; identical to SEQ ID NO: 215804
  chr14:60193647-60194366
  hypo

SEQ ID NO: 409820 - DNA, 184 bp, Homo sapiens; identical to SEQ ID NO: 266700
  chr14:61246679-61246863
  hypo

SEQ ID NO: 409821 - DNA, 92 bp, Homo sapiens; identical to SEQ ID NO: 266701
  chr14:61929139-61929231
  hypo

SEQ ID NO: 409822 - DNA, 66 bp, Homo sapiens; identical to SEQ ID NO: 266703
  chr14:61995224-61995290
  hypo

SEQ ID NO: 409823 - DNA, 148 bp, Homo sapiens; identical to SEQ ID NO: 215809
  chr14:62015169-62015317
  hypo

SEQ ID NO: 409824 - DNA, 54 bp, Homo sapiens; identical to SEQ ID NO: 266706
  chr14:62027306-62027360
  hypo

SEQ ID NO: 409825 - DNA, 196 bp, Homo sapiens; identical to SEQ ID NO: 215812
  chr14:62523573-62523769
  hypo

SEQ ID NO: 409826 - DNA, 35 bp, Homo sapiens; identical to SEQ ID NO: 224711
  chr14:64182960-64182995
  hypo

SEQ ID NO: 409827 - DNA, 42 bp, Homo sapiens; identical to SEQ ID NO: 215813
  chr14:64190117-64190159
  hypo

SEQ ID NO: 409828 - DNA, 221 bp, Homo sapiens; identical to SEQ ID NO: 290271
  chr14:64760852-64761073
  hypo

SEQ ID NO: 409829 - DNA, 61 bp, Homo sapiens; identical to SEQ ID NO: 389191
  chr14:64761254-64761315
  hypo

SEQ ID NO: 409830 - DNA, 80 bp, Homo sapiens; identical to SEQ ID NO: 215817
  chr14:64888236-64888316
  hypo

SEQ ID NO: 409831 - DNA, 81 bp, Homo sapiens; identical to SEQ ID NO: 266720
  chr14:64905829-64905910
  hypo

SEQ ID NO: 409832 - DNA, 291 bp, Homo sapiens; identical to SEQ ID NO: 266726
  chr14:65194543-65194834
  hypo

SEQ ID NO: 409833 - DNA, 84 bp, Homo sapiens; identical to SEQ ID NO: 215826
  chr14:65237647-65237731
  hypo

SEQ ID NO: 409834 - DNA, 54 bp, Homo sapiens; identical to SEQ ID NO: 215828
  chr14:65248987-65249041
  hypo

SEQ ID NO: 409835 - DNA, 119 bp, Homo sapiens; identical to SEQ ID NO: 215831
  chr14:65493164-65493283
  hypo

SEQ ID NO: 409836 - DNA, 35 bp, Homo sapiens; identical to SEQ ID NO: 266745
  chr14:65532138-65532173
  hypo

SEQ ID NO: 409837 - DNA, 34 bp, Homo sapiens; identical to SEQ ID NO: 266747
  chr14:65631813-65631847
  hypo

SEQ ID NO: 409838 - DNA, 176 bp, Homo sapiens; identical to SEQ ID NO: 266748
  chr14:65746810-65746986
  hypo

SEQ ID NO: 409839 - DNA, 218 bp, Homo sapiens; identical to SEQ ID NO: 266749
  chr14:66479541-66479759
  hypo

SEQ ID NO: 409840 - DNA, 61 bp, Homo sapiens; identical to SEQ ID NO: 266751
  chr14:66560926-66560987
  hypo

SEQ ID NO: 409841 - DNA, 42 bp, Homo sapiens; identical to SEQ ID NO: 215832
  chr14:66814104-66814146
  hypo

SEQ ID NO: 409842 - DNA, 32 bp, Homo sapiens; identical to SEQ ID NO: 266753
  chr14:66976290-66976322
  hypo

SEQ ID NO: 409843 - DNA, 37 bp, Homo sapiens; identical to SEQ ID NO: 266755
  chr14:66976456-66976493
  hypo

SEQ ID NO: 409844 - DNA, 84 bp, Homo sapiens; identical to SEQ ID NO: 215834
  chr14:67876365-67876449
  hypo

SEQ ID NO: 409845 - DNA, 179 bp, Homo sapiens; identical to SEQ ID NO: 266760
  chr14:67888349-67888528
  hypo

SEQ ID NO: 409846 - DNA, 54 bp, Homo sapiens; identical to SEQ ID NO: 266764
  chr14:68163051-68163105
  hypo

SEQ ID NO: 409847 - DNA, 98 bp, Homo sapiens; identical to SEQ ID NO: 215836
  chr14:68829198-68829296
  hypo

SEQ ID NO: 409848 - DNA, 42 bp, Homo sapiens; identical to SEQ ID NO: 266767
  chr14:68968539-68968581
  hypo

SEQ ID NO: 409849 - DNA, 98 bp, Homo sapiens; identical to SEQ ID NO: 266768
  chr14:68993117-68993215
  hypo

SEQ ID NO: 409850 - DNA, 99 bp, Homo sapiens; identical to SEQ ID NO: 266770
  chr14:69050653-69050752
  hypo

SEQ ID NO: 409851 - DNA, 252 bp, Homo sapiens; identical to SEQ ID NO: 266771
  chr14:69052663-69052915
  hypo

SEQ ID NO: 409852 - DNA, 88 bp, Homo sapiens; identical to SEQ ID NO: 318050
  chr14:69143561-69143649
  hypo

SEQ ID NO: 409853 - DNA, 43 bp, Homo sapiens; identical to SEQ ID NO: 266776
  chr14:69153995-69154038
  hypo

SEQ ID NO: 409854 - DNA, 93 bp, Homo sapiens; identical to SEQ ID NO: 266778
  chr14:69218775-69218868
  hypo

SEQ ID NO: 409855 - DNA, 40 bp, Homo sapiens; identical to SEQ ID NO: 266781
  chr14:69337465-69337505
  hypo

SEQ ID NO: 409856 - DNA, 515 bp, Homo sapiens; identical to SEQ ID NO: 224715
  chr14:69444793-69445308
  hypo

SEQ ID NO: 409857 - DNA, 104 bp, Homo sapiens; identical to SEQ ID NO: 203653
  chr14:69618203-69618307
  hypo

SEQ ID NO: 409858 - DNA, 95 bp, Homo sapiens; identical to SEQ ID NO: 203654
  chr14:69658738-69658833
  hypo

SEQ ID NO: 409859 - DNA, 140 bp, Homo sapiens; identical to SEQ ID NO: 318074
  chr14:69867591-69867731
  hypo

SEQ ID NO: 409860 - DNA, 83 bp, Homo sapiens; identical to SEQ ID NO: 318075
  chr14:69867761-69867844
  hypo

SEQ ID NO: 409861 - DNA, 87 bp, Homo sapiens; identical to SEQ ID NO: 266794
  chr14:70387802-70387889
  hypo

SEQ ID NO: 409862 - DNA, 60 bp, Homo sapiens; identical to SEQ ID NO: 224724
  chr14:71108798-71108858
  hypo

SEQ ID NO: 409863 - DNA, 40 bp, Homo sapiens; identical to SEQ ID NO: 266795
  chr14:71443359-71443399
  hypo

SEQ ID NO: 409864 - DNA, 42 bp, Homo sapiens; identical to SEQ ID NO: 266798
  chr14:72431251-72431293
  hypo

SEQ ID NO: 409865 - DNA, 215 bp, Homo sapiens; identical to SEQ ID NO: 266810
  chr14:73302930-73303145
  hypo

SEQ ID NO: 409866 - DNA, 469 bp, Homo sapiens; identical to SEQ ID NO: 399503
  chr14:73393144-73393613
  hypo

SEQ ID NO: 409867 - DNA, 73 bp, Homo sapiens; identical to SEQ ID NO: 215858
  chr14:73428614-73428687
  hypo

SEQ ID NO: 409868 - DNA, 180 bp, Homo sapiens; identical to SEQ ID NO: 266817
  chr14:73482390-73482570
  hypo

SEQ ID NO: 409869 - DNA, 89 bp, Homo sapiens; identical to SEQ ID NO: 266818
  chr14:73482875-73482964
  hypo

SEQ ID NO: 409870 - DNA, 31 bp, Homo sapiens; identical to SEQ ID NO: 266819
  chr14:73687399-73687430
  hypo

SEQ ID NO: 409871 - DNA, 35 bp, Homo sapiens; identical to SEQ ID NO: 215860
  chr14:73855377-73855412
  hypo

SEQ ID NO: 409872 - DNA, 37 bp, Homo sapiens; identical to SEQ ID NO: 266822
  chr14:73926314-73926351
  hypo

SEQ ID NO: 409873 - DNA, 69 bp, Homo sapiens; identical to SEQ ID NO: 318122
  chr14:74273439-74273508
  hypo

SEQ ID NO: 409874 - DNA, 35 bp, Homo sapiens; identical to SEQ ID NO: 215868
  chr14:74369046-74369081
  hypo

SEQ ID NO: 409875 - DNA, 91 bp, Homo sapiens; identical to SEQ ID NO: 215869
  chr14:74418713-74418804
  hypo

SEQ ID NO: 409876 - DNA, 88 bp, Homo sapiens; identical to SEQ ID NO: 215870
  chr14:74626548-74626636
  hypo

SEQ ID NO: 409877 - DNA, 161 bp, Homo sapiens; identical to SEQ ID NO: 215871
  chr14:74628386-74628547
  hypo

SEQ ID NO: 409878 - DNA, 94 bp, Homo sapiens; identical to SEQ ID NO: 215872
  chr14:74957659-74957753
  hypo

SEQ ID NO: 409879 - DNA, 81 bp, Homo sapiens; identical to SEQ ID NO: 266839
  chr14:75062987-75063068
  hypo

SEQ ID NO: 409880 - DNA, 39 bp, Homo sapiens; identical to SEQ ID NO: 266840
  chr14:75416062-75416101
  hypo

SEQ ID NO: 409881 - DNA, 71 bp, Homo sapiens; identical to SEQ ID NO: 215873
  chr14:75423075-75423146
  hypo

SEQ ID NO: 409882 - DNA, 196 bp, Homo sapiens; identical to SEQ ID NO: 203675
  chr14:75743668-75743864
  hypo

SEQ ID NO: 409883 - DNA, 404 bp, Homo sapiens; identical to SEQ ID NO: 266849
  chr14:76012913-76013317
  hypo

SEQ ID NO: 409884 - DNA, 86 bp, Homo sapiens; identical to SEQ ID NO: 215881
  chr14:76446468-76446554
  hypo

SEQ ID NO: 409885 - DNA, 321 bp, Homo sapiens; identical to SEQ ID NO: 87130
  chr14:76446750-76447071
  hypo

SEQ ID NO: 409886 - DNA, 104 bp, Homo sapiens; identical to SEQ ID NO: 318148
  chr14:76461806-76461910
  hypo

SEQ ID NO: 409887 - DNA, 89 bp, Homo sapiens; identical to SEQ ID NO: 266857
  chr14:76628408-76628497
  hypo

SEQ ID NO: 409888 - DNA, 32 bp, Homo sapiens; identical to SEQ ID NO: 266858
  chr14:76738013-76738045
  hypo

SEQ ID NO: 409889 - DNA, 577 bp, Homo sapiens; identical to SEQ ID NO: 266859
  chr14:76905595-76906172
  hypo

SEQ ID NO: 409890 - DNA, 36 bp, Homo sapiens; identical to SEQ ID NO: 215884
  chr14:76998229-76998265
  hypo

SEQ ID NO: 409891 - DNA, 136 bp, Homo sapiens; identical to SEQ ID NO: 318154
  chr14:77242297-77242433
  hypo

SEQ ID NO: 409892 - DNA, 91 bp, Homo sapiens; identical to SEQ ID NO: 266862
  chr14:77370516-77370607
  hypo

SEQ ID NO: 409893 - DNA, 103 bp, Homo sapiens; identical to SEQ ID NO: 266864
  chr14:77433610-77433713
  hypo

SEQ ID NO: 409894 - DNA, 38 bp, Homo sapiens; identical to SEQ ID NO: 266866
  chr14:77437670-77437708
  hypo

SEQ ID NO: 409895 - DNA, 568 bp, Homo sapiens; identical to SEQ ID NO: 290397
  chr14:77605688-77606256
  hypo

SEQ ID NO: 409896 - DNA, 88 bp, Homo sapiens; identical to SEQ ID NO: 384533
  chr14:77736779-77736867
  hypo

SEQ ID NO: 409897 - DNA, 97 bp, Homo sapiens; identical to SEQ ID NO: 290401
  chr14:77736883-77736980
  hypo

SEQ ID NO: 409898 - DNA, 101 bp, Homo sapiens; identical to SEQ ID NO: 266871
  chr14:77939354-77939455
  hypo

SEQ ID NO: 409899 - DNA, 37 bp, Homo sapiens; identical to SEQ ID NO: 266873
  chr14:78152933-78152970
  hypo

SEQ ID NO: 409900 - DNA, 37 bp, Homo sapiens; identical to SEQ ID NO: 215893
  chr14:78388714-78388751
  hypo

SEQ ID NO: 409901 - DNA, 207 bp, Homo sapiens; identical to SEQ ID NO: 215894
  chr14:81231425-81231632
  hypo

SEQ ID NO: 409902 - DNA, 75 bp, Homo sapiens; identical to SEQ ID NO: 266884
  chr14:81439765-81439840
  hypo

SEQ ID NO: 409903 - DNA, 37 bp, Homo sapiens; identical to SEQ ID NO: 266888
  chr14:81904519-81904556
  hypo

SEQ ID NO: 409904 - DNA, 102 bp, Homo sapiens; identical to SEQ ID NO: 266889
  chr14:82295806-82295908
  hypo

SEQ ID NO: 409905 - DNA, 34 bp, Homo sapiens; identical to SEQ ID NO: 266890
  chr14:86054380-86054414
  hypo

SEQ ID NO: 409906 - DNA, 75 bp, Homo sapiens; identical to SEQ ID NO: 266891
  chr14:87963380-87963455
  hypo

SEQ ID NO: 409907 - DNA, 77 bp, Homo sapiens; identical to SEQ ID NO: 215896
  chr14:88457820-88457897
  hypo

SEQ ID NO: 409908 - DNA, 33 bp, Homo sapiens; identical to SEQ ID NO: 215898
  chr14:88527464-88527497
  hypo

SEQ ID NO: 409909 - DNA, 147 bp, Homo sapiens; identical to SEQ ID NO: 266896
  chr14:88587438-88587585
  hypo

SEQ ID NO: 409910 - DNA, 36 bp, Homo sapiens; identical to SEQ ID NO: 215901
  chr14:88686789-88686825
  hypo

SEQ ID NO: 409911 - DNA, 102 bp, Homo sapiens; identical to SEQ ID NO: 266899
  chr14:88954653-88954755
  hypo

SEQ ID NO: 409912 - DNA, 782 bp, Homo sapiens; identical to SEQ ID NO: 203701
  chr14:89020631-89021413
  hypo

SEQ ID NO: 409913 - DNA, 725 bp, Homo sapiens; identical to SEQ ID NO: 290430
  chr14:89290490-89291215
  hypo

SEQ ID NO: 409914 - DNA, 180 bp, Homo sapiens; identical to SEQ ID NO: 215906
  chr14:89292610-89292790
  hypo

SEQ ID NO: 409915 - DNA, 238 bp, Homo sapiens; identical to SEQ ID NO: 203703
  chr14:89506861-89507099
  hypo

SEQ ID NO: 409916 - DNA, 181 bp, Homo sapiens; identical to SEQ ID NO: 266904
  chr14:89646424-89646605
  hypo

SEQ ID NO: 409917 - DNA, 216 bp, Homo sapiens; identical to SEQ ID NO: 266908
  chr14:89775981-89776197
  hypo

SEQ ID NO: 409918 - DNA, 247 bp, Homo sapiens; identical to SEQ ID NO: 215911
  chr14:89811174-89811421
  hypo

SEQ ID NO: 409919 - DNA, 235 bp, Homo sapiens; identical to SEQ ID NO: 266916
  chr14:89956432-89956667
  hypo

SEQ ID NO: 409920 - DNA, 182 bp, Homo sapiens; identical to SEQ ID NO: 224749
  chr14:90167708-90167890
  hypo

SEQ ID NO: 409921 - DNA, 39 bp, Homo sapiens; identical to SEQ ID NO: 266918
  chr14:90323676-90323715
  hypo

SEQ ID NO: 409922 - DNA, 235 bp, Homo sapiens; identical to SEQ ID NO: 266919
  chr14:90358154-90358389
  hypo

SEQ ID NO: 409923 - DNA, 673 bp, Homo sapiens; identical to SEQ ID NO: 399545
  chr14:90422122-90422795
  hypo

SEQ ID NO: 409924 - DNA, 163 bp, Homo sapiens; identical to SEQ ID NO: 215917
  chr14:90505789-90505952
  hypo

SEQ ID NO: 409925 - DNA, 91 bp, Homo sapiens; identical to SEQ ID NO: 266922
  chr14:90747429-90747520
  hypo

SEQ ID NO: 409926 - DNA, 109 bp, Homo sapiens; identical to SEQ ID NO: 318240
  chr14:90983360-90983469
  hypo

SEQ ID NO: 409927 - DNA, 168 bp, Homo sapiens; identical to SEQ ID NO: 266929
  chr14:91007706-91007874
  hypo

SEQ ID NO: 409928 - DNA, 103 bp, Homo sapiens; identical to SEQ ID NO: 266930
  chr14:91077534-91077637
  hypo

SEQ ID NO: 409929 - DNA, 131 bp, Homo sapiens; identical to SEQ ID NO: 215923
  chr14:91127198-91127329
  hypo

SEQ ID NO: 409930 - DNA, 187 bp, Homo sapiens; identical to SEQ ID NO: 266933
  chr14:91589623-91589810
  hypo

SEQ ID NO: 409931 - DNA, 38 bp, Homo sapiens; identical to SEQ ID NO: 318250
  chr14:91691822-91691860
  hypo

SEQ ID NO: 409932 - DNA, 161 bp, Homo sapiens; identical to SEQ ID NO: 266938
  chr14:91712444-91712605
  hypo

SEQ ID NO: 409933 - DNA, 408 bp, Homo sapiens; identical to SEQ ID NO: 266941
  chr14:91744077-91744485
  hypo

SEQ ID NO: 409934 - DNA, 67 bp, Homo sapiens; identical to SEQ ID NO: 318259
  chr14:91758193-91758260
  hypo

SEQ ID NO: 409935 - DNA, 100 bp, Homo sapiens; identical to SEQ ID NO: 215930
  chr14:91775792-91775892
  hypo

SEQ ID NO: 409936 - DNA, 123 bp, Homo sapiens; identical to SEQ ID NO: 318262
  chr14:91780259-91780382
  hypo

SEQ ID NO: 409937 - DNA, 413 bp, Homo sapiens; identical to SEQ ID NO: 266952
  chr14:91804341-91804754
  hypo

SEQ ID NO: 409938 - DNA, 104 bp, Homo sapiens; identical to SEQ ID NO: 215934
  chr14:91825112-91825216
  hypo

SEQ ID NO: 409939 - DNA, 189 bp, Homo sapiens; identical to SEQ ID NO: 215937
  chr14:91848934-91849123
  hypo

SEQ ID NO: 409940 - DNA, 207 bp, Homo sapiens; identical to SEQ ID NO: 215938
  chr14:91850943-91851150
  hypo

SEQ ID NO: 409941 - DNA, 213 bp, Homo sapiens; identical to SEQ ID NO: 266962
  chr14:91871519-91871732
  hypo

SEQ ID NO: 409942 - DNA, 199 bp, Homo sapiens; identical to SEQ ID NO: 215940
  chr14:92492743-92492942
  hypo

SEQ ID NO: 409943 - DNA, 43 bp, Homo sapiens; identical to SEQ ID NO: 266964
  chr14:92507492-92507535
  hypo

SEQ ID NO: 409944 - DNA, 44 bp, Homo sapiens; identical to SEQ ID NO: 266968
  chr14:92992506-92992550
  hypo

SEQ ID NO: 409945 - DNA, 225 bp, Homo sapiens; identical to SEQ ID NO: 266971
  chr14:93115303-93115528
  hypo

SEQ ID NO: 409946 - DNA, 100 bp, Homo sapiens; identical to SEQ ID NO: 266973
  chr14:93149543-93149643
  hypo

SEQ ID NO: 409947 - DNA, 713 bp, Homo sapiens; identical to SEQ ID NO: 266977
  chr14:93423289-93424002
  hypo

SEQ ID NO: 409948 - DNA, 189 bp, Homo sapiens; identical to SEQ ID NO: 215945
  chr14:93486022-93486211
  hypo

SEQ ID NO: 409949 - DNA, 46 bp, Homo sapiens; identical to SEQ ID NO: 215946
  chr14:93525816-93525862
  hypo

SEQ ID NO: 409950 - DNA, 281 bp, Homo sapiens; identical to SEQ ID NO: 266988
  chr14:93533287-93533568
  hypo

SEQ ID NO: 409951 - DNA, 33 bp, Homo sapiens; identical to SEQ ID NO: 215948
  chr14:93570836-93570869
  hypo

SEQ ID NO: 409952 - DNA, 127 bp, Homo sapiens; identical to SEQ ID NO: 318307
  chr14:93697057-93697184
  hypo

SEQ ID NO: 409953 - DNA, 312 bp, Homo sapiens; identical to SEQ ID NO: 266996
  chr14:93813480-93813792
  hypo

SEQ ID NO: 409954 - DNA, 100 bp, Homo sapiens; identical to SEQ ID NO: 266997
  chr14:94048704-94048804
  hypo

SEQ ID NO: 409955 - DNA, 242 bp, Homo sapiens; identical to SEQ ID NO: 266998
  chr14:94187385-94187627
  hypo

SEQ ID NO: 409956 - DNA, 175 bp, Homo sapiens; identical to SEQ ID NO: 267005
  chr14:94829568-94829743
  hypo

SEQ ID NO: 409957 - DNA, 124 bp, Homo sapiens; identical to SEQ ID NO: 267006
  chr14:95538387-95538511
  hypo

SEQ ID NO: 409958 - DNA, 148 bp, Homo sapiens; identical to SEQ ID NO: 267007
  chr14:95693650-95693798
  hypo

SEQ ID NO: 409959 - DNA, 301 bp, Homo sapiens; identical to SEQ ID NO: 318327
  chr14:95740116-95740417
  hypo

SEQ ID NO: 409960 - DNA, 148 bp, Homo sapiens; identical to SEQ ID NO: 267010
  chr14:95880712-95880860
  hypo

SEQ ID NO: 409961 - DNA, 274 bp, Homo sapiens; identical to SEQ ID NO: 290496
  chr14:95932315-95932589
  hypo

SEQ ID NO: 409962 - DNA, 35 bp, Homo sapiens; identical to SEQ ID NO: 215957
  chr14:96015607-96015642
  hypo

SEQ ID NO: 409963 - DNA, 202 bp, Homo sapiens; identical to SEQ ID NO: 215963
  chr14:96653271-96653473
  hypo

SEQ ID NO: 409964 - DNA, 186 bp, Homo sapiens; identical to SEQ ID NO: 267020
  chr14:96745877-96746063
  hypo

SEQ ID NO: 409965 - DNA, 65 bp, Homo sapiens; identical to SEQ ID NO: 267032
  chr14:97404572-97404637
  hypo

SEQ ID NO: 409966 - DNA, 33 bp, Homo sapiens; identical to SEQ ID NO: 267034
  chr14:97589660-97589693
  hypo

SEQ ID NO: 409967 - DNA, 214 bp, Homo sapiens; identical to SEQ ID NO: 267035
  chr14:99509012-99509226
  hypo

SEQ ID NO: 409968 - DNA, 330 bp, Homo sapiens; identical to SEQ ID NO: 267037
  chr14:99655545-99655875
  hypo

SEQ ID NO: 409969 - DNA, 97 bp, Homo sapiens; identical to SEQ ID NO: 267038
  chr14:99681714-99681811
  hypo

SEQ ID NO: 409970 - DNA, 77 bp, Homo sapiens; identical to SEQ ID NO: 215968
  chr14:99707131-99707208
  hypo

SEQ ID NO: 409971 - DNA, 225 bp, Homo sapiens; identical to SEQ ID NO: 267047
  chr14:99931509-99931734
  hypo

SEQ ID NO: 409972 - DNA, 241 bp, Homo sapiens; identical to SEQ ID NO: 267048
  chr14:99932772-99933013
  hypo

SEQ ID NO: 409973 - DNA, 567 bp, Homo sapiens; identical to SEQ ID NO: 267049
  chr14:99969303-99969870
  hypo

SEQ ID NO: 409974 - DNA, 61 bp, Homo sapiens; identical to SEQ ID NO: 215972
  chr14:99976343-99976404
  hypo

SEQ ID NO: 409975 - DNA, 81 bp, Homo sapiens; identical to SEQ ID NO: 267052
  chr14:99978205-99978286
  hypo

SEQ ID NO: 409976 - DNA, 643 bp, Homo sapiens; identical to SEQ ID NO: 389231
  chr14:100069898-100070541
  hypo

SEQ ID NO: 409977 - DNA, 420 bp, Homo sapiens; identical to SEQ ID NO: 224775
  chr14:100070591-100071011
  hypo

SEQ ID NO: 409978 - DNA, 240 bp, Homo sapiens; identical to SEQ ID NO: 224776
  chr14:100071337-100071577
  hypo

SEQ ID NO: 409979 - DNA, 177 bp, Homo sapiens; identical to SEQ ID NO: 267053
  chr14:100118139-100118316
  hypo

SEQ ID NO: 409980 - DNA, 149 bp, Homo sapiens; identical to SEQ ID NO: 267056
  chr14:100437167-100437316
  hypo

SEQ ID NO: 409981 - DNA, 248 bp, Homo sapiens; identical to SEQ ID NO: 290532
  chr14:100625926-100626174
  hypo

SEQ ID NO: 409982 - DNA, 64 bp, Homo sapiens; identical to SEQ ID NO: 125211
  chr14:100626295-100626359
  hypo

SEQ ID NO: 409983 - DNA, 87 bp, Homo sapiens; identical to SEQ ID NO: 215979
  chr14:100644135-100644222
  hypo

SEQ ID NO: 409984 - DNA, 228 bp, Homo sapiens; identical to SEQ ID NO: 267065
  chr14:100681486-100681714
  hypo

SEQ ID NO: 409985 - DNA, 97 bp, Homo sapiens; identical to SEQ ID NO: 267068
  chr14:100747814-100747911
  hypo

SEQ ID NO: 409986 - DNA, 103 bp, Homo sapiens; identical to SEQ ID NO: 267072
  chr14:100758850-100758953
  hypo

SEQ ID NO: 409987 - DNA, 402 bp, Homo sapiens; identical to SEQ ID NO: 290536
  chr14:100771908-100772310
  hypo

SEQ ID NO: 409988 - DNA, 244 bp, Homo sapiens; identical to SEQ ID NO: 267073
  chr14:100795242-100795486
  hypo

SEQ ID NO: 409989 - DNA, 126 bp, Homo sapiens; identical to SEQ ID NO: 267078
  chr14:100910095-100910221
  hypo

SEQ ID NO: 409990 - DNA, 161 bp, Homo sapiens; identical to SEQ ID NO: 267079
  chr14:100937837-100937998
  hypo

SEQ ID NO: 409991 - DNA, 67 bp, Homo sapiens; identical to SEQ ID NO: 267080
  chr14:100940878-100940945
  hypo

SEQ ID NO: 409992 - DNA, 42 bp, Homo sapiens; identical to SEQ ID NO: 267081
  chr14:100980664-100980706
  hypo

SEQ ID NO: 409993 - DNA, 193 bp, Homo sapiens; identical to SEQ ID NO: 267082
  chr14:100990019-100990212
  hypo

SEQ ID NO: 409994 - DNA, 1413 bp, Homo sapiens; identical to SEQ ID NO: 267083
  chr14:101003646-101005059
  hypo

SEQ ID NO: 409995 - DNA, 198 bp, Homo sapiens; identical to SEQ ID NO: 267084
  chr14:101005497-101005695
  hypo

SEQ ID NO: 409996 - DNA, 319 bp, Homo sapiens; identical to SEQ ID NO: 267085
  chr14:101060508-101060827
  hypo

SEQ ID NO: 409997 - DNA, 178 bp, Homo sapiens; identical to SEQ ID NO: 290542
  chr14:101192969-101193147
  hypo

SEQ ID NO: 409998 - DNA, 206 bp, Homo sapiens; identical to SEQ ID NO: 267095
  chr14:101377326-101377532
  hypo

SEQ ID NO: 409999 - DNA, 321 bp, Homo sapiens; identical to SEQ ID NO: 267097
  chr14:101491363-101491684
  hypo

SEQ ID NO: 410000 - DNA, 133 bp, Homo sapiens; identical to SEQ ID NO: 318430
  chr14:101506260-101506393
  hypo

SEQ ID NO: 410001 - DNA, 194 bp, Homo sapiens; identical to SEQ ID NO: 267100
  chr14:101515982-101516176
  hypo

SEQ ID NO: 410002 - DNA, 471 bp, Homo sapiens; identical to SEQ ID NO: 318432
  chr14:101531769-101532240
  hypo

SEQ ID NO: 410003 - DNA, 381 bp, Homo sapiens; identical to SEQ ID NO: 267102
  chr14:101569746-101570127
  hypo

SEQ ID NO: 410004 - DNA, 274 bp, Homo sapiens; identical to SEQ ID NO: 215997
  chr14:101579008-101579282
  hypo

SEQ ID NO: 410005 - DNA, 203 bp, Homo sapiens; identical to SEQ ID NO: 267106
  chr14:101640848-101641051
  hypo

SEQ ID NO: 410006 - DNA, 34 bp, Homo sapiens; identical to SEQ ID NO: 267110
  chr14:101727903-101727937
  hypo

SEQ ID NO: 410007 - DNA, 115 bp, Homo sapiens; identical to SEQ ID NO: 267111
  chr14:101834398-101834513
  hypo

SEQ ID NO: 410008 - DNA, 118 bp, Homo sapiens; identical to SEQ ID NO: 267114
  chr14:101994455-101994573
  hypo

SEQ ID NO: 410009 - DNA, 305 bp, Homo sapiens; identical to SEQ ID NO: 267116
  chr14:102053854-102054159
  hypo

SEQ ID NO: 410010 - DNA, 89 bp, Homo sapiens; identical to SEQ ID NO: 215999
  chr14:102093963-102094052
  hypo

SEQ ID NO: 410011 - DNA, 113 bp, Homo sapiens; identical to SEQ ID NO: 216000
  chr14:102094128-102094241
  hypo

SEQ ID NO: 410012 - DNA, 281 bp, Homo sapiens; identical to SEQ ID NO: 267119
  chr14:102175310-102175591
  hypo

SEQ ID NO: 410013 - DNA, 127 bp, Homo sapiens; identical to SEQ ID NO: 267120
  chr14:102186689-102186816
  hypo

SEQ ID NO: 410014 - DNA, 128 bp, Homo sapiens; identical to SEQ ID NO: 386592
  chr14:102230011-102230139
  hypo

SEQ ID NO: 410015 - DNA, 152 bp, Homo sapiens; identical to SEQ ID NO: 267122
  chr14:102239453-102239605
  hypo

SEQ ID NO: 410016 - DNA, 35 bp, Homo sapiens; identical to SEQ ID NO: 267123
  chr14:102286260-102286295
  hypo

SEQ ID NO: 410017 - DNA, 94 bp, Homo sapiens; identical to SEQ ID NO: 267125
  chr14:102302011-102302105
  hypo

SEQ ID NO: 410018 - DNA, 245 bp, Homo sapiens; identical to SEQ ID NO: 267127
  chr14:102307821-102308066
  hypo

SEQ ID NO: 410019 - DNA, 299 bp, Homo sapiens; identical to SEQ ID NO: 267128
  chr14:102325127-102325426
  hypo

SEQ ID NO: 410020 - DNA, 324 bp, Homo sapiens; identical to SEQ ID NO: 267129
  chr14:102330613-102330937
  hypo

SEQ ID NO: 410021 - DNA, 206 bp, Homo sapiens; identical to SEQ ID NO: 216003
  chr14:102343692-102343898
  hypo

SEQ ID NO: 410022 - DNA, 210 bp, Homo sapiens; identical to SEQ ID NO: 216006
  chr14:102360720-102360930
  hypo

SEQ ID NO: 410023 - DNA, 245 bp, Homo sapiens; identical to SEQ ID NO: 267135
  chr14:102361139-102361384
  hypo

SEQ ID NO: 410024 - DNA, 342 bp, Homo sapiens; identical to SEQ ID NO: 267137
  chr14:102391503-102391845
  hypo

SEQ ID NO: 410025 - DNA, 161 bp, Homo sapiens; identical to SEQ ID NO: 267140
  chr14:102398577-102398738
  hypo

SEQ ID NO: 410026 - DNA, 35 bp, Homo sapiens; identical to SEQ ID NO: 267144
  chr14:102450595-102450630
  hypo

SEQ ID NO: 410027 - DNA, 61 bp, Homo sapiens; identical to SEQ ID NO: 318485
  chr14:102530234-102530295
  hypo

SEQ ID NO: 410028 - DNA, 85 bp, Homo sapiens; identical to SEQ ID NO: 267154
  chr14:102592764-102592849
  hypo

SEQ ID NO: 410029 - DNA, 190 bp, Homo sapiens; identical to SEQ ID NO: 216013
  chr14:102635326-102635516
  hypo

SEQ ID NO: 410030 - DNA, 292 bp, Homo sapiens; identical to SEQ ID NO: 216014
  chr14:102650992-102651284
  hypo

SEQ ID NO: 410031 - DNA, 90 bp, Homo sapiens; identical to SEQ ID NO: 267157
  chr14:102668988-102669078
  hypo

SEQ ID NO: 410032 - DNA, 118 bp, Homo sapiens; identical to SEQ ID NO: 267158
  chr14:102680415-102680533
  hypo

SEQ ID NO: 410033 - DNA, 87 bp, Homo sapiens; identical to SEQ ID NO: 393390
  chr14:102681974-102682061
  hypo

SEQ ID NO: 410034 - DNA, 448 bp, Homo sapiens; identical to SEQ ID NO: 267162
  chr14:102695442-102695890
  hypo

SEQ ID NO: 410035 - DNA, 233 bp, Homo sapiens; identical to SEQ ID NO: 216018
  chr14:102793000-102793233
  hypo

SEQ ID NO: 410036 - DNA, 143 bp, Homo sapiens; identical to SEQ ID NO: 267165
  chr14:102901395-102901538
  hypo

SEQ ID NO: 410037 - DNA, 159 bp, Homo sapiens; identical to SEQ ID NO: 318498
  chr14:102909003-102909162
  hypo

SEQ ID NO: 410038 - DNA, 289 bp, Homo sapiens; identical to SEQ ID NO: 318499
  chr14:102909192-102909481
  hypo

SEQ ID NO: 410039 - DNA, 80 bp, Homo sapiens; identical to SEQ ID NO: 216019
  chr14:102931213-102931293
  hypo

SEQ ID NO: 410040 - DNA, 352 bp, Homo sapiens; identical to SEQ ID NO: 267171
  chr14:102961892-102962244
  hypo

SEQ ID NO: 410041 - DNA, 168 bp, Homo sapiens; identical to SEQ ID NO: 216021
  chr14:102966288-102966456
  hypo

SEQ ID NO: 410042 - DNA, 31 bp, Homo sapiens; identical to SEQ ID NO: 267178
  chr14:103055786-103055817
  hypo

SEQ ID NO: 410043 - DNA, 120 bp, Homo sapiens; identical to SEQ ID NO: 216026
  chr14:103144544-103144664
  hypo

SEQ ID NO: 410044 - DNA, 39 bp, Homo sapiens; identical to SEQ ID NO: 267182
  chr14:103193874-103193913
  hypo

SEQ ID NO: 410045 - DNA, 202 bp, Homo sapiens; identical to SEQ ID NO: 267183
  chr14:103215840-103216042
  hypo

SEQ ID NO: 410046 - DNA, 46 bp, Homo sapiens; identical to SEQ ID NO: 267185
  chr14:103242390-103242436
  hypo

SEQ ID NO: 410047 - DNA, 314 bp, Homo sapiens; identical to SEQ ID NO: 267186
  chr14:103242915-103243229
  hypo

SEQ ID NO: 410048 - DNA, 423 bp, Homo sapiens; identical to SEQ ID NO: 267189
  chr14:103363893-103364316
  hypo

SEQ ID NO: 410049 - DNA, 55 bp, Homo sapiens; identical to SEQ ID NO: 267190
  chr14:103366993-103367048
  hypo

SEQ ID NO: 410050 - DNA, 144 bp, Homo sapiens; identical to SEQ ID NO: 267192
  chr14:103391460-103391604
  hypo

SEQ ID NO: 410051 - DNA, 136 bp, Homo sapiens; identical to SEQ ID NO: 216032
  chr14:103407161-103407297
  hypo

SEQ ID NO: 410052 - DNA, 44 bp, Homo sapiens; identical to SEQ ID NO: 318531
  chr14:103416814-103416858
  hypo

SEQ ID NO: 410053 - DNA, 55 bp, Homo sapiens; identical to SEQ ID NO: 384547
  chr14:103430379-103430434
  hypo

SEQ ID NO: 410054 - DNA, 124 bp, Homo sapiens; identical to SEQ ID NO: 290568
  chr14:103430509-103430633
  hypo

SEQ ID NO: 410055 - DNA, 150 bp, Homo sapiens; identical to SEQ ID NO: 216040
  chr14:103442296-103442446
  hypo

SEQ ID NO: 410056 - DNA, 552 bp, Homo sapiens; identical to SEQ ID NO: 267207
  chr14:103453117-103453669
  hypo

SEQ ID NO: 410057 - DNA, 67 bp, Homo sapiens; identical to SEQ ID NO: 267211
  chr14:103470286-103470353
  hypo

SEQ ID NO: 410058 - DNA, 34 bp, Homo sapiens; identical to SEQ ID NO: 267214
  chr14:103525032-103525066
  hypo

SEQ ID NO: 410059 - DNA, 93 bp, Homo sapiens; identical to SEQ ID NO: 267215
  chr14:103525306-103525399
  hypo

SEQ ID NO: 410060 - DNA, 215 bp, Homo sapiens; identical to SEQ ID NO: 267216
  chr14:103538914-103539129
  hypo

SEQ ID NO: 410061 - DNA, 77 bp, Homo sapiens; identical to SEQ ID NO: 203771
  chr14:103541957-103542034
  hypo

SEQ ID NO: 410062 - DNA, 33 bp, Homo sapiens; identical to SEQ ID NO: 267219
  chr14:103583158-103583191
  hypo

SEQ ID NO: 410063 - DNA, 219 bp, Homo sapiens; identical to SEQ ID NO: 290575
  chr14:103593755-103593974
  hypo

SEQ ID NO: 410064 - DNA, 289 bp, Homo sapiens; identical to SEQ ID NO: 290576
  chr14:103594004-103594293
  hypo

SEQ ID NO: 410065 - DNA, 72 bp, Homo sapiens; identical to SEQ ID NO: 267223
  chr14:103697779-103697851
  hypo

SEQ ID NO: 410066 - DNA, 158 bp, Homo sapiens; identical to SEQ ID NO: 267228
  chr14:103966175-103966333
  hypo

SEQ ID NO: 410067 - DNA, 439 bp, Homo sapiens; identical to SEQ ID NO: 267231
  chr14:103981303-103981742
  hypo

SEQ ID NO: 410068 - DNA, 284 bp, Homo sapiens; identical to SEQ ID NO: 267235
  chr14:104012458-104012742
  hypo

SEQ ID NO: 410069 - DNA, 454 bp, Homo sapiens; identical to SEQ ID NO: 267236
  chr14:104017444-104017898
  hypo

SEQ ID NO: 410070 - DNA, 119 bp, Homo sapiens; identical to SEQ ID NO: 216060
  chr14:104061735-104061854
  hypo

SEQ ID NO: 410071 - DNA, 119 bp, Homo sapiens; identical to SEQ ID NO: 290588
  chr14:104094604-104094723
  hypo

SEQ ID NO: 410072 - DNA, 119 bp, Homo sapiens; identical to SEQ ID NO: 318582
  chr14:104121158-104121277
  hypo

SEQ ID NO: 410073 - DNA, 114 bp, Homo sapiens; identical to SEQ ID NO: 216061
  chr14:104152224-104152338
  hypo

SEQ ID NO: 410074 - DNA, 131 bp, Homo sapiens; identical to SEQ ID NO: 267249
  chr14:104188353-104188484
  hypo

SEQ ID NO: 410075 - DNA, 152 bp, Homo sapiens; identical to SEQ ID NO: 267252
  chr14:104200030-104200182
  hypo

SEQ ID NO: 410076 - DNA, 121 bp, Homo sapiens; identical to SEQ ID NO: 216070
  chr14:104204087-104204208
  hypo

SEQ ID NO: 410077 - DNA, 65 bp, Homo sapiens; identical to SEQ ID NO: 267255
  chr14:104222924-104222989
  hypo

SEQ ID NO: 410078 - DNA, 45 bp, Homo sapiens; identical to SEQ ID NO: 216072
  chr14:104335355-104335400
  hypo

SEQ ID NO: 410079 - DNA, 202 bp, Homo sapiens; identical to SEQ ID NO: 216073
  chr14:104335677-104335879
  hypo

SEQ ID NO: 410080 - DNA, 63 bp, Homo sapiens; identical to SEQ ID NO: 216078
  chr14:104548475-104548538
  hypo

SEQ ID NO: 410081 - DNA, 231 bp, Homo sapiens; identical to SEQ ID NO: 267264
  chr14:104570011-104570242
  hypo

SEQ ID NO: 410082 - DNA, 111 bp, Homo sapiens; identical to SEQ ID NO: 267265
  chr14:104571681-104571792
  hypo

SEQ ID NO: 410083 - DNA, 112 bp, Homo sapiens; identical to SEQ ID NO: 267266
  chr14:104600535-104600647
  hypo

SEQ ID NO: 410084 - DNA, 35 bp, Homo sapiens; identical to SEQ ID NO: 267270
  chr14:104627959-104627994
  hypo

SEQ ID NO: 410085 - DNA, 133 bp, Homo sapiens; identical to SEQ ID NO: 267285
  chr14:104718711-104718844
  hypo

SEQ ID NO: 410086 - DNA, 205 bp, Homo sapiens; identical to SEQ ID NO: 318630
  chr14:104770380-104770585
  hypo

SEQ ID NO: 410087 - DNA, 108 bp, Homo sapiens; identical to SEQ ID NO: 267291
  chr14:104812558-104812666
  hypo

SEQ ID NO: 410088 - DNA, 36 bp, Homo sapiens; identical to SEQ ID NO: 267293
  chr14:104813345-104813381
  hypo

SEQ ID NO: 410089 - DNA, 255 bp, Homo sapiens; identical to SEQ ID NO: 267295
  chr14:104839337-104839592
  hypo

SEQ ID NO: 410090 - DNA, 46 bp, Homo sapiens; identical to SEQ ID NO: 216086
  chr14:104854591-104854637
  hypo

SEQ ID NO: 410091 - DNA, 185 bp, Homo sapiens; identical to SEQ ID NO: 216087
  chr14:104854673-104854858
  hypo

SEQ ID NO: 410092 - DNA, 271 bp, Homo sapiens; identical to SEQ ID NO: 216088
  chr14:104895986-104896257
  hypo

SEQ ID NO: 410093 - DNA, 85 bp, Homo sapiens; identical to SEQ ID NO: 216089
  chr14:105102963-105103048
  hypo

SEQ ID NO: 410094 - DNA, 67 bp, Homo sapiens; identical to SEQ ID NO: 267303
  chr14:105119951-105120018
  hypo

SEQ ID NO: 410095 - DNA, 114 bp, Homo sapiens; identical to SEQ ID NO: 216091
  chr14:105153068-105153182
  hypo

SEQ ID NO: 410096 - DNA, 122 bp, Homo sapiens; identical to SEQ ID NO: 318647
  chr14:105157363-105157485
  hypo

SEQ ID NO: 410097 - DNA, 64 bp, Homo sapiens; identical to SEQ ID NO: 318648
  chr14:105174394-105174458
  hypo

SEQ ID NO: 410098 - DNA, 161 bp, Homo sapiens; identical to SEQ ID NO: 267309
  chr14:105182343-105182504
  hypo

SEQ ID NO: 410099 - DNA, 337 bp, Homo sapiens; identical to SEQ ID NO: 290602
  chr14:105195466-105195803
  hypo

SEQ ID NO: 410100 - DNA, 44 bp, Homo sapiens; identical to SEQ ID NO: 216096
  chr14:105223769-105223813
  hypo

SEQ ID NO: 410101 - DNA, 108 bp, Homo sapiens; identical to SEQ ID NO: 267317
  chr14:105225798-105225906
  hypo

SEQ ID NO: 410102 - DNA, 166 bp, Homo sapiens; identical to SEQ ID NO: 267318
  chr14:105226172-105226338
  hypo

SEQ ID NO: 410103 - DNA, 94 bp, Homo sapiens; identical to SEQ ID NO: 216097
  chr14:105236575-105236669
  hypo

SEQ ID NO: 410104 - DNA, 58 bp, Homo sapiens; identical to SEQ ID NO: 216099
  chr14:105245408-105245466
  hypo

SEQ ID NO: 410105 - DNA, 180 bp, Homo sapiens; identical to SEQ ID NO: 224803
  chr14:105269059-105269239
  hypo

SEQ ID NO: 410106 - DNA, 188 bp, Homo sapiens; identical to SEQ ID NO: 267329
  chr14:105335727-105335915
  hypo

SEQ ID NO: 410107 - DNA, 189 bp, Homo sapiens; identical to SEQ ID NO: 267330
  chr14:105347539-105347728
  hypo

SEQ ID NO: 410108 - DNA, 62 bp, Homo sapiens; identical to SEQ ID NO: 267334
  chr14:105351133-105351195
  hypo

SEQ ID NO: 410109 - DNA, 240 bp, Homo sapiens; identical to SEQ ID NO: 267335
  chr14:105352620-105352860
  hypo

SEQ ID NO: 410110 - DNA, 125 bp, Homo sapiens; identical to SEQ ID NO: 267337
  chr14:105362737-105362862
  hypo

SEQ ID NO: 410111 - DNA, 54 bp, Homo sapiens; identical to SEQ ID NO: 267339
  chr14:105464945-105464999
  hypo

SEQ ID NO: 410112 - DNA, 300 bp, Homo sapiens; identical to SEQ ID NO: 216106
  chr14:105469615-105469915
  hypo

SEQ ID NO: 410113 - DNA, 50 bp, Homo sapiens; identical to SEQ ID NO: 216108
  chr14:105533295-105533345
  hypo

SEQ ID NO: 410114 - DNA, 173 bp, Homo sapiens; identical to SEQ ID NO: 216109
  chr14:105538393-105538566
  hypo

SEQ ID NO: 410115 - DNA, 45 bp, Homo sapiens; identical to SEQ ID NO: 267350
  chr14:105610437-105610482
  hypo

SEQ ID NO: 410116 - DNA, 220 bp, Homo sapiens; identical to SEQ ID NO: 216111
  chr14:105612116-105612336
  hypo

SEQ ID NO: 410117 - DNA, 324 bp, Homo sapiens; identical to SEQ ID NO: 267355
  chr14:105621962-105622286
  hypo

SEQ ID NO: 410118 - DNA, 57 bp, Homo sapiens; identical to SEQ ID NO: 216113
  chr14:105639401-105639458
  hypo

SEQ ID NO: 410119 - DNA, 155 bp, Homo sapiens; identical to SEQ ID NO: 290617
  chr14:105647609-105647764
  hypo

SEQ ID NO: 410120 - DNA, 270 bp, Homo sapiens; identical to SEQ ID NO: 267360
  chr14:105690180-105690450
  hypo

SEQ ID NO: 410121 - DNA, 180 bp, Homo sapiens; identical to SEQ ID NO: 267362
  chr14:105717870-105718050
  hypo

SEQ ID NO: 410122 - DNA, 202 bp, Homo sapiens; identical to SEQ ID NO: 224811
  chr15:20478123-20478325
  hypo

SEQ ID NO: 410123 - DNA, 148 bp, Homo sapiens; identical to SEQ ID NO: 267369
  chr15:22803359-22803507
  hypo

SEQ ID NO: 410124 - DNA, 60 bp, Homo sapiens; identical to SEQ ID NO: 267371
  chr15:22920760-22920820
  hypo

SEQ ID NO: 410125 - DNA, 52 bp, Homo sapiens; identical to SEQ ID NO: 267376
  chr15:22940780-22940832
  hypo

SEQ ID NO: 410126 - DNA, 86 bp, Homo sapiens; identical to SEQ ID NO: 216122
  chr15:22945063-22945149
  hypo

SEQ ID NO: 410127 - DNA, 142 bp, Homo sapiens; identical to SEQ ID NO: 216123
  chr15:22966142-22966284
  hypo

SEQ ID NO: 410128 - DNA, 116 bp, Homo sapiens; identical to SEQ ID NO: 216124
  chr15:22968266-22968382
  hypo

SEQ ID NO: 410129 - DNA, 103 bp, Homo sapiens; identical to SEQ ID NO: 216126
  chr15:22979738-22979841
  hypo

SEQ ID NO: 410130 - DNA, 35 bp, Homo sapiens; identical to SEQ ID NO: 216127
  chr15:23077086-23077121
  hypo

SEQ ID NO: 410131 - DNA, 353 bp, Homo sapiens; identical to SEQ ID NO: 318736
  chr15:23084862-23085215
  hypo

SEQ ID NO: 410132 - DNA, 229 bp, Homo sapiens; identical to SEQ ID NO: 267387
  chr15:25863450-25863679
  hypo

SEQ ID NO: 410133 - DNA, 152 bp, Homo sapiens; identical to SEQ ID NO: 267388
  chr15:25918277-25918429
  hypo

SEQ ID NO: 410134 - DNA, 301 bp, Homo sapiens; identical to SEQ ID NO: 216129
  chr15:25963361-25963662
  hypo

SEQ ID NO: 410135 - DNA, 274 bp, Homo sapiens; identical to SEQ ID NO: 267396
  chr15:27959332-27959606
  hypo

SEQ ID NO: 410136 - DNA, 94 bp, Homo sapiens; identical to SEQ ID NO: 267397
  chr15:27959726-27959820
  hypo

SEQ ID NO: 410137 - DNA, 125 bp, Homo sapiens; identical to SEQ ID NO: 216132
  chr15:28356786-28356911
  hypo

SEQ ID NO: 410138 - DNA, 149 bp, Homo sapiens; identical to SEQ ID NO: 267399
  chr15:28358254-28358403
  hypo

SEQ ID NO: 410139 - DNA, 92 bp, Homo sapiens; identical to SEQ ID NO: 267401
  chr15:28377832-28377924
  hypo

SEQ ID NO: 410140 - DNA, 50 bp, Homo sapiens; identical to SEQ ID NO: 318752
  chr15:28389777-28389827
  hypo

SEQ ID NO: 410141 - DNA, 65 bp, Homo sapiens; identical to SEQ ID NO: 216133
  chr15:28390033-28390098
  hypo

SEQ ID NO: 410142 - DNA, 86 bp, Homo sapiens; identical to SEQ ID NO: 216136
  chr15:28900534-28900620
  hypo

SEQ ID NO: 410143 - DNA, 152 bp, Homo sapiens; identical to SEQ ID NO: 216137
  chr15:29101155-29101307
  hypo

SEQ ID NO: 410144 - DNA, 86 bp, Homo sapiens; identical to SEQ ID NO: 216140
  chr15:29111213-29111299
  hypo

SEQ ID NO: 410145 - DNA, 502 bp, Homo sapiens; identical to SEQ ID NO: 267412
  chr15:29140040-29140542
  hypo

SEQ ID NO: 410146 - DNA, 92 bp, Homo sapiens; identical to SEQ ID NO: 267415
  chr15:29146201-29146293
  hypo

SEQ ID NO: 410147 - DNA, 350 bp, Homo sapiens; identical to SEQ ID NO: 216141
  chr15:29236505-29236855
  hypo

SEQ ID NO: 410148 - DNA, 1187 bp, Homo sapiens; identical to SEQ ID NO: 267419
  chr15:29345750-29346937
  hypo

SEQ ID NO: 410149 - DNA, 157 bp, Homo sapiens; identical to SEQ ID NO: 267420
  chr15:29357222-29357379
  hypo

SEQ ID NO: 410150 - DNA, 427 bp, Homo sapiens; identical to SEQ ID NO: 216144
  chr15:29410106-29410533
  hypo

SEQ ID NO: 410151 - DNA, 187 bp, Homo sapiens; identical to SEQ ID NO: 267426
  chr15:29411084-29411271
  hypo

SEQ ID NO: 410152 - DNA, 61 bp, Homo sapiens
  chr15:29418534-29418595
  hypo
tgcacctgtgagcccatgccaggatcctctggagacacatggccagggggaagggcaggtt

SEQ ID NO: 410153 - DNA, 64 bp, Homo sapiens; identical to SEQ ID NO: 216151
  chr15:29448969-29449033
  hypo

SEQ ID NO: 410154 - DNA, 65 bp, Homo sapiens; identical to SEQ ID NO: 267434
  chr15:29487547-29487612
  hypo

SEQ ID NO: 410155 - DNA, 78 bp, Homo sapiens; identical to SEQ ID NO: 267435
  chr15:29697962-29698040
  hypo

SEQ ID NO: 410156 - DNA, 72 bp, Homo sapiens; identical to SEQ ID NO: 267436
  chr15:30022825-30022897
  hypo

SEQ ID NO: 410157 - DNA, 42 bp, Homo sapiens; identical to SEQ ID NO: 267438
  chr15:30333821-30333863
  hypo

SEQ ID NO: 410158 - DNA, 157 bp, Homo sapiens; identical to SEQ ID NO: 216160
  chr15:31395008-31395165
  hypo

SEQ ID NO: 410159 - DNA, 75 bp, Homo sapiens; identical to SEQ ID NO: 267449
  chr15:31490444-31490519
  hypo

SEQ ID NO: 410160 - DNA, 38 bp, Homo sapiens; identical to SEQ ID NO: 267456
  chr15:31611580-31611618
  hypo

SEQ ID NO: 410161 - DNA, 457 bp, Homo sapiens; identical to SEQ ID NO: 267462
  chr15:31776581-31777038
  hypo

SEQ ID NO: 410162 - DNA, 133 bp, Homo sapiens; identical to SEQ ID NO: 267466
  chr15:33359132-33359265
  hypo

SEQ ID NO: 410163 - DNA, 99 bp, Homo sapiens; identical to SEQ ID NO: 389247
  chr15:33603879-33603978
  hypo

SEQ ID NO: 410164 - DNA, 149 bp, Homo sapiens; identical to SEQ ID NO: 267472
  chr15:33969176-33969325
  hypo

SEQ ID NO: 410165 - DNA, 98 bp, Homo sapiens; identical to SEQ ID NO: 267473
  chr15:34142220-34142318
  hypo

SEQ ID NO: 410166 - DNA, 120 bp, Homo sapiens; identical to SEQ ID NO: 267474
  chr15:34322808-34322928
  hypo

SEQ ID NO: 410167 - DNA, 44 bp, Homo sapiens; identical to SEQ ID NO: 267478
  chr15:34524063-34524107
  hypo

SEQ ID NO: 410168 - DNA, 152 bp, Homo sapiens; identical to SEQ ID NO: 267480
  chr15:34630947-34631099
  hypo

SEQ ID NO: 410169 - DNA, 146 bp, Homo sapiens; identical to SEQ ID NO: 267489
  chr15:36870094-36870240
  hypo

SEQ ID NO: 410170 - DNA, 679 bp, Homo sapiens; identical to SEQ ID NO: 224830
  chr15:37393563-37394242
  hypo

SEQ ID NO: 410171 - DNA, 84 bp, Homo sapiens; identical to SEQ ID NO: 216180
  chr15:39415395-39415479
  hypo

SEQ ID NO: 410172 - DNA, 217 bp, Homo sapiens; identical to SEQ ID NO: 267493
  chr15:39703028-39703245
  hypo

SEQ ID NO: 410173 - DNA, 218 bp, Homo sapiens; identical to SEQ ID NO: 267494
  chr15:39742868-39743086
  hypo

SEQ ID NO: 410174 - DNA, 158 bp, Homo sapiens; identical to SEQ ID NO: 216182
  chr15:39881427-39881585
  hypo

SEQ ID NO: 410175 - DNA, 344 bp, Homo sapiens; identical to SEQ ID NO: 203835
  chr15:40074971-40075315
  hypo

SEQ ID NO: 410176 - DNA, 148 bp, Homo sapiens; identical to SEQ ID NO: 237856
  chr15:40225953-40226101
  hypo

SEQ ID NO: 410177 - DNA, 118 bp, Homo sapiens; identical to SEQ ID NO: 318869
  chr15:40368064-40368182
  hypo

SEQ ID NO: 410178 - DNA, 85 bp, Homo sapiens; identical to SEQ ID NO: 267507
  chr15:40558266-40558351
  hypo

SEQ ID NO: 410179 - DNA, 36 bp, Homo sapiens; identical to SEQ ID NO: 203836
  chr15:40559555-40559591
  hypo

SEQ ID NO: 410180 - DNA, 215 bp, Homo sapiens; identical to SEQ ID NO: 267509
  chr15:40645375-40645590
  hypo

SEQ ID NO: 410181 - DNA, 103 bp, Homo sapiens; identical to SEQ ID NO: 267511
  chr15:40701402-40701505
  hypo

SEQ ID NO: 410182 - DNA, 43 bp, Homo sapiens; identical to SEQ ID NO: 267512
  chr15:40701565-40701608
  hypo

SEQ ID NO: 410183 - DNA, 189 bp, Homo sapiens; identical to SEQ ID NO: 267513
  chr15:40716012-40716201
  hypo

SEQ ID NO: 410184 - DNA, 33 bp, Homo sapiens; identical to SEQ ID NO: 267514
  chr15:40766007-40766040
  hypo

SEQ ID NO: 410185 - DNA, 150 bp, Homo sapiens; identical to SEQ ID NO: 216194
  chr15:41082365-41082515
  hypo

SEQ ID NO: 410186 - DNA, 172 bp, Homo sapiens; identical to SEQ ID NO: 216197
  chr15:41121306-41121478
  hypo

SEQ ID NO: 410187 - DNA, 156 bp, Homo sapiens; identical to SEQ ID NO: 224840
  chr15:41136285-41136441
  hypo

SEQ ID NO: 410188 - DNA, 37 bp, Homo sapiens; identical to SEQ ID NO: 267526
  chr15:41235297-41235334
  hypo

SEQ ID NO: 410189 - DNA, 150 bp, Homo sapiens; identical to SEQ ID NO: 177044
  chr15:41316676-41316826
  hypo

SEQ ID NO: 410190 - DNA, 91 bp, Homo sapiens; identical to SEQ ID NO: 216202
  chr15:41732307-41732398
  hypo

SEQ ID NO: 410191 - DNA, 109 bp, Homo sapiens; identical to SEQ ID NO: 267535
  chr15:41842774-41842883
  hypo

SEQ ID NO: 410192 - DNA, 200 bp, Homo sapiens; identical to SEQ ID NO: 224842
  chr15:42112223-42112423
  hypo

SEQ ID NO: 410193 - DNA, 243 bp, Homo sapiens; identical to SEQ ID NO: 267538
  chr15:42147780-42148023
  hypo

SEQ ID NO: 410194 - DNA, 120 bp, Homo sapiens; identical to SEQ ID NO: 267539
  chr15:42151063-42151183
  hypo

SEQ ID NO: 410195 - DNA, 55 bp, Homo sapiens; identical to SEQ ID NO: 216205
  chr15:42160236-42160291
  hypo

SEQ ID NO: 410196 - DNA, 71 bp, Homo sapiens; identical to SEQ ID NO: 216206
  chr15:42167406-42167477
  hypo

SEQ ID NO: 410197 - DNA, 174 bp, Homo sapiens; identical to SEQ ID NO: 267545
  chr15:42171430-42171604
  hypo

SEQ ID NO: 410198 - DNA, 168 bp, Homo sapiens; identical to SEQ ID NO: 267546
  chr15:42185523-42185691
  hypo

SEQ ID NO: 410199 - DNA, 101 bp, Homo sapiens; identical to SEQ ID NO: 267548
  chr15:42211495-42211596
  hypo

SEQ ID NO: 410200 - DNA, 163 bp, Homo sapiens; identical to SEQ ID NO: 267550
  chr15:42232298-42232461
  hypo

SEQ ID NO: 410201 - DNA, 174 bp, Homo sapiens; identical to SEQ ID NO: 267552
  chr15:42284449-42284623
  hypo

SEQ ID NO: 410202 - DNA, 99 bp, Homo sapiens; identical to SEQ ID NO: 267554
  chr15:42350764-42350863
  hypo

SEQ ID NO: 410203 - DNA, 110 bp, Homo sapiens; identical to SEQ ID NO: 216208
  chr15:42362997-42363107
  hypo

SEQ ID NO: 410204 - DNA, 64 bp, Homo sapiens; identical to SEQ ID NO: 267557
  chr15:42363982-42364046
  hypo

SEQ ID NO: 410205 - DNA, 44 bp, Homo sapiens; identical to SEQ ID NO: 216209
  chr15:42388224-42388268
  hypo

SEQ ID NO: 410206 - DNA, 192 bp, Homo sapiens; identical to SEQ ID NO: 216210
  chr15:42434610-42434802
  hypo

SEQ ID NO: 410207 - DNA, 183 bp, Homo sapiens; identical to SEQ ID NO: 267560
  chr15:42438905-42439088
  hypo

SEQ ID NO: 410208 - DNA, 158 bp, Homo sapiens; identical to SEQ ID NO: 267561
  chr15:42446543-42446701
  hypo

SEQ ID NO: 410209 - DNA, 76 bp, Homo sapiens; identical to SEQ ID NO: 267562
  chr15:42446969-42447045
  hypo

SEQ ID NO: 410210 - DNA, 199 bp, Homo sapiens; identical to SEQ ID NO: 318938
  chr15:42447819-42448018
  hypo

SEQ ID NO: 410211 - DNA, 119 bp, Homo sapiens; identical to SEQ ID NO: 216212
  chr15:42452409-42452528
  hypo

SEQ ID NO: 410212 - DNA, 57 bp, Homo sapiens; identical to SEQ ID NO: 267566
  chr15:42470689-42470746
  hypo

SEQ ID NO: 410213 - DNA, 34 bp, Homo sapiens; identical to SEQ ID NO: 216213
  chr15:42562652-42562686
  hypo

SEQ ID NO: 410214 - DNA, 193 bp, Homo sapiens; identical to SEQ ID NO: 267568
  chr15:42644703-42644896
  hypo

SEQ ID NO: 410215 - DNA, 68 bp, Homo sapiens; identical to SEQ ID NO: 267571
  chr15:42696332-42696400
  hypo

SEQ ID NO: 410216 - DNA, 180 bp, Homo sapiens; identical to SEQ ID NO: 267572
  chr15:42711709-42711889
  hypo

SEQ ID NO: 410217 - DNA, 69 bp, Homo sapiens; identical to SEQ ID NO: 267573
  chr15:42742089-42742158
  hypo

SEQ ID NO: 410218 - DNA, 72 bp, Homo sapiens; identical to SEQ ID NO: 318948
  chr15:42748435-42748507
  hypo

SEQ ID NO: 410219 - DNA, 40 bp, Homo sapiens; identical to SEQ ID NO: 267576
  chr15:42806617-42806657
  hypo

SEQ ID NO: 410220 - DNA, 33 bp, Homo sapiens; identical to SEQ ID NO: 267580
  chr15:43124802-43124835
  hypo

SEQ ID NO: 410221 - DNA, 92 bp, Homo sapiens; identical to SEQ ID NO: 267581
  chr15:43124895-43124987
  hypo

SEQ ID NO: 410222 - DNA, 192 bp, Homo sapiens; identical to SEQ ID NO: 267582
  chr15:43300433-43300625
  hypo

SEQ ID NO: 410223 - DNA, 176 bp, Homo sapiens; identical to SEQ ID NO: 318958
  chr15:43527646-43527822
  hypo

SEQ ID NO: 410224 - DNA, 50 bp, Homo sapiens; identical to SEQ ID NO: 267586
  chr15:43574742-43574792
  hypo

SEQ ID NO: 410225 - DNA, 96 bp, Homo sapiens; identical to SEQ ID NO: 267588
  chr15:43610151-43610247
  hypo

SEQ ID NO: 410226 - DNA, 195 bp, Homo sapiens; identical to SEQ ID NO: 267590
  chr15:43820127-43820322
  hypo

SEQ ID NO: 410227 - DNA, 67 bp, Homo sapiens; identical to SEQ ID NO: 267591
  chr15:43941020-43941087
  hypo

SEQ ID NO: 410228 - DNA, 250 bp, Homo sapiens; identical to SEQ ID NO: 267596
  chr15:44105318-44105568
  hypo

SEQ ID NO: 410229 - DNA, 42 bp, Homo sapiens; identical to SEQ ID NO: 267597
  chr15:44117884-44117926
  hypo

SEQ ID NO: 410230 - DNA, 37 bp, Homo sapiens; identical to SEQ ID NO: 267600
  chr15:44823850-44823887
  hypo

SEQ ID NO: 410231 - DNA, 37 bp, Homo sapiens; identical to SEQ ID NO: 267602
  chr15:45391480-45391517
  hypo

SEQ ID NO: 410232 - DNA, 31 bp, Homo sapiens; identical to SEQ ID NO: 267608
  chr15:45450627-45450658
  hypo

SEQ ID NO: 410233 - DNA, 56 bp, Homo sapiens; identical to SEQ ID NO: 267611
  chr15:45742670-45742726
  hypo

SEQ ID NO: 410234 - DNA, 61 bp, Homo sapiens; identical to SEQ ID NO: 267612
  chr15:45742970-45743031
  hypo

SEQ ID NO: 410235 - DNA, 120 bp, Homo sapiens; identical to SEQ ID NO: 267613
  chr15:45809769-45809889
  hypo

SEQ ID NO: 410236 - DNA, 194 bp, Homo sapiens; identical to SEQ ID NO: 267617
  chr15:48707764-48707958
  hypo

SEQ ID NO: 410237 - DNA, 137 bp, Homo sapiens; identical to SEQ ID NO: 267619
  chr15:49411763-49411900
  hypo

SEQ ID NO: 410238 - DNA, 93 bp, Homo sapiens; identical to SEQ ID NO: 267623
  chr15:50158729-50158822
  hypo

SEQ ID NO: 410239 - DNA, 37 bp, Homo sapiens; identical to SEQ ID NO: 216231
  chr15:51016480-51016517
  hypo

SEQ ID NO: 410240 - DNA, 58 bp, Homo sapiens; identical to SEQ ID NO: 216232
  chr15:51176888-51176946
  hypo

SEQ ID NO: 410241 - DNA, 120 bp, Homo sapiens; identical to SEQ ID NO: 267627
  chr15:51182345-51182465
  hypo

SEQ ID NO: 410242 - DNA, 115 bp, Homo sapiens; identical to SEQ ID NO: 290807
  chr15:51633851-51633966
  hypo

SEQ ID NO: 410243 - DNA, 153 bp, Homo sapiens; identical to SEQ ID NO: 290808
  chr15:51634175-51634328
  hypo

SEQ ID NO: 410244 - DNA, 197 bp, Homo sapiens; identical to SEQ ID NO: 267630
  chr15:51659607-51659804
  hypo

SEQ ID NO: 410245 - DNA, 95 bp, Homo sapiens; identical to SEQ ID NO: 267634
  chr15:52310149-52310244
  hypo

SEQ ID NO: 410246 - DNA, 510 bp, Homo sapiens; identical to SEQ ID NO: 389272
  chr15:52820415-52820925
  hypo

SEQ ID NO: 410247 - DNA, 31 bp, Homo sapiens; identical to SEQ ID NO: 216237
  chr15:52968138-52968169
  hypo

SEQ ID NO: 410248 - DNA, 35 bp, Homo sapiens; identical to SEQ ID NO: 267648
  chr15:55893171-55893206
  hypo

SEQ ID NO: 410249 - DNA, 79 bp, Homo sapiens; identical to SEQ ID NO: 290832
  chr15:56035510-56035589
  hypo

SEQ ID NO: 410250 - DNA, 82 bp, Homo sapiens; identical to SEQ ID NO: 125767
  chr15:56035677-56035759
  hypo

SEQ ID NO: 410251 - DNA, 184 bp, Homo sapiens; identical to SEQ ID NO: 267651
  chr15:56140361-56140545
  hypo

SEQ ID NO: 410252 - DNA, 87 bp, Homo sapiens; identical to SEQ ID NO: 216241
  chr15:56170930-56171017
  hypo

SEQ ID NO: 410253 - DNA, 36 bp, Homo sapiens; identical to SEQ ID NO: 267655
  chr15:57209353-57209389
  hypo

SEQ ID NO: 410254 - DNA, 340 bp, Homo sapiens; identical to SEQ ID NO: 224859
  chr15:57210212-57210552
  hypo

SEQ ID NO: 410255 - DNA, 145 bp, Homo sapiens; identical to SEQ ID NO: 267658
  chr15:57614726-57614871
  hypo

SEQ ID NO: 410256 - DNA, 257 bp, Homo sapiens; identical to SEQ ID NO: 267660
  chr15:57620372-57620629
  hypo

SEQ ID NO: 410257 - DNA, 184 bp, Homo sapiens; identical to SEQ ID NO: 267661
  chr15:57731150-57731334
  hypo

SEQ ID NO: 410258 - DNA, 226 bp, Homo sapiens; identical to SEQ ID NO: 267665
  chr15:58001325-58001551
  hypo

SEQ ID NO: 410259 - DNA, 166 bp, Homo sapiens; identical to SEQ ID NO: 267667
  chr15:58761931-58762097
  hypo

SEQ ID NO: 410260 - DNA, 37 bp, Homo sapiens; identical to SEQ ID NO: 216250
  chr15:59158760-59158797
  hypo

SEQ ID NO: 410261 - DNA, 213 bp, Homo sapiens; identical to SEQ ID NO: 267672
  chr15:59243451-59243664
  hypo

SEQ ID NO: 410262 - DNA, 40 bp, Homo sapiens; identical to SEQ ID NO: 267673
  chr15:59291804-59291844
  hypo

SEQ ID NO: 410263 - DNA, 61 bp, Homo sapiens; identical to SEQ ID NO: 267674
  chr15:59450930-59450991
  hypo

SEQ ID NO: 410264 - DNA, 102 bp, Homo sapiens; identical to SEQ ID NO: 267679
  chr15:59561665-59561767
  hypo

SEQ ID NO: 410265 - DNA, 86 bp, Homo sapiens; identical to SEQ ID NO: 216252
  chr15:59580024-59580110
  hypo

SEQ ID NO: 410266 - DNA, 164 bp, Homo sapiens; identical to SEQ ID NO: 216255
  chr15:59685907-59686071
  hypo

SEQ ID NO: 410267 - DNA, 92 bp, Homo sapiens; identical to SEQ ID NO: 267687
  chr15:60680001-60680093
  hypo

SEQ ID NO: 410268 - DNA, 196 bp, Homo sapiens; identical to SEQ ID NO: 267689
  chr15:60865562-60865758
  hypo

SEQ ID NO: 410269 - DNA, 52 bp, Homo sapiens; identical to SEQ ID NO: 267690
  chr15:61012492-61012544
  hypo

SEQ ID NO: 410270 - DNA, 226 bp, Homo sapiens; identical to SEQ ID NO: 267691
  chr15:61231724-61231950
  hypo

SEQ ID NO: 410271 - DNA, 93 bp, Homo sapiens; identical to SEQ ID NO: 267694
  chr15:61948808-61948901
  hypo

SEQ ID NO: 410272 - DNA, 97 bp, Homo sapiens; identical to SEQ ID NO: 203912
  chr15:62456139-62456236
  hypo

SEQ ID NO: 410273 - DNA, 204 bp, Homo sapiens; identical to SEQ ID NO: 389283
  chr15:62456395-62456599
  hypo

SEQ ID NO: 410274 - DNA, 72 bp, Homo sapiens; identical to SEQ ID NO: 267696
  chr15:62591901-62591973
  hypo

SEQ ID NO: 410275 - DNA, 217 bp, Homo sapiens; identical to SEQ ID NO: 267698
  chr15:62750295-62750512
  hypo

SEQ ID NO: 410276 - DNA, 45 bp, Homo sapiens; identical to SEQ ID NO: 267699
  chr15:62752750-62752795
  hypo

SEQ ID NO: 410277 - DNA, 41 bp, Homo sapiens; identical to SEQ ID NO: 267700
  chr15:62753414-62753455
  hypo

SEQ ID NO: 410278 - DNA, 99 bp, Homo sapiens; identical to SEQ ID NO: 216266
  chr15:62776552-62776651
  hypo

SEQ ID NO: 410279 - DNA, 152 bp, Homo sapiens; identical to SEQ ID NO: 267704
  chr15:62779386-62779538
  hypo

SEQ ID NO: 410280 - DNA, 32 bp, Homo sapiens; identical to SEQ ID NO: 216268
  chr15:62791806-62791838
  hypo

SEQ ID NO: 410281 - DNA, 76 bp, Homo sapiens; identical to SEQ ID NO: 267708
  chr15:62810501-62810577
  hypo

SEQ ID NO: 410282 - DNA, 73 bp, Homo sapiens; identical to SEQ ID NO: 216271
  chr15:62828095-62828168
  hypo

SEQ ID NO: 410283 - DNA, 93 bp, Homo sapiens; identical to SEQ ID NO: 267712
  chr15:62863460-62863553
  hypo

SEQ ID NO: 410284 - DNA, 97 bp, Homo sapiens; identical to SEQ ID NO: 216274
  chr15:62959085-62959182
  hypo

SEQ ID NO: 410285 - DNA, 35 bp, Homo sapiens; identical to SEQ ID NO: 267717
  chr15:62967409-62967444
  hypo

SEQ ID NO: 410286 - DNA, 161 bp, Homo sapiens; identical to SEQ ID NO: 267724
  chr15:63028501-63028662
  hypo

SEQ ID NO: 410287 - DNA, 93 bp, Homo sapiens; identical to SEQ ID NO: 267742
  chr15:63100845-63100938
  hypo

SEQ ID NO: 410288 - DNA, 105 bp, Homo sapiens; identical to SEQ ID NO: 224869
  chr15:63130456-63130561
  hypo

SEQ ID NO: 410289 - DNA, 266 bp, Homo sapiens; identical to SEQ ID NO: 267748
  chr15:63167175-63167441
  hypo

SEQ ID NO: 410290 - DNA, 89 bp, Homo sapiens; identical to SEQ ID NO: 216294
  chr15:63245891-63245980
  hypo

SEQ ID NO: 410291 - DNA, 92 bp, Homo sapiens; identical to SEQ ID NO: 267751
  chr15:63282596-63282688
  hypo

SEQ ID NO: 410292 - DNA, 47 bp, Homo sapiens; identical to SEQ ID NO: 216295
  chr15:63321676-63321723
  hypo

SEQ ID NO: 410293 - DNA, 178 bp, Homo sapiens; identical to SEQ ID NO: 267753
  chr15:63382905-63383083
  hypo

SEQ ID NO: 410294 - DNA, 144 bp, Homo sapiens; identical to SEQ ID NO: 267754
  chr15:63585219-63585363
  hypo

SEQ ID NO: 410295 - DNA, 199 bp, Homo sapiens; identical to SEQ ID NO: 267757
  chr15:63614192-63614391
  hypo

SEQ ID NO: 410296 - DNA, 136 bp, Homo sapiens; identical to SEQ ID NO: 267758
  chr15:63647633-63647769
  hypo

SEQ ID NO: 410297 - DNA, 62 bp, Homo sapiens; identical to SEQ ID NO: 216296
  chr15:63753619-63753681
  hypo

SEQ ID NO: 410298 - DNA, 79 bp, Homo sapiens; identical to SEQ ID NO: 267767
  chr15:64109577-64109656
  hypo

SEQ ID NO: 410299 - DNA, 137 bp, Homo sapiens; identical to SEQ ID NO: 319168
  chr15:64649916-64650053
  hypo

SEQ ID NO: 410300 - DNA, 147 bp, Homo sapiens; identical to SEQ ID NO: 267773
  chr15:64670701-64670848
  hypo

SEQ ID NO: 410301 - DNA, 32 bp, Homo sapiens
  chr15:64674891-64674923
  hypo
ggtcaggcatggtggctcacacctgtaatcct

SEQ ID NO: 410302 - DNA, 84 bp, Homo sapiens; identical to SEQ ID NO: 267777
  chr15:64715655-64715739
  hypo

SEQ ID NO: 410303 - DNA, 88 bp, Homo sapiens; identical to SEQ ID NO: 216306
  chr15:64865096-64865184
  hypo

SEQ ID NO: 410304 - DNA, 39 bp, Homo sapiens; identical to SEQ ID NO: 267779
  chr15:65041216-65041255
  hypo

SEQ ID NO: 410305 - DNA, 186 bp, Homo sapiens; identical to SEQ ID NO: 216307
  chr15:65119040-65119226
  hypo

SEQ ID NO: 410306 - DNA, 102 bp, Homo sapiens; identical to SEQ ID NO: 216308
  chr15:65119640-65119742
  hypo

SEQ ID NO: 410307 - DNA, 143 bp, Homo sapiens; identical to SEQ ID NO: 267786
  chr15:65380109-65380252
  hypo

SEQ ID NO: 410308 - DNA, 195 bp, Homo sapiens; identical to SEQ ID NO: 267787
  chr15:65538640-65538835
  hypo

SEQ ID NO: 410309 - DNA, 43 bp, Homo sapiens; identical to SEQ ID NO: 267796
  chr15:66951024-66951067
  hypo

SEQ ID NO: 410310 - DNA, 131 bp, Homo sapiens; identical to SEQ ID NO: 319193
  chr15:66963541-66963672
  hypo

SEQ ID NO: 410311 - DNA, 159 bp, Homo sapiens; identical to SEQ ID NO: 319194
  chr15:66964083-66964242
  hypo

SEQ ID NO: 410312 - DNA, 90 bp, Homo sapiens; identical to SEQ ID NO: 216314
  chr15:67011791-67011881
  hypo

SEQ ID NO: 410313 - DNA, 668 bp, Homo sapiens; identical to SEQ ID NO: 267801
  chr15:67073254-67073922
  hypo

SEQ ID NO: 410314 - DNA, 77 bp, Homo sapiens; identical to SEQ ID NO: 267809
  chr15:67481788-67481865
  hypo

SEQ ID NO: 410315 - DNA, 341 bp, Homo sapiens; identical to SEQ ID NO: 267812
  chr15:67757461-67757802
  hypo

SEQ ID NO: 410316 - DNA, 105 bp, Homo sapiens; identical to SEQ ID NO: 267813
  chr15:68085074-68085179
  hypo

SEQ ID NO: 410317 - DNA, 547 bp, Homo sapiens; identical to SEQ ID NO: 267814
  chr15:68098612-68099159
  hypo

SEQ ID NO: 410318 - DNA, 71 bp, Homo sapiens; identical to SEQ ID NO: 224883
  chr15:68177208-68177279
  hypo

SEQ ID NO: 410319 - DNA, 105 bp, Homo sapiens; identical to SEQ ID NO: 267815
  chr15:68394333-68394438
  hypo

SEQ ID NO: 410320 - DNA, 31 bp, Homo sapiens; identical to SEQ ID NO: 267821
  chr15:68854259-68854290
  hypo

SEQ ID NO: 410321 - DNA, 40 bp, Homo sapiens; identical to SEQ ID NO: 267824
  chr15:68899868-68899908
  hypo

SEQ ID NO: 410322 - DNA, 258 bp, Homo sapiens; identical to SEQ ID NO: 216323
  chr15:69002974-69003232
  hypo

SEQ ID NO: 410323 - DNA, 93 bp, Homo sapiens; identical to SEQ ID NO: 216324
  chr15:69003955-69004048
  hypo

SEQ ID NO: 410324 - DNA, 250 bp, Homo sapiens; identical to SEQ ID NO: 267830
  chr15:69076663-69076913
  hypo

SEQ ID NO: 410325 - DNA, 489 bp, Homo sapiens; identical to SEQ ID NO: 267831
  chr15:69099731-69100220
  hypo

SEQ ID NO: 410326 - DNA, 113 bp, Homo sapiens; identical to SEQ ID NO: 267832
  chr15:69285723-69285836
  hypo

SEQ ID NO: 410327 - DNA, 180 bp, Homo sapiens; identical to SEQ ID NO: 216327
  chr15:69322967-69323147
  hypo

SEQ ID NO: 410328 - DNA, 184 bp, Homo sapiens; identical to SEQ ID NO: 216328
  chr15:69387167-69387351
  hypo

SEQ ID NO: 410329 - DNA, 77 bp, Homo sapiens; identical to SEQ ID NO: 267839
  chr15:69481791-69481868
  hypo

SEQ ID NO: 410330 - DNA, 160 bp, Homo sapiens; identical to SEQ ID NO: 267841
  chr15:69577241-69577401
  hypo

SEQ ID NO: 410331 - DNA, 214 bp, Homo sapiens; identical to SEQ ID NO: 216330
  chr15:69590152-69590366
  hypo

SEQ ID NO: 410332 - DNA, 78 bp, Homo sapiens; identical to SEQ ID NO: 216331
  chr15:69715405-69715483
  hypo

SEQ ID NO: 410333 - DNA, 119 bp, Homo sapiens; identical to SEQ ID NO: 267846
  chr15:69851550-69851669
  hypo

SEQ ID NO: 410334 - DNA, 155 bp, Homo sapiens; identical to SEQ ID NO: 267850
  chr15:69925151-69925306
  hypo

SEQ ID NO: 410335 - DNA, 199 bp, Homo sapiens; identical to SEQ ID NO: 267853
  chr15:70339879-70340078
  hypo

SEQ ID NO: 410336 - DNA, 116 bp, Homo sapiens; identical to SEQ ID NO: 216334
  chr15:70342264-70342380
  hypo

SEQ ID NO: 410337 - DNA, 71 bp, Homo sapiens; identical to SEQ ID NO: 319253
  chr15:70347466-70347537
  hypo

SEQ ID NO: 410338 - DNA, 33 bp, Homo sapiens; identical to SEQ ID NO: 319254
  chr15:70347575-70347608
  hypo

SEQ ID NO: 410339 - DNA, 76 bp, Homo sapiens; identical to SEQ ID NO: 203948
  chr15:70391279-70391355
  hypo

SEQ ID NO: 410340 - DNA, 36 bp, Homo sapiens; identical to SEQ ID NO: 267860
  chr15:70707944-70707980
  hypo

SEQ ID NO: 410341 - DNA, 31 bp, Homo sapiens; identical to SEQ ID NO: 216343
  chr15:71466447-71466478
  hypo

SEQ ID NO: 410342 - DNA, 38 bp, Homo sapiens; identical to SEQ ID NO: 267869
  chr15:71880351-71880389
  hypo

SEQ ID NO: 410343 - DNA, 99 bp, Homo sapiens; identical to SEQ ID NO: 267870
  chr15:71966264-71966363
  hypo

SEQ ID NO: 410344 - DNA, 175 bp, Homo sapiens; identical to SEQ ID NO: 216344
  chr15:72040756-72040931
  hypo

SEQ ID NO: 410345 - DNA, 287 bp, Homo sapiens; identical to SEQ ID NO: 267875
  chr15:72082357-72082644
  hypo

SEQ ID NO: 410346 - DNA, 147 bp, Homo sapiens; identical to SEQ ID NO: 267877
  chr15:72109741-72109888
  hypo

SEQ ID NO: 410347 - DNA, 41 bp, Homo sapiens; identical to SEQ ID NO: 216347
  chr15:72471183-72471224
  hypo

SEQ ID NO: 410348 - DNA, 216 bp, Homo sapiens; identical to SEQ ID NO: 399708
  chr15:72523039-72523255
  hypo

SEQ ID NO: 410349 - DNA, 37 bp, Homo sapiens; identical to SEQ ID NO: 267882
  chr15:72525047-72525084
  hypo

SEQ ID NO: 410350 - DNA, 37 bp, Homo sapiens; identical to SEQ ID NO: 267883
  chr15:72525324-72525361
  hypo

SEQ ID NO: 410351 - DNA, 80 bp, Homo sapiens; identical to SEQ ID NO: 267885
  chr15:72743819-72743899
  hypo

SEQ ID NO: 410352 - DNA, 95 bp, Homo sapiens; identical to SEQ ID NO: 267889
  chr15:73147250-73147345
  hypo

SEQ ID NO: 410353 - DNA, 164 bp, Homo sapiens; identical to SEQ ID NO: 224892
  chr15:73344008-73344172
  hypo

SEQ ID NO: 410354 - DNA, 57 bp, Homo sapiens; identical to SEQ ID NO: 267893
  chr15:73634701-73634758
  hypo

SEQ ID NO: 410355 - DNA, 99 bp, Homo sapiens; identical to SEQ ID NO: 267894
  chr15:73635760-73635859
  hypo

SEQ ID NO: 410356 - DNA, 84 bp, Homo sapiens; identical to SEQ ID NO: 216351
  chr15:73735440-73735524
  hypo

SEQ ID NO: 410357 - DNA, 333 bp, Homo sapiens; identical to SEQ ID NO: 216352
  chr15:73889351-73889684
  hypo

SEQ ID NO: 410358 - DNA, 412 bp, Homo sapiens; identical to SEQ ID NO: 290989
  chr15:74045243-74045655
  hypo

SEQ ID NO: 410359 - DNA, 201 bp, Homo sapiens; identical to SEQ ID NO: 267898
  chr15:74188046-74188247
  hypo

SEQ ID NO: 410360 - DNA, 408 bp, Homo sapiens; identical to SEQ ID NO: 267900
  chr15:74315317-74315725
  hypo

SEQ ID NO: 410361 - DNA, 116 bp, Homo sapiens; identical to SEQ ID NO: 267901
  chr15:74333742-74333858
  hypo

SEQ ID NO: 410362 - DNA, 91 bp, Homo sapiens; identical to SEQ ID NO: 216356
  chr15:74679876-74679967
  hypo

SEQ ID NO: 410363 - DNA, 174 bp, Homo sapiens; identical to SEQ ID NO: 267904
  chr15:74702942-74703116
  hypo

SEQ ID NO: 410364 - DNA, 31 bp, Homo sapiens; identical to SEQ ID NO: 267907
  chr15:74839796-74839827
  hypo

SEQ ID NO: 410365 - DNA, 71 bp, Homo sapiens; identical to SEQ ID NO: 319314
  chr15:74903825-74903896
  hypo

SEQ ID NO: 410366 - DNA, 176 bp, Homo sapiens; identical to SEQ ID NO: 291004
  chr15:74912313-74912489
  hypo

SEQ ID NO: 410367 - DNA, 125 bp, Homo sapiens; identical to SEQ ID NO: 267910
  chr15:74913937-74914062
  hypo

SEQ ID NO: 410368 - DNA, 47 bp, Homo sapiens; identical to SEQ ID NO: 267913
  chr15:75093277-75093324
  hypo

SEQ ID NO: 410369 - DNA, 183 bp, Homo sapiens; identical to SEQ ID NO: 216358
  chr15:75094768-75094951
  hypo

SEQ ID NO: 410370 - DNA, 103 bp, Homo sapiens; identical to SEQ ID NO: 216359
  chr15:75158701-75158804
  hypo

SEQ ID NO: 410371 - DNA, 42 bp, Homo sapiens; identical to SEQ ID NO: 216360
  chr15:75158924-75158966
  hypo

SEQ ID NO: 410372 - DNA, 142 bp, Homo sapiens; identical to SEQ ID NO: 216361
  chr15:75221041-75221183
  hypo

SEQ ID NO: 410373 - DNA, 58 bp, Homo sapiens; identical to SEQ ID NO: 267920
  chr15:75293194-75293252
  hypo

SEQ ID NO: 410374 - DNA, 32 bp, Homo sapiens; identical to SEQ ID NO: 216363
  chr15:75413015-75413047
  hypo

SEQ ID NO: 410375 - DNA, 103 bp, Homo sapiens; identical to SEQ ID NO: 267922
  chr15:75498358-75498461
  hypo

SEQ ID NO: 410376 - DNA, 113 bp, Homo sapiens; identical to SEQ ID NO: 267923
  chr15:75500845-75500958
  hypo

SEQ ID NO: 410377 - DNA, 151 bp, Homo sapiens; identical to SEQ ID NO: 267924
  chr15:75594676-75594827
  hypo

SEQ ID NO: 410378 - DNA, 69 bp, Homo sapiens; identical to SEQ ID NO: 216364
  chr15:75614951-75615020
  hypo

SEQ ID NO: 410379 - DNA, 290 bp, Homo sapiens; identical to SEQ ID NO: 399720
  chr15:75640520-75640810
  hypo

SEQ ID NO: 410380 - DNA, 104 bp, Homo sapiens; identical to SEQ ID NO: 224899
  chr15:75640871-75640975
  hypo

SEQ ID NO: 410381 - DNA, 205 bp, Homo sapiens; identical to SEQ ID NO: 267931
  chr15:75949260-75949465
  hypo

SEQ ID NO: 410382 - DNA, 126 bp, Homo sapiens; identical to SEQ ID NO: 216370
  chr15:75981377-75981503
  hypo

SEQ ID NO: 410383 - DNA, 153 bp, Homo sapiens; identical to SEQ ID NO: 267933
  chr15:75997150-75997303
  hypo

SEQ ID NO: 410384 - DNA, 263 bp, Homo sapiens; identical to SEQ ID NO: 267934
  chr15:76019477-76019740
  hypo

SEQ ID NO: 410385 - DNA, 186 bp, Homo sapiens; identical to SEQ ID NO: 216371
  chr15:76083847-76084033
  hypo

SEQ ID NO: 410386 - DNA, 42 bp, Homo sapiens; identical to SEQ ID NO: 267938
  chr15:77072238-77072280
  hypo

SEQ ID NO: 410387 - DNA, 120 bp, Homo sapiens; identical to SEQ ID NO: 267939
  chr15:77072340-77072460
  hypo

SEQ ID NO: 410388 - DNA, 392 bp, Homo sapiens; identical to SEQ ID NO: 267940
  chr15:77321763-77322155
  hypo

SEQ ID NO: 410389 - DNA, 34 bp, Homo sapiens; identical to SEQ ID NO: 267941
  chr15:77332740-77332774
  hypo

SEQ ID NO: 410390 - DNA, 31 bp, Homo sapiens; identical to SEQ ID NO: 267943
  chr15:77358028-77358059
  hypo

SEQ ID NO: 410391 - DNA, 183 bp, Homo sapiens; identical to SEQ ID NO: 267944
  chr15:77473436-77473619
  hypo

SEQ ID NO: 410392 - DNA, 204 bp, Homo sapiens; identical to SEQ ID NO: 267948
  chr15:77936322-77936526
  hypo

SEQ ID NO: 410393 - DNA, 143 bp, Homo sapiens; identical to SEQ ID NO: 291049
  chr15:78110977-78111120
  hypo

SEQ ID NO: 410394 - DNA, 80 bp, Homo sapiens; identical to SEQ ID NO: 291050
  chr15:78111210-78111290
  hypo

SEQ ID NO: 410395 - DNA, 95 bp, Homo sapiens; identical to SEQ ID NO: 267952
  chr15:78181925-78182020
  hypo

SEQ ID NO: 410396 - DNA, 340 bp, Homo sapiens; identical to SEQ ID NO: 267953
  chr15:78189972-78190312
  hypo

SEQ ID NO: 410397 - DNA, 171 bp, Homo sapiens; identical to SEQ ID NO: 216376
  chr15:78268339-78268510
  hypo

SEQ ID NO: 410398 - DNA, 38 bp, Homo sapiens; identical to SEQ ID NO: 267959
  chr15:78295565-78295603
  hypo

SEQ ID NO: 410399 - DNA, 93 bp, Homo sapiens; identical to SEQ ID NO: 267960
  chr15:78403530-78403623
  hypo

SEQ ID NO: 410400 - DNA, 79 bp, Homo sapiens; identical to SEQ ID NO: 216377
  chr15:78450091-78450170
  hypo

SEQ ID NO: 410401 - DNA, 101 bp, Homo sapiens; identical to SEQ ID NO: 216379
  chr15:78501675-78501776
  hypo

SEQ ID NO: 410402 - DNA, 45 bp, Homo sapiens; identical to SEQ ID NO: 216380
  chr15:78501942-78501987
  hypo

SEQ ID NO: 410403 - DNA, 81 bp, Homo sapiens; identical to SEQ ID NO: 216381
  chr15:78510187-78510268
  hypo

SEQ ID NO: 410404 - DNA, 45 bp, Homo sapiens; identical to SEQ ID NO: 267968
  chr15:78555195-78555240
  hypo

SEQ ID NO: 410405 - DNA, 149 bp, Homo sapiens; identical to SEQ ID NO: 216382
  chr15:78566544-78566693
  hypo

SEQ ID NO: 410406 - DNA, 118 bp, Homo sapiens; identical to SEQ ID NO: 267971
  chr15:78577626-78577744
  hypo

SEQ ID NO: 410407 - DNA, 133 bp, Homo sapiens; identical to SEQ ID NO: 267978
  chr15:79050495-79050628
  hypo

SEQ ID NO: 410408 - DNA, 239 bp, Homo sapiens; identical to SEQ ID NO: 267979
  chr15:79055678-79055917
  hypo

SEQ ID NO: 410409 - DNA, 232 bp, Homo sapiens; identical to SEQ ID NO: 267980
  chr15:79056239-79056471
  hypo

SEQ ID NO: 410410 - DNA, 206 bp, Homo sapiens; identical to SEQ ID NO: 267985
  chr15:79218012-79218218
  hypo

SEQ ID NO: 410411 - DNA, 103 bp, Homo sapiens; identical to SEQ ID NO: 267986
  chr15:79222387-79222490
  hypo

SEQ ID NO: 410412 - DNA, 125 bp, Homo sapiens; identical to SEQ ID NO: 216387
  chr15:79309573-79309698
  hypo

SEQ ID NO: 410413 - DNA, 133 bp, Homo sapiens; identical to SEQ ID NO: 267988
  chr15:79310062-79310195
  hypo

SEQ ID NO: 410414 - DNA, 111 bp, Homo sapiens; identical to SEQ ID NO: 267989
  chr15:79471666-79471777
  hypo

SEQ ID NO: 410415 - DNA, 75 bp, Homo sapiens; identical to SEQ ID NO: 203992
  chr15:79723976-79724051
  hypo

SEQ ID NO: 410416 - DNA, 223 bp, Homo sapiens; identical to SEQ ID NO: 267990
  chr15:80216925-80217148
  hypo

SEQ ID NO: 410417 - DNA, 79 bp, Homo sapiens; identical to SEQ ID NO: 267991
  chr15:80217366-80217445
  hypo

SEQ ID NO: 410418 - DNA, 39 bp, Homo sapiens; identical to SEQ ID NO: 267994
  chr15:80434194-80434233
  hypo

SEQ ID NO: 410419 - DNA, 246 bp, Homo sapiens; identical to SEQ ID NO: 267997
  chr15:80478408-80478654
  hypo

SEQ ID NO: 410420 - DNA, 370 bp, Homo sapiens; identical to SEQ ID NO: 268002
  chr15:81164289-81164659
  hypo

SEQ ID NO: 410421 - DNA, 94 bp, Homo sapiens; identical to SEQ ID NO: 268003
  chr15:81199005-81199099
  hypo

SEQ ID NO: 410422 - DNA, 229 bp, Homo sapiens; identical to SEQ ID NO: 268004
  chr15:81224341-81224570
  hypo

SEQ ID NO: 410423 - DNA, 120 bp, Homo sapiens; identical to SEQ ID NO: 216394
  chr15:81247852-81247972
  hypo

SEQ ID NO: 410424 - DNA, 169 bp, Homo sapiens; identical to SEQ ID NO: 268008
  chr15:81342115-81342284
  hypo

SEQ ID NO: 410425 - DNA, 183 bp, Homo sapiens; identical to SEQ ID NO: 216396
  chr15:81605218-81605401
  hypo

SEQ ID NO: 410426 - DNA, 200 bp, Homo sapiens; identical to SEQ ID NO: 268010
  chr15:81605679-81605879
  hypo

SEQ ID NO: 410427 - DNA, 43 bp, Homo sapiens; identical to SEQ ID NO: 268011
  chr15:82276016-82276059
  hypo

SEQ ID NO: 410428 - DNA, 91 bp, Homo sapiens; identical to SEQ ID NO: 268013
  chr15:83440820-83440911
  hypo

SEQ ID NO: 410429 - DNA, 94 bp, Homo sapiens; identical to SEQ ID NO: 268014
  chr15:83459217-83459311
  hypo

SEQ ID NO: 410430 - DNA, 300 bp, Homo sapiens; identical to SEQ ID NO: 224913
  chr15:83654649-83654949
  hypo

SEQ ID NO: 410431 - DNA, 41 bp, Homo sapiens; identical to SEQ ID NO: 216402
  chr15:83827862-83827903
  hypo

SEQ ID NO: 410432 - DNA, 36 bp, Homo sapiens; identical to SEQ ID NO: 399743
  chr15:84034342-84034378
  hypo

SEQ ID NO: 410433 - DNA, 86 bp, Homo sapiens; identical to SEQ ID NO: 291091
  chr15:84034412-84034498
  hypo

SEQ ID NO: 410434 - DNA, 577 bp, Homo sapiens; identical to SEQ ID NO: 291096
  chr15:85143661-85144238
  hypo

SEQ ID NO: 410435 - DNA, 148 bp, Homo sapiens; identical to SEQ ID NO: 204015
  chr15:85200368-85200516
  hypo

SEQ ID NO: 410436 - DNA, 123 bp, Homo sapiens; identical to SEQ ID NO: 291099
  chr15:85258869-85258992
  hypo

SEQ ID NO: 410437 - DNA, 82 bp, Homo sapiens; identical to SEQ ID NO: 268022
  chr15:85401076-85401158
  hypo

SEQ ID NO: 410438 - DNA, 89 bp, Homo sapiens; identical to SEQ ID NO: 216405
  chr15:85478275-85478364
  hypo

SEQ ID NO: 410439 - DNA, 203 bp, Homo sapiens; identical to SEQ ID NO: 319450
  chr15:85680889-85681092
  hypo

SEQ ID NO: 410440 - DNA, 66 bp, Homo sapiens; identical to SEQ ID NO: 216407
  chr15:85681122-85681188
  hypo

SEQ ID NO: 410441 - DNA, 151 bp, Homo sapiens; identical to SEQ ID NO: 216408
  chr15:85695659-85695810
  hypo

SEQ ID NO: 410442 - DNA, 120 bp, Homo sapiens; identical to SEQ ID NO: 268027
  chr15:85725512-85725632
  hypo

SEQ ID NO: 410443 - DNA, 42 bp, Homo sapiens; identical to SEQ ID NO: 268028
  chr15:85774090-85774132
  hypo

SEQ ID NO: 410444 - DNA, 32 bp, Homo sapiens; identical to SEQ ID NO: 216409
  chr15:85886327-85886359
  hypo

SEQ ID NO: 410445 - DNA, 42 bp, Homo sapiens; identical to SEQ ID NO: 268039
  chr15:88493813-88493855
  hypo

SEQ ID NO: 410446 - DNA, 266 bp, Homo sapiens; identical to SEQ ID NO: 268040
  chr15:89179287-89179553
  hypo

SEQ ID NO: 410447 - DNA, 219 bp, Homo sapiens; identical to SEQ ID NO: 268041
  chr15:89284711-89284930
  hypo

SEQ ID NO: 410448 - DNA, 227 bp, Homo sapiens; identical to SEQ ID NO: 268043
  chr15:89388857-89389084
  hypo

SEQ ID NO: 410449 - DNA, 186 bp, Homo sapiens; identical to SEQ ID NO: 216411
  chr15:89404008-89404194
  hypo

SEQ ID NO: 410450 - DNA, 35 bp, Homo sapiens; identical to SEQ ID NO: 268045
  chr15:89605894-89605929
  hypo

SEQ ID NO: 410451 - DNA, 45 bp, Homo sapiens; identical to SEQ ID NO: 268047
  chr15:89807367-89807412
  hypo

SEQ ID NO: 410452 - DNA, 40 bp, Homo sapiens; identical to SEQ ID NO: 216412
  chr15:89809026-89809066
  hypo

SEQ ID NO: 410453 - DNA, 345 bp, Homo sapiens; identical to SEQ ID NO: 291120
  chr15:89905400-89905745
  hypo

SEQ ID NO: 410454 - DNA, 234 bp, Homo sapiens; identical to SEQ ID NO: 291121
  chr15:89905890-89906124
  hypo

SEQ ID NO: 410455 - DNA, 68 bp, Homo sapiens; identical to SEQ ID NO: 216414
  chr15:90171832-90171900
  hypo

SEQ ID NO: 410456 - DNA, 243 bp, Homo sapiens; identical to SEQ ID NO: 268054
  chr15:90214507-90214750
  hypo

SEQ ID NO: 410457 - DNA, 41 bp, Homo sapiens; identical to SEQ ID NO: 268056
  chr15:90317994-90318035
  hypo

SEQ ID NO: 410458 - DNA, 80 bp, Homo sapiens; identical to SEQ ID NO: 268057
  chr15:90342641-90342721
  hypo

SEQ ID NO: 410459 - DNA, 36 bp, Homo sapiens; identical to SEQ ID NO: 216421
  chr15:90548960-90548996
  hypo

SEQ ID NO: 410460 - DNA, 92 bp, Homo sapiens; identical to SEQ ID NO: 268063
  chr15:90590718-90590810
  hypo

SEQ ID NO: 410461 - DNA, 153 bp, Homo sapiens; identical to SEQ ID NO: 268066
  chr15:90617275-90617428
  hypo

SEQ ID NO: 410462 - DNA, 81 bp, Homo sapiens; identical to SEQ ID NO: 204034
  chr15:90634777-90634858
  hypo

SEQ ID NO: 410463 - DNA, 32 bp, Homo sapiens; identical to SEQ ID NO: 268067
  chr15:90702246-90702278
  hypo

SEQ ID NO: 410464 - DNA, 36 bp, Homo sapiens; identical to SEQ ID NO: 216427
  chr15:90729568-90729604
  hypo

SEQ ID NO: 410465 - DNA, 36 bp, Homo sapiens; identical to SEQ ID NO: 268072
  chr15:90751191-90751227
  hypo

SEQ ID NO: 410466 - DNA, 202 bp, Homo sapiens; identical to SEQ ID NO: 216429
  chr15:90753863-90754065
  hypo

SEQ ID NO: 410467 - DNA, 200 bp, Homo sapiens; identical to SEQ ID NO: 268076
  chr15:90806189-90806389
  hypo

SEQ ID NO: 410468 - DNA, 60 bp, Homo sapiens; identical to SEQ ID NO: 291143
  chr15:90891947-90892007
  hypo

SEQ ID NO: 410469 - DNA, 37 bp, Homo sapiens; identical to SEQ ID NO: 216436
  chr15:91072383-91072420
  hypo

SEQ ID NO: 410470 - DNA, 95 bp, Homo sapiens; identical to SEQ ID NO: 268080
  chr15:91083105-91083200
  hypo

SEQ ID NO: 410471 - DNA, 80 bp, Homo sapiens; identical to SEQ ID NO: 268081
  chr15:91162925-91163005
  hypo

SEQ ID NO: 410472 - DNA, 40 bp, Homo sapiens; identical to SEQ ID NO: 216437
  chr15:91311952-91311992
  hypo

SEQ ID NO: 410473 - DNA, 43 bp, Homo sapiens; identical to SEQ ID NO: 268089
  chr15:91365251-91365294
  hypo

SEQ ID NO: 410474 - DNA, 72 bp, Homo sapiens; identical to SEQ ID NO: 204036
  chr15:91414358-91414430
  hypo

SEQ ID NO: 410475 - DNA, 285 bp, Homo sapiens; identical to SEQ ID NO: 268092
  chr15:91425022-91425307
  hypo

SEQ ID NO: 410476 - DNA, 92 bp, Homo sapiens; identical to SEQ ID NO: 268093
  chr15:91497739-91497831
  hypo

SEQ ID NO: 410477 - DNA, 109 bp, Homo sapiens; identical to SEQ ID NO: 319530
  chr15:91500831-91500940
  hypo

SEQ ID NO: 410478 - DNA, 194 bp, Homo sapiens; identical to SEQ ID NO: 268104
  chr15:92987936-92988130
  hypo

SEQ ID NO: 410479 - DNA, 186 bp, Homo sapiens; identical to SEQ ID NO: 216447
  chr15:93153520-93153706
  hypo

SEQ ID NO: 410480 - DNA, 74 bp, Homo sapiens; identical to SEQ ID NO: 268106
  chr15:93176138-93176212
  hypo

SEQ ID NO: 410481 - DNA, 180 bp, Homo sapiens; identical to SEQ ID NO: 268108
  chr15:93316009-93316189
  hypo

SEQ ID NO: 410482 - DNA, 120 bp, Homo sapiens; identical to SEQ ID NO: 216448
  chr15:93350343-93350463
  hypo

SEQ ID NO: 410483 - DNA, 123 bp, Homo sapiens; identical to SEQ ID NO: 268111
  chr15:93362349-93362472
  hypo

SEQ ID NO: 410484 - DNA, 77 bp, Homo sapiens; identical to SEQ ID NO: 268118
  chr15:93524851-93524928
  hypo

SEQ ID NO: 410485 - DNA, 137 bp, Homo sapiens; identical to SEQ ID NO: 216451
  chr15:93546307-93546444
  hypo

SEQ ID NO: 410486 - DNA, 81 bp, Homo sapiens; identical to SEQ ID NO: 216452
  chr15:93567908-93567989
  hypo

SEQ ID NO: 410487 - DNA, 665 bp, Homo sapiens; identical to SEQ ID NO: 268121
  chr15:93588122-93588787
  hypo

SEQ ID NO: 410488 - DNA, 44 bp, Homo sapiens; identical to SEQ ID NO: 268124
  chr15:93897785-93897829
  hypo

SEQ ID NO: 410489 - DNA, 32 bp, Homo sapiens; identical to SEQ ID NO: 216457
  chr15:94014475-94014507
  hypo

SEQ ID NO: 410490 - DNA, 300 bp, Homo sapiens; identical to SEQ ID NO: 384586
  chr15:94774274-94774574
  hypo

SEQ ID NO: 410491 - DNA, 220 bp, Homo sapiens; identical to SEQ ID NO: 268131
  chr15:94778462-94778682
  hypo

SEQ ID NO: 410492 - DNA, 43 bp, Homo sapiens; identical to SEQ ID NO: 216459
  chr15:94794563-94794606
  hypo

SEQ ID NO: 410493 - DNA, 76 bp, Homo sapiens; identical to SEQ ID NO: 268133
  chr15:94841669-94841745
  hypo

SEQ ID NO: 410494 - DNA, 56 bp, Homo sapiens; identical to SEQ ID NO: 268136
  chr15:95019094-95019150
  hypo

SEQ ID NO: 410495 - DNA, 212 bp, Homo sapiens; identical to SEQ ID NO: 268137
  chr15:95019400-95019612
  hypo

SEQ ID NO: 410496 - DNA, 390 bp, Homo sapiens; identical to SEQ ID NO: 268138
  chr15:95398763-95399153
  hypo

SEQ ID NO: 410497 - DNA, 89 bp, Homo sapiens; identical to SEQ ID NO: 268139
  chr15:96007651-96007740
  hypo

SEQ ID NO: 410498 - DNA, 34 bp, Homo sapiens; identical to SEQ ID NO: 268140
  chr15:96817336-96817370
  hypo

SEQ ID NO: 410499 - DNA, 81 bp, Homo sapiens; identical to SEQ ID NO: 268141
  chr15:96817400-96817481
  hypo

SEQ ID NO: 410500 - DNA, 377 bp, Homo sapiens; identical to SEQ ID NO: 389321
  chr15:96873421-96873798
  hypo

SEQ ID NO: 410501 - DNA, 268 bp, Homo sapiens; identical to SEQ ID NO: 291185
  chr15:98503609-98503877
  hypo

SEQ ID NO: 410502 - DNA, 168 bp, Homo sapiens; identical to SEQ ID NO: 291186
  chr15:98503946-98504114
  hypo

SEQ ID NO: 410503 - DNA, 180 bp, Homo sapiens; identical to SEQ ID NO: 268149
  chr15:99161542-99161722
  hypo

SEQ ID NO: 410504 - DNA, 56 bp, Homo sapiens; identical to SEQ ID NO: 268150
  chr15:99190074-99190130
  hypo

SEQ ID NO: 410505 - DNA, 33 bp, Homo sapiens; identical to SEQ ID NO: 268152
  chr15:99190315-99190348
  hypo

SEQ ID NO: 410506 - DNA, 510 bp, Homo sapiens; identical to SEQ ID NO: 291193
  chr15:99191216-99191726
  hypo

SEQ ID NO: 410507 - DNA, 210 bp, Homo sapiens; identical to SEQ ID NO: 126471
  chr15:99191748-99191958
  hypo

SEQ ID NO: 410508 - DNA, 570 bp, Homo sapiens; identical to SEQ ID NO: 224952
  chr15:99192162-99192732
  hypo

SEQ ID NO: 410509 - DNA, 76 bp, Homo sapiens; identical to SEQ ID NO: 268154
  chr15:99215806-99215882
  hypo

SEQ ID NO: 410510 - DNA, 63 bp, Homo sapiens; identical to SEQ ID NO: 268157
  chr15:99250992-99251055
  hypo

SEQ ID NO: 410511 - DNA, 341 bp, Homo sapiens; identical to SEQ ID NO: 268162
  chr15:99338922-99339263
  hypo

SEQ ID NO: 410512 - DNA, 38 bp, Homo sapiens; identical to SEQ ID NO: 216472
  chr15:99340602-99340640
  hypo

SEQ ID NO: 410513 - DNA, 172 bp, Homo sapiens; identical to SEQ ID NO: 268165
  chr15:99352651-99352823
  hypo

SEQ ID NO: 410514 - DNA, 120 bp, Homo sapiens; identical to SEQ ID NO: 216473
  chr15:99354751-99354871
  hypo

SEQ ID NO: 410515 - DNA, 69 bp, Homo sapiens; identical to SEQ ID NO: 268167
  chr15:99364726-99364795
  hypo

SEQ ID NO: 410516 - DNA, 42 bp, Homo sapiens; identical to SEQ ID NO: 268170
  chr15:99411823-99411865
  hypo

SEQ ID NO: 410517 - DNA, 120 bp, Homo sapiens; identical to SEQ ID NO: 268174
  chr15:99433456-99433576
  hypo

SEQ ID NO: 410518 - DNA, 108 bp, Homo sapiens; identical to SEQ ID NO: 216476
  chr15:99440185-99440293
  hypo

SEQ ID NO: 410519 - DNA, 105 bp, Homo sapiens; identical to SEQ ID NO: 216482
  chr15:99512752-99512857
  hypo

SEQ ID NO: 410520 - DNA, 97 bp, Homo sapiens; identical to SEQ ID NO: 268189
  chr15:99954583-99954680
  hypo

SEQ ID NO: 410521 - DNA, 472 bp, Homo sapiens; identical to SEQ ID NO: 268190
  chr15:99966717-99967189
  hypo

SEQ ID NO: 410522 - DNA, 42 bp, Homo sapiens; identical to SEQ ID NO: 204068
  chr15:100273862-100273904
  hypo

SEQ ID NO: 410523 - DNA, 48 bp, Homo sapiens; identical to SEQ ID NO: 224955
  chr15:100273946-100273994
  hypo

SEQ ID NO: 410524 - DNA, 92 bp, Homo sapiens; identical to SEQ ID NO: 216486
  chr15:100274190-100274282
  hypo

SEQ ID NO: 410525 - DNA, 209 bp, Homo sapiens; identical to SEQ ID NO: 216487
  chr15:100649031-100649240
  hypo

SEQ ID NO: 410526 - DNA, 102 bp, Homo sapiens; identical to SEQ ID NO: 216489
  chr15:100791527-100791629
  hypo

SEQ ID NO: 410527 - DNA, 177 bp, Homo sapiens; identical to SEQ ID NO: 268200
  chr15:100880285-100880462
  hypo

SEQ ID NO: 410528 - DNA, 42 bp, Homo sapiens; identical to SEQ ID NO: 268201
  chr15:101059359-101059401
  hypo

SEQ ID NO: 410529 - DNA, 35 bp, Homo sapiens; identical to SEQ ID NO: 268203
  chr15:101194866-101194901
  hypo

SEQ ID NO: 410530 - DNA, 193 bp, Homo sapiens; identical to SEQ ID NO: 216492
  chr15:101267000-101267193
  hypo

SEQ ID NO: 410531 - DNA, 174 bp, Homo sapiens; identical to SEQ ID NO: 216494
  chr15:101469411-101469585
  hypo

SEQ ID NO: 410532 - DNA, 89 bp, Homo sapiens; identical to SEQ ID NO: 319658
  chr15:101535315-101535404
  hypo

SEQ ID NO: 410533 - DNA, 243 bp, Homo sapiens; identical to SEQ ID NO: 268211
  chr15:101719768-101720011
  hypo

SEQ ID NO: 410534 - DNA, 107 bp, Homo sapiens; identical to SEQ ID NO: 268212
  chr15:101720485-101720592
  hypo

SEQ ID NO: 410535 - DNA, 81 bp, Homo sapiens; identical to SEQ ID NO: 268214
  chr15:101739034-101739115
  hypo

SEQ ID NO: 410536 - DNA, 154 bp, Homo sapiens; identical to SEQ ID NO: 224959
  chr15:101791012-101791166
  hypo

SEQ ID NO: 410537 - DNA, 196 bp, Homo sapiens; identical to SEQ ID NO: 216497
  chr15:101862667-101862863
  hypo

SEQ ID NO: 410538 - DNA, 116 bp, Homo sapiens; identical to SEQ ID NO: 268221
  chr15:101865103-101865219
  hypo

SEQ ID NO: 410539 - DNA, 32 bp, Homo sapiens; identical to SEQ ID NO: 216500
  chr15:101949766-101949798
  hypo

SEQ ID NO: 410540 - DNA, 214 bp, Homo sapiens; identical to SEQ ID NO: 216501
  chr15:101974813-101975027
  hypo

SEQ ID NO: 410541 - DNA, 114 bp, Homo sapiens; identical to SEQ ID NO: 268230
  chr15:101977435-101977549
  hypo

SEQ ID NO: 410542 - DNA, 172 bp, Homo sapiens; identical to SEQ ID NO: 216502
  chr15:102004885-102005057
  hypo

SEQ ID NO: 410543 - DNA, 156 bp, Homo sapiens; identical to SEQ ID NO: 268239
  chr15:102070859-102071015
  hypo

SEQ ID NO: 410544 - DNA, 36 bp, Homo sapiens; identical to SEQ ID NO: 268241
  chr15:102076394-102076430
  hypo

SEQ ID NO: 410545 - DNA, 174 bp, Homo sapiens; identical to SEQ ID NO: 216506
  chr15:102251172-102251346
  hypo

SEQ ID NO: 410546 - DNA, 143 bp, Homo sapiens; identical to SEQ ID NO: 216515
  chr16:136642-136785
  hypo

SEQ ID NO: 410547 - DNA, 40 bp, Homo sapiens; identical to SEQ ID NO: 216518
  chr16:232125-232165
  hypo

SEQ ID NO: 410548 - DNA, 39 bp, Homo sapiens; identical to SEQ ID NO: 268260
  chr16:232585-232624
  hypo

SEQ ID NO: 410549 - DNA, 89 bp, Homo sapiens; identical to SEQ ID NO: 268262
  chr16:255869-255958
  hypo

SEQ ID NO: 410550 - DNA, 50 bp, Homo sapiens; identical to SEQ ID NO: 268268
  chr16:316210-316260
  hypo

SEQ ID NO: 410551 - DNA, 134 bp, Homo sapiens; identical to SEQ ID NO: 216522
  chr16:354255-354389
  hypo

SEQ ID NO: 410552 - DNA, 190 bp, Homo sapiens; identical to SEQ ID NO: 216524
  chr16:360132-360322
  hypo

SEQ ID NO: 410553 - DNA, 266 bp, Homo sapiens; identical to SEQ ID NO: 268286
  chr16:422074-422340
  hypo

SEQ ID NO: 410554 - DNA, 92 bp, Homo sapiens; identical to SEQ ID NO: 268289
  chr16:439056-439148
  hypo

SEQ ID NO: 410555 - DNA, 39 bp, Homo sapiens; identical to SEQ ID NO: 386687
  chr16:468014-468053
  hypo

SEQ ID NO: 410556 - DNA, 120 bp, Homo sapiens; identical to SEQ ID NO: 216531
  chr16:505065-505185
  hypo

SEQ ID NO: 410557 - DNA, 568 bp, Homo sapiens; identical to SEQ ID NO: 268300
  chr16:525278-525846
  hypo

SEQ ID NO: 410558 - DNA, 163 bp, Homo sapiens; identical to SEQ ID NO: 216536
  chr16:534203-534366
  hypo

SEQ ID NO: 410559 - DNA, 65 bp, Homo sapiens; identical to SEQ ID NO: 268308
  chr16:573426-573491
  hypo

SEQ ID NO: 410560 - DNA, 72 bp, Homo sapiens; identical to SEQ ID NO: 216541
  chr16:587258-587330
  hypo

SEQ ID NO: 410561 - DNA, 165 bp, Homo sapiens; identical to SEQ ID NO: 216542
  chr16:588070-588235
  hypo

SEQ ID NO: 410562 - DNA, 40 bp, Homo sapiens; identical to SEQ ID NO: 216546
  chr16:613512-613552
  hypo

SEQ ID NO: 410563 - DNA, 785 bp, Homo sapiens; identical to SEQ ID NO: 268321
  chr16:623991-624776
  hypo

SEQ ID NO: 410564 - DNA, 44 bp, Homo sapiens; identical to SEQ ID NO: 393594
  chr16:666664-666708
  hypo

SEQ ID NO: 410565 - DNA, 130 bp, Homo sapiens
  chr16:668274-668404
  hypo
gctctttccattgcttttcaaaggatgtttctcctgattctttctgaatgtgagttgttgtcctgtcaaactcccaaggactttctttctttataaggatattctcacattggtttgtttatttgtttgt

SEQ ID NO: 410566 - DNA, 145 bp, Homo sapiens; identical to SEQ ID NO: 268334
  chr16:689010-689155
  hypo

SEQ ID NO: 410567 - DNA, 41 bp, Homo sapiens; identical to SEQ ID NO: 268337
  chr16:716021-716062
  hypo

SEQ ID NO: 410568 - DNA, 50 bp, Homo sapiens; identical to SEQ ID NO: 204077
  chr16:717960-718010
  hypo

SEQ ID NO: 410569 - DNA, 44 bp, Homo sapiens; identical to SEQ ID NO: 268344
  chr16:737200-737244
  hypo

SEQ ID NO: 410570 - DNA, 518 bp, Homo sapiens; identical to SEQ ID NO: 216565
  chr16:767027-767545
  hypo

SEQ ID NO: 410571 - DNA, 105 bp, Homo sapiens; identical to SEQ ID NO: 224977
  chr16:778111-778216
  hypo

SEQ ID NO: 410572 - DNA, 162 bp, Homo sapiens; identical to SEQ ID NO: 268349
  chr16:783583-783745
  hypo

SEQ ID NO: 410573 - DNA, 44 bp, Homo sapiens; identical to SEQ ID NO: 319817
  chr16:798359-798403
  hypo

SEQ ID NO: 410574 - DNA, 260 bp, Homo sapiens; identical to SEQ ID NO: 268351
  chr16:798433-798693
  hypo

SEQ ID NO: 410575 - DNA, 144 bp, Homo sapiens; identical to SEQ ID NO: 216568
  chr16:809245-809389
  hypo

SEQ ID NO: 410576 - DNA, 477 bp, Homo sapiens; identical to SEQ ID NO: 268354
  chr16:816636-817113
  hypo

SEQ ID NO: 410577 - DNA, 299 bp, Homo sapiens; identical to SEQ ID NO: 319828
  chr16:898860-899159
  hypo

SEQ ID NO: 410578 - DNA, 41 bp, Homo sapiens; identical to SEQ ID NO: 216574
  chr16:899189-899230
  hypo

SEQ ID NO: 410579 - DNA, 96 bp, Homo sapiens; identical to SEQ ID NO: 216575
  chr16:919967-920063
  hypo

SEQ ID NO: 410580 - DNA, 44 bp, Homo sapiens; identical to SEQ ID NO: 319832
  chr16:924504-924548
  hypo

SEQ ID NO: 410581 - DNA, 220 bp, Homo sapiens; identical to SEQ ID NO: 319833
  chr16:929566-929786
  hypo

SEQ ID NO: 410582 - DNA, 129 bp, Homo sapiens; identical to SEQ ID NO: 216580
  chr16:949645-949774
  hypo

SEQ ID NO: 410583 - DNA, 126 bp, Homo sapiens; identical to SEQ ID NO: 268376
  chr16:967568-967694
  hypo

SEQ ID NO: 410584 - DNA, 154 bp, Homo sapiens; identical to SEQ ID NO: 319845
  chr16:969055-969209
  hypo

SEQ ID NO: 410585 - DNA, 244 bp, Homo sapiens; identical to SEQ ID NO: 319846
  chr16:969239-969483
  hypo

SEQ ID NO: 410586 - DNA, 171 bp, Homo sapiens; identical to SEQ ID NO: 268381
  chr16:1014778-1014949
  hypo

SEQ ID NO: 410587 - DNA, 465 bp, Homo sapiens; identical to SEQ ID NO: 319852
  chr16:1017655-1018120
  hypo

SEQ ID NO: 410588 - DNA, 573 bp, Homo sapiens; identical to SEQ ID NO: 319860
  chr16:1075861-1076434
  hypo

SEQ ID NO: 410589 - DNA, 227 bp, Homo sapiens; identical to SEQ ID NO: 319861
  chr16:1077659-1077886
  hypo

SEQ ID NO: 410590 - DNA, 48 bp, Homo sapiens; identical to SEQ ID NO: 319862
  chr16:1077949-1077997
  hypo

SEQ ID NO: 410591 - DNA, 119 bp, Homo sapiens; identical to SEQ ID NO: 216587
  chr16:1081654-1081773
  hypo

SEQ ID NO: 410592 - DNA, 36 bp, Homo sapiens; identical to SEQ ID NO: 268392
  chr16:1095307-1095343
  hypo

SEQ ID NO: 410593 - DNA, 109 bp, Homo sapiens; identical to SEQ ID NO: 216588
  chr16:1198574-1198683
  hypo

SEQ ID NO: 410594 - DNA, 227 bp, Homo sapiens; identical to SEQ ID NO: 268402
  chr16:1199857-1200084
  hypo

SEQ ID NO: 410595 - DNA, 73 bp, Homo sapiens; identical to SEQ ID NO: 268412
  chr16:1247873-1247946
  hypo

SEQ ID NO: 410596 - DNA, 58 bp, Homo sapiens; identical to SEQ ID NO: 319895
  chr16:1267126-1267184
  hypo

SEQ ID NO: 410597 - DNA, 35 bp, Homo sapiens; identical to SEQ ID NO: 319896
  chr16:1267214-1267249
  hypo

SEQ ID NO: 410598 - DNA, 217 bp, Homo sapiens; identical to SEQ ID NO: 319897
  chr16:1267479-1267696
  hypo

SEQ ID NO: 410599 - DNA, 39 bp, Homo sapiens; identical to SEQ ID NO: 268426
  chr16:1341419-1341458
  hypo

SEQ ID NO: 410600 - DNA, 142 bp, Homo sapiens; identical to SEQ ID NO: 216601
  chr16:1367993-1368135
  hypo

SEQ ID NO: 410601 - DNA, 100 bp, Homo sapiens; identical to SEQ ID NO: 268431
  chr16:1370327-1370427
  hypo

SEQ ID NO: 410602 - DNA, 83 bp, Homo sapiens; identical to SEQ ID NO: 268432
  chr16:1374351-1374434
  hypo

SEQ ID NO: 410603 - DNA, 144 bp, Homo sapiens; identical to SEQ ID NO: 291244
  chr16:1384098-1384242
  hypo

SEQ ID NO: 410604 - DNA, 145 bp, Homo sapiens; identical to SEQ ID NO: 268433
  chr16:1390248-1390393
  hypo

SEQ ID NO: 410605 - DNA, 55 bp, Homo sapiens; identical to SEQ ID NO: 319912
  chr16:1391650-1391705
  hypo

SEQ ID NO: 410606 - DNA, 74 bp, Homo sapiens; identical to SEQ ID NO: 268437
  chr16:1406894-1406968
  hypo

SEQ ID NO: 410607 - DNA, 274 bp, Homo sapiens; identical to SEQ ID NO: 319917
  chr16:1407936-1408210
  hypo

SEQ ID NO: 410608 - DNA, 178 bp, Homo sapiens; identical to SEQ ID NO: 268440
  chr16:1414467-1414645
  hypo

SEQ ID NO: 410609 - DNA, 145 bp, Homo sapiens; identical to SEQ ID NO: 268441
  chr16:1416341-1416486
  hypo

SEQ ID NO: 410610 - DNA, 243 bp, Homo sapiens; identical to SEQ ID NO: 204080
  chr16:1429037-1429280
  hypo

SEQ ID NO: 410611 - DNA, 248 bp, Homo sapiens; identical to SEQ ID NO: 268447
  chr16:1435412-1435660
  hypo

SEQ ID NO: 410612 - DNA, 32 bp, Homo sapiens; identical to SEQ ID NO: 216611
  chr16:1465337-1465369
  hypo

SEQ ID NO: 410613 - DNA, 59 bp, Homo sapiens; identical to SEQ ID NO: 393610
  chr16:1472168-1472227
  hypo

SEQ ID NO: 410614 - DNA, 41 bp, Homo sapiens; identical to SEQ ID NO: 319931
  chr16:1487860-1487901
  hypo

SEQ ID NO: 410615 - DNA, 42 bp, Homo sapiens; identical to SEQ ID NO: 319932
  chr16:1488051-1488093
  hypo

SEQ ID NO: 410616 - DNA, 183 bp, Homo sapiens; identical to SEQ ID NO: 319933
  chr16:1488497-1488680
  hypo

SEQ ID NO: 410617 - DNA, 103 bp, Homo sapiens; identical to SEQ ID NO: 319934
  chr16:1488710-1488813
  hypo

SEQ ID NO: 410618 - DNA, 849 bp, Homo sapiens; identical to SEQ ID NO: 268457
  chr16:1510691-1511540
  hypo

SEQ ID NO: 410619 - DNA, 42 bp, Homo sapiens; identical to SEQ ID NO: 268463
  chr16:1575251-1575293
  hypo

SEQ ID NO: 410620 - DNA, 166 bp, Homo sapiens; identical to SEQ ID NO: 268464
  chr16:1575857-1576023
  hypo

SEQ ID NO: 410621 - DNA, 67 bp, Homo sapiens; identical to SEQ ID NO: 216621
  chr16:1613977-1614044
  hypo

SEQ ID NO: 410622 - DNA, 62 bp, Homo sapiens
  chr16:1652583-1652645
  hypo
gcactccccctgcattggatgagaggcaaattcccacagttcagagagggacagctactttt

SEQ ID NO: 410623 - DNA, 434 bp, Homo sapiens; identical to SEQ ID NO: 224987
  chr16:1660449-1660883
  hypo

SEQ ID NO: 410624 - DNA, 82 bp, Homo sapiens; identical to SEQ ID NO: 268478
  chr16:1681341-1681423
  hypo

SEQ ID NO: 410625 - DNA, 128 bp, Homo sapiens; identical to SEQ ID NO: 216627
  chr16:1701258-1701386
  hypo

SEQ ID NO: 410626 - DNA, 128 bp, Homo sapiens; identical to SEQ ID NO: 268485
  chr16:1719761-1719889
  hypo

SEQ ID NO: 410627 - DNA, 123 bp, Homo sapiens; identical to SEQ ID NO: 268486
  chr16:1723672-1723795
  hypo

SEQ ID NO: 410628 - DNA, 198 bp, Homo sapiens; identical to SEQ ID NO: 268489
  chr16:1731569-1731767
  hypo

SEQ ID NO: 410629 - DNA, 164 bp, Homo sapiens; identical to SEQ ID NO: 268491
  chr16:1735954-1736118
  hypo

SEQ ID NO: 410630 - DNA, 161 bp, Homo sapiens; identical to SEQ ID NO: 319979
  chr16:1739991-1740152
  hypo

SEQ ID NO: 410631 - DNA, 83 bp, Homo sapiens; identical to SEQ ID NO: 319980
  chr16:1740206-1740289
  hypo

SEQ ID NO: 410632 - DNA, 68 bp, Homo sapiens; identical to SEQ ID NO: 268495
  chr16:1748235-1748303
  hypo

SEQ ID NO: 410633 - DNA, 121 bp, Homo sapiens; identical to SEQ ID NO: 268496
  chr16:1748861-1748982
  hypo

SEQ ID NO: 410634 - DNA, 90 bp, Homo sapiens; identical to SEQ ID NO: 268498
  chr16:1751083-1751173
  hypo

SEQ ID NO: 410635 - DNA, 106 bp, Homo sapiens; identical to SEQ ID NO: 268500
  chr16:1795484-1795590
  hypo

SEQ ID NO: 410636 - DNA, 164 bp, Homo sapiens; identical to SEQ ID NO: 216637
  chr16:1805218-1805382
  hypo

SEQ ID NO: 410637 - DNA, 34 bp, Homo sapiens; identical to SEQ ID NO: 268504
  chr16:1807114-1807148
  hypo

SEQ ID NO: 410638 - DNA, 307 bp, Homo sapiens; identical to SEQ ID NO: 216642
  chr16:1818407-1818714
  hypo

SEQ ID NO: 410639 - DNA, 94 bp, Homo sapiens; identical to SEQ ID NO: 268514
  chr16:1835078-1835172
  hypo

SEQ ID NO: 410640 - DNA, 36 bp, Homo sapiens; identical to SEQ ID NO: 268520
  chr16:1938628-1938664
  hypo

SEQ ID NO: 410641 - DNA, 32 bp, Homo sapiens; identical to SEQ ID NO: 268521
  chr16:1944317-1944349
  hypo

SEQ ID NO: 410642 - DNA, 162 bp, Homo sapiens; identical to SEQ ID NO: 320013
  chr16:1960052-1960214
  hypo

SEQ ID NO: 410643 - DNA, 100 bp, Homo sapiens; identical to SEQ ID NO: 268524
  chr16:1985415-1985515
  hypo

SEQ ID NO: 410644 - DNA, 515 bp, Homo sapiens; identical to SEQ ID NO: 268529
  chr16:2003499-2004014
  hypo

SEQ ID NO: 410645 - DNA, 120 bp, Homo sapiens; identical to SEQ ID NO: 268530
  chr16:2007511-2007631
  hypo

SEQ ID NO: 410646 - DNA, 308 bp, Homo sapiens; identical to SEQ ID NO: 216649
  chr16:2049434-2049742
  hypo

SEQ ID NO: 410647 - DNA, 71 bp, Homo sapiens; identical to SEQ ID NO: 216659
  chr16:2135230-2135301
  hypo

SEQ ID NO: 410648 - DNA, 314 bp, Homo sapiens; identical to SEQ ID NO: 216660
  chr16:2135330-2135644
  hypo

SEQ ID NO: 410649 - DNA, 71 bp, Homo sapiens; identical to SEQ ID NO: 268553
  chr16:2144843-2144914
  hypo

SEQ ID NO: 410650 - DNA, 78 bp, Homo sapiens; identical to SEQ ID NO: 320052
  chr16:2145547-2145625
  hypo

SEQ ID NO: 410651 - DNA, 151 bp, Homo sapiens; identical to SEQ ID NO: 320053
  chr16:2145727-2145878
  hypo

SEQ ID NO: 410652 - DNA, 63 bp, Homo sapiens; identical to SEQ ID NO: 216665
  chr16:2146462-2146525
  hypo

SEQ ID NO: 410653 - DNA, 101 bp, Homo sapiens; identical to SEQ ID NO: 320060
  chr16:2212858-2212959
  hypo

SEQ ID NO: 410654 - DNA, 65 bp, Homo sapiens; identical to SEQ ID NO: 268568
  chr16:2235438-2235503
  hypo

SEQ ID NO: 410655 - DNA, 50 bp, Homo sapiens; identical to SEQ ID NO: 268576
  chr16:2294342-2294392
  hypo

SEQ ID NO: 410656 - DNA, 185 bp, Homo sapiens; identical to SEQ ID NO: 268579
  chr16:2338097-2338282
  hypo

SEQ ID NO: 410657 - DNA, 160 bp, Homo sapiens; identical to SEQ ID NO: 268580
  chr16:2339391-2339551
  hypo

SEQ ID NO: 410658 - DNA, 396 bp, Homo sapiens; identical to SEQ ID NO: 268581
  chr16:2347405-2347801
  hypo

SEQ ID NO: 410659 - DNA, 54 bp, Homo sapiens; identical to SEQ ID NO: 268583
  chr16:2369672-2369726
  hypo

SEQ ID NO: 410660 - DNA, 108 bp, Homo sapiens; identical to SEQ ID NO: 268589
  chr16:2501133-2501241
  hypo

SEQ ID NO: 410661 - DNA, 99 bp, Homo sapiens; identical to SEQ ID NO: 216680
  chr16:2508556-2508655
  hypo

SEQ ID NO: 410662 - DNA, 268 bp, Homo sapiens; identical to SEQ ID NO: 291276
  chr16:2521459-2521727
  hypo

SEQ ID NO: 410663 - DNA, 119 bp, Homo sapiens; identical to SEQ ID NO: 291277
  chr16:2521857-2521976
  hypo

SEQ ID NO: 410664 - DNA, 47 bp, Homo sapiens; identical to SEQ ID NO: 268594
  chr16:2539901-2539948
  hypo

SEQ ID NO: 410665 - DNA, 145 bp, Homo sapiens; identical to SEQ ID NO: 216688
  chr16:2579464-2579609
  hypo

SEQ ID NO: 410666 - DNA, 249 bp, Homo sapiens; identical to SEQ ID NO: 216691
  chr16:2648042-2648291
  hypo

SEQ ID NO: 410667 - DNA, 209 bp, Homo sapiens; identical to SEQ ID NO: 268604
  chr16:2716878-2717087
  hypo

SEQ ID NO: 410668 - DNA, 165 bp, Homo sapiens; identical to SEQ ID NO: 320120
  chr16:2819593-2819758
  hypo

SEQ ID NO: 410669 - DNA, 232 bp, Homo sapiens; identical to SEQ ID NO: 268615
  chr16:2975080-2975312
  hypo

SEQ ID NO: 410670 - DNA, 65 bp, Homo sapiens; identical to SEQ ID NO: 268617
  chr16:3051091-3051156
  hypo

SEQ ID NO: 410671 - DNA, 136 bp, Homo sapiens; identical to SEQ ID NO: 268618
  chr16:3052305-3052441
  hypo

SEQ ID NO: 410672 - DNA, 35 bp, Homo sapiens; identical to SEQ ID NO: 268619
  chr16:3053165-3053200
  hypo

SEQ ID NO: 410673 - DNA, 37 bp, Homo sapiens; identical to SEQ ID NO: 291287
  chr16:3097009-3097046
  hypo

SEQ ID NO: 410674 - DNA, 469 bp, Homo sapiens; identical to SEQ ID NO: 393630
  chr16:3139975-3140444
  hypo

SEQ ID NO: 410675 - DNA, 67 bp, Homo sapiens; identical to SEQ ID NO: 268624
  chr16:3169009-3169076
  hypo

SEQ ID NO: 410676 - DNA, 187 bp, Homo sapiens; identical to SEQ ID NO: 216701
  chr16:3189117-3189304
  hypo

SEQ ID NO: 410677 - DNA, 32 bp, Homo sapiens; identical to SEQ ID NO: 238340
  chr16:3200663-3200695
  hypo

SEQ ID NO: 410678 - DNA, 107 bp, Homo sapiens; identical to SEQ ID NO: 320144
  chr16:3211536-3211643
  hypo

SEQ ID NO: 410679 - DNA, 137 bp, Homo sapiens; identical to SEQ ID NO: 216707
  chr16:3515977-3516114
  hypo

SEQ ID NO: 410680 - DNA, 145 bp, Homo sapiens; identical to SEQ ID NO: 268637
  chr16:3542403-3542548
  hypo

SEQ ID NO: 410681 - DNA, 37 bp, Homo sapiens; identical to SEQ ID NO: 216709
  chr16:3552775-3552812
  hypo

SEQ ID NO: 410682 - DNA, 118 bp, Homo sapiens; identical to SEQ ID NO: 268641
  chr16:3635039-3635157
  hypo

SEQ ID NO: 410683 - DNA, 121 bp, Homo sapiens; identical to SEQ ID NO: 268643
  chr16:3704780-3704901
  hypo

SEQ ID NO: 410684 - DNA, 77 bp, Homo sapiens; identical to SEQ ID NO: 268644
  chr16:3706729-3706806
  hypo

SEQ ID NO: 410685 - DNA, 146 bp, Homo sapiens; identical to SEQ ID NO: 268649
  chr16:3777135-3777281
  hypo

SEQ ID NO: 410686 - DNA, 131 bp, Homo sapiens; identical to SEQ ID NO: 268650
  chr16:3781042-3781173
  hypo

SEQ ID NO: 410687 - DNA, 1007 bp, Homo sapiens; identical to SEQ ID NO: 399823
  chr16:3781555-3782562
  hypo

SEQ ID NO: 410688 - DNA, 182 bp, Homo sapiens; identical to SEQ ID NO: 216715
  chr16:3785796-3785978
  hypo

SEQ ID NO: 410689 - DNA, 152 bp, Homo sapiens; identical to SEQ ID NO: 216716
  chr16:3802012-3802164
  hypo

SEQ ID NO: 410690 - DNA, 50 bp, Homo sapiens; identical to SEQ ID NO: 268661
  chr16:3873408-3873458
  hypo

SEQ ID NO: 410691 - DNA, 78 bp, Homo sapiens; identical to SEQ ID NO: 268663
  chr16:3925259-3925337
  hypo

SEQ ID NO: 410692 - DNA, 111 bp, Homo sapiens; identical to SEQ ID NO: 225001
  chr16:3989147-3989258
  hypo

SEQ ID NO: 410693 - DNA, 75 bp, Homo sapiens; identical to SEQ ID NO: 268666
  chr16:4016326-4016401
  hypo

SEQ ID NO: 410694 - DNA, 237 bp, Homo sapiens; identical to SEQ ID NO: 268667
  chr16:4021225-4021462
  hypo

SEQ ID NO: 410695 - DNA, 138 bp, Homo sapiens; identical to SEQ ID NO: 268668
  chr16:4029240-4029378
  hypo

SEQ ID NO: 410696 - DNA, 273 bp, Homo sapiens; identical to SEQ ID NO: 268672
  chr16:4160070-4160343
  hypo

SEQ ID NO: 410697 - DNA, 106 bp, Homo sapiens; identical to SEQ ID NO: 179392
  chr16:4164069-4164175
  hypo

SEQ ID NO: 410698 - DNA, 71 bp, Homo sapiens; identical to SEQ ID NO: 320191
  chr16:4203567-4203638
  hypo

SEQ ID NO: 410699 - DNA, 482 bp, Homo sapiens; identical to SEQ ID NO: 268680
  chr16:4268166-4268648
  hypo

SEQ ID NO: 410700 - DNA, 153 bp, Homo sapiens; identical to SEQ ID NO: 268683
  chr16:4313275-4313428
  hypo

SEQ ID NO: 410701 - DNA, 204 bp, Homo sapiens; identical to SEQ ID NO: 320203
  chr16:4385112-4385316
  hypo

SEQ ID NO: 410702 - DNA, 44 bp, Homo sapiens; identical to SEQ ID NO: 268688
  chr16:4414173-4414217
  hypo

SEQ ID NO: 410703 - DNA, 116 bp, Homo sapiens; identical to SEQ ID NO: 268702
  chr16:4644648-4644764
  hypo

SEQ ID NO: 410704 - DNA, 100 bp, Homo sapiens; identical to SEQ ID NO: 268705
  chr16:4671351-4671451
  hypo

SEQ ID NO: 410705 - DNA, 92 bp, Homo sapiens; identical to SEQ ID NO: 216736
  chr16:4689936-4690028
  hypo

SEQ ID NO: 410706 - DNA, 526 bp, Homo sapiens; identical to SEQ ID NO: 216737
  chr16:4704660-4705186
  hypo

SEQ ID NO: 410707 - DNA, 455 bp, Homo sapiens; identical to SEQ ID NO: 268708
  chr16:4717781-4718236
  hypo

SEQ ID NO: 410708 - DNA, 226 bp, Homo sapiens; identical to SEQ ID NO: 268711
  chr16:4731810-4732036
  hypo

SEQ ID NO: 410709 - DNA, 67 bp, Homo sapiens; identical to SEQ ID NO: 268712
  chr16:4748493-4748560
  hypo

SEQ ID NO: 410710 - DNA, 101 bp, Homo sapiens; identical to SEQ ID NO: 268713
  chr16:4748901-4749002
  hypo

SEQ ID NO: 410711 - DNA, 142 bp, Homo sapiens; identical to SEQ ID NO: 268716
  chr16:4795507-4795649
  hypo

SEQ ID NO: 410712 - DNA, 134 bp, Homo sapiens; identical to SEQ ID NO: 268718
  chr16:4841348-4841482
  hypo

SEQ ID NO: 410713 - DNA, 93 bp, Homo sapiens; identical to SEQ ID NO: 216743
  chr16:4845270-4845363
  hypo

SEQ ID NO: 410714 - DNA, 215 bp, Homo sapiens; identical to SEQ ID NO: 225008
  chr16:4852975-4853190
  hypo

SEQ ID NO: 410715 - DNA, 96 bp, Homo sapiens; identical to SEQ ID NO: 216745
  chr16:4900508-4900604
  hypo

SEQ ID NO: 410716 - DNA, 117 bp, Homo sapiens; identical to SEQ ID NO: 216746
  chr16:4900634-4900751
  hypo

SEQ ID NO: 410717 - DNA, 50 bp, Homo sapiens; identical to SEQ ID NO: 320244
  chr16:4931479-4931529
  hypo

SEQ ID NO: 410718 - DNA, 78 bp, Homo sapiens; identical to SEQ ID NO: 320245
  chr16:4931559-4931637
  hypo

SEQ ID NO: 410719 - DNA, 511 bp, Homo sapiens; identical to SEQ ID NO: 268727
  chr16:4933220-4933731
  hypo

SEQ ID NO: 410720 - DNA, 167 bp, Homo sapiens; identical to SEQ ID NO: 216752
  chr16:4980311-4980478
  hypo

SEQ ID NO: 410721 - DNA, 366 bp, Homo sapiens; identical to SEQ ID NO: 268731
  chr16:4981429-4981795
  hypo

SEQ ID NO: 410722 - DNA, 207 bp, Homo sapiens; identical to SEQ ID NO: 268732
  chr16:5084818-5085025
  hypo

SEQ ID NO: 410723 - DNA, 206 bp, Homo sapiens; identical to SEQ ID NO: 216754
  chr16:5628622-5628828
  hypo

SEQ ID NO: 410724 - DNA, 31 bp, Homo sapiens; identical to SEQ ID NO: 268737
  chr16:6838744-6838775
  hypo

SEQ ID NO: 410725 - DNA, 99 bp, Homo sapiens; identical to SEQ ID NO: 268738
  chr16:6860826-6860925
  hypo

SEQ ID NO: 410726 - DNA, 129 bp, Homo sapiens; identical to SEQ ID NO: 268746
  chr16:9013680-9013809
  hypo

SEQ ID NO: 410727 - DNA, 135 bp, Homo sapiens; identical to SEQ ID NO: 268749
  chr16:9218839-9218974
  hypo

SEQ ID NO: 410728 - DNA, 175 bp, Homo sapiens; identical to SEQ ID NO: 268751
  chr16:10031818-10031993
  hypo

SEQ ID NO: 410729 - DNA, 97 bp, Homo sapiens; identical to SEQ ID NO: 268752
  chr16:10517770-10517867
  hypo

SEQ ID NO: 410730 - DNA, 186 bp, Homo sapiens; identical to SEQ ID NO: 216761
  chr16:10631325-10631511
  hypo

SEQ ID NO: 410731 - DNA, 257 bp, Homo sapiens; identical to SEQ ID NO: 216763
  chr16:10868652-10868909
  hypo

SEQ ID NO: 410732 - DNA, 38 bp, Homo sapiens; identical to SEQ ID NO: 268756
  chr16:10913111-10913149
  hypo

SEQ ID NO: 410733 - DNA, 54 bp, Homo sapiens; identical to SEQ ID NO: 268760
  chr16:11072431-11072485
  hypo

SEQ ID NO: 410734 - DNA, 314 bp, Homo sapiens; identical to SEQ ID NO: 268761
  chr16:11072844-11073158
  hypo

SEQ ID NO: 410735 - DNA, 196 bp, Homo sapiens; identical to SEQ ID NO: 268762
  chr16:11085470-11085666
  hypo

SEQ ID NO: 410736 - DNA, 186 bp, Homo sapiens; identical to SEQ ID NO: 216769
  chr16:11174343-11174529
  hypo

SEQ ID NO: 410737 - DNA, 41 bp, Homo sapiens; identical to SEQ ID NO: 268771
  chr16:11225773-11225814
  hypo

SEQ ID NO: 410738 - DNA, 49 bp, Homo sapiens; identical to SEQ ID NO: 268774
  chr16:11249342-11249391
  hypo

SEQ ID NO: 410739 - DNA, 226 bp, Homo sapiens; identical to SEQ ID NO: 268775
  chr16:11249644-11249870
  hypo

SEQ ID NO: 410740 - DNA, 104 bp, Homo sapiens; identical to SEQ ID NO: 216776
  chr16:11265077-11265181
  hypo

SEQ ID NO: 410741 - DNA, 134 bp, Homo sapiens; identical to SEQ ID NO: 268777
  chr16:11267978-11268112
  hypo

SEQ ID NO: 410742 - DNA, 138 bp, Homo sapiens; identical to SEQ ID NO: 320309
  chr16:11282895-11283033
  hypo

SEQ ID NO: 410743 - DNA, 119 bp, Homo sapiens; identical to SEQ ID NO: 268781
  chr16:11323718-11323837
  hypo

SEQ ID NO: 410744 - DNA, 119 bp, Homo sapiens; identical to SEQ ID NO: 268782
  chr16:11344316-11344435
  hypo

SEQ ID NO: 410745 - DNA, 416 bp, Homo sapiens; identical to SEQ ID NO: 225015
  chr16:11348663-11349079
  hypo

SEQ ID NO: 410746 - DNA, 52 bp, Homo sapiens; identical to SEQ ID NO: 216777
  chr16:11370335-11370387
  hypo

SEQ ID NO: 410747 - DNA, 387 bp, Homo sapiens; identical to SEQ ID NO: 268784
  chr16:11398035-11398422
  hypo

SEQ ID NO: 410748 - DNA, 47 bp, Homo sapiens; identical to SEQ ID NO: 268785
  chr16:11443253-11443300
  hypo

SEQ ID NO: 410749 - DNA, 110 bp, Homo sapiens; identical to SEQ ID NO: 320321
  chr16:11770050-11770160
  hypo

SEQ ID NO: 410750 - DNA, 134 bp, Homo sapiens; identical to SEQ ID NO: 320322
  chr16:11770190-11770324
  hypo

SEQ ID NO: 410751 - DNA, 214 bp, Homo sapiens; identical to SEQ ID NO: 216782
  chr16:11775050-11775264
  hypo

SEQ ID NO: 410752 - DNA, 72 bp, Homo sapiens; identical to SEQ ID NO: 268794
  chr16:11786030-11786102
  hypo

SEQ ID NO: 410753 - DNA, 44 bp, Homo sapiens; identical to SEQ ID NO: 268806
  chr16:11989479-11989523
  hypo

SEQ ID NO: 410754 - DNA, 180 bp, Homo sapiens; identical to SEQ ID NO: 216789
  chr16:12011433-12011613
  hypo

SEQ ID NO: 410755 - DNA, 120 bp, Homo sapiens; identical to SEQ ID NO: 268809
  chr16:12018078-12018198
  hypo

SEQ ID NO: 410756 - DNA, 36 bp, Homo sapiens; identical to SEQ ID NO: 268810
  chr16:12042328-12042364
  hypo

SEQ ID NO: 410757 - DNA, 120 bp, Homo sapiens; identical to SEQ ID NO: 268811
  chr16:12068910-12069030
  hypo

SEQ ID NO: 410758 - DNA, 148 bp, Homo sapiens; identical to SEQ ID NO: 268813
  chr16:12118317-12118465
  hypo

SEQ ID NO: 410759 - DNA, 78 bp, Homo sapiens; identical to SEQ ID NO: 216792
  chr16:12136759-12136837
  hypo

SEQ ID NO: 410760 - DNA, 33 bp, Homo sapiens; identical to SEQ ID NO: 268817
  chr16:12157506-12157539
  hypo

SEQ ID NO: 410761 - DNA, 196 bp, Homo sapiens; identical to SEQ ID NO: 268821
  chr16:12237125-12237321
  hypo

SEQ ID NO: 410762 - DNA, 181 bp, Homo sapiens; identical to SEQ ID NO: 268822
  chr16:12264697-12264878
  hypo

SEQ ID NO: 410763 - DNA, 85 bp, Homo sapiens; identical to SEQ ID NO: 268824
  chr16:12286197-12286282
  hypo

SEQ ID NO: 410764 - DNA, 188 bp, Homo sapiens; identical to SEQ ID NO: 268826
  chr16:12293539-12293727
  hypo

SEQ ID NO: 410765 - DNA, 101 bp, Homo sapiens; identical to SEQ ID NO: 268828
  chr16:12331021-12331122
  hypo

SEQ ID NO: 410766 - DNA, 169 bp, Homo sapiens; identical to SEQ ID NO: 268829
  chr16:12377985-12378154
  hypo

SEQ ID NO: 410767 - DNA, 82 bp, Homo sapiens; identical to SEQ ID NO: 268831
  chr16:12399116-12399198
  hypo

SEQ ID NO: 410768 - DNA, 358 bp, Homo sapiens; identical to SEQ ID NO: 268832
  chr16:12412005-12412363
  hypo

SEQ ID NO: 410769 - DNA, 80 bp, Homo sapiens; identical to SEQ ID NO: 268834
  chr16:12497524-12497604
  hypo

SEQ ID NO: 410770 - DNA, 327 bp, Homo sapiens; identical to SEQ ID NO: 268837
  chr16:12579140-12579467
  hypo

SEQ ID NO: 410771 - DNA, 69 bp, Homo sapiens; identical to SEQ ID NO: 268853
  chr16:14692498-14692567
  hypo

SEQ ID NO: 410772 - DNA, 111 bp, Homo sapiens; identical to SEQ ID NO: 216800
  chr16:14725660-14725771
  hypo

SEQ ID NO: 410773 - DNA, 38 bp, Homo sapiens; identical to SEQ ID NO: 216801
  chr16:14735318-14735356
  hypo

SEQ ID NO: 410774 - DNA, 152 bp, Homo sapiens; identical to SEQ ID NO: 216803
  chr16:14763027-14763179
  hypo

SEQ ID NO: 410775 - DNA, 38 bp, Homo sapiens; identical to SEQ ID NO: 268861
  chr16:15055595-15055633
  hypo

SEQ ID NO: 410776 - DNA, 58 bp, Homo sapiens; identical to SEQ ID NO: 320396
  chr16:15191479-15191537
  hypo

SEQ ID NO: 410777 - DNA, 191 bp, Homo sapiens; identical to SEQ ID NO: 268865
  chr16:15541440-15541631
  hypo

SEQ ID NO: 410778 - DNA, 120 bp, Homo sapiens; identical to SEQ ID NO: 216806
  chr16:15607783-15607903
  hypo

SEQ ID NO: 410779 - DNA, 68 bp, Homo sapiens; identical to SEQ ID NO: 216809
  chr16:15693241-15693309
  hypo

SEQ ID NO: 410780 - DNA, 83 bp, Homo sapiens; identical to SEQ ID NO: 216811
  chr16:15707174-15707257
  hypo

SEQ ID NO: 410781 - DNA, 82 bp, Homo sapiens; identical to SEQ ID NO: 216812
  chr16:15707963-15708045
  hypo

SEQ ID NO: 410782 - DNA, 260 bp, Homo sapiens; identical to SEQ ID NO: 216813
  chr16:15723202-15723462
  hypo

SEQ ID NO: 410783 - DNA, 104 bp, Homo sapiens; identical to SEQ ID NO: 268880
  chr16:15728112-15728216
  hypo

SEQ ID NO: 410784 - DNA, 127 bp, Homo sapiens; identical to SEQ ID NO: 216814
  chr16:15729537-15729664
  hypo

SEQ ID NO: 410785 - DNA, 99 bp, Homo sapiens; identical to SEQ ID NO: 216815
  chr16:15747494-15747593
  hypo

SEQ ID NO: 410786 - DNA, 55 bp, Homo sapiens; identical to SEQ ID NO: 268888
  chr16:15798699-15798754
  hypo

SEQ ID NO: 410787 - DNA, 78 bp, Homo sapiens; identical to SEQ ID NO: 268890
  chr16:15808722-15808800
  hypo

SEQ ID NO: 410788 - DNA, 34 bp, Homo sapiens
  chr16:15820529-15820563
  hypo
gtttttttaatatttaattgaacagggagatcat

SEQ ID NO: 410789 - DNA, 42 bp, Homo sapiens; identical to SEQ ID NO: 268894
  chr16:15991506-15991548
  hypo

SEQ ID NO: 410790 - DNA, 76 bp, Homo sapiens; identical to SEQ ID NO: 268895
  chr16:16019074-16019150
  hypo

SEQ ID NO: 410791 - DNA, 31 bp, Homo sapiens; identical to SEQ ID NO: 268896
  chr16:16022603-16022634
  hypo

SEQ ID NO: 410792 - DNA, 35 bp, Homo sapiens; identical to SEQ ID NO: 268897
  chr16:16041979-16042014
  hypo

SEQ ID NO: 410793 - DNA, 39 bp, Homo sapiens; identical to SEQ ID NO: 268898
  chr16:16090901-16090940
  hypo

SEQ ID NO: 410794 - DNA, 234 bp, Homo sapiens; identical to SEQ ID NO: 268900
  chr16:16180668-16180902
  hypo

SEQ ID NO: 410795 - DNA, 206 bp, Homo sapiens; identical to SEQ ID NO: 216821
  chr16:16219544-16219750
  hypo

SEQ ID NO: 410796 - DNA, 43 bp, Homo sapiens; identical to SEQ ID NO: 268905
  chr16:16245755-16245798
  hypo

SEQ ID NO: 410797 - DNA, 279 bp, Homo sapiens; identical to SEQ ID NO: 268906
  chr16:16259432-16259711
  hypo

SEQ ID NO: 410798 - DNA, 186 bp, Homo sapiens; identical to SEQ ID NO: 216823
  chr16:16282899-16283085
  hypo

SEQ ID NO: 410799 - DNA, 42 bp, Homo sapiens; identical to SEQ ID NO: 268908
  chr16:17054605-17054647
  hypo

SEQ ID NO: 410800 - DNA, 75 bp, Homo sapiens; identical to SEQ ID NO: 268909
  chr16:17294379-17294454
  hypo

SEQ ID NO: 410801 - DNA, 138 bp, Homo sapiens; identical to SEQ ID NO: 268910
  chr16:17357449-17357587
  hypo

SEQ ID NO: 410802 - DNA, 42 bp, Homo sapiens; identical to SEQ ID NO: 216824
  chr16:17754966-17755008
  hypo

SEQ ID NO: 410803 - DNA, 37 bp, Homo sapiens; identical to SEQ ID NO: 268912
  chr16:18036046-18036083
  hypo

SEQ ID NO: 410804 - DNA, 43 bp, Homo sapiens; identical to SEQ ID NO: 216826
  chr16:18884774-18884817
  hypo

SEQ ID NO: 410805 - DNA, 160 bp, Homo sapiens; identical to SEQ ID NO: 268918
  chr16:19051022-19051182
  hypo

SEQ ID NO: 410806 - DNA, 36 bp, Homo sapiens; identical to SEQ ID NO: 268919
  chr16:19085558-19085594
  hypo

SEQ ID NO: 410807 - DNA, 42 bp, Homo sapiens; identical to SEQ ID NO: 216827
  chr16:19184226-19184268
  hypo

SEQ ID NO: 410808 - DNA, 89 bp, Homo sapiens; identical to SEQ ID NO: 268922
  chr16:19252128-19252217
  hypo

SEQ ID NO: 410809 - DNA, 81 bp, Homo sapiens; identical to SEQ ID NO: 268925
  chr16:19485545-19485626
  hypo

SEQ ID NO: 410810 - DNA, 45 bp, Homo sapiens; identical to SEQ ID NO: 268927
  chr16:19568731-19568776
  hypo

SEQ ID NO: 410811 - DNA, 86 bp, Homo sapiens; identical to SEQ ID NO: 268931
  chr16:19706325-19706411
  hypo

SEQ ID NO: 410812 - DNA, 100 bp, Homo sapiens; identical to SEQ ID NO: 268934
  chr16:19743742-19743842
  hypo

SEQ ID NO: 410813 - DNA, 83 bp, Homo sapiens; identical to SEQ ID NO: 268938
  chr16:20335323-20335406
  hypo

SEQ ID NO: 410814 - DNA, 35 bp, Homo sapiens; identical to SEQ ID NO: 268939
  chr16:20702408-20702443
  hypo

SEQ ID NO: 410815 - DNA, 143 bp, Homo sapiens; identical to SEQ ID NO: 225024
  chr16:20817490-20817633
  hypo

SEQ ID NO: 410816 - DNA, 53 bp, Homo sapiens; identical to SEQ ID NO: 216839
  chr16:21178770-21178823
  hypo

SEQ ID NO: 410817 - DNA, 233 bp, Homo sapiens; identical to SEQ ID NO: 268952
  chr16:21535692-21535925
  hypo

SEQ ID NO: 410818 - DNA, 149 bp, Homo sapiens; identical to SEQ ID NO: 320481
  chr16:21539210-21539359
  hypo

SEQ ID NO: 410819 - DNA, 80 bp, Homo sapiens; identical to SEQ ID NO: 216845
  chr16:21635698-21635778
  hypo

SEQ ID NO: 410820 - DNA, 34 bp, Homo sapiens; identical to SEQ ID NO: 216846
  chr16:21666771-21666805
  hypo

SEQ ID NO: 410821 - DNA, 123 bp, Homo sapiens; identical to SEQ ID NO: 268965
  chr16:22236967-22237090
  hypo

SEQ ID NO: 410822 - DNA, 90 bp, Homo sapiens; identical to SEQ ID NO: 216849
  chr16:22285049-22285139
  hypo

SEQ ID NO: 410823 - DNA, 189 bp, Homo sapiens; identical to SEQ ID NO: 268967
  chr16:22324533-22324722
  hypo

SEQ ID NO: 410824 - DNA, 192 bp, Homo sapiens; identical to SEQ ID NO: 216852
  chr16:22358431-22358623
  hypo

SEQ ID NO: 410825 - DNA, 89 bp, Homo sapiens; identical to SEQ ID NO: 268971
  chr16:22411852-22411941
  hypo

SEQ ID NO: 410826 - DNA, 153 bp, Homo sapiens; identical to SEQ ID NO: 268972
  chr16:22792389-22792542
  hypo

SEQ ID NO: 410827 - DNA, 42 bp, Homo sapiens; identical to SEQ ID NO: 268973
  chr16:23093841-23093883
  hypo

SEQ ID NO: 410828 - DNA, 33 bp, Homo sapiens; identical to SEQ ID NO: 268975
  chr16:23331328-23331361
  hypo

SEQ ID NO: 410829 - DNA, 155 bp, Homo sapiens; identical to SEQ ID NO: 268978
  chr16:23402871-23403026
  hypo

SEQ ID NO: 410830 - DNA, 49 bp, Homo sapiens; identical to SEQ ID NO: 268981
  chr16:23481441-23481490
  hypo

SEQ ID NO: 410831 - DNA, 200 bp, Homo sapiens; identical to SEQ ID NO: 268982
  chr16:23496842-23497042
  hypo

SEQ ID NO: 410832 - DNA, 384 bp, Homo sapiens; identical to SEQ ID NO: 268988
  chr16:23577993-23578377
  hypo

SEQ ID NO: 410833 - DNA, 144 bp, Homo sapiens; identical to SEQ ID NO: 320519
  chr16:23595588-23595732
  hypo

SEQ ID NO: 410834 - DNA, 36 bp, Homo sapiens; identical to SEQ ID NO: 320520
  chr16:23595762-23595798
  hypo

SEQ ID NO: 410835 - DNA, 97 bp, Homo sapiens; identical to SEQ ID NO: 204138
  chr16:23766000-23766097
  hypo

SEQ ID NO: 410836 - DNA, 103 bp, Homo sapiens; identical to SEQ ID NO: 204139
  chr16:23766130-23766233
  hypo

SEQ ID NO: 410837 - DNA, 86 bp, Homo sapiens; identical to SEQ ID NO: 268994
  chr16:24079284-24079370
  hypo

SEQ ID NO: 410838 - DNA, 121 bp, Homo sapiens; identical to SEQ ID NO: 268996
  chr16:24131552-24131673
  hypo

SEQ ID NO: 410839 - DNA, 42 bp, Homo sapiens; identical to SEQ ID NO: 268997
  chr16:24288802-24288844
  hypo

SEQ ID NO: 410840 - DNA, 44 bp, Homo sapiens; identical to SEQ ID NO: 204140
  chr16:24354628-24354672
  hypo

SEQ ID NO: 410841 - DNA, 250 bp, Homo sapiens; identical to SEQ ID NO: 320531
  chr16:24372758-24373008
  hypo

SEQ ID NO: 410842 - DNA, 41 bp, Homo sapiens; identical to SEQ ID NO: 268999
  chr16:24587543-24587584
  hypo

SEQ ID NO: 410843 - DNA, 80 bp, Homo sapiens; identical to SEQ ID NO: 216861
  chr16:24772184-24772264
  hypo

SEQ ID NO: 410844 - DNA, 125 bp, Homo sapiens; identical to SEQ ID NO: 269006
  chr16:25009670-25009795
  hypo

SEQ ID NO: 410845 - DNA, 82 bp, Homo sapiens; identical to SEQ ID NO: 320540
  chr16:25071330-25071412
  hypo

SEQ ID NO: 410846 - DNA, 84 bp, Homo sapiens; identical to SEQ ID NO: 269008
  chr16:25168834-25168918
  hypo

SEQ ID NO: 410847 - DNA, 42 bp, Homo sapiens; identical to SEQ ID NO: 216864
  chr16:25266495-25266537
  hypo

SEQ ID NO: 410848 - DNA, 107 bp, Homo sapiens; identical to SEQ ID NO: 216865
  chr16:25266573-25266680
  hypo

SEQ ID NO: 410849 - DNA, 118 bp, Homo sapiens; identical to SEQ ID NO: 320545
  chr16:27052120-27052238
  hypo

SEQ ID NO: 410850 - DNA, 119 bp, Homo sapiens; identical to SEQ ID NO: 320546
  chr16:27052308-27052427
  hypo

SEQ ID NO: 410851 - DNA, 143 bp, Homo sapiens; identical to SEQ ID NO: 204142
  chr16:27121251-27121394
  hypo

SEQ ID NO: 410852 - DNA, 35 bp, Homo sapiens; identical to SEQ ID NO: 269013
  chr16:27219620-27219655
  hypo

SEQ ID NO: 410853 - DNA, 32 bp, Homo sapiens; identical to SEQ ID NO: 269015
  chr16:27242669-27242701
  hypo

SEQ ID NO: 410854 - DNA, 36 bp, Homo sapiens; identical to SEQ ID NO: 216868
  chr16:27309235-27309271
  hypo

SEQ ID NO: 410855 - DNA, 81 bp, Homo sapiens; identical to SEQ ID NO: 216869
  chr16:27475124-27475205
  hypo

SEQ ID NO: 410856 - DNA, 73 bp, Homo sapiens; identical to SEQ ID NO: 216870
  chr16:27475235-27475308
  hypo

SEQ ID NO: 410857 - DNA, 574 bp, Homo sapiens; identical to SEQ ID NO: 216871
  chr16:27475618-27476192
  hypo

SEQ ID NO: 410858 - DNA, 188 bp, Homo sapiens; identical to SEQ ID NO: 269023
  chr16:27506624-27506812
  hypo

SEQ ID NO: 410859 - DNA, 338 bp, Homo sapiens; identical to SEQ ID NO: 216872
  chr16:27510216-27510554
  hypo

SEQ ID NO: 410860 - DNA, 37 bp, Homo sapiens; identical to SEQ ID NO: 216874
  chr16:27539546-27539583
  hypo

SEQ ID NO: 410861 - DNA, 103 bp, Homo sapiens; identical to SEQ ID NO: 269031
  chr16:27640048-27640151
  hypo

SEQ ID NO: 410862 - DNA, 113 bp, Homo sapiens; identical to SEQ ID NO: 269032
  chr16:27735234-27735347
  hypo

SEQ ID NO: 410863 - DNA, 543 bp, Homo sapiens; identical to SEQ ID NO: 269033
  chr16:27748861-27749404
  hypo

SEQ ID NO: 410864 - DNA, 42 bp, Homo sapiens; identical to SEQ ID NO: 269037
  chr16:27945907-27945949
  hypo

SEQ ID NO: 410865 - DNA, 156 bp, Homo sapiens; identical to SEQ ID NO: 216878
  chr16:28116153-28116309
  hypo

SEQ ID NO: 410866 - DNA, 141 bp, Homo sapiens; identical to SEQ ID NO: 216880
  chr16:28332354-28332495
  hypo

SEQ ID NO: 410867 - DNA, 120 bp, Homo sapiens; identical to SEQ ID NO: 216881
  chr16:28822780-28822900
  hypo

SEQ ID NO: 410868 - DNA, 129 bp, Homo sapiens; identical to SEQ ID NO: 269047
  chr16:28845818-28845947
  hypo

SEQ ID NO: 410869 - DNA, 203 bp, Homo sapiens; identical to SEQ ID NO: 269050
  chr16:28911981-28912184
  hypo

SEQ ID NO: 410870 - DNA, 231 bp, Homo sapiens; identical to SEQ ID NO: 216883
  chr16:28914705-28914936
  hypo

SEQ ID NO: 410871 - DNA, 530 bp, Homo sapiens; identical to SEQ ID NO: 269053
  chr16:28922055-28922585
  hypo

SEQ ID NO: 410872 - DNA, 99 bp, Homo sapiens; identical to SEQ ID NO: 269056
  chr16:29023076-29023175
  hypo

SEQ ID NO: 410873 - DNA, 178 bp, Homo sapiens; identical to SEQ ID NO: 269057
  chr16:29118743-29118921
  hypo

SEQ ID NO: 410874 - DNA, 217 bp, Homo sapiens; identical to SEQ ID NO: 269058
  chr16:29150831-29151048
  hypo

SEQ ID NO: 410875 - DNA, 187 bp, Homo sapiens; identical to SEQ ID NO: 269061
  chr16:29198308-29198495
  hypo

SEQ ID NO: 410876 - DNA, 175 bp, Homo sapiens; identical to SEQ ID NO: 320599
  chr16:29230296-29230471
  hypo

SEQ ID NO: 410877 - DNA, 77 bp, Homo sapiens; identical to SEQ ID NO: 269066
  chr16:29262666-29262743
  hypo

SEQ ID NO: 410878 - DNA, 79 bp, Homo sapiens; identical to SEQ ID NO: 204150
  chr16:29606232-29606311
  hypo

SEQ ID NO: 410879 - DNA, 35 bp, Homo sapiens; identical to SEQ ID NO: 225043
  chr16:29691806-29691841
  hypo

SEQ ID NO: 410880 - DNA, 99 bp, Homo sapiens; identical to SEQ ID NO: 269069
  chr16:29697748-29697847
  hypo

SEQ ID NO: 410881 - DNA, 180 bp, Homo sapiens; identical to SEQ ID NO: 269070
  chr16:29703876-29704056
  hypo

SEQ ID NO: 410882 - DNA, 413 bp, Homo sapiens; identical to SEQ ID NO: 216893
  chr16:29755602-29756015
  hypo

SEQ ID NO: 410883 - DNA, 31 bp, Homo sapiens; identical to SEQ ID NO: 269073
  chr16:29820500-29820531
  hypo

SEQ ID NO: 410884 - DNA, 83 bp, Homo sapiens; identical to SEQ ID NO: 269075
  chr16:29821043-29821126
  hypo

SEQ ID NO: 410885 - DNA, 34 bp, Homo sapiens; identical to SEQ ID NO: 269082
  chr16:29866930-29866964
  hypo

SEQ ID NO: 410886 - DNA, 161 bp, Homo sapiens; identical to SEQ ID NO: 269083
  chr16:29873348-29873509
  hypo

SEQ ID NO: 410887 - DNA, 104 bp, Homo sapiens; identical to SEQ ID NO: 269085
  chr16:29971777-29971881
  hypo

SEQ ID NO: 410888 - DNA, 170 bp, Homo sapiens; identical to SEQ ID NO: 269087
  chr16:30000466-30000636
  hypo

SEQ ID NO: 410889 - DNA, 37 bp, Homo sapiens; identical to SEQ ID NO: 269090
  chr16:30018172-30018209
  hypo

SEQ ID NO: 410890 - DNA, 120 bp, Homo sapiens; identical to SEQ ID NO: 269094
  chr16:30073149-30073269
  hypo

SEQ ID NO: 410891 - DNA, 127 bp, Homo sapiens; identical to SEQ ID NO: 216905
  chr16:30125291-30125418
  hypo

SEQ ID NO: 410892 - DNA, 403 bp, Homo sapiens; identical to SEQ ID NO: 216907
  chr16:30199143-30199546
  hypo

SEQ ID NO: 410893 - DNA, 157 bp, Homo sapiens; identical to SEQ ID NO: 269104
  chr16:30402328-30402485
  hypo

SEQ ID NO: 410894 - DNA, 39 bp, Homo sapiens; identical to SEQ ID NO: 269107
  chr16:30506741-30506780
  hypo

SEQ ID NO: 410895 - DNA, 689 bp, Homo sapiens; identical to SEQ ID NO: 291456
  chr16:30596384-30597073
  hypo

SEQ ID NO: 410896 - DNA, 47 bp, Homo sapiens; identical to SEQ ID NO: 269112
  chr16:30737305-30737352
  hypo

SEQ ID NO: 410897 - DNA, 56 bp, Homo sapiens; identical to SEQ ID NO: 216910
  chr16:30784032-30784088
  hypo

SEQ ID NO: 410898 - DNA, 100 bp, Homo sapiens; identical to SEQ ID NO: 216911
  chr16:30794665-30794765
  hypo

SEQ ID NO: 410899 - DNA, 47 bp, Homo sapiens; identical to SEQ ID NO: 216913
  chr16:30835266-30835313
  hypo

SEQ ID NO: 410900 - DNA, 660 bp, Homo sapiens; identical to SEQ ID NO: 269122
  chr16:30845547-30846207
  hypo

SEQ ID NO: 410901 - DNA, 42 bp, Homo sapiens; identical to SEQ ID NO: 269124
  chr16:30938666-30938708
  hypo

SEQ ID NO: 410902 - DNA, 198 bp, Homo sapiens; identical to SEQ ID NO: 269126
  chr16:30939779-30939977
  hypo

SEQ ID NO: 410903 - DNA, 458 bp, Homo sapiens; identical to SEQ ID NO: 269127
  chr16:30958051-30958509
  hypo

SEQ ID NO: 410904 - DNA, 250 bp, Homo sapiens; identical to SEQ ID NO: 269128
  chr16:30964630-30964880
  hypo

SEQ ID NO: 410905 - DNA, 64 bp, Homo sapiens; identical to SEQ ID NO: 216919
  chr16:30968112-30968176
  hypo

SEQ ID NO: 410906 - DNA, 63 bp, Homo sapiens; identical to SEQ ID NO: 269136
  chr16:31009764-31009827
  hypo

SEQ ID NO: 410907 - DNA, 142 bp, Homo sapiens; identical to SEQ ID NO: 269137
  chr16:31012794-31012936
  hypo

SEQ ID NO: 410908 - DNA, 104 bp, Homo sapiens; identical to SEQ ID NO: 269138
  chr16:31013740-31013844
  hypo

SEQ ID NO: 410909 - DNA, 37 bp, Homo sapiens; identical to SEQ ID NO: 269139
  chr16:31039944-31039981
  hypo

SEQ ID NO: 410910 - DNA, 108 bp, Homo sapiens; identical to SEQ ID NO: 269140
  chr16:31073553-31073661
  hypo

SEQ ID NO: 410911 - DNA, 104 bp, Homo sapiens; identical to SEQ ID NO: 225053
  chr16:31117288-31117392
  hypo

SEQ ID NO: 410912 - DNA, 114 bp, Homo sapiens; identical to SEQ ID NO: 269146
  chr16:31415513-31415627
  hypo

SEQ ID NO: 410913 - DNA, 306 bp, Homo sapiens; identical to SEQ ID NO: 269147
  chr16:31422484-31422790
  hypo

SEQ ID NO: 410914 - DNA, 403 bp, Homo sapiens; identical to SEQ ID NO: 291484
  chr16:31453960-31454363
  hypo

SEQ ID NO: 410915 - DNA, 351 bp, Homo sapiens; identical to SEQ ID NO: 269151
  chr16:31475825-31476176
  hypo

SEQ ID NO: 410916 - DNA, 164 bp, Homo sapiens; identical to SEQ ID NO: 269155
  chr16:31508122-31508286
  hypo

SEQ ID NO: 410917 - DNA, 37 bp, Homo sapiens; identical to SEQ ID NO: 216934
  chr16:31557995-31558032
  hypo

SEQ ID NO: 410918 - DNA, 175 bp, Homo sapiens; identical to SEQ ID NO: 269161
  chr16:34986007-34986182
  hypo

SEQ ID NO: 410919 - DNA, 99 bp, Homo sapiens; identical to SEQ ID NO: 269181
  chr16:48535068-48535167
  hypo

SEQ ID NO: 410920 - DNA, 156 bp, Homo sapiens; identical to SEQ ID NO: 216949
  chr16:48577583-48577739
  hypo

SEQ ID NO: 410921 - DNA, 107 bp, Homo sapiens; identical to SEQ ID NO: 269189
  chr16:49671511-49671618
  hypo

SEQ ID NO: 410922 - DNA, 32 bp, Homo sapiens; identical to SEQ ID NO: 216951
  chr16:50218668-50218700
  hypo

SEQ ID NO: 410923 - DNA, 87 bp, Homo sapiens; identical to SEQ ID NO: 269196
  chr16:50272245-50272332
  hypo

SEQ ID NO: 410924 - DNA, 141 bp, Homo sapiens; identical to SEQ ID NO: 320750
  chr16:50336215-50336356
  hypo

SEQ ID NO: 410925 - DNA, 239 bp, Homo sapiens; identical to SEQ ID NO: 216956
  chr16:50336386-50336625
  hypo

SEQ ID NO: 410926 - DNA, 45 bp, Homo sapiens; identical to SEQ ID NO: 216962
  chr16:53448551-53448596
  hypo

SEQ ID NO: 410927 - DNA, 61 bp, Homo sapiens; identical to SEQ ID NO: 320764
  chr16:53467395-53467456
  hypo

SEQ ID NO: 410928 - DNA, 82 bp, Homo sapiens; identical to SEQ ID NO: 216965
  chr16:53825645-53825727
  hypo

SEQ ID NO: 410929 - DNA, 212 bp, Homo sapiens; identical to SEQ ID NO: 269216
  chr16:55052638-55052850
  hypo

SEQ ID NO: 410930 - DNA, 46 bp, Homo sapiens; identical to SEQ ID NO: 216967
  chr16:55053597-55053643
  hypo

SEQ ID NO: 410931 - DNA, 34 bp, Homo sapiens; identical to SEQ ID NO: 269219
  chr16:55215807-55215841
  hypo

SEQ ID NO: 410932 - DNA, 254 bp, Homo sapiens; identical to SEQ ID NO: 269221
  chr16:56309852-56310106
  hypo

SEQ ID NO: 410933 - DNA, 54 bp, Homo sapiens; identical to SEQ ID NO: 269222
  chr16:56345486-56345540
  hypo

SEQ ID NO: 410934 - DNA, 165 bp, Homo sapiens; identical to SEQ ID NO: 269224
  chr16:56368690-56368855
  hypo

SEQ ID NO: 410935 - DNA, 253 bp, Homo sapiens; identical to SEQ ID NO: 269225
  chr16:56370683-56370936
  hypo

SEQ ID NO: 410936 - DNA, 40 bp, Homo sapiens; identical to SEQ ID NO: 269233
  chr16:56869746-56869786
  hypo

SEQ ID NO: 410937 - DNA, 43 bp, Homo sapiens; identical to SEQ ID NO: 269234
  chr16:56902581-56902624
  hypo

SEQ ID NO: 410938 - DNA, 266 bp, Homo sapiens; identical to SEQ ID NO: 216979
  chr16:56928223-56928489
  hypo

SEQ ID NO: 410939 - DNA, 78 bp, Homo sapiens; identical to SEQ ID NO: 269236
  chr16:56951555-56951633
  hypo

SEQ ID NO: 410940 - DNA, 39 bp, Homo sapiens; identical to SEQ ID NO: 269237
  chr16:56953540-56953579
  hypo

SEQ ID NO: 410941 - DNA, 360 bp, Homo sapiens; identical to SEQ ID NO: 291576
  chr16:57126699-57127059
  hypo

SEQ ID NO: 410942 - DNA, 94 bp, Homo sapiens; identical to SEQ ID NO: 269241
  chr16:57304016-57304110
  hypo

SEQ ID NO: 410943 - DNA, 274 bp, Homo sapiens; identical to SEQ ID NO: 269245
  chr16:57537288-57537562
  hypo

SEQ ID NO: 410944 - DNA, 188 bp, Homo sapiens; identical to SEQ ID NO: 269247
  chr16:57601801-57601989
  hypo

SEQ ID NO: 410945 - DNA, 59 bp, Homo sapiens; identical to SEQ ID NO: 269248
  chr16:57657365-57657424
  hypo

SEQ ID NO: 410946 - DNA, 57 bp, Homo sapiens; identical to SEQ ID NO: 269250
  chr16:57686683-57686740
  hypo

SEQ ID NO: 410947 - DNA, 101 bp, Homo sapiens; identical to SEQ ID NO: 216983
  chr16:57697546-57697647
  hypo

SEQ ID NO: 410948 - DNA, 75 bp, Homo sapiens; identical to SEQ ID NO: 269253
  chr16:57737538-57737613
  hypo

SEQ ID NO: 410949 - DNA, 207 bp, Homo sapiens; identical to SEQ ID NO: 269254
  chr16:57759978-57760185
  hypo

SEQ ID NO: 410950 - DNA, 338 bp, Homo sapiens; identical to SEQ ID NO: 320821
  chr16:57935116-57935454
  hypo

SEQ ID NO: 410951 - DNA, 48 bp, Homo sapiens; identical to SEQ ID NO: 320822
  chr16:57935605-57935653
  hypo

SEQ ID NO: 410952 - DNA, 67 bp, Homo sapiens; identical to SEQ ID NO: 216988
  chr16:58076202-58076269
  hypo

SEQ ID NO: 410953 - DNA, 116 bp, Homo sapiens; identical to SEQ ID NO: 269271
  chr16:66542831-66542947
  hypo

SEQ ID NO: 410954 - DNA, 159 bp, Homo sapiens; identical to SEQ ID NO: 269272
  chr16:66579299-66579458
  hypo

SEQ ID NO: 410955 - DNA, 618 bp, Homo sapiens; identical to SEQ ID NO: 269273
  chr16:66600011-66600629
  hypo

SEQ ID NO: 410956 - DNA, 64 bp, Homo sapiens; identical to SEQ ID NO: 269275
  chr16:66752187-66752251
  hypo

SEQ ID NO: 410957 - DNA, 180 bp, Homo sapiens; identical to SEQ ID NO: 216996
  chr16:66781286-66781466
  hypo

SEQ ID NO: 410958 - DNA, 757 bp, Homo sapiens; identical to SEQ ID NO: 269277
  chr16:66835306-66836063
  hypo

SEQ ID NO: 410959 - DNA, 120 bp, Homo sapiens; identical to SEQ ID NO: 269279
  chr16:66986333-66986453
  hypo

SEQ ID NO: 410960 - DNA, 203 bp, Homo sapiens; identical to SEQ ID NO: 291611
  chr16:67183854-67184057
  hypo

SEQ ID NO: 410961 - DNA, 208 bp, Homo sapiens; identical to SEQ ID NO: 269283
  chr16:67213017-67213225
  hypo

SEQ ID NO: 410962 - DNA, 101 bp, Homo sapiens; identical to SEQ ID NO: 269285
  chr16:67222915-67223016
  hypo

SEQ ID NO: 410963 - DNA, 32 bp, Homo sapiens; identical to SEQ ID NO: 269287
  chr16:67241298-67241330
  hypo

SEQ ID NO: 410964 - DNA, 368 bp, Homo sapiens; identical to SEQ ID NO: 217008
  chr16:67469689-67470057
  hypo

SEQ ID NO: 410965 - DNA, 122 bp, Homo sapiens; identical to SEQ ID NO: 217010
  chr16:67470863-67470985
  hypo

SEQ ID NO: 410966 - DNA, 218 bp, Homo sapiens; identical to SEQ ID NO: 269297
  chr16:67478341-67478559
  hypo

SEQ ID NO: 410967 - DNA, 66 bp, Homo sapiens; identical to SEQ ID NO: 269300
  chr16:67574479-67574545
  hypo

SEQ ID NO: 410968 - DNA, 99 bp, Homo sapiens; identical to SEQ ID NO: 269304
  chr16:67848821-67848920
  hypo

SEQ ID NO: 410969 - DNA, 202 bp, Homo sapiens; identical to SEQ ID NO: 217018
  chr16:67920022-67920224
  hypo

SEQ ID NO: 410970 - DNA, 39 bp, Homo sapiens; identical to SEQ ID NO: 269308
  chr16:68250713-68250752
  hypo

SEQ ID NO: 410971 - DNA, 57 bp, Homo sapiens; identical to SEQ ID NO: 204267
  chr16:68298829-68298886
  hypo

SEQ ID NO: 410972 - DNA, 191 bp, Homo sapiens; identical to SEQ ID NO: 217030
  chr16:68737004-68737195
  hypo

SEQ ID NO: 410973 - DNA, 34 bp, Homo sapiens; identical to SEQ ID NO: 217031
  chr16:68739594-68739628
  hypo

SEQ ID NO: 410974 - DNA, 45 bp, Homo sapiens; identical to SEQ ID NO: 269317
  chr16:68755703-68755748
  hypo

SEQ ID NO: 410975 - DNA, 88 bp, Homo sapiens; identical to SEQ ID NO: 269319
  chr16:68782327-68782415
  hypo

SEQ ID NO: 410976 - DNA, 37 bp, Homo sapiens; identical to SEQ ID NO: 269320
  chr16:68838288-68838325
  hypo

SEQ ID NO: 410977 - DNA, 140 bp, Homo sapiens; identical to SEQ ID NO: 269322
  chr16:68854968-68855108
  hypo

SEQ ID NO: 410978 - DNA, 224 bp, Homo sapiens; identical to SEQ ID NO: 269323
  chr16:68856757-68856981
  hypo

SEQ ID NO: 410979 - DNA, 34 bp, Homo sapiens; identical to SEQ ID NO: 269326
  chr16:69077094-69077128
  hypo

SEQ ID NO: 410980 - DNA, 45 bp, Homo sapiens; identical to SEQ ID NO: 217038
  chr16:69133540-69133585
  hypo

SEQ ID NO: 410981 - DNA, 45 bp, Homo sapiens; identical to SEQ ID NO: 217039
  chr16:69133633-69133678
  hypo

SEQ ID NO: 410982 - DNA, 251 bp, Homo sapiens; identical to SEQ ID NO: 269329
  chr16:69134520-69134771
  hypo

SEQ ID NO: 410983 - DNA, 730 bp, Homo sapiens; identical to SEQ ID NO: 399939
  chr16:69139815-69140545
  hypo

SEQ ID NO: 410984 - DNA, 34 bp, Homo sapiens; identical to SEQ ID NO: 269334
  chr16:69344499-69344533
  hypo

SEQ ID NO: 410985 - DNA, 33 bp, Homo sapiens; identical to SEQ ID NO: 217041
  chr16:69352180-69352213
  hypo

SEQ ID NO: 410986 - DNA, 100 bp, Homo sapiens; identical to SEQ ID NO: 269339
  chr16:69391672-69391772
  hypo

SEQ ID NO: 410987 - DNA, 36 bp, Homo sapiens; identical to SEQ ID NO: 217049
  chr16:69439224-69439260
  hypo

SEQ ID NO: 410988 - DNA, 230 bp, Homo sapiens; identical to SEQ ID NO: 269342
  chr16:69446265-69446495
  hypo

SEQ ID NO: 410989 - DNA, 84 bp, Homo sapiens; identical to SEQ ID NO: 217050
  chr16:69495121-69495205
  hypo

SEQ ID NO: 410990 - DNA, 145 bp, Homo sapiens; identical to SEQ ID NO: 269344
  chr16:69557041-69557186
  hypo

SEQ ID NO: 410991 - DNA, 275 bp, Homo sapiens; identical to SEQ ID NO: 217051
  chr16:69557609-69557884
  hypo

SEQ ID NO: 410992 - DNA, 41 bp, Homo sapiens; identical to SEQ ID NO: 269347
  chr16:69613048-69613089
  hypo

SEQ ID NO: 410993 - DNA, 87 bp, Homo sapiens; identical to SEQ ID NO: 269350
  chr16:69759428-69759515
  hypo

SEQ ID NO: 410994 - DNA, 240 bp, Homo sapiens; identical to SEQ ID NO: 217054
  chr16:69761437-69761677
  hypo

SEQ ID NO: 410995 - DNA, 182 bp, Homo sapiens; identical to SEQ ID NO: 217055
  chr16:69825950-69826132
  hypo

SEQ ID NO: 410996 - DNA, 159 bp, Homo sapiens; identical to SEQ ID NO: 269357
  chr16:69955523-69955682
  hypo

SEQ ID NO: 410997 - DNA, 130 bp, Homo sapiens; identical to SEQ ID NO: 217063
  chr16:70286315-70286445
  hypo

SEQ ID NO: 410998 - DNA, 55 bp, Homo sapiens; identical to SEQ ID NO: 269365
  chr16:70442006-70442061
  hypo

SEQ ID NO: 410999 - DNA, 46 bp, Homo sapiens; identical to SEQ ID NO: 269366
  chr16:70442308-70442354
  hypo

SEQ ID NO: 411000 - DNA, 105 bp, Homo sapiens; identical to SEQ ID NO: 225109
  chr16:70472498-70472603
  hypo

SEQ ID NO: 411001 - DNA, 120 bp, Homo sapiens; identical to SEQ ID NO: 269367
  chr16:70479294-70479414
  hypo

SEQ ID NO: 411002 - DNA, 50 bp, Homo sapiens; identical to SEQ ID NO: 217067
  chr16:70507080-70507130
  hypo

SEQ ID NO: 411003 - DNA, 349 bp, Homo sapiens; identical to SEQ ID NO: 269373
  chr16:70727987-70728336
  hypo

SEQ ID NO: 411004 - DNA, 187 bp, Homo sapiens; identical to SEQ ID NO: 269374
  chr16:70754253-70754440
  hypo

SEQ ID NO: 411005 - DNA, 148 bp, Homo sapiens; identical to SEQ ID NO: 217072
  chr16:70783611-70783759
  hypo

SEQ ID NO: 411006 - DNA, 96 bp, Homo sapiens; identical to SEQ ID NO: 269382
  chr16:70829399-70829495
  hypo

SEQ ID NO: 411007 - DNA, 45 bp, Homo sapiens; identical to SEQ ID NO: 217075
  chr16:71324585-71324630
  hypo

SEQ ID NO: 411008 - DNA, 182 bp, Homo sapiens; identical to SEQ ID NO: 269384
  chr16:71537485-71537667
  hypo

SEQ ID NO: 411009 - DNA, 148 bp, Homo sapiens; identical to SEQ ID NO: 269386
  chr16:71674493-71674641
  hypo

SEQ ID NO: 411010 - DNA, 35 bp, Homo sapiens; identical to SEQ ID NO: 269391
  chr16:71756040-71756075
  hypo

SEQ ID NO: 411011 - DNA, 34 bp, Homo sapiens; identical to SEQ ID NO: 269395
  chr16:71948332-71948366
  hypo

SEQ ID NO: 411012 - DNA, 38 bp, Homo sapiens; identical to SEQ ID NO: 269396
  chr16:72018727-72018765
  hypo

SEQ ID NO: 411013 - DNA, 208 bp, Homo sapiens; identical to SEQ ID NO: 204280
  chr16:72699010-72699218
  hypo

SEQ ID NO: 411014 - DNA, 198 bp, Homo sapiens; identical to SEQ ID NO: 269402
  chr16:72916141-72916339
  hypo

SEQ ID NO: 411015 - DNA, 212 bp, Homo sapiens; identical to SEQ ID NO: 217087
  chr16:72949233-72949445
  hypo

SEQ ID NO: 411016 - DNA, 118 bp, Homo sapiens; identical to SEQ ID NO: 217088
  chr16:72957814-72957932
  hypo

SEQ ID NO: 411017 - DNA, 174 bp, Homo sapiens; identical to SEQ ID NO: 269406
  chr16:72958495-72958669
  hypo

SEQ ID NO: 411018 - DNA, 101 bp, Homo sapiens; identical to SEQ ID NO: 217089
  chr16:72984703-72984804
  hypo

SEQ ID NO: 411019 - DNA, 192 bp, Homo sapiens; identical to SEQ ID NO: 269413
  chr16:72997030-72997222
  hypo

SEQ ID NO: 411020 - DNA, 86 bp, Homo sapiens; identical to SEQ ID NO: 217092
  chr16:73007796-73007882
  hypo

SEQ ID NO: 411021 - DNA, 96 bp, Homo sapiens; identical to SEQ ID NO: 269415
  chr16:73029802-73029898
  hypo

SEQ ID NO: 411022 - DNA, 334 bp, Homo sapiens; identical to SEQ ID NO: 291692
  chr16:73091551-73091885
  hypo

SEQ ID NO: 411023 - DNA, 217 bp, Homo sapiens; identical to SEQ ID NO: 53263
  chr16:73091900-73092117
  hypo

SEQ ID NO: 411024 - DNA, 166 bp, Homo sapiens; identical to SEQ ID NO: 291694
  chr16:73092380-73092546
  hypo

SEQ ID NO: 411025 - DNA, 94 bp, Homo sapiens; identical to SEQ ID NO: 217095
  chr16:73208571-73208665
  hypo

SEQ ID NO: 411026 - DNA, 35 bp, Homo sapiens; identical to SEQ ID NO: 269420
  chr16:74408512-74408547
  hypo

SEQ ID NO: 411027 - DNA, 45 bp, Homo sapiens; identical to SEQ ID NO: 269422
  chr16:74511568-74511613
  hypo

SEQ ID NO: 411028 - DNA, 43 bp, Homo sapiens; identical to SEQ ID NO: 269423
  chr16:74540183-74540226
  hypo

SEQ ID NO: 411029 - DNA, 79 bp, Homo sapiens; identical to SEQ ID NO: 225115
  chr16:74808949-74809028
  hypo

SEQ ID NO: 411030 - DNA, 149 bp, Homo sapiens; identical to SEQ ID NO: 269430
  chr16:74872626-74872775
  hypo

SEQ ID NO: 411031 - DNA, 146 bp, Homo sapiens; identical to SEQ ID NO: 269432
  chr16:74901700-74901846
  hypo

SEQ ID NO: 411032 - DNA, 94 bp, Homo sapiens
  chr16:74908780-74908874
  hypo
gcccagcctgtttttttttgttttttttacaccagaactccttcttctgagccactgcacccagctgctgagtactgtattttctcaggggctc

SEQ ID NO: 411033 - DNA, 40 bp, Homo sapiens; identical to SEQ ID NO: 204287
  chr16:75018963-75019003
  hypo

SEQ ID NO: 411034 - DNA, 32 bp, Homo sapiens; identical to SEQ ID NO: 269438
  chr16:75075662-75075694
  hypo

SEQ ID NO: 411035 - DNA, 44 bp, Homo sapiens; identical to SEQ ID NO: 217108
  chr16:75113381-75113425
  hypo

SEQ ID NO: 411036 - DNA, 154 bp, Homo sapiens; identical to SEQ ID NO: 321052
  chr16:75226944-75227098
  hypo

SEQ ID NO: 411037 - DNA, 65 bp, Homo sapiens; identical to SEQ ID NO: 321053
  chr16:75227128-75227193
  hypo

SEQ ID NO: 411038 - DNA, 161 bp, Homo sapiens; identical to SEQ ID NO: 225119
  chr16:75299751-75299912
  hypo

SEQ ID NO: 411039 - DNA, 44 bp, Homo sapiens; identical to SEQ ID NO: 269454
  chr16:75479780-75479824
  hypo

SEQ ID NO: 411040 - DNA, 457 bp, Homo sapiens; identical to SEQ ID NO: 269456
  chr16:75513119-75513576
  hypo

SEQ ID NO: 411041 - DNA, 176 bp, Homo sapiens; identical to SEQ ID NO: 291713
  chr16:75529727-75529903
  hypo

SEQ ID NO: 411042 - DNA, 138 bp, Homo sapiens; identical to SEQ ID NO: 217120
  chr16:75606235-75606373
  hypo

SEQ ID NO: 411043 - DNA, 580 bp, Homo sapiens; identical to SEQ ID NO: 217123
  chr16:77228259-77228839
  hypo

SEQ ID NO: 411044 - DNA, 43 bp, Homo sapiens; identical to SEQ ID NO: 217124
  chr16:77229453-77229496
  hypo

SEQ ID NO: 411045 - DNA, 104 bp, Homo sapiens; identical to SEQ ID NO: 225125
  chr16:77747330-77747434
  hypo

SEQ ID NO: 411046 - DNA, 40 bp, Homo sapiens; identical to SEQ ID NO: 225127
  chr16:78139962-78140002
  hypo

SEQ ID NO: 411047 - DNA, 32 bp, Homo sapiens; identical to SEQ ID NO: 225129
  chr16:78425003-78425035
  hypo

SEQ ID NO: 411048 - DNA, 103 bp, Homo sapiens; identical to SEQ ID NO: 204305
  chr16:79636191-79636294
  hypo

SEQ ID NO: 411049 - DNA, 115 bp, Homo sapiens; identical to SEQ ID NO: 399976
  chr16:79804693-79804808
  hypo

SEQ ID NO: 411050 - DNA, 38 bp, Homo sapiens; identical to SEQ ID NO: 217135
  chr16:80654697-80654735
  hypo

SEQ ID NO: 411051 - DNA, 158 bp, Homo sapiens; identical to SEQ ID NO: 269478
  chr16:80714339-80714497
  hypo

SEQ ID NO: 411052 - DNA, 198 bp, Homo sapiens; identical to SEQ ID NO: 217137
  chr16:81315519-81315717
  hypo

SEQ ID NO: 411053 - DNA, 201 bp, Homo sapiens; identical to SEQ ID NO: 217138
  chr16:81323324-81323525
  hypo

SEQ ID NO: 411054 - DNA, 250 bp, Homo sapiens; identical to SEQ ID NO: 217141
  chr16:81505617-81505867
  hypo

SEQ ID NO: 411055 - DNA, 317 bp, Homo sapiens; identical to SEQ ID NO: 269493
  chr16:81556854-81557171
  hypo

SEQ ID NO: 411056 - DNA, 102 bp, Homo sapiens; identical to SEQ ID NO: 321106
  chr16:81557201-81557303
  hypo

SEQ ID NO: 411057 - DNA, 253 bp, Homo sapiens; identical to SEQ ID NO: 217144
  chr16:81557355-81557608
  hypo

SEQ ID NO: 411058 - DNA, 262 bp, Homo sapiens; identical to SEQ ID NO: 269499
  chr16:81620081-81620343
  hypo

SEQ ID NO: 411059 - DNA, 108 bp, Homo sapiens; identical to SEQ ID NO: 269504
  chr16:81655707-81655815
  hypo

SEQ ID NO: 411060 - DNA, 164 bp, Homo sapiens; identical to SEQ ID NO: 269508
  chr16:81700317-81700481
  hypo

SEQ ID NO: 411061 - DNA, 453 bp, Homo sapiens; identical to SEQ ID NO: 269511
  chr16:81737255-81737708
  hypo

SEQ ID NO: 411062 - DNA, 377 bp, Homo sapiens; identical to SEQ ID NO: 269514
  chr16:81924958-81925335
  hypo

SEQ ID NO: 411063 - DNA, 197 bp, Homo sapiens; identical to SEQ ID NO: 269516
  chr16:81942077-81942274
  hypo

SEQ ID NO: 411064 - DNA, 207 bp, Homo sapiens; identical to SEQ ID NO: 217153
  chr16:82172390-82172597
  hypo

SEQ ID NO: 411065 - DNA, 39 bp, Homo sapiens; identical to SEQ ID NO: 217158
  chr16:84004407-84004446
  hypo

SEQ ID NO: 411066 - DNA, 74 bp, Homo sapiens; identical to SEQ ID NO: 321144
  chr16:84074762-84074836
  hypo

SEQ ID NO: 411067 - DNA, 87 bp, Homo sapiens; identical to SEQ ID NO: 321145
  chr16:84074871-84074958
  hypo

SEQ ID NO: 411068 - DNA, 55 bp, Homo sapiens; identical to SEQ ID NO: 386778
  chr16:84132212-84132267
  hypo

SEQ ID NO: 411069 - DNA, 150 bp, Homo sapiens; identical to SEQ ID NO: 269538
  chr16:84270371-84270521
  hypo

SEQ ID NO: 411070 - DNA, 194 bp, Homo sapiens; identical to SEQ ID NO: 269539
  chr16:84296330-84296524
  hypo

SEQ ID NO: 411071 - DNA, 113 bp, Homo sapiens; identical to SEQ ID NO: 217160
  chr16:84423862-84423975
  hypo

SEQ ID NO: 411072 - DNA, 273 bp, Homo sapiens; identical to SEQ ID NO: 269544
  chr16:84535207-84535480
  hypo

SEQ ID NO: 411073 - DNA, 212 bp, Homo sapiens; identical to SEQ ID NO: 217164
  chr16:84535780-84535992
  hypo

SEQ ID NO: 411074 - DNA, 255 bp, Homo sapiens; identical to SEQ ID NO: 269546
  chr16:84537368-84537623
  hypo

SEQ ID NO: 411075 - DNA, 32 bp, Homo sapiens; identical to SEQ ID NO: 269547
  chr16:84553146-84553178
  hypo

SEQ ID NO: 411076 - DNA, 139 bp, Homo sapiens; identical to SEQ ID NO: 217165
  chr16:84593079-84593218
  hypo

SEQ ID NO: 411077 - DNA, 104 bp, Homo sapiens; identical to SEQ ID NO: 269549
  chr16:84602924-84603028
  hypo

SEQ ID NO: 411078 - DNA, 254 bp, Homo sapiens; identical to SEQ ID NO: 269552
  chr16:84683895-84684149
  hypo

SEQ ID NO: 411079 - DNA, 41 bp, Homo sapiens; identical to SEQ ID NO: 269555
  chr16:84735938-84735979
  hypo

SEQ ID NO: 411080 - DNA, 185 bp, Homo sapiens; identical to SEQ ID NO: 217167
  chr16:84749467-84749652
  hypo

SEQ ID NO: 411081 - DNA, 231 bp, Homo sapiens; identical to SEQ ID NO: 269558
  chr16:84800549-84800780
  hypo

SEQ ID NO: 411082 - DNA, 450 bp, Homo sapiens; identical to SEQ ID NO: 269562
  chr16:84824664-84825114
  hypo

SEQ ID NO: 411083 - DNA, 158 bp, Homo sapiens; identical to SEQ ID NO: 269565
  chr16:84904248-84904406
  hypo

SEQ ID NO: 411084 - DNA, 45 bp, Homo sapiens; identical to SEQ ID NO: 269566
  chr16:84954215-84954260
  hypo

SEQ ID NO: 411085 - DNA, 182 bp, Homo sapiens; identical to SEQ ID NO: 217171
  chr16:84965070-84965252
  hypo

SEQ ID NO: 411086 - DNA, 102 bp, Homo sapiens; identical to SEQ ID NO: 217174
  chr16:85001517-85001619
  hypo

SEQ ID NO: 411087 - DNA, 82 bp, Homo sapiens; identical to SEQ ID NO: 217175
  chr16:85001679-85001761
  hypo

SEQ ID NO: 411088 - DNA, 143 bp, Homo sapiens; identical to SEQ ID NO: 217177
  chr16:85008291-85008434
  hypo

SEQ ID NO: 411089 - DNA, 341 bp, Homo sapiens; identical to SEQ ID NO: 269576
  chr16:85009390-85009731
  hypo

SEQ ID NO: 411090 - DNA, 118 bp, Homo sapiens; identical to SEQ ID NO: 269578
  chr16:85011214-85011332
  hypo

SEQ ID NO: 411091 - DNA, 120 bp, Homo sapiens; identical to SEQ ID NO: 269579
  chr16:85013863-85013983
  hypo

SEQ ID NO: 411092 - DNA, 97 bp, Homo sapiens; identical to SEQ ID NO: 269580
  chr16:85015385-85015482
  hypo

SEQ ID NO: 411093 - DNA, 458 bp, Homo sapiens; identical to SEQ ID NO: 269581
  chr16:85019752-85020210
  hypo

SEQ ID NO: 411094 - DNA, 143 bp, Homo sapiens; identical to SEQ ID NO: 269582
  chr16:85024470-85024613
  hypo

SEQ ID NO: 411095 - DNA, 93 bp, Homo sapiens; identical to SEQ ID NO: 269583
  chr16:85026076-85026169
  hypo

SEQ ID NO: 411096 - DNA, 147 bp, Homo sapiens; identical to SEQ ID NO: 269585
  chr16:85029250-85029397
  hypo

SEQ ID NO: 411097 - DNA, 42 bp, Homo sapiens; identical to SEQ ID NO: 269586
  chr16:85030031-85030073
  hypo

SEQ ID NO: 411098 - DNA, 97 bp, Homo sapiens; identical to SEQ ID NO: 225138
  chr16:85143894-85143991
  hypo

SEQ ID NO: 411099 - DNA, 162 bp, Homo sapiens; identical to SEQ ID NO: 269592
  chr16:85151028-85151190
  hypo

SEQ ID NO: 411100 - DNA, 208 bp, Homo sapiens; identical to SEQ ID NO: 217183
  chr16:85196722-85196930
  hypo

SEQ ID NO: 411101 - DNA, 173 bp, Homo sapiens; identical to SEQ ID NO: 217184
  chr16:85214271-85214444
  hypo

SEQ ID NO: 411102 - DNA, 374 bp, Homo sapiens; identical to SEQ ID NO: 269595
  chr16:85216377-85216751
  hypo

SEQ ID NO: 411103 - DNA, 88 bp, Homo sapiens; identical to SEQ ID NO: 269596
  chr16:85241883-85241971
  hypo

SEQ ID NO: 411104 - DNA, 45 bp, Homo sapiens; identical to SEQ ID NO: 269598
  chr16:85283528-85283573
  hypo

SEQ ID NO: 411105 - DNA, 187 bp, Homo sapiens; identical to SEQ ID NO: 269599
  chr16:85305676-85305863
  hypo

SEQ ID NO: 411106 - DNA, 53 bp, Homo sapiens; identical to SEQ ID NO: 321222
  chr16:85317797-85317850
  hypo

SEQ ID NO: 411107 - DNA, 107 bp, Homo sapiens; identical to SEQ ID NO: 321223
  chr16:85317882-85317989
  hypo

SEQ ID NO: 411108 - DNA, 214 bp, Homo sapiens; identical to SEQ ID NO: 321224
  chr16:85318221-85318435
  hypo

SEQ ID NO: 411109 - DNA, 172 bp, Homo sapiens; identical to SEQ ID NO: 269606
  chr16:85329623-85329795
  hypo

SEQ ID NO: 411110 - DNA, 44 bp, Homo sapiens; identical to SEQ ID NO: 217189
  chr16:85332745-85332789
  hypo

SEQ ID NO: 411111 - DNA, 95 bp, Homo sapiens; identical to SEQ ID NO: 217190
  chr16:85336635-85336730
  hypo

SEQ ID NO: 411112 - DNA, 194 bp, Homo sapiens; identical to SEQ ID NO: 269610
  chr16:85351334-85351528
  hypo

SEQ ID NO: 411113 - DNA, 83 bp, Homo sapiens; identical to SEQ ID NO: 269611
  chr16:85369411-85369494
  hypo

SEQ ID NO: 411114 - DNA, 208 bp, Homo sapiens; identical to SEQ ID NO: 269612
  chr16:85377785-85377993
  hypo

SEQ ID NO: 411115 - DNA, 36 bp, Homo sapiens; identical to SEQ ID NO: 217191
  chr16:85399704-85399740
  hypo

SEQ ID NO: 411116 - DNA, 48 bp, Homo sapiens; identical to SEQ ID NO: 217192
  chr16:85399770-85399818
  hypo

SEQ ID NO: 411117 - DNA, 161 bp, Homo sapiens; identical to SEQ ID NO: 217194
  chr16:85410442-85410603
  hypo

SEQ ID NO: 411118 - DNA, 171 bp, Homo sapiens; identical to SEQ ID NO: 217197
  chr16:85426317-85426488
  hypo

SEQ ID NO: 411119 - DNA, 285 bp, Homo sapiens; identical to SEQ ID NO: 269621
  chr16:85428653-85428938
  hypo

SEQ ID NO: 411120 - DNA, 94 bp, Homo sapiens; identical to SEQ ID NO: 217199
  chr16:85432465-85432559
  hypo

SEQ ID NO: 411121 - DNA, 38 bp, Homo sapiens; identical to SEQ ID NO: 269626
  chr16:85458421-85458459
  hypo

SEQ ID NO: 411122 - DNA, 137 bp, Homo sapiens; identical to SEQ ID NO: 269630
  chr16:85492605-85492742
  hypo

SEQ ID NO: 411123 - DNA, 148 bp, Homo sapiens; identical to SEQ ID NO: 269633
  chr16:85498783-85498931
  hypo

SEQ ID NO: 411124 - DNA, 141 bp, Homo sapiens; identical to SEQ ID NO: 269636
  chr16:85520266-85520407
  hypo

SEQ ID NO: 411125 - DNA, 41 bp, Homo sapiens; identical to SEQ ID NO: 217207
  chr16:85523184-85523225
  hypo

SEQ ID NO: 411126 - DNA, 413 bp, Homo sapiens; identical to SEQ ID NO: 269638
  chr16:85529540-85529953
  hypo

SEQ ID NO: 411127 - DNA, 173 bp, Homo sapiens; identical to SEQ ID NO: 321265
  chr16:85537318-85537491
  hypo

SEQ ID NO: 411128 - DNA, 321 bp, Homo sapiens; identical to SEQ ID NO: 217211
  chr16:85541368-85541689
  hypo

SEQ ID NO: 411129 - DNA, 149 bp, Homo sapiens; identical to SEQ ID NO: 399983
  chr16:85589963-85590112
  hypo

SEQ ID NO: 411130 - DNA, 521 bp, Homo sapiens; identical to SEQ ID NO: 269648
  chr16:85616219-85616740
  hypo

SEQ ID NO: 411131 - DNA, 74 bp, Homo sapiens; identical to SEQ ID NO: 217223
  chr16:85678761-85678835
  hypo

SEQ ID NO: 411132 - DNA, 337 bp, Homo sapiens; identical to SEQ ID NO: 269661
  chr16:85682220-85682557
  hypo

SEQ ID NO: 411133 - DNA, 433 bp, Homo sapiens; identical to SEQ ID NO: 269662
  chr16:85682761-85683194
  hypo

SEQ ID NO: 411134 - DNA, 82 bp, Homo sapiens; identical to SEQ ID NO: 217228
  chr16:85693857-85693939
  hypo

SEQ ID NO: 411135 - DNA, 234 bp, Homo sapiens; identical to SEQ ID NO: 269671
  chr16:85743824-85744058
  hypo

SEQ ID NO: 411136 - DNA, 137 bp, Homo sapiens; identical to SEQ ID NO: 269673
  chr16:85849284-85849421
  hypo

SEQ ID NO: 411137 - DNA, 37 bp, Homo sapiens; identical to SEQ ID NO: 269674
  chr16:85954880-85954917
  hypo

SEQ ID NO: 411138 - DNA, 215 bp, Homo sapiens; identical to SEQ ID NO: 269676
  chr16:85985997-85986212
  hypo

SEQ ID NO: 411139 - DNA, 163 bp, Homo sapiens; identical to SEQ ID NO: 217233
  chr16:86101896-86102059
  hypo

SEQ ID NO: 411140 - DNA, 266 bp, Homo sapiens; identical to SEQ ID NO: 217234
  chr16:86102114-86102380
  hypo

SEQ ID NO: 411141 - DNA, 357 bp, Homo sapiens; identical to SEQ ID NO: 269680
  chr16:86560978-86561335
  hypo

SEQ ID NO: 411142 - DNA, 122 bp, Homo sapiens; identical to SEQ ID NO: 269682
  chr16:86562411-86562533
  hypo

SEQ ID NO: 411143 - DNA, 189 bp, Homo sapiens; identical to SEQ ID NO: 269683
  chr16:86570329-86570518
  hypo

SEQ ID NO: 411144 - DNA, 155 bp, Homo sapiens; identical to SEQ ID NO: 269685
  chr16:86740874-86741029
  hypo

SEQ ID NO: 411145 - DNA, 160 bp, Homo sapiens; identical to SEQ ID NO: 269686
  chr16:86741299-86741459
  hypo

SEQ ID NO: 411146 - DNA, 132 bp, Homo sapiens; identical to SEQ ID NO: 321317
  chr16:86878502-86878634
  hypo

SEQ ID NO: 411147 - DNA, 126 bp, Homo sapiens; identical to SEQ ID NO: 269693
  chr16:87177254-87177380
  hypo

SEQ ID NO: 411148 - DNA, 137 bp, Homo sapiens; identical to SEQ ID NO: 269697
  chr16:87250241-87250378
  hypo

SEQ ID NO: 411149 - DNA, 47 bp, Homo sapiens; identical to SEQ ID NO: 217246
  chr16:87447846-87447893
  hypo

SEQ ID NO: 411150 - DNA, 178 bp, Homo sapiens; identical to SEQ ID NO: 269707
  chr16:87465351-87465529
  hypo

SEQ ID NO: 411151 - DNA, 95 bp, Homo sapiens; identical to SEQ ID NO: 269710
  chr16:87493948-87494043
  hypo

SEQ ID NO: 411152 - DNA, 169 bp, Homo sapiens; identical to SEQ ID NO: 269712
  chr16:87625740-87625909
  hypo

SEQ ID NO: 411153 - DNA, 76 bp, Homo sapiens; identical to SEQ ID NO: 389392
  chr16:87635461-87635537
  hypo

SEQ ID NO: 411154 - DNA, 179 bp, Homo sapiens; identical to SEQ ID NO: 217252
  chr16:87681106-87681285
  hypo

SEQ ID NO: 411155 - DNA, 101 bp, Homo sapiens; identical to SEQ ID NO: 217253
  chr16:87681315-87681416
  hypo

SEQ ID NO: 411156 - DNA, 100 bp, Homo sapiens; identical to SEQ ID NO: 269715
  chr16:87724407-87724507
  hypo

SEQ ID NO: 411157 - DNA, 137 bp, Homo sapiens; identical to SEQ ID NO: 321354
  chr16:87740771-87740908
  hypo

SEQ ID NO: 411158 - DNA, 178 bp, Homo sapiens; identical to SEQ ID NO: 269720
  chr16:87756599-87756777
  hypo

SEQ ID NO: 411159 - DNA, 97 bp, Homo sapiens; identical to SEQ ID NO: 217257
  chr16:87782716-87782813
  hypo

SEQ ID NO: 411160 - DNA, 150 bp, Homo sapiens; identical to SEQ ID NO: 269723
  chr16:87784654-87784804
  hypo

SEQ ID NO: 411161 - DNA, 35 bp, Homo sapiens; identical to SEQ ID NO: 269724
  chr16:87807642-87807677
  hypo

SEQ ID NO: 411162 - DNA, 215 bp, Homo sapiens; identical to SEQ ID NO: 269727
  chr16:87874192-87874407
  hypo

SEQ ID NO: 411163 - DNA, 151 bp, Homo sapiens; identical to SEQ ID NO: 217259
  chr16:87895432-87895583
  hypo

SEQ ID NO: 411164 - DNA, 82 bp, Homo sapiens; identical to SEQ ID NO: 269729
  chr16:87911934-87912016
  hypo

SEQ ID NO: 411165 - DNA, 45 bp, Homo sapiens; identical to SEQ ID NO: 269732
  chr16:87934808-87934853
  hypo

SEQ ID NO: 411166 - DNA, 107 bp, Homo sapiens
  chr16:87962666-87962773
  hypo
gcccagccttggattattttcttcttacaaattcctaaccacagaatcactaggtcaaagggtgcatccaacagaagtctagaaaacaaggataaagatgtatagcc

SEQ ID NO: 411167 - DNA, 130 bp, Homo sapiens; identical to SEQ ID NO: 225161
  chr16:88031994-88032124
  hypo

SEQ ID NO: 411168 - DNA, 293 bp, Homo sapiens; identical to SEQ ID NO: 269737
  chr16:88047709-88048002
  hypo

SEQ ID NO: 411169 - DNA, 300 bp, Homo sapiens; identical to SEQ ID NO: 217263
  chr16:88049613-88049913
  hypo

SEQ ID NO: 411170 - DNA, 98 bp, Homo sapiens; identical to SEQ ID NO: 269741
  chr16:88056979-88057077
  hypo

SEQ ID NO: 411171 - DNA, 282 bp, Homo sapiens; identical to SEQ ID NO: 217264
  chr16:88073665-88073947
  hypo

SEQ ID NO: 411172 - DNA, 49 bp, Homo sapiens; identical to SEQ ID NO: 217265
  chr16:88078972-88079021
  hypo

SEQ ID NO: 411173 - DNA, 40 bp, Homo sapiens; identical to SEQ ID NO: 217269
  chr16:88106973-88107013
  hypo

SEQ ID NO: 411174 - DNA, 568 bp, Homo sapiens; identical to SEQ ID NO: 269751
  chr16:88109979-88110547
  hypo

SEQ ID NO: 411175 - DNA, 87 bp, Homo sapiens; identical to SEQ ID NO: 269753
  chr16:88151480-88151567
  hypo

SEQ ID NO: 411176 - DNA, 91 bp, Homo sapiens; identical to SEQ ID NO: 269756
  chr16:88237696-88237787
  hypo

SEQ ID NO: 411177 - DNA, 132 bp, Homo sapiens; identical to SEQ ID NO: 321403
  chr16:88356136-88356268
  hypo

SEQ ID NO: 411178 - DNA, 268 bp, Homo sapiens; identical to SEQ ID NO: 269762
  chr16:88385554-88385822
  hypo

SEQ ID NO: 411179 - DNA, 76 bp, Homo sapiens; identical to SEQ ID NO: 269763
  chr16:88442479-88442555
  hypo

SEQ ID NO: 411180 - DNA, 431 bp, Homo sapiens; identical to SEQ ID NO: 321409
  chr16:88460215-88460646
  hypo

SEQ ID NO: 411181 - DNA, 635 bp, Homo sapiens; identical to SEQ ID NO: 269766
  chr16:88479696-88480331
  hypo

SEQ ID NO: 411182 - DNA, 189 bp, Homo sapiens; identical to SEQ ID NO: 217277
  chr16:88493599-88493788
  hypo

SEQ ID NO: 411183 - DNA, 32 bp, Homo sapiens; identical to SEQ ID NO: 217278
  chr16:88498087-88498119
  hypo

SEQ ID NO: 411184 - DNA, 69 bp, Homo sapiens; identical to SEQ ID NO: 269772
  chr16:88501887-88501956
  hypo

SEQ ID NO: 411185 - DNA, 45 bp, Homo sapiens; identical to SEQ ID NO: 217281
  chr16:88537675-88537720
  hypo

SEQ ID NO: 411186 - DNA, 205 bp, Homo sapiens; identical to SEQ ID NO: 269777
  chr16:88538054-88538259
  hypo

SEQ ID NO: 411187 - DNA, 374 bp, Homo sapiens; identical to SEQ ID NO: 321422
  chr16:88547819-88548193
  hypo

SEQ ID NO: 411188 - DNA, 503 bp, Homo sapiens; identical to SEQ ID NO: 321423
  chr16:88550903-88551406
  hypo

SEQ ID NO: 411189 - DNA, 306 bp, Homo sapiens; identical to SEQ ID NO: 217284
  chr16:88551574-88551880
  hypo

SEQ ID NO: 411190 - DNA, 214 bp, Homo sapiens; identical to SEQ ID NO: 269782
  chr16:88596786-88597000
  hypo

SEQ ID NO: 411191 - DNA, 44 bp, Homo sapiens; identical to SEQ ID NO: 217285
  chr16:88642725-88642769
  hypo

SEQ ID NO: 411192 - DNA, 113 bp, Homo sapiens; identical to SEQ ID NO: 269785
  chr16:88644982-88645095
  hypo

SEQ ID NO: 411193 - DNA, 144 bp, Homo sapiens; identical to SEQ ID NO: 217286
  chr16:88645407-88645551
  hypo

SEQ ID NO: 411194 - DNA, 198 bp, Homo sapiens; identical to SEQ ID NO: 217289
  chr16:88649040-88649238
  hypo

SEQ ID NO: 411195 - DNA, 258 bp, Homo sapiens; identical to SEQ ID NO: 269790
  chr16:88664686-88664944
  hypo

SEQ ID NO: 411196 - DNA, 493 bp, Homo sapiens; identical to SEQ ID NO: 269791
  chr16:88673630-88674123
  hypo

SEQ ID NO: 411197 - DNA, 225 bp, Homo sapiens; identical to SEQ ID NO: 269792
  chr16:88683207-88683432
  hypo

SEQ ID NO: 411198 - DNA, 36 bp, Homo sapiens; identical to SEQ ID NO: 269794
  chr16:88684167-88684203
  hypo

SEQ ID NO: 411199 - DNA, 64 bp, Homo sapiens; identical to SEQ ID NO: 217291
  chr16:88689149-88689213
  hypo

SEQ ID NO: 411200 - DNA, 711 bp, Homo sapiens; identical to SEQ ID NO: 269800
  chr16:88711755-88712466
  hypo

SEQ ID NO: 411201 - DNA, 91 bp, Homo sapiens; identical to SEQ ID NO: 225166
  chr16:88721558-88721649
  hypo

SEQ ID NO: 411202 - DNA, 65 bp, Homo sapiens; identical to SEQ ID NO: 321443
  chr16:88722261-88722326
  hypo

SEQ ID NO: 411203 - DNA, 113 bp, Homo sapiens; identical to SEQ ID NO: 217296
  chr16:88722817-88722930
  hypo

SEQ ID NO: 411204 - DNA, 127 bp, Homo sapiens; identical to SEQ ID NO: 217300
  chr16:88738306-88738433
  hypo

SEQ ID NO: 411205 - DNA, 54 bp, Homo sapiens; identical to SEQ ID NO: 269805
  chr16:88756879-88756933
  hypo

SEQ ID NO: 411206 - DNA, 133 bp, Homo sapiens; identical to SEQ ID NO: 225167
  chr16:88764923-88765056
  hypo

SEQ ID NO: 411207 - DNA, 322 bp, Homo sapiens; identical to SEQ ID NO: 269807
  chr16:88776937-88777259
  hypo

SEQ ID NO: 411208 - DNA, 31 bp, Homo sapiens; identical to SEQ ID NO: 269808
  chr16:88780638-88780669
  hypo

SEQ ID NO: 411209 - DNA, 38 bp, Homo sapiens; identical to SEQ ID NO: 269809
  chr16:88780699-88780737
  hypo

SEQ ID NO: 411210 - DNA, 177 bp, Homo sapiens; identical to SEQ ID NO: 269810
  chr16:88780767-88780944
  hypo

SEQ ID NO: 411211 - DNA, 38 bp, Homo sapiens; identical to SEQ ID NO: 269811
  chr16:88785880-88785918
  hypo

SEQ ID NO: 411212 - DNA, 101 bp, Homo sapiens; identical to SEQ ID NO: 217303
  chr16:88787977-88788078
  hypo

SEQ ID NO: 411213 - DNA, 62 bp, Homo sapiens; identical to SEQ ID NO: 217304
  chr16:88788384-88788446
  hypo

SEQ ID NO: 411214 - DNA, 206 bp, Homo sapiens; identical to SEQ ID NO: 321464
  chr16:88794360-88794566
  hypo

SEQ ID NO: 411215 - DNA, 45 bp, Homo sapiens; identical to SEQ ID NO: 321465
  chr16:88794761-88794806
  hypo

SEQ ID NO: 411216 - DNA, 34 bp, Homo sapiens; identical to SEQ ID NO: 269817
  chr16:88796722-88796756
  hypo

SEQ ID NO: 411217 - DNA, 602 bp, Homo sapiens; identical to SEQ ID NO: 269822
  chr16:88800570-88801172
  hypo

SEQ ID NO: 411218 - DNA, 152 bp, Homo sapiens; identical to SEQ ID NO: 269823
  chr16:88801433-88801585
  hypo

SEQ ID NO: 411219 - DNA, 80 bp, Homo sapiens; identical to SEQ ID NO: 269826
  chr16:88810535-88810615
  hypo

SEQ ID NO: 411220 - DNA, 41 bp, Homo sapiens; identical to SEQ ID NO: 269828
  chr16:88823488-88823529
  hypo

SEQ ID NO: 411221 - DNA, 59 bp, Homo sapiens; identical to SEQ ID NO: 217313
  chr16:88831171-88831230
  hypo

SEQ ID NO: 411222 - DNA, 142 bp, Homo sapiens; identical to SEQ ID NO: 217314
  chr16:88831297-88831439
  hypo

SEQ ID NO: 411223 - DNA, 105 bp, Homo sapiens; identical to SEQ ID NO: 269832
  chr16:88831981-88832086
  hypo

SEQ ID NO: 411224 - DNA, 114 bp, Homo sapiens; identical to SEQ ID NO: 204339
  chr16:88851818-88851932
  hypo

SEQ ID NO: 411225 - DNA, 37 bp, Homo sapiens; identical to SEQ ID NO: 321487
  chr16:88871965-88872002
  hypo

SEQ ID NO: 411226 - DNA, 507 bp, Homo sapiens; identical to SEQ ID NO: 204340
  chr16:88878527-88879034
  hypo

SEQ ID NO: 411227 - DNA, 239 bp, Homo sapiens; identical to SEQ ID NO: 217319
  chr16:88927321-88927560
  hypo

SEQ ID NO: 411228 - DNA, 149 bp, Homo sapiens; identical to SEQ ID NO: 217320
  chr16:88933926-88934075
  hypo

SEQ ID NO: 411229 - DNA, 52 bp, Homo sapiens; identical to SEQ ID NO: 217321
  chr16:88942321-88942373
  hypo

SEQ ID NO: 411230 - DNA, 45 bp, Homo sapiens; identical to SEQ ID NO: 321511
  chr16:88965557-88965602
  hypo

SEQ ID NO: 411231 - DNA, 485 bp, Homo sapiens; identical to SEQ ID NO: 217330
  chr16:88978122-88978607
  hypo

SEQ ID NO: 411232 - DNA, 102 bp, Homo sapiens; identical to SEQ ID NO: 321517
  chr16:88997823-88997925
  hypo

SEQ ID NO: 411233 - DNA, 38 bp, Homo sapiens; identical to SEQ ID NO: 269870
  chr16:89004837-89004875
  hypo

SEQ ID NO: 411234 - DNA, 201 bp, Homo sapiens; identical to SEQ ID NO: 321523
  chr16:89010085-89010286
  hypo

SEQ ID NO: 411235 - DNA, 294 bp, Homo sapiens; identical to SEQ ID NO: 269874
  chr16:89016745-89017039
  hypo

SEQ ID NO: 411236 - DNA, 200 bp, Homo sapiens; identical to SEQ ID NO: 269876
  chr16:89027649-89027849
  hypo

SEQ ID NO: 411237 - DNA, 164 bp, Homo sapiens; identical to SEQ ID NO: 269881
  chr16:89089219-89089383
  hypo

SEQ ID NO: 411238 - DNA, 78 bp, Homo sapiens; identical to SEQ ID NO: 321531
  chr16:89103370-89103448
  hypo

SEQ ID NO: 411239 - DNA, 102 bp, Homo sapiens; identical to SEQ ID NO: 269886
  chr16:89115645-89115747
  hypo

SEQ ID NO: 411240 - DNA, 87 bp, Homo sapiens; identical to SEQ ID NO: 321536
  chr16:89122410-89122497
  hypo

SEQ ID NO: 411241 - DNA, 418 bp, Homo sapiens; identical to SEQ ID NO: 269890
  chr16:89129270-89129688
  hypo

SEQ ID NO: 411242 - DNA, 724 bp, Homo sapiens; identical to SEQ ID NO: 321538
  chr16:89130512-89131236
  hypo

SEQ ID NO: 411243 - DNA, 39 bp, Homo sapiens; identical to SEQ ID NO: 217339
  chr16:89131266-89131305
  hypo

SEQ ID NO: 411244 - DNA, 277 bp, Homo sapiens; identical to SEQ ID NO: 269892
  chr16:89132011-89132288
  hypo

SEQ ID NO: 411245 - DNA, 53 bp, Homo sapiens; identical to SEQ ID NO: 217342
  chr16:89139898-89139951
  hypo

SEQ ID NO: 411246 - DNA, 312 bp, Homo sapiens; identical to SEQ ID NO: 217343
  chr16:89140055-89140367
  hypo

SEQ ID NO: 411247 - DNA, 704 bp, Homo sapiens; identical to SEQ ID NO: 321545
  chr16:89140434-89141138
  hypo

SEQ ID NO: 411248 - DNA, 240 bp, Homo sapiens; identical to SEQ ID NO: 269897
  chr16:89147081-89147321
  hypo

SEQ ID NO: 411249 - DNA, 324 bp, Homo sapiens; identical to SEQ ID NO: 269905
  chr16:89179513-89179837
  hypo

SEQ ID NO: 411250 - DNA, 363 bp, Homo sapiens; identical to SEQ ID NO: 217351
  chr16:89198318-89198681
  hypo

SEQ ID NO: 411251 - DNA, 86 bp, Homo sapiens; identical to SEQ ID NO: 321567
  chr16:89225782-89225868
  hypo

SEQ ID NO: 411252 - DNA, 215 bp, Homo sapiens; identical to SEQ ID NO: 321568
  chr16:89226047-89226262
  hypo

SEQ ID NO: 411253 - DNA, 98 bp, Homo sapiens; identical to SEQ ID NO: 217359
  chr16:89255153-89255251
  hypo

SEQ ID NO: 411254 - DNA, 42 bp, Homo sapiens; identical to SEQ ID NO: 269920
  chr16:89347101-89347143
  hypo

SEQ ID NO: 411255 - DNA, 314 bp, Homo sapiens; identical to SEQ ID NO: 217364
  chr16:89359017-89359331
  hypo

SEQ ID NO: 411256 - DNA, 154 bp, Homo sapiens; identical to SEQ ID NO: 321584
  chr16:89360166-89360320
  hypo

SEQ ID NO: 411257 - DNA, 43 bp, Homo sapiens; identical to SEQ ID NO: 269928
  chr16:89366945-89366988
  hypo

SEQ ID NO: 411258 - DNA, 31 bp, Homo sapiens; identical to SEQ ID NO: 269929
  chr16:89387488-89387519
  hypo

SEQ ID NO: 411259 - DNA, 45 bp, Homo sapiens; identical to SEQ ID NO: 217367
  chr16:89437574-89437619
  hypo

SEQ ID NO: 411260 - DNA, 70 bp, Homo sapiens; identical to SEQ ID NO: 269942
  chr16:89471629-89471699
  hypo

SEQ ID NO: 411261 - DNA, 241 bp, Homo sapiens; identical to SEQ ID NO: 217372
  chr16:89500005-89500246
  hypo

SEQ ID NO: 411262 - DNA, 99 bp, Homo sapiens; identical to SEQ ID NO: 217375
  chr16:89548161-89548260
  hypo

SEQ ID NO: 411263 - DNA, 159 bp, Homo sapiens; identical to SEQ ID NO: 269954
  chr16:89597145-89597304
  hypo

SEQ ID NO: 411264 - DNA, 139 bp, Homo sapiens; identical to SEQ ID NO: 225177
  chr16:89627717-89627856
  hypo

SEQ ID NO: 411265 - DNA, 300 bp, Homo sapiens; identical to SEQ ID NO: 217380
  chr16:89647764-89648064
  hypo

SEQ ID NO: 411266 - DNA, 186 bp, Homo sapiens; identical to SEQ ID NO: 321620
  chr16:89663966-89664152
  hypo

SEQ ID NO: 411267 - DNA, 47 bp, Homo sapiens; identical to SEQ ID NO: 217386
  chr16:89715825-89715872
  hypo

SEQ ID NO: 411268 - DNA, 65 bp, Homo sapiens; identical to SEQ ID NO: 217387
  chr16:89755908-89755973
  hypo

SEQ ID NO: 411269 - DNA, 75 bp, Homo sapiens; identical to SEQ ID NO: 217390
  chr16:89800299-89800374
  hypo

SEQ ID NO: 411270 - DNA, 85 bp, Homo sapiens; identical to SEQ ID NO: 217391
  chr16:89807744-89807829
  hypo

SEQ ID NO: 411271 - DNA, 39 bp, Homo sapiens; identical to SEQ ID NO: 269976
  chr16:89809822-89809861
  hypo

SEQ ID NO: 411272 - DNA, 38 bp, Homo sapiens; identical to SEQ ID NO: 217393
  chr16:89830047-89830085
  hypo

SEQ ID NO: 411273 - DNA, 131 bp, Homo sapiens; identical to SEQ ID NO: 269980
  chr16:89845487-89845618
  hypo

SEQ ID NO: 411274 - DNA, 152 bp, Homo sapiens; identical to SEQ ID NO: 225178
  chr16:89894420-89894572
  hypo

SEQ ID NO: 411275 - DNA, 64 bp, Homo sapiens; identical to SEQ ID NO: 269987
  chr16:89920072-89920136
  hypo

SEQ ID NO: 411276 - DNA, 87 bp, Homo sapiens; identical to SEQ ID NO: 269988
  chr16:89926090-89926177
  hypo

SEQ ID NO: 411277 - DNA, 310 bp, Homo sapiens; identical to SEQ ID NO: 217399
  chr16:89966590-89966900
  hypo

SEQ ID NO: 411278 - DNA, 96 bp, Homo sapiens; identical to SEQ ID NO: 269994
  chr16:89971008-89971104
  hypo

SEQ ID NO: 411279 - DNA, 69 bp, Homo sapiens; identical to SEQ ID NO: 269996
  chr16:89982538-89982607
  hypo

SEQ ID NO: 411280 - DNA, 189 bp, Homo sapiens; identical to SEQ ID NO: 217406
  chr16:90053307-90053496
  hypo

SEQ ID NO: 411281 - DNA, 123 bp, Homo sapiens; identical to SEQ ID NO: 270002
  chr16:90057596-90057719
  hypo

SEQ ID NO: 411282 - DNA, 135 bp, Homo sapiens; identical to SEQ ID NO: 217407
  chr16:90059132-90059267
  hypo

SEQ ID NO: 411283 - DNA, 284 bp, Homo sapiens; identical to SEQ ID NO: 270005
  chr16:90068123-90068407
  hypo

SEQ ID NO: 411284 - DNA, 461 bp, Homo sapiens; identical to SEQ ID NO: 270006
  chr16:90072249-90072710
  hypo

SEQ ID NO: 411285 - DNA, 45 bp, Homo sapiens; identical to SEQ ID NO: 225179
  chr16:90087050-90087095
  hypo

SEQ ID NO: 411286 - DNA, 206 bp, Homo sapiens; identical to SEQ ID NO: 270007
  chr16:90109929-90110135
  hypo

SEQ ID NO: 411287 - DNA, 81 bp, Homo sapiens; identical to SEQ ID NO: 270008
  chr16:90115266-90115347
  hypo

SEQ ID NO: 411288 - DNA, 54 bp, Homo sapiens; identical to SEQ ID NO: 321678
  chr17:401102-401156
  hypo

SEQ ID NO: 411289 - DNA, 152 bp, Homo sapiens; identical to SEQ ID NO: 217412
  chr17:512963-513115
  hypo

SEQ ID NO: 411290 - DNA, 41 bp, Homo sapiens; identical to SEQ ID NO: 270011
  chr17:523202-523243
  hypo

SEQ ID NO: 411291 - DNA, 59 bp, Homo sapiens; identical to SEQ ID NO: 389401
  chr17:523856-523915
  hypo

SEQ ID NO: 411292 - DNA, 114 bp, Homo sapiens; identical to SEQ ID NO: 217414
  chr17:536283-536397
  hypo

SEQ ID NO: 411293 - DNA, 116 bp, Homo sapiens; identical to SEQ ID NO: 321683
  chr17:536432-536548
  hypo

SEQ ID NO: 411294 - DNA, 49 bp, Homo sapiens; identical to SEQ ID NO: 217417
  chr17:591791-591840
  hypo

SEQ ID NO: 411295 - DNA, 140 bp, Homo sapiens; identical to SEQ ID NO: 270019
  chr17:641127-641267
  hypo

SEQ ID NO: 411296 - DNA, 137 bp, Homo sapiens; identical to SEQ ID NO: 217423
  chr17:663955-664092
  hypo

SEQ ID NO: 411297 - DNA, 464 bp, Homo sapiens; identical to SEQ ID NO: 217426
  chr17:693367-693831
  hypo

SEQ ID NO: 411298 - DNA, 33 bp, Homo sapiens; identical to SEQ ID NO: 270027
  chr17:744617-744650
  hypo

SEQ ID NO: 411299 - DNA, 34 bp, Homo sapiens; identical to SEQ ID NO: 270028
  chr17:797966-798000
  hypo

SEQ ID NO: 411300 - DNA, 96 bp, Homo sapiens; identical to SEQ ID NO: 270029
  chr17:817716-817812
  hypo

SEQ ID NO: 411301 - DNA, 92 bp, Homo sapiens; identical to SEQ ID NO: 217427
  chr17:835941-836033
  hypo

SEQ ID NO: 411302 - DNA, 150 bp, Homo sapiens; identical to SEQ ID NO: 217428
  chr17:836153-836303
  hypo

SEQ ID NO: 411303 - DNA, 409 bp, Homo sapiens; identical to SEQ ID NO: 270032
  chr17:839511-839920
  hypo

SEQ ID NO: 411304 - DNA, 68 bp, Homo sapiens; identical to SEQ ID NO: 321712
  chr17:876752-876820
  hypo

SEQ ID NO: 411305 - DNA, 84 bp, Homo sapiens; identical to SEQ ID NO: 225185
  chr17:883202-883286
  hypo

SEQ ID NO: 411306 - DNA, 64 bp, Homo sapiens; identical to SEQ ID NO: 217432
  chr17:916258-916322
  hypo

SEQ ID NO: 411307 - DNA, 525 bp, Homo sapiens; identical to SEQ ID NO: 270040
  chr17:929504-930029
  hypo

SEQ ID NO: 411308 - DNA, 66 bp, Homo sapiens; identical to SEQ ID NO: 270042
  chr17:952745-952811
  hypo

SEQ ID NO: 411309 - DNA, 89 bp, Homo sapiens; identical to SEQ ID NO: 270044
  chr17:978612-978701
  hypo

SEQ ID NO: 411310 - DNA, 65 bp, Homo sapiens; identical to SEQ ID NO: 270047
  chr17:1043599-1043664
  hypo

SEQ ID NO: 411311 - DNA, 110 bp, Homo sapiens; identical to SEQ ID NO: 270048
  chr17:1053213-1053323
  hypo

SEQ ID NO: 411312 - DNA, 59 bp, Homo sapiens; identical to SEQ ID NO: 270049
  chr17:1053672-1053731
  hypo

SEQ ID NO: 411313 - DNA, 73 bp, Homo sapiens; identical to SEQ ID NO: 225186
  chr17:1132222-1132295
  hypo

SEQ ID NO: 411314 - DNA, 53 bp, Homo sapiens; identical to SEQ ID NO: 270053
  chr17:1208267-1208320
  hypo

SEQ ID NO: 411315 - DNA, 214 bp, Homo sapiens; identical to SEQ ID NO: 270054
  chr17:1240771-1240985
  hypo

SEQ ID NO: 411316 - DNA, 51 bp, Homo sapiens
  chr17:1241045-1241096
  hypo
agggtgagattccatctcaaaaaaaaaaaaaatgttaatagctccccagat

SEQ ID NO: 411317 - DNA, 87 bp, Homo sapiens; identical to SEQ ID NO: 270058
  chr17:1255769-1255856
  hypo

SEQ ID NO: 411318 - DNA, 204 bp, Homo sapiens; identical to SEQ ID NO: 270061
  chr17:1373309-1373513
  hypo

SEQ ID NO: 411319 - DNA, 81 bp, Homo sapiens; identical to SEQ ID NO: 217435
  chr17:1376039-1376120
  hypo

SEQ ID NO: 411320 - DNA, 235 bp, Homo sapiens; identical to SEQ ID NO: 270064
  chr17:1386238-1386473
  hypo

SEQ ID NO: 411321 - DNA, 116 bp, Homo sapiens; identical to SEQ ID NO: 217437
  chr17:1387481-1387597
  hypo

SEQ ID NO: 411322 - DNA, 186 bp, Homo sapiens; identical to SEQ ID NO: 321752
  chr17:1494364-1494550
  hypo

SEQ ID NO: 411323 - DNA, 204 bp, Homo sapiens; identical to SEQ ID NO: 270076
  chr17:1527254-1527458
  hypo

SEQ ID NO: 411324 - DNA, 39 bp, Homo sapiens; identical to SEQ ID NO: 270079
  chr17:1562742-1562781
  hypo

SEQ ID NO: 411325 - DNA, 360 bp, Homo sapiens; identical to SEQ ID NO: 225188
  chr17:1613330-1613690
  hypo

SEQ ID NO: 411326 - DNA, 120 bp, Homo sapiens; identical to SEQ ID NO: 270080
  chr17:1694044-1694164
  hypo

SEQ ID NO: 411327 - DNA, 156 bp, Homo sapiens; identical to SEQ ID NO: 217446
  chr17:1694900-1695056
  hypo

SEQ ID NO: 411328 - DNA, 161 bp, Homo sapiens; identical to SEQ ID NO: 217452
  chr17:1792141-1792302
  hypo

SEQ ID NO: 411329 - DNA, 58 bp, Homo sapiens; identical to SEQ ID NO: 270090
  chr17:1802318-1802376
  hypo

SEQ ID NO: 411330 - DNA, 146 bp, Homo sapiens; identical to SEQ ID NO: 321770
  chr17:1824435-1824581
  hypo

SEQ ID NO: 411331 - DNA, 79 bp, Homo sapiens; identical to SEQ ID NO: 321771
  chr17:1824611-1824690
  hypo

SEQ ID NO: 411332 - DNA, 52 bp, Homo sapiens; identical to SEQ ID NO: 217454
  chr17:1837750-1837802
  hypo

SEQ ID NO: 411333 - DNA, 31 bp, Homo sapiens; identical to SEQ ID NO: 217457
  chr17:2015469-2015500
  hypo

SEQ ID NO: 411334 - DNA, 146 bp, Homo sapiens; identical to SEQ ID NO: 225192
  chr17:2156718-2156864
  hypo

SEQ ID NO: 411335 - DNA, 156 bp, Homo sapiens; identical to SEQ ID NO: 217459
  chr17:2182384-2182540
  hypo

SEQ ID NO: 411336 - DNA, 38 bp, Homo sapiens; identical to SEQ ID NO: 270108
  chr17:2263307-2263345
  hypo

SEQ ID NO: 411337 - DNA, 51 bp, Homo sapiens; identical to SEQ ID NO: 321789
  chr17:2278750-2278801
  hypo

SEQ ID NO: 411338 - DNA, 452 bp, Homo sapiens; identical to SEQ ID NO: 321790
  chr17:2278925-2279377
  hypo

SEQ ID NO: 411339 - DNA, 128 bp, Homo sapiens; identical to SEQ ID NO: 270111
  chr17:2290294-2290422
  hypo

SEQ ID NO: 411340 - DNA, 66 bp, Homo sapiens; identical to SEQ ID NO: 386842
  chr17:2326291-2326357
  hypo

SEQ ID NO: 411341 - DNA, 39 bp, Homo sapiens; identical to SEQ ID NO: 217463
  chr17:2326810-2326849
  hypo

SEQ ID NO: 411342 - DNA, 120 bp, Homo sapiens; identical to SEQ ID NO: 217464
  chr17:2388546-2388666
  hypo

SEQ ID NO: 411343 - DNA, 77 bp, Homo sapiens; identical to SEQ ID NO: 270117
  chr17:2539951-2540028
  hypo

SEQ ID NO: 411344 - DNA, 39 bp, Homo sapiens; identical to SEQ ID NO: 270118
  chr17:2590520-2590559
  hypo

SEQ ID NO: 411345 - DNA, 203 bp, Homo sapiens; identical to SEQ ID NO: 217465
  chr17:2595624-2595827
  hypo

SEQ ID NO: 411346 - DNA, 235 bp, Homo sapiens; identical to SEQ ID NO: 270120
  chr17:2599038-2599273
  hypo

SEQ ID NO: 411347 - DNA, 34 bp, Homo sapiens; identical to SEQ ID NO: 217468
  chr17:2616132-2616166
  hypo

SEQ ID NO: 411348 - DNA, 240 bp, Homo sapiens; identical to SEQ ID NO: 217471
  chr17:2684894-2685134
  hypo

SEQ ID NO: 411349 - DNA, 95 bp, Homo sapiens; identical to SEQ ID NO: 270127
  chr17:2708584-2708679
  hypo

SEQ ID NO: 411350 - DNA, 287 bp, Homo sapiens; identical to SEQ ID NO: 217474
  chr17:2908449-2908736
  hypo

SEQ ID NO: 411351 - DNA, 168 bp, Homo sapiens; identical to SEQ ID NO: 270134
  chr17:3374890-3375058
  hypo

SEQ ID NO: 411352 - DNA, 321 bp, Homo sapiens; identical to SEQ ID NO: 270137
  chr17:3486255-3486576
  hypo

SEQ ID NO: 411353 - DNA, 72 bp, Homo sapiens; identical to SEQ ID NO: 217476
  chr17:3500360-3500432
  hypo

SEQ ID NO: 411354 - DNA, 84 bp, Homo sapiens; identical to SEQ ID NO: 270140
  chr17:3561543-3561627
  hypo

SEQ ID NO: 411355 - DNA, 250 bp, Homo sapiens; identical to SEQ ID NO: 270141
  chr17:3562849-3563099
  hypo

SEQ ID NO: 411356 - DNA, 190 bp, Homo sapiens; identical to SEQ ID NO: 270144
  chr17:3653522-3653712
  hypo

SEQ ID NO: 411357 - DNA, 99 bp, Homo sapiens; identical to SEQ ID NO: 270145
  chr17:3660155-3660254
  hypo

SEQ ID NO: 411358 - DNA, 158 bp, Homo sapiens; identical to SEQ ID NO: 270147
  chr17:3711312-3711470
  hypo

SEQ ID NO: 411359 - DNA, 73 bp, Homo sapiens; identical to SEQ ID NO: 217482
  chr17:3721569-3721642
  hypo

SEQ ID NO: 411360 - DNA, 39 bp, Homo sapiens; identical to SEQ ID NO: 321834
  chr17:3741553-3741592
  hypo

SEQ ID NO: 411361 - DNA, 240 bp, Homo sapiens; identical to SEQ ID NO: 321835
  chr17:3755034-3755274
  hypo

SEQ ID NO: 411362 - DNA, 111 bp, Homo sapiens; identical to SEQ ID NO: 270152
  chr17:3793345-3793456
  hypo

SEQ ID NO: 411363 - DNA, 135 bp, Homo sapiens; identical to SEQ ID NO: 217484
  chr17:3844806-3844941
  hypo

SEQ ID NO: 411364 - DNA, 370 bp, Homo sapiens; identical to SEQ ID NO: 270155
  chr17:3850755-3851125
  hypo

SEQ ID NO: 411365 - DNA, 31 bp, Homo sapiens; identical to SEQ ID NO: 217489
  chr17:4039622-4039653
  hypo

SEQ ID NO: 411366 - DNA, 104 bp, Homo sapiens; identical to SEQ ID NO: 270162
  chr17:4048008-4048112
  hypo

SEQ ID NO: 411367 - DNA, 288 bp, Homo sapiens; identical to SEQ ID NO: 270165
  chr17:4074112-4074400
  hypo

SEQ ID NO: 411368 - DNA, 45 bp, Homo sapiens; identical to SEQ ID NO: 217491
  chr17:4161526-4161571
  hypo

SEQ ID NO: 411369 - DNA, 120 bp, Homo sapiens; identical to SEQ ID NO: 270175
  chr17:4250033-4250153
  hypo

SEQ ID NO: 411370 - DNA, 37 bp, Homo sapiens; identical to SEQ ID NO: 270177
  chr17:4289153-4289190
  hypo

SEQ ID NO: 411371 - DNA, 87 bp, Homo sapiens; identical to SEQ ID NO: 217496
  chr17:4461986-4462073
  hypo

SEQ ID NO: 411372 - DNA, 239 bp, Homo sapiens; identical to SEQ ID NO: 225204
  chr17:4938733-4938972
  hypo

SEQ ID NO: 411373 - DNA, 164 bp, Homo sapiens; identical to SEQ ID NO: 217505
  chr17:5392214-5392378
  hypo

SEQ ID NO: 411374 - DNA, 163 bp, Homo sapiens; identical to SEQ ID NO: 270193
  chr17:5465216-5465379
  hypo

SEQ ID NO: 411375 - DNA, 147 bp, Homo sapiens; identical to SEQ ID NO: 217507
  chr17:6023533-6023680
  hypo

SEQ ID NO: 411376 - DNA, 157 bp, Homo sapiens; identical to SEQ ID NO: 217508
  chr17:6023875-6024032
  hypo

SEQ ID NO: 411377 - DNA, 138 bp, Homo sapiens; identical to SEQ ID NO: 270195
  chr17:6419897-6420035
  hypo

SEQ ID NO: 411378 - DNA, 37 bp, Homo sapiens; identical to SEQ ID NO: 270200
  chr17:6755824-6755861
  hypo

SEQ ID NO: 411379 - DNA, 92 bp, Homo sapiens; identical to SEQ ID NO: 270201
  chr17:6899902-6899994
  hypo

SEQ ID NO: 411380 - DNA, 159 bp, Homo sapiens; identical to SEQ ID NO: 270203
  chr17:7076077-7076236
  hypo

SEQ ID NO: 411381 - DNA, 67 bp, Homo sapiens; identical to SEQ ID NO: 204392
  chr17:7146588-7146655
  hypo

SEQ ID NO: 411382 - DNA, 51 bp, Homo sapiens; identical to SEQ ID NO: 270214
  chr17:7292301-7292352
  hypo

SEQ ID NO: 411383 - DNA, 43 bp, Homo sapiens; identical to SEQ ID NO: 270215
  chr17:7318437-7318480
  hypo

SEQ ID NO: 411384 - DNA, 274 bp, Homo sapiens; identical to SEQ ID NO: 225215
  chr17:7340607-7340881
  hypo

SEQ ID NO: 411385 - DNA, 160 bp, Homo sapiens; identical to SEQ ID NO: 217518
  chr17:7367404-7367564
  hypo

SEQ ID NO: 411386 - DNA, 249 bp, Homo sapiens; identical to SEQ ID NO: 321923
  chr17:7419658-7419907
  hypo

SEQ ID NO: 411387 - DNA, 385 bp, Homo sapiens; identical to SEQ ID NO: 291954
  chr17:7486279-7486664
  hypo

SEQ ID NO: 411388 - DNA, 287 bp, Homo sapiens; identical to SEQ ID NO: 225217
  chr17:7486947-7487234
  hypo

SEQ ID NO: 411389 - DNA, 619 bp, Homo sapiens; identical to SEQ ID NO: 217523
  chr17:7491960-7492579
  hypo

SEQ ID NO: 411390 - DNA, 40 bp, Homo sapiens
  chr17:7493109-7493149
  hypo
cttaaaaagtgtattttatccccaagcccagagcttaaac

SEQ ID NO: 411391 - DNA, 273 bp, Homo sapiens; identical to SEQ ID NO: 270229
  chr17:7493323-7493596
  hypo

SEQ ID NO: 411392 - DNA, 41 bp, Homo sapiens; identical to SEQ ID NO: 217525
  chr17:7536911-7536952
  hypo

SEQ ID NO: 411393 - DNA, 165 bp, Homo sapiens; identical to SEQ ID NO: 204402
  chr17:7571719-7571884
  hypo

SEQ ID NO: 411394 - DNA, 773 bp, Homo sapiens; identical to SEQ ID NO: 204403
  chr17:7572184-7572957
  hypo

SEQ ID NO: 411395 - DNA, 329 bp, Homo sapiens; identical to SEQ ID NO: 204409
  chr17:7590625-7590954
  hypo

SEQ ID NO: 411396 - DNA, 33 bp, Homo sapiens; identical to SEQ ID NO: 321946
  chr17:7727216-7727249
  hypo

SEQ ID NO: 411397 - DNA, 95 bp, Homo sapiens; identical to SEQ ID NO: 217535
  chr17:7769321-7769416
  hypo

SEQ ID NO: 411398 - DNA, 42 bp, Homo sapiens; identical to SEQ ID NO: 270240
  chr17:7797154-7797196
  hypo

SEQ ID NO: 411399 - DNA, 184 bp, Homo sapiens; identical to SEQ ID NO: 217537
  chr17:7798625-7798809
  hypo

SEQ ID NO: 411400 - DNA, 101 bp, Homo sapiens; identical to SEQ ID NO: 217538
  chr17:7800249-7800350
  hypo

SEQ ID NO: 411401 - DNA, 49 bp, Homo sapiens; identical to SEQ ID NO: 217542
  chr17:7811072-7811121
  hypo

SEQ ID NO: 411402 - DNA, 126 bp, Homo sapiens; identical to SEQ ID NO: 270247
  chr17:7812554-7812680
  hypo

SEQ ID NO: 411403 - DNA, 79 bp, Homo sapiens; identical to SEQ ID NO: 217543
  chr17:7813720-7813799
  hypo

SEQ ID NO: 411404 - DNA, 120 bp, Homo sapiens; identical to SEQ ID NO: 217544
  chr17:7892730-7892850
  hypo

SEQ ID NO: 411405 - DNA, 472 bp, Homo sapiens; identical to SEQ ID NO: 217546
  chr17:8138410-8138882
  hypo

SEQ ID NO: 411406 - DNA, 38 bp, Homo sapiens; identical to SEQ ID NO: 270257
  chr17:8276463-8276501
  hypo

SEQ ID NO: 411407 - DNA, 244 bp, Homo sapiens; identical to SEQ ID NO: 321967
  chr17:8295898-8296142
  hypo

SEQ ID NO: 411408 - DNA, 258 bp, Homo sapiens; identical to SEQ ID NO: 217549
  chr17:8311456-8311714
  hypo

SEQ ID NO: 411409 - DNA, 103 bp, Homo sapiens; identical to SEQ ID NO: 270260
  chr17:8319005-8319108
  hypo

SEQ ID NO: 411410 - DNA, 83 bp, Homo sapiens; identical to SEQ ID NO: 217550
  chr17:8325971-8326054
  hypo

SEQ ID NO: 411411 - DNA, 59 bp, Homo sapiens; identical to SEQ ID NO: 217551
  chr17:8365227-8365286
  hypo

SEQ ID NO: 411412 - DNA, 104 bp, Homo sapiens; identical to SEQ ID NO: 270270
  chr17:8458246-8458350
  hypo

SEQ ID NO: 411413 - DNA, 57 bp, Homo sapiens; identical to SEQ ID NO: 270271
  chr17:8471465-8471522
  hypo

SEQ ID NO: 411414 - DNA, 126 bp, Homo sapiens; identical to SEQ ID NO: 217554
  chr17:8700777-8700903
  hypo

SEQ ID NO: 411415 - DNA, 33 bp, Homo sapiens; identical to SEQ ID NO: 225226
  chr17:8759640-8759673
  hypo

SEQ ID NO: 411416 - DNA, 102 bp, Homo sapiens; identical to SEQ ID NO: 270278
  chr17:8932900-8933002
  hypo

SEQ ID NO: 411417 - DNA, 147 bp, Homo sapiens; identical to SEQ ID NO: 217556
  chr17:9054227-9054374
  hypo

SEQ ID NO: 411418 - DNA, 44 bp, Homo sapiens; identical to SEQ ID NO: 321991
  chr17:9065675-9065719
  hypo

SEQ ID NO: 411419 - DNA, 106 bp, Homo sapiens; identical to SEQ ID NO: 321992
  chr17:9065749-9065855
  hypo

SEQ ID NO: 411420 - DNA, 275 bp, Homo sapiens; identical to SEQ ID NO: 270287
  chr17:9124886-9125161
  hypo

SEQ ID NO: 411421 - DNA, 191 bp, Homo sapiens; identical to SEQ ID NO: 217559
  chr17:9150998-9151189
  hypo

SEQ ID NO: 411422 - DNA, 77 bp, Homo sapiens; identical to SEQ ID NO: 270290
  chr17:9153811-9153888
  hypo

SEQ ID NO: 411423 - DNA, 193 bp, Homo sapiens; identical to SEQ ID NO: 270293
  chr17:9264056-9264249
  hypo

SEQ ID NO: 411424 - DNA, 164 bp, Homo sapiens; identical to SEQ ID NO: 270295
  chr17:9474685-9474849
  hypo

SEQ ID NO: 411425 - DNA, 184 bp, Homo sapiens; identical to SEQ ID NO: 270305
  chr17:10216484-10216668
  hypo

SEQ ID NO: 411426 - DNA, 169 bp, Homo sapiens; identical to SEQ ID NO: 270307
  chr17:11774905-11775074
  hypo

SEQ ID NO: 411427 - DNA, 44 bp, Homo sapiens; identical to SEQ ID NO: 217568
  chr17:12744163-12744207
  hypo

SEQ ID NO: 411428 - DNA, 135 bp, Homo sapiens; identical to SEQ ID NO: 204432
  chr17:12877185-12877320
  hypo

SEQ ID NO: 411429 - DNA, 242 bp, Homo sapiens; identical to SEQ ID NO: 217571
  chr17:12905698-12905940
  hypo

SEQ ID NO: 411430 - DNA, 44 bp, Homo sapiens; identical to SEQ ID NO: 217574
  chr17:14236462-14236506
  hypo

SEQ ID NO: 411431 - DNA, 38 bp, Homo sapiens; identical to SEQ ID NO: 270316
  chr17:14674674-14674712
  hypo

SEQ ID NO: 411432 - DNA, 89 bp, Homo sapiens; identical to SEQ ID NO: 217575
  chr17:15411143-15411232
  hypo

SEQ ID NO: 411433 - DNA, 45 bp, Homo sapiens; identical to SEQ ID NO: 270321
  chr17:15843704-15843749
  hypo

SEQ ID NO: 411434 - DNA, 186 bp, Homo sapiens; identical to SEQ ID NO: 270323
  chr17:15873031-15873217
  hypo

SEQ ID NO: 411435 - DNA, 55 bp, Homo sapiens; identical to SEQ ID NO: 270324
  chr17:15952212-15952267
  hypo

SEQ ID NO: 411436 - DNA, 120 bp, Homo sapiens; identical to SEQ ID NO: 270326
  chr17:16149817-16149937
  hypo

SEQ ID NO: 411437 - DNA, 121 bp, Homo sapiens; identical to SEQ ID NO: 217582
  chr17:16385291-16385412
  hypo

SEQ ID NO: 411438 - DNA, 273 bp, Homo sapiens; identical to SEQ ID NO: 217583
  chr17:16391199-16391472
  hypo

SEQ ID NO: 411439 - DNA, 57 bp, Homo sapiens; identical to SEQ ID NO: 225243
  chr17:16395229-16395286
  hypo

SEQ ID NO: 411440 - DNA, 172 bp, Homo sapiens; identical to SEQ ID NO: 270332
  chr17:16399904-16400076
  hypo

SEQ ID NO: 411441 - DNA, 200 bp, Homo sapiens; identical to SEQ ID NO: 270333
  chr17:16434315-16434515
  hypo

SEQ ID NO: 411442 - DNA, 197 bp, Homo sapiens; identical to SEQ ID NO: 270335
  chr17:16927737-16927934
  hypo

SEQ ID NO: 411443 - DNA, 119 bp, Homo sapiens; identical to SEQ ID NO: 270339
  chr17:17012232-17012351
  hypo

SEQ ID NO: 411444 - DNA, 484 bp, Homo sapiens; identical to SEQ ID NO: 270343
  chr17:17067430-17067914
  hypo

SEQ ID NO: 411445 - DNA, 98 bp, Homo sapiens; identical to SEQ ID NO: 270351
  chr17:17142228-17142326
  hypo

SEQ ID NO: 411446 - DNA, 206 bp, Homo sapiens; identical to SEQ ID NO: 270354
  chr17:17250660-17250866
  hypo

SEQ ID NO: 411447 - DNA, 311 bp, Homo sapiens; identical to SEQ ID NO: 217590
  chr17:17251122-17251433
  hypo

SEQ ID NO: 411448 - DNA, 101 bp, Homo sapiens; identical to SEQ ID NO: 270356
  chr17:17255033-17255134
  hypo

SEQ ID NO: 411449 - DNA, 247 bp, Homo sapiens; identical to SEQ ID NO: 270361
  chr17:17344148-17344395
  hypo

SEQ ID NO: 411450 - DNA, 52 bp, Homo sapiens; identical to SEQ ID NO: 217593
  chr17:17402429-17402481
  hypo

SEQ ID NO: 411451 - DNA, 132 bp, Homo sapiens; identical to SEQ ID NO: 217594
  chr17:17447945-17448077
  hypo

SEQ ID NO: 411452 - DNA, 92 bp, Homo sapiens; identical to SEQ ID NO: 270366
  chr17:17590235-17590327
  hypo

SEQ ID NO: 411453 - DNA, 296 bp, Homo sapiens; identical to SEQ ID NO: 270370
  chr17:17615237-17615533
  hypo

SEQ ID NO: 411454 - DNA, 92 bp, Homo sapiens; identical to SEQ ID NO: 217595
  chr17:17618837-17618929
  hypo

SEQ ID NO: 411455 - DNA, 182 bp, Homo sapiens; identical to SEQ ID NO: 270377
  chr17:17881580-17881762
  hypo

SEQ ID NO: 411456 - DNA, 108 bp, Homo sapiens; identical to SEQ ID NO: 270378
  chr17:17908138-17908246
  hypo

SEQ ID NO: 411457 - DNA, 174 bp, Homo sapiens; identical to SEQ ID NO: 270381
  chr17:18026591-18026765
  hypo

SEQ ID NO: 411458 - DNA, 453 bp, Homo sapiens; identical to SEQ ID NO: 270385
  chr17:18149873-18150326
  hypo

SEQ ID NO: 411459 - DNA, 61 bp, Homo sapiens; identical to SEQ ID NO: 270389
  chr17:18267503-18267564
  hypo

SEQ ID NO: 411460 - DNA, 79 bp, Homo sapiens; identical to SEQ ID NO: 270392
  chr17:18527462-18527541
  hypo

SEQ ID NO: 411461 - DNA, 94 bp, Homo sapiens; identical to SEQ ID NO: 270399
  chr17:18895396-18895490
  hypo

SEQ ID NO: 411462 - DNA, 88 bp, Homo sapiens; identical to SEQ ID NO: 270401
  chr17:19203399-19203487
  hypo

SEQ ID NO: 411463 - DNA, 79 bp, Homo sapiens; identical to SEQ ID NO: 217605
  chr17:19211655-19211734
  hypo

SEQ ID NO: 411464 - DNA, 216 bp, Homo sapiens; identical to SEQ ID NO: 322128
  chr17:19211764-19211980
  hypo

SEQ ID NO: 411465 - DNA, 49 bp, Homo sapiens; identical to SEQ ID NO: 270404
  chr17:19234671-19234720
  hypo

SEQ ID NO: 411466 - DNA, 401 bp, Homo sapiens; identical to SEQ ID NO: 270408
  chr17:19617063-19617464
  hypo

SEQ ID NO: 411467 - DNA, 65 bp, Homo sapiens; identical to SEQ ID NO: 217611
  chr17:19641468-19641533
  hypo

SEQ ID NO: 411468 - DNA, 58 bp, Homo sapiens; identical to SEQ ID NO: 270412
  chr17:19642884-19642942
  hypo

SEQ ID NO: 411469 - DNA, 174 bp, Homo sapiens; identical to SEQ ID NO: 270414
  chr17:19644760-19644934
  hypo

SEQ ID NO: 411470 - DNA, 88 bp, Homo sapiens; identical to SEQ ID NO: 270417
  chr17:19650045-19650133
  hypo

SEQ ID NO: 411471 - DNA, 44 bp, Homo sapiens; identical to SEQ ID NO: 270418
  chr17:19686487-19686531
  hypo

SEQ ID NO: 411472 - DNA, 104 bp, Homo sapiens; identical to SEQ ID NO: 217612
  chr17:19687003-19687107
  hypo

SEQ ID NO: 411473 - DNA, 71 bp, Homo sapiens; identical to SEQ ID NO: 270423
  chr17:19772163-19772234
  hypo

SEQ ID NO: 411474 - DNA, 45 bp, Homo sapiens; identical to SEQ ID NO: 270424
  chr17:19773273-19773318
  hypo

SEQ ID NO: 411475 - DNA, 93 bp, Homo sapiens; identical to SEQ ID NO: 270426
  chr17:19861688-19861781
  hypo

SEQ ID NO: 411476 - DNA, 120 bp, Homo sapiens; identical to SEQ ID NO: 270428
  chr17:19902538-19902658
  hypo

SEQ ID NO: 411477 - DNA, 246 bp, Homo sapiens; identical to SEQ ID NO: 204463
  chr17:20059180-20059426
  hypo

SEQ ID NO: 411478 - DNA, 120 bp, Homo sapiens; identical to SEQ ID NO: 270431
  chr17:20065370-20065490
  hypo

SEQ ID NO: 411479 - DNA, 34 bp, Homo sapiens; identical to SEQ ID NO: 270432
  chr17:20065730-20065764
  hypo

SEQ ID NO: 411480 - DNA, 83 bp, Homo sapiens; identical to SEQ ID NO: 217617
  chr17:20087136-20087219
  hypo

SEQ ID NO: 411481 - DNA, 377 bp, Homo sapiens; identical to SEQ ID NO: 270434
  chr17:20107950-20108327
  hypo

SEQ ID NO: 411482 - DNA, 78 bp, Homo sapiens; identical to SEQ ID NO: 270435
  chr17:20141015-20141093
  hypo

SEQ ID NO: 411483 - DNA, 33 bp, Homo sapiens; identical to SEQ ID NO: 270439
  chr17:20220061-20220094
  hypo

SEQ ID NO: 411484 - DNA, 187 bp, Homo sapiens; identical to SEQ ID NO: 270444
  chr17:20841354-20841541
  hypo

SEQ ID NO: 411485 - DNA, 133 bp, Homo sapiens; identical to SEQ ID NO: 217619
  chr17:20905669-20905802
  hypo

SEQ ID NO: 411486 - DNA, 195 bp, Homo sapiens; identical to SEQ ID NO: 217620
  chr17:20914087-20914282
  hypo

SEQ ID NO: 411487 - DNA, 185 bp, Homo sapiens; identical to SEQ ID NO: 217621
  chr17:20919060-20919245
  hypo

SEQ ID NO: 411488 - DNA, 41 bp, Homo sapiens; identical to SEQ ID NO: 270454
  chr17:21128221-21128262
  hypo

SEQ ID NO: 411489 - DNA, 83 bp, Homo sapiens; identical to SEQ ID NO: 217622
  chr17:21160808-21160891
  hypo

SEQ ID NO: 411490 - DNA, 118 bp, Homo sapiens; identical to SEQ ID NO: 270466
  chr17:25748141-25748259
  hypo

SEQ ID NO: 411491 - DNA, 127 bp, Homo sapiens; identical to SEQ ID NO: 270467
  chr17:25829641-25829768
  hypo

SEQ ID NO: 411492 - DNA, 210 bp, Homo sapiens; identical to SEQ ID NO: 322192
  chr17:25878807-25879017
  hypo

SEQ ID NO: 411493 - DNA, 354 bp, Homo sapiens; identical to SEQ ID NO: 322193
  chr17:25879047-25879401
  hypo

SEQ ID NO: 411494 - DNA, 34 bp, Homo sapiens; identical to SEQ ID NO: 217632
  chr17:25933867-25933901
  hypo

SEQ ID NO: 411495 - DNA, 97 bp, Homo sapiens; identical to SEQ ID NO: 217634
  chr17:25948172-25948269
  hypo

SEQ ID NO: 411496 - DNA, 110 bp, Homo sapiens; identical to SEQ ID NO: 270479
  chr17:25970770-25970880
  hypo

SEQ ID NO: 411497 - DNA, 238 bp, Homo sapiens; identical to SEQ ID NO: 217640
  chr17:26960859-26961097
  hypo

SEQ ID NO: 411498 - DNA, 129 bp, Homo sapiens; identical to SEQ ID NO: 217643
  chr17:27011597-27011726
  hypo

SEQ ID NO: 411499 - DNA, 64 bp, Homo sapiens; identical to SEQ ID NO: 270492
  chr17:27028074-27028138
  hypo

SEQ ID NO: 411500 - DNA, 283 bp, Homo sapiens; identical to SEQ ID NO: 322219
  chr17:27056869-27057152
  hypo

SEQ ID NO: 411501 - DNA, 176 bp, Homo sapiens; identical to SEQ ID NO: 270494
  chr17:27074939-27075115
  hypo

SEQ ID NO: 411502 - DNA, 35 bp, Homo sapiens; identical to SEQ ID NO: 217645
  chr17:27138132-27138167
  hypo

SEQ ID NO: 411503 - DNA, 96 bp, Homo sapiens; identical to SEQ ID NO: 270499
  chr17:27171310-27171406
  hypo

SEQ ID NO: 411504 - DNA, 38 bp, Homo sapiens; identical to SEQ ID NO: 270500
  chr17:27179810-27179848
  hypo

SEQ ID NO: 411505 - DNA, 492 bp, Homo sapiens; identical to SEQ ID NO: 270503
  chr17:27228011-27228503
  hypo

SEQ ID NO: 411506 - DNA, 87 bp, Homo sapiens; identical to SEQ ID NO: 292117
  chr17:27333201-27333288
  hypo

SEQ ID NO: 411507 - DNA, 69 bp, Homo sapiens; identical to SEQ ID NO: 217648
  chr17:27407262-27407331
  hypo

SEQ ID NO: 411508 - DNA, 66 bp, Homo sapiens; identical to SEQ ID NO: 217649
  chr17:27407717-27407783
  hypo

SEQ ID NO: 411509 - DNA, 36 bp, Homo sapiens; identical to SEQ ID NO: 270512
  chr17:27421183-27421219
  hypo

SEQ ID NO: 411510 - DNA, 133 bp, Homo sapiens; identical to SEQ ID NO: 217656
  chr17:27902814-27902947
  hypo

SEQ ID NO: 411511 - DNA, 36 bp, Homo sapiens; identical to SEQ ID NO: 270518
  chr17:27908746-27908782
  hypo

SEQ ID NO: 411512 - DNA, 903 bp, Homo sapiens; identical to SEQ ID NO: 292123
  chr17:27942512-27943415
  hypo

SEQ ID NO: 411513 - DNA, 242 bp, Homo sapiens; identical to SEQ ID NO: 204481
  chr17:28563016-28563258
  hypo

SEQ ID NO: 411514 - DNA, 73 bp, Homo sapiens
  chr17:29232004-29232077
  hypo
tctttaaaagaggattagtttttaaactatattatatagagttttaaatagagcttttgttgttttcaagtca

SEQ ID NO: 411515 - DNA, 85 bp, Homo sapiens; identical to SEQ ID NO: 322258
  chr17:29234397-29234482
  hypo

SEQ ID NO: 411516 - DNA, 488 bp, Homo sapiens; identical to SEQ ID NO: 128356
  chr17:29421899-29422387
  hypo

SEQ ID NO: 411517 - DNA, 144 bp, Homo sapiens; identical to SEQ ID NO: 204486
  chr17:29483000-29483144
  hypo

SEQ ID NO: 411518 - DNA, 91 bp, Homo sapiens; identical to SEQ ID NO: 204487
  chr17:29486027-29486118
  hypo

SEQ ID NO: 411519 - DNA, 191 bp, Homo sapiens; identical to SEQ ID NO: 204488
  chr17:29490203-29490394
  hypo

SEQ ID NO: 411520 - DNA, 109 bp, Homo sapiens; identical to SEQ ID NO: 204489
  chr17:29496908-29497017
  hypo

SEQ ID NO: 411521 - DNA, 68 bp, Homo sapiens; identical to SEQ ID NO: 204490
  chr17:29508439-29508507
  hypo

SEQ ID NO: 411522 - DNA, 174 bp, Homo sapiens; identical to SEQ ID NO: 204493
  chr17:29527439-29527613
  hypo

SEQ ID NO: 411523 - DNA, 123 bp, Homo sapiens; identical to SEQ ID NO: 204494
  chr17:29528054-29528177
  hypo

SEQ ID NO: 411524 - DNA, 75 bp, Homo sapiens; identical to SEQ ID NO: 204495
  chr17:29528428-29528503
  hypo

SEQ ID NO: 411525 - DNA, 59 bp, Homo sapiens; identical to SEQ ID NO: 204497
  chr17:29541468-29541527
  hypo

SEQ ID NO: 411526 - DNA, 47 bp, Homo sapiens; identical to SEQ ID NO: 204498
  chr17:29541556-29541603
  hypo

SEQ ID NO: 411527 - DNA, 136 bp, Homo sapiens; identical to SEQ ID NO: 204499
  chr17:29546009-29546145
  hypo

SEQ ID NO: 411528 - DNA, 156 bp, Homo sapiens; identical to SEQ ID NO: 204502
  chr17:29552112-29552268
  hypo

SEQ ID NO: 411529 - DNA, 250 bp, Homo sapiens; identical to SEQ ID NO: 204503
  chr17:29553452-29553702
  hypo

SEQ ID NO: 411530 - DNA, 74 bp, Homo sapiens; identical to SEQ ID NO: 204504
  chr17:29554235-29554309
  hypo

SEQ ID NO: 411531 - DNA, 84 bp, Homo sapiens; identical to SEQ ID NO: 204505
  chr17:29554540-29554624
  hypo

SEQ ID NO: 411532 - DNA, 441 bp, Homo sapiens; identical to SEQ ID NO: 204506
  chr17:29556042-29556483
  hypo

SEQ ID NO: 411533 - DNA, 123 bp, Homo sapiens; identical to SEQ ID NO: 204508
  chr17:29557277-29557400
  hypo

SEQ ID NO: 411534 - DNA, 117 bp, Homo sapiens; identical to SEQ ID NO: 204510
  chr17:29559090-29559207
  hypo

SEQ ID NO: 411535 - DNA, 514 bp, Homo sapiens; identical to SEQ ID NO: 204511
  chr17:29559717-29560231
  hypo

SEQ ID NO: 411536 - DNA, 136 bp, Homo sapiens; identical to SEQ ID NO: 204514
  chr17:29576001-29576137
  hypo

SEQ ID NO: 411537 - DNA, 63 bp, Homo sapiens; identical to SEQ ID NO: 204515
  chr17:29579955-29580018
  hypo

SEQ ID NO: 411538 - DNA, 147 bp, Homo sapiens; identical to SEQ ID NO: 204518
  chr17:29587386-29587533
  hypo

SEQ ID NO: 411539 - DNA, 111 bp, Homo sapiens; identical to SEQ ID NO: 204520
  chr17:29592246-29592357
  hypo

SEQ ID NO: 411540 - DNA, 203 bp, Homo sapiens; identical to SEQ ID NO: 204523
  chr17:29657313-29657516
  hypo

SEQ ID NO: 411541 - DNA, 582 bp, Homo sapiens; identical to SEQ ID NO: 204525
  chr17:29663350-29663932
  hypo

SEQ ID NO: 411542 - DNA, 215 bp, Homo sapiens; identical to SEQ ID NO: 204526
  chr17:29664385-29664600
  hypo

SEQ ID NO: 411543 - DNA, 141 bp, Homo sapiens; identical to SEQ ID NO: 204529
  chr17:29667522-29667663
  hypo

SEQ ID NO: 411544 - DNA, 123 bp, Homo sapiens; identical to SEQ ID NO: 204534
  chr17:29683477-29683600
  hypo

SEQ ID NO: 411545 - DNA, 410 bp, Homo sapiens; identical to SEQ ID NO: 204535
  chr17:29683977-29684387
  hypo

SEQ ID NO: 411546 - DNA, 143 bp, Homo sapiens; identical to SEQ ID NO: 204536
  chr17:29685497-29685640
  hypo

SEQ ID NO: 411547 - DNA, 47 bp, Homo sapiens; identical to SEQ ID NO: 204537
  chr17:29685986-29686033
  hypo

SEQ ID NO: 411548 - DNA, 217 bp, Homo sapiens; identical to SEQ ID NO: 204538
  chr17:29687504-29687721
  hypo

SEQ ID NO: 411549 - DNA, 241 bp, Homo sapiens; identical to SEQ ID NO: 270534
  chr17:30348356-30348597
  hypo

SEQ ID NO: 411550 - DNA, 40 bp, Homo sapiens; identical to SEQ ID NO: 270536
  chr17:30582939-30582979
  hypo

SEQ ID NO: 411551 - DNA, 89 bp, Homo sapiens; identical to SEQ ID NO: 204542
  chr17:30813422-30813511
  hypo

SEQ ID NO: 411552 - DNA, 199 bp, Homo sapiens; identical to SEQ ID NO: 217724
  chr17:30844875-30845074
  hypo

SEQ ID NO: 411553 - DNA, 253 bp, Homo sapiens; identical to SEQ ID NO: 270543
  chr17:31047963-31048216
  hypo

SEQ ID NO: 411554 - DNA, 105 bp, Homo sapiens; identical to SEQ ID NO: 225322
  chr17:31203740-31203845
  hypo

SEQ ID NO: 411555 - DNA, 77 bp, Homo sapiens; identical to SEQ ID NO: 270552
  chr17:33578345-33578422
  hypo

SEQ ID NO: 411556 - DNA, 34 bp, Homo sapiens; identical to SEQ ID NO: 270553
  chr17:33898171-33898205
  hypo

SEQ ID NO: 411557 - DNA, 112 bp, Homo sapiens; identical to SEQ ID NO: 270556
  chr17:35039667-35039779
  hypo

SEQ ID NO: 411558 - DNA, 172 bp, Homo sapiens; identical to SEQ ID NO: 270557
  chr17:35045439-35045611
  hypo

SEQ ID NO: 411559 - DNA, 117 bp, Homo sapiens; identical to SEQ ID NO: 270558
  chr17:35099227-35099344
  hypo

SEQ ID NO: 411560 - DNA, 35 bp, Homo sapiens; identical to SEQ ID NO: 217732
  chr17:35414066-35414101
  hypo

SEQ ID NO: 411561 - DNA, 164 bp, Homo sapiens; identical to SEQ ID NO: 270561
  chr17:35488971-35489135
  hypo

SEQ ID NO: 411562 - DNA, 456 bp, Homo sapiens; identical to SEQ ID NO: 292228
  chr17:35716404-35716860
  hypo

SEQ ID NO: 411563 - DNA, 82 bp, Homo sapiens; identical to SEQ ID NO: 270567
  chr17:36076477-36076559
  hypo

SEQ ID NO: 411564 - DNA, 46 bp, Homo sapiens; identical to SEQ ID NO: 11164
  chr17:36762362-36762408
  hypo

SEQ ID NO: 411565 - DNA, 42 bp, Homo sapiens; identical to SEQ ID NO: 270568
  chr17:36818503-36818545
  hypo

SEQ ID NO: 411566 - DNA, 450 bp, Homo sapiens; identical to SEQ ID NO: 204570
  chr17:36905017-36905467
  hypo

SEQ ID NO: 411567 - DNA, 42 bp, Homo sapiens; identical to SEQ ID NO: 217742
  chr17:36967822-36967864
  hypo

SEQ ID NO: 411568 - DNA, 120 bp, Homo sapiens; identical to SEQ ID NO: 270575
  chr17:37012074-37012194
  hypo

SEQ ID NO: 411569 - DNA, 31 bp, Homo sapiens; identical to SEQ ID NO: 270578
  chr17:37111337-37111368
  hypo

SEQ ID NO: 411570 - DNA, 35 bp, Homo sapiens; identical to SEQ ID NO: 270580
  chr17:37276419-37276454
  hypo

SEQ ID NO: 411571 - DNA, 39 bp, Homo sapiens; identical to SEQ ID NO: 217744
  chr17:37445220-37445259
  hypo

SEQ ID NO: 411572 - DNA, 34 bp, Homo sapiens; identical to SEQ ID NO: 217745
  chr17:37452478-37452512
  hypo

SEQ ID NO: 411573 - DNA, 85 bp, Homo sapiens; identical to SEQ ID NO: 217747
  chr17:37483846-37483931
  hypo

SEQ ID NO: 411574 - DNA, 180 bp, Homo sapiens; identical to SEQ ID NO: 270587
  chr17:37583288-37583468
  hypo

SEQ ID NO: 411575 - DNA, 33 bp, Homo sapiens; identical to SEQ ID NO: 217749
  chr17:37701201-37701234
  hypo

SEQ ID NO: 411576 - DNA, 146 bp, Homo sapiens; identical to SEQ ID NO: 292264
  chr17:37762839-37762985
  hypo

SEQ ID NO: 411577 - DNA, 52 bp, Homo sapiens; identical to SEQ ID NO: 204587
  chr17:37823746-37823798
  hypo

SEQ ID NO: 411578 - DNA, 525 bp, Homo sapiens; identical to SEQ ID NO: 292272
  chr17:37823945-37824470
  hypo

SEQ ID NO: 411579 - DNA, 31 bp, Homo sapiens; identical to SEQ ID NO: 322392
  chr17:37887589-37887620
  hypo

SEQ ID NO: 411580 - DNA, 84 bp, Homo sapiens; identical to SEQ ID NO: 270594
  chr17:38075339-38075423
  hypo

SEQ ID NO: 411581 - DNA, 120 bp, Homo sapiens; identical to SEQ ID NO: 217758
  chr17:38105714-38105834
  hypo

SEQ ID NO: 411582 - DNA, 39 bp, Homo sapiens; identical to SEQ ID NO: 204593
  chr17:38228513-38228552
  hypo

SEQ ID NO: 411583 - DNA, 46 bp, Homo sapiens; identical to SEQ ID NO: 217762
  chr17:38244541-38244587
  hypo

SEQ ID NO: 411584 - DNA, 504 bp, Homo sapiens; identical to SEQ ID NO: 217763
  chr17:38249240-38249744
  hypo

SEQ ID NO: 411585 - DNA, 164 bp, Homo sapiens; identical to SEQ ID NO: 270600
  chr17:38250103-38250267
  hypo

SEQ ID NO: 411586 - DNA, 124 bp, Homo sapiens; identical to SEQ ID NO: 217764
  chr17:38251853-38251977
  hypo

SEQ ID NO: 411587 - DNA, 120 bp, Homo sapiens; identical to SEQ ID NO: 270602
  chr17:38276209-38276329
  hypo

SEQ ID NO: 411588 - DNA, 37 bp, Homo sapiens; identical to SEQ ID NO: 217765
  chr17:38380418-38380455
  hypo

SEQ ID NO: 411589 - DNA, 78 bp, Homo sapiens; identical to SEQ ID NO: 217768
  chr17:38511651-38511729
  hypo

SEQ ID NO: 411590 - DNA, 91 bp, Homo sapiens; identical to SEQ ID NO: 217769
  chr17:38513565-38513656
  hypo

SEQ ID NO: 411591 - DNA, 41 bp, Homo sapiens; identical to SEQ ID NO: 270607
  chr17:38638673-38638714
  hypo

SEQ ID NO: 411592 - DNA, 97 bp, Homo sapiens; identical to SEQ ID NO: 270608
  chr17:38656559-38656656
  hypo

SEQ ID NO: 411593 - DNA, 42 bp, Homo sapiens; identical to SEQ ID NO: 270610
  chr17:38692022-38692064
  hypo

SEQ ID NO: 411594 - DNA, 323 bp, Homo sapiens; identical to SEQ ID NO: 270612
  chr17:38774236-38774559
  hypo

SEQ ID NO: 411595 - DNA, 411 bp, Homo sapiens; identical to SEQ ID NO: 270620
  chr17:39673044-39673455
  hypo

SEQ ID NO: 411596 - DNA, 142 bp, Homo sapiens; identical to SEQ ID NO: 217778
  chr17:39681121-39681263
  hypo

SEQ ID NO: 411597 - DNA, 111 bp, Homo sapiens; identical to SEQ ID NO: 270625
  chr17:39694232-39694343
  hypo

SEQ ID NO: 411598 - DNA, 136 bp, Homo sapiens; identical to SEQ ID NO: 270630
  chr17:40330251-40330387
  hypo

SEQ ID NO: 411599 - DNA, 118 bp, Homo sapiens; identical to SEQ ID NO: 217782
  chr17:40337520-40337638
  hypo

SEQ ID NO: 411600 - DNA, 203 bp, Homo sapiens; identical to SEQ ID NO: 270633
  chr17:40362204-40362407
  hypo

SEQ ID NO: 411601 - DNA, 33 bp, Homo sapiens; identical to SEQ ID NO: 270640
  chr17:40427746-40427779
  hypo

SEQ ID NO: 411602 - DNA, 517 bp, Homo sapiens; identical to SEQ ID NO: 292311
  chr17:40428745-40429262
  hypo

SEQ ID NO: 411603 - DNA, 147 bp, Homo sapiens; identical to SEQ ID NO: 217790
  chr17:40447592-40447739
  hypo

SEQ ID NO: 411604 - DNA, 165 bp, Homo sapiens; identical to SEQ ID NO: 270643
  chr17:40453235-40453400
  hypo

SEQ ID NO: 411605 - DNA, 418 bp, Homo sapiens; identical to SEQ ID NO: 270645
  chr17:40456105-40456523
  hypo

SEQ ID NO: 411606 - DNA, 107 bp, Homo sapiens; identical to SEQ ID NO: 270647
  chr17:40459507-40459614
  hypo

SEQ ID NO: 411607 - DNA, 35 bp, Homo sapiens; identical to SEQ ID NO: 270650
  chr17:40533448-40533483
  hypo

SEQ ID NO: 411608 - DNA, 162 bp, Homo sapiens; identical to SEQ ID NO: 225354
  chr17:40575277-40575439
  hypo

SEQ ID NO: 411609 - DNA, 76 bp, Homo sapiens; identical to SEQ ID NO: 217794
  chr17:40616719-40616795
  hypo

SEQ ID NO: 411610 - DNA, 196 bp, Homo sapiens; identical to SEQ ID NO: 270655
  chr17:40695505-40695701
  hypo

SEQ ID NO: 411611 - DNA, 42 bp, Homo sapiens; identical to SEQ ID NO: 270658
  chr17:40711057-40711099
  hypo

SEQ ID NO: 411612 - DNA, 100 bp, Homo sapiens; identical to SEQ ID NO: 322471
  chr17:40801993-40802093
  hypo

SEQ ID NO: 411613 - DNA, 40 bp, Homo sapiens; identical to SEQ ID NO: 217796
  chr17:40804385-40804425
  hypo

SEQ ID NO: 411614 - DNA, 104 bp, Homo sapiens; identical to SEQ ID NO: 270662
  chr17:40820751-40820855
  hypo

SEQ ID NO: 411615 - DNA, 108 bp, Homo sapiens; identical to SEQ ID NO: 217797
  chr17:40847766-40847874
  hypo

SEQ ID NO: 411616 - DNA, 33 bp, Homo sapiens; identical to SEQ ID NO: 270664
  chr17:40856548-40856581
  hypo

SEQ ID NO: 411617 - DNA, 93 bp, Homo sapiens; identical to SEQ ID NO: 322480
  chr17:40951180-40951273
  hypo

SEQ ID NO: 411618 - DNA, 58 bp, Homo sapiens; identical to SEQ ID NO: 217798
  chr17:41131474-41131532
  hypo

SEQ ID NO: 411619 - DNA, 43 bp, Homo sapiens; identical to SEQ ID NO: 270672
  chr17:41177996-41178039
  hypo

SEQ ID NO: 411620 - DNA, 134 bp, Homo sapiens; identical to SEQ ID NO: 322484
  chr17:41188391-41188525
  hypo

SEQ ID NO: 411621 - DNA, 32 bp, Homo sapiens; identical to SEQ ID NO: 292337
  chr17:41203102-41203134
  hypo

SEQ ID NO: 411622 - DNA, 38 bp, Homo sapiens; identical to SEQ ID NO: 292338
  chr17:41209114-41209152
  hypo

SEQ ID NO: 411623 - DNA, 311 bp, Homo sapiens; identical to SEQ ID NO: 225365
  chr17:41222944-41223255
  hypo

SEQ ID NO: 411624 - DNA, 172 bp, Homo sapiens; identical to SEQ ID NO: 225368
  chr17:41234420-41234592
  hypo

SEQ ID NO: 411625 - DNA, 89 bp, Homo sapiens; identical to SEQ ID NO: 225369
  chr17:41242960-41243049
  hypo

SEQ ID NO: 411626 - DNA, 77 bp, Homo sapiens; identical to SEQ ID NO: 225371
  chr17:41247862-41247939
  hypo

SEQ ID NO: 411627 - DNA, 106 bp, Homo sapiens; identical to SEQ ID NO: 225373
  chr17:41251791-41251897
  hypo

SEQ ID NO: 411628 - DNA, 140 bp, Homo sapiens; identical to SEQ ID NO: 225374
  chr17:41256138-41256278
  hypo

SEQ ID NO: 411629 - DNA, 78 bp, Homo sapiens; identical to SEQ ID NO: 225376
  chr17:41258472-41258550
  hypo

SEQ ID NO: 411630 - DNA, 57 bp, Homo sapiens; identical to SEQ ID NO: 292353
  chr17:41276075-41276132
  hypo

SEQ ID NO: 411631 - DNA, 120 bp, Homo sapiens; identical to SEQ ID NO: 322506
  chr17:41290192-41290312
  hypo

SEQ ID NO: 411632 - DNA, 36 bp, Homo sapiens; identical to SEQ ID NO: 270677
  chr17:41320636-41320672
  hypo

SEQ ID NO: 411633 - DNA, 33 bp, Homo sapiens; identical to SEQ ID NO: 270680
  chr17:41444581-41444614
  hypo

SEQ ID NO: 411634 - DNA, 136 bp, Homo sapiens; identical to SEQ ID NO: 270683
  chr17:41610027-41610163
  hypo

SEQ ID NO: 411635 - DNA, 41 bp, Homo sapiens; identical to SEQ ID NO: 217804
  chr17:41895347-41895388
  hypo

SEQ ID NO: 411636 - DNA, 37 bp, Homo sapiens; identical to SEQ ID NO: 270687
  chr17:41915919-41915956
  hypo

SEQ ID NO: 411637 - DNA, 122 bp, Homo sapiens; identical to SEQ ID NO: 292372
  chr17:42015411-42015533
  hypo

SEQ ID NO: 411638 - DNA, 291 bp, Homo sapiens; identical to SEQ ID NO: 292373
  chr17:42015571-42015862
  hypo

SEQ ID NO: 411639 - DNA, 124 bp, Homo sapiens; identical to SEQ ID NO: 270690
  chr17:42098921-42099045
  hypo

SEQ ID NO: 411640 - DNA, 453 bp, Homo sapiens; identical to SEQ ID NO: 270692
  chr17:42109843-42110296
  hypo

SEQ ID NO: 411641 - DNA, 91 bp, Homo sapiens; identical to SEQ ID NO: 270695
  chr17:42249458-42249549
  hypo

SEQ ID NO: 411642 - DNA, 343 bp, Homo sapiens; identical to SEQ ID NO: 225385
  chr17:42287964-42288307
  hypo

SEQ ID NO: 411643 - DNA, 216 bp, Homo sapiens; identical to SEQ ID NO: 270698
  chr17:42292484-42292700
  hypo

SEQ ID NO: 411644 - DNA, 614 bp, Homo sapiens; identical to SEQ ID NO: 292390
  chr17:42298856-42299470
  hypo

SEQ ID NO: 411645 - DNA, 418 bp, Homo sapiens; identical to SEQ ID NO: 270700
  chr17:42328460-42328878
  hypo

SEQ ID NO: 411646 - DNA, 198 bp, Homo sapiens; identical to SEQ ID NO: 270706
  chr17:42427016-42427214
  hypo

SEQ ID NO: 411647 - DNA, 388 bp, Homo sapiens; identical to SEQ ID NO: 217815
  chr17:42427764-42428152
  hypo

SEQ ID NO: 411648 - DNA, 180 bp, Homo sapiens; identical to SEQ ID NO: 270708
  chr17:42590362-42590542
  hypo

SEQ ID NO: 411649 - DNA, 159 bp, Homo sapiens; identical to SEQ ID NO: 217819
  chr17:42942200-42942359
  hypo

SEQ ID NO: 411650 - DNA, 63 bp, Homo sapiens; identical to SEQ ID NO: 217820
  chr17:42981556-42981619
  hypo

SEQ ID NO: 411651 - DNA, 207 bp, Homo sapiens; identical to SEQ ID NO: 217821
  chr17:42992858-42993065
  hypo

SEQ ID NO: 411652 - DNA, 309 bp, Homo sapiens; identical to SEQ ID NO: 217823
  chr17:43121047-43121356
  hypo

SEQ ID NO: 411653 - DNA, 85 bp, Homo sapiens; identical to SEQ ID NO: 217825
  chr17:43124006-43124091
  hypo

SEQ ID NO: 411654 - DNA, 33 bp, Homo sapiens; identical to SEQ ID NO: 217826
  chr17:43173433-43173466
  hypo

SEQ ID NO: 411655 - DNA, 53 bp, Homo sapiens; identical to SEQ ID NO: 217830
  chr17:43196206-43196259
  hypo

SEQ ID NO: 411656 - DNA, 223 bp, Homo sapiens; identical to SEQ ID NO: 270724
  chr17:43208547-43208770
  hypo

SEQ ID NO: 411657 - DNA, 113 bp, Homo sapiens; identical to SEQ ID NO: 217833
  chr17:43321183-43321296
  hypo

SEQ ID NO: 411658 - DNA, 88 bp, Homo sapiens; identical to SEQ ID NO: 217834
  chr17:43321347-43321435
  hypo

SEQ ID NO: 411659 - DNA, 89 bp, Homo sapiens
  chr17:45689950-45690039
  hypo
gctgatctgaggagtcctgtaggttttcatcataaattcccttgacttataggtaacatcattttgtgaagcatggaactttttttttt

SEQ ID NO: 411660 - DNA, 228 bp, Homo sapiens; identical to SEQ ID NO: 217839
  chr17:45885682-45885910
  hypo

SEQ ID NO: 411661 - DNA, 54 bp, Homo sapiens; identical to SEQ ID NO: 270740
  chr17:45886228-45886282
  hypo

SEQ ID NO: 411662 - DNA, 103 bp, Homo sapiens; identical to SEQ ID NO: 270741
  chr17:45891076-45891179
  hypo

SEQ ID NO: 411663 - DNA, 389 bp, Homo sapiens; identical to SEQ ID NO: 270742
  chr17:45894355-45894744
  hypo

SEQ ID NO: 411664 - DNA, 81 bp, Homo sapiens; identical to SEQ ID NO: 270743
  chr17:45943943-45944024
  hypo

SEQ ID NO: 411665 - DNA, 151 bp, Homo sapiens; identical to SEQ ID NO: 270744
  chr17:45944324-45944475
  hypo

SEQ ID NO: 411666 - DNA, 37 bp, Homo sapiens; identical to SEQ ID NO: 217841
  chr17:45970935-45970972
  hypo

SEQ ID NO: 411667 - DNA, 37 bp, Homo sapiens; identical to SEQ ID NO: 270747
  chr17:46017956-46017993
  hypo

SEQ ID NO: 411668 - DNA, 99 bp, Homo sapiens; identical to SEQ ID NO: 322594
  chr17:46080828-46080927
  hypo

SEQ ID NO: 411669 - DNA, 33 bp, Homo sapiens; identical to SEQ ID NO: 217842
  chr17:46123911-46123944
  hypo

SEQ ID NO: 411670 - DNA, 57 bp, Homo sapiens; identical to SEQ ID NO: 270754
  chr17:46176826-46176883
  hypo

SEQ ID NO: 411671 - DNA, 37 bp, Homo sapiens; identical to SEQ ID NO: 270756
  chr17:46223566-46223603
  hypo

SEQ ID NO: 411672 - DNA, 120 bp, Homo sapiens; identical to SEQ ID NO: 270757
  chr17:46235537-46235657
  hypo

SEQ ID NO: 411673 - DNA, 31 bp, Homo sapiens; identical to SEQ ID NO: 270758
  chr17:46409045-46409076
  hypo

SEQ ID NO: 411674 - DNA, 66 bp, Homo sapiens; identical to SEQ ID NO: 389489
  chr17:46696472-46696538
  hypo

SEQ ID NO: 411675 - DNA, 266 bp, Homo sapiens; identical to SEQ ID NO: 292462
  chr17:46696643-46696909
  hypo

SEQ ID NO: 411676 - DNA, 210 bp, Homo sapiens; identical to SEQ ID NO: 270762
  chr17:47092596-47092806
  hypo

SEQ ID NO: 411677 - DNA, 119 bp, Homo sapiens; identical to SEQ ID NO: 322624
  chr17:47170956-47171075
  hypo

SEQ ID NO: 411678 - DNA, 180 bp, Homo sapiens; identical to SEQ ID NO: 270765
  chr17:47177621-47177801
  hypo

SEQ ID NO: 411679 - DNA, 53 bp, Homo sapiens; identical to SEQ ID NO: 292495
  chr17:47547746-47547799
  hypo

SEQ ID NO: 411680 - DNA, 445 bp, Homo sapiens; identical to SEQ ID NO: 270768
  chr17:47629443-47629888
  hypo

SEQ ID NO: 411681 - DNA, 34 bp, Homo sapiens; identical to SEQ ID NO: 270771
  chr17:47851979-47852013
  hypo

SEQ ID NO: 411682 - DNA, 92 bp, Homo sapiens; identical to SEQ ID NO: 217858
  chr17:47895284-47895376
  hypo

SEQ ID NO: 411683 - DNA, 162 bp, Homo sapiens; identical to SEQ ID NO: 217859
  chr17:47911774-47911936
  hypo

SEQ ID NO: 411684 - DNA, 85 bp, Homo sapiens; identical to SEQ ID NO: 384670
  chr17:47928527-47928612
  hypo

SEQ ID NO: 411685 - DNA, 173 bp, Homo sapiens; identical to SEQ ID NO: 225421
  chr17:47929093-47929266
  hypo

SEQ ID NO: 411686 - DNA, 63 bp, Homo sapiens; identical to SEQ ID NO: 217860
  chr17:47998383-47998446
  hypo

SEQ ID NO: 411687 - DNA, 545 bp, Homo sapiens; identical to SEQ ID NO: 292513
  chr17:48072070-48072615
  hypo

SEQ ID NO: 411688 - DNA, 42 bp, Homo sapiens; identical to SEQ ID NO: 217862
  chr17:48139110-48139152
  hypo

SEQ ID NO: 411689 - DNA, 113 bp, Homo sapiens; identical to SEQ ID NO: 270776
  chr17:48183244-48183357
  hypo

SEQ ID NO: 411690 - DNA, 79 bp, Homo sapiens; identical to SEQ ID NO: 270778
  chr17:48258096-48258175
  hypo

SEQ ID NO: 411691 - DNA, 219 bp, Homo sapiens; identical to SEQ ID NO: 270779
  chr17:48258578-48258797
  hypo

SEQ ID NO: 411692 - DNA, 40 bp, Homo sapiens; identical to SEQ ID NO: 270786
  chr17:48589712-48589752
  hypo

SEQ ID NO: 411693 - DNA, 45 bp, Homo sapiens; identical to SEQ ID NO: 322657
  chr17:48620600-48620645
  hypo

SEQ ID NO: 411694 - DNA, 208 bp, Homo sapiens; identical to SEQ ID NO: 270793
  chr17:48764876-48765084
  hypo

SEQ ID NO: 411695 - DNA, 105 bp, Homo sapiens; identical to SEQ ID NO: 217872
  chr17:48881298-48881403
  hypo

SEQ ID NO: 411696 - DNA, 60 bp, Homo sapiens; identical to SEQ ID NO: 217873
  chr17:48911127-48911187
  hypo

SEQ ID NO: 411697 - DNA, 98 bp, Homo sapiens; identical to SEQ ID NO: 217874
  chr17:48911230-48911328
  hypo

SEQ ID NO: 411698 - DNA, 82 bp, Homo sapiens; identical to SEQ ID NO: 270801
  chr17:48971131-48971213
  hypo

SEQ ID NO: 411699 - DNA, 115 bp, Homo sapiens; identical to SEQ ID NO: 204711
  chr17:49028000-49028115
  hypo

SEQ ID NO: 411700 - DNA, 32 bp, Homo sapiens; identical to SEQ ID NO: 270805
  chr17:49194752-49194784
  hypo

SEQ ID NO: 411701 - DNA, 46 bp, Homo sapiens; identical to SEQ ID NO: 270808
  chr17:49354211-49354257
  hypo

SEQ ID NO: 411702 - DNA, 78 bp, Homo sapiens; identical to SEQ ID NO: 217879
  chr17:52832078-52832156
  hypo

SEQ ID NO: 411703 - DNA, 43 bp, Homo sapiens; identical to SEQ ID NO: 270810
  chr17:52865183-52865226
  hypo

SEQ ID NO: 411704 - DNA, 36 bp, Homo sapiens; identical to SEQ ID NO: 270812
  chr17:53398066-53398102
  hypo

SEQ ID NO: 411705 - DNA, 37 bp, Homo sapiens; identical to SEQ ID NO: 270817
  chr17:53579056-53579093
  hypo

SEQ ID NO: 411706 - DNA, 185 bp, Homo sapiens; identical to SEQ ID NO: 270818
  chr17:53852162-53852347
  hypo

SEQ ID NO: 411707 - DNA, 271 bp, Homo sapiens; identical to SEQ ID NO: 217885
  chr17:54976882-54977153
  hypo

SEQ ID NO: 411708 - DNA, 43 bp, Homo sapiens; identical to SEQ ID NO: 322698
  chr17:55184835-55184878
  hypo

SEQ ID NO: 411709 - DNA, 34 bp, Homo sapiens; identical to SEQ ID NO: 217889
  chr17:55426663-55426697
  hypo

SEQ ID NO: 411710 - DNA, 44 bp, Homo sapiens; identical to SEQ ID NO: 217890
  chr17:55519664-55519708
  hypo

SEQ ID NO: 411711 - DNA, 67 bp, Homo sapiens; identical to SEQ ID NO: 270830
  chr17:55605295-55605362
  hypo

SEQ ID NO: 411712 - DNA, 32 bp, Homo sapiens; identical to SEQ ID NO: 270831
  chr17:55615595-55615627
  hypo

SEQ ID NO: 411713 - DNA, 144 bp, Homo sapiens; identical to SEQ ID NO: 270832
  chr17:55643992-55644136
  hypo

SEQ ID NO: 411714 - DNA, 91 bp, Homo sapiens; identical to SEQ ID NO: 270834
  chr17:55647400-55647491
  hypo

SEQ ID NO: 411715 - DNA, 182 bp, Homo sapiens; identical to SEQ ID NO: 217892
  chr17:55752305-55752487
  hypo

SEQ ID NO: 411716 - DNA, 462 bp, Homo sapiens; identical to SEQ ID NO: 225439
  chr17:56032083-56032545
  hypo

SEQ ID NO: 411717 - DNA, 77 bp, Homo sapiens; identical to SEQ ID NO: 270843
  chr17:56389453-56389530
  hypo

SEQ ID NO: 411718 - DNA, 153 bp, Homo sapiens; identical to SEQ ID NO: 400285
  chr17:56429846-56429999
  hypo

SEQ ID NO: 411719 - DNA, 32 bp, Homo sapiens; identical to SEQ ID NO: 217899
  chr17:56471400-56471432
  hypo

SEQ ID NO: 411720 - DNA, 41 bp, Homo sapiens; identical to SEQ ID NO: 270850
  chr17:57007398-57007439
  hypo

SEQ ID NO: 411721 - DNA, 180 bp, Homo sapiens; identical to SEQ ID NO: 217904
  chr17:57476111-57476291
  hypo

SEQ ID NO: 411722 - DNA, 76 bp, Homo sapiens; identical to SEQ ID NO: 217905
  chr17:57591255-57591331
  hypo

SEQ ID NO: 411723 - DNA, 31 bp, Homo sapiens; identical to SEQ ID NO: 217907
  chr17:57832470-57832501
  hypo

SEQ ID NO: 411724 - DNA, 77 bp, Homo sapiens; identical to SEQ ID NO: 217908
  chr17:57937325-57937402
  hypo

SEQ ID NO: 411725 - DNA, 33 bp, Homo sapiens; identical to SEQ ID NO: 270871
  chr17:58559518-58559551
  hypo

SEQ ID NO: 411726 - DNA, 36 bp, Homo sapiens; identical to SEQ ID NO: 217910
  chr17:58590466-58590502
  hypo

SEQ ID NO: 411727 - DNA, 242 bp, Homo sapiens; identical to SEQ ID NO: 204730
  chr17:58700868-58701110
  hypo

SEQ ID NO: 411728 - DNA, 125 bp, Homo sapiens; identical to SEQ ID NO: 204731
  chr17:58711213-58711338
  hypo

SEQ ID NO: 411729 - DNA, 1530 bp, Homo sapiens; identical to SEQ ID NO: 204734
  chr17:58740342-58741872
  hypo

SEQ ID NO: 411730 - DNA, 361 bp, Homo sapiens; identical to SEQ ID NO: 270880
  chr17:59430810-59431171
  hypo

SEQ ID NO: 411731 - DNA, 70 bp, Homo sapiens; identical to SEQ ID NO: 270883
  chr17:59445737-59445807
  hypo

SEQ ID NO: 411732 - DNA, 599 bp, Homo sapiens; identical to SEQ ID NO: 270884
  chr17:59520971-59521570
  hypo

SEQ ID NO: 411733 - DNA, 180 bp, Homo sapiens; identical to SEQ ID NO: 217922
  chr17:60014065-60014245
  hypo

SEQ ID NO: 411734 - DNA, 87 bp, Homo sapiens; identical to SEQ ID NO: 217926
  chr17:60564888-60564975
  hypo

SEQ ID NO: 411735 - DNA, 318 bp, Homo sapiens; identical to SEQ ID NO: 270897
  chr17:60747507-60747825
  hypo

SEQ ID NO: 411736 - DNA, 41 bp, Homo sapiens; identical to SEQ ID NO: 270900
  chr17:60750844-60750885
  hypo

SEQ ID NO: 411737 - DNA, 150 bp, Homo sapiens; identical to SEQ ID NO: 217928
  chr17:60753744-60753894
  hypo

SEQ ID NO: 411738 - DNA, 252 bp, Homo sapiens; identical to SEQ ID NO: 270904
  chr17:60757611-60757863
  hypo

SEQ ID NO: 411739 - DNA, 49 bp, Homo sapiens; identical to SEQ ID NO: 217930
  chr17:60758441-60758490
  hypo

SEQ ID NO: 411740 - DNA, 192 bp, Homo sapiens; identical to SEQ ID NO: 292604
  chr17:60781450-60781642
  hypo

SEQ ID NO: 411741 - DNA, 165 bp, Homo sapiens; identical to SEQ ID NO: 270910
  chr17:60793413-60793578
  hypo

SEQ ID NO: 411742 - DNA, 221 bp, Homo sapiens; identical to SEQ ID NO: 270911
  chr17:60858152-60858373
  hypo

SEQ ID NO: 411743 - DNA, 104 bp, Homo sapiens; identical to SEQ ID NO: 270913
  chr17:61050279-61050383
  hypo

SEQ ID NO: 411744 - DNA, 184 bp, Homo sapiens; identical to SEQ ID NO: 270915
  chr17:61498925-61499109
  hypo

SEQ ID NO: 411745 - DNA, 393 bp, Homo sapiens; identical to SEQ ID NO: 270916
  chr17:61514950-61515343
  hypo

SEQ ID NO: 411746 - DNA, 75 bp, Homo sapiens; identical to SEQ ID NO: 270917
  chr17:61521531-61521606
  hypo

SEQ ID NO: 411747 - DNA, 89 bp, Homo sapiens; identical to SEQ ID NO: 270921
  chr17:61611415-61611504
  hypo

SEQ ID NO: 411748 - DNA, 41 bp, Homo sapiens; identical to SEQ ID NO: 270926
  chr17:61892318-61892359
  hypo

SEQ ID NO: 411749 - DNA, 148 bp, Homo sapiens; identical to SEQ ID NO: 217944
  chr17:62010938-62011086
  hypo

SEQ ID NO: 411750 - DNA, 115 bp, Homo sapiens; identical to SEQ ID NO: 270932
  chr17:62131680-62131795
  hypo

SEQ ID NO: 411751 - DNA, 165 bp, Homo sapiens; identical to SEQ ID NO: 270934
  chr17:62236399-62236564
  hypo

SEQ ID NO: 411752 - DNA, 34 bp, Homo sapiens; identical to SEQ ID NO: 270936
  chr17:62659957-62659991
  hypo

SEQ ID NO: 411753 - DNA, 62 bp, Homo sapiens; identical to SEQ ID NO: 204753
  chr17:62915906-62915968
  hypo

SEQ ID NO: 411754 - DNA, 320 bp, Homo sapiens; identical to SEQ ID NO: 270941
  chr17:62935835-62936155
  hypo

SEQ ID NO: 411755 - DNA, 99 bp, Homo sapiens; identical to SEQ ID NO: 270943
  chr17:63069466-63069565
  hypo

SEQ ID NO: 411756 - DNA, 31 bp, Homo sapiens; identical to SEQ ID NO: 270945
  chr17:63459276-63459307
  hypo

SEQ ID NO: 411757 - DNA, 85 bp, Homo sapiens; identical to SEQ ID NO: 270946
  chr17:63497915-63498000
  hypo

SEQ ID NO: 411758 - DNA, 350 bp, Homo sapiens; identical to SEQ ID NO: 217948
  chr17:63534022-63534372
  hypo

SEQ ID NO: 411759 - DNA, 173 bp, Homo sapiens; identical to SEQ ID NO: 225472
  chr17:64298539-64298712
  hypo

SEQ ID NO: 411760 - DNA, 40 bp, Homo sapiens; identical to SEQ ID NO: 270957
  chr17:65298392-65298432
  hypo

SEQ ID NO: 411761 - DNA, 42 bp, Homo sapiens; identical to SEQ ID NO: 270958
  chr17:65314671-65314713
  hypo

SEQ ID NO: 411762 - DNA, 44 bp, Homo sapiens; identical to SEQ ID NO: 270961
  chr17:65573104-65573148
  hypo

SEQ ID NO: 411763 - DNA, 201 bp, Homo sapiens; identical to SEQ ID NO: 270965
  chr17:66384596-66384797
  hypo

SEQ ID NO: 411764 - DNA, 230 bp, Homo sapiens; identical to SEQ ID NO: 270972
  chr17:66446928-66447158
  hypo

SEQ ID NO: 411765 - DNA, 127 bp, Homo sapiens; identical to SEQ ID NO: 270977
  chr17:67081066-67081193
  hypo

SEQ ID NO: 411766 - DNA, 209 bp, Homo sapiens; identical to SEQ ID NO: 270978
  chr17:67468376-67468585
  hypo

SEQ ID NO: 411767 - DNA, 31 bp, Homo sapiens; identical to SEQ ID NO: 270979
  chr17:68197136-68197167
  hypo

SEQ ID NO: 411768 - DNA, 51 bp, Homo sapiens; identical to SEQ ID NO: 204765
  chr17:70270193-70270244
  hypo

SEQ ID NO: 411769 - DNA, 342 bp, Homo sapiens; identical to SEQ ID NO: 270983
  chr17:70441816-70442158
  hypo

SEQ ID NO: 411770 - DNA, 64 bp, Homo sapiens; identical to SEQ ID NO: 270984
  chr17:70507522-70507586
  hypo

SEQ ID NO: 411771 - DNA, 85 bp, Homo sapiens; identical to SEQ ID NO: 270986
  chr17:70705003-70705088
  hypo

SEQ ID NO: 411772 - DNA, 603 bp, Homo sapiens; identical to SEQ ID NO: 322892
  chr17:70712101-70712704
  hypo

SEQ ID NO: 411773 - DNA, 87 bp, Homo sapiens; identical to SEQ ID NO: 322893
  chr17:70712734-70712821
  hypo

SEQ ID NO: 411774 - DNA, 33 bp, Homo sapiens; identical to SEQ ID NO: 270989
  chr17:70785406-70785439
  hypo

SEQ ID NO: 411775 - DNA, 120 bp, Homo sapiens; identical to SEQ ID NO: 270990
  chr17:70948870-70948990
  hypo

SEQ ID NO: 411776 - DNA, 34 bp, Homo sapiens; identical to SEQ ID NO: 270991
  chr17:71026284-71026318
  hypo

SEQ ID NO: 411777 - DNA, 46 bp, Homo sapiens; identical to SEQ ID NO: 270992
  chr17:71126821-71126867
  hypo

SEQ ID NO: 411778 - DNA, 42 bp, Homo sapiens; identical to SEQ ID NO: 270993
  chr17:71190856-71190898
  hypo

SEQ ID NO: 411779 - DNA, 209 bp, Homo sapiens; identical to SEQ ID NO: 217978
  chr17:71269220-71269429
  hypo

SEQ ID NO: 411780 - DNA, 87 bp, Homo sapiens; identical to SEQ ID NO: 217979
  chr17:71272524-71272611
  hypo

SEQ ID NO: 411781 - DNA, 258 bp, Homo sapiens; identical to SEQ ID NO: 271003
  chr17:71325320-71325578
  hypo

SEQ ID NO: 411782 - DNA, 154 bp, Homo sapiens; identical to SEQ ID NO: 271004
  chr17:71326305-71326459
  hypo

SEQ ID NO: 411783 - DNA, 199 bp, Homo sapiens; identical to SEQ ID NO: 271005
  chr17:71345761-71345960
  hypo

SEQ ID NO: 411784 - DNA, 204 bp, Homo sapiens; identical to SEQ ID NO: 217985
  chr17:71354224-71354428
  hypo

SEQ ID NO: 411785 - DNA, 128 bp, Homo sapiens; identical to SEQ ID NO: 271012
  chr17:71420061-71420189
  hypo

SEQ ID NO: 411786 - DNA, 55 bp, Homo sapiens; identical to SEQ ID NO: 271021
  chr17:72198104-72198159
  hypo

SEQ ID NO: 411787 - DNA, 449 bp, Homo sapiens; identical to SEQ ID NO: 389524
  chr17:72208668-72209117
  hypo

SEQ ID NO: 411788 - DNA, 83 bp, Homo sapiens; identical to SEQ ID NO: 271023
  chr17:72221625-72221708
  hypo

SEQ ID NO: 411789 - DNA, 42 bp, Homo sapiens; identical to SEQ ID NO: 271024
  chr17:72243967-72244009
  hypo

SEQ ID NO: 411790 - DNA, 446 bp, Homo sapiens; identical to SEQ ID NO: 322935
  chr17:72249046-72249492
  hypo

SEQ ID NO: 411791 - DNA, 336 bp, Homo sapiens; identical to SEQ ID NO: 271027
  chr17:72260300-72260636
  hypo

SEQ ID NO: 411792 - DNA, 34 bp, Homo sapiens; identical to SEQ ID NO: 217993
  chr17:72290214-72290248
  hypo

SEQ ID NO: 411793 - DNA, 49 bp, Homo sapiens; identical to SEQ ID NO: 271032
  chr17:72370873-72370922
  hypo

SEQ ID NO: 411794 - DNA, 150 bp, Homo sapiens; identical to SEQ ID NO: 271033
  chr17:72391682-72391832
  hypo

SEQ ID NO: 411795 - DNA, 34 bp, Homo sapiens; identical to SEQ ID NO: 271037
  chr17:72808771-72808805
  hypo

SEQ ID NO: 411796 - DNA, 269 bp, Homo sapiens; identical to SEQ ID NO: 217998
  chr17:72811189-72811458
  hypo

SEQ ID NO: 411797 - DNA, 155 bp, Homo sapiens; identical to SEQ ID NO: 271046
  chr17:72940421-72940576
  hypo

SEQ ID NO: 411798 - DNA, 43 bp, Homo sapiens; identical to SEQ ID NO: 271047
  chr17:72999880-72999923
  hypo

SEQ ID NO: 411799 - DNA, 120 bp, Homo sapiens; identical to SEQ ID NO: 271048
  chr17:73003500-73003620
  hypo

SEQ ID NO: 411800 - DNA, 236 bp, Homo sapiens; identical to SEQ ID NO: 271050
  chr17:73016427-73016663
  hypo

SEQ ID NO: 411801 - DNA, 266 bp, Homo sapiens; identical to SEQ ID NO: 271051
  chr17:73016884-73017150
  hypo

SEQ ID NO: 411802 - DNA, 34 bp, Homo sapiens; identical to SEQ ID NO: 271053
  chr17:73067479-73067513
  hypo

SEQ ID NO: 411803 - DNA, 240 bp, Homo sapiens; identical to SEQ ID NO: 271055
  chr17:73086308-73086548
  hypo

SEQ ID NO: 411804 - DNA, 113 bp, Homo sapiens; identical to SEQ ID NO: 322974
  chr17:73089510-73089623
  hypo

SEQ ID NO: 411805 - DNA, 369 bp, Homo sapiens; identical to SEQ ID NO: 322975
  chr17:73090127-73090496
  hypo

SEQ ID NO: 411806 - DNA, 351 bp, Homo sapiens; identical to SEQ ID NO: 271061
  chr17:73096166-73096517
  hypo

SEQ ID NO: 411807 - DNA, 46 bp, Homo sapiens; identical to SEQ ID NO: 322982
  chr17:73115914-73115960
  hypo

SEQ ID NO: 411808 - DNA, 221 bp, Homo sapiens; identical to SEQ ID NO: 271065
  chr17:73131495-73131716
  hypo

SEQ ID NO: 411809 - DNA, 34 bp, Homo sapiens; identical to SEQ ID NO: 218013
  chr17:73136019-73136053
  hypo

SEQ ID NO: 411810 - DNA, 120 bp, Homo sapiens; identical to SEQ ID NO: 271071
  chr17:73172030-73172150
  hypo

SEQ ID NO: 411811 - DNA, 180 bp, Homo sapiens; identical to SEQ ID NO: 218016
  chr17:73209661-73209841
  hypo

SEQ ID NO: 411812 - DNA, 151 bp, Homo sapiens; identical to SEQ ID NO: 218018
  chr17:73241507-73241658
  hypo

SEQ ID NO: 411813 - DNA, 31 bp, Homo sapiens; identical to SEQ ID NO: 218019
  chr17:73241838-73241869
  hypo

SEQ ID NO: 411814 - DNA, 214 bp, Homo sapiens; identical to SEQ ID NO: 271081
  chr17:73274193-73274407
  hypo

SEQ ID NO: 411815 - DNA, 397 bp, Homo sapiens; identical to SEQ ID NO: 218023
  chr17:73311549-73311946
  hypo

SEQ ID NO: 411816 - DNA, 202 bp, Homo sapiens; identical to SEQ ID NO: 271083
  chr17:73465135-73465337
  hypo

SEQ ID NO: 411817 - DNA, 77 bp, Homo sapiens; identical to SEQ ID NO: 184556
  chr17:73532630-73532707
  hypo

SEQ ID NO: 411818 - DNA, 50 bp, Homo sapiens; identical to SEQ ID NO: 271089
  chr17:73569825-73569875
  hypo

SEQ ID NO: 411819 - DNA, 136 bp, Homo sapiens; identical to SEQ ID NO: 271092
  chr17:73590839-73590975
  hypo

SEQ ID NO: 411820 - DNA, 286 bp, Homo sapiens; identical to SEQ ID NO: 323016
  chr17:73606094-73606380
  hypo

SEQ ID NO: 411821 - DNA, 71 bp, Homo sapiens; identical to SEQ ID NO: 218031
  chr17:73606459-73606530
  hypo

SEQ ID NO: 411822 - DNA, 56 bp, Homo sapiens; identical to SEQ ID NO: 271094
  chr17:73607689-73607745
  hypo

SEQ ID NO: 411823 - DNA, 38 bp, Homo sapiens; identical to SEQ ID NO: 271099
  chr17:73618512-73618550
  hypo

SEQ ID NO: 411824 - DNA, 156 bp, Homo sapiens; identical to SEQ ID NO: 218038
  chr17:73680637-73680793
  hypo

SEQ ID NO: 411825 - DNA, 46 bp, Homo sapiens; identical to SEQ ID NO: 271107
  chr17:73718995-73719041
  hypo

SEQ ID NO: 411826 - DNA, 420 bp, Homo sapiens; identical to SEQ ID NO: 271120
  chr17:73836061-73836481
  hypo

SEQ ID NO: 411827 - DNA, 45 bp, Homo sapiens; identical to SEQ ID NO: 225503
  chr17:73874667-73874712
  hypo

SEQ ID NO: 411828 - DNA, 65 bp, Homo sapiens; identical to SEQ ID NO: 218045
  chr17:73887194-73887259
  hypo

SEQ ID NO: 411829 - DNA, 80 bp, Homo sapiens; identical to SEQ ID NO: 323050
  chr17:73895617-73895697
  hypo

SEQ ID NO: 411830 - DNA, 31 bp, Homo sapiens; identical to SEQ ID NO: 218047
  chr17:73904785-73904816
  hypo

SEQ ID NO: 411831 - DNA, 44 bp, Homo sapiens; identical to SEQ ID NO: 271128
  chr17:73915888-73915932
  hypo

SEQ ID NO: 411832 - DNA, 102 bp, Homo sapiens; identical to SEQ ID NO: 271133
  chr17:74008701-74008803
  hypo

SEQ ID NO: 411833 - DNA, 36 bp, Homo sapiens; identical to SEQ ID NO: 271135
  chr17:74014165-74014201
  hypo

SEQ ID NO: 411834 - DNA, 145 bp, Homo sapiens; identical to SEQ ID NO: 323065
  chr17:74028159-74028304
  hypo

SEQ ID NO: 411835 - DNA, 122 bp, Homo sapiens; identical to SEQ ID NO: 323066
  chr17:74028413-74028535
  hypo

SEQ ID NO: 411836 - DNA, 32 bp, Homo sapiens; identical to SEQ ID NO: 271139
  chr17:74040832-74040864
  hypo

SEQ ID NO: 411837 - DNA, 31 bp, Homo sapiens; identical to SEQ ID NO: 271140
  chr17:74041104-74041135
  hypo

SEQ ID NO: 411838 - DNA, 170 bp, Homo sapiens; identical to SEQ ID NO: 271142
  chr17:74046449-74046619
  hypo

SEQ ID NO: 411839 - DNA, 131 bp, Homo sapiens; identical to SEQ ID NO: 204799
  chr17:74072580-74072711
  hypo

SEQ ID NO: 411840 - DNA, 121 bp, Homo sapiens; identical to SEQ ID NO: 271147
  chr17:74081023-74081144
  hypo

SEQ ID NO: 411841 - DNA, 50 bp, Homo sapiens; identical to SEQ ID NO: 271150
  chr17:74094005-74094055
  hypo

SEQ ID NO: 411842 - DNA, 113 bp, Homo sapiens; identical to SEQ ID NO: 218057
  chr17:74275071-74275184
  hypo

SEQ ID NO: 411843 - DNA, 509 bp, Homo sapiens; identical to SEQ ID NO: 271153
  chr17:74303710-74304219
  hypo

SEQ ID NO: 411844 - DNA, 33 bp, Homo sapiens; identical to SEQ ID NO: 271154
  chr17:74333712-74333745
  hypo

SEQ ID NO: 411845 - DNA, 118 bp, Homo sapiens; identical to SEQ ID NO: 218063
  chr17:74415734-74415852
  hypo

SEQ ID NO: 411846 - DNA, 132 bp, Homo sapiens; identical to SEQ ID NO: 271165
  chr17:74472949-74473081
  hypo

SEQ ID NO: 411847 - DNA, 93 bp, Homo sapiens; identical to SEQ ID NO: 218069
  chr17:74551787-74551880
  hypo

SEQ ID NO: 411848 - DNA, 180 bp, Homo sapiens; identical to SEQ ID NO: 271172
  chr17:74574205-74574385
  hypo

SEQ ID NO: 411849 - DNA, 34 bp, Homo sapiens; identical to SEQ ID NO: 218070
  chr17:74579152-74579186
  hypo

SEQ ID NO: 411850 - DNA, 232 bp, Homo sapiens; identical to SEQ ID NO: 204805
  chr17:74732973-74733205
  hypo

SEQ ID NO: 411851 - DNA, 253 bp, Homo sapiens; identical to SEQ ID NO: 218077
  chr17:74771040-74771293
  hypo

SEQ ID NO: 411852 - DNA, 87 bp, Homo sapiens; identical to SEQ ID NO: 218078
  chr17:74771572-74771659
  hypo

SEQ ID NO: 411853 - DNA, 37 bp, Homo sapiens; identical to SEQ ID NO: 218082
  chr17:75196310-75196347
  hypo

SEQ ID NO: 411854 - DNA, 35 bp, Homo sapiens; identical to SEQ ID NO: 271193
  chr17:75300269-75300304
  hypo

SEQ ID NO: 411855 - DNA, 114 bp, Homo sapiens; identical to SEQ ID NO: 271194
  chr17:75303152-75303266
  hypo

SEQ ID NO: 411856 - DNA, 201 bp, Homo sapiens; identical to SEQ ID NO: 271197
  chr17:75354844-75355045
  hypo

SEQ ID NO: 411857 - DNA, 146 bp, Homo sapiens; identical to SEQ ID NO: 271198
  chr17:75373025-75373171
  hypo

SEQ ID NO: 411858 - DNA, 115 bp, Homo sapiens; identical to SEQ ID NO: 323141
  chr17:75413667-75413782
  hypo

SEQ ID NO: 411859 - DNA, 334 bp, Homo sapiens; identical to SEQ ID NO: 218092
  chr17:75413812-75414146
  hypo

SEQ ID NO: 411860 - DNA, 166 bp, Homo sapiens; identical to SEQ ID NO: 271202
  chr17:75420113-75420279
  hypo

SEQ ID NO: 411861 - DNA, 278 bp, Homo sapiens; identical to SEQ ID NO: 218093
  chr17:75434081-75434359
  hypo

SEQ ID NO: 411862 - DNA, 59 bp, Homo sapiens; identical to SEQ ID NO: 271206
  chr17:75452368-75452427
  hypo

SEQ ID NO: 411863 - DNA, 515 bp, Homo sapiens; identical to SEQ ID NO: 218096
  chr17:75476867-75477382
  hypo

SEQ ID NO: 411864 - DNA, 122 bp, Homo sapiens; identical to SEQ ID NO: 218097
  chr17:75490716-75490838
  hypo

SEQ ID NO: 411865 - DNA, 220 bp, Homo sapiens; identical to SEQ ID NO: 323156
  chr17:75523272-75523492
  hypo

SEQ ID NO: 411866 - DNA, 41 bp, Homo sapiens; identical to SEQ ID NO: 271218
  chr17:75586408-75586449
  hypo

SEQ ID NO: 411867 - DNA, 116 bp, Homo sapiens; identical to SEQ ID NO: 271219
  chr17:75599499-75599615
  hypo

SEQ ID NO: 411868 - DNA, 31 bp, Homo sapiens; identical to SEQ ID NO: 271220
  chr17:75603635-75603666
  hypo

SEQ ID NO: 411869 - DNA, 206 bp, Homo sapiens; identical to SEQ ID NO: 271221
  chr17:75643461-75643667
  hypo

SEQ ID NO: 411870 - DNA, 61 bp, Homo sapiens; identical to SEQ ID NO: 271226
  chr17:75828065-75828126
  hypo

SEQ ID NO: 411871 - DNA, 151 bp, Homo sapiens; identical to SEQ ID NO: 271227
  chr17:75840892-75841043
  hypo

SEQ ID NO: 411872 - DNA, 133 bp, Homo sapiens; identical to SEQ ID NO: 271228
  chr17:75844070-75844203
  hypo

SEQ ID NO: 411873 - DNA, 48 bp, Homo sapiens; identical to SEQ ID NO: 271233
  chr17:76046728-76046776
  hypo

SEQ ID NO: 411874 - DNA, 42 bp, Homo sapiens; identical to SEQ ID NO: 271234
  chr17:76076532-76076574
  hypo

SEQ ID NO: 411875 - DNA, 68 bp, Homo sapiens; identical to SEQ ID NO: 271235
  chr17:76089069-76089137
  hypo

SEQ ID NO: 411876 - DNA, 133 bp, Homo sapiens; identical to SEQ ID NO: 218101
  chr17:76114990-76115123
  hypo

SEQ ID NO: 411877 - DNA, 117 bp, Homo sapiens; identical to SEQ ID NO: 218102
  chr17:76121808-76121925
  hypo

SEQ ID NO: 411878 - DNA, 189 bp, Homo sapiens; identical to SEQ ID NO: 218103
  chr17:76129456-76129645
  hypo

SEQ ID NO: 411879 - DNA, 95 bp, Homo sapiens; identical to SEQ ID NO: 218106
  chr17:76153510-76153605
  hypo

SEQ ID NO: 411880 - DNA, 94 bp, Homo sapiens; identical to SEQ ID NO: 218107
  chr17:76153905-76153999
  hypo

SEQ ID NO: 411881 - DNA, 44 bp, Homo sapiens; identical to SEQ ID NO: 271251
  chr17:76173533-76173577
  hypo

SEQ ID NO: 411882 - DNA, 80 bp, Homo sapiens; identical to SEQ ID NO: 218109
  chr17:76176965-76177045
  hypo

SEQ ID NO: 411883 - DNA, 157 bp, Homo sapiens; identical to SEQ ID NO: 225520
  chr17:76349231-76349388
  hypo

SEQ ID NO: 411884 - DNA, 38 bp, Homo sapiens; identical to SEQ ID NO: 271261
  chr17:76396177-76396215
  hypo

SEQ ID NO: 411885 - DNA, 39 bp, Homo sapiens; identical to SEQ ID NO: 323202
  chr17:76396873-76396912
  hypo

SEQ ID NO: 411886 - DNA, 139 bp, Homo sapiens; identical to SEQ ID NO: 218114
  chr17:76397569-76397708
  hypo

SEQ ID NO: 411887 - DNA, 100 bp, Homo sapiens; identical to SEQ ID NO: 218115
  chr17:76404659-76404759
  hypo

SEQ ID NO: 411888 - DNA, 292 bp, Homo sapiens; identical to SEQ ID NO: 218116
  chr17:76404803-76405095
  hypo

SEQ ID NO: 411889 - DNA, 48 bp, Homo sapiens; identical to SEQ ID NO: 218117
  chr17:76405130-76405178
  hypo

SEQ ID NO: 411890 - DNA, 41 bp, Homo sapiens; identical to SEQ ID NO: 218120
  chr17:76456117-76456158
  hypo

SEQ ID NO: 411891 - DNA, 193 bp, Homo sapiens; identical to SEQ ID NO: 271270
  chr17:76457712-76457905
  hypo

SEQ ID NO: 411892 - DNA, 95 bp, Homo sapiens; identical to SEQ ID NO: 323218
  chr17:76498806-76498901
  hypo

SEQ ID NO: 411893 - DNA, 86 bp, Homo sapiens; identical to SEQ ID NO: 323219
  chr17:76498972-76499058
  hypo

SEQ ID NO: 411894 - DNA, 306 bp, Homo sapiens; identical to SEQ ID NO: 218121
  chr17:76526260-76526566
  hypo

SEQ ID NO: 411895 - DNA, 39 bp, Homo sapiens; identical to SEQ ID NO: 218122
  chr17:76526629-76526668
  hypo

SEQ ID NO: 411896 - DNA, 138 bp, Homo sapiens; identical to SEQ ID NO: 271283
  chr17:76563675-76563813
  hypo

SEQ ID NO: 411897 - DNA, 177 bp, Homo sapiens; identical to SEQ ID NO: 271287
  chr17:76618703-76618880
  hypo

SEQ ID NO: 411898 - DNA, 214 bp, Homo sapiens; identical to SEQ ID NO: 271288
  chr17:76669915-76670129
  hypo

SEQ ID NO: 411899 - DNA, 44 bp, Homo sapiens; identical to SEQ ID NO: 218125
  chr17:76766753-76766797
  hypo

SEQ ID NO: 411900 - DNA, 62 bp, Homo sapiens; identical to SEQ ID NO: 271295
  chr17:76801793-76801855
  hypo

SEQ ID NO: 411901 - DNA, 32 bp, Homo sapiens; identical to SEQ ID NO: 323243
  chr17:76897271-76897303
  hypo

SEQ ID NO: 411902 - DNA, 130 bp, Homo sapiens; identical to SEQ ID NO: 54663
  chr17:76921422-76921552
  hypo

SEQ ID NO: 411903 - DNA, 39 bp, Homo sapiens; identical to SEQ ID NO: 271301
  chr17:76963990-76964029
  hypo

SEQ ID NO: 411904 - DNA, 72 bp, Homo sapiens; identical to SEQ ID NO: 218129
  chr17:76977964-76978036
  hypo

SEQ ID NO: 411905 - DNA, 211 bp, Homo sapiens; identical to SEQ ID NO: 271303
  chr17:76987616-76987827
  hypo

SEQ ID NO: 411906 - DNA, 156 bp, Homo sapiens; identical to SEQ ID NO: 271308
  chr17:76997943-76998099
  hypo

SEQ ID NO: 411907 - DNA, 145 bp, Homo sapiens; identical to SEQ ID NO: 218140
  chr17:76999462-76999607
  hypo

SEQ ID NO: 411908 - DNA, 154 bp, Homo sapiens; identical to SEQ ID NO: 271312
  chr17:77002125-77002279
  hypo

SEQ ID NO: 411909 - DNA, 60 bp, Homo sapiens; identical to SEQ ID NO: 218141
  chr17:77043872-77043932
  hypo

SEQ ID NO: 411910 - DNA, 80 bp, Homo sapiens; identical to SEQ ID NO: 225522
  chr17:77070949-77071029
  hypo

SEQ ID NO: 411911 - DNA, 46 bp, Homo sapiens; identical to SEQ ID NO: 271325
  chr17:77121065-77121111
  hypo

SEQ ID NO: 411912 - DNA, 172 bp, Homo sapiens; identical to SEQ ID NO: 323280
  chr17:77200443-77200615
  hypo

SEQ ID NO: 411913 - DNA, 85 bp, Homo sapiens; identical to SEQ ID NO: 271331
  chr17:77206526-77206611
  hypo

SEQ ID NO: 411914 - DNA, 213 bp, Homo sapiens; identical to SEQ ID NO: 271332
  chr17:77224254-77224467
  hypo

SEQ ID NO: 411915 - DNA, 60 bp, Homo sapiens; identical to SEQ ID NO: 271335
  chr17:77333541-77333601
  hypo

SEQ ID NO: 411916 - DNA, 31 bp, Homo sapiens; identical to SEQ ID NO: 271338
  chr17:77385164-77385195
  hypo

SEQ ID NO: 411917 - DNA, 174 bp, Homo sapiens; identical to SEQ ID NO: 204822
  chr17:77771456-77771630
  hypo

SEQ ID NO: 411918 - DNA, 386 bp, Homo sapiens; identical to SEQ ID NO: 225527
  chr17:77774854-77775240
  hypo

SEQ ID NO: 411919 - DNA, 63 bp, Homo sapiens; identical to SEQ ID NO: 271346
  chr17:77900547-77900610
  hypo

SEQ ID NO: 411920 - DNA, 153 bp, Homo sapiens; identical to SEQ ID NO: 218158
  chr17:77913051-77913204
  hypo

SEQ ID NO: 411921 - DNA, 97 bp, Homo sapiens
  chr17:77921727-77921824
  hypo
gcttgccttcacctcagtggaaggcagctgtgccaccatctcagagcccaagcttagcttccagacacacagacccttgctttgcaaaaggtaatgg

SEQ ID NO: 411922 - DNA, 37 bp, Homo sapiens; identical to SEQ ID NO: 323313
  chr17:77926415-77926452
  hypo

SEQ ID NO: 411923 - DNA, 203 bp, Homo sapiens; identical to SEQ ID NO: 323314
  chr17:77926558-77926761
  hypo

SEQ ID NO: 411924 - DNA, 61 bp, Homo sapiens; identical to SEQ ID NO: 271366
  chr17:77954476-77954537
  hypo

SEQ ID NO: 411925 - DNA, 100 bp, Homo sapiens; identical to SEQ ID NO: 271368
  chr17:77956294-77956394
  hypo

SEQ ID NO: 411926 - DNA, 484 bp, Homo sapiens; identical to SEQ ID NO: 271370
  chr17:77975731-77976215
  hypo

SEQ ID NO: 411927 - DNA, 305 bp, Homo sapiens; identical to SEQ ID NO: 218170
  chr17:77980905-77981210
  hypo

SEQ ID NO: 411928 - DNA, 100 bp, Homo sapiens; identical to SEQ ID NO: 204832
  chr17:78009418-78009518
  hypo

SEQ ID NO: 411929 - DNA, 474 bp, Homo sapiens; identical to SEQ ID NO: 400358
  chr17:78010029-78010503
  hypo

SEQ ID NO: 411930 - DNA, 175 bp, Homo sapiens; identical to SEQ ID NO: 271377
  chr17:78022348-78022523
  hypo

SEQ ID NO: 411931 - DNA, 225 bp, Homo sapiens; identical to SEQ ID NO: 271380
  chr17:78026928-78027153
  hypo

SEQ ID NO: 411932 - DNA, 212 bp, Homo sapiens; identical to SEQ ID NO: 271384
  chr17:78055253-78055465
  hypo

SEQ ID NO: 411933 - DNA, 157 bp, Homo sapiens; identical to SEQ ID NO: 271386
  chr17:78061502-78061659
  hypo

SEQ ID NO: 411934 - DNA, 194 bp, Homo sapiens; identical to SEQ ID NO: 271388
  chr17:78077294-78077488
  hypo

SEQ ID NO: 411935 - DNA, 194 bp, Homo sapiens; identical to SEQ ID NO: 323348
  chr17:78083553-78083747
  hypo

SEQ ID NO: 411936 - DNA, 37 bp, Homo sapiens; identical to SEQ ID NO: 323349
  chr17:78083818-78083855
  hypo

SEQ ID NO: 411937 - DNA, 112 bp, Homo sapiens; identical to SEQ ID NO: 218179
  chr17:78086406-78086518
  hypo

SEQ ID NO: 411938 - DNA, 200 bp, Homo sapiens; identical to SEQ ID NO: 271394
  chr17:78155302-78155502
  hypo

SEQ ID NO: 411939 - DNA, 172 bp, Homo sapiens; identical to SEQ ID NO: 218180
  chr17:78158229-78158401
  hypo

SEQ ID NO: 411940 - DNA, 200 bp, Homo sapiens; identical to SEQ ID NO: 218182
  chr17:78165107-78165307
  hypo

SEQ ID NO: 411941 - DNA, 33 bp, Homo sapiens; identical to SEQ ID NO: 271399
  chr17:78179550-78179583
  hypo

SEQ ID NO: 411942 - DNA, 96 bp, Homo sapiens; identical to SEQ ID NO: 271401
  chr17:78188823-78188919
  hypo

SEQ ID NO: 411943 - DNA, 129 bp, Homo sapiens; identical to SEQ ID NO: 218183
  chr17:78195404-78195533
  hypo

SEQ ID NO: 411944 - DNA, 183 bp, Homo sapiens; identical to SEQ ID NO: 271405
  chr17:78256873-78257056
  hypo

SEQ ID NO: 411945 - DNA, 304 bp, Homo sapiens; identical to SEQ ID NO: 271410
  chr17:78337245-78337549
  hypo

SEQ ID NO: 411946 - DNA, 54 bp, Homo sapiens; identical to SEQ ID NO: 271411
  chr17:78338098-78338152
  hypo

SEQ ID NO: 411947 - DNA, 277 bp, Homo sapiens; identical to SEQ ID NO: 218188
  chr17:78354368-78354645
  hypo

SEQ ID NO: 411948 - DNA, 58 bp, Homo sapiens; identical to SEQ ID NO: 271414
  chr17:78362264-78362322
  hypo

SEQ ID NO: 411949 - DNA, 136 bp, Homo sapiens; identical to SEQ ID NO: 225537
  chr17:78388546-78388682
  hypo

SEQ ID NO: 411950 - DNA, 90 bp, Homo sapiens; identical to SEQ ID NO: 225538
  chr17:78389461-78389551
  hypo

SEQ ID NO: 411951 - DNA, 496 bp, Homo sapiens; identical to SEQ ID NO: 292798
  chr17:78428377-78428873
  hypo

SEQ ID NO: 411952 - DNA, 136 bp, Homo sapiens; identical to SEQ ID NO: 271419
  chr17:78442642-78442778
  hypo

SEQ ID NO: 411953 - DNA, 54 bp, Homo sapiens; identical to SEQ ID NO: 400364
  chr17:78450959-78451013
  hypo

SEQ ID NO: 411954 - DNA, 117 bp, Homo sapiens; identical to SEQ ID NO: 271420
  chr17:78475921-78476038
  hypo

SEQ ID NO: 411955 - DNA, 32 bp, Homo sapiens; identical to SEQ ID NO: 271423
  chr17:78561142-78561174
  hypo

SEQ ID NO: 411956 - DNA, 127 bp, Homo sapiens; identical to SEQ ID NO: 271424
  chr17:78582535-78582662
  hypo

SEQ ID NO: 411957 - DNA, 84 bp, Homo sapiens
  chr17:78590518-78590602
  hypo
aagcaataggcttcactttgtatcttgaactgggaaggagtggagaaaaaaaaaatattagagccctttgctatacttacttta

SEQ ID NO: 411958 - DNA, 85 bp, Homo sapiens; identical to SEQ ID NO: 271431
  chr17:78620631-78620716
  hypo

SEQ ID NO: 411959 - DNA, 409 bp, Homo sapiens; identical to SEQ ID NO: 271434
  chr17:78642231-78642640
  hypo

SEQ ID NO: 411960 - DNA, 184 bp, Homo sapiens; identical to SEQ ID NO: 271438
  chr17:78691303-78691487
  hypo

SEQ ID NO: 411961 - DNA, 89 bp, Homo sapiens; identical to SEQ ID NO: 271440
  chr17:78745063-78745152
  hypo

SEQ ID NO: 411962 - DNA, 290 bp, Homo sapiens; identical to SEQ ID NO: 271441
  chr17:78747664-78747954
  hypo

SEQ ID NO: 411963 - DNA, 208 bp, Homo sapiens; identical to SEQ ID NO: 218196
  chr17:78759715-78759923
  hypo

SEQ ID NO: 411964 - DNA, 31 bp, Homo sapiens; identical to SEQ ID NO: 271447
  chr17:78782970-78783001
  hypo

SEQ ID NO: 411965 - DNA, 31 bp, Homo sapiens; identical to SEQ ID NO: 271448
  chr17:78783241-78783272
  hypo

SEQ ID NO: 411966 - DNA, 115 bp, Homo sapiens; identical to SEQ ID NO: 218200
  chr17:78789606-78789721
  hypo

SEQ ID NO: 411967 - DNA, 196 bp, Homo sapiens; identical to SEQ ID NO: 323411
  chr17:78794034-78794230
  hypo

SEQ ID NO: 411968 - DNA, 36 bp, Homo sapiens; identical to SEQ ID NO: 218201
  chr17:78796145-78796181
  hypo

SEQ ID NO: 411969 - DNA, 401 bp, Homo sapiens; identical to SEQ ID NO: 271457
  chr17:78812101-78812502
  hypo

SEQ ID NO: 411970 - DNA, 233 bp, Homo sapiens; identical to SEQ ID NO: 271458
  chr17:78818427-78818660
  hypo

SEQ ID NO: 411971 - DNA, 76 bp, Homo sapiens; identical to SEQ ID NO: 271459
  chr17:78822274-78822350
  hypo

SEQ ID NO: 411972 - DNA, 232 bp, Homo sapiens; identical to SEQ ID NO: 271463
  chr17:78870192-78870424
  hypo

SEQ ID NO: 411973 - DNA, 52 bp, Homo sapiens; identical to SEQ ID NO: 271464
  chr17:78871406-78871458
  hypo

SEQ ID NO: 411974 - DNA, 183 bp, Homo sapiens; identical to SEQ ID NO: 218206
  chr17:78873841-78874024
  hypo

SEQ ID NO: 411975 - DNA, 449 bp, Homo sapiens; identical to SEQ ID NO: 218207
  chr17:78876642-78877091
  hypo

SEQ ID NO: 411976 - DNA, 109 bp, Homo sapiens; identical to SEQ ID NO: 218208
  chr17:78877957-78878066
  hypo

SEQ ID NO: 411977 - DNA, 185 bp, Homo sapiens; identical to SEQ ID NO: 218210
  chr17:78968280-78968465
  hypo

SEQ ID NO: 411978 - DNA, 37 bp, Homo sapiens; identical to SEQ ID NO: 271477
  chr17:78975640-78975677
  hypo

SEQ ID NO: 411979 - DNA, 71 bp, Homo sapiens; identical to SEQ ID NO: 323438
  chr17:78999784-78999855
  hypo

SEQ ID NO: 411980 - DNA, 182 bp, Homo sapiens; identical to SEQ ID NO: 218214
  chr17:79042375-79042557
  hypo

SEQ ID NO: 411981 - DNA, 444 bp, Homo sapiens; identical to SEQ ID NO: 271484
  chr17:79044047-79044491
  hypo

SEQ ID NO: 411982 - DNA, 34 bp, Homo sapiens; identical to SEQ ID NO: 271492
  chr17:79052330-79052364
  hypo

SEQ ID NO: 411983 - DNA, 133 bp, Homo sapiens; identical to SEQ ID NO: 271498
  chr17:79061383-79061516
  hypo

SEQ ID NO: 411984 - DNA, 97 bp, Homo sapiens; identical to SEQ ID NO: 218221
  chr17:79065509-79065606
  hypo

SEQ ID NO: 411985 - DNA, 36 bp, Homo sapiens; identical to SEQ ID NO: 218227
  chr17:79078512-79078548
  hypo

SEQ ID NO: 411986 - DNA, 123 bp, Homo sapiens; identical to SEQ ID NO: 218230
  chr17:79083370-79083493
  hypo

SEQ ID NO: 411987 - DNA, 196 bp, Homo sapiens; identical to SEQ ID NO: 218235
  chr17:79097959-79098155
  hypo

SEQ ID NO: 411988 - DNA, 105 bp, Homo sapiens; identical to SEQ ID NO: 323480
  chr17:79098203-79098308
  hypo

SEQ ID NO: 411989 - DNA, 356 bp, Homo sapiens; identical to SEQ ID NO: 218238
  chr17:79102634-79102990
  hypo

SEQ ID NO: 411990 - DNA, 54 bp, Homo sapiens; identical to SEQ ID NO: 271524
  chr17:79114515-79114569
  hypo

SEQ ID NO: 411991 - DNA, 148 bp, Homo sapiens; identical to SEQ ID NO: 271525
  chr17:79133081-79133229
  hypo

SEQ ID NO: 411992 - DNA, 182 bp, Homo sapiens; identical to SEQ ID NO: 271527
  chr17:79135804-79135986
  hypo

SEQ ID NO: 411993 - DNA, 264 bp, Homo sapiens; identical to SEQ ID NO: 271528
  chr17:79154928-79155192
  hypo

SEQ ID NO: 411994 - DNA, 36 bp, Homo sapiens; identical to SEQ ID NO: 271531
  chr17:79168720-79168756
  hypo

SEQ ID NO: 411995 - DNA, 278 bp, Homo sapiens; identical to SEQ ID NO: 271532
  chr17:79169406-79169684
  hypo

SEQ ID NO: 411996 - DNA, 70 bp, Homo sapiens; identical to SEQ ID NO: 218243
  chr17:79216891-79216961
  hypo

SEQ ID NO: 411997 - DNA, 125 bp, Homo sapiens; identical to SEQ ID NO: 218245
  chr17:79230308-79230433
  hypo

SEQ ID NO: 411998 - DNA, 96 bp, Homo sapiens; identical to SEQ ID NO: 218247
  chr17:79294051-79294147
  hypo

SEQ ID NO: 411999 - DNA, 180 bp, Homo sapiens; identical to SEQ ID NO: 204843
  chr17:79319124-79319304
  hypo

SEQ ID NO: 412000 - DNA, 98 bp, Homo sapiens; identical to SEQ ID NO: 271551
  chr17:79597564-79597662
  hypo

SEQ ID NO: 412001 - DNA, 60 bp, Homo sapiens; identical to SEQ ID NO: 218257
  chr17:79653803-79653863
  hypo

SEQ ID NO: 412002 - DNA, 35 bp, Homo sapiens; identical to SEQ ID NO: 271562
  chr17:79657392-79657427
  hypo

SEQ ID NO: 412003 - DNA, 64 bp, Homo sapiens; identical to SEQ ID NO: 271564
  chr17:79664245-79664309
  hypo

SEQ ID NO: 412004 - DNA, 58 bp, Homo sapiens; identical to SEQ ID NO: 271566
  chr17:79674301-79674359
  hypo

SEQ ID NO: 412005 - DNA, 102 bp, Homo sapiens; identical to SEQ ID NO: 218261
  chr17:79705356-79705458
  hypo

SEQ ID NO: 412006 - DNA, 260 bp, Homo sapiens; identical to SEQ ID NO: 271571
  chr17:79772552-79772812
  hypo

SEQ ID NO: 412007 - DNA, 42 bp, Homo sapiens; identical to SEQ ID NO: 271572
  chr17:79776471-79776513
  hypo

SEQ ID NO: 412008 - DNA, 278 bp, Homo sapiens; identical to SEQ ID NO: 271574
  chr17:79792218-79792496
  hypo

SEQ ID NO: 412009 - DNA, 243 bp, Homo sapiens; identical to SEQ ID NO: 271577
  chr17:79804099-79804342
  hypo

SEQ ID NO: 412010 - DNA, 177 bp, Homo sapiens; identical to SEQ ID NO: 218263
  chr17:79844241-79844418
  hypo

SEQ ID NO: 412011 - DNA, 120 bp, Homo sapiens; identical to SEQ ID NO: 218265
  chr17:79851770-79851890
  hypo

SEQ ID NO: 412012 - DNA, 31 bp, Homo sapiens; identical to SEQ ID NO: 218266
  chr17:79863961-79863992
  hypo

SEQ ID NO: 412013 - DNA, 187 bp, Homo sapiens; identical to SEQ ID NO: 204844
  chr17:79885890-79886077
  hypo

SEQ ID NO: 412014 - DNA, 83 bp, Homo sapiens; identical to SEQ ID NO: 218270
  chr17:79892730-79892813
  hypo

SEQ ID NO: 412015 - DNA, 412 bp, Homo sapiens; identical to SEQ ID NO: 323553
  chr17:79892890-79893302
  hypo

SEQ ID NO: 412016 - DNA, 84 bp, Homo sapiens; identical to SEQ ID NO: 218275
  chr17:79942955-79943039
  hypo

SEQ ID NO: 412017 - DNA, 506 bp, Homo sapiens; identical to SEQ ID NO: 271597
  chr17:79950561-79951067
  hypo

SEQ ID NO: 412018 - DNA, 378 bp, Homo sapiens; identical to SEQ ID NO: 271599
  chr17:79961365-79961743
  hypo

SEQ ID NO: 412019 - DNA, 236 bp, Homo sapiens; identical to SEQ ID NO: 271602
  chr17:79972011-79972247
  hypo

SEQ ID NO: 412020 - DNA, 280 bp, Homo sapiens; identical to SEQ ID NO: 323570
  chr17:79977136-79977416
  hypo

SEQ ID NO: 412021 - DNA, 209 bp, Homo sapiens; identical to SEQ ID NO: 323571
  chr17:79977446-79977655
  hypo

SEQ ID NO: 412022 - DNA, 40 bp, Homo sapiens; identical to SEQ ID NO: 204847
  chr17:79989900-79989940
  hypo

SEQ ID NO: 412023 - DNA, 373 bp, Homo sapiens; identical to SEQ ID NO: 218283
  chr17:80005250-80005623
  hypo

SEQ ID NO: 412024 - DNA, 84 bp, Homo sapiens; identical to SEQ ID NO: 271605
  chr17:80011809-80011893
  hypo

SEQ ID NO: 412025 - DNA, 267 bp, Homo sapiens; identical to SEQ ID NO: 218284
  chr17:80018605-80018872
  hypo

SEQ ID NO: 412026 - DNA, 137 bp, Homo sapiens; identical to SEQ ID NO: 218287
  chr17:80030812-80030949
  hypo

SEQ ID NO: 412027 - DNA, 64 bp, Homo sapiens; identical to SEQ ID NO: 218288
  chr17:80038872-80038936
  hypo

SEQ ID NO: 412028 - DNA, 87 bp, Homo sapiens; identical to SEQ ID NO: 218289
  chr17:80040622-80040709
  hypo

SEQ ID NO: 412029 - DNA, 231 bp, Homo sapiens; identical to SEQ ID NO: 218290
  chr17:80042509-80042740
  hypo

SEQ ID NO: 412030 - DNA, 282 bp, Homo sapiens; identical to SEQ ID NO: 271618
  chr17:80062707-80062989
  hypo

SEQ ID NO: 412031 - DNA, 104 bp, Homo sapiens; identical to SEQ ID NO: 271619
  chr17:80077690-80077794
  hypo

SEQ ID NO: 412032 - DNA, 284 bp, Homo sapiens; identical to SEQ ID NO: 271620
  chr17:80084435-80084719
  hypo

SEQ ID NO: 412033 - DNA, 38 bp, Homo sapiens; identical to SEQ ID NO: 271622
  chr17:80100748-80100786
  hypo

SEQ ID NO: 412034 - DNA, 187 bp, Homo sapiens; identical to SEQ ID NO: 271623
  chr17:80135500-80135687
  hypo

SEQ ID NO: 412035 - DNA, 160 bp, Homo sapiens; identical to SEQ ID NO: 218298
  chr17:80144203-80144363
  hypo

SEQ ID NO: 412036 - DNA, 236 bp, Homo sapiens; identical to SEQ ID NO: 271626
  chr17:80159381-80159617
  hypo

SEQ ID NO: 412037 - DNA, 109 bp, Homo sapiens; identical to SEQ ID NO: 271627
  chr17:80176133-80176242
  hypo

SEQ ID NO: 412038 - DNA, 176 bp, Homo sapiens; identical to SEQ ID NO: 271629
  chr17:80202410-80202586
  hypo

SEQ ID NO: 412039 - DNA, 138 bp, Homo sapiens; identical to SEQ ID NO: 271630
  chr17:80207968-80208106
  hypo

SEQ ID NO: 412040 - DNA, 74 bp, Homo sapiens; identical to SEQ ID NO: 323612
  chr17:80240741-80240815
  hypo

SEQ ID NO: 412041 - DNA, 48 bp, Homo sapiens; identical to SEQ ID NO: 218304
  chr17:80260760-80260808
  hypo

SEQ ID NO: 412042 - DNA, 114 bp, Homo sapiens; identical to SEQ ID NO: 271643
  chr17:80275866-80275980
  hypo

SEQ ID NO: 412043 - DNA, 141 bp, Homo sapiens; identical to SEQ ID NO: 271651
  chr17:80354750-80354891
  hypo

SEQ ID NO: 412044 - DNA, 323 bp, Homo sapiens; identical to SEQ ID NO: 271652
  chr17:80355877-80356200
  hypo

SEQ ID NO: 412045 - DNA, 118 bp, Homo sapiens; identical to SEQ ID NO: 271656
  chr17:80393112-80393230
  hypo

SEQ ID NO: 412046 - DNA, 147 bp, Homo sapiens; identical to SEQ ID NO: 323637
  chr17:80448730-80448877
  hypo

SEQ ID NO: 412047 - DNA, 100 bp, Homo sapiens; identical to SEQ ID NO: 271664
  chr17:80487529-80487629
  hypo

SEQ ID NO: 412048 - DNA, 62 bp, Homo sapiens; identical to SEQ ID NO: 271666
  chr17:80503130-80503192
  hypo

SEQ ID NO: 412049 - DNA, 46 bp, Homo sapiens
  chr17:80517078-80517124
  hypo
agtgtttgatttggtgtcctgagtgtctgtatgtggatgtggagtg

SEQ ID NO: 412050 - DNA, 191 bp, Homo sapiens; identical to SEQ ID NO: 271669
  chr17:80524560-80524751
  hypo

SEQ ID NO: 412051 - DNA, 120 bp, Homo sapiens; identical to SEQ ID NO: 218316
  chr17:80593584-80593704
  hypo

SEQ ID NO: 412052 - DNA, 34 bp, Homo sapiens; identical to SEQ ID NO: 271679
  chr17:80600300-80600334
  hypo

SEQ ID NO: 412053 - DNA, 120 bp, Homo sapiens; identical to SEQ ID NO: 271681
  chr17:80603958-80604078
  hypo

SEQ ID NO: 412054 - DNA, 139 bp, Homo sapiens; identical to SEQ ID NO: 218317
  chr17:80604378-80604517
  hypo

SEQ ID NO: 412055 - DNA, 111 bp, Homo sapiens; identical to SEQ ID NO: 218318
  chr17:80614273-80614384
  hypo

SEQ ID NO: 412056 - DNA, 202 bp, Homo sapiens; identical to SEQ ID NO: 400376
  chr17:80656845-80657047
  hypo

SEQ ID NO: 412057 - DNA, 229 bp, Homo sapiens; identical to SEQ ID NO: 271689
  chr17:80660560-80660789
  hypo

SEQ ID NO: 412058 - DNA, 116 bp, Homo sapiens; identical to SEQ ID NO: 271692
  chr17:80671048-80671164
  hypo

SEQ ID NO: 412059 - DNA, 159 bp, Homo sapiens; identical to SEQ ID NO: 271693
  chr17:80671194-80671353
  hypo

SEQ ID NO: 412060 - DNA, 74 bp, Homo sapiens; identical to SEQ ID NO: 218323
  chr17:80678256-80678330
  hypo

SEQ ID NO: 412061 - DNA, 37 bp, Homo sapiens; identical to SEQ ID NO: 323672
  chr17:80692926-80692963
  hypo

SEQ ID NO: 412062 - DNA, 66 bp, Homo sapiens; identical to SEQ ID NO: 323676
  chr17:80712972-80713038
  hypo

SEQ ID NO: 412063 - DNA, 162 bp, Homo sapiens; identical to SEQ ID NO: 271700
  chr17:80732519-80732681
  hypo

SEQ ID NO: 412064 - DNA, 40 bp, Homo sapiens; identical to SEQ ID NO: 271701
  chr17:80744319-80744359
  hypo

SEQ ID NO: 412065 - DNA, 273 bp, Homo sapiens; identical to SEQ ID NO: 271703
  chr17:80745052-80745325
  hypo

SEQ ID NO: 412066 - DNA, 127 bp, Homo sapiens; identical to SEQ ID NO: 218330
  chr17:80767312-80767439
  hypo

SEQ ID NO: 412067 - DNA, 165 bp, Homo sapiens; identical to SEQ ID NO: 271713
  chr17:80775961-80776126
  hypo

SEQ ID NO: 412068 - DNA, 119 bp, Homo sapiens; identical to SEQ ID NO: 271717
  chr17:80816746-80816865
  hypo

SEQ ID NO: 412069 - DNA, 217 bp, Homo sapiens; identical to SEQ ID NO: 218335
  chr17:80819087-80819304
  hypo

SEQ ID NO: 412070 - DNA, 34 bp, Homo sapiens; identical to SEQ ID NO: 271721
  chr17:80825506-80825540
  hypo

SEQ ID NO: 412071 - DNA, 58 bp, Homo sapiens; identical to SEQ ID NO: 271722
  chr17:80827938-80827996
  hypo

SEQ ID NO: 412072 - DNA, 84 bp, Homo sapiens; identical to SEQ ID NO: 271723
  chr17:80828571-80828655
  hypo

SEQ ID NO: 412073 - DNA, 78 bp, Homo sapiens; identical to SEQ ID NO: 218336
  chr17:80830876-80830954
  hypo

SEQ ID NO: 412074 - DNA, 154 bp, Homo sapiens; identical to SEQ ID NO: 271725
  chr17:80831395-80831549
  hypo

SEQ ID NO: 412075 - DNA, 401 bp, Homo sapiens; identical to SEQ ID NO: 323709
  chr17:80847894-80848295
  hypo

SEQ ID NO: 412076 - DNA, 55 bp, Homo sapiens; identical to SEQ ID NO: 271731
  chr17:80859905-80859960
  hypo

SEQ ID NO: 412077 - DNA, 310 bp, Homo sapiens; identical to SEQ ID NO: 271734
  chr17:80867900-80868210
  hypo

SEQ ID NO: 412078 - DNA, 157 bp, Homo sapiens; identical to SEQ ID NO: 271735
  chr17:80873073-80873230
  hypo

SEQ ID NO: 412079 - DNA, 851 bp, Homo sapiens; identical to SEQ ID NO: 271738
  chr17:80888853-80889704
  hypo

SEQ ID NO: 412080 - DNA, 226 bp, Homo sapiens; identical to SEQ ID NO: 271741
  chr17:80897174-80897400
  hypo

SEQ ID NO: 412081 - DNA, 107 bp, Homo sapiens; identical to SEQ ID NO: 271742
  chr17:80897430-80897537
  hypo

SEQ ID NO: 412082 - DNA, 349 bp, Homo sapiens; identical to SEQ ID NO: 271743
  chr17:80898972-80899321
  hypo

SEQ ID NO: 412083 - DNA, 114 bp, Homo sapiens; identical to SEQ ID NO: 218345
  chr17:80917377-80917491
  hypo

SEQ ID NO: 412084 - DNA, 201 bp, Homo sapiens; identical to SEQ ID NO: 218347
  chr17:80935245-80935446
  hypo

SEQ ID NO: 412085 - DNA, 82 bp, Homo sapiens; identical to SEQ ID NO: 271752
  chr17:80982744-80982826
  hypo

SEQ ID NO: 412086 - DNA, 34 bp, Homo sapiens; identical to SEQ ID NO: 271754
  chr17:80997455-80997489
  hypo

SEQ ID NO: 412087 - DNA, 221 bp, Homo sapiens; identical to SEQ ID NO: 323737
  chr17:81015979-81016200
  hypo

SEQ ID NO: 412088 - DNA, 127 bp, Homo sapiens; identical to SEQ ID NO: 218351
  chr17:81021377-81021504
  hypo

SEQ ID NO: 412089 - DNA, 372 bp, Homo sapiens; identical to SEQ ID NO: 323739
  chr17:81032434-81032806
  hypo

SEQ ID NO: 412090 - DNA, 321 bp, Homo sapiens; identical to SEQ ID NO: 323740
  chr17:81032836-81033157
  hypo

SEQ ID NO: 412091 - DNA, 237 bp, Homo sapiens; identical to SEQ ID NO: 323741
  chr17:81033517-81033754
  hypo

SEQ ID NO: 412092 - DNA, 309 bp, Homo sapiens; identical to SEQ ID NO: 323745
  chr17:81042717-81043026
  hypo

SEQ ID NO: 412093 - DNA, 71 bp, Homo sapiens; identical to SEQ ID NO: 218354
  chr17:81043193-81043264
  hypo

SEQ ID NO: 412094 - DNA, 315 bp, Homo sapiens; identical to SEQ ID NO: 271765
  chr17:81051924-81052239
  hypo

SEQ ID NO: 412095 - DNA, 113 bp, Homo sapiens; identical to SEQ ID NO: 218356
  chr17:81068540-81068653
  hypo

SEQ ID NO: 412096 - DNA, 176 bp, Homo sapiens; identical to SEQ ID NO: 218357
  chr17:81068791-81068967
  hypo

SEQ ID NO: 412097 - DNA, 192 bp, Homo sapiens; identical to SEQ ID NO: 271771
  chr17:81102241-81102433
  hypo

SEQ ID NO: 412098 - DNA, 177 bp, Homo sapiens; identical to SEQ ID NO: 271772
  chr17:81104183-81104360
  hypo

SEQ ID NO: 412099 - DNA, 793 bp, Homo sapiens; identical to SEQ ID NO: 271779
  chr18:580159-580952
  hypo

SEQ ID NO: 412100 - DNA, 37 bp, Homo sapiens; identical to SEQ ID NO: 218363
  chr18:698119-698156
  hypo

SEQ ID NO: 412101 - DNA, 80 bp, Homo sapiens; identical to SEQ ID NO: 271784
  chr18:1772178-1772258
  hypo

SEQ ID NO: 412102 - DNA, 93 bp, Homo sapiens; identical to SEQ ID NO: 271787
  chr18:1847233-1847326
  hypo

SEQ ID NO: 412103 - DNA, 34 bp, Homo sapiens; identical to SEQ ID NO: 271788
  chr18:1928649-1928683
  hypo

SEQ ID NO: 412104 - DNA, 285 bp, Homo sapiens; identical to SEQ ID NO: 292858
  chr18:2571378-2571663
  hypo

SEQ ID NO: 412105 - DNA, 192 bp, Homo sapiens; identical to SEQ ID NO: 271792
  chr18:2851484-2851676
  hypo

SEQ ID NO: 412106 - DNA, 136 bp, Homo sapiens; identical to SEQ ID NO: 204861
  chr18:2907034-2907170
  hypo

SEQ ID NO: 412107 - DNA, 127 bp, Homo sapiens; identical to SEQ ID NO: 218370
  chr18:2910112-2910239
  hypo

SEQ ID NO: 412108 - DNA, 34 bp, Homo sapiens; identical to SEQ ID NO: 271795
  chr18:2910452-2910486
  hypo

SEQ ID NO: 412109 - DNA, 49 bp, Homo sapiens; identical to SEQ ID NO: 323791
  chr18:2913121-2913170
  hypo

SEQ ID NO: 412110 - DNA, 216 bp, Homo sapiens; identical to SEQ ID NO: 271798
  chr18:2921975-2922191
  hypo

SEQ ID NO: 412111 - DNA, 165 bp, Homo sapiens; identical to SEQ ID NO: 218371
  chr18:3011266-3011431
  hypo

SEQ ID NO: 412112 - DNA, 162 bp, Homo sapiens; identical to SEQ ID NO: 271801
  chr18:3026813-3026975
  hypo

SEQ ID NO: 412113 - DNA, 118 bp, Homo sapiens; identical to SEQ ID NO: 323800
  chr18:3126668-3126786
  hypo

SEQ ID NO: 412114 - DNA, 126 bp, Homo sapiens; identical to SEQ ID NO: 271806
  chr18:3135595-3135721
  hypo

SEQ ID NO: 412115 - DNA, 188 bp, Homo sapiens; identical to SEQ ID NO: 218374
  chr18:3214253-3214441
  hypo

SEQ ID NO: 412116 - DNA, 36 bp, Homo sapiens; identical to SEQ ID NO: 271811
  chr18:3412987-3413023
  hypo

SEQ ID NO: 412117 - DNA, 238 bp, Homo sapiens; identical to SEQ ID NO: 271812
  chr18:3415134-3415372
  hypo

SEQ ID NO: 412118 - DNA, 120 bp, Homo sapiens; identical to SEQ ID NO: 218379
  chr18:3443851-3443971
  hypo

SEQ ID NO: 412119 - DNA, 631 bp, Homo sapiens; identical to SEQ ID NO: 204865
  chr18:3447898-3448529
  hypo

SEQ ID NO: 412120 - DNA, 42 bp, Homo sapiens; identical to SEQ ID NO: 218384
  chr18:3534580-3534622
  hypo

SEQ ID NO: 412121 - DNA, 62 bp, Homo sapiens; identical to SEQ ID NO: 271825
  chr18:3592367-3592429
  hypo

SEQ ID NO: 412122 - DNA, 36 bp, Homo sapiens; identical to SEQ ID NO: 218387
  chr18:3600255-3600291
  hypo

SEQ ID NO: 412123 - DNA, 35 bp, Homo sapiens; identical to SEQ ID NO: 218388
  chr18:3600531-3600566
  hypo

SEQ ID NO: 412124 - DNA, 92 bp, Homo sapiens; identical to SEQ ID NO: 271828
  chr18:3602008-3602100
  hypo

SEQ ID NO: 412125 - DNA, 76 bp, Homo sapiens; identical to SEQ ID NO: 271829
  chr18:3608039-3608115
  hypo

SEQ ID NO: 412126 - DNA, 93 bp, Homo sapiens; identical to SEQ ID NO: 271830
  chr18:3610054-3610147
  hypo

SEQ ID NO: 412127 - DNA, 139 bp, Homo sapiens; identical to SEQ ID NO: 271834
  chr18:3648338-3648477
  hypo

SEQ ID NO: 412128 - DNA, 90 bp, Homo sapiens; identical to SEQ ID NO: 292875
  chr18:4455561-4455651
  hypo

SEQ ID NO: 412129 - DNA, 154 bp, Homo sapiens; identical to SEQ ID NO: 271845
  chr18:5149403-5149557
  hypo

SEQ ID NO: 412130 - DNA, 40 bp, Homo sapiens; identical to SEQ ID NO: 271848
  chr18:5533864-5533904
  hypo

SEQ ID NO: 412131 - DNA, 198 bp, Homo sapiens; identical to SEQ ID NO: 271849
  chr18:6284881-6285079
  hypo

SEQ ID NO: 412132 - DNA, 165 bp, Homo sapiens; identical to SEQ ID NO: 271850
  chr18:6444200-6444365
  hypo

SEQ ID NO: 412133 - DNA, 69 bp, Homo sapiens; identical to SEQ ID NO: 218397
  chr18:6953009-6953078
  hypo

SEQ ID NO: 412134 - DNA, 134 bp, Homo sapiens; identical to SEQ ID NO: 204879
  chr18:7116637-7116771
  hypo

SEQ ID NO: 412135 - DNA, 80 bp, Homo sapiens; identical to SEQ ID NO: 218399
  chr18:7351750-7351830
  hypo

SEQ ID NO: 412136 - DNA, 409 bp, Homo sapiens; identical to SEQ ID NO: 271854
  chr18:8348210-8348619
  hypo

SEQ ID NO: 412137 - DNA, 200 bp, Homo sapiens; identical to SEQ ID NO: 292896
  chr18:8367259-8367459
  hypo

SEQ ID NO: 412138 - DNA, 33 bp, Homo sapiens; identical to SEQ ID NO: 271855
  chr18:8400564-8400597
  hypo

SEQ ID NO: 412139 - DNA, 63 bp, Homo sapiens; identical to SEQ ID NO: 218407
  chr18:8662986-8663049
  hypo

SEQ ID NO: 412140 - DNA, 56 bp, Homo sapiens; identical to SEQ ID NO: 271862
  chr18:8711911-8711967
  hypo

SEQ ID NO: 412141 - DNA, 145 bp, Homo sapiens; identical to SEQ ID NO: 218408
  chr18:8733060-8733205
  hypo

SEQ ID NO: 412142 - DNA, 65 bp, Homo sapiens; identical to SEQ ID NO: 271865
  chr18:8733742-8733807
  hypo

SEQ ID NO: 412143 - DNA, 62 bp, Homo sapiens; identical to SEQ ID NO: 271868
  chr18:8787325-8787387
  hypo

SEQ ID NO: 412144 - DNA, 124 bp, Homo sapiens; identical to SEQ ID NO: 271869
  chr18:8794467-8794591
  hypo

SEQ ID NO: 412145 - DNA, 154 bp, Homo sapiens; identical to SEQ ID NO: 271872
  chr18:8814259-8814413
  hypo

SEQ ID NO: 412146 - DNA, 140 bp, Homo sapiens; identical to SEQ ID NO: 271876
  chr18:8856547-8856687
  hypo

SEQ ID NO: 412147 - DNA, 31 bp, Homo sapiens; identical to SEQ ID NO: 218414
  chr18:9101197-9101228
  hypo

SEQ ID NO: 412148 - DNA, 42 bp, Homo sapiens; identical to SEQ ID NO: 271888
  chr18:9514021-9514063
  hypo

SEQ ID NO: 412149 - DNA, 79 bp, Homo sapiens; identical to SEQ ID NO: 271896
  chr18:9758085-9758164
  hypo

SEQ ID NO: 412150 - DNA, 162 bp, Homo sapiens; identical to SEQ ID NO: 218424
  chr18:9797400-9797562
  hypo

SEQ ID NO: 412151 - DNA, 269 bp, Homo sapiens; identical to SEQ ID NO: 271901
  chr18:9838068-9838337
  hypo

SEQ ID NO: 412152 - DNA, 136 bp, Homo sapiens; identical to SEQ ID NO: 271906
  chr18:9962327-9962463
  hypo

SEQ ID NO: 412153 - DNA, 285 bp, Homo sapiens; identical to SEQ ID NO: 271907
  chr18:10031148-10031433
  hypo

SEQ ID NO: 412154 - DNA, 83 bp, Homo sapiens; identical to SEQ ID NO: 271908
  chr18:10047642-10047725
  hypo

SEQ ID NO: 412155 - DNA, 249 bp, Homo sapiens; identical to SEQ ID NO: 271910
  chr18:10150712-10150961
  hypo

SEQ ID NO: 412156 - DNA, 98 bp, Homo sapiens; identical to SEQ ID NO: 271913
  chr18:10336858-10336956
  hypo

SEQ ID NO: 412157 - DNA, 191 bp, Homo sapiens; identical to SEQ ID NO: 218425
  chr18:10474225-10474416
  hypo

SEQ ID NO: 412158 - DNA, 259 bp, Homo sapiens; identical to SEQ ID NO: 323929
  chr18:10474462-10474721
  hypo

SEQ ID NO: 412159 - DNA, 64 bp, Homo sapiens; identical to SEQ ID NO: 271918
  chr18:10538267-10538331
  hypo

SEQ ID NO: 412160 - DNA, 40 bp, Homo sapiens; identical to SEQ ID NO: 271925
  chr18:11534215-11534255
  hypo

SEQ ID NO: 412161 - DNA, 45 bp, Homo sapiens; identical to SEQ ID NO: 271927
  chr18:11589694-11589739
  hypo

SEQ ID NO: 412162 - DNA, 36 bp, Homo sapiens; identical to SEQ ID NO: 271931
  chr18:11929334-11929370
  hypo

SEQ ID NO: 412163 - DNA, 213 bp, Homo sapiens; identical to SEQ ID NO: 218432
  chr18:12093611-12093824
  hypo

SEQ ID NO: 412164 - DNA, 696 bp, Homo sapiens; identical to SEQ ID NO: 218434
  chr18:12279587-12280283
  hypo

SEQ ID NO: 412165 - DNA, 681 bp, Homo sapiens; identical to SEQ ID NO: 384702
  chr18:12308216-12308897
  hypo

SEQ ID NO: 412166 - DNA, 125 bp, Homo sapiens; identical to SEQ ID NO: 384703
  chr18:12308927-12309052
  hypo

SEQ ID NO: 412167 - DNA, 98 bp, Homo sapiens; identical to SEQ ID NO: 218443
  chr18:12431471-12431569
  hypo

SEQ ID NO: 412168 - DNA, 317 bp, Homo sapiens; identical to SEQ ID NO: 218444
  chr18:12432919-12433236
  hypo

SEQ ID NO: 412169 - DNA, 161 bp, Homo sapiens; identical to SEQ ID NO: 271949
  chr18:12460294-12460455
  hypo

SEQ ID NO: 412170 - DNA, 33 bp, Homo sapiens; identical to SEQ ID NO: 271951
  chr18:12701659-12701692
  hypo

SEQ ID NO: 412171 - DNA, 39 bp, Homo sapiens; identical to SEQ ID NO: 271955
  chr18:12856102-12856141
  hypo

SEQ ID NO: 412172 - DNA, 37 bp, Homo sapiens; identical to SEQ ID NO: 218446
  chr18:12949141-12949178
  hypo

SEQ ID NO: 412173 - DNA, 101 bp, Homo sapiens; identical to SEQ ID NO: 271963
  chr18:13181960-13182061
  hypo

SEQ ID NO: 412174 - DNA, 89 bp, Homo sapiens; identical to SEQ ID NO: 271970
  chr18:13257121-13257210
  hypo

SEQ ID NO: 412175 - DNA, 140 bp, Homo sapiens; identical to SEQ ID NO: 271973
  chr18:13311612-13311752
  hypo

SEQ ID NO: 412176 - DNA, 130 bp, Homo sapiens; identical to SEQ ID NO: 271976
  chr18:13393100-13393230
  hypo

SEQ ID NO: 412177 - DNA, 279 bp, Homo sapiens; identical to SEQ ID NO: 271978
  chr18:13404255-13404534
  hypo

SEQ ID NO: 412178 - DNA, 77 bp, Homo sapiens; identical to SEQ ID NO: 271980
  chr18:13412928-13413005
  hypo

SEQ ID NO: 412179 - DNA, 125 bp, Homo sapiens; identical to SEQ ID NO: 324006
  chr18:13460975-13461100
  hypo

SEQ ID NO: 412180 - DNA, 98 bp, Homo sapiens; identical to SEQ ID NO: 324007
  chr18:13461383-13461481
  hypo

SEQ ID NO: 412181 - DNA, 42 bp, Homo sapiens; identical to SEQ ID NO: 271988
  chr18:13462966-13463008
  hypo

SEQ ID NO: 412182 - DNA, 43 bp, Homo sapiens; identical to SEQ ID NO: 324010
  chr18:13477929-13477972
  hypo

SEQ ID NO: 412183 - DNA, 60 bp, Homo sapiens; identical to SEQ ID NO: 271997
  chr18:13503353-13503413
  hypo

SEQ ID NO: 412184 - DNA, 44 bp, Homo sapiens; identical to SEQ ID NO: 271998
  chr18:13505525-13505569
  hypo

SEQ ID NO: 412185 - DNA, 147 bp, Homo sapiens; identical to SEQ ID NO: 272001
  chr18:13519311-13519458
  hypo

SEQ ID NO: 412186 - DNA, 202 bp, Homo sapiens; identical to SEQ ID NO: 218463
  chr18:13525325-13525527
  hypo

SEQ ID NO: 412187 - DNA, 269 bp, Homo sapiens; identical to SEQ ID NO: 218464
  chr18:13532099-13532368
  hypo

SEQ ID NO: 412188 - DNA, 35 bp, Homo sapiens; identical to SEQ ID NO: 272006
  chr18:13571915-13571950
  hypo

SEQ ID NO: 412189 - DNA, 88 bp, Homo sapiens; identical to SEQ ID NO: 272015
  chr18:18997462-18997550
  hypo

SEQ ID NO: 412190 - DNA, 59 bp, Homo sapiens; identical to SEQ ID NO: 272021
  chr18:19769948-19770007
  hypo

SEQ ID NO: 412191 - DNA, 34 bp, Homo sapiens; identical to SEQ ID NO: 218468
  chr18:19778302-19778336
  hypo

SEQ ID NO: 412192 - DNA, 132 bp, Homo sapiens; identical to SEQ ID NO: 272024
  chr18:20380480-20380612
  hypo

SEQ ID NO: 412193 - DNA, 219 bp, Homo sapiens; identical to SEQ ID NO: 218475
  chr18:20790547-20790766
  hypo

SEQ ID NO: 412194 - DNA, 260 bp, Homo sapiens; identical to SEQ ID NO: 218476
  chr18:20800425-20800685
  hypo

SEQ ID NO: 412195 - DNA, 256 bp, Homo sapiens; identical to SEQ ID NO: 272031
  chr18:20853662-20853918
  hypo

SEQ ID NO: 412196 - DNA, 47 bp, Homo sapiens; identical to SEQ ID NO: 272032
  chr18:20882093-20882140
  hypo

SEQ ID NO: 412197 - DNA, 42 bp, Homo sapiens; identical to SEQ ID NO: 218478
  chr18:20910923-20910965
  hypo

SEQ ID NO: 412198 - DNA, 43 bp, Homo sapiens; identical to SEQ ID NO: 272035
  chr18:21042374-21042417
  hypo

SEQ ID NO: 412199 - DNA, 155 bp, Homo sapiens; identical to SEQ ID NO: 272036
  chr18:21104196-21104351
  hypo

SEQ ID NO: 412200 - DNA, 48 bp, Homo sapiens; identical to SEQ ID NO: 218480
  chr18:21164538-21164586
  hypo

SEQ ID NO: 412201 - DNA, 389 bp, Homo sapiens; identical to SEQ ID NO: 389559
  chr18:21242427-21242816
  hypo

SEQ ID NO: 412202 - DNA, 154 bp, Homo sapiens; identical to SEQ ID NO: 272043
  chr18:21508086-21508240
  hypo

SEQ ID NO: 412203 - DNA, 116 bp, Homo sapiens; identical to SEQ ID NO: 218482
  chr18:21849311-21849427
  hypo

SEQ ID NO: 412204 - DNA, 204 bp, Homo sapiens; identical to SEQ ID NO: 272048
  chr18:22098635-22098839
  hypo

SEQ ID NO: 412205 - DNA, 32 bp, Homo sapiens; identical to SEQ ID NO: 272049
  chr18:22552213-22552245
  hypo

SEQ ID NO: 412206 - DNA, 186 bp, Homo sapiens; identical to SEQ ID NO: 272050
  chr18:22597055-22597241
  hypo

SEQ ID NO: 412207 - DNA, 105 bp, Homo sapiens; identical to SEQ ID NO: 225614
  chr18:22653839-22653944
  hypo

SEQ ID NO: 412208 - DNA, 74 bp, Homo sapiens; identical to SEQ ID NO: 272056
  chr18:22787366-22787440
  hypo

SEQ ID NO: 412209 - DNA, 418 bp, Homo sapiens; identical to SEQ ID NO: 272058
  chr18:22806990-22807408
  hypo

SEQ ID NO: 412210 - DNA, 154 bp, Homo sapiens; identical to SEQ ID NO: 218486
  chr18:23652341-23652495
  hypo

SEQ ID NO: 412211 - DNA, 32 bp, Homo sapiens; identical to SEQ ID NO: 272062
  chr18:24409812-24409844
  hypo

SEQ ID NO: 412212 - DNA, 37 bp, Homo sapiens; identical to SEQ ID NO: 272063
  chr18:26202689-26202726
  hypo

SEQ ID NO: 412213 - DNA, 99 bp, Homo sapiens; identical to SEQ ID NO: 272065
  chr18:27932659-27932758
  hypo

SEQ ID NO: 412214 - DNA, 120 bp, Homo sapiens; identical to SEQ ID NO: 272067
  chr18:29026532-29026652
  hypo

SEQ ID NO: 412215 - DNA, 36 bp, Homo sapiens; identical to SEQ ID NO: 204939
  chr18:29265160-29265196
  hypo

SEQ ID NO: 412216 - DNA, 45 bp, Homo sapiens; identical to SEQ ID NO: 218492
  chr18:29269413-29269458
  hypo

SEQ ID NO: 412217 - DNA, 54 bp, Homo sapiens; identical to SEQ ID NO: 218493
  chr18:29293795-29293849
  hypo

SEQ ID NO: 412218 - DNA, 99 bp, Homo sapiens; identical to SEQ ID NO: 272072
  chr18:29325111-29325210
  hypo

SEQ ID NO: 412219 - DNA, 61 bp, Homo sapiens; identical to SEQ ID NO: 272073
  chr18:29366854-29366915
  hypo

SEQ ID NO: 412220 - DNA, 1425 bp, Homo sapiens; identical to SEQ ID NO: 293003
  chr18:30050221-30051646
  hypo

SEQ ID NO: 412221 - DNA, 178 bp, Homo sapiens; identical to SEQ ID NO: 55008
  chr18:31803673-31803851
  hypo

SEQ ID NO: 412222 - DNA, 240 bp, Homo sapiens; identical to SEQ ID NO: 225630
  chr18:33766971-33767211
  hypo

SEQ ID NO: 412223 - DNA, 35 bp, Homo sapiens; identical to SEQ ID NO: 272087
  chr18:34366183-34366218
  hypo

SEQ ID NO: 412224 - DNA, 47 bp, Homo sapiens; identical to SEQ ID NO: 272095
  chr18:42295260-42295307
  hypo

SEQ ID NO: 412225 - DNA, 67 bp, Homo sapiens; identical to SEQ ID NO: 204969
  chr18:42531892-42531959
  hypo

SEQ ID NO: 412226 - DNA, 192 bp, Homo sapiens; identical to SEQ ID NO: 272098
  chr18:43307167-43307359
  hypo

SEQ ID NO: 412227 - DNA, 66 bp, Homo sapiens; identical to SEQ ID NO: 272099
  chr18:43410024-43410090
  hypo

SEQ ID NO: 412228 - DNA, 32 bp, Homo sapiens; identical to SEQ ID NO: 218512
  chr18:43599472-43599504
  hypo

SEQ ID NO: 412229 - DNA, 120 bp, Homo sapiens; identical to SEQ ID NO: 218513
  chr18:43767225-43767345
  hypo

SEQ ID NO: 412230 - DNA, 336 bp, Homo sapiens; identical to SEQ ID NO: 272106
  chr18:43906510-43906846
  hypo

SEQ ID NO: 412231 - DNA, 44 bp, Homo sapiens; identical to SEQ ID NO: 218515
  chr18:44010836-44010880
  hypo

SEQ ID NO: 412232 - DNA, 34 bp, Homo sapiens; identical to SEQ ID NO: 272113
  chr18:45186646-45186680
  hypo

SEQ ID NO: 412233 - DNA, 200 bp, Homo sapiens; identical to SEQ ID NO: 272115
  chr18:45554569-45554769
  hypo

SEQ ID NO: 412234 - DNA, 194 bp, Homo sapiens; identical to SEQ ID NO: 272119
  chr18:45820419-45820613
  hypo

SEQ ID NO: 412235 - DNA, 291 bp, Homo sapiens; identical to SEQ ID NO: 272122
  chr18:46142031-46142322
  hypo

SEQ ID NO: 412236 - DNA, 46 bp, Homo sapiens; identical to SEQ ID NO: 324177
  chr18:46142352-46142398
  hypo

SEQ ID NO: 412237 - DNA, 228 bp, Homo sapiens; identical to SEQ ID NO: 272126
  chr18:46385808-46386036
  hypo

SEQ ID NO: 412238 - DNA, 49 bp, Homo sapiens; identical to SEQ ID NO: 186561
  chr18:46386611-46386660
  hypo

SEQ ID NO: 412239 - DNA, 81 bp, Homo sapiens; identical to SEQ ID NO: 272130
  chr18:46486896-46486977
  hypo

SEQ ID NO: 412240 - DNA, 104 bp, Homo sapiens; identical to SEQ ID NO: 204986
  chr18:46501913-46502017
  hypo

SEQ ID NO: 412241 - DNA, 84 bp, Homo sapiens; identical to SEQ ID NO: 272131
  chr18:46524824-46524908
  hypo

SEQ ID NO: 412242 - DNA, 255 bp, Homo sapiens; identical to SEQ ID NO: 272132
  chr18:46547227-46547482
  hypo

SEQ ID NO: 412243 - DNA, 270 bp, Homo sapiens; identical to SEQ ID NO: 218532
  chr18:48190331-48190601
  hypo

SEQ ID NO: 412244 - DNA, 158 bp, Homo sapiens; identical to SEQ ID NO: 272140
  chr18:48661656-48661814
  hypo

SEQ ID NO: 412245 - DNA, 120 bp, Homo sapiens; identical to SEQ ID NO: 218535
  chr18:48725413-48725533
  hypo

SEQ ID NO: 412246 - DNA, 31 bp, Homo sapiens; identical to SEQ ID NO: 218536
  chr18:53106926-53106957
  hypo

SEQ ID NO: 412247 - DNA, 159 bp, Homo sapiens; identical to SEQ ID NO: 272148
  chr18:53126065-53126224
  hypo

SEQ ID NO: 412248 - DNA, 40 bp, Homo sapiens; identical to SEQ ID NO: 205004
  chr18:53257761-53257801
  hypo

SEQ ID NO: 412249 - DNA, 163 bp, Homo sapiens; identical to SEQ ID NO: 218539
  chr18:54398593-54398756
  hypo

SEQ ID NO: 412250 - DNA, 53 bp, Homo sapiens; identical to SEQ ID NO: 218541
  chr18:55315834-55315887
  hypo

SEQ ID NO: 412251 - DNA, 133 bp, Homo sapiens; identical to SEQ ID NO: 218542
  chr18:55329689-55329822
  hypo

SEQ ID NO: 412252 - DNA, 110 bp, Homo sapiens; identical to SEQ ID NO: 272155
  chr18:55398780-55398890
  hypo

SEQ ID NO: 412253 - DNA, 44 bp, Homo sapiens; identical to SEQ ID NO: 218543
  chr18:55427027-55427071
  hypo

SEQ ID NO: 412254 - DNA, 187 bp, Homo sapiens; identical to SEQ ID NO: 272158
  chr18:55760789-55760976
  hypo

SEQ ID NO: 412255 - DNA, 33 bp, Homo sapiens; identical to SEQ ID NO: 272160
  chr18:55817734-55817767
  hypo

SEQ ID NO: 412256 - DNA, 55 bp, Homo sapiens; identical to SEQ ID NO: 272162
  chr18:55847725-55847780
  hypo

SEQ ID NO: 412257 - DNA, 184 bp, Homo sapiens; identical to SEQ ID NO: 272168
  chr18:55945680-55945864
  hypo

SEQ ID NO: 412258 - DNA, 173 bp, Homo sapiens; identical to SEQ ID NO: 272170
  chr18:55977131-55977304
  hypo

SEQ ID NO: 412259 - DNA, 183 bp, Homo sapiens; identical to SEQ ID NO: 324227
  chr18:55992342-55992525
  hypo

SEQ ID NO: 412260 - DNA, 136 bp, Homo sapiens; identical to SEQ ID NO: 272175
  chr18:56062044-56062180
  hypo

SEQ ID NO: 412261 - DNA, 141 bp, Homo sapiens; identical to SEQ ID NO: 272177
  chr18:56359260-56359401
  hypo

SEQ ID NO: 412262 - DNA, 136 bp, Homo sapiens; identical to SEQ ID NO: 218545
  chr18:56483782-56483918
  hypo

SEQ ID NO: 412263 - DNA, 61 bp, Homo sapiens; identical to SEQ ID NO: 272180
  chr18:56814249-56814310
  hypo

SEQ ID NO: 412264 - DNA, 83 bp, Homo sapiens; identical to SEQ ID NO: 272187
  chr18:59834319-59834402
  hypo

SEQ ID NO: 412265 - DNA, 41 bp, Homo sapiens; identical to SEQ ID NO: 218550
  chr18:60110314-60110355
  hypo

SEQ ID NO: 412266 - DNA, 180 bp, Homo sapiens; identical to SEQ ID NO: 272194
  chr18:60111709-60111889
  hypo

SEQ ID NO: 412267 - DNA, 164 bp, Homo sapiens; identical to SEQ ID NO: 218551
  chr18:60117014-60117178
  hypo

SEQ ID NO: 412268 - DNA, 157 bp, Homo sapiens; identical to SEQ ID NO: 272197
  chr18:60154518-60154675
  hypo

SEQ ID NO: 412269 - DNA, 95 bp, Homo sapiens; identical to SEQ ID NO: 225665
  chr18:60191979-60192074
  hypo

SEQ ID NO: 412270 - DNA, 146 bp, Homo sapiens; identical to SEQ ID NO: 272198
  chr18:60210294-60210440
  hypo

SEQ ID NO: 412271 - DNA, 70 bp, Homo sapiens; identical to SEQ ID NO: 218559
  chr18:60273154-60273224
  hypo

SEQ ID NO: 412272 - DNA, 90 bp, Homo sapiens; identical to SEQ ID NO: 272205
  chr18:60377413-60377503
  hypo

SEQ ID NO: 412273 - DNA, 1435 bp, Homo sapiens; identical to SEQ ID NO: 205030
  chr18:60382939-60384374
  hypo

SEQ ID NO: 412274 - DNA, 186 bp, Homo sapiens; identical to SEQ ID NO: 218561
  chr18:60523278-60523464
  hypo

SEQ ID NO: 412275 - DNA, 97 bp, Homo sapiens; identical to SEQ ID NO: 272211
  chr18:60614284-60614381
  hypo

SEQ ID NO: 412276 - DNA, 202 bp, Homo sapiens; identical to SEQ ID NO: 218564
  chr18:60645390-60645592
  hypo

SEQ ID NO: 412277 - DNA, 111 bp, Homo sapiens; identical to SEQ ID NO: 272218
  chr18:60959765-60959876
  hypo

SEQ ID NO: 412278 - DNA, 169 bp, Homo sapiens; identical to SEQ ID NO: 272220
  chr18:60992577-60992746
  hypo

SEQ ID NO: 412279 - DNA, 111 bp, Homo sapiens; identical to SEQ ID NO: 218567
  chr18:66360549-66360660
  hypo

SEQ ID NO: 412280 - DNA, 90 bp, Homo sapiens; identical to SEQ ID NO: 272226
  chr18:67985374-67985464
  hypo

SEQ ID NO: 412281 - DNA, 370 bp, Homo sapiens; identical to SEQ ID NO: 218570
  chr18:67991980-67992350
  hypo

SEQ ID NO: 412282 - DNA, 361 bp, Homo sapiens; identical to SEQ ID NO: 272229
  chr18:67992600-67992961
  hypo

SEQ ID NO: 412283 - DNA, 83 bp, Homo sapiens; identical to SEQ ID NO: 272233
  chr18:71847878-71847961
  hypo

SEQ ID NO: 412284 - DNA, 33 bp, Homo sapiens; identical to SEQ ID NO: 272235
  chr18:71874053-71874086
  hypo

SEQ ID NO: 412285 - DNA, 171 bp, Homo sapiens; identical to SEQ ID NO: 218577
  chr18:71889077-71889248
  hypo

SEQ ID NO: 412286 - DNA, 61 bp, Homo sapiens; identical to SEQ ID NO: 218579
  chr18:71983206-71983267
  hypo

SEQ ID NO: 412287 - DNA, 336 bp, Homo sapiens; identical to SEQ ID NO: 272241
  chr18:72189898-72190234
  hypo

SEQ ID NO: 412288 - DNA, 62 bp, Homo sapiens; identical to SEQ ID NO: 218582
  chr18:72344372-72344434
  hypo

SEQ ID NO: 412289 - DNA, 136 bp, Homo sapiens; identical to SEQ ID NO: 272248
  chr18:72378034-72378170
  hypo

SEQ ID NO: 412290 - DNA, 215 bp, Homo sapiens; identical to SEQ ID NO: 272249
  chr18:72543641-72543856
  hypo

SEQ ID NO: 412291 - DNA, 170 bp, Homo sapiens; identical to SEQ ID NO: 272250
  chr18:72568950-72569120
  hypo

SEQ ID NO: 412292 - DNA, 158 bp, Homo sapiens; identical to SEQ ID NO: 272251
  chr18:72604260-72604418
  hypo

SEQ ID NO: 412293 - DNA, 32 bp, Homo sapiens; identical to SEQ ID NO: 272256
  chr18:72670449-72670481
  hypo

SEQ ID NO: 412294 - DNA, 511 bp, Homo sapiens; identical to SEQ ID NO: 324329
  chr18:72844252-72844763
  hypo

SEQ ID NO: 412295 - DNA, 138 bp, Homo sapiens; identical to SEQ ID NO: 324330
  chr18:72844808-72844946
  hypo

SEQ ID NO: 412296 - DNA, 165 bp, Homo sapiens; identical to SEQ ID NO: 272264
  chr18:72914982-72915147
  hypo

SEQ ID NO: 412297 - DNA, 295 bp, Homo sapiens; identical to SEQ ID NO: 272265
  chr18:72956539-72956834
  hypo

SEQ ID NO: 412298 - DNA, 485 bp, Homo sapiens; identical to SEQ ID NO: 272266
  chr18:72960668-72961153
  hypo

SEQ ID NO: 412299 - DNA, 34 bp, Homo sapiens; identical to SEQ ID NO: 272268
  chr18:73282767-73282801
  hypo

SEQ ID NO: 412300 - DNA, 96 bp, Homo sapiens; identical to SEQ ID NO: 272270
  chr18:74065277-74065373
  hypo

SEQ ID NO: 412301 - DNA, 111 bp, Homo sapiens; identical to SEQ ID NO: 272273
  chr18:74069464-74069575
  hypo

SEQ ID NO: 412302 - DNA, 154 bp, Homo sapiens; identical to SEQ ID NO: 272281
  chr18:74093649-74093803
  hypo

SEQ ID NO: 412303 - DNA, 52 bp, Homo sapiens; identical to SEQ ID NO: 218595
  chr18:74094279-74094331
  hypo

SEQ ID NO: 412304 - DNA, 34 bp, Homo sapiens; identical to SEQ ID NO: 218597
  chr18:74113520-74113554
  hypo

SEQ ID NO: 412305 - DNA, 63 bp, Homo sapiens; identical to SEQ ID NO: 272286
  chr18:74116224-74116287
  hypo

SEQ ID NO: 412306 - DNA, 137 bp, Homo sapiens; identical to SEQ ID NO: 272290
  chr18:74128214-74128351
  hypo

SEQ ID NO: 412307 - DNA, 45 bp, Homo sapiens; identical to SEQ ID NO: 272295
  chr18:74136486-74136531
  hypo

SEQ ID NO: 412308 - DNA, 465 bp, Homo sapiens; identical to SEQ ID NO: 272298
  chr18:74143894-74144359
  hypo

SEQ ID NO: 412309 - DNA, 51 bp, Homo sapiens; identical to SEQ ID NO: 272300
  chr18:74147444-74147495
  hypo

SEQ ID NO: 412310 - DNA, 171 bp, Homo sapiens; identical to SEQ ID NO: 272303
  chr18:74149887-74150058
  hypo

SEQ ID NO: 412311 - DNA, 65 bp, Homo sapiens; identical to SEQ ID NO: 272305
  chr18:74156516-74156581
  hypo

SEQ ID NO: 412312 - DNA, 150 bp, Homo sapiens; identical to SEQ ID NO: 272316
  chr18:74260505-74260655
  hypo

SEQ ID NO: 412313 - DNA, 203 bp, Homo sapiens; identical to SEQ ID NO: 272317
  chr18:74275176-74275379
  hypo

SEQ ID NO: 412314 - DNA, 34 bp, Homo sapiens; identical to SEQ ID NO: 272318
  chr18:74299118-74299152
  hypo

SEQ ID NO: 412315 - DNA, 280 bp, Homo sapiens; identical to SEQ ID NO: 272325
  chr18:74420127-74420407
  hypo

SEQ ID NO: 412316 - DNA, 35 bp, Homo sapiens; identical to SEQ ID NO: 272326
  chr18:74420789-74420824
  hypo

SEQ ID NO: 412317 - DNA, 44 bp, Homo sapiens; identical to SEQ ID NO: 272327
  chr18:74424292-74424336
  hypo

SEQ ID NO: 412318 - DNA, 120 bp, Homo sapiens; identical to SEQ ID NO: 272329
  chr18:74443717-74443837
  hypo

SEQ ID NO: 412319 - DNA, 38 bp, Homo sapiens; identical to SEQ ID NO: 272330
  chr18:74471098-74471136
  hypo

SEQ ID NO: 412320 - DNA, 62 bp, Homo sapiens; identical to SEQ ID NO: 272338
  chr18:74627687-74627749
  hypo

SEQ ID NO: 412321 - DNA, 361 bp, Homo sapiens; identical to SEQ ID NO: 272339
  chr18:74631683-74632044
  hypo

SEQ ID NO: 412322 - DNA, 79 bp, Homo sapiens; identical to SEQ ID NO: 218623
  chr18:74633615-74633694
  hypo

SEQ ID NO: 412323 - DNA, 230 bp, Homo sapiens; identical to SEQ ID NO: 272342
  chr18:74691007-74691237
  hypo

SEQ ID NO: 412324 - DNA, 196 bp, Homo sapiens; identical to SEQ ID NO: 272345
  chr18:74720163-74720359
  hypo

SEQ ID NO: 412325 - DNA, 155 bp, Homo sapiens; identical to SEQ ID NO: 272349
  chr18:74726189-74726344
  hypo

SEQ ID NO: 412326 - DNA, 66 bp, Homo sapiens; identical to SEQ ID NO: 272350
  chr18:74726374-74726440
  hypo

SEQ ID NO: 412327 - DNA, 99 bp, Homo sapiens; identical to SEQ ID NO: 218625
  chr18:74729467-74729566
  hypo

SEQ ID NO: 412328 - DNA, 237 bp, Homo sapiens; identical to SEQ ID NO: 272353
  chr18:74731842-74732079
  hypo

SEQ ID NO: 412329 - DNA, 146 bp, Homo sapiens; identical to SEQ ID NO: 218626
  chr18:74733725-74733871
  hypo

SEQ ID NO: 412330 - DNA, 284 bp, Homo sapiens; identical to SEQ ID NO: 272355
  chr18:74734080-74734364
  hypo

SEQ ID NO: 412331 - DNA, 83 bp, Homo sapiens; identical to SEQ ID NO: 272359
  chr18:74761164-74761247
  hypo

SEQ ID NO: 412332 - DNA, 185 bp, Homo sapiens; identical to SEQ ID NO: 218630
  chr18:74763242-74763427
  hypo

SEQ ID NO: 412333 - DNA, 232 bp, Homo sapiens; identical to SEQ ID NO: 218633
  chr18:74782716-74782948
  hypo

SEQ ID NO: 412334 - DNA, 117 bp, Homo sapiens; identical to SEQ ID NO: 218635
  chr18:74806769-74806886
  hypo

SEQ ID NO: 412335 - DNA, 178 bp, Homo sapiens; identical to SEQ ID NO: 272369
  chr18:74822939-74823117
  hypo

SEQ ID NO: 412336 - DNA, 37 bp, Homo sapiens; identical to SEQ ID NO: 218637
  chr18:74841696-74841733
  hypo

SEQ ID NO: 412337 - DNA, 40 bp, Homo sapiens; identical to SEQ ID NO: 218638
  chr18:74847361-74847401
  hypo

SEQ ID NO: 412338 - DNA, 136 bp, Homo sapiens; identical to SEQ ID NO: 272375
  chr18:75087208-75087344
  hypo

SEQ ID NO: 412339 - DNA, 287 bp, Homo sapiens; identical to SEQ ID NO: 324452
  chr18:75088254-75088541
  hypo

SEQ ID NO: 412340 - DNA, 208 bp, Homo sapiens; identical to SEQ ID NO: 272377
  chr18:75120506-75120714
  hypo

SEQ ID NO: 412341 - DNA, 100 bp, Homo sapiens; identical to SEQ ID NO: 272378
  chr18:75214587-75214687
  hypo

SEQ ID NO: 412342 - DNA, 37 bp, Homo sapiens; identical to SEQ ID NO: 272382
  chr18:75361204-75361241
  hypo

SEQ ID NO: 412343 - DNA, 42 bp, Homo sapiens; identical to SEQ ID NO: 272384
  chr18:75845223-75845265
  hypo

SEQ ID NO: 412344 - DNA, 71 bp, Homo sapiens; identical to SEQ ID NO: 272386
  chr18:75957356-75957427
  hypo

SEQ ID NO: 412345 - DNA, 155 bp, Homo sapiens; identical to SEQ ID NO: 272393
  chr18:76252107-76252262
  hypo

SEQ ID NO: 412346 - DNA, 61 bp, Homo sapiens; identical to SEQ ID NO: 272396
  chr18:76437856-76437917
  hypo

SEQ ID NO: 412347 - DNA, 165 bp, Homo sapiens; identical to SEQ ID NO: 218651
  chr18:76477630-76477795
  hypo

SEQ ID NO: 412348 - DNA, 128 bp, Homo sapiens; identical to SEQ ID NO: 272401
  chr18:76491232-76491360
  hypo

SEQ ID NO: 412349 - DNA, 210 bp, Homo sapiens; identical to SEQ ID NO: 272405
  chr18:76546830-76547040
  hypo

SEQ ID NO: 412350 - DNA, 45 bp, Homo sapiens; identical to SEQ ID NO: 272420
  chr18:77143641-77143686
  hypo

SEQ ID NO: 412351 - DNA, 58 bp, Homo sapiens; identical to SEQ ID NO: 272421
  chr18:77145392-77145450
  hypo

SEQ ID NO: 412352 - DNA, 379 bp, Homo sapiens; identical to SEQ ID NO: 218663
  chr18:77166684-77167063
  hypo

SEQ ID NO: 412353 - DNA, 358 bp, Homo sapiens; identical to SEQ ID NO: 218664
  chr18:77174745-77175103
  hypo

SEQ ID NO: 412354 - DNA, 268 bp, Homo sapiens; identical to SEQ ID NO: 272427
  chr18:77185306-77185574
  hypo

SEQ ID NO: 412355 - DNA, 56 bp, Homo sapiens; identical to SEQ ID NO: 324508
  chr18:77186375-77186431
  hypo

SEQ ID NO: 412356 - DNA, 53 bp, Homo sapiens; identical to SEQ ID NO: 324509
  chr18:77186466-77186519
  hypo

SEQ ID NO: 412357 - DNA, 356 bp, Homo sapiens; identical to SEQ ID NO: 293196
  chr18:77193428-77193784
  hypo

SEQ ID NO: 412358 - DNA, 116 bp, Homo sapiens; identical to SEQ ID NO: 218667
  chr18:77194820-77194936
  hypo

SEQ ID NO: 412359 - DNA, 169 bp, Homo sapiens; identical to SEQ ID NO: 218668
  chr18:77194978-77195147
  hypo

SEQ ID NO: 412360 - DNA, 1761 bp, Homo sapiens; identical to SEQ ID NO: 218669
  chr18:77196527-77198288
  hypo

SEQ ID NO: 412361 - DNA, 1042 bp, Homo sapiens; identical to SEQ ID NO: 218670
  chr18:77199644-77200686
  hypo

SEQ ID NO: 412362 - DNA, 36 bp, Homo sapiens; identical to SEQ ID NO: 272435
  chr18:77201348-77201384
  hypo

SEQ ID NO: 412363 - DNA, 1262 bp, Homo sapiens; identical to SEQ ID NO: 218671
  chr18:77204185-77205447
  hypo

SEQ ID NO: 412364 - DNA, 157 bp, Homo sapiens; identical to SEQ ID NO: 272438
  chr18:77208090-77208247
  hypo

SEQ ID NO: 412365 - DNA, 139 bp, Homo sapiens; identical to SEQ ID NO: 272439
  chr18:77208867-77209006
  hypo

SEQ ID NO: 412366 - DNA, 927 bp, Homo sapiens; identical to SEQ ID NO: 218672
  chr18:77210976-77211903
  hypo

SEQ ID NO: 412367 - DNA, 451 bp, Homo sapiens; identical to SEQ ID NO: 272442
  chr18:77212145-77212596
  hypo

SEQ ID NO: 412368 - DNA, 458 bp, Homo sapiens; identical to SEQ ID NO: 218674
  chr18:77212957-77213415
  hypo

SEQ ID NO: 412369 - DNA, 175 bp, Homo sapiens; identical to SEQ ID NO: 218675
  chr18:77215331-77215506
  hypo

SEQ ID NO: 412370 - DNA, 253 bp, Homo sapiens; identical to SEQ ID NO: 324529
  chr18:77235786-77236039
  hypo

SEQ ID NO: 412371 - DNA, 108 bp, Homo sapiens; identical to SEQ ID NO: 272450
  chr18:77263494-77263602
  hypo

SEQ ID NO: 412372 - DNA, 189 bp, Homo sapiens; identical to SEQ ID NO: 272457
  chr18:77304066-77304255
  hypo

SEQ ID NO: 412373 - DNA, 577 bp, Homo sapiens; identical to SEQ ID NO: 324546
  chr18:77312927-77313504
  hypo

SEQ ID NO: 412374 - DNA, 41 bp, Homo sapiens; identical to SEQ ID NO: 218688
  chr18:77315948-77315989
  hypo

SEQ ID NO: 412375 - DNA, 591 bp, Homo sapiens; identical to SEQ ID NO: 272472
  chr18:77340201-77340792
  hypo

SEQ ID NO: 412376 - DNA, 150 bp, Homo sapiens; identical to SEQ ID NO: 272473
  chr18:77347862-77348012
  hypo

SEQ ID NO: 412377 - DNA, 84 bp, Homo sapiens; identical to SEQ ID NO: 218693
  chr18:77356569-77356653
  hypo

SEQ ID NO: 412378 - DNA, 74 bp, Homo sapiens; identical to SEQ ID NO: 218694
  chr18:77356683-77356757
  hypo

SEQ ID NO: 412379 - DNA, 65 bp, Homo sapiens; identical to SEQ ID NO: 272481
  chr18:77375217-77375282
  hypo

SEQ ID NO: 412380 - DNA, 103 bp, Homo sapiens; identical to SEQ ID NO: 272483
  chr18:77390502-77390605
  hypo

SEQ ID NO: 412381 - DNA, 83 bp, Homo sapiens; identical to SEQ ID NO: 218697
  chr18:77457661-77457744
  hypo

SEQ ID NO: 412382 - DNA, 260 bp, Homo sapiens; identical to SEQ ID NO: 272491
  chr18:77485494-77485754
  hypo

SEQ ID NO: 412383 - DNA, 39 bp, Homo sapiens; identical to SEQ ID NO: 272492
  chr18:77493027-77493066
  hypo

SEQ ID NO: 412384 - DNA, 212 bp, Homo sapiens; identical to SEQ ID NO: 272495
  chr18:77503023-77503235
  hypo

SEQ ID NO: 412385 - DNA, 39 bp, Homo sapiens; identical to SEQ ID NO: 272510
  chr18:77615733-77615772
  hypo

SEQ ID NO: 412386 - DNA, 367 bp, Homo sapiens; identical to SEQ ID NO: 218712
  chr18:77638243-77638610
  hypo

SEQ ID NO: 412387 - DNA, 130 bp, Homo sapiens; identical to SEQ ID NO: 272523
  chr18:77685460-77685590
  hypo

SEQ ID NO: 412388 - DNA, 158 bp, Homo sapiens; identical to SEQ ID NO: 205049
  chr18:77710773-77710931
  hypo

SEQ ID NO: 412389 - DNA, 92 bp, Homo sapiens; identical to SEQ ID NO: 272529
  chr18:77772123-77772215
  hypo

SEQ ID NO: 412390 - DNA, 135 bp, Homo sapiens; identical to SEQ ID NO: 225693
  chr18:77794468-77794603
  hypo

SEQ ID NO: 412391 - DNA, 381 bp, Homo sapiens; identical to SEQ ID NO: 272531
  chr18:77804875-77805256
  hypo

SEQ ID NO: 412392 - DNA, 38 bp, Homo sapiens; identical to SEQ ID NO: 272535
  chr18:77913923-77913961
  hypo

SEQ ID NO: 412393 - DNA, 168 bp, Homo sapiens; identical to SEQ ID NO: 218717
  chr18:77939058-77939226
  hypo

SEQ ID NO: 412394 - DNA, 193 bp, Homo sapiens; identical to SEQ ID NO: 218718
  chr18:77942205-77942398
  hypo

SEQ ID NO: 412395 - DNA, 88 bp, Homo sapiens; identical to SEQ ID NO: 272539
  chr18:77957216-77957304
  hypo

SEQ ID NO: 412396 - DNA, 185 bp, Homo sapiens; identical to SEQ ID NO: 272540
  chr18:77988259-77988444
  hypo

SEQ ID NO: 412397 - DNA, 167 bp, Homo sapiens; identical to SEQ ID NO: 272542
  chr19:327875-328042
  hypo

SEQ ID NO: 412398 - DNA, 34 bp, Homo sapiens; identical to SEQ ID NO: 272543
  chr19:369328-369362
  hypo

SEQ ID NO: 412399 - DNA, 294 bp, Homo sapiens; identical to SEQ ID NO: 272550
  chr19:416971-417265
  hypo

SEQ ID NO: 412400 - DNA, 37 bp, Homo sapiens; identical to SEQ ID NO: 218723
  chr19:434176-434213
  hypo

SEQ ID NO: 412401 - DNA, 36 bp, Homo sapiens; identical to SEQ ID NO: 272555
  chr19:434753-434789
  hypo

SEQ ID NO: 412402 - DNA, 89 bp, Homo sapiens; identical to SEQ ID NO: 324653
  chr19:436223-436312
  hypo

SEQ ID NO: 412403 - DNA, 268 bp, Homo sapiens; identical to SEQ ID NO: 324654
  chr19:436346-436614
  hypo

SEQ ID NO: 412404 - DNA, 48 bp, Homo sapiens; identical to SEQ ID NO: 324655
  chr19:436644-436692
  hypo

SEQ ID NO: 412405 - DNA, 34 bp, Homo sapiens; identical to SEQ ID NO: 272558
  chr19:449972-450006
  hypo

SEQ ID NO: 412406 - DNA, 120 bp, Homo sapiens; identical to SEQ ID NO: 272562
  chr19:477567-477687
  hypo

SEQ ID NO: 412407 - DNA, 34 bp, Homo sapiens; identical to SEQ ID NO: 272564
  chr19:484683-484717
  hypo

SEQ ID NO: 412408 - DNA, 41 bp, Homo sapiens; identical to SEQ ID NO: 205062
  chr19:507106-507147
  hypo

SEQ ID NO: 412409 - DNA, 81 bp, Homo sapiens; identical to SEQ ID NO: 218727
  chr19:536230-536311
  hypo

SEQ ID NO: 412410 - DNA, 82 bp, Homo sapiens; identical to SEQ ID NO: 272571
  chr19:540964-541046
  hypo

SEQ ID NO: 412411 - DNA, 387 bp, Homo sapiens; identical to SEQ ID NO: 272573
  chr19:542336-542723
  hypo

SEQ ID NO: 412412 - DNA, 39 bp, Homo sapiens; identical to SEQ ID NO: 272574
  chr19:546049-546088
  hypo

SEQ ID NO: 412413 - DNA, 45 bp, Homo sapiens; identical to SEQ ID NO: 272577
  chr19:559344-559389
  hypo

SEQ ID NO: 412414 - DNA, 102 bp, Homo sapiens; identical to SEQ ID NO: 324676
  chr19:559629-559731
  hypo

SEQ ID NO: 412415 - DNA, 121 bp, Homo sapiens; identical to SEQ ID NO: 324677
  chr19:559808-559929
  hypo

SEQ ID NO: 412416 - DNA, 37 bp, Homo sapiens; identical to SEQ ID NO: 272579
  chr19:561123-561160
  hypo

SEQ ID NO: 412417 - DNA, 126 bp, Homo sapiens; identical to SEQ ID NO: 272582
  chr19:585310-585436
  hypo

SEQ ID NO: 412418 - DNA, 180 bp, Homo sapiens; identical to SEQ ID NO: 324682
  chr19:592198-592378
  hypo

SEQ ID NO: 412419 - DNA, 620 bp, Homo sapiens; identical to SEQ ID NO: 218734
  chr19:619067-619687
  hypo

SEQ ID NO: 412420 - DNA, 218 bp, Homo sapiens; identical to SEQ ID NO: 324691
  chr19:624025-624243
  hypo

SEQ ID NO: 412421 - DNA, 73 bp, Homo sapiens; identical to SEQ ID NO: 324694
  chr19:635380-635453
  hypo

SEQ ID NO: 412422 - DNA, 71 bp, Homo sapiens
  chr19:638277-638348
  hypo
taataataaaataaaatcactgaactgtacagtgtaagtgggtgaattgtgtggtatatgagtgatgtttc

SEQ ID NO: 412423 - DNA, 298 bp, Homo sapiens; identical to SEQ ID NO: 95427
  chr19:647140-647438
  hypo

SEQ ID NO: 412424 - DNA, 132 bp, Homo sapiens; identical to SEQ ID NO: 293228
  chr19:680400-680532
  hypo

SEQ ID NO: 412425 - DNA, 172 bp, Homo sapiens; identical to SEQ ID NO: 218742
  chr19:731146-731318
  hypo

SEQ ID NO: 412426 - DNA, 41 bp, Homo sapiens; identical to SEQ ID NO: 272605
  chr19:741879-741920
  hypo

SEQ ID NO: 412427 - DNA, 277 bp, Homo sapiens; identical to SEQ ID NO: 272607
  chr19:746555-746832
  hypo

SEQ ID NO: 412428 - DNA, 90 bp, Homo sapiens; identical to SEQ ID NO: 218745
  chr19:748210-748300
  hypo

SEQ ID NO: 412429 - DNA, 33 bp, Homo sapiens; identical to SEQ ID NO: 272610
  chr19:754570-754603
  hypo

SEQ ID NO: 412430 - DNA, 56 bp, Homo sapiens; identical to SEQ ID NO: 272612
  chr19:762948-763004
  hypo

SEQ ID NO: 412431 - DNA, 62 bp, Homo sapiens; identical to SEQ ID NO: 272615
  chr19:807308-807370
  hypo

SEQ ID NO: 412432 - DNA, 319 bp, Homo sapiens; identical to SEQ ID NO: 272616
  chr19:813011-813330
  hypo

SEQ ID NO: 412433 - DNA, 311 bp, Homo sapiens; identical to SEQ ID NO: 324725
  chr19:868909-869220
  hypo

SEQ ID NO: 412434 - DNA, 71 bp, Homo sapiens; identical to SEQ ID NO: 218751
  chr19:869266-869337
  hypo

SEQ ID NO: 412435 - DNA, 92 bp, Homo sapiens; identical to SEQ ID NO: 272624
  chr19:882615-882707
  hypo

SEQ ID NO: 412436 - DNA, 33 bp, Homo sapiens; identical to SEQ ID NO: 272630
  chr19:927379-927412
  hypo

SEQ ID NO: 412437 - DNA, 50 bp, Homo sapiens; identical to SEQ ID NO: 272631
  chr19:927524-927574
  hypo

SEQ ID NO: 412438 - DNA, 329 bp, Homo sapiens; identical to SEQ ID NO: 218760
  chr19:932112-932441
  hypo

SEQ ID NO: 412439 - DNA, 77 bp, Homo sapiens; identical to SEQ ID NO: 218766
  chr19:944821-944898
  hypo

SEQ ID NO: 412440 - DNA, 85 bp, Homo sapiens; identical to SEQ ID NO: 272645
  chr19:959193-959278
  hypo

SEQ ID NO: 412441 - DNA, 48 bp, Homo sapiens; identical to SEQ ID NO: 272647
  chr19:962810-962858
  hypo

SEQ ID NO: 412442 - DNA, 313 bp, Homo sapiens; identical to SEQ ID NO: 272648
  chr19:962888-963201
  hypo

SEQ ID NO: 412443 - DNA, 257 bp, Homo sapiens; identical to SEQ ID NO: 272650
  chr19:968535-968792
  hypo

SEQ ID NO: 412444 - DNA, 57 bp, Homo sapiens; identical to SEQ ID NO: 272654
  chr19:1004461-1004518
  hypo

SEQ ID NO: 412445 - DNA, 370 bp, Homo sapiens; identical to SEQ ID NO: 272657
  chr19:1009749-1010119
  hypo

SEQ ID NO: 412446 - DNA, 173 bp, Homo sapiens; identical to SEQ ID NO: 272658
  chr19:1010992-1011165
  hypo

SEQ ID NO: 412447 - DNA, 89 bp, Homo sapiens; identical to SEQ ID NO: 218777
  chr19:1047747-1047836
  hypo

SEQ ID NO: 412448 - DNA, 212 bp, Homo sapiens; identical to SEQ ID NO: 272667
  chr19:1050963-1051175
  hypo

SEQ ID NO: 412449 - DNA, 480 bp, Homo sapiens; identical to SEQ ID NO: 272670
  chr19:1077669-1078149
  hypo

SEQ ID NO: 412450 - DNA, 35 bp, Homo sapiens; identical to SEQ ID NO: 324787
  chr19:1082938-1082973
  hypo

SEQ ID NO: 412451 - DNA, 305 bp, Homo sapiens; identical to SEQ ID NO: 324788
  chr19:1083009-1083314
  hypo

SEQ ID NO: 412452 - DNA, 43 bp, Homo sapiens; identical to SEQ ID NO: 272674
  chr19:1089505-1089548
  hypo

SEQ ID NO: 412453 - DNA, 126 bp, Homo sapiens; identical to SEQ ID NO: 324792
  chr19:1105727-1105853
  hypo

SEQ ID NO: 412454 - DNA, 516 bp, Homo sapiens
  chr19:1108138-1108654
  hypo
accttggccctgctccccaccgctgctcctaggggagaaacggtccctgtgtcttggggcatgtttcgcctaaaggcgtgtcagagaggagcctgggcgccggggaagggtgggctgaactggatcacgctctgccgctcgggaccaccgcccgccgcgccccccgcccccgcgccctcccccagcgcgccctcggagggcggccccgcgtgcagcgagcgcagcatgtcctccagcacctccttgaagttgatgtcgcagccctggtgcgcgagggccgcagggtcggcctgggcgtcgggggtgcccagcggcacgacgccggggccggcgtccagggacagcggcgccgggaaagagaagtgcgggggcggcgggaaggcctcggccggggggctgtaggtgaggtccagcacctctccggggccgcaaggcagcgccagcgggcgcggggcgggcggggcggggcagcccagggcgggcgcctgcctgcgcttcacgtccgcatccatcagc

SEQ ID NO: 412455 - DNA, 184 bp, Homo sapiens; identical to SEQ ID NO: 272678
  chr19:1110422-1110606
  hypo

SEQ ID NO: 412456 - DNA, 311 bp, Homo sapiens; identical to SEQ ID NO: 218785
  chr19:1117275-1117586
  hypo

SEQ ID NO: 412457 - DNA, 221 bp, Homo sapiens; identical to SEQ ID NO: 272683
  chr19:1133596-1133817
  hypo

SEQ ID NO: 412458 - DNA, 670 bp, Homo sapiens; identical to SEQ ID NO: 324805
  chr19:1169515-1170185
  hypo

SEQ ID NO: 412459 - DNA, 33 bp, Homo sapiens; identical to SEQ ID NO: 218791
  chr19:1170230-1170263
  hypo

SEQ ID NO: 412460 - DNA, 225 bp, Homo sapiens; identical to SEQ ID NO: 272691
  chr19:1172305-1172530
  hypo

SEQ ID NO: 412461 - DNA, 33 bp, Homo sapiens; identical to SEQ ID NO: 225706
  chr19:1173617-1173650
  hypo

SEQ ID NO: 412462 - DNA, 267 bp, Homo sapiens; identical to SEQ ID NO: 218795
  chr19:1178810-1179077
  hypo

SEQ ID NO: 412463 - DNA, 76 bp, Homo sapiens; identical to SEQ ID NO: 218797
  chr19:1213519-1213595
  hypo

SEQ ID NO: 412464 - DNA, 36 bp, Homo sapiens; identical to SEQ ID NO: 272706
  chr19:1277515-1277551
  hypo

SEQ ID NO: 412465 - DNA, 180 bp, Homo sapiens; identical to SEQ ID NO: 272712
  chr19:1304765-1304945
  hypo

SEQ ID NO: 412466 - DNA, 188 bp, Homo sapiens; identical to SEQ ID NO: 272714
  chr19:1310928-1311116
  hypo

SEQ ID NO: 412467 - DNA, 268 bp, Homo sapiens; identical to SEQ ID NO: 218809
  chr19:1360025-1360293
  hypo

SEQ ID NO: 412468 - DNA, 453 bp, Homo sapiens; identical to SEQ ID NO: 272725
  chr19:1386825-1387278
  hypo

SEQ ID NO: 412469 - DNA, 358 bp, Homo sapiens; identical to SEQ ID NO: 272726
  chr19:1388331-1388689
  hypo

SEQ ID NO: 412470 - DNA, 47 bp, Homo sapiens; identical to SEQ ID NO: 293254
  chr19:1401653-1401700
  hypo

SEQ ID NO: 412471 - DNA, 161 bp, Homo sapiens; identical to SEQ ID NO: 272729
  chr19:1416664-1416825
  hypo

SEQ ID NO: 412472 - DNA, 195 bp, Homo sapiens; identical to SEQ ID NO: 272730
  chr19:1423006-1423201
  hypo

SEQ ID NO: 412473 - DNA, 413 bp, Homo sapiens; identical to SEQ ID NO: 272733
  chr19:1425396-1425809
  hypo

SEQ ID NO: 412474 - DNA, 668 bp, Homo sapiens; identical to SEQ ID NO: 272738
  chr19:1482910-1483578
  hypo

SEQ ID NO: 412475 - DNA, 183 bp, Homo sapiens; identical to SEQ ID NO: 205082
  chr19:1546217-1546400
  hypo

SEQ ID NO: 412476 - DNA, 33 bp, Homo sapiens; identical to SEQ ID NO: 218819
  chr19:1555127-1555160
  hypo

SEQ ID NO: 412477 - DNA, 342 bp, Homo sapiens; identical to SEQ ID NO: 324875
  chr19:1578503-1578845
  hypo

SEQ ID NO: 412478 - DNA, 68 bp, Homo sapiens; identical to SEQ ID NO: 218821
  chr19:1579338-1579406
  hypo

SEQ ID NO: 412479 - DNA, 165 bp, Homo sapiens; identical to SEQ ID NO: 272749
  chr19:1612194-1612359
  hypo

SEQ ID NO: 412480 - DNA, 170 bp, Homo sapiens; identical to SEQ ID NO: 218822
  chr19:1612624-1612794
  hypo

SEQ ID NO: 412481 - DNA, 391 bp, Homo sapiens; identical to SEQ ID NO: 272752
  chr19:1638548-1638939
  hypo

SEQ ID NO: 412482 - DNA, 517 bp, Homo sapiens; identical to SEQ ID NO: 272763
  chr19:1815903-1816420
  hypo

SEQ ID NO: 412483 - DNA, 175 bp, Homo sapiens; identical to SEQ ID NO: 218831
  chr19:1822372-1822547
  hypo

SEQ ID NO: 412484 - DNA, 238 bp, Homo sapiens; identical to SEQ ID NO: 272766
  chr19:1827067-1827305
  hypo

SEQ ID NO: 412485 - DNA, 170 bp, Homo sapiens; identical to SEQ ID NO: 293307
  chr19:1876315-1876485
  hypo

SEQ ID NO: 412486 - DNA, 156 bp, Homo sapiens; identical to SEQ ID NO: 130373
  chr19:1876538-1876694
  hypo

SEQ ID NO: 412487 - DNA, 321 bp, Homo sapiens
  chr19:1913105-1913426
  hypo
ggggtgctggaggagcagtgccgctggctggaccccgacacgtaggcgccgccctcctgcctccggacccttcccgctcccggccgtggggcgcccctcctggacttccgggcctcgatttcttccgcacaagcctgaccgtggatttcagggacacataccgcctccagcggggagcacgggtgctgccttccgtgcggatcgagctttcctggactcggtcattggggccaccccgtgccagcggtgcccttctgcggccgcccttgctgcgtttgtgtcccctctgtctcgcgggccgggaaactgctctgatgggaa

SEQ ID NO: 412488 - DNA, 92 bp, Homo sapiens; identical to SEQ ID NO: 218839
  chr19:1920122-1920214
  hypo

SEQ ID NO: 412489 - DNA, 799 bp, Homo sapiens; identical to SEQ ID NO: 272775
  chr19:1920872-1921671
  hypo

SEQ ID NO: 412490 - DNA, 182 bp, Homo sapiens; identical to SEQ ID NO: 272779
  chr19:1970824-1971006
  hypo

SEQ ID NO: 412491 - DNA, 283 bp, Homo sapiens; identical to SEQ ID NO: 272782
  chr19:1979736-1980019
  hypo

SEQ ID NO: 412492 - DNA, 268 bp, Homo sapiens; identical to SEQ ID NO: 218846
  chr19:1999991-2000259
  hypo

SEQ ID NO: 412493 - DNA, 247 bp, Homo sapiens; identical to SEQ ID NO: 272792
  chr19:2046071-2046318
  hypo

SEQ ID NO: 412494 - DNA, 107 bp, Homo sapiens; identical to SEQ ID NO: 272797
  chr19:2113981-2114088
  hypo

SEQ ID NO: 412495 - DNA, 114 bp, Homo sapiens; identical to SEQ ID NO: 272798
  chr19:2115182-2115296
  hypo

SEQ ID NO: 412496 - DNA, 264 bp, Homo sapiens; identical to SEQ ID NO: 272799
  chr19:2116558-2116822
  hypo

SEQ ID NO: 412497 - DNA, 31 bp, Homo sapiens; identical to SEQ ID NO: 218852
  chr19:2136920-2136951
  hypo

SEQ ID NO: 412498 - DNA, 200 bp, Homo sapiens; identical to SEQ ID NO: 218854
  chr19:2148550-2148750
  hypo

SEQ ID NO: 412499 - DNA, 31 bp, Homo sapiens; identical to SEQ ID NO: 218855
  chr19:2160536-2160567
  hypo

SEQ ID NO: 412500 - DNA, 206 bp, Homo sapiens; identical to SEQ ID NO: 389612
  chr19:2168903-2169109
  hypo

SEQ ID NO: 412501 - DNA, 315 bp, Homo sapiens; identical to SEQ ID NO: 272806
  chr19:2176355-2176670
  hypo

SEQ ID NO: 412502 - DNA, 58 bp, Homo sapiens; identical to SEQ ID NO: 324950
  chr19:2191533-2191591
  hypo

SEQ ID NO: 412503 - DNA, 95 bp, Homo sapiens; identical to SEQ ID NO: 324951
  chr19:2191691-2191786
  hypo

SEQ ID NO: 412504 - DNA, 210 bp, Homo sapiens; identical to SEQ ID NO: 324954
  chr19:2214155-2214365
  hypo

SEQ ID NO: 412505 - DNA, 576 bp, Homo sapiens; identical to SEQ ID NO: 218861
  chr19:2216069-2216645
  hypo

SEQ ID NO: 412506 - DNA, 192 bp, Homo sapiens; identical to SEQ ID NO: 272817
  chr19:2229560-2229752
  hypo

SEQ ID NO: 412507 - DNA, 80 bp, Homo sapiens; identical to SEQ ID NO: 218864
  chr19:2243435-2243515
  hypo

SEQ ID NO: 412508 - DNA, 484 bp, Homo sapiens; identical to SEQ ID NO: 218865
  chr19:2243571-2244055
  hypo

SEQ ID NO: 412509 - DNA, 268 bp, Homo sapiens; identical to SEQ ID NO: 272822
  chr19:2255405-2255673
  hypo

SEQ ID NO: 412510 - DNA, 205 bp, Homo sapiens; identical to SEQ ID NO: 272824
  chr19:2278466-2278671
  hypo

SEQ ID NO: 412511 - DNA, 157 bp, Homo sapiens; identical to SEQ ID NO: 218871
  chr19:2321612-2321769
  hypo

SEQ ID NO: 412512 - DNA, 112 bp, Homo sapiens; identical to SEQ ID NO: 324975
  chr19:2331161-2331273
  hypo

SEQ ID NO: 412513 - DNA, 62 bp, Homo sapiens; identical to SEQ ID NO: 324976
  chr19:2331443-2331505
  hypo

SEQ ID NO: 412514 - DNA, 175 bp, Homo sapiens; identical to SEQ ID NO: 272828
  chr19:2334601-2334776
  hypo

SEQ ID NO: 412515 - DNA, 270 bp, Homo sapiens; identical to SEQ ID NO: 324979
  chr19:2358667-2358937
  hypo

SEQ ID NO: 412516 - DNA, 85 bp, Homo sapiens; identical to SEQ ID NO: 272834
  chr19:2399106-2399191
  hypo

SEQ ID NO: 412517 - DNA, 189 bp, Homo sapiens; identical to SEQ ID NO: 272835
  chr19:2408350-2408539
  hypo

SEQ ID NO: 412518 - DNA, 173 bp, Homo sapiens; identical to SEQ ID NO: 218876
  chr19:2441909-2442082
  hypo

SEQ ID NO: 412519 - DNA, 40 bp, Homo sapiens; identical to SEQ ID NO: 272840
  chr19:2509906-2509946
  hypo

SEQ ID NO: 412520 - DNA, 58 bp, Homo sapiens; identical to SEQ ID NO: 218883
  chr19:2683833-2683891
  hypo

SEQ ID NO: 412521 - DNA, 76 bp, Homo sapiens; identical to SEQ ID NO: 272849
  chr19:2733948-2734024
  hypo

SEQ ID NO: 412522 - DNA, 181 bp, Homo sapiens; identical to SEQ ID NO: 272852
  chr19:2761827-2762008
  hypo

SEQ ID NO: 412523 - DNA, 164 bp, Homo sapiens; identical to SEQ ID NO: 272853
  chr19:2789345-2789509
  hypo

SEQ ID NO: 412524 - DNA, 87 bp, Homo sapiens; identical to SEQ ID NO: 272857
  chr19:2881140-2881227
  hypo

SEQ ID NO: 412525 - DNA, 159 bp, Homo sapiens; identical to SEQ ID NO: 325009
  chr19:2899803-2899962
  hypo

SEQ ID NO: 412526 - DNA, 37 bp, Homo sapiens; identical to SEQ ID NO: 218889
  chr19:2908411-2908448
  hypo

SEQ ID NO: 412527 - DNA, 69 bp, Homo sapiens; identical to SEQ ID NO: 218894
  chr19:2941878-2941947
  hypo

SEQ ID NO: 412528 - DNA, 438 bp, Homo sapiens; identical to SEQ ID NO: 400504
  chr19:2944614-2945052
  hypo

SEQ ID NO: 412529 - DNA, 632 bp, Homo sapiens; identical to SEQ ID NO: 205109
  chr19:2950418-2951050
  hypo

SEQ ID NO: 412530 - DNA, 208 bp, Homo sapiens; identical to SEQ ID NO: 272867
  chr19:2956972-2957180
  hypo

SEQ ID NO: 412531 - DNA, 141 bp, Homo sapiens; identical to SEQ ID NO: 205110
  chr19:2977372-2977513
  hypo

SEQ ID NO: 412532 - DNA, 92 bp, Homo sapiens; identical to SEQ ID NO: 272868
  chr19:2995961-2996053
  hypo

SEQ ID NO: 412533 - DNA, 61 bp, Homo sapiens; identical to SEQ ID NO: 218898
  chr19:2996848-2996909
  hypo

SEQ ID NO: 412534 - DNA, 92 bp, Homo sapiens; identical to SEQ ID NO: 272871
  chr19:3006699-3006791
  hypo

SEQ ID NO: 412535 - DNA, 143 bp, Homo sapiens; identical to SEQ ID NO: 272872
  chr19:3053351-3053494
  hypo

SEQ ID NO: 412536 - DNA, 289 bp, Homo sapiens; identical to SEQ ID NO: 272875
  chr19:3056309-3056598
  hypo

SEQ ID NO: 412537 - DNA, 87 bp, Homo sapiens; identical to SEQ ID NO: 205112
  chr19:3094304-3094391
  hypo

SEQ ID NO: 412538 - DNA, 143 bp, Homo sapiens; identical to SEQ ID NO: 225731
  chr19:3094777-3094920
  hypo

SEQ ID NO: 412539 - DNA, 340 bp, Homo sapiens; identical to SEQ ID NO: 218904
  chr19:3113301-3113641
  hypo

SEQ ID NO: 412540 - DNA, 140 bp, Homo sapiens; identical to SEQ ID NO: 272882
  chr19:3135020-3135160
  hypo

SEQ ID NO: 412541 - DNA, 670 bp, Homo sapiens; identical to SEQ ID NO: 272883
  chr19:3148406-3149076
  hypo

SEQ ID NO: 412542 - DNA, 52 bp, Homo sapiens; identical to SEQ ID NO: 272884
  chr19:3151442-3151494
  hypo

SEQ ID NO: 412543 - DNA, 210 bp, Homo sapiens; identical to SEQ ID NO: 218909
  chr19:3155758-3155968
  hypo

SEQ ID NO: 412544 - DNA, 39 bp, Homo sapiens; identical to SEQ ID NO: 272887
  chr19:3170964-3171003
  hypo

SEQ ID NO: 412545 - DNA, 565 bp, Homo sapiens; identical to SEQ ID NO: 272888
  chr19:3196028-3196593
  hypo

SEQ ID NO: 412546 - DNA, 103 bp, Homo sapiens; identical to SEQ ID NO: 218912
  chr19:3296495-3296598
  hypo

SEQ ID NO: 412547 - DNA, 141 bp, Homo sapiens; identical to SEQ ID NO: 325050
  chr19:3296765-3296906
  hypo

SEQ ID NO: 412548 - DNA, 749 bp, Homo sapiens; identical to SEQ ID NO: 272894
  chr19:3381393-3382142
  hypo

SEQ ID NO: 412549 - DNA, 90 bp, Homo sapiens; identical to SEQ ID NO: 218916
  chr19:3449010-3449100
  hypo

SEQ ID NO: 412550 - DNA, 32 bp, Homo sapiens; identical to SEQ ID NO: 272899
  chr19:3453421-3453453
  hypo

SEQ ID NO: 412551 - DNA, 157 bp, Homo sapiens; identical to SEQ ID NO: 218917
  chr19:3456283-3456440
  hypo

SEQ ID NO: 412552 - DNA, 139 bp, Homo sapiens; identical to SEQ ID NO: 218918
  chr19:3464751-3464890
  hypo

SEQ ID NO: 412553 - DNA, 83 bp, Homo sapiens; identical to SEQ ID NO: 272905
  chr19:3494337-3494420
  hypo

SEQ ID NO: 412554 - DNA, 104 bp, Homo sapiens; identical to SEQ ID NO: 272907
  chr19:3494900-3495004
  hypo

SEQ ID NO: 412555 - DNA, 69 bp, Homo sapiens; identical to SEQ ID NO: 272908
  chr19:3509503-3509572
  hypo

SEQ ID NO: 412556 - DNA, 92 bp, Homo sapiens; identical to SEQ ID NO: 272909
  chr19:3522932-3523024
  hypo

SEQ ID NO: 412557 - DNA, 381 bp, Homo sapiens; identical to SEQ ID NO: 218921
  chr19:3531590-3531971
  hypo

SEQ ID NO: 412558 - DNA, 209 bp, Homo sapiens; identical to SEQ ID NO: 218923
  chr19:3577496-3577705
  hypo

SEQ ID NO: 412559 - DNA, 269 bp, Homo sapiens; identical to SEQ ID NO: 293353
  chr19:3585428-3585697
  hypo

SEQ ID NO: 412560 - DNA, 489 bp, Homo sapiens; identical to SEQ ID NO: 225737
  chr19:3606743-3607232
  hypo

SEQ ID NO: 412561 - DNA, 123 bp, Homo sapiens; identical to SEQ ID NO: 272920
  chr19:3624529-3624652
  hypo

SEQ ID NO: 412562 - DNA, 122 bp, Homo sapiens; identical to SEQ ID NO: 272921
  chr19:3630283-3630405
  hypo

SEQ ID NO: 412563 - DNA, 163 bp, Homo sapiens; identical to SEQ ID NO: 218927
  chr19:3638707-3638870
  hypo

SEQ ID NO: 412564 - DNA, 133 bp, Homo sapiens; identical to SEQ ID NO: 272923
  chr19:3642943-3643076
  hypo

SEQ ID NO: 412565 - DNA, 72 bp, Homo sapiens; identical to SEQ ID NO: 293357
  chr19:3671894-3671966
  hypo

SEQ ID NO: 412566 - DNA, 56 bp, Homo sapiens; identical to SEQ ID NO: 130472
  chr19:3672066-3672122
  hypo

SEQ ID NO: 412567 - DNA, 192 bp, Homo sapiens; identical to SEQ ID NO: 272928
  chr19:3676226-3676418
  hypo

SEQ ID NO: 412568 - DNA, 160 bp, Homo sapiens; identical to SEQ ID NO: 272933
  chr19:3728587-3728747
  hypo

SEQ ID NO: 412569 - DNA, 42 bp, Homo sapiens; identical to SEQ ID NO: 218936
  chr19:3754228-3754270
  hypo

SEQ ID NO: 412570 - DNA, 141 bp, Homo sapiens; identical to SEQ ID NO: 272941
  chr19:3771587-3771728
  hypo

SEQ ID NO: 412571 - DNA, 39 bp, Homo sapiens; identical to SEQ ID NO: 272945
  chr19:3807698-3807737
  hypo

SEQ ID NO: 412572 - DNA, 303 bp, Homo sapiens; identical to SEQ ID NO: 272946
  chr19:3816598-3816901
  hypo

SEQ ID NO: 412573 - DNA, 229 bp, Homo sapiens; identical to SEQ ID NO: 325117
  chr19:3827530-3827759
  hypo

SEQ ID NO: 412574 - DNA, 480 bp, Homo sapiens; identical to SEQ ID NO: 325118
  chr19:3855704-3856184
  hypo

SEQ ID NO: 412575 - DNA, 36 bp, Homo sapiens; identical to SEQ ID NO: 325119
  chr19:3856216-3856252
  hypo

SEQ ID NO: 412576 - DNA, 76 bp, Homo sapiens; identical to SEQ ID NO: 272956
  chr19:3979328-3979404
  hypo

SEQ ID NO: 412577 - DNA, 459 bp, Homo sapiens; identical to SEQ ID NO: 325129
  chr19:3982274-3982733
  hypo

SEQ ID NO: 412578 - DNA, 99 bp, Homo sapiens; identical to SEQ ID NO: 325130
  chr19:3983095-3983194
  hypo

SEQ ID NO: 412579 - DNA, 283 bp, Homo sapiens; identical to SEQ ID NO: 272963
  chr19:4033314-4033597
  hypo

SEQ ID NO: 412580 - DNA, 369 bp, Homo sapiens; identical to SEQ ID NO: 272965
  chr19:4037867-4038236
  hypo

SEQ ID NO: 412581 - DNA, 61 bp, Homo sapiens; identical to SEQ ID NO: 272966
  chr19:4042780-4042841
  hypo

SEQ ID NO: 412582 - DNA, 39 bp, Homo sapiens; identical to SEQ ID NO: 325141
  chr19:4044933-4044972
  hypo

SEQ ID NO: 412583 - DNA, 63 bp, Homo sapiens; identical to SEQ ID NO: 325142
  chr19:4045002-4045065
  hypo

SEQ ID NO: 412584 - DNA, 47 bp, Homo sapiens; identical to SEQ ID NO: 218954
  chr19:4047771-4047818
  hypo

SEQ ID NO: 412585 - DNA, 45 bp, Homo sapiens; identical to SEQ ID NO: 325145
  chr19:4050362-4050407
  hypo

SEQ ID NO: 412586 - DNA, 236 bp, Homo sapiens; identical to SEQ ID NO: 272975
  chr19:4062303-4062539
  hypo

SEQ ID NO: 412587 - DNA, 39 bp, Homo sapiens; identical to SEQ ID NO: 218961
  chr19:4093667-4093706
  hypo

SEQ ID NO: 412588 - DNA, 240 bp, Homo sapiens; identical to SEQ ID NO: 272979
  chr19:4116487-4116727
  hypo

SEQ ID NO: 412589 - DNA, 143 bp, Homo sapiens; identical to SEQ ID NO: 272981
  chr19:4168249-4168392
  hypo

SEQ ID NO: 412590 - DNA, 114 bp, Homo sapiens; identical to SEQ ID NO: 272987
  chr19:4322986-4323100
  hypo

SEQ ID NO: 412591 - DNA, 42 bp, Homo sapiens; identical to SEQ ID NO: 272988
  chr19:4360669-4360711
  hypo

SEQ ID NO: 412592 - DNA, 393 bp, Homo sapiens; identical to SEQ ID NO: 218967
  chr19:4371567-4371960
  hypo

SEQ ID NO: 412593 - DNA, 48 bp, Homo sapiens; identical to SEQ ID NO: 272991
  chr19:4419788-4419836
  hypo

SEQ ID NO: 412594 - DNA, 185 bp, Homo sapiens; identical to SEQ ID NO: 218970
  chr19:4442913-4443098
  hypo

SEQ ID NO: 412595 - DNA, 415 bp, Homo sapiens; identical to SEQ ID NO: 218971
  chr19:4446322-4446737
  hypo

SEQ ID NO: 412596 - DNA, 237 bp, Homo sapiens; identical to SEQ ID NO: 218972
  chr19:4483097-4483334
  hypo

SEQ ID NO: 412597 - DNA, 38 bp, Homo sapiens; identical to SEQ ID NO: 218975
  chr19:4554410-4554448
  hypo

SEQ ID NO: 412598 - DNA, 207 bp, Homo sapiens; identical to SEQ ID NO: 273004
  chr19:4566461-4566668
  hypo

SEQ ID NO: 412599 - DNA, 35 bp, Homo sapiens; identical to SEQ ID NO: 273005
  chr19:4578035-4578070
  hypo

SEQ ID NO: 412600 - DNA, 452 bp, Homo sapiens; identical to SEQ ID NO: 293390
  chr19:4580776-4581228
  hypo

SEQ ID NO: 412601 - DNA, 78 bp, Homo sapiens; identical to SEQ ID NO: 273006
  chr19:4627183-4627261
  hypo

SEQ ID NO: 412602 - DNA, 80 bp, Homo sapiens; identical to SEQ ID NO: 325188
  chr19:4672904-4672984
  hypo

SEQ ID NO: 412603 - DNA, 207 bp, Homo sapiens; identical to SEQ ID NO: 273011
  chr19:4678845-4679052
  hypo

SEQ ID NO: 412604 - DNA, 74 bp, Homo sapiens; identical to SEQ ID NO: 218978
  chr19:4683997-4684071
  hypo

SEQ ID NO: 412605 - DNA, 141 bp, Homo sapiens; identical to SEQ ID NO: 273014
  chr19:4687368-4687509
  hypo

SEQ ID NO: 412606 - DNA, 120 bp, Homo sapiens; identical to SEQ ID NO: 218979
  chr19:4798239-4798359
  hypo

SEQ ID NO: 412607 - DNA, 145 bp, Homo sapiens; identical to SEQ ID NO: 218982
  chr19:4851495-4851640
  hypo

SEQ ID NO: 412608 - DNA, 166 bp, Homo sapiens; identical to SEQ ID NO: 273026
  chr19:4851997-4852163
  hypo

SEQ ID NO: 412609 - DNA, 34 bp, Homo sapiens; identical to SEQ ID NO: 273027
  chr19:4902800-4902834
  hypo

SEQ ID NO: 412610 - DNA, 68 bp, Homo sapiens; identical to SEQ ID NO: 273029
  chr19:4930783-4930851
  hypo

SEQ ID NO: 412611 - DNA, 191 bp, Homo sapiens; identical to SEQ ID NO: 218983
  chr19:4941804-4941995
  hypo

SEQ ID NO: 412612 - DNA, 59 bp, Homo sapiens; identical to SEQ ID NO: 218985
  chr19:4962295-4962354
  hypo

SEQ ID NO: 412613 - DNA, 116 bp, Homo sapiens; identical to SEQ ID NO: 218986
  chr19:4962384-4962500
  hypo

SEQ ID NO: 412614 - DNA, 81 bp, Homo sapiens; identical to SEQ ID NO: 273034
  chr19:4973466-4973547
  hypo

SEQ ID NO: 412615 - DNA, 42 bp, Homo sapiens; identical to SEQ ID NO: 218990
  chr19:4991094-4991136
  hypo

SEQ ID NO: 412616 - DNA, 151 bp, Homo sapiens; identical to SEQ ID NO: 273040
  chr19:5022644-5022795
  hypo

SEQ ID NO: 412617 - DNA, 134 bp, Homo sapiens; identical to SEQ ID NO: 273042
  chr19:5031056-5031190
  hypo

SEQ ID NO: 412618 - DNA, 311 bp, Homo sapiens; identical to SEQ ID NO: 325232
  chr19:5058359-5058670
  hypo

SEQ ID NO: 412619 - DNA, 77 bp, Homo sapiens; identical to SEQ ID NO: 325233
  chr19:5058700-5058777
  hypo

SEQ ID NO: 412620 - DNA, 268 bp, Homo sapiens; identical to SEQ ID NO: 218996
  chr19:5060971-5061239
  hypo

SEQ ID NO: 412621 - DNA, 148 bp, Homo sapiens; identical to SEQ ID NO: 273054
  chr19:5087015-5087163
  hypo

SEQ ID NO: 412622 - DNA, 79 bp, Homo sapiens; identical to SEQ ID NO: 273057
  chr19:5110734-5110813
  hypo

SEQ ID NO: 412623 - DNA, 382 bp, Homo sapiens; identical to SEQ ID NO: 273060
  chr19:5148669-5149051
  hypo

SEQ ID NO: 412624 - DNA, 36 bp, Homo sapiens; identical to SEQ ID NO: 273061
  chr19:5154721-5154757
  hypo

SEQ ID NO: 412625 - DNA, 173 bp, Homo sapiens; identical to SEQ ID NO: 273063
  chr19:5210689-5210862
  hypo

SEQ ID NO: 412626 - DNA, 73 bp, Homo sapiens; identical to SEQ ID NO: 273065
  chr19:5223285-5223358
  hypo

SEQ ID NO: 412627 - DNA, 364 bp, Homo sapiens; identical to SEQ ID NO: 273066
  chr19:5231254-5231618
  hypo

SEQ ID NO: 412628 - DNA, 988 bp, Homo sapiens; identical to SEQ ID NO: 273067
  chr19:5237605-5238593
  hypo

SEQ ID NO: 412629 - DNA, 419 bp, Homo sapiens; identical to SEQ ID NO: 219000
  chr19:5245671-5246090
  hypo

SEQ ID NO: 412630 - DNA, 410 bp, Homo sapiens; identical to SEQ ID NO: 273072
  chr19:5307584-5307994
  hypo

SEQ ID NO: 412631 - DNA, 409 bp, Homo sapiens; identical to SEQ ID NO: 273074
  chr19:5334919-5335328
  hypo

SEQ ID NO: 412632 - DNA, 35 bp, Homo sapiens; identical to SEQ ID NO: 273077
  chr19:5577528-5577563
  hypo

SEQ ID NO: 412633 - DNA, 111 bp, Homo sapiens; identical to SEQ ID NO: 273078
  chr19:5582381-5582492
  hypo

SEQ ID NO: 412634 - DNA, 139 bp, Homo sapiens; identical to SEQ ID NO: 219004
  chr19:5587166-5587305
  hypo

SEQ ID NO: 412635 - DNA, 41 bp, Homo sapiens; identical to SEQ ID NO: 273083
  chr19:5641156-5641197
  hypo

SEQ ID NO: 412636 - DNA, 275 bp, Homo sapiens; identical to SEQ ID NO: 273084
  chr19:5661522-5661797
  hypo

SEQ ID NO: 412637 - DNA, 103 bp, Homo sapiens; identical to SEQ ID NO: 273085
  chr19:5667770-5667873
  hypo

SEQ ID NO: 412638 - DNA, 139 bp, Homo sapiens; identical to SEQ ID NO: 325274
  chr19:5668103-5668242
  hypo

SEQ ID NO: 412639 - DNA, 77 bp, Homo sapiens; identical to SEQ ID NO: 325275
  chr19:5668272-5668349
  hypo

SEQ ID NO: 412640 - DNA, 92 bp, Homo sapiens; identical to SEQ ID NO: 325276
  chr19:5676242-5676334
  hypo

SEQ ID NO: 412641 - DNA, 57 bp, Homo sapiens; identical to SEQ ID NO: 273090
  chr19:5703577-5703634
  hypo

SEQ ID NO: 412642 - DNA, 44 bp, Homo sapiens; identical to SEQ ID NO: 273092
  chr19:5722397-5722441
  hypo

SEQ ID NO: 412643 - DNA, 59 bp, Homo sapiens
  chr19:5759561-5759620
  hypo
atgaaactccagctccaaaaaaaaaaaaaaaaaaagcaaaaataagccaagtgtagtgg

SEQ ID NO: 412644 - DNA, 37 bp, Homo sapiens; identical to SEQ ID NO: 273094
  chr19:5776294-5776331
  hypo

SEQ ID NO: 412645 - DNA, 94 bp, Homo sapiens; identical to SEQ ID NO: 273095
  chr19:5784778-5784872
  hypo

SEQ ID NO: 412646 - DNA, 40 bp, Homo sapiens; identical to SEQ ID NO: 219012
  chr19:5785227-5785267
  hypo

SEQ ID NO: 412647 - DNA, 198 bp, Homo sapiens; identical to SEQ ID NO: 219013
  chr19:5785480-5785678
  hypo

SEQ ID NO: 412648 - DNA, 50 bp, Homo sapiens; identical to SEQ ID NO: 219020
  chr19:5826124-5826174
  hypo

SEQ ID NO: 412649 - DNA, 114 bp, Homo sapiens; identical to SEQ ID NO: 325298
  chr19:5826209-5826323
  hypo

SEQ ID NO: 412650 - DNA, 38 bp, Homo sapiens; identical to SEQ ID NO: 219022
  chr19:5834509-5834547
  hypo

SEQ ID NO: 412651 - DNA, 117 bp, Homo sapiens; identical to SEQ ID NO: 273107
  chr19:5846506-5846623
  hypo

SEQ ID NO: 412652 - DNA, 159 bp, Homo sapiens; identical to SEQ ID NO: 219026
  chr19:5914411-5914570
  hypo

SEQ ID NO: 412653 - DNA, 150 bp, Homo sapiens; identical to SEQ ID NO: 219030
  chr19:5927750-5927900
  hypo

SEQ ID NO: 412654 - DNA, 158 bp, Homo sapiens; identical to SEQ ID NO: 273119
  chr19:5957316-5957474
  hypo

SEQ ID NO: 412655 - DNA, 162 bp, Homo sapiens; identical to SEQ ID NO: 219032
  chr19:5985339-5985501
  hypo

SEQ ID NO: 412656 - DNA, 571 bp, Homo sapiens; identical to SEQ ID NO: 273127
  chr19:5998429-5999000
  hypo

SEQ ID NO: 412657 - DNA, 450 bp, Homo sapiens; identical to SEQ ID NO: 273128
  chr19:5999240-5999690
  hypo

SEQ ID NO: 412658 - DNA, 654 bp, Homo sapiens; identical to SEQ ID NO: 273130
  chr19:6002450-6003104
  hypo

SEQ ID NO: 412659 - DNA, 99 bp, Homo sapiens; identical to SEQ ID NO: 273131
  chr19:6003433-6003532
  hypo

SEQ ID NO: 412660 - DNA, 225 bp, Homo sapiens; identical to SEQ ID NO: 219037
  chr19:6003832-6004057
  hypo

SEQ ID NO: 412661 - DNA, 61 bp, Homo sapiens
  chr19:6005135-6005196
  hypo
aatattttaaaatgcaaaaggaaagataccccaaactcccaccataacatagaaactcaga

SEQ ID NO: 412662 - DNA, 94 bp, Homo sapiens; identical to SEQ ID NO: 273138
  chr19:6010177-6010271
  hypo

SEQ ID NO: 412663 - DNA, 92 bp, Homo sapiens; identical to SEQ ID NO: 219043
  chr19:6012586-6012678
  hypo

SEQ ID NO: 412664 - DNA, 278 bp, Homo sapiens; identical to SEQ ID NO: 273141
  chr19:6015901-6016179
  hypo

SEQ ID NO: 412665 - DNA, 76 bp, Homo sapiens; identical to SEQ ID NO: 219046
  chr19:6018261-6018337
  hypo

SEQ ID NO: 412666 - DNA, 135 bp, Homo sapiens; identical to SEQ ID NO: 273144
  chr19:6019758-6019893
  hypo

SEQ ID NO: 412667 - DNA, 390 bp, Homo sapiens; identical to SEQ ID NO: 273146
  chr19:6021709-6022099
  hypo

SEQ ID NO: 412668 - DNA, 580 bp, Homo sapiens; identical to SEQ ID NO: 273150
  chr19:6026959-6027539
  hypo

SEQ ID NO: 412669 - DNA, 164 bp, Homo sapiens; identical to SEQ ID NO: 219050
  chr19:6040234-6040398
  hypo

SEQ ID NO: 412670 - DNA, 181 bp, Homo sapiens; identical to SEQ ID NO: 219054
  chr19:6062926-6063107
  hypo

SEQ ID NO: 412671 - DNA, 36 bp, Homo sapiens; identical to SEQ ID NO: 273158
  chr19:6076061-6076097
  hypo

SEQ ID NO: 412672 - DNA, 776 bp, Homo sapiens; identical to SEQ ID NO: 205141
  chr19:6110226-6111002
  hypo

SEQ ID NO: 412673 - DNA, 267 bp, Homo sapiens; identical to SEQ ID NO: 273163
  chr19:6215002-6215269
  hypo

SEQ ID NO: 412674 - DNA, 235 bp, Homo sapiens; identical to SEQ ID NO: 273165
  chr19:6230445-6230680
  hypo

SEQ ID NO: 412675 - DNA, 219 bp, Homo sapiens; identical to SEQ ID NO: 273167
  chr19:6241968-6242187
  hypo

SEQ ID NO: 412676 - DNA, 164 bp, Homo sapiens; identical to SEQ ID NO: 273168
  chr19:6249578-6249742
  hypo

SEQ ID NO: 412677 - DNA, 423 bp, Homo sapiens; identical to SEQ ID NO: 273171
  chr19:6374177-6374600
  hypo

SEQ ID NO: 412678 - DNA, 118 bp, Homo sapiens; identical to SEQ ID NO: 273175
  chr19:6433456-6433574
  hypo

SEQ ID NO: 412679 - DNA, 236 bp, Homo sapiens; identical to SEQ ID NO: 273180
  chr19:6750239-6750475
  hypo

SEQ ID NO: 412680 - DNA, 270 bp, Homo sapiens; identical to SEQ ID NO: 273181
  chr19:6829821-6830091
  hypo

SEQ ID NO: 412681 - DNA, 38 bp, Homo sapiens; identical to SEQ ID NO: 273183
  chr19:7103100-7103138
  hypo

SEQ ID NO: 412682 - DNA, 38 bp, Homo sapiens; identical to SEQ ID NO: 325385
  chr19:7157628-7157666
  hypo

SEQ ID NO: 412683 - DNA, 96 bp, Homo sapiens; identical to SEQ ID NO: 219066
  chr19:7194737-7194833
  hypo

SEQ ID NO: 412684 - DNA, 81 bp, Homo sapiens; identical to SEQ ID NO: 273192
  chr19:7236595-7236676
  hypo

SEQ ID NO: 412685 - DNA, 42 bp, Homo sapiens; identical to SEQ ID NO: 273194
  chr19:7256901-7256943
  hypo

SEQ ID NO: 412686 - DNA, 776 bp, Homo sapiens; identical to SEQ ID NO: 400543
  chr19:7293746-7294522
  hypo

SEQ ID NO: 412687 - DNA, 188 bp, Homo sapiens; identical to SEQ ID NO: 219070
  chr19:7484059-7484247
  hypo

SEQ ID NO: 412688 - DNA, 179 bp, Homo sapiens; identical to SEQ ID NO: 219071
  chr19:7484791-7484970
  hypo

SEQ ID NO: 412689 - DNA, 96 bp, Homo sapiens; identical to SEQ ID NO: 273200
  chr19:7487170-7487266
  hypo

SEQ ID NO: 412690 - DNA, 242 bp, Homo sapiens; identical to SEQ ID NO: 293435
  chr19:7553842-7554084
  hypo

SEQ ID NO: 412691 - DNA, 180 bp, Homo sapiens; identical to SEQ ID NO: 273209
  chr19:7555031-7555211
  hypo

SEQ ID NO: 412692 - DNA, 663 bp, Homo sapiens; identical to SEQ ID NO: 273210
  chr19:7619582-7620245
  hypo

SEQ ID NO: 412693 - DNA, 159 bp, Homo sapiens; identical to SEQ ID NO: 273214
  chr19:7655856-7656015
  hypo

SEQ ID NO: 412694 - DNA, 540 bp, Homo sapiens; identical to SEQ ID NO: 225765
  chr19:7677148-7677688
  hypo

SEQ ID NO: 412695 - DNA, 613 bp, Homo sapiens; identical to SEQ ID NO: 273216
  chr19:7680032-7680645
  hypo

SEQ ID NO: 412696 - DNA, 44 bp, Homo sapiens; identical to SEQ ID NO: 273225
  chr19:7862879-7862923
  hypo

SEQ ID NO: 412697 - DNA, 312 bp, Homo sapiens; identical to SEQ ID NO: 273228
  chr19:7920730-7921042
  hypo

SEQ ID NO: 412698 - DNA, 170 bp, Homo sapiens; identical to SEQ ID NO: 205157
  chr19:7990126-7990296
  hypo

SEQ ID NO: 412699 - DNA, 58 bp, Homo sapiens; identical to SEQ ID NO: 273233
  chr19:7993373-7993431
  hypo

SEQ ID NO: 412700 - DNA, 486 bp, Homo sapiens; identical to SEQ ID NO: 273236
  chr19:7998974-7999460
  hypo

SEQ ID NO: 412701 - DNA, 37 bp, Homo sapiens; identical to SEQ ID NO: 273247
  chr19:8203390-8203427
  hypo

SEQ ID NO: 412702 - DNA, 45 bp, Homo sapiens; identical to SEQ ID NO: 273249
  chr19:8440196-8440241
  hypo

SEQ ID NO: 412703 - DNA, 253 bp, Homo sapiens; identical to SEQ ID NO: 273251
  chr19:8468435-8468688
  hypo

SEQ ID NO: 412704 - DNA, 228 bp, Homo sapiens; identical to SEQ ID NO: 273255
  chr19:8495657-8495885
  hypo

SEQ ID NO: 412705 - DNA, 156 bp, Homo sapiens; identical to SEQ ID NO: 219096
  chr19:8528411-8528567
  hypo

SEQ ID NO: 412706 - DNA, 37 bp, Homo sapiens; identical to SEQ ID NO: 273261
  chr19:8547111-8547148
  hypo

SEQ ID NO: 412707 - DNA, 164 bp, Homo sapiens; identical to SEQ ID NO: 273262
  chr19:8554605-8554769
  hypo

SEQ ID NO: 412708 - DNA, 179 bp, Homo sapiens; identical to SEQ ID NO: 273268
  chr19:8604833-8605012
  hypo

SEQ ID NO: 412709 - DNA, 228 bp, Homo sapiens; identical to SEQ ID NO: 273270
  chr19:8618012-8618240
  hypo

SEQ ID NO: 412710 - DNA, 86 bp, Homo sapiens; identical to SEQ ID NO: 219103
  chr19:9343354-9343440
  hypo

SEQ ID NO: 412711 - DNA, 44 bp, Homo sapiens; identical to SEQ ID NO: 219104
  chr19:9371593-9371637
  hypo

SEQ ID NO: 412712 - DNA, 91 bp, Homo sapiens; identical to SEQ ID NO: 273278
  chr19:9845537-9845628
  hypo

SEQ ID NO: 412713 - DNA, 105 bp, Homo sapiens; identical to SEQ ID NO: 273279
  chr19:9894646-9894751
  hypo

SEQ ID NO: 412714 - DNA, 38 bp, Homo sapiens; identical to SEQ ID NO: 325493
  chr19:9937315-9937353
  hypo

SEQ ID NO: 412715 - DNA, 91 bp, Homo sapiens; identical to SEQ ID NO: 273286
  chr19:9967993-9968084
  hypo

SEQ ID NO: 412716 - DNA, 143 bp, Homo sapiens; identical to SEQ ID NO: 219110
  chr19:10231242-10231385
  hypo

SEQ ID NO: 412717 - DNA, 115 bp, Homo sapiens; identical to SEQ ID NO: 219111
  chr19:10246096-10246211
  hypo

SEQ ID NO: 412718 - DNA, 253 bp, Homo sapiens; identical to SEQ ID NO: 219112
  chr19:10246253-10246506
  hypo

SEQ ID NO: 412719 - DNA, 416 bp, Homo sapiens; identical to SEQ ID NO: 219113
  chr19:10246566-10246982
  hypo

SEQ ID NO: 412720 - DNA, 262 bp, Homo sapiens; identical to SEQ ID NO: 225775
  chr19:10252656-10252918
  hypo

SEQ ID NO: 412721 - DNA, 32 bp, Homo sapiens; identical to SEQ ID NO: 273296
  chr19:10295209-10295241
  hypo

SEQ ID NO: 412722 - DNA, 145 bp, Homo sapiens; identical to SEQ ID NO: 219115
  chr19:10295674-10295819
  hypo

SEQ ID NO: 412723 - DNA, 114 bp, Homo sapiens; identical to SEQ ID NO: 273299
  chr19:10338378-10338492
  hypo

SEQ ID NO: 412724 - DNA, 184 bp, Homo sapiens; identical to SEQ ID NO: 225777
  chr19:10363159-10363343
  hypo

SEQ ID NO: 412725 - DNA, 42 bp, Homo sapiens; identical to SEQ ID NO: 273303
  chr19:10394496-10394538
  hypo

SEQ ID NO: 412726 - DNA, 306 bp, Homo sapiens; identical to SEQ ID NO: 273305
  chr19:10420150-10420456
  hypo

SEQ ID NO: 412727 - DNA, 145 bp, Homo sapiens; identical to SEQ ID NO: 225785
  chr19:10589794-10589939
  hypo

SEQ ID NO: 412728 - DNA, 116 bp, Homo sapiens; identical to SEQ ID NO: 219126
  chr19:10685492-10685608
  hypo

SEQ ID NO: 412729 - DNA, 42 bp, Homo sapiens; identical to SEQ ID NO: 273313
  chr19:10689002-10689044
  hypo

SEQ ID NO: 412730 - DNA, 36 bp, Homo sapiens; identical to SEQ ID NO: 219132
  chr19:10794362-10794398
  hypo

SEQ ID NO: 412731 - DNA, 317 bp, Homo sapiens; identical to SEQ ID NO: 273321
  chr19:10818162-10818479
  hypo

SEQ ID NO: 412732 - DNA, 147 bp, Homo sapiens; identical to SEQ ID NO: 273322
  chr19:10822778-10822925
  hypo

SEQ ID NO: 412733 - DNA, 204 bp, Homo sapiens; identical to SEQ ID NO: 325553
  chr19:10859009-10859213
  hypo

SEQ ID NO: 412734 - DNA, 52 bp, Homo sapiens
  chr19:10875607-10875659
  hypo
gagttatcctgttcttgttttttctttttcttttttttttttttttgagatg

SEQ ID NO: 412735 - DNA, 207 bp, Homo sapiens; identical to SEQ ID NO: 273331
  chr19:10881732-10881939
  hypo

SEQ ID NO: 412736 - DNA, 90 bp, Homo sapiens; identical to SEQ ID NO: 273333
  chr19:10927555-10927645
  hypo

SEQ ID NO: 412737 - DNA, 151 bp, Homo sapiens; identical to SEQ ID NO: 325565
  chr19:11002590-11002741
  hypo

SEQ ID NO: 412738 - DNA, 180 bp, Homo sapiens; identical to SEQ ID NO: 273347
  chr19:11068308-11068488
  hypo

SEQ ID NO: 412739 - DNA, 101 bp, Homo sapiens; identical to SEQ ID NO: 273349
  chr19:11084520-11084621
  hypo

SEQ ID NO: 412740 - DNA, 183 bp, Homo sapiens; identical to SEQ ID NO: 219148
  chr19:11145621-11145804
  hypo

SEQ ID NO: 412741 - DNA, 248 bp, Homo sapiens; identical to SEQ ID NO: 273355
  chr19:11151830-11152078
  hypo

SEQ ID NO: 412742 - DNA, 330 bp, Homo sapiens; identical to SEQ ID NO: 273357
  chr19:11154843-11155173
  hypo

SEQ ID NO: 412743 - DNA, 460 bp, Homo sapiens; identical to SEQ ID NO: 205181
  chr19:11200842-11201302
  hypo

SEQ ID NO: 412744 - DNA, 270 bp, Homo sapiens; identical to SEQ ID NO: 273361
  chr19:11213902-11214172
  hypo

SEQ ID NO: 412745 - DNA, 233 bp, Homo sapiens; identical to SEQ ID NO: 219153
  chr19:11215985-11216218
  hypo

SEQ ID NO: 412746 - DNA, 266 bp, Homo sapiens; identical to SEQ ID NO: 225793
  chr19:11308102-11308368
  hypo

SEQ ID NO: 412747 - DNA, 59 bp, Homo sapiens; identical to SEQ ID NO: 273367
  chr19:11319674-11319733
  hypo

SEQ ID NO: 412748 - DNA, 63 bp, Homo sapiens; identical to SEQ ID NO: 273369
  chr19:11333607-11333670
  hypo

SEQ ID NO: 412749 - DNA, 150 bp, Homo sapiens; identical to SEQ ID NO: 219157
  chr19:11339623-11339773
  hypo

SEQ ID NO: 412750 - DNA, 42 bp, Homo sapiens; identical to SEQ ID NO: 225794
  chr19:11373072-11373114
  hypo

SEQ ID NO: 412751 - DNA, 184 bp, Homo sapiens; identical to SEQ ID NO: 219161
  chr19:11559278-11559462
  hypo

SEQ ID NO: 412752 - DNA, 96 bp, Homo sapiens; identical to SEQ ID NO: 273382
  chr19:11699967-11700063
  hypo

SEQ ID NO: 412753 - DNA, 148 bp, Homo sapiens; identical to SEQ ID NO: 273385
  chr19:11820662-11820810
  hypo

SEQ ID NO: 412754 - DNA, 44 bp, Homo sapiens; identical to SEQ ID NO: 325619
  chr19:11926785-11926829
  hypo

SEQ ID NO: 412755 - DNA, 89 bp, Homo sapiens; identical to SEQ ID NO: 273388
  chr19:11961501-11961590
  hypo

SEQ ID NO: 412756 - DNA, 360 bp, Homo sapiens; identical to SEQ ID NO: 273391
  chr19:12205465-12205825
  hypo

SEQ ID NO: 412757 - DNA, 43 bp, Homo sapiens; identical to SEQ ID NO: 273393
  chr19:12416132-12416175
  hypo

SEQ ID NO: 412758 - DNA, 145 bp, Homo sapiens; identical to SEQ ID NO: 273395
  chr19:12461696-12461841
  hypo

SEQ ID NO: 412759 - DNA, 40 bp, Homo sapiens; identical to SEQ ID NO: 273397
  chr19:12701915-12701955
  hypo

SEQ ID NO: 412760 - DNA, 132 bp, Homo sapiens; identical to SEQ ID NO: 225804
  chr19:12707774-12707906
  hypo

SEQ ID NO: 412761 - DNA, 95 bp, Homo sapiens; identical to SEQ ID NO: 219174
  chr19:12729967-12730062
  hypo

SEQ ID NO: 412762 - DNA, 120 bp, Homo sapiens; identical to SEQ ID NO: 219175
  chr19:12746886-12747006
  hypo

SEQ ID NO: 412763 - DNA, 70 bp, Homo sapiens; identical to SEQ ID NO: 273402
  chr19:12748932-12749002
  hypo

SEQ ID NO: 412764 - DNA, 51 bp, Homo sapiens; identical to SEQ ID NO: 219178
  chr19:12811290-12811341
  hypo

SEQ ID NO: 412765 - DNA, 149 bp, Homo sapiens; identical to SEQ ID NO: 273413
  chr19:12953398-12953547
  hypo

SEQ ID NO: 412766 - DNA, 73 bp, Homo sapiens; identical to SEQ ID NO: 273418
  chr19:12986930-12987003
  hypo

SEQ ID NO: 412767 - DNA, 75 bp, Homo sapiens; identical to SEQ ID NO: 273421
  chr19:13017983-13018058
  hypo

SEQ ID NO: 412768 - DNA, 98 bp, Homo sapiens; identical to SEQ ID NO: 205217
  chr19:13029775-13029873
  hypo

SEQ ID NO: 412769 - DNA, 51 bp, Homo sapiens; identical to SEQ ID NO: 384755
  chr19:13030316-13030367
  hypo

SEQ ID NO: 412770 - DNA, 513 bp, Homo sapiens; identical to SEQ ID NO: 205219
  chr19:13049935-13050448
  hypo

SEQ ID NO: 412771 - DNA, 828 bp, Homo sapiens; identical to SEQ ID NO: 205220
  chr19:13050858-13051686
  hypo

SEQ ID NO: 412772 - DNA, 144 bp, Homo sapiens; identical to SEQ ID NO: 384757
  chr19:13106028-13106172
  hypo

SEQ ID NO: 412773 - DNA, 93 bp, Homo sapiens; identical to SEQ ID NO: 219197
  chr19:13115952-13116045
  hypo

SEQ ID NO: 412774 - DNA, 37 bp, Homo sapiens; identical to SEQ ID NO: 273438
  chr19:13154726-13154763
  hypo

SEQ ID NO: 412775 - DNA, 98 bp, Homo sapiens; identical to SEQ ID NO: 219199
  chr19:13160324-13160422
  hypo

SEQ ID NO: 412776 - DNA, 178 bp, Homo sapiens; identical to SEQ ID NO: 273441
  chr19:13177633-13177811
  hypo

SEQ ID NO: 412777 - DNA, 107 bp, Homo sapiens; identical to SEQ ID NO: 273451
  chr19:13249109-13249216
  hypo

SEQ ID NO: 412778 - DNA, 112 bp, Homo sapiens; identical to SEQ ID NO: 273452
  chr19:13252910-13253022
  hypo

SEQ ID NO: 412779 - DNA, 154 bp, Homo sapiens; identical to SEQ ID NO: 225818
  chr19:13264169-13264323
  hypo

SEQ ID NO: 412780 - DNA, 62 bp, Homo sapiens; identical to SEQ ID NO: 205232
  chr19:13274019-13274081
  hypo

SEQ ID NO: 412781 - DNA, 131 bp, Homo sapiens; identical to SEQ ID NO: 273454
  chr19:13309845-13309976
  hypo

SEQ ID NO: 412782 - DNA, 49 bp, Homo sapiens; identical to SEQ ID NO: 325720
  chr19:13936528-13936577
  hypo

SEQ ID NO: 412783 - DNA, 71 bp, Homo sapiens; identical to SEQ ID NO: 325721
  chr19:13936712-13936783
  hypo

SEQ ID NO: 412784 - DNA, 38 bp, Homo sapiens; identical to SEQ ID NO: 273469
  chr19:13969423-13969461
  hypo

SEQ ID NO: 412785 - DNA, 97 bp, Homo sapiens; identical to SEQ ID NO: 273470
  chr19:13987350-13987447
  hypo

SEQ ID NO: 412786 - DNA, 209 bp, Homo sapiens; identical to SEQ ID NO: 219213
  chr19:14000962-14001171
  hypo

SEQ ID NO: 412787 - DNA, 273 bp, Homo sapiens; identical to SEQ ID NO: 273476
  chr19:14072645-14072918
  hypo

SEQ ID NO: 412788 - DNA, 50 bp, Homo sapiens; identical to SEQ ID NO: 273481
  chr19:14084971-14085021
  hypo

SEQ ID NO: 412789 - DNA, 234 bp, Homo sapiens; identical to SEQ ID NO: 293630
  chr19:14089418-14089652
  hypo

SEQ ID NO: 412790 - DNA, 57 bp, Homo sapiens; identical to SEQ ID NO: 293631
  chr19:14089812-14089869
  hypo

SEQ ID NO: 412791 - DNA, 33 bp, Homo sapiens; identical to SEQ ID NO: 273487
  chr19:14352486-14352519
  hypo

SEQ ID NO: 412792 - DNA, 443 bp, Homo sapiens; identical to SEQ ID NO: 225828
  chr19:14516821-14517264
  hypo

SEQ ID NO: 412793 - DNA, 245 bp, Homo sapiens; identical to SEQ ID NO: 273493
  chr19:14591231-14591476
  hypo

SEQ ID NO: 412794 - DNA, 290 bp, Homo sapiens; identical to SEQ ID NO: 273494
  chr19:14616946-14617236
  hypo

SEQ ID NO: 412795 - DNA, 107 bp, Homo sapiens; identical to SEQ ID NO: 273496
  chr19:14636954-14637061
  hypo

SEQ ID NO: 412796 - DNA, 46 bp, Homo sapiens; identical to SEQ ID NO: 205241
  chr19:14887561-14887607
  hypo

SEQ ID NO: 412797 - DNA, 96 bp, Homo sapiens; identical to SEQ ID NO: 219228
  chr19:14912989-14913085
  hypo

SEQ ID NO: 412798 - DNA, 43 bp, Homo sapiens; identical to SEQ ID NO: 273506
  chr19:15044831-15044874
  hypo

SEQ ID NO: 412799 - DNA, 36 bp, Homo sapiens; identical to SEQ ID NO: 293646
  chr19:15091053-15091089
  hypo

SEQ ID NO: 412800 - DNA, 133 bp, Homo sapiens; identical to SEQ ID NO: 273508
  chr19:15209505-15209638
  hypo

SEQ ID NO: 412801 - DNA, 41 bp, Homo sapiens; identical to SEQ ID NO: 219231
  chr19:15252900-15252941
  hypo

SEQ ID NO: 412802 - DNA, 81 bp, Homo sapiens; identical to SEQ ID NO: 273519
  chr19:15346126-15346207
  hypo

SEQ ID NO: 412803 - DNA, 188 bp, Homo sapiens; identical to SEQ ID NO: 219234
  chr19:15352349-15352537
  hypo

SEQ ID NO: 412804 - DNA, 172 bp, Homo sapiens; identical to SEQ ID NO: 189115
  chr19:15360255-15360427
  hypo

SEQ ID NO: 412805 - DNA, 396 bp, Homo sapiens; identical to SEQ ID NO: 219235
  chr19:15375241-15375637
  hypo

SEQ ID NO: 412806 - DNA, 128 bp, Homo sapiens; identical to SEQ ID NO: 273525
  chr19:15401109-15401237
  hypo

SEQ ID NO: 412807 - DNA, 240 bp, Homo sapiens; identical to SEQ ID NO: 273528
  chr19:15426970-15427210
  hypo

SEQ ID NO: 412808 - DNA, 87 bp, Homo sapiens; identical to SEQ ID NO: 293653
  chr19:15479821-15479908
  hypo

SEQ ID NO: 412809 - DNA, 206 bp, Homo sapiens; identical to SEQ ID NO: 273529
  chr19:15487800-15488006
  hypo

SEQ ID NO: 412810 - DNA, 120 bp, Homo sapiens; identical to SEQ ID NO: 219238
  chr19:15506075-15506195
  hypo

SEQ ID NO: 412811 - DNA, 36 bp, Homo sapiens; identical to SEQ ID NO: 226560
  chr19:15694860-15694896
  hypo

SEQ ID NO: 412812 - DNA, 77 bp, Homo sapiens; identical to SEQ ID NO: 273537
  chr19:15937637-15937714
  hypo

SEQ ID NO: 412813 - DNA, 53 bp, Homo sapiens; identical to SEQ ID NO: 273539
  chr19:16147950-16148003
  hypo

SEQ ID NO: 412814 - DNA, 153 bp, Homo sapiens; identical to SEQ ID NO: 273540
  chr19:16198711-16198864
  hypo

SEQ ID NO: 412815 - DNA, 38 bp, Homo sapiens; identical to SEQ ID NO: 273542
  chr19:16221419-16221457
  hypo

SEQ ID NO: 412816 - DNA, 239 bp, Homo sapiens; identical to SEQ ID NO: 219248
  chr19:16243047-16243286
  hypo

SEQ ID NO: 412817 - DNA, 270 bp, Homo sapiens; identical to SEQ ID NO: 273549
  chr19:16318743-16319013
  hypo

SEQ ID NO: 412818 - DNA, 162 bp, Homo sapiens; identical to SEQ ID NO: 219250
  chr19:16328981-16329143
  hypo

SEQ ID NO: 412819 - DNA, 128 bp, Homo sapiens; identical to SEQ ID NO: 273552
  chr19:16337602-16337730
  hypo

SEQ ID NO: 412820 - DNA, 291 bp, Homo sapiens; identical to SEQ ID NO: 273553
  chr19:16337760-16338051
  hypo

SEQ ID NO: 412821 - DNA, 42 bp, Homo sapiens; identical to SEQ ID NO: 273555
  chr19:16469773-16469815
  hypo

SEQ ID NO: 412822 - DNA, 626 bp, Homo sapiens; identical to SEQ ID NO: 273560
  chr19:16511801-16512427
  hypo

SEQ ID NO: 412823 - DNA, 54 bp, Homo sapiens; identical to SEQ ID NO: 219255
  chr19:16513151-16513205
  hypo

SEQ ID NO: 412824 - DNA, 155 bp, Homo sapiens; identical to SEQ ID NO: 273562
  chr19:16528334-16528489
  hypo

SEQ ID NO: 412825 - DNA, 43 bp, Homo sapiens; identical to SEQ ID NO: 219258
  chr19:16631183-16631226
  hypo

SEQ ID NO: 412826 - DNA, 105 bp, Homo sapiens; identical to SEQ ID NO: 225840
  chr19:16638141-16638246
  hypo

SEQ ID NO: 412827 - DNA, 83 bp, Homo sapiens; identical to SEQ ID NO: 219260
  chr19:16680107-16680190
  hypo

SEQ ID NO: 412828 - DNA, 390 bp, Homo sapiens; identical to SEQ ID NO: 273573
  chr19:16680657-16681047
  hypo

SEQ ID NO: 412829 - DNA, 117 bp, Homo sapiens; identical to SEQ ID NO: 273575
  chr19:16735189-16735306
  hypo

SEQ ID NO: 412830 - DNA, 190 bp, Homo sapiens; identical to SEQ ID NO: 273576
  chr19:16735778-16735968
  hypo

SEQ ID NO: 412831 - DNA, 97 bp, Homo sapiens; identical to SEQ ID NO: 273583
  chr19:16835422-16835519
  hypo

SEQ ID NO: 412832 - DNA, 551 bp, Homo sapiens; identical to SEQ ID NO: 273584
  chr19:17000717-17001268
  hypo

SEQ ID NO: 412833 - DNA, 36 bp, Homo sapiens; identical to SEQ ID NO: 273585
  chr19:17009182-17009218
  hypo

SEQ ID NO: 412834 - DNA, 169 bp, Homo sapiens; identical to SEQ ID NO: 273586
  chr19:17091354-17091523
  hypo

SEQ ID NO: 412835 - DNA, 76 bp, Homo sapiens; identical to SEQ ID NO: 225842
  chr19:17137592-17137668
  hypo

SEQ ID NO: 412836 - DNA, 371 bp, Homo sapiens; identical to SEQ ID NO: 273588
  chr19:17160719-17161090
  hypo

SEQ ID NO: 412837 - DNA, 120 bp, Homo sapiens; identical to SEQ ID NO: 219271
  chr19:17255382-17255502
  hypo

SEQ ID NO: 412838 - DNA, 265 bp, Homo sapiens; identical to SEQ ID NO: 225844
  chr19:17357470-17357735
  hypo

SEQ ID NO: 412839 - DNA, 56 bp, Homo sapiens; identical to SEQ ID NO: 273599
  chr19:17369111-17369167
  hypo

SEQ ID NO: 412840 - DNA, 120 bp, Homo sapiens; identical to SEQ ID NO: 273600
  chr19:17376563-17376683
  hypo

SEQ ID NO: 412841 - DNA, 44 bp, Homo sapiens; identical to SEQ ID NO: 273603
  chr19:17397664-17397708
  hypo

SEQ ID NO: 412842 - DNA, 866 bp, Homo sapiens; identical to SEQ ID NO: 273612
  chr19:17443706-17444572
  hypo

SEQ ID NO: 412843 - DNA, 42 bp, Homo sapiens; identical to SEQ ID NO: 273614
  chr19:17536626-17536668
  hypo

SEQ ID NO: 412844 - DNA, 372 bp, Homo sapiens; identical to SEQ ID NO: 273615
  chr19:17597312-17597684
  hypo

SEQ ID NO: 412845 - DNA, 62 bp, Homo sapiens; identical to SEQ ID NO: 273616
  chr19:17631822-17631884
  hypo

SEQ ID NO: 412846 - DNA, 258 bp, Homo sapiens; identical to SEQ ID NO: 273617
  chr19:17657447-17657705
  hypo

SEQ ID NO: 412847 - DNA, 330 bp, Homo sapiens; identical to SEQ ID NO: 293692
  chr19:17799069-17799399
  hypo

SEQ ID NO: 412848 - DNA, 38 bp, Homo sapiens; identical to SEQ ID NO: 273623
  chr19:17848807-17848845
  hypo

SEQ ID NO: 412849 - DNA, 392 bp, Homo sapiens; identical to SEQ ID NO: 273624
  chr19:17881296-17881688
  hypo

SEQ ID NO: 412850 - DNA, 41 bp, Homo sapiens; identical to SEQ ID NO: 219290
  chr19:18054174-18054215
  hypo

SEQ ID NO: 412851 - DNA, 84 bp, Homo sapiens; identical to SEQ ID NO: 273631
  chr19:18080377-18080461
  hypo

SEQ ID NO: 412852 - DNA, 429 bp, Homo sapiens; identical to SEQ ID NO: 219291
  chr19:18084483-18084912
  hypo

SEQ ID NO: 412853 - DNA, 108 bp, Homo sapiens; identical to SEQ ID NO: 219292
  chr19:18085018-18085126
  hypo

SEQ ID NO: 412854 - DNA, 47 bp, Homo sapiens; identical to SEQ ID NO: 273635
  chr19:18120713-18120760
  hypo

SEQ ID NO: 412855 - DNA, 83 bp, Homo sapiens; identical to SEQ ID NO: 273639
  chr19:18159860-18159943
  hypo

SEQ ID NO: 412856 - DNA, 54 bp, Homo sapiens; identical to SEQ ID NO: 273642
  chr19:18242605-18242659
  hypo

SEQ ID NO: 412857 - DNA, 135 bp, Homo sapiens; identical to SEQ ID NO: 273643
  chr19:18242689-18242824
  hypo

SEQ ID NO: 412858 - DNA, 145 bp, Homo sapiens; identical to SEQ ID NO: 273647
  chr19:18277902-18278047
  hypo

SEQ ID NO: 412859 - DNA, 199 bp, Homo sapiens; identical to SEQ ID NO: 293713
  chr19:18344017-18344216
  hypo

SEQ ID NO: 412860 - DNA, 157 bp, Homo sapiens; identical to SEQ ID NO: 273650
  chr19:18416995-18417152
  hypo

SEQ ID NO: 412861 - DNA, 330 bp, Homo sapiens; identical to SEQ ID NO: 205279
  chr19:18420497-18420827
  hypo

SEQ ID NO: 412862 - DNA, 101 bp, Homo sapiens; identical to SEQ ID NO: 273651
  chr19:18435014-18435115
  hypo

SEQ ID NO: 412863 - DNA, 79 bp, Homo sapiens; identical to SEQ ID NO: 219304
  chr19:18496195-18496274
  hypo

SEQ ID NO: 412864 - DNA, 49 bp, Homo sapiens; identical to SEQ ID NO: 273657
  chr19:18556529-18556578
  hypo

SEQ ID NO: 412865 - DNA, 67 bp, Homo sapiens; identical to SEQ ID NO: 219306
  chr19:18557168-18557235
  hypo

SEQ ID NO: 412866 - DNA, 142 bp, Homo sapiens; identical to SEQ ID NO: 273659
  chr19:18591739-18591881
  hypo

SEQ ID NO: 412867 - DNA, 81 bp, Homo sapiens; identical to SEQ ID NO: 219308
  chr19:18675984-18676065
  hypo

SEQ ID NO: 412868 - DNA, 36 bp, Homo sapiens; identical to SEQ ID NO: 219310
  chr19:18757684-18757720
  hypo

SEQ ID NO: 412869 - DNA, 148 bp, Homo sapiens; identical to SEQ ID NO: 219313
  chr19:18798371-18798519
  hypo

SEQ ID NO: 412870 - DNA, 65 bp, Homo sapiens; identical to SEQ ID NO: 219317
  chr19:18871011-18871076
  hypo

SEQ ID NO: 412871 - DNA, 457 bp, Homo sapiens; identical to SEQ ID NO: 273679
  chr19:18874215-18874672
  hypo

SEQ ID NO: 412872 - DNA, 35 bp, Homo sapiens; identical to SEQ ID NO: 219320
  chr19:18957753-18957788
  hypo

SEQ ID NO: 412873 - DNA, 34 bp, Homo sapiens; identical to SEQ ID NO: 273692
  chr19:19087049-19087083
  hypo

SEQ ID NO: 412874 - DNA, 64 bp, Homo sapiens; identical to SEQ ID NO: 273693
  chr19:19100287-19100351
  hypo

SEQ ID NO: 412875 - DNA, 136 bp, Homo sapiens; identical to SEQ ID NO: 273694
  chr19:19104043-19104179
  hypo

SEQ ID NO: 412876 - DNA, 272 bp, Homo sapiens; identical to SEQ ID NO: 273697
  chr19:19135284-19135556
  hypo

SEQ ID NO: 412877 - DNA, 198 bp, Homo sapiens; identical to SEQ ID NO: 273698
  chr19:19136747-19136945
  hypo

SEQ ID NO: 412878 - DNA, 98 bp, Homo sapiens; identical to SEQ ID NO: 273699
  chr19:19147972-19148070
  hypo

SEQ ID NO: 412879 - DNA, 36 bp, Homo sapiens; identical to SEQ ID NO: 325996
  chr19:19218819-19218855
  hypo

SEQ ID NO: 412880 - DNA, 275 bp, Homo sapiens; identical to SEQ ID NO: 273705
  chr19:19231766-19232041
  hypo

SEQ ID NO: 412881 - DNA, 328 bp, Homo sapiens; identical to SEQ ID NO: 273707
  chr19:19389261-19389589
  hypo

SEQ ID NO: 412882 - DNA, 90 bp, Homo sapiens; identical to SEQ ID NO: 273711
  chr19:19447258-19447348
  hypo

SEQ ID NO: 412883 - DNA, 513 bp, Homo sapiens; identical to SEQ ID NO: 273716
  chr19:19604056-19604569
  hypo

SEQ ID NO: 412884 - DNA, 194 bp, Homo sapiens; identical to SEQ ID NO: 273717
  chr19:19611820-19612014
  hypo

SEQ ID NO: 412885 - DNA, 150 bp, Homo sapiens; identical to SEQ ID NO: 273720
  chr19:19623134-19623284
  hypo

SEQ ID NO: 412886 - DNA, 98 bp, Homo sapiens; identical to SEQ ID NO: 273721
  chr19:19624553-19624651
  hypo

SEQ ID NO: 412887 - DNA, 65 bp, Homo sapiens; identical to SEQ ID NO: 273724
  chr19:19674354-19674419
  hypo

SEQ ID NO: 412888 - DNA, 38 bp, Homo sapiens; identical to SEQ ID NO: 273726
  chr19:19710043-19710081
  hypo

SEQ ID NO: 412889 - DNA, 54 bp, Homo sapiens; identical to SEQ ID NO: 273730
  chr19:19766967-19767021
  hypo

SEQ ID NO: 412890 - DNA, 120 bp, Homo sapiens; identical to SEQ ID NO: 273732
  chr19:19775583-19775703
  hypo

SEQ ID NO: 412891 - DNA, 225 bp, Homo sapiens; identical to SEQ ID NO: 273734
  chr19:19822261-19822486
  hypo

SEQ ID NO: 412892 - DNA, 76 bp, Homo sapiens; identical to SEQ ID NO: 273737
  chr19:20013812-20013888
  hypo

SEQ ID NO: 412893 - DNA, 37 bp, Homo sapiens; identical to SEQ ID NO: 273738
  chr19:20095094-20095131
  hypo

SEQ ID NO: 412894 - DNA, 86 bp, Homo sapiens; identical to SEQ ID NO: 273739
  chr19:20103785-20103871
  hypo

SEQ ID NO: 412895 - DNA, 41 bp, Homo sapiens; identical to SEQ ID NO: 273740
  chr19:20115867-20115908
  hypo

SEQ ID NO: 412896 - DNA, 120 bp, Homo sapiens; identical to SEQ ID NO: 273741
  chr19:20187137-20187257
  hypo

SEQ ID NO: 412897 - DNA, 90 bp, Homo sapiens; identical to SEQ ID NO: 273742
  chr19:21235804-21235894
  hypo

SEQ ID NO: 412898 - DNA, 32 bp, Homo sapiens; identical to SEQ ID NO: 273743
  chr19:21254339-21254371
  hypo

SEQ ID NO: 412899 - DNA, 120 bp, Homo sapiens; identical to SEQ ID NO: 219343
  chr19:21261376-21261496
  hypo

SEQ ID NO: 412900 - DNA, 89 bp, Homo sapiens; identical to SEQ ID NO: 219344
  chr19:21305621-21305710
  hypo

SEQ ID NO: 412901 - DNA, 257 bp, Homo sapiens; identical to SEQ ID NO: 273746
  chr19:21513407-21513664
  hypo

SEQ ID NO: 412902 - DNA, 92 bp, Homo sapiens; identical to SEQ ID NO: 219347
  chr19:21627223-21627315
  hypo

SEQ ID NO: 412903 - DNA, 35 bp, Homo sapiens; identical to SEQ ID NO: 273749
  chr19:21642233-21642268
  hypo

SEQ ID NO: 412904 - DNA, 105 bp, Homo sapiens; identical to SEQ ID NO: 219348
  chr19:21645410-21645515
  hypo

SEQ ID NO: 412905 - DNA, 180 bp, Homo sapiens; identical to SEQ ID NO: 273751
  chr19:21648186-21648366
  hypo

SEQ ID NO: 412906 - DNA, 96 bp, Homo sapiens; identical to SEQ ID NO: 219349
  chr19:21654951-21655047
  hypo

SEQ ID NO: 412907 - DNA, 40 bp, Homo sapiens; identical to SEQ ID NO: 273753
  chr19:21717590-21717630
  hypo

SEQ ID NO: 412908 - DNA, 33 bp, Homo sapiens; identical to SEQ ID NO: 219351
  chr19:21792703-21792736
  hypo

SEQ ID NO: 412909 - DNA, 180 bp, Homo sapiens; identical to SEQ ID NO: 273757
  chr19:21798902-21799082
  hypo

SEQ ID NO: 412910 - DNA, 180 bp, Homo sapiens; identical to SEQ ID NO: 219352
  chr19:22815034-22815214
  hypo

SEQ ID NO: 412911 - DNA, 32 bp, Homo sapiens; identical to SEQ ID NO: 219356
  chr19:22825458-22825490
  hypo

SEQ ID NO: 412912 - DNA, 120 bp, Homo sapiens; identical to SEQ ID NO: 273769
  chr19:23271955-23272075
  hypo

SEQ ID NO: 412913 - DNA, 39 bp, Homo sapiens; identical to SEQ ID NO: 273770
  chr19:23297430-23297469
  hypo

SEQ ID NO: 412914 - DNA, 180 bp, Homo sapiens; identical to SEQ ID NO: 273772
  chr19:23435643-23435823
  hypo

SEQ ID NO: 412915 - DNA, 37 bp, Homo sapiens; identical to SEQ ID NO: 273773
  chr19:23453188-23453225
  hypo

SEQ ID NO: 412916 - DNA, 39 bp, Homo sapiens; identical to SEQ ID NO: 273774
  chr19:23917853-23917892
  hypo

SEQ ID NO: 412917 - DNA, 120 bp, Homo sapiens; identical to SEQ ID NO: 273777
  chr19:24269010-24269130
  hypo

SEQ ID NO: 412918 - DNA, 42 bp, Homo sapiens; identical to SEQ ID NO: 273780
  chr19:28663020-28663062
  hypo

SEQ ID NO: 412919 - DNA, 37 bp, Homo sapiens; identical to SEQ ID NO: 273781
  chr19:29208561-29208598
  hypo

SEQ ID NO: 412920 - DNA, 79 bp, Homo sapiens; identical to SEQ ID NO: 219360
  chr19:30102075-30102154
  hypo

SEQ ID NO: 412921 - DNA, 305 bp, Homo sapiens; identical to SEQ ID NO: 273786
  chr19:30129854-30130159
  hypo

SEQ ID NO: 412922 - DNA, 89 bp, Homo sapiens; identical to SEQ ID NO: 273792
  chr19:30324369-30324458
  hypo

SEQ ID NO: 412923 - DNA, 162 bp, Homo sapiens; identical to SEQ ID NO: 219364
  chr19:30535945-30536107
  hypo

SEQ ID NO: 412924 - DNA, 279 bp, Homo sapiens; identical to SEQ ID NO: 326103
  chr19:30562447-30562726
  hypo

SEQ ID NO: 412925 - DNA, 42 bp, Homo sapiens; identical to SEQ ID NO: 273804
  chr19:31126107-31126149
  hypo

SEQ ID NO: 412926 - DNA, 33 bp, Homo sapiens; identical to SEQ ID NO: 293816
  chr19:31210819-31210852
  hypo

SEQ ID NO: 412927 - DNA, 51 bp, Homo sapiens; identical to SEQ ID NO: 273807
  chr19:31275152-31275203
  hypo

SEQ ID NO: 412928 - DNA, 42 bp, Homo sapiens; identical to SEQ ID NO: 273808
  chr19:31388754-31388796
  hypo

SEQ ID NO: 412929 - DNA, 107 bp, Homo sapiens; identical to SEQ ID NO: 273814
  chr19:31792447-31792554
  hypo

SEQ ID NO: 412930 - DNA, 239 bp, Homo sapiens; identical to SEQ ID NO: 219376
  chr19:31794098-31794337
  hypo

SEQ ID NO: 412931 - DNA, 42 bp, Homo sapiens; identical to SEQ ID NO: 273817
  chr19:32063825-32063867
  hypo

SEQ ID NO: 412932 - DNA, 42 bp, Homo sapiens; identical to SEQ ID NO: 273818
  chr19:32064208-32064250
  hypo

SEQ ID NO: 412933 - DNA, 42 bp, Homo sapiens; identical to SEQ ID NO: 273821
  chr19:32087789-32087831
  hypo

SEQ ID NO: 412934 - DNA, 189 bp, Homo sapiens; identical to SEQ ID NO: 273822
  chr19:32088784-32088973
  hypo

SEQ ID NO: 412935 - DNA, 113 bp, Homo sapiens; identical to SEQ ID NO: 326139
  chr19:32366624-32366737
  hypo

SEQ ID NO: 412936 - DNA, 118 bp, Homo sapiens; identical to SEQ ID NO: 273829
  chr19:32537990-32538108
  hypo

SEQ ID NO: 412937 - DNA, 189 bp, Homo sapiens; identical to SEQ ID NO: 273840
  chr19:33304762-33304951
  hypo

SEQ ID NO: 412938 - DNA, 150 bp, Homo sapiens; identical to SEQ ID NO: 273842
  chr19:33365575-33365725
  hypo

SEQ ID NO: 412939 - DNA, 47 bp, Homo sapiens; identical to SEQ ID NO: 219388
  chr19:33415226-33415273
  hypo

SEQ ID NO: 412940 - DNA, 111 bp, Homo sapiens; identical to SEQ ID NO: 273847
  chr19:33540577-33540688
  hypo

SEQ ID NO: 412941 - DNA, 180 bp, Homo sapiens; identical to SEQ ID NO: 273849
  chr19:33556899-33557079
  hypo

SEQ ID NO: 412942 - DNA, 119 bp, Homo sapiens; identical to SEQ ID NO: 219391
  chr19:33693687-33693806
  hypo

SEQ ID NO: 412943 - DNA, 37 bp, Homo sapiens; identical to SEQ ID NO: 273855
  chr19:33697260-33697297
  hypo

SEQ ID NO: 412944 - DNA, 165 bp, Homo sapiens; identical to SEQ ID NO: 273859
  chr19:33702314-33702479
  hypo

SEQ ID NO: 412945 - DNA, 339 bp, Homo sapiens; identical to SEQ ID NO: 273862
  chr19:33726762-33727101
  hypo

SEQ ID NO: 412946 - DNA, 1022 bp, Homo sapiens; identical to SEQ ID NO: 384772
  chr19:33790839-33791861
  hypo

SEQ ID NO: 412947 - DNA, 81 bp, Homo sapiens; identical to SEQ ID NO: 219396
  chr19:33882202-33882283
  hypo

SEQ ID NO: 412948 - DNA, 52 bp, Homo sapiens; identical to SEQ ID NO: 273867
  chr19:33917859-33917911
  hypo

SEQ ID NO: 412949 - DNA, 178 bp, Homo sapiens; identical to SEQ ID NO: 219397
  chr19:33926621-33926799
  hypo

SEQ ID NO: 412950 - DNA, 183 bp, Homo sapiens; identical to SEQ ID NO: 219398
  chr19:33939089-33939272
  hypo

SEQ ID NO: 412951 - DNA, 32 bp, Homo sapiens; identical to SEQ ID NO: 273870
  chr19:33953394-33953426
  hypo

SEQ ID NO: 412952 - DNA, 118 bp, Homo sapiens; identical to SEQ ID NO: 273871
  chr19:33953632-33953750
  hypo

SEQ ID NO: 412953 - DNA, 63 bp, Homo sapiens; identical to SEQ ID NO: 273875
  chr19:34158695-34158758
  hypo

SEQ ID NO: 412954 - DNA, 348 bp, Homo sapiens; identical to SEQ ID NO: 394555
  chr19:34263490-34263838
  hypo

SEQ ID NO: 412955 - DNA, 40 bp, Homo sapiens; identical to SEQ ID NO: 326199
  chr19:34272708-34272748
  hypo

SEQ ID NO: 412956 - DNA, 158 bp, Homo sapiens; identical to SEQ ID NO: 225896
  chr19:34287808-34287966
  hypo

SEQ ID NO: 412957 - DNA, 82 bp, Homo sapiens; identical to SEQ ID NO: 400671
  chr19:34288005-34288087
  hypo

SEQ ID NO: 412958 - DNA, 88 bp, Homo sapiens; identical to SEQ ID NO: 219403
  chr19:34421531-34421619
  hypo

SEQ ID NO: 412959 - DNA, 32 bp, Homo sapiens; identical to SEQ ID NO: 273882
  chr19:34537937-34537969
  hypo

SEQ ID NO: 412960 - DNA, 31 bp, Homo sapiens; identical to SEQ ID NO: 67308
  chr19:34538209-34538240
  hypo

SEQ ID NO: 412961 - DNA, 34 bp, Homo sapiens; identical to SEQ ID NO: 273884
  chr19:34538665-34538699
  hypo

SEQ ID NO: 412962 - DNA, 34 bp, Homo sapiens; identical to SEQ ID NO: 273885
  chr19:34538939-34538973
  hypo

SEQ ID NO: 412963 - DNA, 34 bp, Homo sapiens; identical to SEQ ID NO: 273886
  chr19:34603234-34603268
  hypo

SEQ ID NO: 412964 - DNA, 37 bp, Homo sapiens; identical to SEQ ID NO: 273887
  chr19:34630392-34630429
  hypo

SEQ ID NO: 412965 - DNA, 190 bp, Homo sapiens; identical to SEQ ID NO: 273888
  chr19:34846160-34846350
  hypo

SEQ ID NO: 412966 - DNA, 49 bp, Homo sapiens; identical to SEQ ID NO: 273891
  chr19:34988798-34988847
  hypo

SEQ ID NO: 412967 - DNA, 42 bp, Homo sapiens; identical to SEQ ID NO: 273892
  chr19:34989429-34989471
  hypo

SEQ ID NO: 412968 - DNA, 309 bp, Homo sapiens; identical to SEQ ID NO: 273893
  chr19:35050089-35050398
  hypo

SEQ ID NO: 412969 - DNA, 61 bp, Homo sapiens; identical to SEQ ID NO: 273894
  chr19:35082486-35082547
  hypo

SEQ ID NO: 412970 - DNA, 38 bp, Homo sapiens; identical to SEQ ID NO: 273895
  chr19:35178755-35178793
  hypo

SEQ ID NO: 412971 - DNA, 139 bp, Homo sapiens; identical to SEQ ID NO: 219409
  chr19:35497760-35497899
  hypo

SEQ ID NO: 412972 - DNA, 88 bp, Homo sapiens; identical to SEQ ID NO: 273904
  chr19:35523454-35523542
  hypo

SEQ ID NO: 412973 - DNA, 32 bp, Homo sapiens; identical to SEQ ID NO: 219412
  chr19:35591100-35591132
  hypo

SEQ ID NO: 412974 - DNA, 60 bp, Homo sapiens; identical to SEQ ID NO: 326236
  chr19:35608882-35608942
  hypo

SEQ ID NO: 412975 - DNA, 115 bp, Homo sapiens; identical to SEQ ID NO: 273916
  chr19:35619189-35619304
  hypo

SEQ ID NO: 412976 - DNA, 137 bp, Homo sapiens; identical to SEQ ID NO: 273919
  chr19:35793376-35793513
  hypo

SEQ ID NO: 412977 - DNA, 36 bp, Homo sapiens; identical to SEQ ID NO: 273921
  chr19:35835485-35835521
  hypo

SEQ ID NO: 412978 - DNA, 58 bp, Homo sapiens; identical to SEQ ID NO: 273922
  chr19:35835740-35835798
  hypo

SEQ ID NO: 412979 - DNA, 253 bp, Homo sapiens; identical to SEQ ID NO: 273925
  chr19:35843200-35843453
  hypo

SEQ ID NO: 412980 - DNA, 217 bp, Homo sapiens; identical to SEQ ID NO: 326249
  chr19:35941137-35941354
  hypo

SEQ ID NO: 412981 - DNA, 185 bp, Homo sapiens; identical to SEQ ID NO: 219417
  chr19:36041161-36041346
  hypo

SEQ ID NO: 412982 - DNA, 193 bp, Homo sapiens; identical to SEQ ID NO: 273932
  chr19:36156235-36156428
  hypo

SEQ ID NO: 412983 - DNA, 229 bp, Homo sapiens; identical to SEQ ID NO: 273934
  chr19:36157519-36157748
  hypo

SEQ ID NO: 412984 - DNA, 78 bp, Homo sapiens; identical to SEQ ID NO: 273936
  chr19:36172746-36172824
  hypo

SEQ ID NO: 412985 - DNA, 88 bp, Homo sapiens; identical to SEQ ID NO: 273937
  chr19:36199997-36200085
  hypo

SEQ ID NO: 412986 - DNA, 46 bp, Homo sapiens; identical to SEQ ID NO: 326263
  chr19:36220151-36220197
  hypo

SEQ ID NO: 412987 - DNA, 139 bp, Homo sapiens; identical to SEQ ID NO: 273942
  chr19:36229127-36229266
  hypo

SEQ ID NO: 412988 - DNA, 77 bp, Homo sapiens; identical to SEQ ID NO: 273944
  chr19:36262374-36262451
  hypo

SEQ ID NO: 412989 - DNA, 79 bp, Homo sapiens; identical to SEQ ID NO: 219423
  chr19:36388611-36388690
  hypo

SEQ ID NO: 412990 - DNA, 82 bp, Homo sapiens; identical to SEQ ID NO: 273948
  chr19:36500940-36501022
  hypo

SEQ ID NO: 412991 - DNA, 36 bp, Homo sapiens; identical to SEQ ID NO: 273950
  chr19:36562069-36562105
  hypo

SEQ ID NO: 412992 - DNA, 50 bp, Homo sapiens; identical to SEQ ID NO: 387179
  chr19:36593115-36593165
  hypo

SEQ ID NO: 412993 - DNA, 246 bp, Homo sapiens; identical to SEQ ID NO: 219426
  chr19:36641157-36641403
  hypo

SEQ ID NO: 412994 - DNA, 32 bp, Homo sapiens; identical to SEQ ID NO: 273956
  chr19:36707255-36707287
  hypo

SEQ ID NO: 412995 - DNA, 31 bp, Homo sapiens; identical to SEQ ID NO: 273957
  chr19:36707527-36707558
  hypo

SEQ ID NO: 412996 - DNA, 44 bp, Homo sapiens; identical to SEQ ID NO: 273959
  chr19:36750231-36750275
  hypo

SEQ ID NO: 412997 - DNA, 93 bp, Homo sapiens; identical to SEQ ID NO: 273962
  chr19:36928986-36929079
  hypo

SEQ ID NO: 412998 - DNA, 146 bp, Homo sapiens; identical to SEQ ID NO: 273964
  chr19:37114162-37114308
  hypo

SEQ ID NO: 412999 - DNA, 285 bp, Homo sapiens; identical to SEQ ID NO: 219428
  chr19:37159168-37159453
  hypo

SEQ ID NO: 413000 - DNA, 113 bp, Homo sapiens; identical to SEQ ID NO: 225912
  chr19:37262887-37263000
  hypo

SEQ ID NO: 413001 - DNA, 99 bp, Homo sapiens; identical to SEQ ID NO: 273968
  chr19:37293601-37293700
  hypo

SEQ ID NO: 413002 - DNA, 120 bp, Homo sapiens; identical to SEQ ID NO: 273970
  chr19:37503359-37503479
  hypo

SEQ ID NO: 413003 - DNA, 190 bp, Homo sapiens; identical to SEQ ID NO: 219429
  chr19:37504006-37504196
  hypo

SEQ ID NO: 413004 - DNA, 284 bp, Homo sapiens; identical to SEQ ID NO: 219430
  chr19:37504226-37504510
  hypo

SEQ ID NO: 413005 - DNA, 682 bp, Homo sapiens; identical to SEQ ID NO: 273973
  chr19:37546262-37546944
  hypo

SEQ ID NO: 413006 - DNA, 340 bp, Homo sapiens; identical to SEQ ID NO: 273974
  chr19:37547634-37547974
  hypo

SEQ ID NO: 413007 - DNA, 216 bp, Homo sapiens; identical to SEQ ID NO: 273976
  chr19:37550817-37551033
  hypo

SEQ ID NO: 413008 - DNA, 214 bp, Homo sapiens; identical to SEQ ID NO: 273978
  chr19:37551901-37552115
  hypo

SEQ ID NO: 413009 - DNA, 97 bp, Homo sapiens; identical to SEQ ID NO: 273980
  chr19:37666951-37667048
  hypo

SEQ ID NO: 413010 - DNA, 36 bp, Homo sapiens; identical to SEQ ID NO: 273981
  chr19:37674960-37674996
  hypo

SEQ ID NO: 413011 - DNA, 36 bp, Homo sapiens; identical to SEQ ID NO: 273982
  chr19:37682220-37682256
  hypo

SEQ ID NO: 413012 - DNA, 42 bp, Homo sapiens; identical to SEQ ID NO: 273985
  chr19:37741708-37741750
  hypo

SEQ ID NO: 413013 - DNA, 37 bp, Homo sapiens; identical to SEQ ID NO: 273986
  chr19:37831817-37831854
  hypo

SEQ ID NO: 413014 - DNA, 241 bp, Homo sapiens; identical to SEQ ID NO: 273987
  chr19:37853603-37853844
  hypo

SEQ ID NO: 413015 - DNA, 35 bp, Homo sapiens; identical to SEQ ID NO: 326317
  chr19:37995775-37995810
  hypo

SEQ ID NO: 413016 - DNA, 35 bp, Homo sapiens; identical to SEQ ID NO: 273991
  chr19:38185144-38185179
  hypo

SEQ ID NO: 413017 - DNA, 382 bp, Homo sapiens; identical to SEQ ID NO: 273993
  chr19:38221768-38222150
  hypo

SEQ ID NO: 413018 - DNA, 82 bp, Homo sapiens; identical to SEQ ID NO: 273994
  chr19:38273674-38273756
  hypo

SEQ ID NO: 413019 - DNA, 39 bp, Homo sapiens; identical to SEQ ID NO: 219433
  chr19:38287060-38287099
  hypo

SEQ ID NO: 413020 - DNA, 74 bp, Homo sapiens; identical to SEQ ID NO: 219434
  chr19:38309039-38309113
  hypo

SEQ ID NO: 413021 - DNA, 114 bp, Homo sapiens; identical to SEQ ID NO: 219435
  chr19:38347218-38347332
  hypo

SEQ ID NO: 413022 - DNA, 57 bp, Homo sapiens; identical to SEQ ID NO: 225920
  chr19:38398221-38398278
  hypo

SEQ ID NO: 413023 - DNA, 196 bp, Homo sapiens; identical to SEQ ID NO: 219438
  chr19:38500327-38500523
  hypo

SEQ ID NO: 413024 - DNA, 42 bp, Homo sapiens; identical to SEQ ID NO: 274008
  chr19:38568581-38568623
  hypo

SEQ ID NO: 413025 - DNA, 142 bp, Homo sapiens; identical to SEQ ID NO: 219441
  chr19:38572720-38572862
  hypo

SEQ ID NO: 413026 - DNA, 221 bp, Homo sapiens; identical to SEQ ID NO: 274013
  chr19:38625953-38626174
  hypo

SEQ ID NO: 413027 - DNA, 92 bp, Homo sapiens; identical to SEQ ID NO: 219444
  chr19:38639131-38639223
  hypo

SEQ ID NO: 413028 - DNA, 179 bp, Homo sapiens; identical to SEQ ID NO: 326349
  chr19:38684215-38684394
  hypo

SEQ ID NO: 413029 - DNA, 38 bp, Homo sapiens; identical to SEQ ID NO: 326350
  chr19:38684424-38684462
  hypo

SEQ ID NO: 413030 - DNA, 91 bp, Homo sapiens; identical to SEQ ID NO: 219448
  chr19:38691720-38691811
  hypo

SEQ ID NO: 413031 - DNA, 430 bp, Homo sapiens; identical to SEQ ID NO: 274023
  chr19:38706579-38707009
  hypo

SEQ ID NO: 413032 - DNA, 440 bp, Homo sapiens; identical to SEQ ID NO: 274024
  chr19:38711296-38711736
  hypo

SEQ ID NO: 413033 - DNA, 87 bp, Homo sapiens; identical to SEQ ID NO: 274027
  chr19:38764530-38764617
  hypo

SEQ ID NO: 413034 - DNA, 58 bp, Homo sapiens; identical to SEQ ID NO: 326367
  chr19:38782477-38782535
  hypo

SEQ ID NO: 413035 - DNA, 73 bp, Homo sapiens; identical to SEQ ID NO: 326368
  chr19:38782670-38782743
  hypo

SEQ ID NO: 413036 - DNA, 235 bp, Homo sapiens; identical to SEQ ID NO: 274033
  chr19:38784873-38785108
  hypo

SEQ ID NO: 413037 - DNA, 45 bp, Homo sapiens; identical to SEQ ID NO: 274035
  chr19:38817274-38817319
  hypo

SEQ ID NO: 413038 - DNA, 44 bp, Homo sapiens; identical to SEQ ID NO: 219453
  chr19:38828333-38828377
  hypo

SEQ ID NO: 413039 - DNA, 33 bp, Homo sapiens; identical to SEQ ID NO: 274045
  chr19:38900084-38900117
  hypo

SEQ ID NO: 413040 - DNA, 38 bp, Homo sapiens; identical to SEQ ID NO: 274050
  chr19:38951826-38951864
  hypo

SEQ ID NO: 413041 - DNA, 164 bp, Homo sapiens; identical to SEQ ID NO: 274055
  chr19:38985044-38985208
  hypo

SEQ ID NO: 413042 - DNA, 595 bp, Homo sapiens; identical to SEQ ID NO: 219462
  chr19:39051723-39052318
  hypo

SEQ ID NO: 413043 - DNA, 125 bp, Homo sapiens; identical to SEQ ID NO: 274064
  chr19:39092089-39092214
  hypo

SEQ ID NO: 413044 - DNA, 31 bp, Homo sapiens; identical to SEQ ID NO: 274068
  chr19:39128243-39128274
  hypo

SEQ ID NO: 413045 - DNA, 79 bp, Homo sapiens; identical to SEQ ID NO: 219465
  chr19:39144877-39144956
  hypo

SEQ ID NO: 413046 - DNA, 154 bp, Homo sapiens; identical to SEQ ID NO: 274074
  chr19:39189493-39189647
  hypo

SEQ ID NO: 413047 - DNA, 196 bp, Homo sapiens; identical to SEQ ID NO: 274075
  chr19:39190982-39191178
  hypo

SEQ ID NO: 413048 - DNA, 86 bp, Homo sapiens; identical to SEQ ID NO: 274078
  chr19:39211068-39211154
  hypo

SEQ ID NO: 413049 - DNA, 178 bp, Homo sapiens; identical to SEQ ID NO: 219471
  chr19:39279303-39279481
  hypo

SEQ ID NO: 413050 - DNA, 77 bp, Homo sapiens; identical to SEQ ID NO: 274088
  chr19:39302318-39302395
  hypo

SEQ ID NO: 413051 - DNA, 36 bp, Homo sapiens; identical to SEQ ID NO: 219476
  chr19:39310980-39311016
  hypo

SEQ ID NO: 413052 - DNA, 233 bp, Homo sapiens; identical to SEQ ID NO: 274092
  chr19:39327431-39327664
  hypo

SEQ ID NO: 413053 - DNA, 33 bp, Homo sapiens; identical to SEQ ID NO: 274095
  chr19:39330892-39330925
  hypo

SEQ ID NO: 413054 - DNA, 433 bp, Homo sapiens; identical to SEQ ID NO: 274096
  chr19:39332929-39333362
  hypo

SEQ ID NO: 413055 - DNA, 176 bp, Homo sapiens; identical to SEQ ID NO: 274099
  chr19:39415993-39416169
  hypo

SEQ ID NO: 413056 - DNA, 147 bp, Homo sapiens; identical to SEQ ID NO: 274101
  chr19:39439160-39439307
  hypo

SEQ ID NO: 413057 - DNA, 62 bp, Homo sapiens; identical to SEQ ID NO: 274102
  chr19:39544160-39544222
  hypo

SEQ ID NO: 413058 - DNA, 98 bp, Homo sapiens; identical to SEQ ID NO: 274103
  chr19:39553665-39553763
  hypo

SEQ ID NO: 413059 - DNA, 42 bp, Homo sapiens; identical to SEQ ID NO: 274104
  chr19:39568094-39568136
  hypo

SEQ ID NO: 413060 - DNA, 124 bp, Homo sapiens; identical to SEQ ID NO: 219480
  chr19:39597518-39597642
  hypo

SEQ ID NO: 413061 - DNA, 220 bp, Homo sapiens; identical to SEQ ID NO: 274108
  chr19:39644535-39644755
  hypo

SEQ ID NO: 413062 - DNA, 155 bp, Homo sapiens; identical to SEQ ID NO: 326449
  chr19:39645707-39645862
  hypo

SEQ ID NO: 413063 - DNA, 270 bp, Homo sapiens; identical to SEQ ID NO: 219484
  chr19:39664416-39664686
  hypo

SEQ ID NO: 413064 - DNA, 196 bp, Homo sapiens; identical to SEQ ID NO: 219486
  chr19:39671859-39672055
  hypo

SEQ ID NO: 413065 - DNA, 133 bp, Homo sapiens; identical to SEQ ID NO: 326457
  chr19:39672255-39672388
  hypo

SEQ ID NO: 413066 - DNA, 429 bp, Homo sapiens; identical to SEQ ID NO: 219487
  chr19:39672463-39672892
  hypo

SEQ ID NO: 413067 - DNA, 201 bp, Homo sapiens; identical to SEQ ID NO: 326459
  chr19:39691027-39691228
  hypo

SEQ ID NO: 413068 - DNA, 90 bp, Homo sapiens; identical to SEQ ID NO: 274120
  chr19:39816484-39816574
  hypo

SEQ ID NO: 413069 - DNA, 247 bp, Homo sapiens; identical to SEQ ID NO: 274122
  chr19:39818151-39818398
  hypo

SEQ ID NO: 413070 - DNA, 53 bp, Homo sapiens; identical to SEQ ID NO: 219489
  chr19:39964614-39964667
  hypo

SEQ ID NO: 413071 - DNA, 98 bp, Homo sapiens; identical to SEQ ID NO: 293965
  chr19:39992838-39992936
  hypo

SEQ ID NO: 413072 - DNA, 165 bp, Homo sapiens; identical to SEQ ID NO: 219490
  chr19:40015704-40015869
  hypo

SEQ ID NO: 413073 - DNA, 34 bp, Homo sapiens; identical to SEQ ID NO: 274130
  chr19:40016713-40016747
  hypo

SEQ ID NO: 413074 - DNA, 420 bp, Homo sapiens; identical to SEQ ID NO: 219492
  chr19:40020180-40020600
  hypo

SEQ ID NO: 413075 - DNA, 31 bp, Homo sapiens; identical to SEQ ID NO: 274133
  chr19:40026202-40026233
  hypo

SEQ ID NO: 413076 - DNA, 105 bp, Homo sapiens; identical to SEQ ID NO: 274135
  chr19:40269170-40269275
  hypo

SEQ ID NO: 413077 - DNA, 175 bp, Homo sapiens; identical to SEQ ID NO: 219493
  chr19:40316373-40316548
  hypo

SEQ ID NO: 413078 - DNA, 95 bp, Homo sapiens; identical to SEQ ID NO: 274140
  chr19:40343350-40343445
  hypo

SEQ ID NO: 413079 - DNA, 41 bp, Homo sapiens; identical to SEQ ID NO: 274142
  chr19:40386023-40386064
  hypo

SEQ ID NO: 413080 - DNA, 103 bp, Homo sapiens; identical to SEQ ID NO: 274143
  chr19:40405622-40405725
  hypo

SEQ ID NO: 413081 - DNA, 119 bp, Homo sapiens; identical to SEQ ID NO: 274144
  chr19:40408775-40408894
  hypo

SEQ ID NO: 413082 - DNA, 70 bp, Homo sapiens; identical to SEQ ID NO: 274146
  chr19:40449596-40449666
  hypo

SEQ ID NO: 413083 - DNA, 42 bp, Homo sapiens; identical to SEQ ID NO: 274150
  chr19:40706865-40706907
  hypo

SEQ ID NO: 413084 - DNA, 175 bp, Homo sapiens; identical to SEQ ID NO: 219499
  chr19:40711781-40711956
  hypo

SEQ ID NO: 413085 - DNA, 42 bp, Homo sapiens; identical to SEQ ID NO: 274152
  chr19:40720419-40720461
  hypo

SEQ ID NO: 413086 - DNA, 34 bp, Homo sapiens; identical to SEQ ID NO: 274153
  chr19:40727176-40727210
  hypo

SEQ ID NO: 413087 - DNA, 135 bp, Homo sapiens; identical to SEQ ID NO: 274154
  chr19:40738249-40738384
  hypo

SEQ ID NO: 413088 - DNA, 367 bp, Homo sapiens; identical to SEQ ID NO: 274157
  chr19:40741640-40742007
  hypo

SEQ ID NO: 413089 - DNA, 165 bp, Homo sapiens; identical to SEQ ID NO: 274160
  chr19:40744734-40744899
  hypo

SEQ ID NO: 413090 - DNA, 161 bp, Homo sapiens; identical to SEQ ID NO: 219502
  chr19:40745940-40746101
  hypo

SEQ ID NO: 413091 - DNA, 72 bp, Homo sapiens; identical to SEQ ID NO: 274165
  chr19:40757959-40758031
  hypo

SEQ ID NO: 413092 - DNA, 169 bp, Homo sapiens; identical to SEQ ID NO: 219504
  chr19:40828672-40828841
  hypo

SEQ ID NO: 413093 - DNA, 109 bp, Homo sapiens; identical to SEQ ID NO: 219507
  chr19:40873917-40874026
  hypo

SEQ ID NO: 413094 - DNA, 113 bp, Homo sapiens; identical to SEQ ID NO: 219509
  chr19:40928722-40928835
  hypo

SEQ ID NO: 413095 - DNA, 115 bp, Homo sapiens; identical to SEQ ID NO: 326520
  chr19:40951499-40951614
  hypo

SEQ ID NO: 413096 - DNA, 247 bp, Homo sapiens; identical to SEQ ID NO: 274183
  chr19:41133575-41133822
  hypo

SEQ ID NO: 413097 - DNA, 93 bp, Homo sapiens; identical to SEQ ID NO: 274184
  chr19:41168076-41168169
  hypo

SEQ ID NO: 413098 - DNA, 33 bp, Homo sapiens; identical to SEQ ID NO: 225936
  chr19:41304119-41304152
  hypo

SEQ ID NO: 413099 - DNA, 61 bp, Homo sapiens; identical to SEQ ID NO: 274188
  chr19:41602157-41602218
  hypo

SEQ ID NO: 413100 - DNA, 41 bp, Homo sapiens; identical to SEQ ID NO: 219515
  chr19:41616326-41616367
  hypo

SEQ ID NO: 413101 - DNA, 223 bp, Homo sapiens; identical to SEQ ID NO: 326537
  chr19:41673657-41673880
  hypo

SEQ ID NO: 413102 - DNA, 342 bp, Homo sapiens; identical to SEQ ID NO: 219517
  chr19:41675691-41676033
  hypo

SEQ ID NO: 413103 - DNA, 350 bp, Homo sapiens; identical to SEQ ID NO: 274194
  chr19:41680150-41680500
  hypo

SEQ ID NO: 413104 - DNA, 104 bp, Homo sapiens; identical to SEQ ID NO: 225938
  chr19:41860206-41860310
  hypo

SEQ ID NO: 413105 - DNA, 124 bp, Homo sapiens; identical to SEQ ID NO: 326543
  chr19:41919971-41920095
  hypo

SEQ ID NO: 413106 - DNA, 91 bp, Homo sapiens; identical to SEQ ID NO: 326545
  chr19:41932289-41932380
  hypo

SEQ ID NO: 413107 - DNA, 136 bp, Homo sapiens; identical to SEQ ID NO: 97636
  chr19:41932387-41932523
  hypo

SEQ ID NO: 413108 - DNA, 134 bp, Homo sapiens; identical to SEQ ID NO: 274202
  chr19:42373112-42373246
  hypo

SEQ ID NO: 413109 - DNA, 308 bp, Homo sapiens; identical to SEQ ID NO: 219520
  chr19:42400292-42400600
  hypo

SEQ ID NO: 413110 - DNA, 55 bp, Homo sapiens; identical to SEQ ID NO: 274211
  chr19:42638977-42639032
  hypo

SEQ ID NO: 413111 - DNA, 56 bp, Homo sapiens; identical to SEQ ID NO: 274212
  chr19:42657375-42657431
  hypo

SEQ ID NO: 413112 - DNA, 185 bp, Homo sapiens; identical to SEQ ID NO: 274213
  chr19:42700691-42700876
  hypo

SEQ ID NO: 413113 - DNA, 31 bp, Homo sapiens; identical to SEQ ID NO: 219526
  chr19:42723738-42723769
  hypo

SEQ ID NO: 413114 - DNA, 46 bp, Homo sapiens; identical to SEQ ID NO: 274217
  chr19:42729404-42729450
  hypo

SEQ ID NO: 413115 - DNA, 94 bp, Homo sapiens; identical to SEQ ID NO: 274219
  chr19:42796467-42796561
  hypo

SEQ ID NO: 413116 - DNA, 99 bp, Homo sapiens; identical to SEQ ID NO: 326569
  chr19:42856483-42856582
  hypo

SEQ ID NO: 413117 - DNA, 236 bp, Homo sapiens; identical to SEQ ID NO: 219528
  chr19:42873732-42873968
  hypo

SEQ ID NO: 413118 - DNA, 84 bp, Homo sapiens; identical to SEQ ID NO: 274225
  chr19:43181320-43181404
  hypo

SEQ ID NO: 413119 - DNA, 150 bp, Homo sapiens; identical to SEQ ID NO: 274226
  chr19:43918868-43919018
  hypo

SEQ ID NO: 413120 - DNA, 327 bp, Homo sapiens; identical to SEQ ID NO: 274227
  chr19:43919347-43919674
  hypo

SEQ ID NO: 413121 - DNA, 90 bp, Homo sapiens; identical to SEQ ID NO: 274232
  chr19:44207878-44207968
  hypo

SEQ ID NO: 413122 - DNA, 167 bp, Homo sapiens; identical to SEQ ID NO: 274234
  chr19:44243554-44243721
  hypo

SEQ ID NO: 413123 - DNA, 322 bp, Homo sapiens; identical to SEQ ID NO: 274242
  chr19:44932984-44933306
  hypo

SEQ ID NO: 413124 - DNA, 31 bp, Homo sapiens; identical to SEQ ID NO: 219538
  chr19:44988475-44988506
  hypo

SEQ ID NO: 413125 - DNA, 35 bp, Homo sapiens; identical to SEQ ID NO: 274248
  chr19:45162026-45162061
  hypo

SEQ ID NO: 413126 - DNA, 104 bp, Homo sapiens; identical to SEQ ID NO: 274251
  chr19:45193693-45193797
  hypo

SEQ ID NO: 413127 - DNA, 204 bp, Homo sapiens; identical to SEQ ID NO: 274252
  chr19:45206658-45206862
  hypo

SEQ ID NO: 413128 - DNA, 122 bp, Homo sapiens; identical to SEQ ID NO: 219547
  chr19:45211220-45211342
  hypo

SEQ ID NO: 413129 - DNA, 90 bp, Homo sapiens; identical to SEQ ID NO: 274255
  chr19:45268259-45268349
  hypo

SEQ ID NO: 413130 - DNA, 38 bp, Homo sapiens; identical to SEQ ID NO: 274261
  chr19:45328104-45328142
  hypo

SEQ ID NO: 413131 - DNA, 368 bp, Homo sapiens; identical to SEQ ID NO: 294084
  chr19:45347906-45348274
  hypo

SEQ ID NO: 413132 - DNA, 272 bp, Homo sapiens; identical to SEQ ID NO: 274263
  chr19:45377062-45377334
  hypo

SEQ ID NO: 413133 - DNA, 78 bp, Homo sapiens; identical to SEQ ID NO: 387208
  chr19:45377394-45377472
  hypo

SEQ ID NO: 413134 - DNA, 44 bp, Homo sapiens; identical to SEQ ID NO: 274265
  chr19:45382930-45382974
  hypo

SEQ ID NO: 413135 - DNA, 40 bp, Homo sapiens; identical to SEQ ID NO: 274266
  chr19:45385981-45386021
  hypo

SEQ ID NO: 413136 - DNA, 353 bp, Homo sapiens; identical to SEQ ID NO: 274268
  chr19:45465023-45465376
  hypo

SEQ ID NO: 413137 - DNA, 261 bp, Homo sapiens; identical to SEQ ID NO: 274270
  chr19:45515279-45515540
  hypo

SEQ ID NO: 413138 - DNA, 101 bp, Homo sapiens; identical to SEQ ID NO: 219557
  chr19:45546675-45546776
  hypo

SEQ ID NO: 413139 - DNA, 212 bp, Homo sapiens; identical to SEQ ID NO: 219558
  chr19:45567707-45567919
  hypo

SEQ ID NO: 413140 - DNA, 259 bp, Homo sapiens; identical to SEQ ID NO: 274282
  chr19:45627566-45627825
  hypo

SEQ ID NO: 413141 - DNA, 157 bp, Homo sapiens; identical to SEQ ID NO: 274286
  chr19:45660340-45660497
  hypo

SEQ ID NO: 413142 - DNA, 63 bp, Homo sapiens; identical to SEQ ID NO: 326656
  chr19:45753597-45753660
  hypo

SEQ ID NO: 413143 - DNA, 166 bp, Homo sapiens; identical to SEQ ID NO: 274291
  chr19:45767999-45768165
  hypo

SEQ ID NO: 413144 - DNA, 100 bp, Homo sapiens; identical to SEQ ID NO: 274292
  chr19:45768393-45768493
  hypo

SEQ ID NO: 413145 - DNA, 109 bp, Homo sapiens; identical to SEQ ID NO: 274294
  chr19:45805727-45805836
  hypo

SEQ ID NO: 413146 - DNA, 86 bp, Homo sapiens; identical to SEQ ID NO: 219569
  chr19:45866860-45866946
  hypo

SEQ ID NO: 413147 - DNA, 186 bp, Homo sapiens; identical to SEQ ID NO: 274300
  chr19:45867290-45867476
  hypo

SEQ ID NO: 413148 - DNA, 207 bp, Homo sapiens; identical to SEQ ID NO: 274301
  chr19:45895251-45895458
  hypo

SEQ ID NO: 413149 - DNA, 82 bp, Homo sapiens; identical to SEQ ID NO: 274303
  chr19:45949940-45950022
  hypo

SEQ ID NO: 413150 - DNA, 90 bp, Homo sapiens; identical to SEQ ID NO: 274305
  chr19:46021493-46021583
  hypo

SEQ ID NO: 413151 - DNA, 41 bp, Homo sapiens; identical to SEQ ID NO: 274308
  chr19:46208926-46208967
  hypo

SEQ ID NO: 413152 - DNA, 161 bp, Homo sapiens; identical to SEQ ID NO: 274309
  chr19:46211661-46211822
  hypo

SEQ ID NO: 413153 - DNA, 33 bp, Homo sapiens; identical to SEQ ID NO: 225958
  chr19:46273813-46273846
  hypo

SEQ ID NO: 413154 - DNA, 316 bp, Homo sapiens; identical to SEQ ID NO: 274315
  chr19:46326464-46326780
  hypo

SEQ ID NO: 413155 - DNA, 105 bp, Homo sapiens; identical to SEQ ID NO: 274319
  chr19:46345643-46345748
  hypo

SEQ ID NO: 413156 - DNA, 240 bp, Homo sapiens; identical to SEQ ID NO: 400746
  chr19:46405055-46405295
  hypo

SEQ ID NO: 413157 - DNA, 32 bp, Homo sapiens; identical to SEQ ID NO: 274323
  chr19:46835962-46835994
  hypo

SEQ ID NO: 413158 - DNA, 38 bp, Homo sapiens; identical to SEQ ID NO: 274324
  chr19:46851845-46851883
  hypo

SEQ ID NO: 413159 - DNA, 241 bp, Homo sapiens; identical to SEQ ID NO: 274329
  chr19:47127006-47127247
  hypo

SEQ ID NO: 413160 - DNA, 751 bp, Homo sapiens; identical to SEQ ID NO: 294146
  chr19:47258852-47259603
  hypo

SEQ ID NO: 413161 - DNA, 42 bp, Homo sapiens; identical to SEQ ID NO: 274333
  chr19:47261178-47261220
  hypo

SEQ ID NO: 413162 - DNA, 117 bp, Homo sapiens; identical to SEQ ID NO: 205503
  chr19:47363286-47363403
  hypo

SEQ ID NO: 413163 - DNA, 193 bp, Homo sapiens; identical to SEQ ID NO: 274339
  chr19:47368883-47369076
  hypo

SEQ ID NO: 413164 - DNA, 169 bp, Homo sapiens; identical to SEQ ID NO: 274341
  chr19:47429562-47429731
  hypo

SEQ ID NO: 413165 - DNA, 38 bp, Homo sapiens; identical to SEQ ID NO: 274343
  chr19:47498024-47498062
  hypo

SEQ ID NO: 413166 - DNA, 69 bp, Homo sapiens; identical to SEQ ID NO: 294152
  chr19:47522920-47522989
  hypo

SEQ ID NO: 413167 - DNA, 56 bp, Homo sapiens; identical to SEQ ID NO: 326722
  chr19:47540628-47540684
  hypo

SEQ ID NO: 413168 - DNA, 79 bp, Homo sapiens; identical to SEQ ID NO: 326723
  chr19:47540719-47540798
  hypo

SEQ ID NO: 413169 - DNA, 33 bp, Homo sapiens; identical to SEQ ID NO: 326728
  chr19:47633342-47633375
  hypo

SEQ ID NO: 413170 - DNA, 152 bp, Homo sapiens; identical to SEQ ID NO: 225972
  chr19:47730760-47730912
  hypo

SEQ ID NO: 413171 - DNA, 42 bp, Homo sapiens; identical to SEQ ID NO: 274353
  chr19:47779445-47779487
  hypo

SEQ ID NO: 413172 - DNA, 52 bp, Homo sapiens; identical to SEQ ID NO: 274354
  chr19:47817584-47817636
  hypo

SEQ ID NO: 413173 - DNA, 137 bp, Homo sapiens; identical to SEQ ID NO: 219593
  chr19:47868801-47868938
  hypo

SEQ ID NO: 413174 - DNA, 165 bp, Homo sapiens; identical to SEQ ID NO: 294172
  chr19:47951123-47951288
  hypo

SEQ ID NO: 413175 - DNA, 175 bp, Homo sapiens; identical to SEQ ID NO: 294173
  chr19:47951318-47951493
  hypo

SEQ ID NO: 413176 - DNA, 44 bp, Homo sapiens; identical to SEQ ID NO: 274363
  chr19:48052287-48052331
  hypo

SEQ ID NO: 413177 - DNA, 94 bp, Homo sapiens; identical to SEQ ID NO: 274365
  chr19:48082925-48083019
  hypo

SEQ ID NO: 413178 - DNA, 39 bp, Homo sapiens; identical to SEQ ID NO: 219600
  chr19:48145667-48145706
  hypo

SEQ ID NO: 413179 - DNA, 45 bp, Homo sapiens; identical to SEQ ID NO: 274373
  chr19:48251493-48251538
  hypo

SEQ ID NO: 413180 - DNA, 38 bp, Homo sapiens; identical to SEQ ID NO: 219603
  chr19:48393224-48393262
  hypo

SEQ ID NO: 413181 - DNA, 44 bp, Homo sapiens; identical to SEQ ID NO: 274378
  chr19:48479211-48479255
  hypo

SEQ ID NO: 413182 - DNA, 228 bp, Homo sapiens; identical to SEQ ID NO: 274384
  chr19:48798924-48799152
  hypo

SEQ ID NO: 413183 - DNA, 105 bp, Homo sapiens; identical to SEQ ID NO: 225979
  chr19:48823631-48823736
  hypo

SEQ ID NO: 413184 - DNA, 112 bp, Homo sapiens; identical to SEQ ID NO: 219607
  chr19:48844372-48844484
  hypo

SEQ ID NO: 413185 - DNA, 53 bp, Homo sapiens; identical to SEQ ID NO: 274387
  chr19:48846609-48846662
  hypo

SEQ ID NO: 413186 - DNA, 144 bp, Homo sapiens; identical to SEQ ID NO: 219609
  chr19:48889258-48889402
  hypo

SEQ ID NO: 413187 - DNA, 93 bp, Homo sapiens; identical to SEQ ID NO: 274393
  chr19:48926477-48926570
  hypo

SEQ ID NO: 413188 - DNA, 183 bp, Homo sapiens; identical to SEQ ID NO: 294193
  chr19:48994398-48994581
  hypo

SEQ ID NO: 413189 - DNA, 174 bp, Homo sapiens; identical to SEQ ID NO: 274401
  chr19:49076590-49076764
  hypo

SEQ ID NO: 413190 - DNA, 389 bp, Homo sapiens; identical to SEQ ID NO: 274405
  chr19:49132563-49132952
  hypo

SEQ ID NO: 413191 - DNA, 45 bp, Homo sapiens; identical to SEQ ID NO: 219618
  chr19:49207344-49207389
  hypo

SEQ ID NO: 413192 - DNA, 273 bp, Homo sapiens; identical to SEQ ID NO: 274412
  chr19:49218942-49219215
  hypo

SEQ ID NO: 413193 - DNA, 98 bp, Homo sapiens; identical to SEQ ID NO: 274416
  chr19:49237047-49237145
  hypo

SEQ ID NO: 413194 - DNA, 76 bp, Homo sapiens; identical to SEQ ID NO: 219621
  chr19:49246879-49246955
  hypo

SEQ ID NO: 413195 - DNA, 78 bp, Homo sapiens; identical to SEQ ID NO: 219623
  chr19:49287699-49287777
  hypo

SEQ ID NO: 413196 - DNA, 99 bp, Homo sapiens; identical to SEQ ID NO: 274422
  chr19:49305614-49305713
  hypo

SEQ ID NO: 413197 - DNA, 182 bp, Homo sapiens; identical to SEQ ID NO: 274423
  chr19:49348663-49348845
  hypo

SEQ ID NO: 413198 - DNA, 93 bp, Homo sapiens; identical to SEQ ID NO: 219624
  chr19:49419216-49419309
  hypo

SEQ ID NO: 413199 - DNA, 64 bp, Homo sapiens; identical to SEQ ID NO: 326815
  chr19:49482062-49482126
  hypo

SEQ ID NO: 413200 - DNA, 152 bp, Homo sapiens; identical to SEQ ID NO: 274429
  chr19:49490480-49490632
  hypo

SEQ ID NO: 413201 - DNA, 48 bp, Homo sapiens; identical to SEQ ID NO: 274430
  chr19:49509361-49509409
  hypo

SEQ ID NO: 413202 - DNA, 96 bp, Homo sapiens; identical to SEQ ID NO: 274432
  chr19:49540857-49540953
  hypo

SEQ ID NO: 413203 - DNA, 55 bp, Homo sapiens; identical to SEQ ID NO: 394650
  chr19:49600408-49600463
  hypo

SEQ ID NO: 413204 - DNA, 163 bp, Homo sapiens; identical to SEQ ID NO: 219627
  chr19:49606743-49606906
  hypo

SEQ ID NO: 413205 - DNA, 87 bp, Homo sapiens; identical to SEQ ID NO: 274438
  chr19:49703773-49703860
  hypo

SEQ ID NO: 413206 - DNA, 205 bp, Homo sapiens; identical to SEQ ID NO: 274440
  chr19:49705148-49705353
  hypo

SEQ ID NO: 413207 - DNA, 131 bp, Homo sapiens; identical to SEQ ID NO: 219631
  chr19:49978920-49979051
  hypo

SEQ ID NO: 413208 - DNA, 34 bp, Homo sapiens; identical to SEQ ID NO: 274446
  chr19:50001236-50001270
  hypo

SEQ ID NO: 413209 - DNA, 44 bp, Homo sapiens; identical to SEQ ID NO: 274450
  chr19:50056051-50056095
  hypo

SEQ ID NO: 413210 - DNA, 163 bp, Homo sapiens; identical to SEQ ID NO: 219634
  chr19:50061336-50061499
  hypo

SEQ ID NO: 413211 - DNA, 190 bp, Homo sapiens; identical to SEQ ID NO: 219635
  chr19:50063175-50063365
  hypo

SEQ ID NO: 413212 - DNA, 38 bp, Homo sapiens; identical to SEQ ID NO: 219638
  chr19:50130457-50130495
  hypo

SEQ ID NO: 413213 - DNA, 135 bp, Homo sapiens; identical to SEQ ID NO: 274465
  chr19:50289573-50289708
  hypo

SEQ ID NO: 413214 - DNA, 203 bp, Homo sapiens; identical to SEQ ID NO: 274466
  chr19:50291871-50292074
  hypo

SEQ ID NO: 413215 - DNA, 34 bp, Homo sapiens; identical to SEQ ID NO: 219644
  chr19:50305176-50305210
  hypo

SEQ ID NO: 413216 - DNA, 162 bp, Homo sapiens; identical to SEQ ID NO: 219645
  chr19:50305240-50305402
  hypo

SEQ ID NO: 413217 - DNA, 218 bp, Homo sapiens; identical to SEQ ID NO: 326862
  chr19:50308885-50309103
  hypo

SEQ ID NO: 413218 - DNA, 111 bp, Homo sapiens; identical to SEQ ID NO: 326863
  chr19:50309133-50309244
  hypo

SEQ ID NO: 413219 - DNA, 89 bp, Homo sapiens; identical to SEQ ID NO: 274479
  chr19:50326703-50326792
  hypo

SEQ ID NO: 413220 - DNA, 57 bp, Homo sapiens; identical to SEQ ID NO: 219647
  chr19:50331699-50331756
  hypo

SEQ ID NO: 413221 - DNA, 48 bp, Homo sapiens; identical to SEQ ID NO: 274484
  chr19:50361410-50361458
  hypo

SEQ ID NO: 413222 - DNA, 204 bp, Homo sapiens; identical to SEQ ID NO: 219648
  chr19:50406382-50406586
  hypo

SEQ ID NO: 413223 - DNA, 173 bp, Homo sapiens; identical to SEQ ID NO: 274487
  chr19:50412838-50413011
  hypo

SEQ ID NO: 413224 - DNA, 325 bp, Homo sapiens; identical to SEQ ID NO: 274490
  chr19:50424485-50424810
  hypo

SEQ ID NO: 413225 - DNA, 166 bp, Homo sapiens; identical to SEQ ID NO: 326878
  chr19:50477639-50477805
  hypo

SEQ ID NO: 413226 - DNA, 37 bp, Homo sapiens; identical to SEQ ID NO: 219651
  chr19:50705041-50705078
  hypo

SEQ ID NO: 413227 - DNA, 323 bp, Homo sapiens; identical to SEQ ID NO: 274497
  chr19:50782874-50783197
  hypo

SEQ ID NO: 413228 - DNA, 76 bp, Homo sapiens; identical to SEQ ID NO: 219655
  chr19:50898815-50898891
  hypo

SEQ ID NO: 413229 - DNA, 43 bp, Homo sapiens; identical to SEQ ID NO: 326897
  chr19:50938504-50938547
  hypo

SEQ ID NO: 413230 - DNA, 44 bp, Homo sapiens; identical to SEQ ID NO: 219657
  chr19:51098421-51098465
  hypo

SEQ ID NO: 413231 - DNA, 204 bp, Homo sapiens; identical to SEQ ID NO: 326903
  chr19:51128562-51128766
  hypo

SEQ ID NO: 413232 - DNA, 35 bp, Homo sapiens; identical to SEQ ID NO: 326904
  chr19:51128799-51128834
  hypo

SEQ ID NO: 413233 - DNA, 136 bp, Homo sapiens; identical to SEQ ID NO: 219659
  chr19:51293556-51293692
  hypo

SEQ ID NO: 413234 - DNA, 215 bp, Homo sapiens; identical to SEQ ID NO: 326908
  chr19:51295158-51295373
  hypo

SEQ ID NO: 413235 - DNA, 106 bp, Homo sapiens; identical to SEQ ID NO: 274516
  chr19:51589548-51589654
  hypo

SEQ ID NO: 413236 - DNA, 253 bp, Homo sapiens; identical to SEQ ID NO: 274518
  chr19:51607194-51607447
  hypo

SEQ ID NO: 413237 - DNA, 178 bp, Homo sapiens; identical to SEQ ID NO: 219665
  chr19:51607825-51608003
  hypo

SEQ ID NO: 413238 - DNA, 205 bp, Homo sapiens; identical to SEQ ID NO: 274525
  chr19:51906688-51906893
  hypo

SEQ ID NO: 413239 - DNA, 47 bp, Homo sapiens; identical to SEQ ID NO: 219672
  chr19:52405665-52405712
  hypo

SEQ ID NO: 413240 - DNA, 93 bp, Homo sapiens; identical to SEQ ID NO: 219673
  chr19:52405954-52406047
  hypo

SEQ ID NO: 413241 - DNA, 82 bp, Homo sapiens; identical to SEQ ID NO: 219676
  chr19:52479588-52479670
  hypo

SEQ ID NO: 413242 - DNA, 36 bp, Homo sapiens; identical to SEQ ID NO: 219683
  chr19:52718578-52718614
  hypo

SEQ ID NO: 413243 - DNA, 34 bp, Homo sapiens; identical to SEQ ID NO: 274546
  chr19:52801866-52801900
  hypo

SEQ ID NO: 413244 - DNA, 31 bp, Homo sapiens; identical to SEQ ID NO: 219687
  chr19:52861439-52861470
  hypo

SEQ ID NO: 413245 - DNA, 182 bp, Homo sapiens; identical to SEQ ID NO: 219688
  chr19:52917256-52917438
  hypo

SEQ ID NO: 413246 - DNA, 180 bp, Homo sapiens; identical to SEQ ID NO: 274555
  chr19:52931619-52931799
  hypo

SEQ ID NO: 413247 - DNA, 41 bp, Homo sapiens; identical to SEQ ID NO: 274556
  chr19:52978881-52978922
  hypo

SEQ ID NO: 413248 - DNA, 76 bp, Homo sapiens; identical to SEQ ID NO: 219690
  chr19:53027352-53027428
  hypo

SEQ ID NO: 413249 - DNA, 201 bp, Homo sapiens; identical to SEQ ID NO: 274558
  chr19:53029365-53029566
  hypo

SEQ ID NO: 413250 - DNA, 38 bp, Homo sapiens; identical to SEQ ID NO: 274560
  chr19:53055548-53055586
  hypo

SEQ ID NO: 413251 - DNA, 79 bp, Homo sapiens; identical to SEQ ID NO: 274561
  chr19:53058376-53058455
  hypo

SEQ ID NO: 413252 - DNA, 46 bp, Homo sapiens; identical to SEQ ID NO: 326964
  chr19:53071335-53071381
  hypo

SEQ ID NO: 413253 - DNA, 158 bp, Homo sapiens; identical to SEQ ID NO: 219692
  chr19:53089793-53089951
  hypo

SEQ ID NO: 413254 - DNA, 31 bp, Homo sapiens; identical to SEQ ID NO: 274574
  chr19:53163140-53163171
  hypo

SEQ ID NO: 413255 - DNA, 515 bp, Homo sapiens; identical to SEQ ID NO: 274576
  chr19:53228720-53229235
  hypo

SEQ ID NO: 413256 - DNA, 78 bp, Homo sapiens; identical to SEQ ID NO: 219694
  chr19:53241622-53241700
  hypo

SEQ ID NO: 413257 - DNA, 42 bp, Homo sapiens; identical to SEQ ID NO: 274580
  chr19:53247899-53247941
  hypo

SEQ ID NO: 413258 - DNA, 99 bp, Homo sapiens; identical to SEQ ID NO: 274581
  chr19:53297749-53297848
  hypo

SEQ ID NO: 413259 - DNA, 153 bp, Homo sapiens; identical to SEQ ID NO: 274582
  chr19:53316598-53316751
  hypo

SEQ ID NO: 413260 - DNA, 41 bp, Homo sapiens; identical to SEQ ID NO: 274583
  chr19:53317558-53317599
  hypo

SEQ ID NO: 413261 - DNA, 98 bp, Homo sapiens; identical to SEQ ID NO: 274589
  chr19:53460885-53460983
  hypo

SEQ ID NO: 413262 - DNA, 153 bp, Homo sapiens; identical to SEQ ID NO: 219700
  chr19:53477544-53477697
  hypo

SEQ ID NO: 413263 - DNA, 120 bp, Homo sapiens; identical to SEQ ID NO: 274596
  chr19:53509014-53509134
  hypo

SEQ ID NO: 413264 - DNA, 160 bp, Homo sapiens; identical to SEQ ID NO: 274597
  chr19:53589028-53589188
  hypo

SEQ ID NO: 413265 - DNA, 87 bp, Homo sapiens; identical to SEQ ID NO: 274601
  chr19:53653017-53653104
  hypo

SEQ ID NO: 413266 - DNA, 93 bp, Homo sapiens; identical to SEQ ID NO: 219703
  chr19:53667653-53667746
  hypo

SEQ ID NO: 413267 - DNA, 100 bp, Homo sapiens; identical to SEQ ID NO: 219704
  chr19:53685270-53685370
  hypo

SEQ ID NO: 413268 - DNA, 64 bp, Homo sapiens; identical to SEQ ID NO: 205588
  chr19:53758247-53758311
  hypo

SEQ ID NO: 413269 - DNA, 73 bp, Homo sapiens; identical to SEQ ID NO: 274615
  chr19:53793746-53793819
  hypo

SEQ ID NO: 413270 - DNA, 192 bp, Homo sapiens; identical to SEQ ID NO: 274616
  chr19:53794081-53794273
  hypo

SEQ ID NO: 413271 - DNA, 97 bp, Homo sapiens; identical to SEQ ID NO: 274619
  chr19:53807087-53807184
  hypo

SEQ ID NO: 413272 - DNA, 34 bp, Homo sapiens; identical to SEQ ID NO: 219708
  chr19:53821074-53821108
  hypo

SEQ ID NO: 413273 - DNA, 93 bp, Homo sapiens; identical to SEQ ID NO: 274624
  chr19:53854364-53854457
  hypo

SEQ ID NO: 413274 - DNA, 58 bp, Homo sapiens; identical to SEQ ID NO: 274625
  chr19:53859528-53859586
  hypo

SEQ ID NO: 413275 - DNA, 120 bp, Homo sapiens; identical to SEQ ID NO: 274627
  chr19:53873291-53873411
  hypo

SEQ ID NO: 413276 - DNA, 290 bp, Homo sapiens; identical to SEQ ID NO: 219710
  chr19:53886631-53886921
  hypo

SEQ ID NO: 413277 - DNA, 172 bp, Homo sapiens; identical to SEQ ID NO: 274629
  chr19:53936945-53937117
  hypo

SEQ ID NO: 413278 - DNA, 197 bp, Homo sapiens; identical to SEQ ID NO: 274630
  chr19:53977470-53977667
  hypo

SEQ ID NO: 413279 - DNA, 198 bp, Homo sapiens; identical to SEQ ID NO: 327037
  chr19:53982539-53982737
  hypo

SEQ ID NO: 413280 - DNA, 162 bp, Homo sapiens; identical to SEQ ID NO: 274632
  chr19:54017723-54017885
  hypo

SEQ ID NO: 413281 - DNA, 42 bp, Homo sapiens; identical to SEQ ID NO: 274634
  chr19:54074926-54074968
  hypo

SEQ ID NO: 413282 - DNA, 397 bp, Homo sapiens; identical to SEQ ID NO: 274635
  chr19:54080852-54081249
  hypo

SEQ ID NO: 413283 - DNA, 97 bp, Homo sapiens; identical to SEQ ID NO: 274636
  chr19:54081309-54081406
  hypo

SEQ ID NO: 413284 - DNA, 42 bp, Homo sapiens; identical to SEQ ID NO: 274637
  chr19:54087417-54087459
  hypo

SEQ ID NO: 413285 - DNA, 39 bp, Homo sapiens; identical to SEQ ID NO: 274639
  chr19:54115655-54115694
  hypo

SEQ ID NO: 413286 - DNA, 108 bp, Homo sapiens; identical to SEQ ID NO: 274641
  chr19:54120403-54120511
  hypo

SEQ ID NO: 413287 - DNA, 446 bp, Homo sapiens; identical to SEQ ID NO: 274642
  chr19:54135108-54135554
  hypo

SEQ ID NO: 413288 - DNA, 36 bp, Homo sapiens; identical to SEQ ID NO: 274644
  chr19:54137676-54137712
  hypo

SEQ ID NO: 413289 - DNA, 86 bp, Homo sapiens; identical to SEQ ID NO: 274646
  chr19:54140568-54140654
  hypo

SEQ ID NO: 413290 - DNA, 34 bp, Homo sapiens; identical to SEQ ID NO: 274647
  chr19:54141502-54141536
  hypo

SEQ ID NO: 413291 - DNA, 225 bp, Homo sapiens; identical to SEQ ID NO: 274649
  chr19:54152258-54152483
  hypo

SEQ ID NO: 413292 - DNA, 33 bp, Homo sapiens; identical to SEQ ID NO: 219717
  chr19:54161842-54161875
  hypo

SEQ ID NO: 413293 - DNA, 161 bp, Homo sapiens; identical to SEQ ID NO: 274652
  chr19:54170239-54170400
  hypo

SEQ ID NO: 413294 - DNA, 240 bp, Homo sapiens; identical to SEQ ID NO: 274654
  chr19:54196084-54196324
  hypo

SEQ ID NO: 413295 - DNA, 45 bp, Homo sapiens; identical to SEQ ID NO: 226019
  chr19:54206968-54207013
  hypo

SEQ ID NO: 413296 - DNA, 33 bp, Homo sapiens; identical to SEQ ID NO: 274656
  chr19:54212284-54212317
  hypo

SEQ ID NO: 413297 - DNA, 64 bp, Homo sapiens; identical to SEQ ID NO: 274658
  chr19:54254582-54254646
  hypo

SEQ ID NO: 413298 - DNA, 109 bp, Homo sapiens; identical to SEQ ID NO: 274660
  chr19:54268118-54268227
  hypo

SEQ ID NO: 413299 - DNA, 82 bp, Homo sapiens; identical to SEQ ID NO: 219719
  chr19:54271336-54271418
  hypo

SEQ ID NO: 413300 - DNA, 210 bp, Homo sapiens; identical to SEQ ID NO: 400805
  chr19:54371779-54371989
  hypo

SEQ ID NO: 413301 - DNA, 277 bp, Homo sapiens; identical to SEQ ID NO: 294364
  chr19:54372055-54372332
  hypo

SEQ ID NO: 413302 - DNA, 224 bp, Homo sapiens; identical to SEQ ID NO: 294365
  chr19:54372400-54372624
  hypo

SEQ ID NO: 413303 - DNA, 281 bp, Homo sapiens; identical to SEQ ID NO: 294366
  chr19:54372682-54372963
  hypo

SEQ ID NO: 413304 - DNA, 325 bp, Homo sapiens; identical to SEQ ID NO: 294367
  chr19:54382389-54382714
  hypo

SEQ ID NO: 413305 - DNA, 194 bp, Homo sapiens; identical to SEQ ID NO: 294368
  chr19:54382804-54382998
  hypo

SEQ ID NO: 413306 - DNA, 132 bp, Homo sapiens; identical to SEQ ID NO: 274665
  chr19:54487090-54487222
  hypo

SEQ ID NO: 413307 - DNA, 76 bp, Homo sapiens; identical to SEQ ID NO: 274668
  chr19:55631056-55631132
  hypo

SEQ ID NO: 413308 - DNA, 119 bp, Homo sapiens; identical to SEQ ID NO: 327084
  chr19:55721105-55721224
  hypo

SEQ ID NO: 413309 - DNA, 35 bp, Homo sapiens; identical to SEQ ID NO: 327085
  chr19:55721254-55721289
  hypo

SEQ ID NO: 413310 - DNA, 147 bp, Homo sapiens; identical to SEQ ID NO: 274670
  chr19:55732005-55732152
  hypo

SEQ ID NO: 413311 - DNA, 92 bp, Homo sapiens; identical to SEQ ID NO: 219729
  chr19:55775276-55775368
  hypo

SEQ ID NO: 413312 - DNA, 460 bp, Homo sapiens; identical to SEQ ID NO: 274674
  chr19:55785505-55785965
  hypo

SEQ ID NO: 413313 - DNA, 37 bp, Homo sapiens; identical to SEQ ID NO: 327091
  chr19:55798403-55798440
  hypo

SEQ ID NO: 413314 - DNA, 176 bp, Homo sapiens; identical to SEQ ID NO: 219731
  chr19:55824302-55824478
  hypo

SEQ ID NO: 413315 - DNA, 202 bp, Homo sapiens; identical to SEQ ID NO: 274679
  chr19:55842494-55842696
  hypo

SEQ ID NO: 413316 - DNA, 93 bp, Homo sapiens; identical to SEQ ID NO: 219733
  chr19:55848034-55848127
  hypo

SEQ ID NO: 413317 - DNA, 377 bp, Homo sapiens; identical to SEQ ID NO: 274682
  chr19:55856150-55856527
  hypo

SEQ ID NO: 413318 - DNA, 209 bp, Homo sapiens; identical to SEQ ID NO: 274683
  chr19:55857843-55858052
  hypo

SEQ ID NO: 413319 - DNA, 36 bp, Homo sapiens; identical to SEQ ID NO: 219734
  chr19:55858739-55858775
  hypo

SEQ ID NO: 413320 - DNA, 404 bp, Homo sapiens; identical to SEQ ID NO: 219736
  chr19:55872208-55872612
  hypo

SEQ ID NO: 413321 - DNA, 36 bp, Homo sapiens; identical to SEQ ID NO: 219737
  chr19:55912229-55912265
  hypo

SEQ ID NO: 413322 - DNA, 78 bp, Homo sapiens; identical to SEQ ID NO: 219738
  chr19:55912363-55912441
  hypo

SEQ ID NO: 413323 - DNA, 161 bp, Homo sapiens; identical to SEQ ID NO: 274687
  chr19:55944091-55944252
  hypo

SEQ ID NO: 413324 - DNA, 256 bp, Homo sapiens; identical to SEQ ID NO: 294391
  chr19:55962684-55962940
  hypo

SEQ ID NO: 413325 - DNA, 63 bp, Homo sapiens; identical to SEQ ID NO: 294392
  chr19:55963044-55963107
  hypo

SEQ ID NO: 413326 - DNA, 96 bp, Homo sapiens; identical to SEQ ID NO: 274693
  chr19:55995221-55995317
  hypo

SEQ ID NO: 413327 - DNA, 108 bp, Homo sapiens; identical to SEQ ID NO: 274696
  chr19:56089714-56089822
  hypo

SEQ ID NO: 413328 - DNA, 260 bp, Homo sapiens; identical to SEQ ID NO: 274699
  chr19:56108941-56109201
  hypo

SEQ ID NO: 413329 - DNA, 303 bp, Homo sapiens; identical to SEQ ID NO: 274700
  chr19:56113855-56114158
  hypo

SEQ ID NO: 413330 - DNA, 54 bp, Homo sapiens; identical to SEQ ID NO: 219747
  chr19:56176622-56176676
  hypo

SEQ ID NO: 413331 - DNA, 334 bp, Homo sapiens; identical to SEQ ID NO: 274722
  chr19:56465555-56465889
  hypo

SEQ ID NO: 413332 - DNA, 86 bp, Homo sapiens; identical to SEQ ID NO: 274723
  chr19:56467208-56467294
  hypo

SEQ ID NO: 413333 - DNA, 35 bp, Homo sapiens; identical to SEQ ID NO: 274724
  chr19:56475820-56475855
  hypo

SEQ ID NO: 413334 - DNA, 146 bp, Homo sapiens; identical to SEQ ID NO: 274726
  chr19:56543708-56543854
  hypo

SEQ ID NO: 413335 - DNA, 270 bp, Homo sapiens; identical to SEQ ID NO: 219758
  chr19:56564933-56565203
  hypo

SEQ ID NO: 413336 - DNA, 481 bp, Homo sapiens; identical to SEQ ID NO: 219760
  chr19:56617360-56617841
  hypo

SEQ ID NO: 413337 - DNA, 388 bp, Homo sapiens; identical to SEQ ID NO: 274731
  chr19:56642159-56642547
  hypo

SEQ ID NO: 413338 - DNA, 462 bp, Homo sapiens; identical to SEQ ID NO: 274734
  chr19:56671132-56671594
  hypo

SEQ ID NO: 413339 - DNA, 36 bp, Homo sapiens
  chr19:56727933-56727969
  hypo
gtttcttttcttttttctttcttccttttttttttt

SEQ ID NO: 413340 - DNA, 61 bp, Homo sapiens; identical to SEQ ID NO: 327167
  chr19:56806261-56806322
  hypo

SEQ ID NO: 413341 - DNA, 42 bp, Homo sapiens; identical to SEQ ID NO: 274744
  chr19:56829441-56829483
  hypo

SEQ ID NO: 413342 - DNA, 1448 bp, Homo sapiens; identical to SEQ ID NO: 219771
  chr19:57175022-57176470
  hypo

SEQ ID NO: 413343 - DNA, 39 bp, Homo sapiens; identical to SEQ ID NO: 274755
  chr19:57190503-57190542
  hypo

SEQ ID NO: 413344 - DNA, 91 bp, Homo sapiens; identical to SEQ ID NO: 274756
  chr19:57254044-57254135
  hypo

SEQ ID NO: 413345 - DNA, 50 bp, Homo sapiens; identical to SEQ ID NO: 274758
  chr19:57349850-57349900
  hypo

SEQ ID NO: 413346 - DNA, 412 bp, Homo sapiens; identical to SEQ ID NO: 274760
  chr19:57350029-57350441
  hypo

SEQ ID NO: 413347 - DNA, 92 bp, Homo sapiens; identical to SEQ ID NO: 274762
  chr19:57425614-57425706
  hypo

SEQ ID NO: 413348 - DNA, 45 bp, Homo sapiens; identical to SEQ ID NO: 327191
  chr19:57477086-57477131
  hypo

SEQ ID NO: 413349 - DNA, 78 bp, Homo sapiens; identical to SEQ ID NO: 327192
  chr19:57477171-57477249
  hypo

SEQ ID NO: 413350 - DNA, 32 bp, Homo sapiens; identical to SEQ ID NO: 274765
  chr19:57501950-57501982
  hypo

SEQ ID NO: 413351 - DNA, 87 bp, Homo sapiens; identical to SEQ ID NO: 274766
  chr19:57543653-57543740
  hypo

SEQ ID NO: 413352 - DNA, 42 bp, Homo sapiens; identical to SEQ ID NO: 274767
  chr19:57579643-57579685
  hypo

SEQ ID NO: 413353 - DNA, 42 bp, Homo sapiens; identical to SEQ ID NO: 274768
  chr19:57583563-57583605
  hypo

SEQ ID NO: 413354 - DNA, 76 bp, Homo sapiens; identical to SEQ ID NO: 219773
  chr19:57604471-57604547
  hypo

SEQ ID NO: 413355 - DNA, 35 bp, Homo sapiens; identical to SEQ ID NO: 274771
  chr19:57627883-57627918
  hypo

SEQ ID NO: 413356 - DNA, 86 bp, Homo sapiens; identical to SEQ ID NO: 274773
  chr19:57630721-57630807
  hypo

SEQ ID NO: 413357 - DNA, 42 bp, Homo sapiens; identical to SEQ ID NO: 274778
  chr19:58180749-58180791
  hypo

SEQ ID NO: 413358 - DNA, 42 bp, Homo sapiens; identical to SEQ ID NO: 274779
  chr19:58184721-58184763
  hypo

SEQ ID NO: 413359 - DNA, 81 bp, Homo sapiens; identical to SEQ ID NO: 274782
  chr19:58298051-58298132
  hypo

SEQ ID NO: 413360 - DNA, 38 bp, Homo sapiens; identical to SEQ ID NO: 219780
  chr19:58317135-58317173
  hypo

SEQ ID NO: 413361 - DNA, 44 bp, Homo sapiens; identical to SEQ ID NO: 274788
  chr19:58484262-58484306
  hypo

SEQ ID NO: 413362 - DNA, 120 bp, Homo sapiens; identical to SEQ ID NO: 274790
  chr19:58544602-58544722
  hypo

SEQ ID NO: 413363 - DNA, 250 bp, Homo sapiens; identical to SEQ ID NO: 219782
  chr19:58551437-58551687
  hypo

SEQ ID NO: 413364 - DNA, 289 bp, Homo sapiens; identical to SEQ ID NO: 327222
  chr19:58551717-58552006
  hypo

SEQ ID NO: 413365 - DNA, 69 bp, Homo sapiens; identical to SEQ ID NO: 327223
  chr19:58552051-58552120
  hypo

SEQ ID NO: 413366 - DNA, 31 bp, Homo sapiens; identical to SEQ ID NO: 274792
  chr19:58555625-58555656
  hypo

SEQ ID NO: 413367 - DNA, 318 bp, Homo sapiens; identical to SEQ ID NO: 219785
  chr19:58557757-58558075
  hypo

SEQ ID NO: 413368 - DNA, 736 bp, Homo sapiens; identical to SEQ ID NO: 274798
  chr19:58564632-58565368
  hypo

SEQ ID NO: 413369 - DNA, 35 bp, Homo sapiens; identical to SEQ ID NO: 219787
  chr19:58593733-58593768
  hypo

SEQ ID NO: 413370 - DNA, 481 bp, Homo sapiens; identical to SEQ ID NO: 274800
  chr19:58595753-58596234
  hypo

SEQ ID NO: 413371 - DNA, 286 bp, Homo sapiens; identical to SEQ ID NO: 327234
  chr19:58598368-58598654
  hypo

SEQ ID NO: 413372 - DNA, 49 bp, Homo sapiens; identical to SEQ ID NO: 327235
  chr19:58598684-58598733
  hypo

SEQ ID NO: 413373 - DNA, 156 bp, Homo sapiens; identical to SEQ ID NO: 274804
  chr19:58711831-58711987
  hypo

SEQ ID NO: 413374 - DNA, 157 bp, Homo sapiens; identical to SEQ ID NO: 219793
  chr19:58872591-58872748
  hypo

SEQ ID NO: 413375 - DNA, 332 bp, Homo sapiens; identical to SEQ ID NO: 294464
  chr19:58874184-58874516
  hypo

SEQ ID NO: 413376 - DNA, 71 bp, Homo sapiens; identical to SEQ ID NO: 226057
  chr19:58920316-58920387
  hypo

SEQ ID NO: 413377 - DNA, 61 bp, Homo sapiens; identical to SEQ ID NO: 274816
  chr20:309115-309176
  hypo

SEQ ID NO: 413378 - DNA, 116 bp, Homo sapiens; identical to SEQ ID NO: 219801
  chr20:413054-413170
  hypo

SEQ ID NO: 413379 - DNA, 43 bp, Homo sapiens; identical to SEQ ID NO: 219802
  chr20:417445-417488
  hypo

SEQ ID NO: 413380 - DNA, 34 bp, Homo sapiens; identical to SEQ ID NO: 274825
  chr20:540395-540429
  hypo

SEQ ID NO: 413381 - DNA, 91 bp, Homo sapiens; identical to SEQ ID NO: 274826
  chr20:631995-632086
  hypo

SEQ ID NO: 413382 - DNA, 361 bp, Homo sapiens; identical to SEQ ID NO: 274828
  chr20:745878-746239
  hypo

SEQ ID NO: 413383 - DNA, 137 bp, Homo sapiens; identical to SEQ ID NO: 274829
  chr20:773017-773154
  hypo

SEQ ID NO: 413384 - DNA, 36 bp, Homo sapiens; identical to SEQ ID NO: 219809
  chr20:1276610-1276646
  hypo

SEQ ID NO: 413385 - DNA, 154 bp, Homo sapiens; identical to SEQ ID NO: 274834
  chr20:1277696-1277850
  hypo

SEQ ID NO: 413386 - DNA, 192 bp, Homo sapiens; identical to SEQ ID NO: 219810
  chr20:1435437-1435629
  hypo

SEQ ID NO: 413387 - DNA, 487 bp, Homo sapiens; identical to SEQ ID NO: 205664
  chr20:2188036-2188523
  hypo

SEQ ID NO: 413388 - DNA, 304 bp, Homo sapiens; identical to SEQ ID NO: 219812
  chr20:2308758-2309062
  hypo

SEQ ID NO: 413389 - DNA, 124 bp, Homo sapiens; identical to SEQ ID NO: 274840
  chr20:2321102-2321226
  hypo

SEQ ID NO: 413390 - DNA, 255 bp, Homo sapiens; identical to SEQ ID NO: 274841
  chr20:2397896-2398151
  hypo

SEQ ID NO: 413391 - DNA, 236 bp, Homo sapiens; identical to SEQ ID NO: 294500
  chr20:2444432-2444668
  hypo

SEQ ID NO: 413392 - DNA, 33 bp, Homo sapiens; identical to SEQ ID NO: 274843
  chr20:2489142-2489175
  hypo

SEQ ID NO: 413393 - DNA, 66 bp, Homo sapiens; identical to SEQ ID NO: 294519
  chr20:3063059-3063125
  hypo

SEQ ID NO: 413394 - DNA, 94 bp, Homo sapiens; identical to SEQ ID NO: 294520
  chr20:3063391-3063485
  hypo

SEQ ID NO: 413395 - DNA, 45 bp, Homo sapiens; identical to SEQ ID NO: 274852
  chr20:3109208-3109253
  hypo

SEQ ID NO: 413396 - DNA, 260 bp, Homo sapiens; identical to SEQ ID NO: 205673
  chr20:3154656-3154916
  hypo

SEQ ID NO: 413397 - DNA, 32 bp, Homo sapiens; identical to SEQ ID NO: 274855
  chr20:3203126-3203158
  hypo

SEQ ID NO: 413398 - DNA, 135 bp, Homo sapiens; identical to SEQ ID NO: 274856
  chr20:3208371-3208506
  hypo

SEQ ID NO: 413399 - DNA, 116 bp, Homo sapiens; identical to SEQ ID NO: 274858
  chr20:3209206-3209322
  hypo

SEQ ID NO: 413400 - DNA, 75 bp, Homo sapiens; identical to SEQ ID NO: 274859
  chr20:3211428-3211503
  hypo

SEQ ID NO: 413401 - DNA, 41 bp, Homo sapiens; identical to SEQ ID NO: 274862
  chr20:3635386-3635427
  hypo

SEQ ID NO: 413402 - DNA, 221 bp, Homo sapiens; identical to SEQ ID NO: 274863
  chr20:3635666-3635887
  hypo

SEQ ID NO: 413403 - DNA, 209 bp, Homo sapiens; identical to SEQ ID NO: 274864
  chr20:3637823-3638032
  hypo

SEQ ID NO: 413404 - DNA, 120 bp, Homo sapiens; identical to SEQ ID NO: 274870
  chr20:3857969-3858089
  hypo

SEQ ID NO: 413405 - DNA, 149 bp, Homo sapiens; identical to SEQ ID NO: 274871
  chr20:3909805-3909954
  hypo

SEQ ID NO: 413406 - DNA, 42 bp, Homo sapiens; identical to SEQ ID NO: 274874
  chr20:4786435-4786477
  hypo

SEQ ID NO: 413407 - DNA, 34 bp, Homo sapiens; identical to SEQ ID NO: 274875
  chr20:4786507-4786541
  hypo

SEQ ID NO: 413408 - DNA, 146 bp, Homo sapiens; identical to SEQ ID NO: 274876
  chr20:4869816-4869962
  hypo

SEQ ID NO: 413409 - DNA, 53 bp, Homo sapiens; identical to SEQ ID NO: 219828
  chr20:5072894-5072947
  hypo

SEQ ID NO: 413410 - DNA, 46 bp, Homo sapiens; identical to SEQ ID NO: 219829
  chr20:5178251-5178297
  hypo

SEQ ID NO: 413411 - DNA, 174 bp, Homo sapiens; identical to SEQ ID NO: 219832
  chr20:5610576-5610750
  hypo

SEQ ID NO: 413412 - DNA, 35 bp, Homo sapiens; identical to SEQ ID NO: 274885
  chr20:5649290-5649325
  hypo

SEQ ID NO: 413413 - DNA, 180 bp, Homo sapiens; identical to SEQ ID NO: 219833
  chr20:5734498-5734678
  hypo

SEQ ID NO: 413414 - DNA, 92 bp, Homo sapiens; identical to SEQ ID NO: 219835
  chr20:5765408-5765500
  hypo

SEQ ID NO: 413415 - DNA, 120 bp, Homo sapiens; identical to SEQ ID NO: 219841
  chr20:6302507-6302627
  hypo

SEQ ID NO: 413416 - DNA, 143 bp, Homo sapiens; identical to SEQ ID NO: 274895
  chr20:6663946-6664089
  hypo

SEQ ID NO: 413417 - DNA, 34 bp, Homo sapiens; identical to SEQ ID NO: 274896
  chr20:6732281-6732315
  hypo

SEQ ID NO: 413418 - DNA, 34 bp, Homo sapiens; identical to SEQ ID NO: 274897
  chr20:6732555-6732589
  hypo

SEQ ID NO: 413419 - DNA, 169 bp, Homo sapiens; identical to SEQ ID NO: 274898
  chr20:6759075-6759244
  hypo

SEQ ID NO: 413420 - DNA, 35 bp, Homo sapiens; identical to SEQ ID NO: 219844
  chr20:6861141-6861176
  hypo

SEQ ID NO: 413421 - DNA, 42 bp, Homo sapiens; identical to SEQ ID NO: 219846
  chr20:10571270-10571312
  hypo

SEQ ID NO: 413422 - DNA, 144 bp, Homo sapiens; identical to SEQ ID NO: 226087
  chr20:10653880-10654024
  hypo

SEQ ID NO: 413423 - DNA, 1019 bp, Homo sapiens; identical to SEQ ID NO: 205705
  chr20:10654669-10655688
  hypo

SEQ ID NO: 413424 - DNA, 453 bp, Homo sapiens; identical to SEQ ID NO: 389761
  chr20:11871901-11872354
  hypo

SEQ ID NO: 413425 - DNA, 180 bp, Homo sapiens; identical to SEQ ID NO: 274916
  chr20:15011645-15011825
  hypo

SEQ ID NO: 413426 - DNA, 66 bp, Homo sapiens; identical to SEQ ID NO: 274917
  chr20:16431607-16431673
  hypo

SEQ ID NO: 413427 - DNA, 409 bp, Homo sapiens; identical to SEQ ID NO: 274918
  chr20:16510876-16511285
  hypo

SEQ ID NO: 413428 - DNA, 130 bp, Homo sapiens; identical to SEQ ID NO: 327383
  chr20:16555178-16555308
  hypo

SEQ ID NO: 413429 - DNA, 38 bp, Homo sapiens; identical to SEQ ID NO: 274923
  chr20:17460141-17460179
  hypo

SEQ ID NO: 413430 - DNA, 384 bp, Homo sapiens; identical to SEQ ID NO: 274925
  chr20:17489362-17489746
  hypo

SEQ ID NO: 413431 - DNA, 64 bp, Homo sapiens; identical to SEQ ID NO: 274927
  chr20:17625935-17625999
  hypo

SEQ ID NO: 413432 - DNA, 187 bp, Homo sapiens; identical to SEQ ID NO: 205715
  chr20:17661564-17661751
  hypo

SEQ ID NO: 413433 - DNA, 72 bp, Homo sapiens; identical to SEQ ID NO: 219863
  chr20:18724827-18724899
  hypo

SEQ ID NO: 413434 - DNA, 180 bp, Homo sapiens; identical to SEQ ID NO: 205724
  chr20:19738432-19738612
  hypo

SEQ ID NO: 413435 - DNA, 119 bp, Homo sapiens; identical to SEQ ID NO: 219869
  chr20:20392662-20392781
  hypo

SEQ ID NO: 413436 - DNA, 32 bp, Homo sapiens; identical to SEQ ID NO: 219872
  chr20:21115585-21115617
  hypo

SEQ ID NO: 413437 - DNA, 105 bp, Homo sapiens; identical to SEQ ID NO: 384811
  chr20:21495255-21495360
  hypo

SEQ ID NO: 413438 - DNA, 35 bp, Homo sapiens; identical to SEQ ID NO: 274956
  chr20:22324533-22324568
  hypo

SEQ ID NO: 413439 - DNA, 166 bp, Homo sapiens; identical to SEQ ID NO: 274964
  chr20:23137428-23137594
  hypo

SEQ ID NO: 413440 - DNA, 42 bp, Homo sapiens; identical to SEQ ID NO: 274966
  chr20:23283473-23283515
  hypo

SEQ ID NO: 413441 - DNA, 91 bp, Homo sapiens; identical to SEQ ID NO: 274967
  chr20:23336930-23337021
  hypo

SEQ ID NO: 413442 - DNA, 155 bp, Homo sapiens; identical to SEQ ID NO: 274968
  chr20:23337306-23337461
  hypo

SEQ ID NO: 413443 - DNA, 383 bp, Homo sapiens; identical to SEQ ID NO: 274969
  chr20:23346218-23346601
  hypo

SEQ ID NO: 413444 - DNA, 42 bp, Homo sapiens; identical to SEQ ID NO: 274971
  chr20:23426501-23426543
  hypo

SEQ ID NO: 413445 - DNA, 240 bp, Homo sapiens; identical to SEQ ID NO: 274974
  chr20:24188722-24188962
  hypo

SEQ ID NO: 413446 - DNA, 76 bp, Homo sapiens; identical to SEQ ID NO: 274976
  chr20:24236950-24237026
  hypo

SEQ ID NO: 413447 - DNA, 43 bp, Homo sapiens; identical to SEQ ID NO: 274978
  chr20:24484894-24484937
  hypo

SEQ ID NO: 413448 - DNA, 406 bp, Homo sapiens; identical to SEQ ID NO: 274982
  chr20:24944573-24944979
  hypo

SEQ ID NO: 413449 - DNA, 37 bp, Homo sapiens; identical to SEQ ID NO: 219889
  chr20:24950217-24950254
  hypo

SEQ ID NO: 413450 - DNA, 239 bp, Homo sapiens; identical to SEQ ID NO: 274986
  chr20:25000500-25000739
  hypo

SEQ ID NO: 413451 - DNA, 281 bp, Homo sapiens; identical to SEQ ID NO: 274988
  chr20:25028526-25028807
  hypo

SEQ ID NO: 413452 - DNA, 55 bp, Homo sapiens; identical to SEQ ID NO: 274989
  chr20:25030308-25030363
  hypo

SEQ ID NO: 413453 - DNA, 212 bp, Homo sapiens; identical to SEQ ID NO: 274991
  chr20:25040600-25040812
  hypo

SEQ ID NO: 413454 - DNA, 488 bp, Homo sapiens; identical to SEQ ID NO: 274992
  chr20:25187625-25188113
  hypo

SEQ ID NO: 413455 - DNA, 127 bp, Homo sapiens; identical to SEQ ID NO: 274993
  chr20:25202580-25202707
  hypo

SEQ ID NO: 413456 - DNA, 79 bp, Homo sapiens; identical to SEQ ID NO: 274997
  chr20:25236291-25236370
  hypo

SEQ ID NO: 413457 - DNA, 103 bp, Homo sapiens; identical to SEQ ID NO: 274998
  chr20:25240119-25240222
  hypo

SEQ ID NO: 413458 - DNA, 224 bp, Homo sapiens; identical to SEQ ID NO: 275000
  chr20:25254265-25254489
  hypo

SEQ ID NO: 413459 - DNA, 43 bp, Homo sapiens; identical to SEQ ID NO: 275001
  chr20:25254609-25254652
  hypo

SEQ ID NO: 413460 - DNA, 33 bp, Homo sapiens; identical to SEQ ID NO: 219893
  chr20:25278858-25278891
  hypo

SEQ ID NO: 413461 - DNA, 189 bp, Homo sapiens; identical to SEQ ID NO: 275007
  chr20:25310088-25310277
  hypo

SEQ ID NO: 413462 - DNA, 218 bp, Homo sapiens; identical to SEQ ID NO: 275018
  chr20:25972702-25972920
  hypo

SEQ ID NO: 413463 - DNA, 35 bp, Homo sapiens; identical to SEQ ID NO: 275019
  chr20:26062267-26062302
  hypo

SEQ ID NO: 413464 - DNA, 180 bp, Homo sapiens; identical to SEQ ID NO: 219899
  chr20:30134131-30134311
  hypo

SEQ ID NO: 413465 - DNA, 77 bp, Homo sapiens; identical to SEQ ID NO: 275025
  chr20:30181219-30181296
  hypo

SEQ ID NO: 413466 - DNA, 41 bp, Homo sapiens; identical to SEQ ID NO: 219904
  chr20:30468561-30468602
  hypo

SEQ ID NO: 413467 - DNA, 43 bp, Homo sapiens; identical to SEQ ID NO: 294694
  chr20:30583025-30583068
  hypo

SEQ ID NO: 413468 - DNA, 289 bp, Homo sapiens; identical to SEQ ID NO: 275037
  chr20:30810304-30810593
  hypo

SEQ ID NO: 413469 - DNA, 171 bp, Homo sapiens; identical to SEQ ID NO: 275039
  chr20:30915287-30915458
  hypo

SEQ ID NO: 413470 - DNA, 386 bp, Homo sapiens; identical to SEQ ID NO: 205768
  chr20:30959966-30960352
  hypo

SEQ ID NO: 413471 - DNA, 104 bp, Homo sapiens; identical to SEQ ID NO: 205770
  chr20:31017140-31017244
  hypo

SEQ ID NO: 413472 - DNA, 359 bp, Homo sapiens; identical to SEQ ID NO: 205772
  chr20:31019123-31019482
  hypo

SEQ ID NO: 413473 - DNA, 106 bp, Homo sapiens; identical to SEQ ID NO: 205773
  chr20:31020682-31020788
  hypo

SEQ ID NO: 413474 - DNA, 634 bp, Homo sapiens; identical to SEQ ID NO: 205774
  chr20:31021086-31021720
  hypo

SEQ ID NO: 413475 - DNA, 357 bp, Homo sapiens; identical to SEQ ID NO: 275042
  chr20:31051294-31051651
  hypo

SEQ ID NO: 413476 - DNA, 88 bp, Homo sapiens; identical to SEQ ID NO: 219923
  chr20:31115869-31115957
  hypo

SEQ ID NO: 413477 - DNA, 56 bp, Homo sapiens; identical to SEQ ID NO: 219924
  chr20:31146689-31146745
  hypo

SEQ ID NO: 413478 - DNA, 111 bp, Homo sapiens; identical to SEQ ID NO: 327546
  chr20:31152007-31152118
  hypo

SEQ ID NO: 413479 - DNA, 68 bp, Homo sapiens; identical to SEQ ID NO: 219927
  chr20:31367769-31367837
  hypo

SEQ ID NO: 413480 - DNA, 59 bp, Homo sapiens; identical to SEQ ID NO: 275057
  chr20:31392269-31392328
  hypo

SEQ ID NO: 413481 - DNA, 253 bp, Homo sapiens; identical to SEQ ID NO: 275061
  chr20:31936115-31936368
  hypo

SEQ ID NO: 413482 - DNA, 258 bp, Homo sapiens; identical to SEQ ID NO: 275064
  chr20:32266840-32267098
  hypo

SEQ ID NO: 413483 - DNA, 42 bp, Homo sapiens; identical to SEQ ID NO: 275065
  chr20:32270661-32270703
  hypo

SEQ ID NO: 413484 - DNA, 210 bp, Homo sapiens; identical to SEQ ID NO: 275066
  chr20:32284902-32285112
  hypo

SEQ ID NO: 413485 - DNA, 100 bp, Homo sapiens; identical to SEQ ID NO: 219932
  chr20:32311064-32311164
  hypo

SEQ ID NO: 413486 - DNA, 200 bp, Homo sapiens; identical to SEQ ID NO: 219934
  chr20:32376690-32376890
  hypo

SEQ ID NO: 413487 - DNA, 35 bp, Homo sapiens; identical to SEQ ID NO: 219937
  chr20:32381768-32381803
  hypo

SEQ ID NO: 413488 - DNA, 214 bp, Homo sapiens; identical to SEQ ID NO: 219938
  chr20:32413015-32413229
  hypo

SEQ ID NO: 413489 - DNA, 42 bp, Homo sapiens; identical to SEQ ID NO: 275083
  chr20:32772602-32772644
  hypo

SEQ ID NO: 413490 - DNA, 60 bp, Homo sapiens; identical to SEQ ID NO: 275084
  chr20:32772952-32773012
  hypo

SEQ ID NO: 413491 - DNA, 139 bp, Homo sapiens; identical to SEQ ID NO: 219945
  chr20:33112448-33112587
  hypo

SEQ ID NO: 413492 - DNA, 42 bp, Homo sapiens; identical to SEQ ID NO: 275093
  chr20:33410314-33410356
  hypo

SEQ ID NO: 413493 - DNA, 452 bp, Homo sapiens; identical to SEQ ID NO: 226131
  chr20:33464343-33464795
  hypo

SEQ ID NO: 413494 - DNA, 76 bp, Homo sapiens; identical to SEQ ID NO: 275096
  chr20:33544843-33544919
  hypo

SEQ ID NO: 413495 - DNA, 194 bp, Homo sapiens; identical to SEQ ID NO: 275098
  chr20:33572633-33572827
  hypo

SEQ ID NO: 413496 - DNA, 80 bp, Homo sapiens; identical to SEQ ID NO: 275099
  chr20:33579658-33579738
  hypo

SEQ ID NO: 413497 - DNA, 34 bp, Homo sapiens; identical to SEQ ID NO: 275100
  chr20:33696514-33696548
  hypo

SEQ ID NO: 413498 - DNA, 81 bp, Homo sapiens; identical to SEQ ID NO: 275101
  chr20:33803020-33803101
  hypo

SEQ ID NO: 413499 - DNA, 49 bp, Homo sapiens; identical to SEQ ID NO: 275109
  chr20:34092136-34092185
  hypo

SEQ ID NO: 413500 - DNA, 96 bp, Homo sapiens; identical to SEQ ID NO: 275113
  chr20:34166313-34166409
  hypo

SEQ ID NO: 413501 - DNA, 171 bp, Homo sapiens; identical to SEQ ID NO: 275114
  chr20:34171852-34172023
  hypo

SEQ ID NO: 413502 - DNA, 44 bp, Homo sapiens; identical to SEQ ID NO: 275117
  chr20:34195461-34195505
  hypo

SEQ ID NO: 413503 - DNA, 40 bp, Homo sapiens; identical to SEQ ID NO: 275120
  chr20:34472079-34472119
  hypo

SEQ ID NO: 413504 - DNA, 163 bp, Homo sapiens; identical to SEQ ID NO: 226134
  chr20:34680201-34680364
  hypo

SEQ ID NO: 413505 - DNA, 84 bp, Homo sapiens; identical to SEQ ID NO: 275131
  chr20:35467712-35467796
  hypo

SEQ ID NO: 413506 - DNA, 42 bp, Homo sapiens; identical to SEQ ID NO: 275132
  chr20:35470832-35470874
  hypo

SEQ ID NO: 413507 - DNA, 215 bp, Homo sapiens; identical to SEQ ID NO: 294750
  chr20:35491515-35491730
  hypo

SEQ ID NO: 413508 - DNA, 163 bp, Homo sapiens; identical to SEQ ID NO: 275135
  chr20:35753148-35753311
  hypo

SEQ ID NO: 413509 - DNA, 321 bp, Homo sapiens; identical to SEQ ID NO: 275141
  chr20:35907656-35907977
  hypo

SEQ ID NO: 413510 - DNA, 137 bp, Homo sapiens; identical to SEQ ID NO: 275143
  chr20:35925946-35926083
  hypo

SEQ ID NO: 413511 - DNA, 102 bp, Homo sapiens; identical to SEQ ID NO: 275145
  chr20:35940186-35940288
  hypo

SEQ ID NO: 413512 - DNA, 282 bp, Homo sapiens; identical to SEQ ID NO: 275146
  chr20:35956277-35956559
  hypo

SEQ ID NO: 413513 - DNA, 123 bp, Homo sapiens; identical to SEQ ID NO: 219969
  chr20:35987182-35987305
  hypo

SEQ ID NO: 413514 - DNA, 34 bp, Homo sapiens; identical to SEQ ID NO: 219970
  chr20:36151088-36151122
  hypo

SEQ ID NO: 413515 - DNA, 346 bp, Homo sapiens; identical to SEQ ID NO: 327651
  chr20:36151161-36151507
  hypo

SEQ ID NO: 413516 - DNA, 208 bp, Homo sapiens; identical to SEQ ID NO: 275154
  chr20:36572548-36572756
  hypo

SEQ ID NO: 413517 - DNA, 205 bp, Homo sapiens; identical to SEQ ID NO: 275156
  chr20:36753455-36753660
  hypo

SEQ ID NO: 413518 - DNA, 279 bp, Homo sapiens; identical to SEQ ID NO: 219976
  chr20:36770537-36770816
  hypo

SEQ ID NO: 413519 - DNA, 232 bp, Homo sapiens; identical to SEQ ID NO: 275171
  chr20:37536535-37536767
  hypo

SEQ ID NO: 413520 - DNA, 90 bp, Homo sapiens; identical to SEQ ID NO: 327676
  chr20:37549578-37549668
  hypo

SEQ ID NO: 413521 - DNA, 120 bp, Homo sapiens; identical to SEQ ID NO: 275174
  chr20:37588339-37588459
  hypo

SEQ ID NO: 413522 - DNA, 85 bp, Homo sapiens; identical to SEQ ID NO: 275176
  chr20:37622329-37622414
  hypo

SEQ ID NO: 413523 - DNA, 43 bp, Homo sapiens; identical to SEQ ID NO: 219986
  chr20:37632981-37633024
  hypo

SEQ ID NO: 413524 - DNA, 282 bp, Homo sapiens; identical to SEQ ID NO: 275179
  chr20:37646803-37647085
  hypo

SEQ ID NO: 413525 - DNA, 75 bp, Homo sapiens; identical to SEQ ID NO: 275182
  chr20:37671509-37671584
  hypo

SEQ ID NO: 413526 - DNA, 38 bp, Homo sapiens; identical to SEQ ID NO: 275188
  chr20:39076958-39076996
  hypo

SEQ ID NO: 413527 - DNA, 90 bp, Homo sapiens; identical to SEQ ID NO: 275189
  chr20:39436088-39436178
  hypo

SEQ ID NO: 413528 - DNA, 220 bp, Homo sapiens; identical to SEQ ID NO: 275193
  chr20:39791147-39791367
  hypo

SEQ ID NO: 413529 - DNA, 42 bp, Homo sapiens; identical to SEQ ID NO: 219991
  chr20:39831202-39831244
  hypo

SEQ ID NO: 413530 - DNA, 128 bp, Homo sapiens; identical to SEQ ID NO: 219992
  chr20:39989813-39989941
  hypo

SEQ ID NO: 413531 - DNA, 59 bp, Homo sapiens
  chr20:40020281-40020340
  hypo
agaatcatggtggaaggcaaggagaagcaaggcacatcttacatgagggcaggaggtgg

SEQ ID NO: 413532 - DNA, 64 bp, Homo sapiens; identical to SEQ ID NO: 275198
  chr20:40161663-40161727
  hypo

SEQ ID NO: 413533 - DNA, 41 bp, Homo sapiens; identical to SEQ ID NO: 275199
  chr20:40352413-40352454
  hypo

SEQ ID NO: 413534 - DNA, 130 bp, Homo sapiens; identical to SEQ ID NO: 275202
  chr20:42142557-42142687
  hypo

SEQ ID NO: 413535 - DNA, 143 bp, Homo sapiens; identical to SEQ ID NO: 219995
  chr20:42192721-42192864
  hypo

SEQ ID NO: 413536 - DNA, 120 bp, Homo sapiens; identical to SEQ ID NO: 275206
  chr20:42215917-42216037
  hypo

SEQ ID NO: 413537 - DNA, 109 bp, Homo sapiens; identical to SEQ ID NO: 327711
  chr20:42345995-42346104
  hypo

SEQ ID NO: 413538 - DNA, 122 bp, Homo sapiens; identical to SEQ ID NO: 327712
  chr20:42346134-42346256
  hypo

SEQ ID NO: 413539 - DNA, 158 bp, Homo sapiens; identical to SEQ ID NO: 394791
  chr20:42833336-42833494
  hypo

SEQ ID NO: 413540 - DNA, 113 bp, Homo sapiens; identical to SEQ ID NO: 275215
  chr20:42885825-42885938
  hypo

SEQ ID NO: 413541 - DNA, 156 bp, Homo sapiens; identical to SEQ ID NO: 219999
  chr20:42924601-42924757
  hypo

SEQ ID NO: 413542 - DNA, 85 bp, Homo sapiens; identical to SEQ ID NO: 327724
  chr20:43052653-43052738
  hypo

SEQ ID NO: 413543 - DNA, 83 bp, Homo sapiens; identical to SEQ ID NO: 275225
  chr20:43329106-43329189
  hypo

SEQ ID NO: 413544 - DNA, 199 bp, Homo sapiens; identical to SEQ ID NO: 275226
  chr20:43356086-43356285
  hypo

SEQ ID NO: 413545 - DNA, 101 bp, Homo sapiens; identical to SEQ ID NO: 275231
  chr20:43660156-43660257
  hypo

SEQ ID NO: 413546 - DNA, 73 bp, Homo sapiens; identical to SEQ ID NO: 226157
  chr20:44462767-44462840
  hypo

SEQ ID NO: 413547 - DNA, 188 bp, Homo sapiens; identical to SEQ ID NO: 275236
  chr20:44463585-44463773
  hypo

SEQ ID NO: 413548 - DNA, 77 bp, Homo sapiens; identical to SEQ ID NO: 220004
  chr20:44469456-44469533
  hypo

SEQ ID NO: 413549 - DNA, 77 bp, Homo sapiens; identical to SEQ ID NO: 294810
  chr20:44519218-44519295
  hypo

SEQ ID NO: 413550 - DNA, 32 bp, Homo sapiens; identical to SEQ ID NO: 275239
  chr20:44560012-44560044
  hypo

SEQ ID NO: 413551 - DNA, 132 bp, Homo sapiens; identical to SEQ ID NO: 275243
  chr20:44578453-44578585
  hypo

SEQ ID NO: 413552 - DNA, 169 bp, Homo sapiens; identical to SEQ ID NO: 275246
  chr20:44707476-44707645
  hypo

SEQ ID NO: 413553 - DNA, 98 bp, Homo sapiens; identical to SEQ ID NO: 275247
  chr20:44707992-44708090
  hypo

SEQ ID NO: 413554 - DNA, 120 bp, Homo sapiens; identical to SEQ ID NO: 275248
  chr20:44720742-44720862
  hypo

SEQ ID NO: 413555 - DNA, 80 bp, Homo sapiens; identical to SEQ ID NO: 327760
  chr20:44893696-44893776
  hypo

SEQ ID NO: 413556 - DNA, 128 bp, Homo sapiens; identical to SEQ ID NO: 275254
  chr20:45343199-45343327
  hypo

SEQ ID NO: 413557 - DNA, 32 bp, Homo sapiens; identical to SEQ ID NO: 275258
  chr20:45829044-45829076
  hypo

SEQ ID NO: 413558 - DNA, 196 bp, Homo sapiens; identical to SEQ ID NO: 220014
  chr20:45837756-45837952
  hypo

SEQ ID NO: 413559 - DNA, 69 bp, Homo sapiens; identical to SEQ ID NO: 275261
  chr20:45878125-45878194
  hypo

SEQ ID NO: 413560 - DNA, 120 bp, Homo sapiens; identical to SEQ ID NO: 220018
  chr20:46011002-46011122
  hypo

SEQ ID NO: 413561 - DNA, 102 bp, Homo sapiens; identical to SEQ ID NO: 327783
  chr20:46013661-46013763
  hypo

SEQ ID NO: 413562 - DNA, 31 bp, Homo sapiens; identical to SEQ ID NO: 275270
  chr20:46175277-46175308
  hypo

SEQ ID NO: 413563 - DNA, 252 bp, Homo sapiens; identical to SEQ ID NO: 275272
  chr20:46305160-46305412
  hypo

SEQ ID NO: 413564 - DNA, 140 bp, Homo sapiens; identical to SEQ ID NO: 327787
  chr20:46315385-46315525
  hypo

SEQ ID NO: 413565 - DNA, 121 bp, Homo sapiens; identical to SEQ ID NO: 275275
  chr20:46390913-46391034
  hypo

SEQ ID NO: 413566 - DNA, 59 bp, Homo sapiens; identical to SEQ ID NO: 275277
  chr20:46489240-46489299
  hypo

SEQ ID NO: 413567 - DNA, 207 bp, Homo sapiens; identical to SEQ ID NO: 275280
  chr20:46846106-46846313
  hypo

SEQ ID NO: 413568 - DNA, 143 bp, Homo sapiens; identical to SEQ ID NO: 327797
  chr20:46972101-46972244
  hypo

SEQ ID NO: 413569 - DNA, 157 bp, Homo sapiens; identical to SEQ ID NO: 275296
  chr20:47713759-47713916
  hypo

SEQ ID NO: 413570 - DNA, 31 bp, Homo sapiens; identical to SEQ ID NO: 275300
  chr20:47805438-47805469
  hypo

SEQ ID NO: 413571 - DNA, 272 bp, Homo sapiens; identical to SEQ ID NO: 275304
  chr20:47865551-47865823
  hypo

SEQ ID NO: 413572 - DNA, 97 bp, Homo sapiens; identical to SEQ ID NO: 226172
  chr20:48194980-48195077
  hypo

SEQ ID NO: 413573 - DNA, 229 bp, Homo sapiens; identical to SEQ ID NO: 275307
  chr20:48209645-48209874
  hypo

SEQ ID NO: 413574 - DNA, 99 bp, Homo sapiens; identical to SEQ ID NO: 327824
  chr20:48252796-48252895
  hypo

SEQ ID NO: 413575 - DNA, 39 bp, Homo sapiens; identical to SEQ ID NO: 275319
  chr20:48549957-48549996
  hypo

SEQ ID NO: 413576 - DNA, 93 bp, Homo sapiens; identical to SEQ ID NO: 220032
  chr20:48720826-48720919
  hypo

SEQ ID NO: 413577 - DNA, 141 bp, Homo sapiens; identical to SEQ ID NO: 275324
  chr20:48744175-48744316
  hypo

SEQ ID NO: 413578 - DNA, 42 bp, Homo sapiens; identical to SEQ ID NO: 275328
  chr20:48791873-48791915
  hypo

SEQ ID NO: 413579 - DNA, 47 bp, Homo sapiens; identical to SEQ ID NO: 327848
  chr20:48863409-48863456
  hypo

SEQ ID NO: 413580 - DNA, 42 bp, Homo sapiens; identical to SEQ ID NO: 275333
  chr20:48936571-48936613
  hypo

SEQ ID NO: 413581 - DNA, 87 bp, Homo sapiens; identical to SEQ ID NO: 275335
  chr20:48974138-48974225
  hypo

SEQ ID NO: 413582 - DNA, 98 bp, Homo sapiens; identical to SEQ ID NO: 275337
  chr20:49046546-49046644
  hypo

SEQ ID NO: 413583 - DNA, 65 bp, Homo sapiens; identical to SEQ ID NO: 220034
  chr20:49046944-49047009
  hypo

SEQ ID NO: 413584 - DNA, 144 bp, Homo sapiens; identical to SEQ ID NO: 220035
  chr20:49197043-49197187
  hypo

SEQ ID NO: 413585 - DNA, 204 bp, Homo sapiens; identical to SEQ ID NO: 220036
  chr20:49203141-49203345
  hypo

SEQ ID NO: 413586 - DNA, 125 bp, Homo sapiens; identical to SEQ ID NO: 220037
  chr20:49204054-49204179
  hypo

SEQ ID NO: 413587 - DNA, 313 bp, Homo sapiens; identical to SEQ ID NO: 220038
  chr20:49204449-49204762
  hypo

SEQ ID NO: 413588 - DNA, 101 bp, Homo sapiens; identical to SEQ ID NO: 220046
  chr20:49244321-49244422
  hypo

SEQ ID NO: 413589 - DNA, 217 bp, Homo sapiens; identical to SEQ ID NO: 275364
  chr20:49294480-49294697
  hypo

SEQ ID NO: 413590 - DNA, 76 bp, Homo sapiens; identical to SEQ ID NO: 275365
  chr20:49302564-49302640
  hypo

SEQ ID NO: 413591 - DNA, 90 bp, Homo sapiens; identical to SEQ ID NO: 275366
  chr20:49318873-49318963
  hypo

SEQ ID NO: 413592 - DNA, 76 bp, Homo sapiens; identical to SEQ ID NO: 220052
  chr20:49331494-49331570
  hypo

SEQ ID NO: 413593 - DNA, 43 bp, Homo sapiens; identical to SEQ ID NO: 275371
  chr20:49355686-49355729
  hypo

SEQ ID NO: 413594 - DNA, 69 bp, Homo sapiens; identical to SEQ ID NO: 220053
  chr20:49406843-49406912
  hypo

SEQ ID NO: 413595 - DNA, 480 bp, Homo sapiens; identical to SEQ ID NO: 275379
  chr20:49487403-49487883
  hypo

SEQ ID NO: 413596 - DNA, 33 bp, Homo sapiens; identical to SEQ ID NO: 220054
  chr20:49556446-49556479
  hypo

SEQ ID NO: 413597 - DNA, 105 bp, Homo sapiens; identical to SEQ ID NO: 275381
  chr20:49620547-49620652
  hypo

SEQ ID NO: 413598 - DNA, 459 bp, Homo sapiens; identical to SEQ ID NO: 275382
  chr20:49620878-49621337
  hypo

SEQ ID NO: 413599 - DNA, 60 bp, Homo sapiens; identical to SEQ ID NO: 275386
  chr20:50104487-50104547
  hypo

SEQ ID NO: 413600 - DNA, 367 bp, Homo sapiens; identical to SEQ ID NO: 275388
  chr20:50199790-50200157
  hypo

SEQ ID NO: 413601 - DNA, 79 bp, Homo sapiens; identical to SEQ ID NO: 275390
  chr20:50213712-50213791
  hypo

SEQ ID NO: 413602 - DNA, 200 bp, Homo sapiens; identical to SEQ ID NO: 275391
  chr20:50293891-50294091
  hypo

SEQ ID NO: 413603 - DNA, 31 bp, Homo sapiens; identical to SEQ ID NO: 220056
  chr20:50326111-50326142
  hypo

SEQ ID NO: 413604 - DNA, 102 bp, Homo sapiens; identical to SEQ ID NO: 220057
  chr20:50337348-50337450
  hypo

SEQ ID NO: 413605 - DNA, 41 bp, Homo sapiens; identical to SEQ ID NO: 220058
  chr20:50346533-50346574
  hypo

SEQ ID NO: 413606 - DNA, 135 bp, Homo sapiens; identical to SEQ ID NO: 220059
  chr20:50378297-50378432
  hypo

SEQ ID NO: 413607 - DNA, 47 bp, Homo sapiens; identical to SEQ ID NO: 327908
  chr20:50378462-50378509
  hypo

SEQ ID NO: 413608 - DNA, 79 bp, Homo sapiens; identical to SEQ ID NO: 220063
  chr20:50405412-50405491
  hypo

SEQ ID NO: 413609 - DNA, 193 bp, Homo sapiens; identical to SEQ ID NO: 220064
  chr20:50407493-50407686
  hypo

SEQ ID NO: 413610 - DNA, 155 bp, Homo sapiens; identical to SEQ ID NO: 220065
  chr20:50407905-50408060
  hypo

SEQ ID NO: 413611 - DNA, 149 bp, Homo sapiens; identical to SEQ ID NO: 220066
  chr20:50408300-50408449
  hypo

SEQ ID NO: 413612 - DNA, 83 bp, Homo sapiens; identical to SEQ ID NO: 327919
  chr20:50419388-50419471
  hypo

SEQ ID NO: 413613 - DNA, 157 bp, Homo sapiens; identical to SEQ ID NO: 275407
  chr20:50451581-50451738
  hypo

SEQ ID NO: 413614 - DNA, 42 bp, Homo sapiens; identical to SEQ ID NO: 275408
  chr20:50591574-50591616
  hypo

SEQ ID NO: 413615 - DNA, 120 bp, Homo sapiens; identical to SEQ ID NO: 220071
  chr20:50805540-50805660
  hypo

SEQ ID NO: 413616 - DNA, 33 bp, Homo sapiens; identical to SEQ ID NO: 220072
  chr20:50805900-50805933
  hypo

SEQ ID NO: 413617 - DNA, 42 bp, Homo sapiens; identical to SEQ ID NO: 275414
  chr20:51794668-51794710
  hypo

SEQ ID NO: 413618 - DNA, 139 bp, Homo sapiens; identical to SEQ ID NO: 275415
  chr20:51870537-51870676
  hypo

SEQ ID NO: 413619 - DNA, 32 bp, Homo sapiens; identical to SEQ ID NO: 220075
  chr20:52281658-52281690
  hypo

SEQ ID NO: 413620 - DNA, 39 bp, Homo sapiens; identical to SEQ ID NO: 275421
  chr20:52305003-52305042
  hypo

SEQ ID NO: 413621 - DNA, 77 bp, Homo sapiens; identical to SEQ ID NO: 220076
  chr20:52311776-52311853
  hypo

SEQ ID NO: 413622 - DNA, 182 bp, Homo sapiens; identical to SEQ ID NO: 275425
  chr20:52481243-52481425
  hypo

SEQ ID NO: 413623 - DNA, 161 bp, Homo sapiens; identical to SEQ ID NO: 275428
  chr20:52758814-52758975
  hypo

SEQ ID NO: 413624 - DNA, 70 bp, Homo sapiens; identical to SEQ ID NO: 275431
  chr20:54681487-54681557
  hypo

SEQ ID NO: 413625 - DNA, 38 bp, Homo sapiens; identical to SEQ ID NO: 275432
  chr20:54747158-54747196
  hypo

SEQ ID NO: 413626 - DNA, 34 bp, Homo sapiens; identical to SEQ ID NO: 327952
  chr20:55071606-55071640
  hypo

SEQ ID NO: 413627 - DNA, 50 bp, Homo sapiens; identical to SEQ ID NO: 275438
  chr20:55091876-55091926
  hypo

SEQ ID NO: 413628 - DNA, 113 bp, Homo sapiens; identical to SEQ ID NO: 275439
  chr20:55667945-55668058
  hypo

SEQ ID NO: 413629 - DNA, 152 bp, Homo sapiens; identical to SEQ ID NO: 275442
  chr20:55692780-55692932
  hypo

SEQ ID NO: 413630 - DNA, 171 bp, Homo sapiens; identical to SEQ ID NO: 275444
  chr20:55742062-55742233
  hypo

SEQ ID NO: 413631 - DNA, 122 bp, Homo sapiens; identical to SEQ ID NO: 275445
  chr20:55748184-55748306
  hypo

SEQ ID NO: 413632 - DNA, 229 bp, Homo sapiens; identical to SEQ ID NO: 275447
  chr20:55904350-55904579
  hypo

SEQ ID NO: 413633 - DNA, 37 bp, Homo sapiens; identical to SEQ ID NO: 220083
  chr20:55959339-55959376
  hypo

SEQ ID NO: 413634 - DNA, 145 bp, Homo sapiens; identical to SEQ ID NO: 205870
  chr20:55966824-55966969
  hypo

SEQ ID NO: 413635 - DNA, 71 bp, Homo sapiens; identical to SEQ ID NO: 275452
  chr20:55969232-55969303
  hypo

SEQ ID NO: 413636 - DNA, 104 bp, Homo sapiens; identical to SEQ ID NO: 327975
  chr20:56031298-56031402
  hypo

SEQ ID NO: 413637 - DNA, 274 bp, Homo sapiens; identical to SEQ ID NO: 275458
  chr20:56076054-56076328
  hypo

SEQ ID NO: 413638 - DNA, 119 bp, Homo sapiens; identical to SEQ ID NO: 275460
  chr20:56115074-56115193
  hypo

SEQ ID NO: 413639 - DNA, 155 bp, Homo sapiens; identical to SEQ ID NO: 275462
  chr20:56167908-56168063
  hypo

SEQ ID NO: 413640 - DNA, 103 bp, Homo sapiens; identical to SEQ ID NO: 275464
  chr20:56227531-56227634
  hypo

SEQ ID NO: 413641 - DNA, 102 bp, Homo sapiens; identical to SEQ ID NO: 275466
  chr20:56262196-56262298
  hypo

SEQ ID NO: 413642 - DNA, 145 bp, Homo sapiens; identical to SEQ ID NO: 220089
  chr20:56264917-56265062
  hypo

SEQ ID NO: 413643 - DNA, 140 bp, Homo sapiens; identical to SEQ ID NO: 275470
  chr20:56270430-56270570
  hypo

SEQ ID NO: 413644 - DNA, 95 bp, Homo sapiens; identical to SEQ ID NO: 275472
  chr20:56299650-56299745
  hypo

SEQ ID NO: 413645 - DNA, 67 bp, Homo sapiens; identical to SEQ ID NO: 275474
  chr20:56717706-56717773
  hypo

SEQ ID NO: 413646 - DNA, 224 bp, Homo sapiens; identical to SEQ ID NO: 226188
  chr20:56811736-56811960
  hypo

SEQ ID NO: 413647 - DNA, 154 bp, Homo sapiens; identical to SEQ ID NO: 220097
  chr20:56977720-56977874
  hypo

SEQ ID NO: 413648 - DNA, 185 bp, Homo sapiens; identical to SEQ ID NO: 275483
  chr20:57037020-57037205
  hypo

SEQ ID NO: 413649 - DNA, 162 bp, Homo sapiens; identical to SEQ ID NO: 220099
  chr20:57041475-57041637
  hypo

SEQ ID NO: 413650 - DNA, 183 bp, Homo sapiens; identical to SEQ ID NO: 275485
  chr20:57070698-57070881
  hypo

SEQ ID NO: 413651 - DNA, 88 bp, Homo sapiens; identical to SEQ ID NO: 275487
  chr20:57213159-57213247
  hypo

SEQ ID NO: 413652 - DNA, 234 bp, Homo sapiens; identical to SEQ ID NO: 220102
  chr20:57244309-57244543
  hypo

SEQ ID NO: 413653 - DNA, 308 bp, Homo sapiens; identical to SEQ ID NO: 275492
  chr20:57375851-57376159
  hypo

SEQ ID NO: 413654 - DNA, 208 bp, Homo sapiens; identical to SEQ ID NO: 226190
  chr20:57414593-57414801
  hypo

SEQ ID NO: 413655 - DNA, 158 bp, Homo sapiens; identical to SEQ ID NO: 205875
  chr20:57415180-57415338
  hypo

SEQ ID NO: 413656 - DNA, 202 bp, Homo sapiens; identical to SEQ ID NO: 220113
  chr20:57578998-57579200
  hypo

SEQ ID NO: 413657 - DNA, 57 bp, Homo sapiens; identical to SEQ ID NO: 205883
  chr20:57797335-57797392
  hypo

SEQ ID NO: 413658 - DNA, 285 bp, Homo sapiens; identical to SEQ ID NO: 294939
  chr20:58514845-58515130
  hypo

SEQ ID NO: 413659 - DNA, 519 bp, Homo sapiens; identical to SEQ ID NO: 275518
  chr20:59965387-59965906
  hypo

SEQ ID NO: 413660 - DNA, 195 bp, Homo sapiens; identical to SEQ ID NO: 275520
  chr20:60098286-60098481
  hypo

SEQ ID NO: 413661 - DNA, 44 bp, Homo sapiens; identical to SEQ ID NO: 275524
  chr20:60176907-60176951
  hypo

SEQ ID NO: 413662 - DNA, 42 bp, Homo sapiens; identical to SEQ ID NO: 275525
  chr20:60194626-60194668
  hypo

SEQ ID NO: 413663 - DNA, 329 bp, Homo sapiens; identical to SEQ ID NO: 275526
  chr20:60198708-60199037
  hypo

SEQ ID NO: 413664 - DNA, 175 bp, Homo sapiens; identical to SEQ ID NO: 275529
  chr20:60236697-60236872
  hypo

SEQ ID NO: 413665 - DNA, 183 bp, Homo sapiens; identical to SEQ ID NO: 275538
  chr20:60329680-60329863
  hypo

SEQ ID NO: 413666 - DNA, 190 bp, Homo sapiens; identical to SEQ ID NO: 220136
  chr20:60361300-60361490
  hypo

SEQ ID NO: 413667 - DNA, 557 bp, Homo sapiens; identical to SEQ ID NO: 275553
  chr20:60495766-60496323
  hypo

SEQ ID NO: 413668 - DNA, 203 bp, Homo sapiens; identical to SEQ ID NO: 275562
  chr20:60551197-60551400
  hypo

SEQ ID NO: 413669 - DNA, 783 bp, Homo sapiens; identical to SEQ ID NO: 328110
  chr20:60615350-60616133
  hypo

SEQ ID NO: 413670 - DNA, 34 bp, Homo sapiens; identical to SEQ ID NO: 328111
  chr20:60635123-60635157
  hypo

SEQ ID NO: 413671 - DNA, 224 bp, Homo sapiens; identical to SEQ ID NO: 275576
  chr20:60735522-60735746
  hypo

SEQ ID NO: 413672 - DNA, 75 bp, Homo sapiens; identical to SEQ ID NO: 394839
  chr20:60842845-60842920
  hypo

SEQ ID NO: 413673 - DNA, 34 bp, Homo sapiens; identical to SEQ ID NO: 220165
  chr20:60845091-60845125
  hypo

SEQ ID NO: 413674 - DNA, 97 bp, Homo sapiens; identical to SEQ ID NO: 275590
  chr20:60866831-60866928
  hypo

SEQ ID NO: 413675 - DNA, 451 bp, Homo sapiens; identical to SEQ ID NO: 275594
  chr20:60880675-60881126
  hypo

SEQ ID NO: 413676 - DNA, 148 bp, Homo sapiens; identical to SEQ ID NO: 220168
  chr20:60891780-60891928
  hypo

SEQ ID NO: 413677 - DNA, 206 bp, Homo sapiens; identical to SEQ ID NO: 220169
  chr20:60891958-60892164
  hypo

SEQ ID NO: 413678 - DNA, 273 bp, Homo sapiens; identical to SEQ ID NO: 328141
  chr20:60892222-60892495
  hypo

SEQ ID NO: 413679 - DNA, 222 bp, Homo sapiens; identical to SEQ ID NO: 328142
  chr20:60905729-60905951
  hypo

SEQ ID NO: 413680 - DNA, 236 bp, Homo sapiens; identical to SEQ ID NO: 220172
  chr20:60906010-60906246
  hypo

SEQ ID NO: 413681 - DNA, 234 bp, Homo sapiens; identical to SEQ ID NO: 220174
  chr20:60913381-60913615
  hypo

SEQ ID NO: 413682 - DNA, 86 bp, Homo sapiens; identical to SEQ ID NO: 220175
  chr20:60925165-60925251
  hypo

SEQ ID NO: 413683 - DNA, 243 bp, Homo sapiens; identical to SEQ ID NO: 205894
  chr20:60941671-60941914
  hypo

SEQ ID NO: 413684 - DNA, 201 bp, Homo sapiens; identical to SEQ ID NO: 275606
  chr20:60963092-60963293
  hypo

SEQ ID NO: 413685 - DNA, 349 bp, Homo sapiens; identical to SEQ ID NO: 275612
  chr20:60996144-60996493
  hypo

SEQ ID NO: 413686 - DNA, 201 bp, Homo sapiens; identical to SEQ ID NO: 220183
  chr20:60997210-60997411
  hypo

SEQ ID NO: 413687 - DNA, 133 bp, Homo sapiens; identical to SEQ ID NO: 275615
  chr20:61009827-61009960
  hypo

SEQ ID NO: 413688 - DNA, 37 bp, Homo sapiens; identical to SEQ ID NO: 275616
  chr20:61010380-61010417
  hypo

SEQ ID NO: 413689 - DNA, 105 bp, Homo sapiens; identical to SEQ ID NO: 275619
  chr20:61275877-61275982
  hypo

SEQ ID NO: 413690 - DNA, 201 bp, Homo sapiens; identical to SEQ ID NO: 220185
  chr20:61285585-61285786
  hypo

SEQ ID NO: 413691 - DNA, 206 bp, Homo sapiens; identical to SEQ ID NO: 275623
  chr20:61289971-61290177
  hypo

SEQ ID NO: 413692 - DNA, 306 bp, Homo sapiens; identical to SEQ ID NO: 275626
  chr20:61297760-61298066
  hypo

SEQ ID NO: 413693 - DNA, 313 bp, Homo sapiens; identical to SEQ ID NO: 275627
  chr20:61298975-61299288
  hypo

SEQ ID NO: 413694 - DNA, 128 bp, Homo sapiens; identical to SEQ ID NO: 328181
  chr20:61312775-61312903
  hypo

SEQ ID NO: 413695 - DNA, 102 bp, Homo sapiens; identical to SEQ ID NO: 275631
  chr20:61323378-61323480
  hypo

SEQ ID NO: 413696 - DNA, 115 bp, Homo sapiens; identical to SEQ ID NO: 328189
  chr20:61364297-61364412
  hypo

SEQ ID NO: 413697 - DNA, 54 bp, Homo sapiens; identical to SEQ ID NO: 328190
  chr20:61364476-61364530
  hypo

SEQ ID NO: 413698 - DNA, 99 bp, Homo sapiens; identical to SEQ ID NO: 328193
  chr20:61393666-61393765
  hypo

SEQ ID NO: 413699 - DNA, 145 bp, Homo sapiens; identical to SEQ ID NO: 275644
  chr20:61405559-61405704
  hypo

SEQ ID NO: 413700 - DNA, 62 bp, Homo sapiens; identical to SEQ ID NO: 328198
  chr20:61411118-61411180
  hypo

SEQ ID NO: 413701 - DNA, 118 bp, Homo sapiens; identical to SEQ ID NO: 275648
  chr20:61442868-61442986
  hypo

SEQ ID NO: 413702 - DNA, 51 bp, Homo sapiens; identical to SEQ ID NO: 400976
  chr20:61447619-61447670
  hypo

SEQ ID NO: 413703 - DNA, 36 bp, Homo sapiens; identical to SEQ ID NO: 400977
  chr20:61447763-61447799
  hypo

SEQ ID NO: 413704 - DNA, 350 bp, Homo sapiens; identical to SEQ ID NO: 328203
  chr20:61459926-61460276
  hypo

SEQ ID NO: 413705 - DNA, 38 bp, Homo sapiens; identical to SEQ ID NO: 220192
  chr20:61470101-61470139
  hypo

SEQ ID NO: 413706 - DNA, 180 bp, Homo sapiens; identical to SEQ ID NO: 275655
  chr20:61473183-61473363
  hypo

SEQ ID NO: 413707 - DNA, 98 bp, Homo sapiens; identical to SEQ ID NO: 275656
  chr20:61473725-61473823
  hypo

SEQ ID NO: 413708 - DNA, 93 bp, Homo sapiens; identical to SEQ ID NO: 220197
  chr20:61518345-61518438
  hypo

SEQ ID NO: 413709 - DNA, 92 bp, Homo sapiens; identical to SEQ ID NO: 275666
  chr20:61538594-61538686
  hypo

SEQ ID NO: 413710 - DNA, 92 bp, Homo sapiens; identical to SEQ ID NO: 275667
  chr20:61540950-61541042
  hypo

SEQ ID NO: 413711 - DNA, 135 bp, Homo sapiens; identical to SEQ ID NO: 220200
  chr20:61576504-61576639
  hypo

SEQ ID NO: 413712 - DNA, 103 bp, Homo sapiens; identical to SEQ ID NO: 294961
  chr20:61583882-61583985
  hypo

SEQ ID NO: 413713 - DNA, 316 bp, Homo sapiens; identical to SEQ ID NO: 294962
  chr20:61584015-61584331
  hypo

SEQ ID NO: 413714 - DNA, 130 bp, Homo sapiens; identical to SEQ ID NO: 220201
  chr20:61619034-61619164
  hypo

SEQ ID NO: 413715 - DNA, 210 bp, Homo sapiens; identical to SEQ ID NO: 275674
  chr20:61666077-61666287
  hypo

SEQ ID NO: 413716 - DNA, 253 bp, Homo sapiens; identical to SEQ ID NO: 220205
  chr20:61693186-61693439
  hypo

SEQ ID NO: 413717 - DNA, 165 bp, Homo sapiens; identical to SEQ ID NO: 220207
  chr20:61748971-61749136
  hypo

SEQ ID NO: 413718 - DNA, 66 bp, Homo sapiens; identical to SEQ ID NO: 220208
  chr20:61749166-61749232
  hypo

SEQ ID NO: 413719 - DNA, 249 bp, Homo sapiens; identical to SEQ ID NO: 294967
  chr20:61759828-61760077
  hypo

SEQ ID NO: 413720 - DNA, 183 bp, Homo sapiens; identical to SEQ ID NO: 328245
  chr20:61765425-61765608
  hypo

SEQ ID NO: 413721 - DNA, 154 bp, Homo sapiens; identical to SEQ ID NO: 275691
  chr20:61819884-61820038
  hypo

SEQ ID NO: 413722 - DNA, 165 bp, Homo sapiens; identical to SEQ ID NO: 275696
  chr20:61880358-61880523
  hypo

SEQ ID NO: 413723 - DNA, 55 bp, Homo sapiens; identical to SEQ ID NO: 220216
  chr20:61895763-61895818
  hypo

SEQ ID NO: 413724 - DNA, 37 bp, Homo sapiens; identical to SEQ ID NO: 220217
  chr20:61909562-61909599
  hypo

SEQ ID NO: 413725 - DNA, 58 bp, Homo sapiens; identical to SEQ ID NO: 220218
  chr20:61913595-61913653
  hypo

SEQ ID NO: 413726 - DNA, 79 bp, Homo sapiens; identical to SEQ ID NO: 328263
  chr20:61942752-61942831
  hypo

SEQ ID NO: 413727 - DNA, 195 bp, Homo sapiens; identical to SEQ ID NO: 275701
  chr20:61947782-61947977
  hypo

SEQ ID NO: 413728 - DNA, 73 bp, Homo sapiens; identical to SEQ ID NO: 275702
  chr20:61951425-61951498
  hypo

SEQ ID NO: 413729 - DNA, 72 bp, Homo sapiens
  chr20:61974493-61974565
  hypo
cagttttgtgggttgcatccagcctttcctacagactgaaatagaagacacttgaatagaaaatgcaaagca

SEQ ID NO: 413730 - DNA, 244 bp, Homo sapiens; identical to SEQ ID NO: 275708
  chr20:61979331-61979575
  hypo

SEQ ID NO: 413731 - DNA, 247 bp, Homo sapiens; identical to SEQ ID NO: 220221
  chr20:61981498-61981745
  hypo

SEQ ID NO: 413732 - DNA, 187 bp, Homo sapiens; identical to SEQ ID NO: 220222
  chr20:61982647-61982834
  hypo

SEQ ID NO: 413733 - DNA, 35 bp, Homo sapiens; identical to SEQ ID NO: 220225
  chr20:62018865-62018900
  hypo

SEQ ID NO: 413734 - DNA, 84 bp, Homo sapiens; identical to SEQ ID NO: 220226
  chr20:62019257-62019341
  hypo

SEQ ID NO: 413735 - DNA, 84 bp, Homo sapiens; identical to SEQ ID NO: 275717
  chr20:62019401-62019485
  hypo

SEQ ID NO: 413736 - DNA, 47 bp, Homo sapiens; identical to SEQ ID NO: 328281
  chr20:62037978-62038025
  hypo

SEQ ID NO: 413737 - DNA, 39 bp, Homo sapiens; identical to SEQ ID NO: 328283
  chr20:62048274-62048313
  hypo

SEQ ID NO: 413738 - DNA, 881 bp, Homo sapiens; identical to SEQ ID NO: 328284
  chr20:62050045-62050926
  hypo

SEQ ID NO: 413739 - DNA, 227 bp, Homo sapiens; identical to SEQ ID NO: 328286
  chr20:62052955-62053182
  hypo

SEQ ID NO: 413740 - DNA, 227 bp, Homo sapiens; identical to SEQ ID NO: 328287
  chr20:62053339-62053566
  hypo

SEQ ID NO: 413741 - DNA, 32 bp, Homo sapiens; identical to SEQ ID NO: 220229
  chr20:62083855-62083887
  hypo

SEQ ID NO: 413742 - DNA, 151 bp, Homo sapiens; identical to SEQ ID NO: 275739
  chr20:62149573-62149724
  hypo

SEQ ID NO: 413743 - DNA, 42 bp, Homo sapiens; identical to SEQ ID NO: 226226
  chr20:62152087-62152129
  hypo

SEQ ID NO: 413744 - DNA, 75 bp, Homo sapiens; identical to SEQ ID NO: 275745
  chr20:62175657-62175732
  hypo

SEQ ID NO: 413745 - DNA, 68 bp, Homo sapiens; identical to SEQ ID NO: 275746
  chr20:62178216-62178284
  hypo

SEQ ID NO: 413746 - DNA, 77 bp, Homo sapiens; identical to SEQ ID NO: 220234
  chr20:62190624-62190701
  hypo

SEQ ID NO: 413747 - DNA, 184 bp, Homo sapiens; identical to SEQ ID NO: 275751
  chr20:62209403-62209587
  hypo

SEQ ID NO: 413748 - DNA, 38 bp, Homo sapiens; identical to SEQ ID NO: 220235
  chr20:62214176-62214214
  hypo

SEQ ID NO: 413749 - DNA, 278 bp, Homo sapiens; identical to SEQ ID NO: 275753
  chr20:62218275-62218553
  hypo

SEQ ID NO: 413750 - DNA, 828 bp, Homo sapiens; identical to SEQ ID NO: 394875
  chr20:62220463-62221291
  hypo

SEQ ID NO: 413751 - DNA, 76 bp, Homo sapiens; identical to SEQ ID NO: 220240
  chr20:62231698-62231774
  hypo

SEQ ID NO: 413752 - DNA, 263 bp, Homo sapiens; identical to SEQ ID NO: 328318
  chr20:62250723-62250986
  hypo

SEQ ID NO: 413753 - DNA, 128 bp, Homo sapiens; identical to SEQ ID NO: 328319
  chr20:62251016-62251144
  hypo

SEQ ID NO: 413754 - DNA, 120 bp, Homo sapiens; identical to SEQ ID NO: 275760
  chr20:62252635-62252755
  hypo

SEQ ID NO: 413755 - DNA, 651 bp, Homo sapiens; identical to SEQ ID NO: 294982
  chr20:62283836-62284487
  hypo

SEQ ID NO: 413756 - DNA, 69 bp, Homo sapiens; identical to SEQ ID NO: 294983
  chr20:62284615-62284684
  hypo

SEQ ID NO: 413757 - DNA, 162 bp, Homo sapiens; identical to SEQ ID NO: 275766
  chr20:62313528-62313690
  hypo

SEQ ID NO: 413758 - DNA, 211 bp, Homo sapiens; identical to SEQ ID NO: 220244
  chr20:62317398-62317609
  hypo

SEQ ID NO: 413759 - DNA, 230 bp, Homo sapiens; identical to SEQ ID NO: 328336
  chr20:62329296-62329526
  hypo

SEQ ID NO: 413760 - DNA, 126 bp, Homo sapiens; identical to SEQ ID NO: 328337
  chr20:62329556-62329682
  hypo

SEQ ID NO: 413761 - DNA, 55 bp, Homo sapiens; identical to SEQ ID NO: 220248
  chr20:62398949-62399004
  hypo

SEQ ID NO: 413762 - DNA, 394 bp, Homo sapiens; identical to SEQ ID NO: 275785
  chr20:62413440-62413834
  hypo

SEQ ID NO: 413763 - DNA, 76 bp, Homo sapiens; identical to SEQ ID NO: 328349
  chr20:62422171-62422247
  hypo

SEQ ID NO: 413764 - DNA, 225 bp, Homo sapiens; identical to SEQ ID NO: 328350
  chr20:62422321-62422546
  hypo

SEQ ID NO: 413765 - DNA, 165 bp, Homo sapiens; identical to SEQ ID NO: 328351
  chr20:62426999-62427164
  hypo

SEQ ID NO: 413766 - DNA, 96 bp, Homo sapiens; identical to SEQ ID NO: 275788
  chr20:62432147-62432243
  hypo

SEQ ID NO: 413767 - DNA, 45 bp, Homo sapiens; identical to SEQ ID NO: 328353
  chr20:62440399-62440444
  hypo

SEQ ID NO: 413768 - DNA, 66 bp, Homo sapiens; identical to SEQ ID NO: 328354
  chr20:62440540-62440606
  hypo

SEQ ID NO: 413769 - DNA, 117 bp, Homo sapiens; identical to SEQ ID NO: 275794
  chr20:62494226-62494343
  hypo

SEQ ID NO: 413770 - DNA, 251 bp, Homo sapiens; identical to SEQ ID NO: 275797
  chr20:62520344-62520595
  hypo

SEQ ID NO: 413771 - DNA, 361 bp, Homo sapiens; identical to SEQ ID NO: 226233
  chr20:62525784-62526145
  hypo

SEQ ID NO: 413772 - DNA, 42 bp, Homo sapiens; identical to SEQ ID NO: 220254
  chr20:62544237-62544279
  hypo

SEQ ID NO: 413773 - DNA, 94 bp, Homo sapiens; identical to SEQ ID NO: 275802
  chr20:62556213-62556307
  hypo

SEQ ID NO: 413774 - DNA, 244 bp, Homo sapiens; identical to SEQ ID NO: 275804
  chr20:62571650-62571894
  hypo

SEQ ID NO: 413775 - DNA, 125 bp, Homo sapiens; identical to SEQ ID NO: 275806
  chr20:62576162-62576287
  hypo

SEQ ID NO: 413776 - DNA, 207 bp, Homo sapiens; identical to SEQ ID NO: 275810
  chr20:62598913-62599120
  hypo

SEQ ID NO: 413777 - DNA, 125 bp, Homo sapiens; identical to SEQ ID NO: 220266
  chr20:62608161-62608286
  hypo

SEQ ID NO: 413778 - DNA, 205 bp, Homo sapiens; identical to SEQ ID NO: 294999
  chr20:62673632-62673837
  hypo

SEQ ID NO: 413779 - DNA, 322 bp, Homo sapiens; identical to SEQ ID NO: 295000
  chr20:62679894-62680216
  hypo

SEQ ID NO: 413780 - DNA, 34 bp, Homo sapiens; identical to SEQ ID NO: 275819
  chr20:62705149-62705183
  hypo

SEQ ID NO: 413781 - DNA, 575 bp, Homo sapiens; identical to SEQ ID NO: 220279
  chr20:62737169-62737744
  hypo

SEQ ID NO: 413782 - DNA, 301 bp, Homo sapiens; identical to SEQ ID NO: 220280
  chr20:62737790-62738091
  hypo

SEQ ID NO: 413783 - DNA, 91 bp, Homo sapiens; identical to SEQ ID NO: 275822
  chr20:62766352-62766443
  hypo

SEQ ID NO: 413784 - DNA, 71 bp, Homo sapiens; identical to SEQ ID NO: 275826
  chr20:62797053-62797124
  hypo

SEQ ID NO: 413785 - DNA, 388 bp, Homo sapiens; identical to SEQ ID NO: 275827
  chr20:62818172-62818560
  hypo

SEQ ID NO: 413786 - DNA, 182 bp, Homo sapiens; identical to SEQ ID NO: 275829
  chr20:62851114-62851296
  hypo

SEQ ID NO: 413787 - DNA, 263 bp, Homo sapiens; identical to SEQ ID NO: 275830
  chr20:62859283-62859546
  hypo

SEQ ID NO: 413788 - DNA, 142 bp, Homo sapiens; identical to SEQ ID NO: 328413
  chr20:62871681-62871823
  hypo

SEQ ID NO: 413789 - DNA, 334 bp, Homo sapiens; identical to SEQ ID NO: 275835
  chr20:62899595-62899929
  hypo

SEQ ID NO: 413790 - DNA, 38 bp, Homo sapiens; identical to SEQ ID NO: 275836
  chr20:62912885-62912923
  hypo

SEQ ID NO: 413791 - DNA, 37 bp, Homo sapiens; identical to SEQ ID NO: 275837
  chr20:62914531-62914568
  hypo

SEQ ID NO: 413792 - DNA, 360 bp, Homo sapiens; identical to SEQ ID NO: 275839
  chr21:15445158-15445518
  hypo

SEQ ID NO: 413793 - DNA, 165 bp, Homo sapiens; identical to SEQ ID NO: 220285
  chr21:15455717-15455882
  hypo

SEQ ID NO: 413794 - DNA, 57 bp, Homo sapiens; identical to SEQ ID NO: 220286
  chr21:15455989-15456046
  hypo

SEQ ID NO: 413795 - DNA, 103 bp, Homo sapiens; identical to SEQ ID NO: 275843
  chr21:16130852-16130955
  hypo

SEQ ID NO: 413796 - DNA, 268 bp, Homo sapiens; identical to SEQ ID NO: 295016
  chr21:16438267-16438535
  hypo

SEQ ID NO: 413797 - DNA, 202 bp, Homo sapiens; identical to SEQ ID NO: 275847
  chr21:16747503-16747705
  hypo

SEQ ID NO: 413798 - DNA, 1361 bp, Homo sapiens; identical to SEQ ID NO: 295019
  chr21:18885047-18886408
  hypo

SEQ ID NO: 413799 - DNA, 35 bp, Homo sapiens; identical to SEQ ID NO: 275848
  chr21:18887830-18887865
  hypo

SEQ ID NO: 413800 - DNA, 36 bp, Homo sapiens; identical to SEQ ID NO: 275850
  chr21:18913418-18913454
  hypo

SEQ ID NO: 413801 - DNA, 98 bp, Homo sapiens; identical to SEQ ID NO: 295021
  chr21:18985373-18985471
  hypo

SEQ ID NO: 413802 - DNA, 60 bp, Homo sapiens; identical to SEQ ID NO: 275851
  chr21:19190791-19190851
  hypo

SEQ ID NO: 413803 - DNA, 37 bp, Homo sapiens; identical to SEQ ID NO: 275857
  chr21:22495685-22495722
  hypo

SEQ ID NO: 413804 - DNA, 213 bp, Homo sapiens; identical to SEQ ID NO: 275861
  chr21:30352359-30352572
  hypo

SEQ ID NO: 413805 - DNA, 99 bp, Homo sapiens; identical to SEQ ID NO: 220298
  chr21:30407636-30407735
  hypo

SEQ ID NO: 413806 - DNA, 42 bp, Homo sapiens; identical to SEQ ID NO: 275866
  chr21:30488430-30488472
  hypo

SEQ ID NO: 413807 - DNA, 146 bp, Homo sapiens; identical to SEQ ID NO: 275867
  chr21:30722368-30722514
  hypo

SEQ ID NO: 413808 - DNA, 105 bp, Homo sapiens; identical to SEQ ID NO: 226254
  chr21:32932326-32932431
  hypo

SEQ ID NO: 413809 - DNA, 150 bp, Homo sapiens; identical to SEQ ID NO: 220304
  chr21:33057409-33057559
  hypo

SEQ ID NO: 413810 - DNA, 32 bp, Homo sapiens; identical to SEQ ID NO: 226255
  chr21:33058221-33058253
  hypo

SEQ ID NO: 413811 - DNA, 32 bp, Homo sapiens; identical to SEQ ID NO: 220306
  chr21:33058553-33058585
  hypo

SEQ ID NO: 413812 - DNA, 111 bp, Homo sapiens; identical to SEQ ID NO: 275873
  chr21:33058885-33058996
  hypo

SEQ ID NO: 413813 - DNA, 101 bp, Homo sapiens; identical to SEQ ID NO: 220307
  chr21:33175427-33175528
  hypo

SEQ ID NO: 413814 - DNA, 139 bp, Homo sapiens; identical to SEQ ID NO: 275875
  chr21:33340684-33340823
  hypo

SEQ ID NO: 413815 - DNA, 120 bp, Homo sapiens; identical to SEQ ID NO: 275878
  chr21:33627820-33627940
  hypo

SEQ ID NO: 413816 - DNA, 616 bp, Homo sapiens; identical to SEQ ID NO: 220309
  chr21:33707628-33708244
  hypo

SEQ ID NO: 413817 - DNA, 137 bp, Homo sapiens; identical to SEQ ID NO: 328479
  chr21:33721619-33721756
  hypo

SEQ ID NO: 413818 - DNA, 42 bp, Homo sapiens; identical to SEQ ID NO: 275888
  chr21:33754389-33754431
  hypo

SEQ ID NO: 413819 - DNA, 583 bp, Homo sapiens; identical to SEQ ID NO: 275890
  chr21:33760391-33760974
  hypo

SEQ ID NO: 413820 - DNA, 32 bp, Homo sapiens
  chr21:33782206-33782238
  hypo
ggccatctccccagacccacttttcttttttg

SEQ ID NO: 413821 - DNA, 163 bp, Homo sapiens; identical to SEQ ID NO: 220313
  chr21:33812566-33812729
  hypo

SEQ ID NO: 413822 - DNA, 240 bp, Homo sapiens; identical to SEQ ID NO: 220314
  chr21:33844219-33844459
  hypo

SEQ ID NO: 413823 - DNA, 208 bp, Homo sapiens; identical to SEQ ID NO: 220315
  chr21:33845782-33845990
  hypo

SEQ ID NO: 413824 - DNA, 65 bp, Homo sapiens; identical to SEQ ID NO: 220316
  chr21:33849056-33849121
  hypo

SEQ ID NO: 413825 - DNA, 36 bp, Homo sapiens; identical to SEQ ID NO: 275898
  chr21:33857747-33857783
  hypo

SEQ ID NO: 413826 - DNA, 148 bp, Homo sapiens; identical to SEQ ID NO: 220318
  chr21:33876126-33876274
  hypo

SEQ ID NO: 413827 - DNA, 109 bp, Homo sapiens; identical to SEQ ID NO: 275906
  chr21:33976772-33976881
  hypo

SEQ ID NO: 413828 - DNA, 54 bp, Homo sapiens
  chr21:34033543-34033597
  hypo
cacttgccagcccttgccaaagcagtagcacaatggtgtgttacttgctgacag

SEQ ID NO: 413829 - DNA, 149 bp, Homo sapiens; identical to SEQ ID NO: 275910
  chr21:34493986-34494135
  hypo

SEQ ID NO: 413830 - DNA, 176 bp, Homo sapiens; identical to SEQ ID NO: 275911
  chr21:34498741-34498917
  hypo

SEQ ID NO: 413831 - DNA, 92 bp, Homo sapiens; identical to SEQ ID NO: 220321
  chr21:34710940-34711032
  hypo

SEQ ID NO: 413832 - DNA, 32 bp, Homo sapiens; identical to SEQ ID NO: 220322
  chr21:34711332-34711364
  hypo

SEQ ID NO: 413833 - DNA, 671 bp, Homo sapiens; identical to SEQ ID NO: 401012
  chr21:34776086-34776757
  hypo

SEQ ID NO: 413834 - DNA, 251 bp, Homo sapiens; identical to SEQ ID NO: 328512
  chr21:34927031-34927282
  hypo

SEQ ID NO: 413835 - DNA, 180 bp, Homo sapiens; identical to SEQ ID NO: 328513
  chr21:34927363-34927543
  hypo

SEQ ID NO: 413836 - DNA, 36 bp, Homo sapiens; identical to SEQ ID NO: 275920
  chr21:35045297-35045333
  hypo

SEQ ID NO: 413837 - DNA, 308 bp, Homo sapiens; identical to SEQ ID NO: 275921
  chr21:35204298-35204606
  hypo

SEQ ID NO: 413838 - DNA, 154 bp, Homo sapiens; identical to SEQ ID NO: 275924
  chr21:35453130-35453284
  hypo

SEQ ID NO: 413839 - DNA, 74 bp, Homo sapiens; identical to SEQ ID NO: 275928
  chr21:36074666-36074740
  hypo

SEQ ID NO: 413840 - DNA, 1937 bp, Homo sapiens; identical to SEQ ID NO: 401017
  chr21:36161938-36163875
  hypo

SEQ ID NO: 413841 - DNA, 236 bp, Homo sapiens; identical to SEQ ID NO: 401018
  chr21:36164756-36164992
  hypo

SEQ ID NO: 413842 - DNA, 67 bp, Homo sapiens; identical to SEQ ID NO: 401019
  chr21:36206695-36206762
  hypo

SEQ ID NO: 413843 - DNA, 42 bp, Homo sapiens; identical to SEQ ID NO: 275932
  chr21:36242109-36242151
  hypo

SEQ ID NO: 413844 - DNA, 39 bp, Homo sapiens; identical to SEQ ID NO: 205980
  chr21:36265221-36265260
  hypo

SEQ ID NO: 413845 - DNA, 131 bp, Homo sapiens; identical to SEQ ID NO: 205982
  chr21:36421464-36421595
  hypo

SEQ ID NO: 413846 - DNA, 143 bp, Homo sapiens; identical to SEQ ID NO: 275935
  chr21:36696253-36696396
  hypo

SEQ ID NO: 413847 - DNA, 134 bp, Homo sapiens; identical to SEQ ID NO: 220337
  chr21:37259305-37259439
  hypo

SEQ ID NO: 413848 - DNA, 183 bp, Homo sapiens; identical to SEQ ID NO: 275938
  chr21:37411502-37411685
  hypo

SEQ ID NO: 413849 - DNA, 42 bp, Homo sapiens; identical to SEQ ID NO: 275942
  chr21:37514437-37514479
  hypo

SEQ ID NO: 413850 - DNA, 62 bp, Homo sapiens; identical to SEQ ID NO: 275943
  chr21:37527866-37527928
  hypo

SEQ ID NO: 413851 - DNA, 47 bp, Homo sapiens; identical to SEQ ID NO: 275944
  chr21:37571105-37571152
  hypo

SEQ ID NO: 413852 - DNA, 177 bp, Homo sapiens; identical to SEQ ID NO: 275945
  chr21:37571538-37571715
  hypo

SEQ ID NO: 413853 - DNA, 177 bp, Homo sapiens; identical to SEQ ID NO: 275949
  chr21:37618034-37618211
  hypo

SEQ ID NO: 413854 - DNA, 45 bp, Homo sapiens; identical to SEQ ID NO: 275952
  chr21:37727417-37727462
  hypo

SEQ ID NO: 413855 - DNA, 280 bp, Homo sapiens; identical to SEQ ID NO: 328559
  chr21:37750164-37750444
  hypo

SEQ ID NO: 413856 - DNA, 40 bp, Homo sapiens; identical to SEQ ID NO: 220342
  chr21:37781692-37781732
  hypo

SEQ ID NO: 413857 - DNA, 431 bp, Homo sapiens; identical to SEQ ID NO: 275960
  chr21:37833298-37833729
  hypo

SEQ ID NO: 413858 - DNA, 206 bp, Homo sapiens; identical to SEQ ID NO: 220343
  chr21:37847275-37847481
  hypo

SEQ ID NO: 413859 - DNA, 79 bp, Homo sapiens; identical to SEQ ID NO: 275962
  chr21:37855513-37855592
  hypo

SEQ ID NO: 413860 - DNA, 64 bp, Homo sapiens; identical to SEQ ID NO: 275963
  chr21:38103483-38103547
  hypo

SEQ ID NO: 413861 - DNA, 200 bp, Homo sapiens; identical to SEQ ID NO: 275969
  chr21:38282807-38283007
  hypo

SEQ ID NO: 413862 - DNA, 199 bp, Homo sapiens; identical to SEQ ID NO: 295105
  chr21:38362192-38362391
  hypo

SEQ ID NO: 413863 - DNA, 122 bp, Homo sapiens; identical to SEQ ID NO: 328578
  chr21:38383188-38383310
  hypo

SEQ ID NO: 413864 - DNA, 415 bp, Homo sapiens; identical to SEQ ID NO: 295110
  chr21:38446375-38446790
  hypo

SEQ ID NO: 413865 - DNA, 73 bp, Homo sapiens; identical to SEQ ID NO: 220345
  chr21:38566696-38566769
  hypo

SEQ ID NO: 413866 - DNA, 182 bp, Homo sapiens; identical to SEQ ID NO: 275976
  chr21:38567963-38568145
  hypo

SEQ ID NO: 413867 - DNA, 50 bp, Homo sapiens; identical to SEQ ID NO: 328590
  chr21:38823585-38823635
  hypo

SEQ ID NO: 413868 - DNA, 397 bp, Homo sapiens; identical to SEQ ID NO: 220349
  chr21:38823665-38824062
  hypo

SEQ ID NO: 413869 - DNA, 214 bp, Homo sapiens; identical to SEQ ID NO: 275988
  chr21:39021859-39022073
  hypo

SEQ ID NO: 413870 - DNA, 164 bp, Homo sapiens; identical to SEQ ID NO: 275992
  chr21:40049306-40049470
  hypo

SEQ ID NO: 413871 - DNA, 86 bp, Homo sapiens; identical to SEQ ID NO: 220357
  chr21:40117700-40117786
  hypo

SEQ ID NO: 413872 - DNA, 1120 bp, Homo sapiens; identical to SEQ ID NO: 226282
  chr21:40177485-40178605
  hypo

SEQ ID NO: 413873 - DNA, 44 bp, Homo sapiens; identical to SEQ ID NO: 220361
  chr21:40278582-40278626
  hypo

SEQ ID NO: 413874 - DNA, 74 bp, Homo sapiens; identical to SEQ ID NO: 276005
  chr21:40328293-40328367
  hypo

SEQ ID NO: 413875 - DNA, 284 bp, Homo sapiens; identical to SEQ ID NO: 276009
  chr21:40340040-40340324
  hypo

SEQ ID NO: 413876 - DNA, 144 bp, Homo sapiens; identical to SEQ ID NO: 276011
  chr21:40354427-40354571
  hypo

SEQ ID NO: 413877 - DNA, 145 bp, Homo sapiens; identical to SEQ ID NO: 276014
  chr21:40431056-40431201
  hypo

SEQ ID NO: 413878 - DNA, 54 bp, Homo sapiens; identical to SEQ ID NO: 276015
  chr21:40433691-40433745
  hypo

SEQ ID NO: 413879 - DNA, 201 bp, Homo sapiens; identical to SEQ ID NO: 220364
  chr21:40434519-40434720
  hypo

SEQ ID NO: 413880 - DNA, 46 bp, Homo sapiens; identical to SEQ ID NO: 276018
  chr21:40463109-40463155
  hypo

SEQ ID NO: 413881 - DNA, 229 bp, Homo sapiens; identical to SEQ ID NO: 276019
  chr21:40465400-40465629
  hypo

SEQ ID NO: 413882 - DNA, 148 bp, Homo sapiens; identical to SEQ ID NO: 220365
  chr21:40480501-40480649
  hypo

SEQ ID NO: 413883 - DNA, 62 bp, Homo sapiens; identical to SEQ ID NO: 220366
  chr21:40488784-40488846
  hypo

SEQ ID NO: 413884 - DNA, 83 bp, Homo sapiens; identical to SEQ ID NO: 276023
  chr21:40490344-40490427
  hypo

SEQ ID NO: 413885 - DNA, 216 bp, Homo sapiens; identical to SEQ ID NO: 276030
  chr21:40693346-40693562
  hypo

SEQ ID NO: 413886 - DNA, 36 bp, Homo sapiens; identical to SEQ ID NO: 276032
  chr21:40705587-40705623
  hypo

SEQ ID NO: 413887 - DNA, 245 bp, Homo sapiens; identical to SEQ ID NO: 276034
  chr21:40764919-40765164
  hypo

SEQ ID NO: 413888 - DNA, 193 bp, Homo sapiens; identical to SEQ ID NO: 276035
  chr21:40820653-40820846
  hypo

SEQ ID NO: 413889 - DNA, 89 bp, Homo sapiens; identical to SEQ ID NO: 220370
  chr21:40904967-40905056
  hypo

SEQ ID NO: 413890 - DNA, 86 bp, Homo sapiens; identical to SEQ ID NO: 276038
  chr21:40952126-40952212
  hypo

SEQ ID NO: 413891 - DNA, 35 bp, Homo sapiens; identical to SEQ ID NO: 276040
  chr21:41711102-41711137
  hypo

SEQ ID NO: 413892 - DNA, 123 bp, Homo sapiens; identical to SEQ ID NO: 295136
  chr21:42539420-42539543
  hypo

SEQ ID NO: 413893 - DNA, 781 bp, Homo sapiens; identical to SEQ ID NO: 401033
  chr21:42539583-42540364
  hypo

SEQ ID NO: 413894 - DNA, 172 bp, Homo sapiens; identical to SEQ ID NO: 276043
  chr21:42582372-42582544
  hypo

SEQ ID NO: 413895 - DNA, 39 bp, Homo sapiens; identical to SEQ ID NO: 220376
  chr21:42585677-42585716
  hypo

SEQ ID NO: 413896 - DNA, 180 bp, Homo sapiens; identical to SEQ ID NO: 220380
  chr21:42608632-42608812
  hypo

SEQ ID NO: 413897 - DNA, 85 bp, Homo sapiens; identical to SEQ ID NO: 220381
  chr21:42609014-42609099
  hypo

SEQ ID NO: 413898 - DNA, 183 bp, Homo sapiens; identical to SEQ ID NO: 276058
  chr21:42710365-42710548
  hypo

SEQ ID NO: 413899 - DNA, 152 bp, Homo sapiens; identical to SEQ ID NO: 276060
  chr21:42838262-42838414
  hypo

SEQ ID NO: 413900 - DNA, 120 bp, Homo sapiens; identical to SEQ ID NO: 220388
  chr21:42896357-42896477
  hypo

SEQ ID NO: 413901 - DNA, 87 bp, Homo sapiens; identical to SEQ ID NO: 226286
  chr21:43067058-43067145
  hypo

SEQ ID NO: 413902 - DNA, 243 bp, Homo sapiens; identical to SEQ ID NO: 220393
  chr21:43088944-43089187
  hypo

SEQ ID NO: 413903 - DNA, 39 bp, Homo sapiens; identical to SEQ ID NO: 276073
  chr21:43108231-43108270
  hypo

SEQ ID NO: 413904 - DNA, 162 bp, Homo sapiens; identical to SEQ ID NO: 276082
  chr21:43171157-43171319
  hypo

SEQ ID NO: 413905 - DNA, 111 bp, Homo sapiens; identical to SEQ ID NO: 220405
  chr21:43245253-43245364
  hypo

SEQ ID NO: 413906 - DNA, 104 bp, Homo sapiens; identical to SEQ ID NO: 276088
  chr21:43251938-43252042
  hypo

SEQ ID NO: 413907 - DNA, 153 bp, Homo sapiens; identical to SEQ ID NO: 276090
  chr21:43269265-43269418
  hypo

SEQ ID NO: 413908 - DNA, 39 bp, Homo sapiens; identical to SEQ ID NO: 276094
  chr21:43340738-43340777
  hypo

SEQ ID NO: 413909 - DNA, 89 bp, Homo sapiens; identical to SEQ ID NO: 220409
  chr21:43347890-43347979
  hypo

SEQ ID NO: 413910 - DNA, 33 bp, Homo sapiens; identical to SEQ ID NO: 220410
  chr21:43348009-43348042
  hypo

SEQ ID NO: 413911 - DNA, 542 bp, Homo sapiens; identical to SEQ ID NO: 401035
  chr21:43373823-43374365
  hypo

SEQ ID NO: 413912 - DNA, 278 bp, Homo sapiens; identical to SEQ ID NO: 276100
  chr21:43392888-43393166
  hypo

SEQ ID NO: 413913 - DNA, 100 bp, Homo sapiens; identical to SEQ ID NO: 276103
  chr21:43506200-43506300
  hypo

SEQ ID NO: 413914 - DNA, 96 bp, Homo sapiens; identical to SEQ ID NO: 276105
  chr21:43544448-43544544
  hypo

SEQ ID NO: 413915 - DNA, 148 bp, Homo sapiens; identical to SEQ ID NO: 276108
  chr21:43570325-43570473
  hypo

SEQ ID NO: 413916 - DNA, 71 bp, Homo sapiens; identical to SEQ ID NO: 276110
  chr21:43638119-43638190
  hypo

SEQ ID NO: 413917 - DNA, 32 bp, Homo sapiens; identical to SEQ ID NO: 276116
  chr21:43767096-43767128
  hypo

SEQ ID NO: 413918 - DNA, 424 bp, Homo sapiens; identical to SEQ ID NO: 276117
  chr21:43767524-43767948
  hypo

SEQ ID NO: 413919 - DNA, 460 bp, Homo sapiens; identical to SEQ ID NO: 276123
  chr21:43825720-43826180
  hypo

SEQ ID NO: 413920 - DNA, 49 bp, Homo sapiens; identical to SEQ ID NO: 328748
  chr21:43864679-43864728
  hypo

SEQ ID NO: 413921 - DNA, 42 bp, Homo sapiens; identical to SEQ ID NO: 276126
  chr21:43968301-43968343
  hypo

SEQ ID NO: 413922 - DNA, 93 bp, Homo sapiens; identical to SEQ ID NO: 276127
  chr21:43969268-43969361
  hypo

SEQ ID NO: 413923 - DNA, 122 bp, Homo sapiens; identical to SEQ ID NO: 220417
  chr21:43981535-43981657
  hypo

SEQ ID NO: 413924 - DNA, 61 bp, Homo sapiens; identical to SEQ ID NO: 220418
  chr21:43981687-43981748
  hypo

SEQ ID NO: 413925 - DNA, 48 bp, Homo sapiens; identical to SEQ ID NO: 276130
  chr21:43986296-43986344
  hypo

SEQ ID NO: 413926 - DNA, 183 bp, Homo sapiens; identical to SEQ ID NO: 276131
  chr21:43988059-43988242
  hypo

SEQ ID NO: 413927 - DNA, 133 bp, Homo sapiens; identical to SEQ ID NO: 276133
  chr21:44003047-44003180
  hypo

SEQ ID NO: 413928 - DNA, 160 bp, Homo sapiens; identical to SEQ ID NO: 276135
  chr21:44042441-44042601
  hypo

SEQ ID NO: 413929 - DNA, 109 bp, Homo sapiens; identical to SEQ ID NO: 220422
  chr21:44065364-44065473
  hypo

SEQ ID NO: 413930 - DNA, 298 bp, Homo sapiens; identical to SEQ ID NO: 276142
  chr21:44077994-44078292
  hypo

SEQ ID NO: 413931 - DNA, 308 bp, Homo sapiens; identical to SEQ ID NO: 276144
  chr21:44088802-44089110
  hypo

SEQ ID NO: 413932 - DNA, 373 bp, Homo sapiens; identical to SEQ ID NO: 276145
  chr21:44099305-44099678
  hypo

SEQ ID NO: 413933 - DNA, 94 bp, Homo sapiens; identical to SEQ ID NO: 276146
  chr21:44102122-44102216
  hypo

SEQ ID NO: 413934 - DNA, 128 bp, Homo sapiens; identical to SEQ ID NO: 276148
  chr21:44110392-44110520
  hypo

SEQ ID NO: 413935 - DNA, 34 bp, Homo sapiens; identical to SEQ ID NO: 276150
  chr21:44129779-44129813
  hypo

SEQ ID NO: 413936 - DNA, 136 bp, Homo sapiens; identical to SEQ ID NO: 276154
  chr21:44176666-44176802
  hypo

SEQ ID NO: 413937 - DNA, 153 bp, Homo sapiens; identical to SEQ ID NO: 276156
  chr21:44188342-44188495
  hypo

SEQ ID NO: 413938 - DNA, 225 bp, Homo sapiens; identical to SEQ ID NO: 328787
  chr21:44283356-44283581
  hypo

SEQ ID NO: 413939 - DNA, 44 bp, Homo sapiens; identical to SEQ ID NO: 276163
  chr21:44390976-44391020
  hypo

SEQ ID NO: 413940 - DNA, 120 bp, Homo sapiens; identical to SEQ ID NO: 276164
  chr21:44439927-44440047
  hypo

SEQ ID NO: 413941 - DNA, 246 bp, Homo sapiens; identical to SEQ ID NO: 220427
  chr21:44440492-44440738
  hypo

SEQ ID NO: 413942 - DNA, 39 bp, Homo sapiens
  chr21:44448042-44448081
  hypo
gtccagcctgccctgccagcctgtgattgttgctgctct

SEQ ID NO: 413943 - DNA, 662 bp, Homo sapiens; identical to SEQ ID NO: 276172
  chr21:44479014-44479676
  hypo

SEQ ID NO: 413944 - DNA, 46 bp, Homo sapiens; identical to SEQ ID NO: 328799
  chr21:44480610-44480656
  hypo

SEQ ID NO: 413945 - DNA, 110 bp, Homo sapiens; identical to SEQ ID NO: 206026
  chr21:44513219-44513329
  hypo

SEQ ID NO: 413946 - DNA, 176 bp, Homo sapiens; identical to SEQ ID NO: 206027
  chr21:44514586-44514762
  hypo

SEQ ID NO: 413947 - DNA, 80 bp, Homo sapiens; identical to SEQ ID NO: 276176
  chr21:44562056-44562136
  hypo

SEQ ID NO: 413948 - DNA, 78 bp, Homo sapiens; identical to SEQ ID NO: 276177
  chr21:44578931-44579009
  hypo

SEQ ID NO: 413949 - DNA, 229 bp, Homo sapiens; identical to SEQ ID NO: 220435
  chr21:44601206-44601435
  hypo

SEQ ID NO: 413950 - DNA, 535 bp, Homo sapiens; identical to SEQ ID NO: 276182
  chr21:44630080-44630615
  hypo

SEQ ID NO: 413951 - DNA, 111 bp, Homo sapiens; identical to SEQ ID NO: 276184
  chr21:44764101-44764212
  hypo

SEQ ID NO: 413952 - DNA, 82 bp, Homo sapiens; identical to SEQ ID NO: 276185
  chr21:44792954-44793036
  hypo

SEQ ID NO: 413953 - DNA, 201 bp, Homo sapiens; identical to SEQ ID NO: 220437
  chr21:44799064-44799265
  hypo

SEQ ID NO: 413954 - DNA, 48 bp, Homo sapiens; identical to SEQ ID NO: 276194
  chr21:44839755-44839803
  hypo

SEQ ID NO: 413955 - DNA, 111 bp, Homo sapiens; identical to SEQ ID NO: 276203
  chr21:44888677-44888788
  hypo

SEQ ID NO: 413956 - DNA, 80 bp, Homo sapiens; identical to SEQ ID NO: 276204
  chr21:44920331-44920411
  hypo

SEQ ID NO: 413957 - DNA, 369 bp, Homo sapiens; identical to SEQ ID NO: 328837
  chr21:45078407-45078776
  hypo

SEQ ID NO: 413958 - DNA, 144 bp, Homo sapiens; identical to SEQ ID NO: 328843
  chr21:45170075-45170219
  hypo

SEQ ID NO: 413959 - DNA, 232 bp, Homo sapiens; identical to SEQ ID NO: 328844
  chr21:45170408-45170640
  hypo

SEQ ID NO: 413960 - DNA, 500 bp, Homo sapiens; identical to SEQ ID NO: 387360
  chr21:45176320-45176820
  hypo

SEQ ID NO: 413961 - DNA, 179 bp, Homo sapiens; identical to SEQ ID NO: 226295
  chr21:45182012-45182191
  hypo

SEQ ID NO: 413962 - DNA, 156 bp, Homo sapiens; identical to SEQ ID NO: 295162
  chr21:45182669-45182825
  hypo

SEQ ID NO: 413963 - DNA, 100 bp, Homo sapiens; identical to SEQ ID NO: 276213
  chr21:45184714-45184814
  hypo

SEQ ID NO: 413964 - DNA, 32 bp, Homo sapiens; identical to SEQ ID NO: 328849
  chr21:45187154-45187186
  hypo

SEQ ID NO: 413965 - DNA, 545 bp, Homo sapiens; identical to SEQ ID NO: 276215
  chr21:45187450-45187995
  hypo

SEQ ID NO: 413966 - DNA, 421 bp, Homo sapiens; identical to SEQ ID NO: 276216
  chr21:45188555-45188976
  hypo

SEQ ID NO: 413967 - DNA, 598 bp, Homo sapiens; identical to SEQ ID NO: 220449
  chr21:45224195-45224793
  hypo

SEQ ID NO: 413968 - DNA, 106 bp, Homo sapiens; identical to SEQ ID NO: 220450
  chr21:45233494-45233600
  hypo

SEQ ID NO: 413969 - DNA, 137 bp, Homo sapiens; identical to SEQ ID NO: 276224
  chr21:45245440-45245577
  hypo

SEQ ID NO: 413970 - DNA, 238 bp, Homo sapiens; identical to SEQ ID NO: 276228
  chr21:45271700-45271938
  hypo

SEQ ID NO: 413971 - DNA, 42 bp, Homo sapiens; identical to SEQ ID NO: 276229
  chr21:45276200-45276242
  hypo

SEQ ID NO: 413972 - DNA, 42 bp, Homo sapiens; identical to SEQ ID NO: 220451
  chr21:45281601-45281643
  hypo

SEQ ID NO: 413973 - DNA, 186 bp, Homo sapiens; identical to SEQ ID NO: 276234
  chr21:45299787-45299973
  hypo

SEQ ID NO: 413974 - DNA, 273 bp, Homo sapiens
  chr21:45353649-45353922
  hypo
ggcctccatccaagcacaggcccaagcaccagctgcaagagccagaggacggcactcccgcgcctgccacgagcctcacgtggagagtggacagtggcatggaaacgccagagggttagaactgagcagcaggacggggtctgtgggtgcacgagaggaggcccttggtctggaacagcctggggtccccatgtgctgtcactgtgtggactggccacacctggtgtgccgcttcctttctcagtcatggccagctgccgaatgccgtaccag

SEQ ID NO: 413975 - DNA, 113 bp, Homo sapiens; identical to SEQ ID NO: 276240
  chr21:45355818-45355931
  hypo

SEQ ID NO: 413976 - DNA, 369 bp, Homo sapiens; identical to SEQ ID NO: 276246
  chr21:45379437-45379806
  hypo

SEQ ID NO: 413977 - DNA, 397 bp, Homo sapiens; identical to SEQ ID NO: 226297
  chr21:45381212-45381609
  hypo

SEQ ID NO: 413978 - DNA, 219 bp, Homo sapiens; identical to SEQ ID NO: 220462
  chr21:45399689-45399908
  hypo

SEQ ID NO: 413979 - DNA, 71 bp, Homo sapiens; identical to SEQ ID NO: 276252
  chr21:45402471-45402542
  hypo

SEQ ID NO: 413980 - DNA, 156 bp, Homo sapiens; identical to SEQ ID NO: 328890
  chr21:45411685-45411841
  hypo

SEQ ID NO: 413981 - DNA, 64 bp, Homo sapiens; identical to SEQ ID NO: 276258
  chr21:45483497-45483561
  hypo

SEQ ID NO: 413982 - DNA, 165 bp, Homo sapiens; identical to SEQ ID NO: 220469
  chr21:45546680-45546845
  hypo

SEQ ID NO: 413983 - DNA, 63 bp, Homo sapiens; identical to SEQ ID NO: 206032
  chr21:45553436-45553499
  hypo

SEQ ID NO: 413984 - DNA, 192 bp, Homo sapiens; identical to SEQ ID NO: 220471
  chr21:45558785-45558977
  hypo

SEQ ID NO: 413985 - DNA, 164 bp, Homo sapiens; identical to SEQ ID NO: 206033
  chr21:45660235-45660399
  hypo

SEQ ID NO: 413986 - DNA, 211 bp, Homo sapiens; identical to SEQ ID NO: 384837
  chr21:45662515-45662726
  hypo

SEQ ID NO: 413987 - DNA, 110 bp, Homo sapiens; identical to SEQ ID NO: 220476
  chr21:45709581-45709691
  hypo

SEQ ID NO: 413988 - DNA, 50 bp, Homo sapiens; identical to SEQ ID NO: 276280
  chr21:45713496-45713546
  hypo

SEQ ID NO: 413989 - DNA, 41 bp, Homo sapiens; identical to SEQ ID NO: 276281
  chr21:45730210-45730251
  hypo

SEQ ID NO: 413990 - DNA, 192 bp, Homo sapiens; identical to SEQ ID NO: 276287
  chr21:45754286-45754478
  hypo

SEQ ID NO: 413991 - DNA, 299 bp, Homo sapiens; identical to SEQ ID NO: 276289
  chr21:45768770-45769069
  hypo

SEQ ID NO: 413992 - DNA, 153 bp, Homo sapiens; identical to SEQ ID NO: 276295
  chr21:45895239-45895392
  hypo

SEQ ID NO: 413993 - DNA, 105 bp, Homo sapiens; identical to SEQ ID NO: 328941
  chr21:45919228-45919333
  hypo

SEQ ID NO: 413994 - DNA, 218 bp, Homo sapiens; identical to SEQ ID NO: 276298
  chr21:45922476-45922694
  hypo

SEQ ID NO: 413995 - DNA, 336 bp, Homo sapiens; identical to SEQ ID NO: 328943
  chr21:45939229-45939565
  hypo

SEQ ID NO: 413996 - DNA, 176 bp, Homo sapiens; identical to SEQ ID NO: 328944
  chr21:45939814-45939990
  hypo

SEQ ID NO: 413997 - DNA, 44 bp, Homo sapiens; identical to SEQ ID NO: 328952
  chr21:46068601-46068645
  hypo

SEQ ID NO: 413998 - DNA, 120 bp, Homo sapiens; identical to SEQ ID NO: 328953
  chr21:46068703-46068823
  hypo

SEQ ID NO: 413999 - DNA, 196 bp, Homo sapiens; identical to SEQ ID NO: 276309
  chr21:46144852-46145048
  hypo

SEQ ID NO: 414000 - DNA, 238 bp, Homo sapiens; identical to SEQ ID NO: 328956
  chr21:46173353-46173591
  hypo

SEQ ID NO: 414001 - DNA, 192 bp, Homo sapiens; identical to SEQ ID NO: 328957
  chr21:46183769-46183961
  hypo

SEQ ID NO: 414002 - DNA, 150 bp, Homo sapiens; identical to SEQ ID NO: 328958
  chr21:46184287-46184437
  hypo

SEQ ID NO: 414003 - DNA, 167 bp, Homo sapiens; identical to SEQ ID NO: 276317
  chr21:46199322-46199489
  hypo

SEQ ID NO: 414004 - DNA, 110 bp, Homo sapiens; identical to SEQ ID NO: 276318
  chr21:46200862-46200972
  hypo

SEQ ID NO: 414005 - DNA, 78 bp, Homo sapiens
  chr21:46277397-46277475
  hypo
tcttgaaacaaacaaaaaacacccagccagcctcctgaagatggctttataagcaaactcccctgggcagtagattac

SEQ ID NO: 414006 - DNA, 502 bp, Homo sapiens; identical to SEQ ID NO: 328972
  chr21:46309404-46309906
  hypo

SEQ ID NO: 414007 - DNA, 36 bp, Homo sapiens; identical to SEQ ID NO: 328973
  chr21:46309961-46309997
  hypo

SEQ ID NO: 414008 - DNA, 37 bp, Homo sapiens; identical to SEQ ID NO: 276338
  chr21:46325576-46325613
  hypo

SEQ ID NO: 414009 - DNA, 468 bp, Homo sapiens; identical to SEQ ID NO: 276341
  chr21:46330230-46330698
  hypo

SEQ ID NO: 414010 - DNA, 96 bp, Homo sapiens; identical to SEQ ID NO: 220501
  chr21:46368232-46368328
  hypo

SEQ ID NO: 414011 - DNA, 36 bp, Homo sapiens; identical to SEQ ID NO: 276346
  chr21:46383298-46383334
  hypo

SEQ ID NO: 414012 - DNA, 200 bp, Homo sapiens; identical to SEQ ID NO: 220503
  chr21:46392162-46392362
  hypo

SEQ ID NO: 414013 - DNA, 186 bp, Homo sapiens; identical to SEQ ID NO: 329000
  chr21:46452572-46452758
  hypo

SEQ ID NO: 414014 - DNA, 234 bp, Homo sapiens; identical to SEQ ID NO: 329003
  chr21:46492081-46492315
  hypo

SEQ ID NO: 414015 - DNA, 49 bp, Homo sapiens; identical to SEQ ID NO: 329005
  chr21:46549426-46549475
  hypo

SEQ ID NO: 414016 - DNA, 51 bp, Homo sapiens; identical to SEQ ID NO: 100440
  chr21:46549556-46549607
  hypo

SEQ ID NO: 414017 - DNA, 70 bp, Homo sapiens; identical to SEQ ID NO: 276362
  chr21:46756061-46756131
  hypo

SEQ ID NO: 414018 - DNA, 255 bp, Homo sapiens; identical to SEQ ID NO: 220506
  chr21:46763204-46763459
  hypo

SEQ ID NO: 414019 - DNA, 82 bp, Homo sapiens; identical to SEQ ID NO: 276364
  chr21:46763922-46764004
  hypo

SEQ ID NO: 414020 - DNA, 500 bp, Homo sapiens; identical to SEQ ID NO: 276365
  chr21:46771045-46771545
  hypo

SEQ ID NO: 414021 - DNA, 87 bp, Homo sapiens; identical to SEQ ID NO: 220513
  chr21:46804103-46804190
  hypo

SEQ ID NO: 414022 - DNA, 142 bp, Homo sapiens; identical to SEQ ID NO: 276378
  chr21:46808897-46809039
  hypo

SEQ ID NO: 414023 - DNA, 138 bp, Homo sapiens; identical to SEQ ID NO: 220518
  chr21:46827462-46827600
  hypo

SEQ ID NO: 414024 - DNA, 56 bp, Homo sapiens; identical to SEQ ID NO: 276396
  chr21:46841890-46841946
  hypo

SEQ ID NO: 414025 - DNA, 322 bp, Homo sapiens; identical to SEQ ID NO: 276400
  chr21:46846292-46846614
  hypo

SEQ ID NO: 414026 - DNA, 32 bp, Homo sapiens; identical to SEQ ID NO: 276406
  chr21:46855682-46855714
  hypo

SEQ ID NO: 414027 - DNA, 65 bp, Homo sapiens; identical to SEQ ID NO: 276413
  chr21:46885376-46885441
  hypo

SEQ ID NO: 414028 - DNA, 132 bp, Homo sapiens; identical to SEQ ID NO: 276429
  chr21:46915604-46915736
  hypo

SEQ ID NO: 414029 - DNA, 48 bp, Homo sapiens; identical to SEQ ID NO: 276430
  chr21:46916179-46916227
  hypo

SEQ ID NO: 414030 - DNA, 33 bp, Homo sapiens; identical to SEQ ID NO: 276438
  chr21:46933738-46933771
  hypo

SEQ ID NO: 414031 - DNA, 104 bp, Homo sapiens; identical to SEQ ID NO: 206041
  chr21:46950778-46950882
  hypo

SEQ ID NO: 414032 - DNA, 88 bp, Homo sapiens; identical to SEQ ID NO: 220554
  chr21:46998316-46998404
  hypo

SEQ ID NO: 414033 - DNA, 173 bp, Homo sapiens; identical to SEQ ID NO: 226309
  chr21:47050917-47051090
  hypo

SEQ ID NO: 414034 - DNA, 170 bp, Homo sapiens; identical to SEQ ID NO: 276450
  chr21:47209072-47209242
  hypo

SEQ ID NO: 414035 - DNA, 206 bp, Homo sapiens; identical to SEQ ID NO: 276454
  chr21:47287811-47288017
  hypo

SEQ ID NO: 414036 - DNA, 127 bp, Homo sapiens; identical to SEQ ID NO: 276460
  chr21:47403601-47403728
  hypo

SEQ ID NO: 414037 - DNA, 293 bp, Homo sapiens; identical to SEQ ID NO: 276462
  chr21:47407169-47407462
  hypo

SEQ ID NO: 414038 - DNA, 87 bp, Homo sapiens; identical to SEQ ID NO: 276463
  chr21:47412237-47412324
  hypo

SEQ ID NO: 414039 - DNA, 141 bp, Homo sapiens; identical to SEQ ID NO: 220563
  chr21:47417619-47417760
  hypo

SEQ ID NO: 414040 - DNA, 318 bp, Homo sapiens; identical to SEQ ID NO: 220564
  chr21:47418109-47418427
  hypo

SEQ ID NO: 414041 - DNA, 226 bp, Homo sapiens; identical to SEQ ID NO: 276470
  chr21:47421947-47422173
  hypo

SEQ ID NO: 414042 - DNA, 219 bp, Homo sapiens; identical to SEQ ID NO: 329132
  chr21:47423177-47423396
  hypo

SEQ ID NO: 414043 - DNA, 338 bp, Homo sapiens; identical to SEQ ID NO: 329133
  chr21:47423426-47423764
  hypo

SEQ ID NO: 414044 - DNA, 188 bp, Homo sapiens; identical to SEQ ID NO: 329135
  chr21:47453063-47453251
  hypo

SEQ ID NO: 414045 - DNA, 114 bp, Homo sapiens; identical to SEQ ID NO: 220567
  chr21:47459901-47460015
  hypo

SEQ ID NO: 414046 - DNA, 483 bp, Homo sapiens; identical to SEQ ID NO: 276484
  chr21:47503500-47503983
  hypo

SEQ ID NO: 414047 - DNA, 157 bp, Homo sapiens; identical to SEQ ID NO: 220568
  chr21:47538429-47538586
  hypo

SEQ ID NO: 414048 - DNA, 65 bp, Homo sapiens; identical to SEQ ID NO: 276487
  chr21:47545574-47545639
  hypo

SEQ ID NO: 414049 - DNA, 110 bp, Homo sapiens; identical to SEQ ID NO: 206045
  chr21:47717450-47717560
  hypo

SEQ ID NO: 414050 - DNA, 84 bp, Homo sapiens; identical to SEQ ID NO: 206046
  chr21:47717589-47717673
  hypo

SEQ ID NO: 414051 - DNA, 116 bp, Homo sapiens; identical to SEQ ID NO: 206047
  chr21:47717748-47717864
  hypo

SEQ ID NO: 414052 - DNA, 45 bp, Homo sapiens; identical to SEQ ID NO: 295203
  chr21:47717865-47717910
  hypo

SEQ ID NO: 414053 - DNA, 58 bp, Homo sapiens; identical to SEQ ID NO: 329162
  chr21:47737837-47737895
  hypo

SEQ ID NO: 414054 - DNA, 98 bp, Homo sapiens; identical to SEQ ID NO: 220575
  chr21:47773781-47773879
  hypo

SEQ ID NO: 414055 - DNA, 266 bp, Homo sapiens; identical to SEQ ID NO: 276501
  chr21:47798303-47798569
  hypo

SEQ ID NO: 414056 - DNA, 44 bp, Homo sapiens; identical to SEQ ID NO: 206048
  chr21:47799137-47799181
  hypo

SEQ ID NO: 414057 - DNA, 52 bp, Homo sapiens; identical to SEQ ID NO: 206049
  chr21:47799225-47799277
  hypo

SEQ ID NO: 414058 - DNA, 264 bp, Homo sapiens; identical to SEQ ID NO: 220581
  chr21:47811198-47811462
  hypo

SEQ ID NO: 414059 - DNA, 224 bp, Homo sapiens; identical to SEQ ID NO: 276505
  chr21:47819671-47819895
  hypo

SEQ ID NO: 414060 - DNA, 301 bp, Homo sapiens; identical to SEQ ID NO: 276507
  chr21:47851456-47851757
  hypo

SEQ ID NO: 414061 - DNA, 114 bp, Homo sapiens; identical to SEQ ID NO: 276510
  chr21:47897027-47897141
  hypo

SEQ ID NO: 414062 - DNA, 267 bp, Homo sapiens; identical to SEQ ID NO: 276519
  chr22:17828553-17828820
  hypo

SEQ ID NO: 414063 - DNA, 461 bp, Homo sapiens; identical to SEQ ID NO: 276522
  chr22:17897911-17898372
  hypo

SEQ ID NO: 414064 - DNA, 78 bp, Homo sapiens; identical to SEQ ID NO: 276523
  chr22:17932151-17932229
  hypo

SEQ ID NO: 414065 - DNA, 35 bp, Homo sapiens; identical to SEQ ID NO: 220586
  chr22:18074668-18074703
  hypo

SEQ ID NO: 414066 - DNA, 161 bp, Homo sapiens; identical to SEQ ID NO: 220587
  chr22:18081585-18081746
  hypo

SEQ ID NO: 414067 - DNA, 91 bp, Homo sapiens; identical to SEQ ID NO: 276535
  chr22:18287771-18287862
  hypo

SEQ ID NO: 414068 - DNA, 96 bp, Homo sapiens; identical to SEQ ID NO: 220591
  chr22:18291185-18291281
  hypo

SEQ ID NO: 414069 - DNA, 315 bp, Homo sapiens; identical to SEQ ID NO: 220592
  chr22:18291533-18291848
  hypo

SEQ ID NO: 414070 - DNA, 163 bp, Homo sapiens; identical to SEQ ID NO: 276538
  chr22:18295061-18295224
  hypo

SEQ ID NO: 414071 - DNA, 44 bp, Homo sapiens; identical to SEQ ID NO: 276543
  chr22:18345292-18345336
  hypo

SEQ ID NO: 414072 - DNA, 54 bp, Homo sapiens; identical to SEQ ID NO: 276545
  chr22:18349167-18349221
  hypo

SEQ ID NO: 414073 - DNA, 154 bp, Homo sapiens; identical to SEQ ID NO: 220600
  chr22:18355710-18355864
  hypo

SEQ ID NO: 414074 - DNA, 82 bp, Homo sapiens; identical to SEQ ID NO: 220601
  chr22:18358159-18358241
  hypo

SEQ ID NO: 414075 - DNA, 348 bp, Homo sapiens; identical to SEQ ID NO: 276552
  chr22:18367813-18368161
  hypo

SEQ ID NO: 414076 - DNA, 62 bp, Homo sapiens; identical to SEQ ID NO: 220603
  chr22:18371272-18371334
  hypo

SEQ ID NO: 414077 - DNA, 105 bp, Homo sapiens; identical to SEQ ID NO: 220604
  chr22:18400898-18401003
  hypo

SEQ ID NO: 414078 - DNA, 262 bp, Homo sapiens; identical to SEQ ID NO: 276559
  chr22:18451007-18451269
  hypo

SEQ ID NO: 414079 - DNA, 271 bp, Homo sapiens; identical to SEQ ID NO: 276565
  chr22:18973383-18973654
  hypo

SEQ ID NO: 414080 - DNA, 36 bp, Homo sapiens; identical to SEQ ID NO: 276568
  chr22:19048114-19048150
  hypo

SEQ ID NO: 414081 - DNA, 61 bp, Homo sapiens; identical to SEQ ID NO: 276571
  chr22:19120094-19120155
  hypo

SEQ ID NO: 414082 - DNA, 33 bp, Homo sapiens; identical to SEQ ID NO: 220611
  chr22:19130728-19130761
  hypo

SEQ ID NO: 414083 - DNA, 36 bp, Homo sapiens; identical to SEQ ID NO: 276573
  chr22:19584223-19584259
  hypo

SEQ ID NO: 414084 - DNA, 67 bp, Homo sapiens; identical to SEQ ID NO: 220613
  chr22:19621109-19621176
  hypo

SEQ ID NO: 414085 - DNA, 120 bp, Homo sapiens; identical to SEQ ID NO: 276578
  chr22:19713942-19714062
  hypo

SEQ ID NO: 414086 - DNA, 36 bp, Homo sapiens; identical to SEQ ID NO: 276580
  chr22:19725676-19725712
  hypo

SEQ ID NO: 414087 - DNA, 288 bp, Homo sapiens; identical to SEQ ID NO: 295228
  chr22:19748301-19748589
  hypo

SEQ ID NO: 414088 - DNA, 40 bp, Homo sapiens; identical to SEQ ID NO: 133782
  chr22:19749084-19749124
  hypo

SEQ ID NO: 414089 - DNA, 355 bp, Homo sapiens; identical to SEQ ID NO: 276582
  chr22:19787001-19787356
  hypo

SEQ ID NO: 414090 - DNA, 92 bp, Homo sapiens; identical to SEQ ID NO: 276586
  chr22:19827948-19828040
  hypo

SEQ ID NO: 414091 - DNA, 84 bp, Homo sapiens; identical to SEQ ID NO: 220618
  chr22:19856498-19856582
  hypo

SEQ ID NO: 414092 - DNA, 132 bp, Homo sapiens; identical to SEQ ID NO: 276592
  chr22:19870367-19870499
  hypo

SEQ ID NO: 414093 - DNA, 55 bp, Homo sapiens; identical to SEQ ID NO: 276593
  chr22:19870815-19870870
  hypo

SEQ ID NO: 414094 - DNA, 419 bp, Homo sapiens; identical to SEQ ID NO: 220619
  chr22:19872851-19873270
  hypo

SEQ ID NO: 414095 - DNA, 159 bp, Homo sapiens; identical to SEQ ID NO: 220620
  chr22:19882774-19882933
  hypo

SEQ ID NO: 414096 - DNA, 114 bp, Homo sapiens; identical to SEQ ID NO: 220621
  chr22:19891185-19891299
  hypo

SEQ ID NO: 414097 - DNA, 496 bp, Homo sapiens; identical to SEQ ID NO: 276597
  chr22:19892195-19892691
  hypo

SEQ ID NO: 414098 - DNA, 177 bp, Homo sapiens; identical to SEQ ID NO: 276598
  chr22:19892921-19893098
  hypo

SEQ ID NO: 414099 - DNA, 74 bp, Homo sapiens; identical to SEQ ID NO: 276600
  chr22:19903251-19903325
  hypo

SEQ ID NO: 414100 - DNA, 257 bp, Homo sapiens; identical to SEQ ID NO: 276604
  chr22:19960818-19961075
  hypo

SEQ ID NO: 414101 - DNA, 213 bp, Homo sapiens; identical to SEQ ID NO: 329280
  chr22:19961470-19961683
  hypo

SEQ ID NO: 414102 - DNA, 81 bp, Homo sapiens; identical to SEQ ID NO: 329281
  chr22:19961721-19961802
  hypo

SEQ ID NO: 414103 - DNA, 57 bp, Homo sapiens; identical to SEQ ID NO: 220624
  chr22:19965520-19965577
  hypo

SEQ ID NO: 414104 - DNA, 38 bp, Homo sapiens; identical to SEQ ID NO: 220627
  chr22:19971874-19971912
  hypo

SEQ ID NO: 414105 - DNA, 75 bp, Homo sapiens; identical to SEQ ID NO: 276613
  chr22:19978174-19978249
  hypo

SEQ ID NO: 414106 - DNA, 272 bp, Homo sapiens; identical to SEQ ID NO: 220629
  chr22:20073379-20073651
  hypo

SEQ ID NO: 414107 - DNA, 42 bp, Homo sapiens; identical to SEQ ID NO: 276618
  chr22:20120590-20120632
  hypo

SEQ ID NO: 414108 - DNA, 190 bp, Homo sapiens; identical to SEQ ID NO: 220632
  chr22:20126324-20126514
  hypo

SEQ ID NO: 414109 - DNA, 248 bp, Homo sapiens; identical to SEQ ID NO: 276622
  chr22:20130992-20131240
  hypo

SEQ ID NO: 414110 - DNA, 257 bp, Homo sapiens; identical to SEQ ID NO: 401074
  chr22:20255237-20255494
  hypo

SEQ ID NO: 414111 - DNA, 146 bp, Homo sapiens; identical to SEQ ID NO: 276625
  chr22:20302965-20303111
  hypo

SEQ ID NO: 414112 - DNA, 50 bp, Homo sapiens; identical to SEQ ID NO: 329303
  chr22:20308710-20308760
  hypo

SEQ ID NO: 414113 - DNA, 45 bp, Homo sapiens; identical to SEQ ID NO: 329305
  chr22:20765421-20765466
  hypo

SEQ ID NO: 414114 - DNA, 120 bp, Homo sapiens; identical to SEQ ID NO: 276629
  chr22:20857254-20857374
  hypo

SEQ ID NO: 414115 - DNA, 112 bp, Homo sapiens; identical to SEQ ID NO: 276635
  chr22:20958608-20958720
  hypo

SEQ ID NO: 414116 - DNA, 77 bp, Homo sapiens; identical to SEQ ID NO: 329313
  chr22:21024825-21024902
  hypo

SEQ ID NO: 414117 - DNA, 53 bp, Homo sapiens; identical to SEQ ID NO: 329314
  chr22:21024948-21025001
  hypo

SEQ ID NO: 414118 - DNA, 60 bp, Homo sapiens; identical to SEQ ID NO: 276638
  chr22:21099331-21099391
  hypo

SEQ ID NO: 414119 - DNA, 344 bp, Homo sapiens; identical to SEQ ID NO: 276639
  chr22:21101701-21102045
  hypo

SEQ ID NO: 414120 - DNA, 117 bp, Homo sapiens; identical to SEQ ID NO: 329319
  chr22:21150558-21150675
  hypo

SEQ ID NO: 414121 - DNA, 149 bp, Homo sapiens; identical to SEQ ID NO: 220640
  chr22:21380146-21380295
  hypo

SEQ ID NO: 414122 - DNA, 102 bp, Homo sapiens; identical to SEQ ID NO: 220641
  chr22:21380358-21380460
  hypo

SEQ ID NO: 414123 - DNA, 147 bp, Homo sapiens; identical to SEQ ID NO: 276648
  chr22:21385764-21385911
  hypo

SEQ ID NO: 414124 - DNA, 33 bp, Homo sapiens; identical to SEQ ID NO: 276653
  chr22:21993228-21993261
  hypo

SEQ ID NO: 414125 - DNA, 147 bp, Homo sapiens; identical to SEQ ID NO: 220647
  chr22:22007501-22007648
  hypo

SEQ ID NO: 414126 - DNA, 41 bp, Homo sapiens; identical to SEQ ID NO: 220648
  chr22:22044381-22044422
  hypo

SEQ ID NO: 414127 - DNA, 147 bp, Homo sapiens; identical to SEQ ID NO: 276660
  chr22:22062353-22062500
  hypo

SEQ ID NO: 414128 - DNA, 42 bp, Homo sapiens; identical to SEQ ID NO: 295252
  chr22:22090486-22090528
  hypo

SEQ ID NO: 414129 - DNA, 42 bp, Homo sapiens; identical to SEQ ID NO: 276662
  chr22:22108627-22108669
  hypo

SEQ ID NO: 414130 - DNA, 35 bp, Homo sapiens; identical to SEQ ID NO: 220650
  chr22:22201294-22201329
  hypo

SEQ ID NO: 414131 - DNA, 311 bp, Homo sapiens; identical to SEQ ID NO: 295256
  chr22:22307056-22307367
  hypo

SEQ ID NO: 414132 - DNA, 49 bp, Homo sapiens; identical to SEQ ID NO: 220657
  chr22:22901056-22901105
  hypo

SEQ ID NO: 414133 - DNA, 56 bp, Homo sapiens; identical to SEQ ID NO: 220658
  chr22:22901455-22901511
  hypo

SEQ ID NO: 414134 - DNA, 36 bp, Homo sapiens; identical to SEQ ID NO: 276669
  chr22:22939290-22939326
  hypo

SEQ ID NO: 414135 - DNA, 106 bp, Homo sapiens; identical to SEQ ID NO: 220662
  chr22:23438416-23438522
  hypo

SEQ ID NO: 414136 - DNA, 103 bp, Homo sapiens; identical to SEQ ID NO: 276674
  chr22:23449790-23449893
  hypo

SEQ ID NO: 414137 - DNA, 208 bp, Homo sapiens; identical to SEQ ID NO: 276676
  chr22:23456377-23456585
  hypo

SEQ ID NO: 414138 - DNA, 295 bp, Homo sapiens; identical to SEQ ID NO: 276678
  chr22:23607403-23607698
  hypo

SEQ ID NO: 414139 - DNA, 113 bp, Homo sapiens; identical to SEQ ID NO: 276679
  chr22:23610355-23610468
  hypo

SEQ ID NO: 414140 - DNA, 85 bp, Homo sapiens; identical to SEQ ID NO: 276680
  chr22:23624725-23624810
  hypo

SEQ ID NO: 414141 - DNA, 126 bp, Homo sapiens; identical to SEQ ID NO: 276683
  chr22:23779039-23779165
  hypo

SEQ ID NO: 414142 - DNA, 92 bp, Homo sapiens; identical to SEQ ID NO: 276685
  chr22:23877156-23877248
  hypo

SEQ ID NO: 414143 - DNA, 35 bp, Homo sapiens; identical to SEQ ID NO: 276689
  chr22:24061531-24061566
  hypo

SEQ ID NO: 414144 - DNA, 458 bp, Homo sapiens; identical to SEQ ID NO: 226339
  chr22:24110419-24110877
  hypo

SEQ ID NO: 414145 - DNA, 44 bp, Homo sapiens; identical to SEQ ID NO: 276694
  chr22:24409920-24409964
  hypo

SEQ ID NO: 414146 - DNA, 142 bp, Homo sapiens; identical to SEQ ID NO: 276696
  chr22:24530396-24530538
  hypo

SEQ ID NO: 414147 - DNA, 91 bp, Homo sapiens; identical to SEQ ID NO: 206073
  chr22:24989196-24989287
  hypo

SEQ ID NO: 414148 - DNA, 139 bp, Homo sapiens; identical to SEQ ID NO: 276701
  chr22:24995693-24995832
  hypo

SEQ ID NO: 414149 - DNA, 130 bp, Homo sapiens; identical to SEQ ID NO: 220674
  chr22:25016920-25017050
  hypo

SEQ ID NO: 414150 - DNA, 36 bp, Homo sapiens; identical to SEQ ID NO: 276703
  chr22:25091139-25091175
  hypo

SEQ ID NO: 414151 - DNA, 103 bp, Homo sapiens; identical to SEQ ID NO: 276705
  chr22:25119952-25120055
  hypo

SEQ ID NO: 414152 - DNA, 120 bp, Homo sapiens; identical to SEQ ID NO: 220675
  chr22:25336184-25336304
  hypo

SEQ ID NO: 414153 - DNA, 331 bp, Homo sapiens; identical to SEQ ID NO: 220679
  chr22:25461275-25461606
  hypo

SEQ ID NO: 414154 - DNA, 40 bp, Homo sapiens; identical to SEQ ID NO: 276710
  chr22:25464946-25464986
  hypo

SEQ ID NO: 414155 - DNA, 91 bp, Homo sapiens; identical to SEQ ID NO: 276711
  chr22:25483556-25483647
  hypo

SEQ ID NO: 414156 - DNA, 41 bp, Homo sapiens; identical to SEQ ID NO: 220682
  chr22:25484924-25484965
  hypo

SEQ ID NO: 414157 - DNA, 44 bp, Homo sapiens; identical to SEQ ID NO: 276715
  chr22:25513768-25513812
  hypo

SEQ ID NO: 414158 - DNA, 184 bp, Homo sapiens; identical to SEQ ID NO: 220685
  chr22:25573211-25573395
  hypo

SEQ ID NO: 414159 - DNA, 195 bp, Homo sapiens; identical to SEQ ID NO: 276720
  chr22:25615344-25615539
  hypo

SEQ ID NO: 414160 - DNA, 42 bp, Homo sapiens; identical to SEQ ID NO: 220688
  chr22:25756562-25756604
  hypo

SEQ ID NO: 414161 - DNA, 33 bp, Homo sapiens; identical to SEQ ID NO: 276723
  chr22:26069299-26069332
  hypo

SEQ ID NO: 414162 - DNA, 155 bp, Homo sapiens; identical to SEQ ID NO: 276724
  chr22:26069540-26069695
  hypo

SEQ ID NO: 414163 - DNA, 37 bp, Homo sapiens; identical to SEQ ID NO: 276725
  chr22:26081888-26081925
  hypo

SEQ ID NO: 414164 - DNA, 79 bp, Homo sapiens; identical to SEQ ID NO: 329425
  chr22:26150543-26150622
  hypo

SEQ ID NO: 414165 - DNA, 125 bp, Homo sapiens; identical to SEQ ID NO: 276728
  chr22:26422520-26422645
  hypo

SEQ ID NO: 414166 - DNA, 761 bp, Homo sapiens; identical to SEQ ID NO: 276729
  chr22:26422873-26423634
  hypo

SEQ ID NO: 414167 - DNA, 312 bp, Homo sapiens; identical to SEQ ID NO: 276730
  chr22:26829744-26830056
  hypo

SEQ ID NO: 414168 - DNA, 34 bp, Homo sapiens; identical to SEQ ID NO: 276731
  chr22:26867803-26867837
  hypo

SEQ ID NO: 414169 - DNA, 201 bp, Homo sapiens; identical to SEQ ID NO: 276732
  chr22:26888176-26888377
  hypo

SEQ ID NO: 414170 - DNA, 146 bp, Homo sapiens; identical to SEQ ID NO: 329435
  chr22:26930530-26930676
  hypo

SEQ ID NO: 414171 - DNA, 80 bp, Homo sapiens; identical to SEQ ID NO: 220693
  chr22:26965205-26965285
  hypo

SEQ ID NO: 414172 - DNA, 232 bp, Homo sapiens; identical to SEQ ID NO: 276741
  chr22:27486749-27486981
  hypo

SEQ ID NO: 414173 - DNA, 175 bp, Homo sapiens; identical to SEQ ID NO: 329446
  chr22:28191122-28191297
  hypo

SEQ ID NO: 414174 - DNA, 210 bp, Homo sapiens; identical to SEQ ID NO: 295301
  chr22:28197049-28197259
  hypo

SEQ ID NO: 414175 - DNA, 32 bp, Homo sapiens; identical to SEQ ID NO: 276744
  chr22:28361345-28361377
  hypo

SEQ ID NO: 414176 - DNA, 189 bp, Homo sapiens; identical to SEQ ID NO: 276747
  chr22:29435189-29435378
  hypo

SEQ ID NO: 414177 - DNA, 321 bp, Homo sapiens; identical to SEQ ID NO: 226353
  chr22:29468748-29469069
  hypo

SEQ ID NO: 414178 - DNA, 44 bp, Homo sapiens; identical to SEQ ID NO: 384852
  chr22:29469129-29469173
  hypo

SEQ ID NO: 414179 - DNA, 202 bp, Homo sapiens; identical to SEQ ID NO: 206096
  chr22:29469213-29469415
  hypo

SEQ ID NO: 414180 - DNA, 80 bp, Homo sapiens; identical to SEQ ID NO: 276750
  chr22:29525175-29525255
  hypo

SEQ ID NO: 414181 - DNA, 330 bp, Homo sapiens; identical to SEQ ID NO: 276751
  chr22:29580364-29580694
  hypo

SEQ ID NO: 414182 - DNA, 34 bp, Homo sapiens; identical to SEQ ID NO: 220702
  chr22:29678067-29678101
  hypo

SEQ ID NO: 414183 - DNA, 676 bp, Homo sapiens; identical to SEQ ID NO: 384855
  chr22:29702500-29703176
  hypo

SEQ ID NO: 414184 - DNA, 150 bp, Homo sapiens; identical to SEQ ID NO: 220706
  chr22:29714174-29714324
  hypo

SEQ ID NO: 414185 - DNA, 180 bp, Homo sapiens; identical to SEQ ID NO: 220708
  chr22:29846233-29846413
  hypo

SEQ ID NO: 414186 - DNA, 120 bp, Homo sapiens; identical to SEQ ID NO: 220709
  chr22:30004164-30004284
  hypo

SEQ ID NO: 414187 - DNA, 179 bp, Homo sapiens; identical to SEQ ID NO: 276772
  chr22:30073518-30073697
  hypo

SEQ ID NO: 414188 - DNA, 209 bp, Homo sapiens; identical to SEQ ID NO: 276775
  chr22:30086757-30086966
  hypo

SEQ ID NO: 414189 - DNA, 31 bp, Homo sapiens; identical to SEQ ID NO: 220716
  chr22:30310013-30310044
  hypo

SEQ ID NO: 414190 - DNA, 174 bp, Homo sapiens; identical to SEQ ID NO: 220718
  chr22:30422074-30422248
  hypo

SEQ ID NO: 414191 - DNA, 143 bp, Homo sapiens; identical to SEQ ID NO: 329496
  chr22:30634183-30634326
  hypo

SEQ ID NO: 414192 - DNA, 32 bp, Homo sapiens; identical to SEQ ID NO: 329497
  chr22:30634356-30634388
  hypo

SEQ ID NO: 414193 - DNA, 90 bp, Homo sapiens; identical to SEQ ID NO: 276791
  chr22:30647190-30647280
  hypo

SEQ ID NO: 414194 - DNA, 245 bp, Homo sapiens; identical to SEQ ID NO: 276792
  chr22:30653608-30653853
  hypo

SEQ ID NO: 414195 - DNA, 197 bp, Homo sapiens; identical to SEQ ID NO: 220720
  chr22:30656576-30656773
  hypo

SEQ ID NO: 414196 - DNA, 72 bp, Homo sapiens; identical to SEQ ID NO: 276794
  chr22:30681973-30682045
  hypo

SEQ ID NO: 414197 - DNA, 192 bp, Homo sapiens; identical to SEQ ID NO: 226359
  chr22:30723111-30723303
  hypo

SEQ ID NO: 414198 - DNA, 42 bp, Homo sapiens; identical to SEQ ID NO: 276796
  chr22:30734441-30734483
  hypo

SEQ ID NO: 414199 - DNA, 181 bp, Homo sapiens; identical to SEQ ID NO: 276797
  chr22:30768084-30768265
  hypo

SEQ ID NO: 414200 - DNA, 64 bp, Homo sapiens; identical to SEQ ID NO: 276798
  chr22:30843508-30843572
  hypo

SEQ ID NO: 414201 - DNA, 352 bp, Homo sapiens; identical to SEQ ID NO: 395053
  chr22:30951743-30952095
  hypo

SEQ ID NO: 414202 - DNA, 328 bp, Homo sapiens; identical to SEQ ID NO: 295344
  chr22:31002803-31003131
  hypo

SEQ ID NO: 414203 - DNA, 33 bp, Homo sapiens; identical to SEQ ID NO: 220725
  chr22:31062272-31062305
  hypo

SEQ ID NO: 414204 - DNA, 44 bp, Homo sapiens; identical to SEQ ID NO: 276810
  chr22:31126862-31126906
  hypo

SEQ ID NO: 414205 - DNA, 45 bp, Homo sapiens; identical to SEQ ID NO: 276814
  chr22:31250071-31250116
  hypo

SEQ ID NO: 414206 - DNA, 36 bp, Homo sapiens; identical to SEQ ID NO: 276816
  chr22:31261979-31262015
  hypo

SEQ ID NO: 414207 - DNA, 237 bp, Homo sapiens; identical to SEQ ID NO: 220729
  chr22:31264325-31264562
  hypo

SEQ ID NO: 414208 - DNA, 221 bp, Homo sapiens; identical to SEQ ID NO: 276820
  chr22:31301689-31301910
  hypo

SEQ ID NO: 414209 - DNA, 38 bp, Homo sapiens
  chr22:31475729-31475767
  hypo
gctttcttctgtgccttgattttcttttttcttttttt

SEQ ID NO: 414210 - DNA, 266 bp, Homo sapiens; identical to SEQ ID NO: 220735
  chr22:31644627-31644893
  hypo

SEQ ID NO: 414211 - DNA, 118 bp, Homo sapiens; identical to SEQ ID NO: 276830
  chr22:31655943-31656061
  hypo

SEQ ID NO: 414212 - DNA, 143 bp, Homo sapiens; identical to SEQ ID NO: 220737
  chr22:31942754-31942897
  hypo

SEQ ID NO: 414213 - DNA, 154 bp, Homo sapiens; identical to SEQ ID NO: 276835
  chr22:31998583-31998737
  hypo

SEQ ID NO: 414214 - DNA, 302 bp, Homo sapiens; identical to SEQ ID NO: 329547
  chr22:32009418-32009720
  hypo

SEQ ID NO: 414215 - DNA, 140 bp, Homo sapiens; identical to SEQ ID NO: 329548
  chr22:32014093-32014233
  hypo

SEQ ID NO: 414216 - DNA, 87 bp, Homo sapiens; identical to SEQ ID NO: 220738
  chr22:32014373-32014460
  hypo

SEQ ID NO: 414217 - DNA, 304 bp, Homo sapiens; identical to SEQ ID NO: 276839
  chr22:32025196-32025500
  hypo

SEQ ID NO: 414218 - DNA, 220 bp, Homo sapiens; identical to SEQ ID NO: 276844
  chr22:32352537-32352757
  hypo

SEQ ID NO: 414219 - DNA, 175 bp, Homo sapiens; identical to SEQ ID NO: 276851
  chr22:32668773-32668948
  hypo

SEQ ID NO: 414220 - DNA, 198 bp, Homo sapiens; identical to SEQ ID NO: 276852
  chr22:32792002-32792200
  hypo

SEQ ID NO: 414221 - DNA, 189 bp, Homo sapiens; identical to SEQ ID NO: 276856
  chr22:32997561-32997750
  hypo

SEQ ID NO: 414222 - DNA, 107 bp, Homo sapiens; identical to SEQ ID NO: 276857
  chr22:33250662-33250769
  hypo

SEQ ID NO: 414223 - DNA, 38 bp, Homo sapiens; identical to SEQ ID NO: 276858
  chr22:33305903-33305941
  hypo

SEQ ID NO: 414224 - DNA, 50 bp, Homo sapiens; identical to SEQ ID NO: 276863
  chr22:34257537-34257587
  hypo

SEQ ID NO: 414225 - DNA, 44 bp, Homo sapiens; identical to SEQ ID NO: 276864
  chr22:35526200-35526244
  hypo

SEQ ID NO: 414226 - DNA, 183 bp, Homo sapiens; identical to SEQ ID NO: 220745
  chr22:35730462-35730645
  hypo

SEQ ID NO: 414227 - DNA, 57 bp, Homo sapiens; identical to SEQ ID NO: 220747
  chr22:35758435-35758492
  hypo

SEQ ID NO: 414228 - DNA, 262 bp, Homo sapiens; identical to SEQ ID NO: 295372
  chr22:35767972-35768234
  hypo

SEQ ID NO: 414229 - DNA, 42 bp, Homo sapiens; identical to SEQ ID NO: 276869
  chr22:35806956-35806998
  hypo

SEQ ID NO: 414230 - DNA, 654 bp, Homo sapiens; identical to SEQ ID NO: 276872
  chr22:35842433-35843087
  hypo

SEQ ID NO: 414231 - DNA, 74 bp, Homo sapiens; identical to SEQ ID NO: 276873
  chr22:35843123-35843197
  hypo

SEQ ID NO: 414232 - DNA, 38 bp, Homo sapiens; identical to SEQ ID NO: 276875
  chr22:35875348-35875386
  hypo

SEQ ID NO: 414233 - DNA, 140 bp, Homo sapiens; identical to SEQ ID NO: 276877
  chr22:35951597-35951737
  hypo

SEQ ID NO: 414234 - DNA, 153 bp, Homo sapiens; identical to SEQ ID NO: 276879
  chr22:36123184-36123337
  hypo

SEQ ID NO: 414235 - DNA, 102 bp, Homo sapiens; identical to SEQ ID NO: 220752
  chr22:36246094-36246196
  hypo

SEQ ID NO: 414236 - DNA, 58 bp, Homo sapiens; identical to SEQ ID NO: 206117
  chr22:36424337-36424395
  hypo

SEQ ID NO: 414237 - DNA, 78 bp, Homo sapiens; identical to SEQ ID NO: 57980
  chr22:36424418-36424496
  hypo

SEQ ID NO: 414238 - DNA, 174 bp, Homo sapiens; identical to SEQ ID NO: 220757
  chr22:36677171-36677345
  hypo

SEQ ID NO: 414239 - DNA, 278 bp, Homo sapiens; identical to SEQ ID NO: 276888
  chr22:36688047-36688325
  hypo

SEQ ID NO: 414240 - DNA, 129 bp, Homo sapiens; identical to SEQ ID NO: 220760
  chr22:36695463-36695592
  hypo

SEQ ID NO: 414241 - DNA, 112 bp, Homo sapiens; identical to SEQ ID NO: 329620
  chr22:36860797-36860909
  hypo

SEQ ID NO: 414242 - DNA, 36 bp, Homo sapiens; identical to SEQ ID NO: 276902
  chr22:36867728-36867764
  hypo

SEQ ID NO: 414243 - DNA, 97 bp, Homo sapiens; identical to SEQ ID NO: 276904
  chr22:36871884-36871981
  hypo

SEQ ID NO: 414244 - DNA, 171 bp, Homo sapiens; identical to SEQ ID NO: 276906
  chr22:36885622-36885793
  hypo

SEQ ID NO: 414245 - DNA, 110 bp, Homo sapiens; identical to SEQ ID NO: 276912
  chr22:37160269-37160379
  hypo

SEQ ID NO: 414246 - DNA, 177 bp, Homo sapiens; identical to SEQ ID NO: 220765
  chr22:37168633-37168810
  hypo

SEQ ID NO: 414247 - DNA, 208 bp, Homo sapiens; identical to SEQ ID NO: 329633
  chr22:37329775-37329983
  hypo

SEQ ID NO: 414248 - DNA, 104 bp, Homo sapiens; identical to SEQ ID NO: 329634
  chr22:37330029-37330133
  hypo

SEQ ID NO: 414249 - DNA, 147 bp, Homo sapiens; identical to SEQ ID NO: 276916
  chr22:37332531-37332678
  hypo

SEQ ID NO: 414250 - DNA, 200 bp, Homo sapiens; identical to SEQ ID NO: 276921
  chr22:37527573-37527773
  hypo

SEQ ID NO: 414251 - DNA, 110 bp, Homo sapiens; identical to SEQ ID NO: 276922
  chr22:37562423-37562533
  hypo

SEQ ID NO: 414252 - DNA, 208 bp, Homo sapiens; identical to SEQ ID NO: 276923
  chr22:37622731-37622939
  hypo

SEQ ID NO: 414253 - DNA, 136 bp, Homo sapiens; identical to SEQ ID NO: 276927
  chr22:37875332-37875468
  hypo

SEQ ID NO: 414254 - DNA, 215 bp, Homo sapiens; identical to SEQ ID NO: 276929
  chr22:37902176-37902391
  hypo

SEQ ID NO: 414255 - DNA, 35 bp, Homo sapiens; identical to SEQ ID NO: 295402
  chr22:37914844-37914879
  hypo

SEQ ID NO: 414256 - DNA, 500 bp, Homo sapiens; identical to SEQ ID NO: 206127
  chr22:37914933-37915433
  hypo

SEQ ID NO: 414257 - DNA, 118 bp, Homo sapiens; identical to SEQ ID NO: 276932
  chr22:38014384-38014502
  hypo

SEQ ID NO: 414258 - DNA, 99 bp, Homo sapiens; identical to SEQ ID NO: 276934
  chr22:38019344-38019443
  hypo

SEQ ID NO: 414259 - DNA, 259 bp, Homo sapiens; identical to SEQ ID NO: 276936
  chr22:38037235-38037494
  hypo

SEQ ID NO: 414260 - DNA, 79 bp, Homo sapiens; identical to SEQ ID NO: 329663
  chr22:38064611-38064690
  hypo

SEQ ID NO: 414261 - DNA, 77 bp, Homo sapiens; identical to SEQ ID NO: 276947
  chr22:38182164-38182241
  hypo

SEQ ID NO: 414262 - DNA, 388 bp, Homo sapiens; identical to SEQ ID NO: 220771
  chr22:38209275-38209663
  hypo

SEQ ID NO: 414263 - DNA, 38 bp, Homo sapiens; identical to SEQ ID NO: 276952
  chr22:38238232-38238270
  hypo

SEQ ID NO: 414264 - DNA, 109 bp, Homo sapiens; identical to SEQ ID NO: 276965
  chr22:38415281-38415390
  hypo

SEQ ID NO: 414265 - DNA, 114 bp, Homo sapiens; identical to SEQ ID NO: 220783
  chr22:38470384-38470498
  hypo

SEQ ID NO: 414266 - DNA, 255 bp, Homo sapiens; identical to SEQ ID NO: 276977
  chr22:38520660-38520915
  hypo

SEQ ID NO: 414267 - DNA, 126 bp, Homo sapiens; identical to SEQ ID NO: 220788
  chr22:38525495-38525621
  hypo

SEQ ID NO: 414268 - DNA, 123 bp, Homo sapiens; identical to SEQ ID NO: 276981
  chr22:38541364-38541487
  hypo

SEQ ID NO: 414269 - DNA, 390 bp, Homo sapiens; identical to SEQ ID NO: 389876
  chr22:38577754-38578144
  hypo

SEQ ID NO: 414270 - DNA, 364 bp, Homo sapiens; identical to SEQ ID NO: 276985
  chr22:38618369-38618733
  hypo

SEQ ID NO: 414271 - DNA, 114 bp, Homo sapiens; identical to SEQ ID NO: 276987
  chr22:38634943-38635057
  hypo

SEQ ID NO: 414272 - DNA, 89 bp, Homo sapiens; identical to SEQ ID NO: 276988
  chr22:38639963-38640052
  hypo

SEQ ID NO: 414273 - DNA, 127 bp, Homo sapiens; identical to SEQ ID NO: 276992
  chr22:38742147-38742274
  hypo

SEQ ID NO: 414274 - DNA, 54 bp, Homo sapiens; identical to SEQ ID NO: 276993
  chr22:38795422-38795476
  hypo

SEQ ID NO: 414275 - DNA, 53 bp, Homo sapiens; identical to SEQ ID NO: 276994
  chr22:38795506-38795559
  hypo

SEQ ID NO: 414276 - DNA, 158 bp, Homo sapiens; identical to SEQ ID NO: 276996
  chr22:38827317-38827475
  hypo

SEQ ID NO: 414277 - DNA, 69 bp, Homo sapiens; identical to SEQ ID NO: 276997
  chr22:38845518-38845587
  hypo

SEQ ID NO: 414278 - DNA, 154 bp, Homo sapiens; identical to SEQ ID NO: 277003
  chr22:39122031-39122185
  hypo

SEQ ID NO: 414279 - DNA, 229 bp, Homo sapiens; identical to SEQ ID NO: 220798
  chr22:39132169-39132398
  hypo

SEQ ID NO: 414280 - DNA, 42 bp, Homo sapiens; identical to SEQ ID NO: 277008
  chr22:39175179-39175221
  hypo

SEQ ID NO: 414281 - DNA, 253 bp, Homo sapiens; identical to SEQ ID NO: 295439
  chr22:39239093-39239346
  hypo

SEQ ID NO: 414282 - DNA, 32 bp, Homo sapiens; identical to SEQ ID NO: 206137
  chr22:39239412-39239444
  hypo

SEQ ID NO: 414283 - DNA, 189 bp, Homo sapiens; identical to SEQ ID NO: 295441
  chr22:39239935-39240124
  hypo

SEQ ID NO: 414284 - DNA, 120 bp, Homo sapiens; identical to SEQ ID NO: 277013
  chr22:39449270-39449390
  hypo

SEQ ID NO: 414285 - DNA, 204 bp, Homo sapiens; identical to SEQ ID NO: 277014
  chr22:39474506-39474710
  hypo

SEQ ID NO: 414286 - DNA, 120 bp, Homo sapiens; identical to SEQ ID NO: 277015
  chr22:39475634-39475754
  hypo

SEQ ID NO: 414287 - DNA, 100 bp, Homo sapiens; identical to SEQ ID NO: 220804
  chr22:39530873-39530973
  hypo

SEQ ID NO: 414288 - DNA, 47 bp, Homo sapiens; identical to SEQ ID NO: 206139
  chr22:39638593-39638640
  hypo

SEQ ID NO: 414289 - DNA, 133 bp, Homo sapiens; identical to SEQ ID NO: 277019
  chr22:39686245-39686378
  hypo

SEQ ID NO: 414290 - DNA, 41 bp, Homo sapiens; identical to SEQ ID NO: 277022
  chr22:39744066-39744107
  hypo

SEQ ID NO: 414291 - DNA, 149 bp, Homo sapiens; identical to SEQ ID NO: 277026
  chr22:39772140-39772289
  hypo

SEQ ID NO: 414292 - DNA, 136 bp, Homo sapiens; identical to SEQ ID NO: 220811
  chr22:39773595-39773731
  hypo

SEQ ID NO: 414293 - DNA, 230 bp, Homo sapiens; identical to SEQ ID NO: 277028
  chr22:39777671-39777901
  hypo

SEQ ID NO: 414294 - DNA, 49 bp, Homo sapiens; identical to SEQ ID NO: 220812
  chr22:39872956-39873005
  hypo

SEQ ID NO: 414295 - DNA, 135 bp, Homo sapiens; identical to SEQ ID NO: 277037
  chr22:40025722-40025857
  hypo

SEQ ID NO: 414296 - DNA, 166 bp, Homo sapiens; identical to SEQ ID NO: 277044
  chr22:40083965-40084131
  hypo

SEQ ID NO: 414297 - DNA, 39 bp, Homo sapiens; identical to SEQ ID NO: 220820
  chr22:40262908-40262947
  hypo

SEQ ID NO: 414298 - DNA, 180 bp, Homo sapiens; identical to SEQ ID NO: 277050
  chr22:40360353-40360533
  hypo

SEQ ID NO: 414299 - DNA, 108 bp, Homo sapiens; identical to SEQ ID NO: 220821
  chr22:40444189-40444297
  hypo

SEQ ID NO: 414300 - DNA, 55 bp, Homo sapiens; identical to SEQ ID NO: 277055
  chr22:40620809-40620864
  hypo

SEQ ID NO: 414301 - DNA, 39 bp, Homo sapiens; identical to SEQ ID NO: 220823
  chr22:40621438-40621477
  hypo

SEQ ID NO: 414302 - DNA, 198 bp, Homo sapiens; identical to SEQ ID NO: 277058
  chr22:40642784-40642982
  hypo

SEQ ID NO: 414303 - DNA, 282 bp, Homo sapiens; identical to SEQ ID NO: 277059
  chr22:40693256-40693538
  hypo

SEQ ID NO: 414304 - DNA, 37 bp, Homo sapiens; identical to SEQ ID NO: 277060
  chr22:40764628-40764665
  hypo

SEQ ID NO: 414305 - DNA, 117 bp, Homo sapiens; identical to SEQ ID NO: 220825
  chr22:40815004-40815121
  hypo

SEQ ID NO: 414306 - DNA, 242 bp, Homo sapiens; identical to SEQ ID NO: 329807
  chr22:41034283-41034525
  hypo

SEQ ID NO: 414307 - DNA, 203 bp, Homo sapiens; identical to SEQ ID NO: 277068
  chr22:41044524-41044727
  hypo

SEQ ID NO: 414308 - DNA, 35 bp, Homo sapiens; identical to SEQ ID NO: 277073
  chr22:41177928-41177963
  hypo

SEQ ID NO: 414309 - DNA, 103 bp, Homo sapiens; identical to SEQ ID NO: 329813
  chr22:41398426-41398529
  hypo

SEQ ID NO: 414310 - DNA, 159 bp, Homo sapiens; identical to SEQ ID NO: 277077
  chr22:41573032-41573191
  hypo

SEQ ID NO: 414311 - DNA, 33 bp, Homo sapiens; identical to SEQ ID NO: 387429
  chr22:41639669-41639702
  hypo

SEQ ID NO: 414312 - DNA, 135 bp, Homo sapiens; identical to SEQ ID NO: 220832
  chr22:41641907-41642042
  hypo

SEQ ID NO: 414313 - DNA, 224 bp, Homo sapiens; identical to SEQ ID NO: 277084
  chr22:41666686-41666910
  hypo

SEQ ID NO: 414314 - DNA, 103 bp, Homo sapiens; identical to SEQ ID NO: 220841
  chr22:41676091-41676194
  hypo

SEQ ID NO: 414315 - DNA, 160 bp, Homo sapiens; identical to SEQ ID NO: 220842
  chr22:41779337-41779497
  hypo

SEQ ID NO: 414316 - DNA, 180 bp, Homo sapiens; identical to SEQ ID NO: 277094
  chr22:41871436-41871616
  hypo

SEQ ID NO: 414317 - DNA, 36 bp, Homo sapiens; identical to SEQ ID NO: 277103
  chr22:42256093-42256129
  hypo

SEQ ID NO: 414318 - DNA, 400 bp, Homo sapiens; identical to SEQ ID NO: 206156
  chr22:42669780-42670180
  hypo

SEQ ID NO: 414319 - DNA, 58 bp, Homo sapiens; identical to SEQ ID NO: 277108
  chr22:42706987-42707045
  hypo

SEQ ID NO: 414320 - DNA, 93 bp, Homo sapiens; identical to SEQ ID NO: 277109
  chr22:42713566-42713659
  hypo

SEQ ID NO: 414321 - DNA, 190 bp, Homo sapiens; identical to SEQ ID NO: 277110
  chr22:42733979-42734169
  hypo

SEQ ID NO: 414322 - DNA, 42 bp, Homo sapiens; identical to SEQ ID NO: 277112
  chr22:42796231-42796273
  hypo

SEQ ID NO: 414323 - DNA, 200 bp, Homo sapiens; identical to SEQ ID NO: 277113
  chr22:42822800-42823000
  hypo

SEQ ID NO: 414324 - DNA, 164 bp, Homo sapiens; identical to SEQ ID NO: 277117
  chr22:42956595-42956759
  hypo

SEQ ID NO: 414325 - DNA, 350 bp, Homo sapiens; identical to SEQ ID NO: 220855
  chr22:42998893-42999243
  hypo

SEQ ID NO: 414326 - DNA, 189 bp, Homo sapiens; identical to SEQ ID NO: 277123
  chr22:43005280-43005469
  hypo

SEQ ID NO: 414327 - DNA, 248 bp, Homo sapiens; identical to SEQ ID NO: 226391
  chr22:43015553-43015801
  hypo

SEQ ID NO: 414328 - DNA, 34 bp, Homo sapiens; identical to SEQ ID NO: 277124
  chr22:43089901-43089935
  hypo

SEQ ID NO: 414329 - DNA, 34 bp, Homo sapiens; identical to SEQ ID NO: 277126
  chr22:43138068-43138102
  hypo

SEQ ID NO: 414330 - DNA, 171 bp, Homo sapiens; identical to SEQ ID NO: 277132
  chr22:43238823-43238994
  hypo

SEQ ID NO: 414331 - DNA, 141 bp, Homo sapiens; identical to SEQ ID NO: 277136
  chr22:43298921-43299062
  hypo

SEQ ID NO: 414332 - DNA, 93 bp, Homo sapiens; identical to SEQ ID NO: 277139
  chr22:43365553-43365646
  hypo

SEQ ID NO: 414333 - DNA, 163 bp, Homo sapiens; identical to SEQ ID NO: 277140
  chr22:43390391-43390554
  hypo

SEQ ID NO: 414334 - DNA, 92 bp, Homo sapiens; identical to SEQ ID NO: 277141
  chr22:43402810-43402902
  hypo

SEQ ID NO: 414335 - DNA, 34 bp, Homo sapiens; identical to SEQ ID NO: 277143
  chr22:43437050-43437084
  hypo

SEQ ID NO: 414336 - DNA, 267 bp, Homo sapiens; identical to SEQ ID NO: 220863
  chr22:43465387-43465654
  hypo

SEQ ID NO: 414337 - DNA, 294 bp, Homo sapiens; identical to SEQ ID NO: 329887
  chr22:43524629-43524923
  hypo

SEQ ID NO: 414338 - DNA, 143 bp, Homo sapiens; identical to SEQ ID NO: 277148
  chr22:43559030-43559173
  hypo

SEQ ID NO: 414339 - DNA, 182 bp, Homo sapiens; identical to SEQ ID NO: 220869
  chr22:43581409-43581591
  hypo

SEQ ID NO: 414340 - DNA, 130 bp, Homo sapiens; identical to SEQ ID NO: 329896
  chr22:43581627-43581757
  hypo

SEQ ID NO: 414341 - DNA, 313 bp, Homo sapiens; identical to SEQ ID NO: 329897
  chr22:43608344-43608657
  hypo

SEQ ID NO: 414342 - DNA, 75 bp, Homo sapiens; identical to SEQ ID NO: 329898
  chr22:43608687-43608762
  hypo

SEQ ID NO: 414343 - DNA, 135 bp, Homo sapiens; identical to SEQ ID NO: 220870
  chr22:43689261-43689396
  hypo

SEQ ID NO: 414344 - DNA, 50 bp, Homo sapiens; identical to SEQ ID NO: 277156
  chr22:43861119-43861169
  hypo

SEQ ID NO: 414345 - DNA, 301 bp, Homo sapiens; identical to SEQ ID NO: 220871
  chr22:43926571-43926872
  hypo

SEQ ID NO: 414346 - DNA, 78 bp, Homo sapiens; identical to SEQ ID NO: 220872
  chr22:43926902-43926980
  hypo

SEQ ID NO: 414347 - DNA, 48 bp, Homo sapiens; identical to SEQ ID NO: 277159
  chr22:44026051-44026099
  hypo

SEQ ID NO: 414348 - DNA, 132 bp, Homo sapiens; identical to SEQ ID NO: 206161
  chr22:44287922-44288054
  hypo

SEQ ID NO: 414349 - DNA, 42 bp, Homo sapiens; identical to SEQ ID NO: 277160
  chr22:44317774-44317816
  hypo

SEQ ID NO: 414350 - DNA, 207 bp, Homo sapiens; identical to SEQ ID NO: 220874
  chr22:44322831-44323038
  hypo

SEQ ID NO: 414351 - DNA, 146 bp, Homo sapiens; identical to SEQ ID NO: 277165
  chr22:44495150-44495296
  hypo

SEQ ID NO: 414352 - DNA, 131 bp, Homo sapiens; identical to SEQ ID NO: 277166
  chr22:44495597-44495728
  hypo

SEQ ID NO: 414353 - DNA, 40 bp, Homo sapiens; identical to SEQ ID NO: 277170
  chr22:44545748-44545788
  hypo

SEQ ID NO: 414354 - DNA, 43 bp, Homo sapiens; identical to SEQ ID NO: 329921
  chr22:44681502-44681545
  hypo

SEQ ID NO: 414355 - DNA, 199 bp, Homo sapiens; identical to SEQ ID NO: 277176
  chr22:44790443-44790642
  hypo

SEQ ID NO: 414356 - DNA, 240 bp, Homo sapiens; identical to SEQ ID NO: 277177
  chr22:44808388-44808628
  hypo

SEQ ID NO: 414357 - DNA, 136 bp, Homo sapiens; identical to SEQ ID NO: 329925
  chr22:44892380-44892516
  hypo

SEQ ID NO: 414358 - DNA, 136 bp, Homo sapiens; identical to SEQ ID NO: 329926
  chr22:45004116-45004252
  hypo

SEQ ID NO: 414359 - DNA, 52 bp, Homo sapiens; identical to SEQ ID NO: 277182
  chr22:45085115-45085167
  hypo

SEQ ID NO: 414360 - DNA, 32 bp, Homo sapiens; identical to SEQ ID NO: 220880
  chr22:45113077-45113109
  hypo

SEQ ID NO: 414361 - DNA, 280 bp, Homo sapiens; identical to SEQ ID NO: 220883
  chr22:45123031-45123311
  hypo

SEQ ID NO: 414362 - DNA, 33 bp, Homo sapiens; identical to SEQ ID NO: 329944
  chr22:45135979-45136012
  hypo

SEQ ID NO: 414363 - DNA, 73 bp, Homo sapiens; identical to SEQ ID NO: 329946
  chr22:45137750-45137823
  hypo

SEQ ID NO: 414364 - DNA, 42 bp, Homo sapiens; identical to SEQ ID NO: 277194
  chr22:45175293-45175335
  hypo

SEQ ID NO: 414365 - DNA, 199 bp, Homo sapiens; identical to SEQ ID NO: 277195
  chr22:45181176-45181375
  hypo

SEQ ID NO: 414366 - DNA, 183 bp, Homo sapiens; identical to SEQ ID NO: 220885
  chr22:45242866-45243049
  hypo

SEQ ID NO: 414367 - DNA, 123 bp, Homo sapiens; identical to SEQ ID NO: 277199
  chr22:45288210-45288333
  hypo

SEQ ID NO: 414368 - DNA, 268 bp, Homo sapiens; identical to SEQ ID NO: 277200
  chr22:45312207-45312475
  hypo

SEQ ID NO: 414369 - DNA, 213 bp, Homo sapiens; identical to SEQ ID NO: 277201
  chr22:45312785-45312998
  hypo

SEQ ID NO: 414370 - DNA, 48 bp, Homo sapiens; identical to SEQ ID NO: 277202
  chr22:45322691-45322739
  hypo

SEQ ID NO: 414371 - DNA, 103 bp, Homo sapiens; identical to SEQ ID NO: 277206
  chr22:45474745-45474848
  hypo

SEQ ID NO: 414372 - DNA, 386 bp, Homo sapiens; identical to SEQ ID NO: 220890
  chr22:45594190-45594576
  hypo

SEQ ID NO: 414373 - DNA, 85 bp, Homo sapiens; identical to SEQ ID NO: 220891
  chr22:45594816-45594901
  hypo

SEQ ID NO: 414374 - DNA, 168 bp, Homo sapiens; identical to SEQ ID NO: 277220
  chr22:45717844-45718012
  hypo

SEQ ID NO: 414375 - DNA, 184 bp, Homo sapiens; identical to SEQ ID NO: 277223
  chr22:45814422-45814606
  hypo

SEQ ID NO: 414376 - DNA, 209 bp, Homo sapiens; identical to SEQ ID NO: 277227
  chr22:45897738-45897947
  hypo

SEQ ID NO: 414377 - DNA, 46 bp, Homo sapiens; identical to SEQ ID NO: 277228
  chr22:45914455-45914501
  hypo

SEQ ID NO: 414378 - DNA, 154 bp, Homo sapiens; identical to SEQ ID NO: 277230
  chr22:45932767-45932921
  hypo

SEQ ID NO: 414379 - DNA, 88 bp, Homo sapiens; identical to SEQ ID NO: 277232
  chr22:45940276-45940364
  hypo

SEQ ID NO: 414380 - DNA, 34 bp, Homo sapiens; identical to SEQ ID NO: 277233
  chr22:45949260-45949294
  hypo

SEQ ID NO: 414381 - DNA, 125 bp, Homo sapiens; identical to SEQ ID NO: 220903
  chr22:45976304-45976429
  hypo

SEQ ID NO: 414382 - DNA, 407 bp, Homo sapiens; identical to SEQ ID NO: 277238
  chr22:45982090-45982497
  hypo

SEQ ID NO: 414383 - DNA, 70 bp, Homo sapiens; identical to SEQ ID NO: 220904
  chr22:45982908-45982978
  hypo

SEQ ID NO: 414384 - DNA, 259 bp, Homo sapiens; identical to SEQ ID NO: 220905
  chr22:45983008-45983267
  hypo

SEQ ID NO: 414385 - DNA, 209 bp, Homo sapiens; identical to SEQ ID NO: 277243
  chr22:46042935-46043144
  hypo

SEQ ID NO: 414386 - DNA, 159 bp, Homo sapiens; identical to SEQ ID NO: 277244
  chr22:46051559-46051718
  hypo

SEQ ID NO: 414387 - DNA, 119 bp, Homo sapiens; identical to SEQ ID NO: 277245
  chr22:46082801-46082920
  hypo

SEQ ID NO: 414388 - DNA, 214 bp, Homo sapiens; identical to SEQ ID NO: 277246
  chr22:46145006-46145220
  hypo

SEQ ID NO: 414389 - DNA, 56 bp, Homo sapiens; identical to SEQ ID NO: 277248
  chr22:46158114-46158170
  hypo

SEQ ID NO: 414390 - DNA, 116 bp, Homo sapiens; identical to SEQ ID NO: 277250
  chr22:46229733-46229849
  hypo

SEQ ID NO: 414391 - DNA, 115 bp, Homo sapiens; identical to SEQ ID NO: 330013
  chr22:46318779-46318894
  hypo

SEQ ID NO: 414392 - DNA, 147 bp, Homo sapiens; identical to SEQ ID NO: 330017
  chr22:46410634-46410781
  hypo

SEQ ID NO: 414393 - DNA, 52 bp, Homo sapiens; identical to SEQ ID NO: 277261
  chr22:46437045-46437097
  hypo

SEQ ID NO: 414394 - DNA, 36 bp, Homo sapiens; identical to SEQ ID NO: 220910
  chr22:46455649-46455685
  hypo

SEQ ID NO: 414395 - DNA, 368 bp, Homo sapiens; identical to SEQ ID NO: 226399
  chr22:46465893-46466261
  hypo

SEQ ID NO: 414396 - DNA, 359 bp, Homo sapiens; identical to SEQ ID NO: 226400
  chr22:46468170-46468529
  hypo

SEQ ID NO: 414397 - DNA, 58 bp, Homo sapiens; identical to SEQ ID NO: 277266
  chr22:46499693-46499751
  hypo

SEQ ID NO: 414398 - DNA, 181 bp, Homo sapiens; identical to SEQ ID NO: 277272
  chr22:46594236-46594417
  hypo

SEQ ID NO: 414399 - DNA, 111 bp, Homo sapiens; identical to SEQ ID NO: 226401
  chr22:46658172-46658283
  hypo

SEQ ID NO: 414400 - DNA, 110 bp, Homo sapiens; identical to SEQ ID NO: 220918
  chr22:46785285-46785395
  hypo

SEQ ID NO: 414401 - DNA, 402 bp, Homo sapiens; identical to SEQ ID NO: 277286
  chr22:46787966-46788368
  hypo

SEQ ID NO: 414402 - DNA, 245 bp, Homo sapiens; identical to SEQ ID NO: 277288
  chr22:46804736-46804981
  hypo

SEQ ID NO: 414403 - DNA, 407 bp, Homo sapiens; identical to SEQ ID NO: 277289
  chr22:46805659-46806066
  hypo

SEQ ID NO: 414404 - DNA, 270 bp, Homo sapiens; identical to SEQ ID NO: 220922
  chr22:46816771-46817041
  hypo

SEQ ID NO: 414405 - DNA, 191 bp, Homo sapiens; identical to SEQ ID NO: 277296
  chr22:46838112-46838303
  hypo

SEQ ID NO: 414406 - DNA, 203 bp, Homo sapiens; identical to SEQ ID NO: 220924
  chr22:46838991-46839194
  hypo

SEQ ID NO: 414407 - DNA, 175 bp, Homo sapiens; identical to SEQ ID NO: 277298
  chr22:46847860-46848035
  hypo

SEQ ID NO: 414408 - DNA, 283 bp, Homo sapiens; identical to SEQ ID NO: 277299
  chr22:46850525-46850808
  hypo

SEQ ID NO: 414409 - DNA, 235 bp, Homo sapiens; identical to SEQ ID NO: 220925
  chr22:46859885-46860120
  hypo

SEQ ID NO: 414410 - DNA, 102 bp, Homo sapiens; identical to SEQ ID NO: 277301
  chr22:46867879-46867981
  hypo

SEQ ID NO: 414411 - DNA, 167 bp, Homo sapiens; identical to SEQ ID NO: 277303
  chr22:46905651-46905818
  hypo

SEQ ID NO: 414412 - DNA, 82 bp, Homo sapiens; identical to SEQ ID NO: 277305
  chr22:46922073-46922155
  hypo

SEQ ID NO: 414413 - DNA, 87 bp, Homo sapiens; identical to SEQ ID NO: 277311
  chr22:47004839-47004926
  hypo

SEQ ID NO: 414414 - DNA, 87 bp, Homo sapiens; identical to SEQ ID NO: 220932
  chr22:47004986-47005073
  hypo

SEQ ID NO: 414415 - DNA, 323 bp, Homo sapiens; identical to SEQ ID NO: 330078
  chr22:47005562-47005885
  hypo

SEQ ID NO: 414416 - DNA, 153 bp, Homo sapiens; identical to SEQ ID NO: 277314
  chr22:47014558-47014711
  hypo

SEQ ID NO: 414417 - DNA, 197 bp, Homo sapiens; identical to SEQ ID NO: 277317
  chr22:47037419-47037616
  hypo

SEQ ID NO: 414418 - DNA, 94 bp, Homo sapiens; identical to SEQ ID NO: 277321
  chr22:47059000-47059094
  hypo

SEQ ID NO: 414419 - DNA, 165 bp, Homo sapiens; identical to SEQ ID NO: 277322
  chr22:47064650-47064815
  hypo

SEQ ID NO: 414420 - DNA, 61 bp, Homo sapiens; identical to SEQ ID NO: 277324
  chr22:47074764-47074825
  hypo

SEQ ID NO: 414421 - DNA, 264 bp, Homo sapiens; identical to SEQ ID NO: 277326
  chr22:47107084-47107348
  hypo

SEQ ID NO: 414422 - DNA, 95 bp, Homo sapiens; identical to SEQ ID NO: 277328
  chr22:47139211-47139306
  hypo

SEQ ID NO: 414423 - DNA, 284 bp, Homo sapiens; identical to SEQ ID NO: 220939
  chr22:47172072-47172356
  hypo

SEQ ID NO: 414424 - DNA, 203 bp, Homo sapiens; identical to SEQ ID NO: 277331
  chr22:47187931-47188134
  hypo

SEQ ID NO: 414425 - DNA, 115 bp, Homo sapiens; identical to SEQ ID NO: 277332
  chr22:47189586-47189701
  hypo

SEQ ID NO: 414426 - DNA, 145 bp, Homo sapiens; identical to SEQ ID NO: 277337
  chr22:47307379-47307524
  hypo

SEQ ID NO: 414427 - DNA, 187 bp, Homo sapiens; identical to SEQ ID NO: 277342
  chr22:47380645-47380832
  hypo

SEQ ID NO: 414428 - DNA, 154 bp, Homo sapiens; identical to SEQ ID NO: 277343
  chr22:47381551-47381705
  hypo

SEQ ID NO: 414429 - DNA, 235 bp, Homo sapiens; identical to SEQ ID NO: 277344
  chr22:47393097-47393332
  hypo

SEQ ID NO: 414430 - DNA, 229 bp, Homo sapiens; identical to SEQ ID NO: 330116
  chr22:47428637-47428866
  hypo

SEQ ID NO: 414431 - DNA, 137 bp, Homo sapiens; identical to SEQ ID NO: 277358
  chr22:47489047-47489184
  hypo

SEQ ID NO: 414432 - DNA, 227 bp, Homo sapiens; identical to SEQ ID NO: 277361
  chr22:47532466-47532693
  hypo

SEQ ID NO: 414433 - DNA, 89 bp, Homo sapiens; identical to SEQ ID NO: 277365
  chr22:47614609-47614698
  hypo

SEQ ID NO: 414434 - DNA, 199 bp, Homo sapiens; identical to SEQ ID NO: 330134
  chr22:47666573-47666772
  hypo

SEQ ID NO: 414435 - DNA, 217 bp, Homo sapiens; identical to SEQ ID NO: 277370
  chr22:48723482-48723699
  hypo

SEQ ID NO: 414436 - DNA, 60 bp, Homo sapiens; identical to SEQ ID NO: 277371
  chr22:48727541-48727601
  hypo

SEQ ID NO: 414437 - DNA, 341 bp, Homo sapiens; identical to SEQ ID NO: 277376
  chr22:48918775-48919116
  hypo

SEQ ID NO: 414438 - DNA, 570 bp, Homo sapiens; identical to SEQ ID NO: 277377
  chr22:48921050-48921620
  hypo

SEQ ID NO: 414439 - DNA, 377 bp, Homo sapiens; identical to SEQ ID NO: 277378
  chr22:48923829-48924206
  hypo

SEQ ID NO: 414440 - DNA, 159 bp, Homo sapiens; identical to SEQ ID NO: 277379
  chr22:48946285-48946444
  hypo

SEQ ID NO: 414441 - DNA, 110 bp, Homo sapiens; identical to SEQ ID NO: 277381
  chr22:48956016-48956126
  hypo

SEQ ID NO: 414442 - DNA, 107 bp, Homo sapiens; identical to SEQ ID NO: 277386
  chr22:48998395-48998502
  hypo

SEQ ID NO: 414443 - DNA, 92 bp, Homo sapiens; identical to SEQ ID NO: 330158
  chr22:49013241-49013333
  hypo

SEQ ID NO: 414444 - DNA, 48 bp, Homo sapiens; identical to SEQ ID NO: 330159
  chr22:49013485-49013533
  hypo

SEQ ID NO: 414445 - DNA, 772 bp, Homo sapiens; identical to SEQ ID NO: 220959
  chr22:49026210-49026982
  hypo

SEQ ID NO: 414446 - DNA, 133 bp, Homo sapiens; identical to SEQ ID NO: 330162
  chr22:49038918-49039051
  hypo

SEQ ID NO: 414447 - DNA, 158 bp, Homo sapiens; identical to SEQ ID NO: 277394
  chr22:49045921-49046079
  hypo

SEQ ID NO: 414448 - DNA, 42 bp, Homo sapiens; identical to SEQ ID NO: 277397
  chr22:49053747-49053789
  hypo

SEQ ID NO: 414449 - DNA, 202 bp, Homo sapiens; identical to SEQ ID NO: 277400
  chr22:49063357-49063559
  hypo

SEQ ID NO: 414450 - DNA, 86 bp, Homo sapiens; identical to SEQ ID NO: 277401
  chr22:49070489-49070575
  hypo

SEQ ID NO: 414451 - DNA, 91 bp, Homo sapiens; identical to SEQ ID NO: 277402
  chr22:49087333-49087424
  hypo

SEQ ID NO: 414452 - DNA, 115 bp, Homo sapiens; identical to SEQ ID NO: 277405
  chr22:49140371-49140486
  hypo

SEQ ID NO: 414453 - DNA, 42 bp, Homo sapiens; identical to SEQ ID NO: 277408
  chr22:49175463-49175505
  hypo

SEQ ID NO: 414454 - DNA, 115 bp, Homo sapiens; identical to SEQ ID NO: 277410
  chr22:49216176-49216291
  hypo

SEQ ID NO: 414455 - DNA, 197 bp, Homo sapiens; identical to SEQ ID NO: 277411
  chr22:49231767-49231964
  hypo

SEQ ID NO: 414456 - DNA, 189 bp, Homo sapiens; identical to SEQ ID NO: 277412
  chr22:49233007-49233196
  hypo

SEQ ID NO: 414457 - DNA, 266 bp, Homo sapiens; identical to SEQ ID NO: 277416
  chr22:49295890-49296156
  hypo

SEQ ID NO: 414458 - DNA, 31 bp, Homo sapiens; identical to SEQ ID NO: 277423
  chr22:49424884-49424915
  hypo

SEQ ID NO: 414459 - DNA, 275 bp, Homo sapiens; identical to SEQ ID NO: 277425
  chr22:49498249-49498524
  hypo

SEQ ID NO: 414460 - DNA, 108 bp, Homo sapiens; identical to SEQ ID NO: 277429
  chr22:49535540-49535648
  hypo

SEQ ID NO: 414461 - DNA, 142 bp, Homo sapiens; identical to SEQ ID NO: 277434
  chr22:49579810-49579952
  hypo

SEQ ID NO: 414462 - DNA, 244 bp, Homo sapiens; identical to SEQ ID NO: 277435
  chr22:49580738-49580982
  hypo

SEQ ID NO: 414463 - DNA, 193 bp, Homo sapiens; identical to SEQ ID NO: 277436
  chr22:49582855-49583048
  hypo

SEQ ID NO: 414464 - DNA, 42 bp, Homo sapiens; identical to SEQ ID NO: 277445
  chr22:49721831-49721873
  hypo

SEQ ID NO: 414465 - DNA, 140 bp, Homo sapiens; identical to SEQ ID NO: 330222
  chr22:49785182-49785322
  hypo

SEQ ID NO: 414466 - DNA, 131 bp, Homo sapiens; identical to SEQ ID NO: 330223
  chr22:49785379-49785510
  hypo

SEQ ID NO: 414467 - DNA, 89 bp, Homo sapiens; identical to SEQ ID NO: 330224
  chr22:49831760-49831849
  hypo

SEQ ID NO: 414468 - DNA, 79 bp, Homo sapiens; identical to SEQ ID NO: 277453
  chr22:49833907-49833986
  hypo

SEQ ID NO: 414469 - DNA, 254 bp, Homo sapiens; identical to SEQ ID NO: 277457
  chr22:49855321-49855575
  hypo

SEQ ID NO: 414470 - DNA, 120 bp, Homo sapiens; identical to SEQ ID NO: 277461
  chr22:49880500-49880620
  hypo

SEQ ID NO: 414471 - DNA, 124 bp, Homo sapiens; identical to SEQ ID NO: 277465
  chr22:49945296-49945420
  hypo

SEQ ID NO: 414472 - DNA, 252 bp, Homo sapiens; identical to SEQ ID NO: 277466
  chr22:49945706-49945958
  hypo

SEQ ID NO: 414473 - DNA, 200 bp, Homo sapiens; identical to SEQ ID NO: 277469
  chr22:49964997-49965197
  hypo

SEQ ID NO: 414474 - DNA, 84 bp, Homo sapiens; identical to SEQ ID NO: 277473
  chr22:49971682-49971766
  hypo

SEQ ID NO: 414475 - DNA, 42 bp, Homo sapiens; identical to SEQ ID NO: 220969
  chr22:50000856-50000898
  hypo

SEQ ID NO: 414476 - DNA, 46 bp, Homo sapiens; identical to SEQ ID NO: 330255
  chr22:50025072-50025118
  hypo

SEQ ID NO: 414477 - DNA, 173 bp, Homo sapiens; identical to SEQ ID NO: 220973
  chr22:50025148-50025321
  hypo

SEQ ID NO: 414478 - DNA, 33 bp, Homo sapiens; identical to SEQ ID NO: 277485
  chr22:50047562-50047595
  hypo

SEQ ID NO: 414479 - DNA, 222 bp, Homo sapiens; identical to SEQ ID NO: 330258
  chr22:50054165-50054387
  hypo

SEQ ID NO: 414480 - DNA, 207 bp, Homo sapiens; identical to SEQ ID NO: 220975
  chr22:50054635-50054842
  hypo

SEQ ID NO: 414481 - DNA, 79 bp, Homo sapiens; identical to SEQ ID NO: 277489
  chr22:50092133-50092212
  hypo

SEQ ID NO: 414482 - DNA, 50 bp, Homo sapiens; identical to SEQ ID NO: 277492
  chr22:50114361-50114411
  hypo

SEQ ID NO: 414483 - DNA, 198 bp, Homo sapiens; identical to SEQ ID NO: 295570
  chr22:50118499-50118697
  hypo

SEQ ID NO: 414484 - DNA, 66 bp, Homo sapiens; identical to SEQ ID NO: 134360
  chr22:50118722-50118788
  hypo

SEQ ID NO: 414485 - DNA, 131 bp, Homo sapiens; identical to SEQ ID NO: 277495
  chr22:50156812-50156943
  hypo

SEQ ID NO: 414486 - DNA, 249 bp, Homo sapiens; identical to SEQ ID NO: 277501
  chr22:50177707-50177956
  hypo

SEQ ID NO: 414487 - DNA, 162 bp, Homo sapiens; identical to SEQ ID NO: 277502
  chr22:50187009-50187171
  hypo

SEQ ID NO: 414488 - DNA, 533 bp, Homo sapiens; identical to SEQ ID NO: 277506
  chr22:50209390-50209923
  hypo

SEQ ID NO: 414489 - DNA, 157 bp, Homo sapiens; identical to SEQ ID NO: 277508
  chr22:50234239-50234396
  hypo

SEQ ID NO: 414490 - DNA, 343 bp, Homo sapiens; identical to SEQ ID NO: 226407
  chr22:50246433-50246776
  hypo

SEQ ID NO: 414491 - DNA, 174 bp, Homo sapiens; identical to SEQ ID NO: 277509
  chr22:50250093-50250267
  hypo

SEQ ID NO: 414492 - DNA, 68 bp, Homo sapiens; identical to SEQ ID NO: 277511
  chr22:50282333-50282401
  hypo

SEQ ID NO: 414493 - DNA, 445 bp, Homo sapiens; identical to SEQ ID NO: 277520
  chr22:50346303-50346748
  hypo

SEQ ID NO: 414494 - DNA, 189 bp, Homo sapiens; identical to SEQ ID NO: 220992
  chr22:50433174-50433363
  hypo

SEQ ID NO: 414495 - DNA, 48 bp, Homo sapiens; identical to SEQ ID NO: 277524
  chr22:50506925-50506973
  hypo

SEQ ID NO: 414496 - DNA, 31 bp, Homo sapiens; identical to SEQ ID NO: 277525
  chr22:50509793-50509824
  hypo

SEQ ID NO: 414497 - DNA, 144 bp, Homo sapiens; identical to SEQ ID NO: 277526
  chr22:50511772-50511916
  hypo

SEQ ID NO: 414498 - DNA, 64 bp, Homo sapiens; identical to SEQ ID NO: 277527
  chr22:50515962-50516026
  hypo

SEQ ID NO: 414499 - DNA, 395 bp, Homo sapiens; identical to SEQ ID NO: 277528
  chr22:50520368-50520763
  hypo

SEQ ID NO: 414500 - DNA, 197 bp, Homo sapiens; identical to SEQ ID NO: 277529
  chr22:50521454-50521651
  hypo

SEQ ID NO: 414501 - DNA, 198 bp, Homo sapiens; identical to SEQ ID NO: 277532
  chr22:50601380-50601578
  hypo

SEQ ID NO: 414502 - DNA, 59 bp, Homo sapiens; identical to SEQ ID NO: 220994
  chr22:50656965-50657024
  hypo

SEQ ID NO: 414503 - DNA, 463 bp, Homo sapiens; identical to SEQ ID NO: 220996
  chr22:50721365-50721828
  hypo

SEQ ID NO: 414504 - DNA, 616 bp, Homo sapiens; identical to SEQ ID NO: 330323
  chr22:50721872-50722488
  hypo

SEQ ID NO: 414505 - DNA, 84 bp, Homo sapiens; identical to SEQ ID NO: 206187
  chr22:50745645-50745729
  hypo

SEQ ID NO: 414506 - DNA, 183 bp, Homo sapiens; identical to SEQ ID NO: 206188
  chr22:50765110-50765293
  hypo

SEQ ID NO: 414507 - DNA, 221 bp, Homo sapiens; identical to SEQ ID NO: 277542
  chr22:50858128-50858349
  hypo

SEQ ID NO: 414508 - DNA, 104 bp, Homo sapiens; identical to SEQ ID NO: 226416
  chr22:50874285-50874389
  hypo

SEQ ID NO: 414509 - DNA, 72 bp, Homo sapiens; identical to SEQ ID NO: 221004
  chr22:50874675-50874747
  hypo

SEQ ID NO: 414510 - DNA, 115 bp, Homo sapiens; identical to SEQ ID NO: 277549
  chr22:50882626-50882741
  hypo

SEQ ID NO: 414511 - DNA, 137 bp, Homo sapiens; identical to SEQ ID NO: 277555
  chr22:50918772-50918909
  hypo

SEQ ID NO: 414512 - DNA, 302 bp, Homo sapiens; identical to SEQ ID NO: 330346
  chr22:50922303-50922605
  hypo

SEQ ID NO: 414513 - DNA, 116 bp, Homo sapiens; identical to SEQ ID NO: 221013
  chr22:50922663-50922779
  hypo

SEQ ID NO: 414514 - DNA, 139 bp, Homo sapiens; identical to SEQ ID NO: 330349
  chr22:50938934-50939073
  hypo

SEQ ID NO: 414515 - DNA, 33 bp, Homo sapiens; identical to SEQ ID NO: 330350
  chr22:50939111-50939144
  hypo

SEQ ID NO: 414516 - DNA, 251 bp, Homo sapiens; identical to SEQ ID NO: 277564
  chr22:50961988-50962239
  hypo

SEQ ID NO: 414517 - DNA, 269 bp, Homo sapiens; identical to SEQ ID NO: 221021
  chr22:51149171-51149440
  hypo

SEQ ID NO: 414518 - DNA, 80 bp, Homo sapiens; identical to SEQ ID NO: 330369
  chrX:2931093-2931173
  hypo

SEQ ID NO: 414519 - DNA, 148 bp, Homo sapiens; identical to SEQ ID NO: 277572
  chrX:3609054-3609202
  hypo

SEQ ID NO: 414520 - DNA, 42 bp, Homo sapiens; identical to SEQ ID NO: 277577
  chrX:4637572-4637614
  hypo

SEQ ID NO: 414521 - DNA, 120 bp, Homo sapiens; identical to SEQ ID NO: 277578
  chrX:4643432-4643552
  hypo

SEQ ID NO: 414522 - DNA, 36 bp, Homo sapiens; identical to SEQ ID NO: 277580
  chrX:6617024-6617060
  hypo

SEQ ID NO: 414523 - DNA, 458 bp, Homo sapiens; identical to SEQ ID NO: 277585
  chrX:9863402-9863860
  hypo

SEQ ID NO: 414524 - DNA, 715 bp, Homo sapiens; identical to SEQ ID NO: 221028
  chrX:10085163-10085878
  hypo

SEQ ID NO: 414525 - DNA, 180 bp, Homo sapiens; identical to SEQ ID NO: 277588
  chrX:10092559-10092739
  hypo

SEQ ID NO: 414526 - DNA, 161 bp, Homo sapiens; identical to SEQ ID NO: 226428
  chrX:11776190-11776351
  hypo

SEQ ID NO: 414527 - DNA, 115 bp, Homo sapiens; identical to SEQ ID NO: 221029
  chrX:11783710-11783825
  hypo

SEQ ID NO: 414528 - DNA, 32 bp, Homo sapiens; identical to SEQ ID NO: 277593
  chrX:15806008-15806040
  hypo

SEQ ID NO: 414529 - DNA, 99 bp, Homo sapiens; identical to SEQ ID NO: 206214
  chrX:15809046-15809145
  hypo

SEQ ID NO: 414530 - DNA, 82 bp, Homo sapiens; identical to SEQ ID NO: 206215
  chrX:15817994-15818076
  hypo

SEQ ID NO: 414531 - DNA, 122 bp, Homo sapiens; identical to SEQ ID NO: 206219
  chrX:15827322-15827444
  hypo

SEQ ID NO: 414532 - DNA, 56 bp, Homo sapiens; identical to SEQ ID NO: 206221
  chrX:15836709-15836765
  hypo

SEQ ID NO: 414533 - DNA, 110 bp, Homo sapiens; identical to SEQ ID NO: 206222
  chrX:15838329-15838439
  hypo

SEQ ID NO: 414534 - DNA, 36 bp, Homo sapiens; identical to SEQ ID NO: 221044
  chrX:16736864-16736900
  hypo

SEQ ID NO: 414535 - DNA, 31 bp, Homo sapiens; identical to SEQ ID NO: 221046
  chrX:19530839-19530870
  hypo

SEQ ID NO: 414536 - DNA, 221 bp, Homo sapiens; identical to SEQ ID NO: 221047
  chrX:20135284-20135505
  hypo

SEQ ID NO: 414537 - DNA, 52 bp, Homo sapiens; identical to SEQ ID NO: 221048
  chrX:20160884-20160936
  hypo

SEQ ID NO: 414538 - DNA, 32 bp, Homo sapiens; identical to SEQ ID NO: 277600
  chrX:24062614-24062646
  hypo

SEQ ID NO: 414539 - DNA, 33 bp, Homo sapiens; identical to SEQ ID NO: 277602
  chrX:24128931-24128964
  hypo

SEQ ID NO: 414540 - DNA, 70 bp, Homo sapiens; identical to SEQ ID NO: 206227
  chrX:27999798-27999868
  hypo

SEQ ID NO: 414541 - DNA, 42 bp, Homo sapiens; identical to SEQ ID NO: 277603
  chrX:33133914-33133956
  hypo

SEQ ID NO: 414542 - DNA, 1155 bp, Homo sapiens; identical to SEQ ID NO: 206230
  chrX:39910498-39911653
  hypo

SEQ ID NO: 414543 - DNA, 157 bp, Homo sapiens; identical to SEQ ID NO: 206231
  chrX:39913138-39913295
  hypo

SEQ ID NO: 414544 - DNA, 78 bp, Homo sapiens; identical to SEQ ID NO: 206232
  chrX:39913508-39913586
  hypo

SEQ ID NO: 414545 - DNA, 146 bp, Homo sapiens; identical to SEQ ID NO: 206233
  chrX:39914620-39914766
  hypo

SEQ ID NO: 414546 - DNA, 167 bp, Homo sapiens; identical to SEQ ID NO: 206234
  chrX:39916407-39916574
  hypo

SEQ ID NO: 414547 - DNA, 345 bp, Homo sapiens; identical to SEQ ID NO: 206237
  chrX:39922860-39923205
  hypo

SEQ ID NO: 414548 - DNA, 264 bp, Homo sapiens; identical to SEQ ID NO: 206238
  chrX:39923588-39923852
  hypo

SEQ ID NO: 414549 - DNA, 1059 bp, Homo sapiens; identical to SEQ ID NO: 384879
  chrX:39932474-39933533
  hypo

SEQ ID NO: 414550 - DNA, 79 bp, Homo sapiens; identical to SEQ ID NO: 206242
  chrX:39935706-39935785
  hypo

SEQ ID NO: 414551 - DNA, 104 bp, Homo sapiens; identical to SEQ ID NO: 277610
  chrX:44224968-44225072
  hypo

SEQ ID NO: 414552 - DNA, 38 bp, Homo sapiens; identical to SEQ ID NO: 277613
  chrX:44754637-44754675
  hypo

SEQ ID NO: 414553 - DNA, 36 bp, Homo sapiens; identical to SEQ ID NO: 277617
  chrX:44909558-44909594
  hypo

SEQ ID NO: 414554 - DNA, 36 bp, Homo sapiens; identical to SEQ ID NO: 277619
  chrX:47181621-47181657
  hypo

SEQ ID NO: 414555 - DNA, 147 bp, Homo sapiens; identical to SEQ ID NO: 277620
  chrX:55115418-55115565
  hypo

SEQ ID NO: 414556 - DNA, 82 bp, Homo sapiens; identical to SEQ ID NO: 277622
  chrX:57705240-57705322
  hypo

SEQ ID NO: 414557 - DNA, 197 bp, Homo sapiens; identical to SEQ ID NO: 277624
  chrX:65007842-65008039
  hypo

SEQ ID NO: 414558 - DNA, 33 bp, Homo sapiens; identical to SEQ ID NO: 277625
  chrX:70442913-70442946
  hypo

SEQ ID NO: 414559 - DNA, 317 bp, Homo sapiens; identical to SEQ ID NO: 277627
  chrX:70797825-70798142
  hypo

SEQ ID NO: 414560 - DNA, 359 bp, Homo sapiens; identical to SEQ ID NO: 226464
  chrX:73163983-73164342
  hypo

SEQ ID NO: 414561 - DNA, 97 bp, Homo sapiens; identical to SEQ ID NO: 206283
  chrX:123171376-123171473
  hypo

SEQ ID NO: 414562 - DNA, 77 bp, Homo sapiens; identical to SEQ ID NO: 206284
  chrX:123176418-123176495
  hypo

SEQ ID NO: 414563 - DNA, 135 bp, Homo sapiens; identical to SEQ ID NO: 206288
  chrX:123184024-123184159
  hypo

SEQ ID NO: 414564 - DNA, 112 bp, Homo sapiens; identical to SEQ ID NO: 206291
  chrX:123191715-123191827
  hypo

SEQ ID NO: 414565 - DNA, 71 bp, Homo sapiens; identical to SEQ ID NO: 206296
  chrX:123199725-123199796
  hypo

SEQ ID NO: 414566 - DNA, 262 bp, Homo sapiens; identical to SEQ ID NO: 206297
  chrX:123200024-123200286
  hypo

SEQ ID NO: 414567 - DNA, 175 bp, Homo sapiens; identical to SEQ ID NO: 206299
  chrX:123204998-123205173
  hypo

SEQ ID NO: 414568 - DNA, 140 bp, Homo sapiens; identical to SEQ ID NO: 206300
  chrX:123210181-123210321
  hypo

SEQ ID NO: 414569 - DNA, 102 bp, Homo sapiens; identical to SEQ ID NO: 206301
  chrX:123211806-123211908
  hypo

SEQ ID NO: 414570 - DNA, 133 bp, Homo sapiens; identical to SEQ ID NO: 206303
  chrX:123217270-123217403
  hypo

SEQ ID NO: 414571 - DNA, 127 bp, Homo sapiens; identical to SEQ ID NO: 206306
  chrX:123227867-123227994
  hypo

SEQ ID NO: 414572 - DNA, 2083 bp, Homo sapiens; identical to SEQ ID NO: 206308
  chrX:123234423-123236506
  hypo

SEQ ID NO: 414573 - DNA, 136 bp, Homo sapiens; identical to SEQ ID NO: 206309
  chrX:129139163-129139299
  hypo

SEQ ID NO: 414574 - DNA, 91 bp, Homo sapiens; identical to SEQ ID NO: 206310
  chrX:129146553-129146644
  hypo

SEQ ID NO: 414575 - DNA, 2398 bp, Homo sapiens; identical to SEQ ID NO: 384886
  chrX:129147791-129150189
  hypo

SEQ ID NO: 414576 - DNA, 81 bp, Homo sapiens; identical to SEQ ID NO: 206313
  chrX:129156871-129156952
  hypo

SEQ ID NO: 414577 - DNA, 227 bp, Homo sapiens; identical to SEQ ID NO: 206315
  chrX:129162609-129162836
  hypo

SEQ ID NO: 414578 - DNA, 222 bp, Homo sapiens; identical to SEQ ID NO: 206316
  chrX:129168429-129168651
  hypo

SEQ ID NO: 414579 - DNA, 48 bp, Homo sapiens; identical to SEQ ID NO: 401276
  chrX:129171341-129171389
  hypo

SEQ ID NO: 414580 - DNA, 148 bp, Homo sapiens; identical to SEQ ID NO: 206318
  chrX:129173111-129173259
  hypo

SEQ ID NO: 414581 - DNA, 78 bp, Homo sapiens; identical to SEQ ID NO: 206319
  chrX:129184691-129184769
  hypo

SEQ ID NO: 414582 - DNA, 157 bp, Homo sapiens; identical to SEQ ID NO: 206320
  chrX:129185834-129185991
  hypo

SEQ ID NO: 414583 - DNA, 184 bp, Homo sapiens; identical to SEQ ID NO: 206324
  chrX:133511601-133511785
  hypo

SEQ ID NO: 414584 - DNA, 102 bp, Homo sapiens; identical to SEQ ID NO: 206325
  chrX:133512034-133512136
  hypo

SEQ ID NO: 414585 - DNA, 134 bp, Homo sapiens; identical to SEQ ID NO: 206326
  chrX:133527530-133527664
  hypo

SEQ ID NO: 414586 - DNA, 44 bp, Homo sapiens; identical to SEQ ID NO: 206327
  chrX:133527938-133527982
  hypo

SEQ ID NO: 414587 - DNA, 130 bp, Homo sapiens; identical to SEQ ID NO: 206331
  chrX:133559230-133559360
  hypo

SEQ ID NO: 414588 - DNA, 393 bp, Homo sapiens; identical to SEQ ID NO: 277634
  chrX:151306512-151306905
  hypo

SEQ ID NO: 414589 - DNA, 153 bp, Homo sapiens; identical to SEQ ID NO: 277635
  chrX:151306965-151307118
  hypo

SEQ ID NO: 414590 - DNA, 61 bp, Homo sapiens; identical to SEQ ID NO: 277637
  chrY:6790937-6790998
  hypo

SEQ ID NO: 414591 - DNA, 79 bp, Homo sapiens; identical to SEQ ID NO: 221134
  chrY:7525418-7525497
  hypo

SEQ ID NO: 414592 - DNA, 92 bp, Homo sapiens; identical to SEQ ID NO: 277641
  chrY:14513075-14513167
  hypo

SEQ ID NO: 414593 - DNA, 92 bp, Homo sapiens; identical to SEQ ID NO: 277642
  chrY:14513347-14513439
  hypo

SEQ ID NO: 414594 - DNA, 180 bp, Homo sapiens; identical to SEQ ID NO: 221137
  chrY:15446038-15446218
  hypo

SEQ ID NO: 414595 - DNA, 45 bp, Homo sapiens; identical to SEQ ID NO: 277648
  chrY:16001309-16001354
  hypo

SEQ ID NO: 414596 - DNA, 45 bp, Homo sapiens; identical to SEQ ID NO: 277649
  chrY:16001474-16001519
  hypo

SEQ ID NO: 414597 - DNA, 152 bp, Homo sapiens; identical to SEQ ID NO: 221140
  chrY:21226202-21226354
  hypo

SEQ ID NO: 414598 - DNA, 55 bp, Homo sapiens; identical to SEQ ID NO: 221141
  chrY:23568831-23568886
  hypo

SEQ ID NO: 414599 - DNA, 103 bp, Homo sapiens; identical to SEQ ID NO: 277657
  AC133920.2_81912-122260:1986-2089
  hypo

SEQ ID NO: 414600 - DNA, 166 bp, Homo sapiens; identical to SEQ ID NO: 277658
  AC153808.1_1-20788:1301-1467
  hypo

SEQ ID NO: 414601 - DNA, 258 bp, Homo sapiens; identical to SEQ ID NO: 221142
  AC153808.1_1-20788:20324-20582
  hypo

SEQ ID NO: 414602 - DNA, 120 bp, Homo sapiens; identical to SEQ ID NO: 277660
  AC240459.2_22426-31906:3389-3509
  hypo

SEQ ID NO: 414603 - DNA, 180 bp, Homo sapiens; identical to SEQ ID NO: 277661
  AEKP01114215.1_1-7461:1444-1624
  hypo

SEQ ID NO: 414604 - DNA, 42 bp, Homo sapiens; identical to SEQ ID NO: 277663
  AEKP01114218.1_1-13684:9682-9724
  hypo

SEQ ID NO: 414605 - DNA, 74 bp, Homo sapiens; identical to SEQ ID NO: 277667
  AEKP01160137.1_1408-4031:1582-1656
  hypo

SEQ ID NO: 414606 - DNA, 116 bp, Homo sapiens; identical to SEQ ID NO: 221144
  AEKP01166227.1_44013-111583:41310-41426
  hypo

SEQ ID NO: 414607 - DNA, 166 bp, Homo sapiens; identical to SEQ ID NO: 277669
  AEKP01166227.1_44013-111583:53194-53360
  hypo

SEQ ID NO: 414608 - DNA, 35 bp, Homo sapiens; identical to SEQ ID NO: 277673
  AEKP01209288.1_3835-9918:5050-5085
  hypo

SEQ ID NO: 414609 - DNA, 93 bp, Homo sapiens; identical to SEQ ID NO: 277675
  AEKP01213516.1_1-2586:271-364
  hypo

SEQ ID NO: 414610 - DNA, 120 bp, Homo sapiens; identical to SEQ ID NO: 221147
  AEKP01221093.1_87-1602:855-975
  hypo

SEQ ID NO: 414611 - DNA, 32 bp, Homo sapiens; identical to SEQ ID NO: 221148
  GL000195.1:80192-80224
  hypo

SEQ ID NO: 414612 - DNA, 62 bp, Homo sapiens; identical to SEQ ID NO: 277684
  GL383535.1:198019-198081
  hypo

SEQ ID NO: 414613 - DNA, 54 bp, Homo sapiens; identical to SEQ ID NO: 221150
  NW_001838014.1_249000-295694:7052-7106
  hypo

SEQ ID NO: 414614 - DNA, 112 bp, Homo sapiens; identical to SEQ ID NO: 206354
  NW_001838402.2_289580-297926:6069-6181
  hypo

SEQ ID NO: 414615 - DNA, 97 bp, Homo sapiens; identical to SEQ ID NO: 221155
  NW_001838987.1_19978397-19979692:120-217
  hypo

SEQ ID NO: 414616 - DNA, 142 bp, Homo sapiens; identical to SEQ ID NO: 221156
  NW_001838993.2_42143-59442:15877-16019
  hypo

SEQ ID NO: 414617 - DNA, 113 bp, Homo sapiens; identical to SEQ ID NO: 277692
  NW_001838998.1_673882-674972:67-180
  hypo

SEQ ID NO: 414618 - DNA, 198 bp, Homo sapiens; identical to SEQ ID NO: 277693
  NW_001839317.1_1572-22707:16430-16628
  hypo

SEQ ID NO: 414619 - DNA, 207 bp, Homo sapiens; identical to SEQ ID NO: 277695
  NW_001839407.1_18933-24809:5028-5235
  hypo

SEQ ID NO: 414620 - DNA, 120 bp, Homo sapiens; identical to SEQ ID NO: 277698
  NW_001839407.1_50257-55859:1667-1787
  hypo

SEQ ID NO: 414621 - DNA, 120 bp, Homo sapiens; identical to SEQ ID NO: 277699
  NW_001839407.1_56047-63507:6752-6872
  hypo

SEQ ID NO: 414622 - DNA, 47 bp, Homo sapiens; identical to SEQ ID NO: 330594
  NW_001839407.1_56047-63507:6992-7039
  hypo

SEQ ID NO: 414623 - DNA, 34 bp, Homo sapiens; identical to SEQ ID NO: 330595
  NW_001839407.1_56047-63507:7078-7112
  hypo

SEQ ID NO: 414624 - DNA, 120 bp, Homo sapiens; identical to SEQ ID NO: 277703
  NW_001839595.1_74059-77718:791-911
  hypo

SEQ ID NO: 414625 - DNA, 269 bp, Homo sapiens; identical to SEQ ID NO: 330599
  NW_001839603.1_36678-41438:2711-2980
  hypo

SEQ ID NO: 414626 - DNA, 300 bp, Homo sapiens; identical to SEQ ID NO: 221158
  NW_001839646.1_1-5206:2128-2428
  hypo

SEQ ID NO: 414627 - DNA, 120 bp, Homo sapiens; identical to SEQ ID NO: 277710
  NW_001839651.1_32960-37353:877-997
  hypo

SEQ ID NO: 414628 - DNA, 95 bp, Homo sapiens; identical to SEQ ID NO: 277711
  NW_001839668.1_21493-58548:14916-15011
  hypo

SEQ ID NO: 414629 - DNA, 120 bp, Homo sapiens; identical to SEQ ID NO: 277716
  NW_001839689.1_69962-76288:4519-4639
  hypo

SEQ ID NO: 414630 - DNA, 120 bp, Homo sapiens; identical to SEQ ID NO: 277718
  NW_001839859.1_35699-41775:4706-4826
  hypo

SEQ ID NO: 414631 - DNA, 120 bp, Homo sapiens; identical to SEQ ID NO: 221161
  NW_001839864.1_130-4387:2039-2159
  hypo

SEQ ID NO: 414632 - DNA, 33 bp, Homo sapiens; identical to SEQ ID NO: 277720
  NW_001840146.1_14915-50612:25838-25871
  hypo

SEQ ID NO: 414633 - DNA, 98 bp, Homo sapiens; identical to SEQ ID NO: 277724
  NW_001840669.1_1-3203:1830-1928
  hypo

SEQ ID NO: 414634 - DNA, 87 bp, Homo sapiens; identical to SEQ ID NO: 221162
  NW_001840841.1_1-4205:1699-1786
  hypo

SEQ ID NO: 414635 - DNA, 105 bp, Homo sapiens; identical to SEQ ID NO: 277728
  NW_001840841.1_32027-40624:2466-2571
  hypo

SEQ ID NO: 414636 - DNA, 61 bp, Homo sapiens; identical to SEQ ID NO: 221164
  NW_001840859.1_1-2890:1537-1598
  hypo

SEQ ID NO: 414637 - DNA, 120 bp, Homo sapiens; identical to SEQ ID NO: 221165
  NW_001841051.1_73730-82666:506-626
  hypo

SEQ ID NO: 414638 - DNA, 120 bp, Homo sapiens; identical to SEQ ID NO: 277734
  NW_001841109.1_139-6923:1788-1908
  hypo

SEQ ID NO: 414639 - DNA, 120 bp, Homo sapiens; identical to SEQ ID NO: 221167
  NW_001841145.1_129149-174453:6133-6253
  hypo

SEQ ID NO: 414640 - DNA, 84 bp, Homo sapiens; identical to SEQ ID NO: 277737
  NW_001841145.1_177495-186900:958-1042
  hypo

SEQ ID NO: 414641 - DNA, 180 bp, Homo sapiens; identical to SEQ ID NO: 277739
  NW_001841145.1_40791-55171:240-420
  hypo

SEQ ID NO: 414642 - DNA, 141 bp, Homo sapiens; identical to SEQ ID NO: 221170
  NW_001841145.1_90215-97412:6817-6958
  hypo

SEQ ID NO: 414643 - DNA, 265 bp, Homo sapiens; identical to SEQ ID NO: 277745
  NW_001841507.1_62-5931:3856-4121
  hypo

SEQ ID NO: 414644 - DNA, 165 bp, Homo sapiens; identical to SEQ ID NO: 277746
  NW_001841533.1_1-11450:7730-7895
  hypo

SEQ ID NO: 414645 - DNA, 178 bp, Homo sapiens; identical to SEQ ID NO: 277748
  NW_001842432.1_1-179261:39824-40002
  hypo

SEQ ID NO: 414646 - DNA, 64 bp, Homo sapiens; identical to SEQ ID NO: 197231
  chr1:859736-859800
  hyper

SEQ ID NO: 414647 - DNA, 187 bp, Homo sapiens; identical to SEQ ID NO: 197232
  chr1:877475-877662
  hyper

SEQ ID NO: 414648 - DNA, 299 bp, Homo sapiens; identical to SEQ ID NO: 226564
  chr1:901741-902040
  hyper

SEQ ID NO: 414649 - DNA, 898 bp, Homo sapiens; identical to SEQ ID NO: 221173
  chr1:935362-936260
  hyper

SEQ ID NO: 414650 - DNA, 392 bp, Homo sapiens; identical to SEQ ID NO: 197235
  chr1:955508-955900
  hyper

SEQ ID NO: 414651 - DNA, 256 bp, Homo sapiens; identical to SEQ ID NO: 277801
  chr1:975561-975817
  hyper

SEQ ID NO: 414652 - DNA, 35 bp, Homo sapiens; identical to SEQ ID NO: 277802
  chr1:975907-975942
  hyper

SEQ ID NO: 414653 - DNA, 51 bp, Homo sapiens; identical to SEQ ID NO: 226566
  chr1:976153-976204
  hyper

SEQ ID NO: 414654 - DNA, 61 bp, Homo sapiens; identical to SEQ ID NO: 221176
  chr1:994999-995060
  hyper

SEQ ID NO: 414655 - DNA, 112 bp, Homo sapiens; identical to SEQ ID NO: 226568
  chr1:1004072-1004184
  hyper

SEQ ID NO: 414656 - DNA, 79 bp, Homo sapiens; identical to SEQ ID NO: 197237
  chr1:1014973-1015052
  hyper

SEQ ID NO: 414657 - DNA, 130 bp, Homo sapiens; identical to SEQ ID NO: 221177
  chr1:1052182-1052312
  hyper

SEQ ID NO: 414658 - DNA, 156 bp, Homo sapiens; identical to SEQ ID NO: 197238
  chr1:1072536-1072692
  hyper

SEQ ID NO: 414659 - DNA, 268 bp, Homo sapiens; identical to SEQ ID NO: 226571
  chr1:1334561-1334829
  hyper

SEQ ID NO: 414660 - DNA, 71 bp, Homo sapiens; identical to SEQ ID NO: 197239
  chr1:1510423-1510494
  hyper

SEQ ID NO: 414661 - DNA, 54 bp, Homo sapiens; identical to SEQ ID NO: 34876
  chr1:1510559-1510613
  hyper

SEQ ID NO: 414662 - DNA, 76 bp, Homo sapiens; identical to SEQ ID NO: 197241
  chr1:1535610-1535686
  hyper

SEQ ID NO: 414663 - DNA, 136 bp, Homo sapiens; identical to SEQ ID NO: 197242
  chr1:1550765-1550901
  hyper

SEQ ID NO: 414664 - DNA, 37 bp, Homo sapiens
  chr1:1713537-1713574
  hyper
cacagagaggccaagtaacttgctcaaggtcacccag

SEQ ID NO: 414665 - DNA, 238 bp, Homo sapiens; identical to SEQ ID NO: 277822
  chr1:1737718-1737956
  hyper

SEQ ID NO: 414666 - DNA, 44 bp, Homo sapiens; identical to SEQ ID NO: 197244
  chr1:1747214-1747258
  hyper

SEQ ID NO: 414667 - DNA, 143 bp, Homo sapiens; identical to SEQ ID NO: 197245
  chr1:1850719-1850862
  hyper

SEQ ID NO: 414668 - DNA, 222 bp, Homo sapiens; identical to SEQ ID NO: 102341
  chr1:1850928-1851150
  hyper

SEQ ID NO: 414669 - DNA, 82 bp, Homo sapiens; identical to SEQ ID NO: 226582
  chr1:1976105-1976187
  hyper

SEQ ID NO: 414670 - DNA, 66 bp, Homo sapiens; identical to SEQ ID NO: 226583
  chr1:2078513-2078579
  hyper

SEQ ID NO: 414671 - DNA, 114 bp, Homo sapiens; identical to SEQ ID NO: 277832
  chr1:2135930-2136044
  hyper

SEQ ID NO: 414672 - DNA, 251 bp, Homo sapiens; identical to SEQ ID NO: 277833
  chr1:2136088-2136339
  hyper

SEQ ID NO: 414673 - DNA, 49 bp, Homo sapiens; identical to SEQ ID NO: 277834
  chr1:2137068-2137117
  hyper

SEQ ID NO: 414674 - DNA, 154 bp, Homo sapiens; identical to SEQ ID NO: 226586
  chr1:2158901-2159055
  hyper

SEQ ID NO: 414675 - DNA, 109 bp, Homo sapiens; identical to SEQ ID NO: 197250
  chr1:2165786-2165895
  hyper

SEQ ID NO: 414676 - DNA, 171 bp, Homo sapiens; identical to SEQ ID NO: 197251
  chr1:2165999-2166170
  hyper

SEQ ID NO: 414677 - DNA, 223 bp, Homo sapiens; identical to SEQ ID NO: 226588
  chr1:2345880-2346103
  hyper

SEQ ID NO: 414678 - DNA, 373 bp, Homo sapiens; identical to SEQ ID NO: 197252
  chr1:2457940-2458313
  hyper

SEQ ID NO: 414679 - DNA, 71 bp, Homo sapiens; identical to SEQ ID NO: 197256
  chr1:2477791-2477862
  hyper

SEQ ID NO: 414680 - DNA, 116 bp, Homo sapiens; identical to SEQ ID NO: 197257
  chr1:2517411-2517527
  hyper

SEQ ID NO: 414681 - DNA, 399 bp, Homo sapiens; identical to SEQ ID NO: 277845
  chr1:2559942-2560341
  hyper

SEQ ID NO: 414682 - DNA, 778 bp, Homo sapiens; identical to SEQ ID NO: 226598
  chr1:2574028-2574806
  hyper

SEQ ID NO: 414683 - DNA, 427 bp, Homo sapiens; identical to SEQ ID NO: 226600
  chr1:2780349-2780776
  hyper

SEQ ID NO: 414684 - DNA, 316 bp, Homo sapiens; identical to SEQ ID NO: 197259
  chr1:2984307-2984623
  hyper

SEQ ID NO: 414685 - DNA, 570 bp, Homo sapiens; identical to SEQ ID NO: 277849
  chr1:2985452-2986022
  hyper

SEQ ID NO: 414686 - DNA, 39 bp, Homo sapiens; identical to SEQ ID NO: 277850
  chr1:2986307-2986346
  hyper

SEQ ID NO: 414687 - DNA, 56 bp, Homo sapiens; identical to SEQ ID NO: 34924
  chr1:2987628-2987684
  hyper

SEQ ID NO: 414688 - DNA, 207 bp, Homo sapiens; identical to SEQ ID NO: 277852
  chr1:3087394-3087601
  hyper

SEQ ID NO: 414689 - DNA, 219 bp, Homo sapiens; identical to SEQ ID NO: 277853
  chr1:3087723-3087942
  hyper

SEQ ID NO: 414690 - DNA, 341 bp, Homo sapiens; identical to SEQ ID NO: 221196
  chr1:3370921-3371262
  hyper

SEQ ID NO: 414691 - DNA, 38 bp, Homo sapiens; identical to SEQ ID NO: 226609
  chr1:3371631-3371669
  hyper

SEQ ID NO: 414692 - DNA, 523 bp, Homo sapiens; identical to SEQ ID NO: 197262
  chr1:3447461-3447984
  hyper

SEQ ID NO: 414693 - DNA, 35 bp, Homo sapiens; identical to SEQ ID NO: 197263
  chr1:3448359-3448394
  hyper

SEQ ID NO: 414694 - DNA, 100 bp, Homo sapiens; identical to SEQ ID NO: 277859
  chr1:3527613-3527713
  hyper

SEQ ID NO: 414695 - DNA, 139 bp, Homo sapiens; identical to SEQ ID NO: 102392
  chr1:3528466-3528605
  hyper

SEQ ID NO: 414696 - DNA, 48 bp, Homo sapiens; identical to SEQ ID NO: 197265
  chr1:3540867-3540915
  hyper

SEQ ID NO: 414697 - DNA, 280 bp, Homo sapiens; identical to SEQ ID NO: 226616
  chr1:3541173-3541453
  hyper

SEQ ID NO: 414698 - DNA, 97 bp, Homo sapiens; identical to SEQ ID NO: 226617
  chr1:3566687-3566784
  hyper

SEQ ID NO: 414699 - DNA, 173 bp, Homo sapiens; identical to SEQ ID NO: 226621
  chr1:3712496-3712669
  hyper

SEQ ID NO: 414700 - DNA, 144 bp, Homo sapiens; identical to SEQ ID NO: 197269
  chr1:3713029-3713173
  hyper

SEQ ID NO: 414701 - DNA, 179 bp, Homo sapiens; identical to SEQ ID NO: 226623
  chr1:3773152-3773331
  hyper

SEQ ID NO: 414702 - DNA, 159 bp, Homo sapiens; identical to SEQ ID NO: 226624
  chr1:3773814-3773973
  hyper

SEQ ID NO: 414703 - DNA, 191 bp, Homo sapiens; identical to SEQ ID NO: 226625
  chr1:3816433-3816624
  hyper

SEQ ID NO: 414704 - DNA, 225 bp, Homo sapiens; identical to SEQ ID NO: 226626
  chr1:3816828-3817053
  hyper

SEQ ID NO: 414705 - DNA, 304 bp, Homo sapiens; identical to SEQ ID NO: 277872
  chr1:3817790-3818094
  hyper

SEQ ID NO: 414706 - DNA, 137 bp, Homo sapiens; identical to SEQ ID NO: 226631
  chr1:5907431-5907568
  hyper

SEQ ID NO: 414707 - DNA, 144 bp, Homo sapiens; identical to SEQ ID NO: 197272
  chr1:6052048-6052192
  hyper

SEQ ID NO: 414708 - DNA, 111 bp, Homo sapiens; identical to SEQ ID NO: 277877
  chr1:6053655-6053766
  hyper

SEQ ID NO: 414709 - DNA, 83 bp, Homo sapiens; identical to SEQ ID NO: 197275
  chr1:6137223-6137306
  hyper

SEQ ID NO: 414710 - DNA, 179 bp, Homo sapiens; identical to SEQ ID NO: 277881
  chr1:6208937-6209116
  hyper

SEQ ID NO: 414711 - DNA, 210 bp, Homo sapiens; identical to SEQ ID NO: 277882
  chr1:6240062-6240272
  hyper

SEQ ID NO: 414712 - DNA, 222 bp, Homo sapiens; identical to SEQ ID NO: 226637
  chr1:6259131-6259353
  hyper

SEQ ID NO: 414713 - DNA, 37 bp, Homo sapiens
  chr1:6265512-6265549
  hyper
gggggtagggggtggggtttggactcttttttttttt

SEQ ID NO: 414714 - DNA, 161 bp, Homo sapiens; identical to SEQ ID NO: 197279
  chr1:6296163-6296324
  hyper

SEQ ID NO: 414715 - DNA, 215 bp, Homo sapiens; identical to SEQ ID NO: 197280
  chr1:6321178-6321393
  hyper

SEQ ID NO: 414716 - DNA, 236 bp, Homo sapiens; identical to SEQ ID NO: 226644
  chr1:6453981-6454217
  hyper

SEQ ID NO: 414717 - DNA, 232 bp, Homo sapiens; identical to SEQ ID NO: 277894
  chr1:6479023-6479255
  hyper

SEQ ID NO: 414718 - DNA, 478 bp, Homo sapiens; identical to SEQ ID NO: 277895
  chr1:6479314-6479792
  hyper

SEQ ID NO: 414719 - DNA, 110 bp, Homo sapiens; identical to SEQ ID NO: 226648
  chr1:6483912-6484022
  hyper

SEQ ID NO: 414720 - DNA, 329 bp, Homo sapiens; identical to SEQ ID NO: 277898
  chr1:6484602-6484931
  hyper

SEQ ID NO: 414721 - DNA, 138 bp, Homo sapiens; identical to SEQ ID NO: 102452
  chr1:6526181-6526319
  hyper

SEQ ID NO: 414722 - DNA, 217 bp, Homo sapiens; identical to SEQ ID NO: 226658
  chr1:6614573-6614790
  hyper

SEQ ID NO: 414723 - DNA, 194 bp, Homo sapiens; identical to SEQ ID NO: 221214
  chr1:6659237-6659431
  hyper

SEQ ID NO: 414724 - DNA, 163 bp, Homo sapiens; identical to SEQ ID NO: 197288
  chr1:6663518-6663681
  hyper

SEQ ID NO: 414725 - DNA, 470 bp, Homo sapiens; identical to SEQ ID NO: 277908
  chr1:6675268-6675738
  hyper

SEQ ID NO: 414726 - DNA, 222 bp, Homo sapiens; identical to SEQ ID NO: 226661
  chr1:6845233-6845455
  hyper

SEQ ID NO: 414727 - DNA, 178 bp, Homo sapiens; identical to SEQ ID NO: 226662
  chr1:7022452-7022630
  hyper

SEQ ID NO: 414728 - DNA, 34 bp, Homo sapiens; identical to SEQ ID NO: 277911
  chr1:7764522-7764556
  hyper

SEQ ID NO: 414729 - DNA, 42 bp, Homo sapiens; identical to SEQ ID NO: 277912
  chr1:7764737-7764779
  hyper

SEQ ID NO: 414730 - DNA, 133 bp, Homo sapiens; identical to SEQ ID NO: 197289
  chr1:7831038-7831171
  hyper

SEQ ID NO: 414731 - DNA, 40 bp, Homo sapiens; identical to SEQ ID NO: 197291
  chr1:7843653-7843693
  hyper

SEQ ID NO: 414732 - DNA, 390 bp, Homo sapiens; identical to SEQ ID NO: 226667
  chr1:8021446-8021836
  hyper

SEQ ID NO: 414733 - DNA, 136 bp, Homo sapiens; identical to SEQ ID NO: 226671
  chr1:8484296-8484432
  hyper

SEQ ID NO: 414734 - DNA, 69 bp, Homo sapiens; identical to SEQ ID NO: 277924
  chr1:8762992-8763061
  hyper

SEQ ID NO: 414735 - DNA, 81 bp, Homo sapiens; identical to SEQ ID NO: 226672
  chr1:8878159-8878240
  hyper

SEQ ID NO: 414736 - DNA, 255 bp, Homo sapiens; identical to SEQ ID NO: 197297
  chr1:9188651-9188906
  hyper

SEQ ID NO: 414737 - DNA, 279 bp, Homo sapiens; identical to SEQ ID NO: 35016
  chr1:9188943-9189222
  hyper

SEQ ID NO: 414738 - DNA, 125 bp, Homo sapiens; identical to SEQ ID NO: 226674
  chr1:9241459-9241584
  hyper

SEQ ID NO: 414739 - DNA, 189 bp, Homo sapiens; identical to SEQ ID NO: 197299
  chr1:9352965-9353154
  hyper

SEQ ID NO: 414740 - DNA, 68 bp, Homo sapiens; identical to SEQ ID NO: 197300
  chr1:9353809-9353877
  hyper

SEQ ID NO: 414741 - DNA, 165 bp, Homo sapiens; identical to SEQ ID NO: 197301
  chr1:9489050-9489215
  hyper

SEQ ID NO: 414742 - DNA, 47 bp, Homo sapiens; identical to SEQ ID NO: 226675
  chr1:9599387-9599434
  hyper

SEQ ID NO: 414743 - DNA, 116 bp, Homo sapiens; identical to SEQ ID NO: 197302
  chr1:9600331-9600447
  hyper

SEQ ID NO: 414744 - DNA, 189 bp, Homo sapiens; identical to SEQ ID NO: 226677
  chr1:9689875-9690064
  hyper

SEQ ID NO: 414745 - DNA, 55 bp, Homo sapiens; identical to SEQ ID NO: 226681
  chr1:9970619-9970674
  hyper

SEQ ID NO: 414746 - DNA, 255 bp, Homo sapiens; identical to SEQ ID NO: 226682
  chr1:10002705-10002960
  hyper

SEQ ID NO: 414747 - DNA, 141 bp, Homo sapiens; identical to SEQ ID NO: 226683
  chr1:10003446-10003587
  hyper

SEQ ID NO: 414748 - DNA, 258 bp, Homo sapiens; identical to SEQ ID NO: 226685
  chr1:10092996-10093254
  hyper

SEQ ID NO: 414749 - DNA, 175 bp, Homo sapiens; identical to SEQ ID NO: 197307
  chr1:10271266-10271441
  hyper

SEQ ID NO: 414750 - DNA, 78 bp, Homo sapiens; identical to SEQ ID NO: 226686
  chr1:10458989-10459067
  hyper

SEQ ID NO: 414751 - DNA, 348 bp, Homo sapiens; identical to SEQ ID NO: 226687
  chr1:10532553-10532901
  hyper

SEQ ID NO: 414752 - DNA, 227 bp, Homo sapiens; identical to SEQ ID NO: 226688
  chr1:10535373-10535600
  hyper

SEQ ID NO: 414753 - DNA, 502 bp, Homo sapiens; identical to SEQ ID NO: 197309
  chr1:10853673-10854175
  hyper

SEQ ID NO: 414754 - DNA, 830 bp, Homo sapiens
  chr1:10855047-10855877
  hyper
ggcccgccagctcccggcagtgctggcttcggaaagagagagaaagaacagaaagcaaaacttcctggcggccgacggccatcagctgcacattctgcaaatgccaccgagtaaaaataaaccggccgccgctccgcccgtccggctcaccccgggcgcacgaatcggccccctgccccgggagatccctgactcggtctggcccgatcccccattcccgcgcgccccctggatccccgctccccgacgctcctccgtcagtcaccacgctctcctttgccgttaagccggaccctaagtgaccgggaaaccggctctctccctttggtgttccctgcgcccccacaaactacttttttctctgtccttcaccaggtgcctatttcagccctgtgcccttggattcagggctcctcctccccaattgttgagctccgaggtcaccctcagcccaccctgggggaacagaccccgaccgaccctctcccacgctgcagagcccccccggagcgcaccactctaccagcccgctagcccgccagcccagcgtcccacgtccccgggcgcaacttctcttctggcgcacacaacagccggcaacaactcgcccgaactttccccgggacccaggcgggctccagccgacagccgggcagctctgggccgatgccccggctccccgtgccctgtgttgccagcccttcagctggggaggcagggggtggggtggggaagggagtgaggaacgccacttgccgcgcctggagcagcgcacttgagataaacttcccaggcacagatgaaaaagggggcgccgctccccccatcta

SEQ ID NO: 414755 - DNA, 612 bp, Homo sapiens; identical to SEQ ID NO: 197312
  chr1:10856315-10856927
  hyper

SEQ ID NO: 414756 - DNA, 316 bp, Homo sapiens; identical to SEQ ID NO: 226694
  chr1:11072441-11072757
  hyper

SEQ ID NO: 414757 - DNA, 137 bp, Homo sapiens; identical to SEQ ID NO: 226695
  chr1:11119506-11119643
  hyper

SEQ ID NO: 414758 - DNA, 116 bp, Homo sapiens; identical to SEQ ID NO: 197313
  chr1:11120532-11120648
  hyper

SEQ ID NO: 414759 - DNA, 353 bp, Homo sapiens; identical to SEQ ID NO: 226697
  chr1:11159755-11160108
  hyper

SEQ ID NO: 414760 - DNA, 397 bp, Homo sapiens; identical to SEQ ID NO: 226698
  chr1:11322517-11322914
  hyper

SEQ ID NO: 414761 - DNA, 58 bp, Homo sapiens; identical to SEQ ID NO: 226700
  chr1:11618432-11618490
  hyper

SEQ ID NO: 414762 - DNA, 35 bp, Homo sapiens; identical to SEQ ID NO: 197315
  chr1:11624042-11624077
  hyper

SEQ ID NO: 414763 - DNA, 258 bp, Homo sapiens; identical to SEQ ID NO: 226702
  chr1:11710537-11710795
  hyper

SEQ ID NO: 414764 - DNA, 79 bp, Homo sapiens; identical to SEQ ID NO: 197316
  chr1:11715183-11715262
  hyper

SEQ ID NO: 414765 - DNA, 115 bp, Homo sapiens; identical to SEQ ID NO: 197317
  chr1:11740565-11740680
  hyper

SEQ ID NO: 414766 - DNA, 37 bp, Homo sapiens; identical to SEQ ID NO: 197318
  chr1:11751778-11751815
  hyper

SEQ ID NO: 414767 - DNA, 154 bp, Homo sapiens; identical to SEQ ID NO: 226706
  chr1:11796158-11796312
  hyper

SEQ ID NO: 414768 - DNA, 325 bp, Homo sapiens; identical to SEQ ID NO: 226707
  chr1:11865775-11866100
  hyper

SEQ ID NO: 414769 - DNA, 178 bp, Homo sapiens; identical to SEQ ID NO: 197319
  chr1:11866366-11866544
  hyper

SEQ ID NO: 414770 - DNA, 231 bp, Homo sapiens; identical to SEQ ID NO: 226709
  chr1:11994683-11994914
  hyper

SEQ ID NO: 414771 - DNA, 234 bp, Homo sapiens; identical to SEQ ID NO: 226710
  chr1:12040194-12040428
  hyper

SEQ ID NO: 414772 - DNA, 132 bp, Homo sapiens; identical to SEQ ID NO: 102580
  chr1:12079273-12079405
  hyper

SEQ ID NO: 414773 - DNA, 304 bp, Homo sapiens; identical to SEQ ID NO: 197327
  chr1:12679083-12679387
  hyper

SEQ ID NO: 414774 - DNA, 161 bp, Homo sapiens; identical to SEQ ID NO: 197330
  chr1:14075414-14075575
  hyper

SEQ ID NO: 414775 - DNA, 31 bp, Homo sapiens; identical to SEQ ID NO: 226720
  chr1:14076277-14076308
  hyper

SEQ ID NO: 414776 - DNA, 48 bp, Homo sapiens; identical to SEQ ID NO: 197339
  chr1:15480892-15480940
  hyper

SEQ ID NO: 414777 - DNA, 199 bp, Homo sapiens; identical to SEQ ID NO: 277987
  chr1:15481065-15481264
  hyper

SEQ ID NO: 414778 - DNA, 70 bp, Homo sapiens; identical to SEQ ID NO: 226728
  chr1:15736985-15737055
  hyper

SEQ ID NO: 414779 - DNA, 302 bp, Homo sapiens; identical to SEQ ID NO: 226729
  chr1:15852991-15853293
  hyper

SEQ ID NO: 414780 - DNA, 151 bp, Homo sapiens; identical to SEQ ID NO: 277993
  chr1:15905373-15905524
  hyper

SEQ ID NO: 414781 - DNA, 75 bp, Homo sapiens; identical to SEQ ID NO: 277994
  chr1:15928914-15928989
  hyper

SEQ ID NO: 414782 - DNA, 208 bp, Homo sapiens; identical to SEQ ID NO: 277995
  chr1:15929019-15929227
  hyper

SEQ ID NO: 414783 - DNA, 163 bp, Homo sapiens; identical to SEQ ID NO: 226730
  chr1:16011276-16011439
  hyper

SEQ ID NO: 414784 - DNA, 45 bp, Homo sapiens; identical to SEQ ID NO: 226732
  chr1:16174336-16174381
  hyper

SEQ ID NO: 414785 - DNA, 216 bp, Homo sapiens; identical to SEQ ID NO: 226733
  chr1:16175858-16176074
  hyper

SEQ ID NO: 414786 - DNA, 233 bp, Homo sapiens; identical to SEQ ID NO: 226734
  chr1:16302447-16302680
  hyper

SEQ ID NO: 414787 - DNA, 212 bp, Homo sapiens; identical to SEQ ID NO: 226735
  chr1:16399670-16399882
  hyper

SEQ ID NO: 414788 - DNA, 1218 bp, Homo sapiens; identical to SEQ ID NO: 278002
  chr1:16481258-16482476
  hyper

SEQ ID NO: 414789 - DNA, 251 bp, Homo sapiens; identical to SEQ ID NO: 197343
  chr1:16482544-16482795
  hyper

SEQ ID NO: 414790 - DNA, 68 bp, Homo sapiens; identical to SEQ ID NO: 197344
  chr1:16514366-16514434
  hyper

SEQ ID NO: 414791 - DNA, 40 bp, Homo sapiens; identical to SEQ ID NO: 278005
  chr1:16542925-16542965
  hyper

SEQ ID NO: 414792 - DNA, 127 bp, Homo sapiens; identical to SEQ ID NO: 221244
  chr1:16558626-16558753
  hyper

SEQ ID NO: 414793 - DNA, 304 bp, Homo sapiens; identical to SEQ ID NO: 226740
  chr1:16563566-16563870
  hyper

SEQ ID NO: 414794 - DNA, 63 bp, Homo sapiens; identical to SEQ ID NO: 226741
  chr1:16679106-16679169
  hyper

SEQ ID NO: 414795 - DNA, 145 bp, Homo sapiens; identical to SEQ ID NO: 226742
  chr1:16693549-16693694
  hyper

SEQ ID NO: 414796 - DNA, 43 bp, Homo sapiens; identical to SEQ ID NO: 226743
  chr1:16766996-16767039
  hyper

SEQ ID NO: 414797 - DNA, 208 bp, Homo sapiens; identical to SEQ ID NO: 197347
  chr1:17591036-17591244
  hyper

SEQ ID NO: 414798 - DNA, 322 bp, Homo sapiens; identical to SEQ ID NO: 226746
  chr1:17766205-17766527
  hyper

SEQ ID NO: 414799 - DNA, 731 bp, Homo sapiens; identical to SEQ ID NO: 197348
  chr1:17865970-17866701
  hyper

SEQ ID NO: 414800 - DNA, 308 bp, Homo sapiens; identical to SEQ ID NO: 197351
  chr1:18435565-18435873
  hyper

SEQ ID NO: 414801 - DNA, 400 bp, Homo sapiens; identical to SEQ ID NO: 278020
  chr1:18958429-18958829
  hyper

SEQ ID NO: 414802 - DNA, 181 bp, Homo sapiens; identical to SEQ ID NO: 395301
  chr1:18964072-18964253
  hyper

SEQ ID NO: 414803 - DNA, 138 bp, Homo sapiens; identical to SEQ ID NO: 226760
  chr1:18965006-18965144
  hyper

SEQ ID NO: 414804 - DNA, 338 bp, Homo sapiens; identical to SEQ ID NO: 278024
  chr1:18966697-18967035
  hyper

SEQ ID NO: 414805 - DNA, 753 bp, Homo sapiens; identical to SEQ ID NO: 278025
  chr1:18967250-18968003
  hyper

SEQ ID NO: 414806 - DNA, 310 bp, Homo sapiens; identical to SEQ ID NO: 278026
  chr1:18968132-18968442
  hyper

SEQ ID NO: 414807 - DNA, 65 bp, Homo sapiens; identical to SEQ ID NO: 226765
  chr1:18969252-18969317
  hyper

SEQ ID NO: 414808 - DNA, 31 bp, Homo sapiens; identical to SEQ ID NO: 197359
  chr1:18972422-18972453
  hyper

SEQ ID NO: 414809 - DNA, 49 bp, Homo sapiens; identical to SEQ ID NO: 278031
  chr1:18972901-18972950
  hyper

SEQ ID NO: 414810 - DNA, 284 bp, Homo sapiens; identical to SEQ ID NO: 278032
  chr1:18973113-18973397
  hyper

SEQ ID NO: 414811 - DNA, 32 bp, Homo sapiens; identical to SEQ ID NO: 278033
  chr1:18978535-18978567
  hyper

SEQ ID NO: 414812 - DNA, 223 bp, Homo sapiens; identical to SEQ ID NO: 226772
  chr1:19229114-19229337
  hyper

SEQ ID NO: 414813 - DNA, 224 bp, Homo sapiens; identical to SEQ ID NO: 226773
  chr1:19229565-19229789
  hyper

SEQ ID NO: 414814 - DNA, 114 bp, Homo sapiens; identical to SEQ ID NO: 226775
  chr1:19536946-19537060
  hyper

SEQ ID NO: 414815 - DNA, 125 bp, Homo sapiens; identical to SEQ ID NO: 226776
  chr1:19577871-19577996
  hyper

SEQ ID NO: 414816 - DNA, 222 bp, Homo sapiens; identical to SEQ ID NO: 226777
  chr1:19578598-19578820
  hyper

SEQ ID NO: 414817 - DNA, 74 bp, Homo sapiens; identical to SEQ ID NO: 278041
  chr1:19600653-19600727
  hyper

SEQ ID NO: 414818 - DNA, 325 bp, Homo sapiens; identical to SEQ ID NO: 197362
  chr1:19639187-19639512
  hyper

SEQ ID NO: 414819 - DNA, 241 bp, Homo sapiens; identical to SEQ ID NO: 226779
  chr1:19812417-19812658
  hyper

SEQ ID NO: 414820 - DNA, 284 bp, Homo sapiens; identical to SEQ ID NO: 221254
  chr1:19991372-19991656
  hyper

SEQ ID NO: 414821 - DNA, 167 bp, Homo sapiens; identical to SEQ ID NO: 197363
  chr1:20002971-20003138
  hyper

SEQ ID NO: 414822 - DNA, 34 bp, Homo sapiens; identical to SEQ ID NO: 35179
  chr1:20692995-20693029
  hyper

SEQ ID NO: 414823 - DNA, 491 bp, Homo sapiens
  chr1:20811821-20812312
  hyper
gtcgccgtaggggctcagcttctcgtcgccgtagggcagcacctccgacatggtcgcgtccgggggctccgccgcggcgcctcctccgcccgcgtccccgcccgcggcggacagggtcagcggcgctggggccgggggcggccggccggggacggcccgcgggctgctgcggcggtggcgccggcgagaggccgggggacgccgctagggcaagagcgcggcactcgcgcgagcggcccggagagcgcccgcggctgcgctgcgctgcgctccggctccgcgcgcgagtggctgctgctccgccagaggcgagcaggactcacatcctcggcgcgctggggctctgggcgggggccgggccgggcggggccgcgagccgggagggaggagacgtccctgcgagcccggagggcgcgggaccgaggagggcgcaccccgggagccgggcgggccggtcctgcggcgagtgcgggcggcggcgccggttcggg

SEQ ID NO: 414824 - DNA, 140 bp, Homo sapiens; identical to SEQ ID NO: 197371
  chr1:20812696-20812836
  hyper

SEQ ID NO: 414825 - DNA, 147 bp, Homo sapiens; identical to SEQ ID NO: 278053
  chr1:20813050-20813197
  hyper

SEQ ID NO: 414826 - DNA, 173 bp, Homo sapiens; identical to SEQ ID NO: 35188
  chr1:20813270-20813443
  hyper

SEQ ID NO: 414827 - DNA, 178 bp, Homo sapiens; identical to SEQ ID NO: 197374
  chr1:20878727-20878905
  hyper

SEQ ID NO: 414828 - DNA, 77 bp, Homo sapiens; identical to SEQ ID NO: 197375
  chr1:20880637-20880714
  hyper

SEQ ID NO: 414829 - DNA, 300 bp, Homo sapiens; identical to SEQ ID NO: 278057
  chr1:20915863-20916163
  hyper

SEQ ID NO: 414830 - DNA, 147 bp, Homo sapiens; identical to SEQ ID NO: 278058
  chr1:20916256-20916403
  hyper

SEQ ID NO: 414831 - DNA, 92 bp, Homo sapiens; identical to SEQ ID NO: 197376
  chr1:20959849-20959941
  hyper

SEQ ID NO: 414832 - DNA, 408 bp, Homo sapiens; identical to SEQ ID NO: 197377
  chr1:20987844-20988252
  hyper

SEQ ID NO: 414833 - DNA, 179 bp, Homo sapiens; identical to SEQ ID NO: 226795
  chr1:21044550-21044729
  hyper

SEQ ID NO: 414834 - DNA, 56 bp, Homo sapiens; identical to SEQ ID NO: 278062
  chr1:21058207-21058263
  hyper

SEQ ID NO: 414835 - DNA, 218 bp, Homo sapiens; identical to SEQ ID NO: 278063
  chr1:21058417-21058635
  hyper

SEQ ID NO: 414836 - DNA, 573 bp, Homo sapiens; identical to SEQ ID NO: 278064
  chr1:21058776-21059349
  hyper

SEQ ID NO: 414837 - DNA, 265 bp, Homo sapiens; identical to SEQ ID NO: 226798
  chr1:21503350-21503615
  hyper

SEQ ID NO: 414838 - DNA, 94 bp, Homo sapiens; identical to SEQ ID NO: 226799
  chr1:21672239-21672333
  hyper

SEQ ID NO: 414839 - DNA, 50 bp, Homo sapiens; identical to SEQ ID NO: 197380
  chr1:22263555-22263605
  hyper

SEQ ID NO: 414840 - DNA, 101 bp, Homo sapiens; identical to SEQ ID NO: 226804
  chr1:22350998-22351099
  hyper

SEQ ID NO: 414841 - DNA, 45 bp, Homo sapiens; identical to SEQ ID NO: 226806
  chr1:22469043-22469088
  hyper

SEQ ID NO: 414842 - DNA, 168 bp, Homo sapiens; identical to SEQ ID NO: 226807
  chr1:22746912-22747080
  hyper

SEQ ID NO: 414843 - DNA, 575 bp, Homo sapiens; identical to SEQ ID NO: 278075
  chr1:23036966-23037541
  hyper

SEQ ID NO: 414844 - DNA, 582 bp, Homo sapiens; identical to SEQ ID NO: 278076
  chr1:23037595-23038177
  hyper

SEQ ID NO: 414845 - DNA, 108 bp, Homo sapiens; identical to SEQ ID NO: 197382
  chr1:23038250-23038358
  hyper

SEQ ID NO: 414846 - DNA, 48 bp, Homo sapiens; identical to SEQ ID NO: 278078
  chr1:23280132-23280180
  hyper

SEQ ID NO: 414847 - DNA, 169 bp, Homo sapiens; identical to SEQ ID NO: 102782
  chr1:23280211-23280380
  hyper

SEQ ID NO: 414848 - DNA, 135 bp, Homo sapiens; identical to SEQ ID NO: 197383
  chr1:23345695-23345830
  hyper

SEQ ID NO: 414849 - DNA, 181 bp, Homo sapiens; identical to SEQ ID NO: 197384
  chr1:23346189-23346370
  hyper

SEQ ID NO: 414850 - DNA, 167 bp, Homo sapiens; identical to SEQ ID NO: 197385
  chr1:23495361-23495528
  hyper

SEQ ID NO: 414851 - DNA, 149 bp, Homo sapiens; identical to SEQ ID NO: 278083
  chr1:23543645-23543794
  hyper

SEQ ID NO: 414852 - DNA, 52 bp, Homo sapiens; identical to SEQ ID NO: 35231
  chr1:23543840-23543892
  hyper

SEQ ID NO: 414853 - DNA, 145 bp, Homo sapiens; identical to SEQ ID NO: 226815
  chr1:23670873-23671018
  hyper

SEQ ID NO: 414854 - DNA, 257 bp, Homo sapiens; identical to SEQ ID NO: 226816
  chr1:23694766-23695023
  hyper

SEQ ID NO: 414855 - DNA, 212 bp, Homo sapiens; identical to SEQ ID NO: 226817
  chr1:23695333-23695545
  hyper

SEQ ID NO: 414856 - DNA, 233 bp, Homo sapiens; identical to SEQ ID NO: 226818
  chr1:23696195-23696428
  hyper

SEQ ID NO: 414857 - DNA, 62 bp, Homo sapiens; identical to SEQ ID NO: 226820
  chr1:23857274-23857336
  hyper

SEQ ID NO: 414858 - DNA, 197 bp, Homo sapiens; identical to SEQ ID NO: 197388
  chr1:23857853-23858050
  hyper

SEQ ID NO: 414859 - DNA, 70 bp, Homo sapiens; identical to SEQ ID NO: 226823
  chr1:23889004-23889074
  hyper

SEQ ID NO: 414860 - DNA, 82 bp, Homo sapiens; identical to SEQ ID NO: 226824
  chr1:24018073-24018155
  hyper

SEQ ID NO: 414861 - DNA, 203 bp, Homo sapiens; identical to SEQ ID NO: 226825
  chr1:24069635-24069838
  hyper

SEQ ID NO: 414862 - DNA, 95 bp, Homo sapiens; identical to SEQ ID NO: 226826
  chr1:24117384-24117479
  hyper

SEQ ID NO: 414863 - DNA, 238 bp, Homo sapiens; identical to SEQ ID NO: 226829
  chr1:24194293-24194531
  hyper

SEQ ID NO: 414864 - DNA, 268 bp, Homo sapiens; identical to SEQ ID NO: 278101
  chr1:24229167-24229435
  hyper

SEQ ID NO: 414865 - DNA, 206 bp, Homo sapiens; identical to SEQ ID NO: 226830
  chr1:24477069-24477275
  hyper

SEQ ID NO: 414866 - DNA, 228 bp, Homo sapiens; identical to SEQ ID NO: 226831
  chr1:24513459-24513687
  hyper

SEQ ID NO: 414867 - DNA, 94 bp, Homo sapiens; identical to SEQ ID NO: 226836
  chr1:24969452-24969546
  hyper

SEQ ID NO: 414868 - DNA, 172 bp, Homo sapiens; identical to SEQ ID NO: 226837
  chr1:24969956-24970128
  hyper

SEQ ID NO: 414869 - DNA, 338 bp, Homo sapiens; identical to SEQ ID NO: 226838
  chr1:25071297-25071635
  hyper

SEQ ID NO: 414870 - DNA, 100 bp, Homo sapiens; identical to SEQ ID NO: 278112
  chr1:25258918-25259018
  hyper

SEQ ID NO: 414871 - DNA, 267 bp, Homo sapiens; identical to SEQ ID NO: 226841
  chr1:25559010-25559277
  hyper

SEQ ID NO: 414872 - DNA, 247 bp, Homo sapiens; identical to SEQ ID NO: 226842
  chr1:25757172-25757419
  hyper

SEQ ID NO: 414873 - DNA, 383 bp, Homo sapiens; identical to SEQ ID NO: 226843
  chr1:25869923-25870306
  hyper

SEQ ID NO: 414874 - DNA, 168 bp, Homo sapiens; identical to SEQ ID NO: 197396
  chr1:25870618-25870786
  hyper

SEQ ID NO: 414875 - DNA, 51 bp, Homo sapiens; identical to SEQ ID NO: 226844
  chr1:26147238-26147289
  hyper

SEQ ID NO: 414876 - DNA, 288 bp, Homo sapiens; identical to SEQ ID NO: 226845
  chr1:26185983-26186271
  hyper

SEQ ID NO: 414877 - DNA, 162 bp, Homo sapiens; identical to SEQ ID NO: 226846
  chr1:26202123-26202285
  hyper

SEQ ID NO: 414878 - DNA, 194 bp, Homo sapiens; identical to SEQ ID NO: 197397
  chr1:26232692-26232886
  hyper

SEQ ID NO: 414879 - DNA, 72 bp, Homo sapiens; identical to SEQ ID NO: 197398
  chr1:26248952-26249024
  hyper

SEQ ID NO: 414880 - DNA, 209 bp, Homo sapiens; identical to SEQ ID NO: 197399
  chr1:26249626-26249835
  hyper

SEQ ID NO: 414881 - DNA, 404 bp, Homo sapiens; identical to SEQ ID NO: 226849
  chr1:26324434-26324838
  hyper

SEQ ID NO: 414882 - DNA, 124 bp, Homo sapiens
  chr1:26372864-26372988
  hyper
gccccctctcccgcgcggggtgcgccgcctcgccgccgaaaagttctcgactttagtttgtagaaatccgctttggtggtcccgacggcaggaatgtggctccttgcctcggaagagggtctcc

SEQ ID NO: 414883 - DNA, 48 bp, Homo sapiens; identical to SEQ ID NO: 278126
  chr1:26373101-26373149
  hyper

SEQ ID NO: 414884 - DNA, 91 bp, Homo sapiens; identical to SEQ ID NO: 197400
  chr1:26560289-26560380
  hyper

SEQ ID NO: 414885 - DNA, 216 bp, Homo sapiens; identical to SEQ ID NO: 226853
  chr1:26633064-26633280
  hyper

SEQ ID NO: 414886 - DNA, 308 bp, Homo sapiens; identical to SEQ ID NO: 197402
  chr1:26735283-26735591
  hyper

SEQ ID NO: 414887 - DNA, 41 bp, Homo sapiens; identical to SEQ ID NO: 278131
  chr1:26735987-26736028
  hyper

SEQ ID NO: 414888 - DNA, 79 bp, Homo sapiens; identical to SEQ ID NO: 278132
  chr1:26737102-26737181
  hyper

SEQ ID NO: 414889 - DNA, 413 bp, Homo sapiens; identical to SEQ ID NO: 226858
  chr1:26758410-26758823
  hyper

SEQ ID NO: 414890 - DNA, 253 bp, Homo sapiens; identical to SEQ ID NO: 226859
  chr1:26798709-26798962
  hyper

SEQ ID NO: 414891 - DNA, 106 bp, Homo sapiens; identical to SEQ ID NO: 197405
  chr1:26855980-26856086
  hyper

SEQ ID NO: 414892 - DNA, 152 bp, Homo sapiens; identical to SEQ ID NO: 226860
  chr1:26947306-26947458
  hyper

SEQ ID NO: 414893 - DNA, 99 bp, Homo sapiens; identical to SEQ ID NO: 226862
  chr1:27114661-27114760
  hyper

SEQ ID NO: 414894 - DNA, 57 bp, Homo sapiens; identical to SEQ ID NO: 226863
  chr1:27226966-27227023
  hyper

SEQ ID NO: 414895 - DNA, 143 bp, Homo sapiens; identical to SEQ ID NO: 226864
  chr1:27247998-27248141
  hyper

SEQ ID NO: 414896 - DNA, 125 bp, Homo sapiens; identical to SEQ ID NO: 197408
  chr1:27286497-27286622
  hyper

SEQ ID NO: 414897 - DNA, 33 bp, Homo sapiens; identical to SEQ ID NO: 197409
  chr1:27320114-27320147
  hyper

SEQ ID NO: 414898 - DNA, 120 bp, Homo sapiens; identical to SEQ ID NO: 226866
  chr1:27321040-27321160
  hyper

SEQ ID NO: 414899 - DNA, 164 bp, Homo sapiens; identical to SEQ ID NO: 226867
  chr1:27560696-27560860
  hyper

SEQ ID NO: 414900 - DNA, 372 bp, Homo sapiens; identical to SEQ ID NO: 278147
  chr1:27718844-27719216
  hyper

SEQ ID NO: 414901 - DNA, 81 bp, Homo sapiens; identical to SEQ ID NO: 197411
  chr1:27816286-27816367
  hyper

SEQ ID NO: 414902 - DNA, 129 bp, Homo sapiens; identical to SEQ ID NO: 197412
  chr1:27816423-27816552
  hyper

SEQ ID NO: 414903 - DNA, 261 bp, Homo sapiens; identical to SEQ ID NO: 102924
  chr1:27816581-27816842
  hyper

SEQ ID NO: 414904 - DNA, 95 bp, Homo sapiens; identical to SEQ ID NO: 197415
  chr1:27928761-27928856
  hyper

SEQ ID NO: 414905 - DNA, 279 bp, Homo sapiens; identical to SEQ ID NO: 278153
  chr1:27929078-27929357
  hyper

SEQ ID NO: 414906 - DNA, 184 bp, Homo sapiens; identical to SEQ ID NO: 278155
  chr1:27961554-27961738
  hyper

SEQ ID NO: 414907 - DNA, 86 bp, Homo sapiens; identical to SEQ ID NO: 102936
  chr1:27961831-27961917
  hyper

SEQ ID NO: 414908 - DNA, 183 bp, Homo sapiens; identical to SEQ ID NO: 197418
  chr1:27986361-27986544
  hyper

SEQ ID NO: 414909 - DNA, 49 bp, Homo sapiens; identical to SEQ ID NO: 226875
  chr1:28099536-28099585
  hyper

SEQ ID NO: 414910 - DNA, 97 bp, Homo sapiens; identical to SEQ ID NO: 226876
  chr1:28157658-28157755
  hyper

SEQ ID NO: 414911 - DNA, 296 bp, Homo sapiens; identical to SEQ ID NO: 226878
  chr1:28241265-28241561
  hyper

SEQ ID NO: 414912 - DNA, 183 bp, Homo sapiens; identical to SEQ ID NO: 226879
  chr1:28261538-28261721
  hyper

SEQ ID NO: 414913 - DNA, 143 bp, Homo sapiens; identical to SEQ ID NO: 197421
  chr1:28414990-28415133
  hyper

SEQ ID NO: 414914 - DNA, 242 bp, Homo sapiens; identical to SEQ ID NO: 226882
  chr1:28562656-28562898
  hyper

SEQ ID NO: 414915 - DNA, 216 bp, Homo sapiens; identical to SEQ ID NO: 278166
  chr1:28586719-28586935
  hyper

SEQ ID NO: 414916 - DNA, 280 bp, Homo sapiens; identical to SEQ ID NO: 102957
  chr1:28586972-28587252
  hyper

SEQ ID NO: 414917 - DNA, 273 bp, Homo sapiens; identical to SEQ ID NO: 226884
  chr1:28833050-28833323
  hyper

SEQ ID NO: 414918 - DNA, 130 bp, Homo sapiens; identical to SEQ ID NO: 226885
  chr1:28844465-28844595
  hyper

SEQ ID NO: 414919 - DNA, 164 bp, Homo sapiens; identical to SEQ ID NO: 226886
  chr1:28879232-28879396
  hyper

SEQ ID NO: 414920 - DNA, 340 bp, Homo sapiens; identical to SEQ ID NO: 278171
  chr1:28879651-28879991
  hyper

SEQ ID NO: 414921 - DNA, 397 bp, Homo sapiens; identical to SEQ ID NO: 226888
  chr1:28908623-28909020
  hyper

SEQ ID NO: 414922 - DNA, 80 bp, Homo sapiens; identical to SEQ ID NO: 278173
  chr1:28919321-28919401
  hyper

SEQ ID NO: 414923 - DNA, 356 bp, Homo sapiens; identical to SEQ ID NO: 226889
  chr1:28969540-28969896
  hyper

SEQ ID NO: 414924 - DNA, 300 bp, Homo sapiens; identical to SEQ ID NO: 226890
  chr1:28974716-28975016
  hyper

SEQ ID NO: 414925 - DNA, 237 bp, Homo sapiens; identical to SEQ ID NO: 226891
  chr1:28994973-28995210
  hyper

SEQ ID NO: 414926 - DNA, 283 bp, Homo sapiens; identical to SEQ ID NO: 278177
  chr1:29062800-29063083
  hyper

SEQ ID NO: 414927 - DNA, 47 bp, Homo sapiens; identical to SEQ ID NO: 226892
  chr1:29063453-29063500
  hyper

SEQ ID NO: 414928 - DNA, 173 bp, Homo sapiens; identical to SEQ ID NO: 226893
  chr1:29213652-29213825
  hyper

SEQ ID NO: 414929 - DNA, 328 bp, Homo sapiens; identical to SEQ ID NO: 226894
  chr1:29241582-29241910
  hyper

SEQ ID NO: 414930 - DNA, 244 bp, Homo sapiens; identical to SEQ ID NO: 278181
  chr1:29448271-29448515
  hyper

SEQ ID NO: 414931 - DNA, 467 bp, Homo sapiens; identical to SEQ ID NO: 278182
  chr1:29448910-29449377
  hyper

SEQ ID NO: 414932 - DNA, 425 bp, Homo sapiens; identical to SEQ ID NO: 226898
  chr1:29557216-29557641
  hyper

SEQ ID NO: 414933 - DNA, 32 bp, Homo sapiens; identical to SEQ ID NO: 226899
  chr1:29563130-29563162
  hyper

SEQ ID NO: 414934 - DNA, 143 bp, Homo sapiens; identical to SEQ ID NO: 278185
  chr1:29564623-29564766
  hyper

SEQ ID NO: 414935 - DNA, 335 bp, Homo sapiens; identical to SEQ ID NO: 278186
  chr1:29564802-29565137
  hyper

SEQ ID NO: 414936 - DNA, 173 bp, Homo sapiens; identical to SEQ ID NO: 278188
  chr1:30559180-30559353
  hyper

SEQ ID NO: 414937 - DNA, 58 bp, Homo sapiens; identical to SEQ ID NO: 226904
  chr1:30559447-30559505
  hyper

SEQ ID NO: 414938 - DNA, 620 bp, Homo sapiens; identical to SEQ ID NO: 278192
  chr1:31191732-31192352
  hyper

SEQ ID NO: 414939 - DNA, 152 bp, Homo sapiens; identical to SEQ ID NO: 226908
  chr1:31380839-31380991
  hyper

SEQ ID NO: 414940 - DNA, 43 bp, Homo sapiens; identical to SEQ ID NO: 278194
  chr1:31538418-31538461
  hyper

SEQ ID NO: 414941 - DNA, 165 bp, Homo sapiens; identical to SEQ ID NO: 103003
  chr1:31538499-31538664
  hyper

SEQ ID NO: 414942 - DNA, 155 bp, Homo sapiens; identical to SEQ ID NO: 197429
  chr1:31769777-31769932
  hyper

SEQ ID NO: 414943 - DNA, 229 bp, Homo sapiens; identical to SEQ ID NO: 226912
  chr1:32083723-32083952
  hyper

SEQ ID NO: 414944 - DNA, 128 bp, Homo sapiens; identical to SEQ ID NO: 197431
  chr1:32110847-32110975
  hyper

SEQ ID NO: 414945 - DNA, 73 bp, Homo sapiens; identical to SEQ ID NO: 226918
  chr1:32480181-32480254
  hyper

SEQ ID NO: 414946 - DNA, 66 bp, Homo sapiens; identical to SEQ ID NO: 226919
  chr1:32573589-32573655
  hyper

SEQ ID NO: 414947 - DNA, 174 bp, Homo sapiens; identical to SEQ ID NO: 197435
  chr1:32574075-32574249
  hyper

SEQ ID NO: 414948 - DNA, 143 bp, Homo sapiens; identical to SEQ ID NO: 278208
  chr1:32666250-32666393
  hyper

SEQ ID NO: 414949 - DNA, 71 bp, Homo sapiens; identical to SEQ ID NO: 226921
  chr1:32671079-32671150
  hyper

SEQ ID NO: 414950 - DNA, 413 bp, Homo sapiens; identical to SEQ ID NO: 226922
  chr1:32687709-32688122
  hyper

SEQ ID NO: 414951 - DNA, 299 bp, Homo sapiens; identical to SEQ ID NO: 197437
  chr1:32757388-32757687
  hyper

SEQ ID NO: 414952 - DNA, 164 bp, Homo sapiens; identical to SEQ ID NO: 226924
  chr1:32758019-32758183
  hyper

SEQ ID NO: 414953 - DNA, 101 bp, Homo sapiens; identical to SEQ ID NO: 197438
  chr1:32852880-32852981
  hyper

SEQ ID NO: 414954 - DNA, 167 bp, Homo sapiens; identical to SEQ ID NO: 197441
  chr1:32931027-32931194
  hyper

SEQ ID NO: 414955 - DNA, 36 bp, Homo sapiens; identical to SEQ ID NO: 197442
  chr1:33005606-33005642
  hyper

SEQ ID NO: 414956 - DNA, 203 bp, Homo sapiens; identical to SEQ ID NO: 197443
  chr1:33116489-33116692
  hyper

SEQ ID NO: 414957 - DNA, 223 bp, Homo sapiens; identical to SEQ ID NO: 226928
  chr1:33168524-33168747
  hyper

SEQ ID NO: 414958 - DNA, 326 bp, Homo sapiens; identical to SEQ ID NO: 278221
  chr1:33207544-33207870
  hyper

SEQ ID NO: 414959 - DNA, 254 bp, Homo sapiens; identical to SEQ ID NO: 226931
  chr1:33282729-33282983
  hyper

SEQ ID NO: 414960 - DNA, 126 bp, Homo sapiens; identical to SEQ ID NO: 197448
  chr1:33283881-33284007
  hyper

SEQ ID NO: 414961 - DNA, 422 bp, Homo sapiens; identical to SEQ ID NO: 226934
  chr1:33430300-33430722
  hyper

SEQ ID NO: 414962 - DNA, 272 bp, Homo sapiens; identical to SEQ ID NO: 226936
  chr1:33502498-33502770
  hyper

SEQ ID NO: 414963 - DNA, 649 bp, Homo sapiens; identical to SEQ ID NO: 226937
  chr1:33592695-33593344
  hyper

SEQ ID NO: 414964 - DNA, 498 bp, Homo sapiens; identical to SEQ ID NO: 197450
  chr1:33721208-33721706
  hyper

SEQ ID NO: 414965 - DNA, 84 bp, Homo sapiens; identical to SEQ ID NO: 221303
  chr1:35260186-35260270
  hyper

SEQ ID NO: 414966 - DNA, 181 bp, Homo sapiens; identical to SEQ ID NO: 226953
  chr1:35497271-35497452
  hyper

SEQ ID NO: 414967 - DNA, 236 bp, Homo sapiens; identical to SEQ ID NO: 197457
  chr1:35544793-35545029
  hyper

SEQ ID NO: 414968 - DNA, 83 bp, Homo sapiens; identical to SEQ ID NO: 226955
  chr1:36023211-36023294
  hyper

SEQ ID NO: 414969 - DNA, 156 bp, Homo sapiens; identical to SEQ ID NO: 278247
  chr1:36173085-36173241
  hyper

SEQ ID NO: 414970 - DNA, 414 bp, Homo sapiens; identical to SEQ ID NO: 278248
  chr1:36173282-36173696
  hyper

SEQ ID NO: 414971 - DNA, 85 bp, Homo sapiens; identical to SEQ ID NO: 197459
  chr1:36235729-36235814
  hyper

SEQ ID NO: 414972 - DNA, 173 bp, Homo sapiens; identical to SEQ ID NO: 197460
  chr1:36615012-36615185
  hyper

SEQ ID NO: 414973 - DNA, 77 bp, Homo sapiens; identical to SEQ ID NO: 226959
  chr1:36690054-36690131
  hyper

SEQ ID NO: 414974 - DNA, 40 bp, Homo sapiens; identical to SEQ ID NO: 226960
  chr1:36789376-36789416
  hyper

SEQ ID NO: 414975 - DNA, 173 bp, Homo sapiens; identical to SEQ ID NO: 197461
  chr1:36863407-36863580
  hyper

SEQ ID NO: 414976 - DNA, 866 bp, Homo sapiens; identical to SEQ ID NO: 197462
  chr1:36931643-36932509
  hyper

SEQ ID NO: 414977 - DNA, 218 bp, Homo sapiens; identical to SEQ ID NO: 197463
  chr1:36933230-36933448
  hyper

SEQ ID NO: 414978 - DNA, 321 bp, Homo sapiens; identical to SEQ ID NO: 278257
  chr1:36936920-36937241
  hyper

SEQ ID NO: 414979 - DNA, 77 bp, Homo sapiens; identical to SEQ ID NO: 197465
  chr1:36937669-36937746
  hyper

SEQ ID NO: 414980 - DNA, 40 bp, Homo sapiens; identical to SEQ ID NO: 278259
  chr1:37501032-37501072
  hyper

SEQ ID NO: 414981 - DNA, 77 bp, Homo sapiens; identical to SEQ ID NO: 278260
  chr1:37501102-37501179
  hyper

SEQ ID NO: 414982 - DNA, 167 bp, Homo sapiens; identical to SEQ ID NO: 278261
  chr1:37501688-37501855
  hyper

SEQ ID NO: 414983 - DNA, 98 bp, Homo sapiens; identical to SEQ ID NO: 278262
  chr1:37501885-37501983
  hyper

SEQ ID NO: 414984 - DNA, 395 bp, Homo sapiens; identical to SEQ ID NO: 278264
  chr1:37940474-37940869
  hyper

SEQ ID NO: 414985 - DNA, 157 bp, Homo sapiens; identical to SEQ ID NO: 278265
  chr1:37980346-37980503
  hyper

SEQ ID NO: 414986 - DNA, 105 bp, Homo sapiens; identical to SEQ ID NO: 197468
  chr1:38019907-38020012
  hyper

SEQ ID NO: 414987 - DNA, 135 bp, Homo sapiens; identical to SEQ ID NO: 197469
  chr1:38061487-38061622
  hyper

SEQ ID NO: 414988 - DNA, 167 bp, Homo sapiens; identical to SEQ ID NO: 278268
  chr1:38100075-38100242
  hyper

SEQ ID NO: 414989 - DNA, 221 bp, Homo sapiens; identical to SEQ ID NO: 197470
  chr1:38100272-38100493
  hyper

SEQ ID NO: 414990 - DNA, 58 bp, Homo sapiens; identical to SEQ ID NO: 347
  chr1:38100533-38100591
  hyper

SEQ ID NO: 414991 - DNA, 256 bp, Homo sapiens; identical to SEQ ID NO: 226973
  chr1:38157954-38158210
  hyper

SEQ ID NO: 414992 - DNA, 71 bp, Homo sapiens; identical to SEQ ID NO: 226976
  chr1:38273328-38273399
  hyper

SEQ ID NO: 414993 - DNA, 98 bp, Homo sapiens; identical to SEQ ID NO: 221316
  chr1:38580185-38580283
  hyper

SEQ ID NO: 414994 - DNA, 367 bp, Homo sapiens; identical to SEQ ID NO: 278279
  chr1:39284066-39284433
  hyper

SEQ ID NO: 414995 - DNA, 205 bp, Homo sapiens; identical to SEQ ID NO: 197474
  chr1:39338990-39339195
  hyper

SEQ ID NO: 414996 - DNA, 127 bp, Homo sapiens; identical to SEQ ID NO: 226983
  chr1:39492081-39492208
  hyper

SEQ ID NO: 414997 - DNA, 95 bp, Homo sapiens; identical to SEQ ID NO: 226984
  chr1:39864297-39864392
  hyper

SEQ ID NO: 414998 - DNA, 42 bp, Homo sapiens; identical to SEQ ID NO: 197475
  chr1:39874199-39874241
  hyper

SEQ ID NO: 414999 - DNA, 45 bp, Homo sapiens; identical to SEQ ID NO: 226990
  chr1:40042402-40042447
  hyper

SEQ ID NO: 415000 - DNA, 183 bp, Homo sapiens; identical to SEQ ID NO: 226992
  chr1:40157111-40157294
  hyper

SEQ ID NO: 415001 - DNA, 344 bp, Homo sapiens; identical to SEQ ID NO: 278290
  chr1:40254463-40254807
  hyper

SEQ ID NO: 415002 - DNA, 121 bp, Homo sapiens; identical to SEQ ID NO: 278291
  chr1:40254922-40255043
  hyper

SEQ ID NO: 415003 - DNA, 35 bp, Homo sapiens; identical to SEQ ID NO: 278292
  chr1:40255068-40255103
  hyper

SEQ ID NO: 415004 - DNA, 81 bp, Homo sapiens; identical to SEQ ID NO: 278293
  chr1:40255104-40255185
  hyper

SEQ ID NO: 415005 - DNA, 280 bp, Homo sapiens; identical to SEQ ID NO: 278294
  chr1:40367951-40368231
  hyper

SEQ ID NO: 415006 - DNA, 31 bp, Homo sapiens; identical to SEQ ID NO: 221329
  chr1:40420568-40420599
  hyper

SEQ ID NO: 415007 - DNA, 122 bp, Homo sapiens; identical to SEQ ID NO: 221330
  chr1:40420932-40421054
  hyper

SEQ ID NO: 415008 - DNA, 53 bp, Homo sapiens; identical to SEQ ID NO: 226996
  chr1:40723946-40723999
  hyper

SEQ ID NO: 415009 - DNA, 46 bp, Homo sapiens; identical to SEQ ID NO: 226999
  chr1:41131456-41131502
  hyper

SEQ ID NO: 415010 - DNA, 239 bp, Homo sapiens; identical to SEQ ID NO: 197481
  chr1:41328054-41328293
  hyper

SEQ ID NO: 415011 - DNA, 146 bp, Homo sapiens; identical to SEQ ID NO: 278306
  chr1:41444974-41445120
  hyper

SEQ ID NO: 415012 - DNA, 35 bp, Homo sapiens; identical to SEQ ID NO: 197482
  chr1:41446124-41446159
  hyper

SEQ ID NO: 415013 - DNA, 56 bp, Homo sapiens; identical to SEQ ID NO: 395420
  chr1:41848754-41848810
  hyper

SEQ ID NO: 415014 - DNA, 37 bp, Homo sapiens; identical to SEQ ID NO: 197486
  chr1:41848840-41848877
  hyper

SEQ ID NO: 415015 - DNA, 306 bp, Homo sapiens; identical to SEQ ID NO: 197487
  chr1:41848976-41849282
  hyper

SEQ ID NO: 415016 - DNA, 494 bp, Homo sapiens; identical to SEQ ID NO: 197488
  chr1:41981667-41982161
  hyper

SEQ ID NO: 415017 - DNA, 163 bp, Homo sapiens; identical to SEQ ID NO: 227009
  chr1:42127233-42127396
  hyper

SEQ ID NO: 415018 - DNA, 48 bp, Homo sapiens; identical to SEQ ID NO: 227011
  chr1:42800266-42800314
  hyper

SEQ ID NO: 415019 - DNA, 456 bp, Homo sapiens; identical to SEQ ID NO: 197489
  chr1:42928782-42929238
  hyper

SEQ ID NO: 415020 - DNA, 472 bp, Homo sapiens; identical to SEQ ID NO: 103258
  chr1:43232901-43233373
  hyper

SEQ ID NO: 415021 - DNA, 79 bp, Homo sapiens; identical to SEQ ID NO: 227015
  chr1:43282586-43282665
  hyper

SEQ ID NO: 415022 - DNA, 62 bp, Homo sapiens; identical to SEQ ID NO: 227017
  chr1:43424613-43424675
  hyper

SEQ ID NO: 415023 - DNA, 124 bp, Homo sapiens; identical to SEQ ID NO: 278323
  chr1:43613349-43613473
  hyper

SEQ ID NO: 415024 - DNA, 531 bp, Homo sapiens; identical to SEQ ID NO: 227019
  chr1:43637578-43638109
  hyper

SEQ ID NO: 415025 - DNA, 43 bp, Homo sapiens; identical to SEQ ID NO: 197492
  chr1:43803509-43803552
  hyper

SEQ ID NO: 415026 - DNA, 208 bp, Homo sapiens; identical to SEQ ID NO: 197493
  chr1:43805020-43805228
  hyper

SEQ ID NO: 415027 - DNA, 67 bp, Homo sapiens; identical to SEQ ID NO: 197494
  chr1:43814927-43814994
  hyper

SEQ ID NO: 415028 - DNA, 268 bp, Homo sapiens; identical to SEQ ID NO: 197495
  chr1:43818177-43818445
  hyper

SEQ ID NO: 415029 - DNA, 154 bp, Homo sapiens; identical to SEQ ID NO: 197496
  chr1:43832812-43832966
  hyper

SEQ ID NO: 415030 - DNA, 45 bp, Homo sapiens; identical to SEQ ID NO: 227021
  chr1:43834166-43834211
  hyper

SEQ ID NO: 415031 - DNA, 211 bp, Homo sapiens; identical to SEQ ID NO: 227022
  chr1:43855424-43855635
  hyper

SEQ ID NO: 415032 - DNA, 287 bp, Homo sapiens; identical to SEQ ID NO: 197497
  chr1:43919241-43919528
  hyper

SEQ ID NO: 415033 - DNA, 119 bp, Homo sapiens; identical to SEQ ID NO: 391
  chr1:43919541-43919660
  hyper

SEQ ID NO: 415034 - DNA, 34 bp, Homo sapiens; identical to SEQ ID NO: 227024
  chr1:43996430-43996464
  hyper

SEQ ID NO: 415035 - DNA, 217 bp, Homo sapiens; identical to SEQ ID NO: 227025
  chr1:43997371-43997588
  hyper

SEQ ID NO: 415036 - DNA, 345 bp, Homo sapiens; identical to SEQ ID NO: 227026
  chr1:44015775-44016120
  hyper

SEQ ID NO: 415037 - DNA, 355 bp, Homo sapiens; identical to SEQ ID NO: 227027
  chr1:44115473-44115828
  hyper

SEQ ID NO: 415038 - DNA, 112 bp, Homo sapiens; identical to SEQ ID NO: 278338
  chr1:44402260-44402372
  hyper

SEQ ID NO: 415039 - DNA, 58 bp, Homo sapiens; identical to SEQ ID NO: 227028
  chr1:44411960-44412018
  hyper

SEQ ID NO: 415040 - DNA, 270 bp, Homo sapiens; identical to SEQ ID NO: 227029
  chr1:44412317-44412587
  hyper

SEQ ID NO: 415041 - DNA, 98 bp, Homo sapiens; identical to SEQ ID NO: 227030
  chr1:44435544-44435642
  hyper

SEQ ID NO: 415042 - DNA, 197 bp, Homo sapiens; identical to SEQ ID NO: 227031
  chr1:44441185-44441382
  hyper

SEQ ID NO: 415043 - DNA, 120 bp, Homo sapiens; identical to SEQ ID NO: 197500
  chr1:44444589-44444709
  hyper

SEQ ID NO: 415044 - DNA, 44 bp, Homo sapiens; identical to SEQ ID NO: 227032
  chr1:44445510-44445554
  hyper

SEQ ID NO: 415045 - DNA, 224 bp, Homo sapiens; identical to SEQ ID NO: 227033
  chr1:44457110-44457334
  hyper

SEQ ID NO: 415046 - DNA, 93 bp, Homo sapiens; identical to SEQ ID NO: 278346
  chr1:44870925-44871018
  hyper

SEQ ID NO: 415047 - DNA, 60 bp, Homo sapiens; identical to SEQ ID NO: 278347
  chr1:44871044-44871104
  hyper

SEQ ID NO: 415048 - DNA, 431 bp, Homo sapiens; identical to SEQ ID NO: 278348
  chr1:44871190-44871621
  hyper

SEQ ID NO: 415049 - DNA, 178 bp, Homo sapiens; identical to SEQ ID NO: 103310
  chr1:44874565-44874743
  hyper

SEQ ID NO: 415050 - DNA, 80 bp, Homo sapiens; identical to SEQ ID NO: 197507
  chr1:45139911-45139991
  hyper

SEQ ID NO: 415051 - DNA, 118 bp, Homo sapiens; identical to SEQ ID NO: 227042
  chr1:45140252-45140370
  hyper

SEQ ID NO: 415052 - DNA, 227 bp, Homo sapiens; identical to SEQ ID NO: 227046
  chr1:45477622-45477849
  hyper

SEQ ID NO: 415053 - DNA, 35 bp, Homo sapiens; identical to SEQ ID NO: 227047
  chr1:45671645-45671680
  hyper

SEQ ID NO: 415054 - DNA, 129 bp, Homo sapiens; identical to SEQ ID NO: 278361
  chr1:45792559-45792688
  hyper

SEQ ID NO: 415055 - DNA, 164 bp, Homo sapiens; identical to SEQ ID NO: 278362
  chr1:45792689-45792853
  hyper

SEQ ID NO: 415056 - DNA, 166 bp, Homo sapiens; identical to SEQ ID NO: 227049
  chr1:45805831-45805997
  hyper

SEQ ID NO: 415057 - DNA, 426 bp, Homo sapiens; identical to SEQ ID NO: 227050
  chr1:45956918-45957344
  hyper

SEQ ID NO: 415058 - DNA, 147 bp, Homo sapiens; identical to SEQ ID NO: 227051
  chr1:45965665-45965812
  hyper

SEQ ID NO: 415059 - DNA, 977 bp, Homo sapiens; identical to SEQ ID NO: 227052
  chr1:45986970-45987947
  hyper

SEQ ID NO: 415060 - DNA, 95 bp, Homo sapiens; identical to SEQ ID NO: 227053
  chr1:46152354-46152449
  hyper

SEQ ID NO: 415061 - DNA, 185 bp, Homo sapiens; identical to SEQ ID NO: 227054
  chr1:46153751-46153936
  hyper

SEQ ID NO: 415062 - DNA, 216 bp, Homo sapiens; identical to SEQ ID NO: 227055
  chr1:46216408-46216624
  hyper

SEQ ID NO: 415063 - DNA, 32 bp, Homo sapiens; identical to SEQ ID NO: 227056
  chr1:46269380-46269412
  hyper

SEQ ID NO: 415064 - DNA, 105 bp, Homo sapiens; identical to SEQ ID NO: 227057
  chr1:46598366-46598471
  hyper

SEQ ID NO: 415065 - DNA, 129 bp, Homo sapiens; identical to SEQ ID NO: 227059
  chr1:46712818-46712947
  hyper

SEQ ID NO: 415066 - DNA, 31 bp, Homo sapiens; identical to SEQ ID NO: 227061
  chr1:46806341-46806372
  hyper

SEQ ID NO: 415067 - DNA, 85 bp, Homo sapiens; identical to SEQ ID NO: 278375
  chr1:46859840-46859925
  hyper

SEQ ID NO: 415068 - DNA, 354 bp, Homo sapiens; identical to SEQ ID NO: 278376
  chr1:46859976-46860330
  hyper

SEQ ID NO: 415069 - DNA, 327 bp, Homo sapiens; identical to SEQ ID NO: 278378
  chr1:46932180-46932507
  hyper

SEQ ID NO: 415070 - DNA, 72 bp, Homo sapiens; identical to SEQ ID NO: 197513
  chr1:46957804-46957876
  hyper

SEQ ID NO: 415071 - DNA, 80 bp, Homo sapiens; identical to SEQ ID NO: 278384
  chr1:46958670-46958750
  hyper

SEQ ID NO: 415072 - DNA, 61 bp, Homo sapiens; identical to SEQ ID NO: 103376
  chr1:46958809-46958870
  hyper

SEQ ID NO: 415073 - DNA, 94 bp, Homo sapiens; identical to SEQ ID NO: 227070
  chr1:46998612-46998706
  hyper

SEQ ID NO: 415074 - DNA, 168 bp, Homo sapiens; identical to SEQ ID NO: 227073
  chr1:47069639-47069807
  hyper

SEQ ID NO: 415075 - DNA, 31 bp, Homo sapiens; identical to SEQ ID NO: 197514
  chr1:47070162-47070193
  hyper

SEQ ID NO: 415076 - DNA, 198 bp, Homo sapiens; identical to SEQ ID NO: 197515
  chr1:47078538-47078736
  hyper

SEQ ID NO: 415077 - DNA, 45 bp, Homo sapiens; identical to SEQ ID NO: 197516
  chr1:47078782-47078827
  hyper

SEQ ID NO: 415078 - DNA, 148 bp, Homo sapiens; identical to SEQ ID NO: 227075
  chr1:47691969-47692117
  hyper

SEQ ID NO: 415079 - DNA, 449 bp, Homo sapiens; identical to SEQ ID NO: 278392
  chr1:47903680-47904129
  hyper

SEQ ID NO: 415080 - DNA, 597 bp, Homo sapiens; identical to SEQ ID NO: 227084
  chr1:47973696-47974293
  hyper

SEQ ID NO: 415081 - DNA, 163 bp, Homo sapiens; identical to SEQ ID NO: 278394
  chr1:48173821-48173984
  hyper

SEQ ID NO: 415082 - DNA, 635 bp, Homo sapiens; identical to SEQ ID NO: 278395
  chr1:48174046-48174681
  hyper

SEQ ID NO: 415083 - DNA, 317 bp, Homo sapiens; identical to SEQ ID NO: 227088
  chr1:48176216-48176533
  hyper

SEQ ID NO: 415084 - DNA, 111 bp, Homo sapiens; identical to SEQ ID NO: 278406
  chr1:50489672-50489783
  hyper

SEQ ID NO: 415085 - DNA, 99 bp, Homo sapiens; identical to SEQ ID NO: 227097
  chr1:50717512-50717611
  hyper

SEQ ID NO: 415086 - DNA, 81 bp, Homo sapiens; identical to SEQ ID NO: 227107
  chr1:50896802-50896883
  hyper

SEQ ID NO: 415087 - DNA, 62 bp, Homo sapiens; identical to SEQ ID NO: 197530
  chr1:51425638-51425700
  hyper

SEQ ID NO: 415088 - DNA, 70 bp, Homo sapiens; identical to SEQ ID NO: 227109
  chr1:51426055-51426125
  hyper

SEQ ID NO: 415089 - DNA, 144 bp, Homo sapiens; identical to SEQ ID NO: 227110
  chr1:51434359-51434503
  hyper

SEQ ID NO: 415090 - DNA, 138 bp, Homo sapiens; identical to SEQ ID NO: 227112
  chr1:51985092-51985230
  hyper

SEQ ID NO: 415091 - DNA, 261 bp, Homo sapiens; identical to SEQ ID NO: 227113
  chr1:52082578-52082839
  hyper

SEQ ID NO: 415092 - DNA, 247 bp, Homo sapiens; identical to SEQ ID NO: 227116
  chr1:52344233-52344480
  hyper

SEQ ID NO: 415093 - DNA, 192 bp, Homo sapiens; identical to SEQ ID NO: 227117
  chr1:52521176-52521368
  hyper

SEQ ID NO: 415094 - DNA, 180 bp, Homo sapiens; identical to SEQ ID NO: 221355
  chr1:52608469-52608649
  hyper

SEQ ID NO: 415095 - DNA, 161 bp, Homo sapiens; identical to SEQ ID NO: 227118
  chr1:52832014-52832175
  hyper

SEQ ID NO: 415096 - DNA, 166 bp, Homo sapiens; identical to SEQ ID NO: 278425
  chr1:53019302-53019468
  hyper

SEQ ID NO: 415097 - DNA, 211 bp, Homo sapiens; identical to SEQ ID NO: 278428
  chr1:53527606-53527817
  hyper

SEQ ID NO: 415098 - DNA, 209 bp, Homo sapiens; identical to SEQ ID NO: 227126
  chr1:53662229-53662438
  hyper

SEQ ID NO: 415099 - DNA, 53 bp, Homo sapiens; identical to SEQ ID NO: 227127
  chr1:53662694-53662747
  hyper

SEQ ID NO: 415100 - DNA, 55 bp, Homo sapiens; identical to SEQ ID NO: 197539
  chr1:53686483-53686538
  hyper

SEQ ID NO: 415101 - DNA, 438 bp, Homo sapiens; identical to SEQ ID NO: 227131
  chr1:54303838-54304276
  hyper

SEQ ID NO: 415102 - DNA, 174 bp, Homo sapiens; identical to SEQ ID NO: 227132
  chr1:54355496-54355670
  hyper

SEQ ID NO: 415103 - DNA, 293 bp, Homo sapiens; identical to SEQ ID NO: 103517
  chr1:54665659-54665952
  hyper

SEQ ID NO: 415104 - DNA, 148 bp, Homo sapiens; identical to SEQ ID NO: 197541
  chr1:54965082-54965230
  hyper

SEQ ID NO: 415105 - DNA, 53 bp, Homo sapiens; identical to SEQ ID NO: 227135
  chr1:55230330-55230383
  hyper

SEQ ID NO: 415106 - DNA, 458 bp, Homo sapiens; identical to SEQ ID NO: 227136
  chr1:55266563-55267021
  hyper

SEQ ID NO: 415107 - DNA, 193 bp, Homo sapiens; identical to SEQ ID NO: 197544
  chr1:55353149-55353342
  hyper

SEQ ID NO: 415108 - DNA, 237 bp, Homo sapiens; identical to SEQ ID NO: 278441
  chr1:55446120-55446357
  hyper

SEQ ID NO: 415109 - DNA, 192 bp, Homo sapiens; identical to SEQ ID NO: 278442
  chr1:55446422-55446614
  hyper

SEQ ID NO: 415110 - DNA, 485 bp, Homo sapiens; identical to SEQ ID NO: 278443
  chr1:55462188-55462673
  hyper

SEQ ID NO: 415111 - DNA, 331 bp, Homo sapiens; identical to SEQ ID NO: 221363
  chr1:56943370-56943701
  hyper

SEQ ID NO: 415112 - DNA, 747 bp, Homo sapiens; identical to SEQ ID NO: 221364
  chr1:57044295-57045042
  hyper

SEQ ID NO: 415113 - DNA, 230 bp, Homo sapiens; identical to SEQ ID NO: 197549
  chr1:57888067-57888297
  hyper

SEQ ID NO: 415114 - DNA, 192 bp, Homo sapiens; identical to SEQ ID NO: 227144
  chr1:58714602-58714794
  hyper

SEQ ID NO: 415115 - DNA, 426 bp, Homo sapiens; identical to SEQ ID NO: 227148
  chr1:59012378-59012804
  hyper

SEQ ID NO: 415116 - DNA, 196 bp, Homo sapiens; identical to SEQ ID NO: 227150
  chr1:59247411-59247607
  hyper

SEQ ID NO: 415117 - DNA, 101 bp, Homo sapiens; identical to SEQ ID NO: 197551
  chr1:59249797-59249898
  hyper

SEQ ID NO: 415118 - DNA, 121 bp, Homo sapiens; identical to SEQ ID NO: 197553
  chr1:59369443-59369564
  hyper

SEQ ID NO: 415119 - DNA, 190 bp, Homo sapiens; identical to SEQ ID NO: 278458
  chr1:59369778-59369968
  hyper

SEQ ID NO: 415120 - DNA, 190 bp, Homo sapiens; identical to SEQ ID NO: 197554
  chr1:59762030-59762220
  hyper

SEQ ID NO: 415121 - DNA, 31 bp, Homo sapiens; identical to SEQ ID NO: 227154
  chr1:59762509-59762540
  hyper

SEQ ID NO: 415122 - DNA, 219 bp, Homo sapiens; identical to SEQ ID NO: 278462
  chr1:60280122-60280341
  hyper

SEQ ID NO: 415123 - DNA, 279 bp, Homo sapiens; identical to SEQ ID NO: 35762
  chr1:60280812-60281091
  hyper

SEQ ID NO: 415124 - DNA, 82 bp, Homo sapiens; identical to SEQ ID NO: 227157
  chr1:60747090-60747172
  hyper

SEQ ID NO: 415125 - DNA, 133 bp, Homo sapiens; identical to SEQ ID NO: 278466
  chr1:61508554-61508687
  hyper

SEQ ID NO: 415126 - DNA, 215 bp, Homo sapiens; identical to SEQ ID NO: 278467
  chr1:61508954-61509169
  hyper

SEQ ID NO: 415127 - DNA, 40 bp, Homo sapiens; identical to SEQ ID NO: 197558
  chr1:61516034-61516074
  hyper

SEQ ID NO: 415128 - DNA, 359 bp, Homo sapiens; identical to SEQ ID NO: 197560
  chr1:61547845-61548204
  hyper

SEQ ID NO: 415129 - DNA, 771 bp, Homo sapiens; identical to SEQ ID NO: 278471
  chr1:61548437-61549208
  hyper

SEQ ID NO: 415130 - DNA, 267 bp, Homo sapiens; identical to SEQ ID NO: 278472
  chr1:61549310-61549577
  hyper

SEQ ID NO: 415131 - DNA, 223 bp, Homo sapiens; identical to SEQ ID NO: 227160
  chr1:62190978-62191201
  hyper

SEQ ID NO: 415132 - DNA, 316 bp, Homo sapiens; identical to SEQ ID NO: 395479
  chr1:62208494-62208810
  hyper

SEQ ID NO: 415133 - DNA, 200 bp, Homo sapiens; identical to SEQ ID NO: 227175
  chr1:63989066-63989266
  hyper

SEQ ID NO: 415134 - DNA, 574 bp, Homo sapiens; identical to SEQ ID NO: 278484
  chr1:64239452-64240026
  hyper

SEQ ID NO: 415135 - DNA, 214 bp, Homo sapiens; identical to SEQ ID NO: 278485
  chr1:64240783-64240997
  hyper

SEQ ID NO: 415136 - DNA, 970 bp, Homo sapiens; identical to SEQ ID NO: 278486
  chr1:64936233-64937203
  hyper

SEQ ID NO: 415137 - DNA, 419 bp, Homo sapiens; identical to SEQ ID NO: 35809
  chr1:65210939-65211358
  hyper

SEQ ID NO: 415138 - DNA, 42 bp, Homo sapiens; identical to SEQ ID NO: 227181
  chr1:65532728-65532770
  hyper

SEQ ID NO: 415139 - DNA, 50 bp, Homo sapiens; identical to SEQ ID NO: 227182
  chr1:65533816-65533866
  hyper

SEQ ID NO: 415140 - DNA, 153 bp, Homo sapiens; identical to SEQ ID NO: 197576
  chr1:65534604-65534757
  hyper

SEQ ID NO: 415141 - DNA, 38 bp, Homo sapiens; identical to SEQ ID NO: 197577
  chr1:65614491-65614529
  hyper

SEQ ID NO: 415142 - DNA, 295 bp, Homo sapiens; identical to SEQ ID NO: 197578
  chr1:65614752-65615047
  hyper

SEQ ID NO: 415143 - DNA, 39 bp, Homo sapiens; identical to SEQ ID NO: 197579
  chr1:65720329-65720368
  hyper

SEQ ID NO: 415144 - DNA, 87 bp, Homo sapiens; identical to SEQ ID NO: 278498
  chr1:65731850-65731937
  hyper

SEQ ID NO: 415145 - DNA, 81 bp, Homo sapiens; identical to SEQ ID NO: 197581
  chr1:66258064-66258145
  hyper

SEQ ID NO: 415146 - DNA, 230 bp, Homo sapiens; identical to SEQ ID NO: 197582
  chr1:66258847-66259077
  hyper

SEQ ID NO: 415147 - DNA, 703 bp, Homo sapiens; identical to SEQ ID NO: 227191
  chr1:66797585-66798288
  hyper

SEQ ID NO: 415148 - DNA, 349 bp, Homo sapiens; identical to SEQ ID NO: 278506
  chr1:67390718-67391067
  hyper

SEQ ID NO: 415149 - DNA, 166 bp, Homo sapiens; identical to SEQ ID NO: 227195
  chr1:67395533-67395699
  hyper

SEQ ID NO: 415150 - DNA, 138 bp, Homo sapiens; identical to SEQ ID NO: 197585
  chr1:68001181-68001319
  hyper

SEQ ID NO: 415151 - DNA, 135 bp, Homo sapiens; identical to SEQ ID NO: 227198
  chr1:68150809-68150944
  hyper

SEQ ID NO: 415152 - DNA, 115 bp, Homo sapiens; identical to SEQ ID NO: 197586
  chr1:68297572-68297687
  hyper

SEQ ID NO: 415153 - DNA, 606 bp, Homo sapiens; identical to SEQ ID NO: 197587
  chr1:68297773-68298379
  hyper

SEQ ID NO: 415154 - DNA, 175 bp, Homo sapiens; identical to SEQ ID NO: 197589
  chr1:68696600-68696775
  hyper

SEQ ID NO: 415155 - DNA, 574 bp, Homo sapiens; identical to SEQ ID NO: 278516
  chr1:68697037-68697611
  hyper

SEQ ID NO: 415156 - DNA, 427 bp, Homo sapiens; identical to SEQ ID NO: 197591
  chr1:68698086-68698513
  hyper

SEQ ID NO: 415157 - DNA, 174 bp, Homo sapiens; identical to SEQ ID NO: 278520
  chr1:70034574-70034748
  hyper

SEQ ID NO: 415158 - DNA, 672 bp, Homo sapiens; identical to SEQ ID NO: 227204
  chr1:70671105-70671777
  hyper

SEQ ID NO: 415159 - DNA, 325 bp, Homo sapiens; identical to SEQ ID NO: 227205
  chr1:70820330-70820655
  hyper

SEQ ID NO: 415160 - DNA, 131 bp, Homo sapiens; identical to SEQ ID NO: 278525
  chr1:71512731-71512862
  hyper

SEQ ID NO: 415161 - DNA, 117 bp, Homo sapiens; identical to SEQ ID NO: 278526
  chr1:71513747-71513864
  hyper

SEQ ID NO: 415162 - DNA, 44 bp, Homo sapiens; identical to SEQ ID NO: 278527
  chr1:72747787-72747831
  hyper

SEQ ID NO: 415163 - DNA, 383 bp, Homo sapiens; identical to SEQ ID NO: 197597
  chr1:72748267-72748650
  hyper

SEQ ID NO: 415164 - DNA, 57 bp, Homo sapiens; identical to SEQ ID NO: 227208
  chr1:74663885-74663942
  hyper

SEQ ID NO: 415165 - DNA, 42 bp, Homo sapiens; identical to SEQ ID NO: 227209
  chr1:75594039-75594081
  hyper

SEQ ID NO: 415166 - DNA, 55 bp, Homo sapiens; identical to SEQ ID NO: 227210
  chr1:75595516-75595571
  hyper

SEQ ID NO: 415167 - DNA, 67 bp, Homo sapiens; identical to SEQ ID NO: 278535
  chr1:75598806-75598873
  hyper

SEQ ID NO: 415168 - DNA, 141 bp, Homo sapiens; identical to SEQ ID NO: 278538
  chr1:76081201-76081342
  hyper

SEQ ID NO: 415169 - DNA, 258 bp, Homo sapiens; identical to SEQ ID NO: 227219
  chr1:76082673-76082931
  hyper

SEQ ID NO: 415170 - DNA, 239 bp, Homo sapiens; identical to SEQ ID NO: 227220
  chr1:76251752-76251991
  hyper

SEQ ID NO: 415171 - DNA, 154 bp, Homo sapiens; identical to SEQ ID NO: 197601
  chr1:76540052-76540206
  hyper

SEQ ID NO: 415172 - DNA, 200 bp, Homo sapiens; identical to SEQ ID NO: 197602
  chr1:76540250-76540450
  hyper

SEQ ID NO: 415173 - DNA, 235 bp, Homo sapiens; identical to SEQ ID NO: 278544
  chr1:76540666-76540901
  hyper

SEQ ID NO: 415174 - DNA, 79 bp, Homo sapiens; identical to SEQ ID NO: 227223
  chr1:77684951-77685030
  hyper

SEQ ID NO: 415175 - DNA, 109 bp, Homo sapiens; identical to SEQ ID NO: 227225
  chr1:78148510-78148619
  hyper

SEQ ID NO: 415176 - DNA, 213 bp, Homo sapiens; identical to SEQ ID NO: 227227
  chr1:78224923-78225136
  hyper

SEQ ID NO: 415177 - DNA, 229 bp, Homo sapiens; identical to SEQ ID NO: 227228
  chr1:78225422-78225651
  hyper

SEQ ID NO: 415178 - DNA, 219 bp, Homo sapiens; identical to SEQ ID NO: 227229
  chr1:78245317-78245536
  hyper

SEQ ID NO: 415179 - DNA, 84 bp, Homo sapiens; identical to SEQ ID NO: 197605
  chr1:78444895-78444979
  hyper

SEQ ID NO: 415180 - DNA, 86 bp, Homo sapiens; identical to SEQ ID NO: 227233
  chr1:81880257-81880343
  hyper

SEQ ID NO: 415181 - DNA, 216 bp, Homo sapiens; identical to SEQ ID NO: 278554
  chr1:82265931-82266147
  hyper

SEQ ID NO: 415182 - DNA, 95 bp, Homo sapiens
  chr1:82266182-82266277
  hyper
aaacctggagacggggtgggtgaaagacgcatcccgggcgcctctccgaagtccaggccgggagcaagctcctgggcctagaggggagggggccc

SEQ ID NO: 415183 - DNA, 194 bp, Homo sapiens; identical to SEQ ID NO: 278560
  chr1:82268379-82268573
  hyper

SEQ ID NO: 415184 - DNA, 74 bp, Homo sapiens; identical to SEQ ID NO: 278561
  chr1:82268960-82269034
  hyper

SEQ ID NO: 415185 - DNA, 33 bp, Homo sapiens; identical to SEQ ID NO: 197608
  chr1:82269508-82269541
  hyper

SEQ ID NO: 415186 - DNA, 115 bp, Homo sapiens; identical to SEQ ID NO: 278563
  chr1:84158381-84158496
  hyper

SEQ ID NO: 415187 - DNA, 34 bp, Homo sapiens; identical to SEQ ID NO: 278564
  chr1:84158526-84158560
  hyper

SEQ ID NO: 415188 - DNA, 179 bp, Homo sapiens; identical to SEQ ID NO: 278567
  chr1:84464234-84464413
  hyper

SEQ ID NO: 415189 - DNA, 503 bp, Homo sapiens; identical to SEQ ID NO: 278568
  chr1:84464878-84465381
  hyper

SEQ ID NO: 415190 - DNA, 150 bp, Homo sapiens
  chr1:84544068-84544218
  hyper
gggtctgggtatccgctgggcgggccggcgcggggcaccgagcgccctccgggtcgcagcttctgaggccgcgggcacgggccaggcctagcagcggccgccgggagtcgttctggggggccgggagaccagctgcctttctcctccatt

SEQ ID NO: 415191 - DNA, 194 bp, Homo sapiens; identical to SEQ ID NO: 227240
  chr1:84972303-84972497
  hyper

SEQ ID NO: 415192 - DNA, 56 bp, Homo sapiens; identical to SEQ ID NO: 197611
  chr1:85040191-85040247
  hyper

SEQ ID NO: 415193 - DNA, 34 bp, Homo sapiens; identical to SEQ ID NO: 278573
  chr1:85358277-85358311
  hyper

SEQ ID NO: 415194 - DNA, 166 bp, Homo sapiens; identical to SEQ ID NO: 197614
  chr1:85527761-85527927
  hyper

SEQ ID NO: 415195 - DNA, 87 bp, Homo sapiens; identical to SEQ ID NO: 278578
  chr1:85527957-85528044
  hyper

SEQ ID NO: 415196 - DNA, 161 bp, Homo sapiens; identical to SEQ ID NO: 197615
  chr1:85666112-85666273
  hyper

SEQ ID NO: 415197 - DNA, 436 bp, Homo sapiens; identical to SEQ ID NO: 278580
  chr1:85666727-85667163
  hyper

SEQ ID NO: 415198 - DNA, 174 bp, Homo sapiens; identical to SEQ ID NO: 227248
  chr1:85741885-85742059
  hyper

SEQ ID NO: 415199 - DNA, 66 bp, Homo sapiens
  chr1:85774195-85774261
  hyper
ggcattcatatggaaaaacagaggtaggaaacattttatacattttgaagatactttgatgtgcag

SEQ ID NO: 415200 - DNA, 1196 bp, Homo sapiens; identical to SEQ ID NO: 278584
  chr1:85929935-85931131
  hyper

SEQ ID NO: 415201 - DNA, 153 bp, Homo sapiens; identical to SEQ ID NO: 278585
  chr1:86042081-86042234
  hyper

SEQ ID NO: 415202 - DNA, 35 bp, Homo sapiens; identical to SEQ ID NO: 227252
  chr1:86042647-86042682
  hyper

SEQ ID NO: 415203 - DNA, 384 bp, Homo sapiens; identical to SEQ ID NO: 227253
  chr1:86045827-86046211
  hyper

SEQ ID NO: 415204 - DNA, 753 bp, Homo sapiens; identical to SEQ ID NO: 197619
  chr1:86046271-86047024
  hyper

SEQ ID NO: 415205 - DNA, 190 bp, Homo sapiens; identical to SEQ ID NO: 600
  chr1:86047064-86047254
  hyper

SEQ ID NO: 415206 - DNA, 63 bp, Homo sapiens; identical to SEQ ID NO: 278591
  chr1:86622127-86622190
  hyper

SEQ ID NO: 415207 - DNA, 84 bp, Homo sapiens; identical to SEQ ID NO: 227256
  chr1:87379857-87379941
  hyper

SEQ ID NO: 415208 - DNA, 52 bp, Homo sapiens; identical to SEQ ID NO: 227257
  chr1:87380149-87380201
  hyper

SEQ ID NO: 415209 - DNA, 101 bp, Homo sapiens; identical to SEQ ID NO: 197621
  chr1:87617583-87617684
  hyper

SEQ ID NO: 415210 - DNA, 72 bp, Homo sapiens; identical to SEQ ID NO: 278595
  chr1:87617858-87617930
  hyper

SEQ ID NO: 415211 - DNA, 127 bp, Homo sapiens; identical to SEQ ID NO: 197623
  chr1:87793799-87793926
  hyper

SEQ ID NO: 415212 - DNA, 105 bp, Homo sapiens; identical to SEQ ID NO: 197624
  chr1:88928502-88928607
  hyper

SEQ ID NO: 415213 - DNA, 94 bp, Homo sapiens; identical to SEQ ID NO: 227261
  chr1:89149364-89149458
  hyper

SEQ ID NO: 415214 - DNA, 84 bp, Homo sapiens; identical to SEQ ID NO: 227262
  chr1:89150030-89150114
  hyper

SEQ ID NO: 415215 - DNA, 34 bp, Homo sapiens; identical to SEQ ID NO: 227263
  chr1:89990216-89990250
  hyper

SEQ ID NO: 415216 - DNA, 143 bp, Homo sapiens; identical to SEQ ID NO: 221399
  chr1:90228347-90228490
  hyper

SEQ ID NO: 415217 - DNA, 146 bp, Homo sapiens; identical to SEQ ID NO: 103789
  chr1:90228980-90229126
  hyper

SEQ ID NO: 415218 - DNA, 172 bp, Homo sapiens; identical to SEQ ID NO: 197626
  chr1:90286176-90286348
  hyper

SEQ ID NO: 415219 - DNA, 45 bp, Homo sapiens; identical to SEQ ID NO: 197627
  chr1:90287493-90287538
  hyper

SEQ ID NO: 415220 - DNA, 81 bp, Homo sapiens
  chr1:91172839-91172920
  hyper
gagatctttgggtttttgaattactttattgatctgaagattttgttctttggaatgtgaccctgtttggacttagagcta

SEQ ID NO: 415221 - DNA, 166 bp, Homo sapiens; identical to SEQ ID NO: 197632
  chr1:91173081-91173247
  hyper

SEQ ID NO: 415222 - DNA, 205 bp, Homo sapiens; identical to SEQ ID NO: 278613
  chr1:91179021-91179226
  hyper

SEQ ID NO: 415223 - DNA, 58 bp, Homo sapiens; identical to SEQ ID NO: 227274
  chr1:91179581-91179639
  hyper

SEQ ID NO: 415224 - DNA, 47 bp, Homo sapiens
  chr1:91184147-91184194
  hyper
gggctcagcccggcgggaggcggatccctgagagggacacagccggg

SEQ ID NO: 415225 - DNA, 114 bp, Homo sapiens; identical to SEQ ID NO: 227288
  chr1:91486937-91487051
  hyper

SEQ ID NO: 415226 - DNA, 134 bp, Homo sapiens; identical to SEQ ID NO: 227289
  chr1:91487792-91487926
  hyper

SEQ ID NO: 415227 - DNA, 140 bp, Homo sapiens; identical to SEQ ID NO: 197635
  chr1:91966293-91966433
  hyper

SEQ ID NO: 415228 - DNA, 105 bp, Homo sapiens; identical to SEQ ID NO: 227292
  chr1:91966641-91966746
  hyper

SEQ ID NO: 415229 - DNA, 170 bp, Homo sapiens; identical to SEQ ID NO: 197636
  chr1:92350554-92350724
  hyper

SEQ ID NO: 415230 - DNA, 331 bp, Homo sapiens; identical to SEQ ID NO: 197637
  chr1:92351379-92351710
  hyper

SEQ ID NO: 415231 - DNA, 616 bp, Homo sapiens; identical to SEQ ID NO: 227296
  chr1:92545648-92546264
  hyper

SEQ ID NO: 415232 - DNA, 184 bp, Homo sapiens; identical to SEQ ID NO: 197640
  chr1:92764405-92764589
  hyper

SEQ ID NO: 415233 - DNA, 35 bp, Homo sapiens; identical to SEQ ID NO: 221405
  chr1:92946278-92946313
  hyper

SEQ ID NO: 415234 - DNA, 60 bp, Homo sapiens; identical to SEQ ID NO: 278633
  chr1:92946605-92946665
  hyper

SEQ ID NO: 415235 - DNA, 924 bp, Homo sapiens; identical to SEQ ID NO: 35990
  chr1:92946768-92947692
  hyper

SEQ ID NO: 415236 - DNA, 328 bp, Homo sapiens; identical to SEQ ID NO: 197643
  chr1:93250604-93250932
  hyper

SEQ ID NO: 415237 - DNA, 88 bp, Homo sapiens; identical to SEQ ID NO: 227300
  chr1:93426908-93426996
  hyper

SEQ ID NO: 415238 - DNA, 167 bp, Homo sapiens; identical to SEQ ID NO: 227301
  chr1:93427437-93427604
  hyper

SEQ ID NO: 415239 - DNA, 225 bp, Homo sapiens; identical to SEQ ID NO: 227302
  chr1:93544520-93544745
  hyper

SEQ ID NO: 415240 - DNA, 761 bp, Homo sapiens; identical to SEQ ID NO: 227303
  chr1:93645817-93646578
  hyper

SEQ ID NO: 415241 - DNA, 100 bp, Homo sapiens; identical to SEQ ID NO: 227304
  chr1:93646698-93646798
  hyper

SEQ ID NO: 415242 - DNA, 534 bp, Homo sapiens; identical to SEQ ID NO: 227305
  chr1:93810812-93811346
  hyper

SEQ ID NO: 415243 - DNA, 1055 bp, Homo sapiens; identical to SEQ ID NO: 197645
  chr1:93913410-93914465
  hyper

SEQ ID NO: 415244 - DNA, 143 bp, Homo sapiens; identical to SEQ ID NO: 197646
  chr1:93914736-93914879
  hyper

SEQ ID NO: 415245 - DNA, 307 bp, Homo sapiens; identical to SEQ ID NO: 278647
  chr1:94146398-94146705
  hyper

SEQ ID NO: 415246 - DNA, 150 bp, Homo sapiens; identical to SEQ ID NO: 278648
  chr1:94146706-94146856
  hyper

SEQ ID NO: 415247 - DNA, 202 bp, Homo sapiens; identical to SEQ ID NO: 197647
  chr1:94312192-94312394
  hyper

SEQ ID NO: 415248 - DNA, 663 bp, Homo sapiens; identical to SEQ ID NO: 227310
  chr1:94344323-94344986
  hyper

SEQ ID NO: 415249 - DNA, 120 bp, Homo sapiens; identical to SEQ ID NO: 197654
  chr1:94884615-94884735
  hyper

SEQ ID NO: 415250 - DNA, 765 bp, Homo sapiens; identical to SEQ ID NO: 197655
  chr1:95006902-95007667
  hyper

SEQ ID NO: 415251 - DNA, 236 bp, Homo sapiens; identical to SEQ ID NO: 278659
  chr1:95007896-95008132
  hyper

SEQ ID NO: 415252 - DNA, 345 bp, Homo sapiens; identical to SEQ ID NO: 197658
  chr1:95391395-95391740
  hyper

SEQ ID NO: 415253 - DNA, 219 bp, Homo sapiens; identical to SEQ ID NO: 278662
  chr1:95392624-95392843
  hyper

SEQ ID NO: 415254 - DNA, 108 bp, Homo sapiens; identical to SEQ ID NO: 197661
  chr1:95392887-95392995
  hyper

SEQ ID NO: 415255 - DNA, 32 bp, Homo sapiens; identical to SEQ ID NO: 197662
  chr1:95393067-95393099
  hyper

SEQ ID NO: 415256 - DNA, 491 bp, Homo sapiens; identical to SEQ ID NO: 227321
  chr1:95538361-95538852
  hyper

SEQ ID NO: 415257 - DNA, 935 bp, Homo sapiens; identical to SEQ ID NO: 278667
  chr1:95582633-95583568
  hyper

SEQ ID NO: 415258 - DNA, 246 bp, Homo sapiens; identical to SEQ ID NO: 227324
  chr1:95699851-95700097
  hyper

SEQ ID NO: 415259 - DNA, 43 bp, Homo sapiens; identical to SEQ ID NO: 227325
  chr1:97187291-97187334
  hyper

SEQ ID NO: 415260 - DNA, 372 bp, Homo sapiens; identical to SEQ ID NO: 278670
  chr1:98386195-98386567
  hyper

SEQ ID NO: 415261 - DNA, 310 bp, Homo sapiens; identical to SEQ ID NO: 36023
  chr1:98386618-98386928
  hyper

SEQ ID NO: 415262 - DNA, 190 bp, Homo sapiens; identical to SEQ ID NO: 197668
  chr1:98514255-98514445
  hyper

SEQ ID NO: 415263 - DNA, 42 bp, Homo sapiens; identical to SEQ ID NO: 278673
  chr1:98515026-98515068
  hyper

SEQ ID NO: 415264 - DNA, 134 bp, Homo sapiens; identical to SEQ ID NO: 278676
  chr1:99470847-99470981
  hyper

SEQ ID NO: 415265 - DNA, 32 bp, Homo sapiens; identical to SEQ ID NO: 227333
  chr1:99730207-99730239
  hyper

SEQ ID NO: 415266 - DNA, 40 bp, Homo sapiens; identical to SEQ ID NO: 197672
  chr1:100316318-100316358
  hyper

SEQ ID NO: 415267 - DNA, 328 bp, Homo sapiens; identical to SEQ ID NO: 227335
  chr1:100435244-100435572
  hyper

SEQ ID NO: 415268 - DNA, 551 bp, Homo sapiens; identical to SEQ ID NO: 227336
  chr1:100503350-100503901
  hyper

SEQ ID NO: 415269 - DNA, 248 bp, Homo sapiens; identical to SEQ ID NO: 227337
  chr1:100598145-100598393
  hyper

SEQ ID NO: 415270 - DNA, 56 bp, Homo sapiens; identical to SEQ ID NO: 103899
  chr1:100715426-100715482
  hyper

SEQ ID NO: 415271 - DNA, 305 bp, Homo sapiens; identical to SEQ ID NO: 227339
  chr1:100731302-100731607
  hyper

SEQ ID NO: 415272 - DNA, 100 bp, Homo sapiens; identical to SEQ ID NO: 227340
  chr1:100816956-100817056
  hyper

SEQ ID NO: 415273 - DNA, 65 bp, Homo sapiens; identical to SEQ ID NO: 227341
  chr1:100817825-100817890
  hyper

SEQ ID NO: 415274 - DNA, 63 bp, Homo sapiens; identical to SEQ ID NO: 227344
  chr1:101491304-101491367
  hyper

SEQ ID NO: 415275 - DNA, 79 bp, Homo sapiens; identical to SEQ ID NO: 227345
  chr1:101491588-101491667
  hyper

SEQ ID NO: 415276 - DNA, 108 bp, Homo sapiens; identical to SEQ ID NO: 197679
  chr1:102462482-102462590
  hyper

SEQ ID NO: 415277 - DNA, 106 bp, Homo sapiens; identical to SEQ ID NO: 197680
  chr1:102462591-102462697
  hyper

SEQ ID NO: 415278 - DNA, 43 bp, Homo sapiens; identical to SEQ ID NO: 278694
  chr1:103572600-103572643
  hyper

SEQ ID NO: 415279 - DNA, 421 bp, Homo sapiens; identical to SEQ ID NO: 227353
  chr1:104068298-104068719
  hyper

SEQ ID NO: 415280 - DNA, 884 bp, Homo sapiens; identical to SEQ ID NO: 227359
  chr1:108742393-108743277
  hyper

SEQ ID NO: 415281 - DNA, 208 bp, Homo sapiens; identical to SEQ ID NO: 227361
  chr1:109234633-109234841
  hyper

SEQ ID NO: 415282 - DNA, 182 bp, Homo sapiens; identical to SEQ ID NO: 227362
  chr1:109235041-109235223
  hyper

SEQ ID NO: 415283 - DNA, 37 bp, Homo sapiens; identical to SEQ ID NO: 227363
  chr1:109584672-109584709
  hyper

SEQ ID NO: 415284 - DNA, 171 bp, Homo sapiens; identical to SEQ ID NO: 227364
  chr1:109618424-109618595
  hyper

SEQ ID NO: 415285 - DNA, 453 bp, Homo sapiens; identical to SEQ ID NO: 278707
  chr1:109632945-109633398
  hyper

SEQ ID NO: 415286 - DNA, 36 bp, Homo sapiens; identical to SEQ ID NO: 227366
  chr1:109642650-109642686
  hyper

SEQ ID NO: 415287 - DNA, 210 bp, Homo sapiens; identical to SEQ ID NO: 227367
  chr1:109643170-109643380
  hyper

SEQ ID NO: 415288 - DNA, 617 bp, Homo sapiens; identical to SEQ ID NO: 278713
  chr1:109940219-109940836
  hyper

SEQ ID NO: 415289 - DNA, 210 bp, Homo sapiens; identical to SEQ ID NO: 227370
  chr1:109968966-109969176
  hyper

SEQ ID NO: 415290 - DNA, 49 bp, Homo sapiens; identical to SEQ ID NO: 227371
  chr1:109969513-109969562
  hyper

SEQ ID NO: 415291 - DNA, 273 bp, Homo sapiens; identical to SEQ ID NO: 278718
  chr1:110009818-110010091
  hyper

SEQ ID NO: 415292 - DNA, 99 bp, Homo sapiens; identical to SEQ ID NO: 278719
  chr1:110025979-110026078
  hyper

SEQ ID NO: 415293 - DNA, 206 bp, Homo sapiens; identical to SEQ ID NO: 197691
  chr1:110052079-110052285
  hyper

SEQ ID NO: 415294 - DNA, 103 bp, Homo sapiens; identical to SEQ ID NO: 227374
  chr1:110090998-110091101
  hyper

SEQ ID NO: 415295 - DNA, 172 bp, Homo sapiens; identical to SEQ ID NO: 227375
  chr1:110162331-110162503
  hyper

SEQ ID NO: 415296 - DNA, 160 bp, Homo sapiens; identical to SEQ ID NO: 278725
  chr1:110230559-110230719
  hyper

SEQ ID NO: 415297 - DNA, 32 bp, Homo sapiens; identical to SEQ ID NO: 278726
  chr1:110282510-110282542
  hyper

SEQ ID NO: 415298 - DNA, 147 bp, Homo sapiens; identical to SEQ ID NO: 197694
  chr1:110453160-110453307
  hyper

SEQ ID NO: 415299 - DNA, 421 bp, Homo sapiens; identical to SEQ ID NO: 197695
  chr1:110453531-110453952
  hyper

SEQ ID NO: 415300 - DNA, 62 bp, Homo sapiens; identical to SEQ ID NO: 227380
  chr1:110526885-110526947
  hyper

SEQ ID NO: 415301 - DNA, 52 bp, Homo sapiens
  chr1:110526977-110527029
  hyper
gagctttaatccaaagggcctggggctgggccagtgagtgagtgggctgtct

SEQ ID NO: 415302 - DNA, 84 bp, Homo sapiens; identical to SEQ ID NO: 227382
  chr1:110577102-110577186
  hyper

SEQ ID NO: 415303 - DNA, 139 bp, Homo sapiens; identical to SEQ ID NO: 227389
  chr1:110752409-110752548
  hyper

SEQ ID NO: 415304 - DNA, 218 bp, Homo sapiens; identical to SEQ ID NO: 227393
  chr1:110880352-110880570
  hyper

SEQ ID NO: 415305 - DNA, 357 bp, Homo sapiens; identical to SEQ ID NO: 227394
  chr1:110881806-110882163
  hyper

SEQ ID NO: 415306 - DNA, 600 bp, Homo sapiens; identical to SEQ ID NO: 197699
  chr1:111148988-111149588
  hyper

SEQ ID NO: 415307 - DNA, 40 bp, Homo sapiens; identical to SEQ ID NO: 197700
  chr1:111289414-111289454
  hyper

SEQ ID NO: 415308 - DNA, 88 bp, Homo sapiens; identical to SEQ ID NO: 227401
  chr1:111682579-111682667
  hyper

SEQ ID NO: 415309 - DNA, 260 bp, Homo sapiens; identical to SEQ ID NO: 227402
  chr1:111683181-111683441
  hyper

SEQ ID NO: 415310 - DNA, 46 bp, Homo sapiens; identical to SEQ ID NO: 278744
  chr1:111813500-111813546
  hyper

SEQ ID NO: 415311 - DNA, 63 bp, Homo sapiens; identical to SEQ ID NO: 278745
  chr1:111813604-111813667
  hyper

SEQ ID NO: 415312 - DNA, 155 bp, Homo sapiens; identical to SEQ ID NO: 227405
  chr1:111889101-111889256
  hyper

SEQ ID NO: 415313 - DNA, 279 bp, Homo sapiens; identical to SEQ ID NO: 227406
  chr1:111991909-111992188
  hyper

SEQ ID NO: 415314 - DNA, 145 bp, Homo sapiens; identical to SEQ ID NO: 227408
  chr1:112532138-112532283
  hyper

SEQ ID NO: 415315 - DNA, 35 bp, Homo sapiens; identical to SEQ ID NO: 197705
  chr1:112938562-112938597
  hyper

SEQ ID NO: 415316 - DNA, 165 bp, Homo sapiens; identical to SEQ ID NO: 227411
  chr1:112939042-112939207
  hyper

SEQ ID NO: 415317 - DNA, 195 bp, Homo sapiens; identical to SEQ ID NO: 227412
  chr1:113008785-113008980
  hyper

SEQ ID NO: 415318 - DNA, 426 bp, Homo sapiens; identical to SEQ ID NO: 278753
  chr1:113051157-113051583
  hyper

SEQ ID NO: 415319 - DNA, 53 bp, Homo sapiens; identical to SEQ ID NO: 278754
  chr1:113052113-113052166
  hyper

SEQ ID NO: 415320 - DNA, 119 bp, Homo sapiens; identical to SEQ ID NO: 227414
  chr1:113162277-113162396
  hyper

SEQ ID NO: 415321 - DNA, 436 bp, Homo sapiens; identical to SEQ ID NO: 227415
  chr1:113216760-113217196
  hyper

SEQ ID NO: 415322 - DNA, 190 bp, Homo sapiens; identical to SEQ ID NO: 197708
  chr1:113249226-113249416
  hyper

SEQ ID NO: 415323 - DNA, 160 bp, Homo sapiens; identical to SEQ ID NO: 227416
  chr1:113249975-113250135
  hyper

SEQ ID NO: 415324 - DNA, 140 bp, Homo sapiens; identical to SEQ ID NO: 197710
  chr1:113258352-113258492
  hyper

SEQ ID NO: 415325 - DNA, 57 bp, Homo sapiens; identical to SEQ ID NO: 278761
  chr1:113392152-113392209
  hyper

SEQ ID NO: 415326 - DNA, 122 bp, Homo sapiens; identical to SEQ ID NO: 197711
  chr1:113497849-113497971
  hyper

SEQ ID NO: 415327 - DNA, 532 bp, Homo sapiens
  chr1:113498188-113498720
  hyper
ggggcggacaatgtcacgaatcataaataacttctgccccgagtcccttcccttggggcagaagcggccaggagagtctggaggtaccacatgcagcagcctcatgttatcccttttccagatcaaagcatctctcgaggagcctattgaagacttaggggggaagggacttccccaccgtcaccgggcaccacgacccaactcctcggccaggcctgggaccggcatcttagcacggggcccgcggctcggctaagagaggcgctgaccccagcgcctcaaggtctccttcaccagcactgcagtccgaggccacgcggctgcctgtgaccacgatgccctctgctgggccgcctccctccgccggagacaaagtctcccaaccccggaggtcccctccgaccccaccagggcagcgagggcaccgtggggtccgcgccgcgtgccgccggctgttacccaactaaccgttatatgcgcggatcgcagcgccgagcgtgtgcgtgacgtggtggcgcaggctggagttcca

SEQ ID NO: 415328 - DNA, 203 bp, Homo sapiens; identical to SEQ ID NO: 221447
  chr1:114302510-114302713
  hyper

SEQ ID NO: 415329 - DNA, 254 bp, Homo sapiens; identical to SEQ ID NO: 227423
  chr1:114354449-114354703
  hyper

SEQ ID NO: 415330 - DNA, 84 bp, Homo sapiens; identical to SEQ ID NO: 197717
  chr1:114355230-114355314
  hyper

SEQ ID NO: 415331 - DNA, 155 bp, Homo sapiens; identical to SEQ ID NO: 227425
  chr1:114471834-114471989
  hyper

SEQ ID NO: 415332 - DNA, 165 bp, Homo sapiens; identical to SEQ ID NO: 278770
  chr1:114695147-114695312
  hyper

SEQ ID NO: 415333 - DNA, 218 bp, Homo sapiens; identical to SEQ ID NO: 278771
  chr1:114697443-114697661
  hyper

SEQ ID NO: 415334 - DNA, 107 bp, Homo sapiens; identical to SEQ ID NO: 197718
  chr1:114697918-114698025
  hyper

SEQ ID NO: 415335 - DNA, 99 bp, Homo sapiens; identical to SEQ ID NO: 227430
  chr1:115053407-115053506
  hyper

SEQ ID NO: 415336 - DNA, 275 bp, Homo sapiens; identical to SEQ ID NO: 197719
  chr1:115124231-115124506
  hyper

SEQ ID NO: 415337 - DNA, 61 bp, Homo sapiens; identical to SEQ ID NO: 197721
  chr1:115258668-115258729
  hyper

SEQ ID NO: 415338 - DNA, 195 bp, Homo sapiens; identical to SEQ ID NO: 227433
  chr1:115323253-115323448
  hyper

SEQ ID NO: 415339 - DNA, 239 bp, Homo sapiens; identical to SEQ ID NO: 395576
  chr1:116382148-116382387
  hyper

SEQ ID NO: 415340 - DNA, 35 bp, Homo sapiens; identical to SEQ ID NO: 227443
  chr1:116519005-116519040
  hyper

SEQ ID NO: 415341 - DNA, 59 bp, Homo sapiens; identical to SEQ ID NO: 197728
  chr1:116961169-116961228
  hyper

SEQ ID NO: 415342 - DNA, 338 bp, Homo sapiens; identical to SEQ ID NO: 197729
  chr1:117209809-117210147
  hyper

SEQ ID NO: 415343 - DNA, 40 bp, Homo sapiens; identical to SEQ ID NO: 227447
  chr1:117215387-117215427
  hyper

SEQ ID NO: 415344 - DNA, 280 bp, Homo sapiens
  chr1:117452364-117452644
  hyper
cgtggggtgggggcccagaggggatggcagggtgggctccgacgcctcctcgcctttaagcgggtggccccggctcttcctccgttacctggagcggggaggggcttgggaaagtttgtgtttgttgctggcaaagcgccggatgggaggcgcgggcgggcgctgcggttcttcccttctgctttcgggaagcggtcggggctgcacactcggatcggcggggccggctcccgggcccggccggctggaggagggagggaaggaggcgggagggagcgag

SEQ ID NO: 415345 - DNA, 378 bp, Homo sapiens; identical to SEQ ID NO: 278790
  chr1:117664693-117665071
  hyper

SEQ ID NO: 415346 - DNA, 263 bp, Homo sapiens; identical to SEQ ID NO: 278791
  chr1:117665105-117665368
  hyper

SEQ ID NO: 415347 - DNA, 412 bp, Homo sapiens; identical to SEQ ID NO: 227450
  chr1:118148622-118149034
  hyper

SEQ ID NO: 415348 - DNA, 236 bp, Homo sapiens; identical to SEQ ID NO: 278794
  chr1:118471568-118471804
  hyper

SEQ ID NO: 415349 - DNA, 78 bp, Homo sapiens; identical to SEQ ID NO: 104099
  chr1:118471866-118471944
  hyper

SEQ ID NO: 415350 - DNA, 119 bp, Homo sapiens; identical to SEQ ID NO: 227453
  chr1:118472379-118472498
  hyper

SEQ ID NO: 415351 - DNA, 136 bp, Homo sapiens; identical to SEQ ID NO: 278797
  chr1:119527652-119527788
  hyper

SEQ ID NO: 415352 - DNA, 48 bp, Homo sapiens; identical to SEQ ID NO: 278798
  chr1:119527820-119527868
  hyper

SEQ ID NO: 415353 - DNA, 224 bp, Homo sapiens; identical to SEQ ID NO: 278799
  chr1:119535349-119535573
  hyper

SEQ ID NO: 415354 - DNA, 80 bp, Homo sapiens; identical to SEQ ID NO: 197733
  chr1:119544707-119544787
  hyper

SEQ ID NO: 415355 - DNA, 74 bp, Homo sapiens; identical to SEQ ID NO: 227467
  chr1:119683271-119683345
  hyper

SEQ ID NO: 415356 - DNA, 113 bp, Homo sapiens; identical to SEQ ID NO: 278803
  chr1:119869837-119869950
  hyper

SEQ ID NO: 415357 - DNA, 426 bp, Homo sapiens; identical to SEQ ID NO: 278804
  chr1:119870254-119870680
  hyper

SEQ ID NO: 415358 - DNA, 293 bp, Homo sapiens; identical to SEQ ID NO: 197736
  chr1:120190872-120191165
  hyper

SEQ ID NO: 415359 - DNA, 68 bp, Homo sapiens; identical to SEQ ID NO: 197737
  chr1:120191312-120191380
  hyper

SEQ ID NO: 415360 - DNA, 255 bp, Homo sapiens; identical to SEQ ID NO: 227471
  chr1:120254605-120254860
  hyper

SEQ ID NO: 415361 - DNA, 217 bp, Homo sapiens; identical to SEQ ID NO: 227473
  chr1:150459684-150459901
  hyper

SEQ ID NO: 415362 - DNA, 38 bp, Homo sapiens; identical to SEQ ID NO: 227475
  chr1:150552000-150552038
  hyper

SEQ ID NO: 415363 - DNA, 61 bp, Homo sapiens; identical to SEQ ID NO: 197738
  chr1:150601697-150601758
  hyper

SEQ ID NO: 415364 - DNA, 69 bp, Homo sapiens; identical to SEQ ID NO: 227479
  chr1:150849135-150849204
  hyper

SEQ ID NO: 415365 - DNA, 87 bp, Homo sapiens; identical to SEQ ID NO: 227480
  chr1:150898621-150898708
  hyper

SEQ ID NO: 415366 - DNA, 33 bp, Homo sapiens; identical to SEQ ID NO: 197741
  chr1:150980783-150980816
  hyper

SEQ ID NO: 415367 - DNA, 201 bp, Homo sapiens; identical to SEQ ID NO: 104165
  chr1:150980853-150981054
  hyper

SEQ ID NO: 415368 - DNA, 55 bp, Homo sapiens; identical to SEQ ID NO: 197744
  chr1:151031281-151031336
  hyper

SEQ ID NO: 415369 - DNA, 170 bp, Homo sapiens; identical to SEQ ID NO: 227485
  chr1:151032105-151032275
  hyper

SEQ ID NO: 415370 - DNA, 106 bp, Homo sapiens; identical to SEQ ID NO: 227486
  chr1:151042862-151042968
  hyper

SEQ ID NO: 415371 - DNA, 238 bp, Homo sapiens; identical to SEQ ID NO: 197745
  chr1:151043249-151043487
  hyper

SEQ ID NO: 415372 - DNA, 189 bp, Homo sapiens; identical to SEQ ID NO: 227488
  chr1:151119043-151119232
  hyper

SEQ ID NO: 415373 - DNA, 78 bp, Homo sapiens; identical to SEQ ID NO: 227489
  chr1:151138453-151138531
  hyper

SEQ ID NO: 415374 - DNA, 132 bp, Homo sapiens; identical to SEQ ID NO: 227490
  chr1:151170900-151171032
  hyper

SEQ ID NO: 415375 - DNA, 178 bp, Homo sapiens; identical to SEQ ID NO: 227491
  chr1:151254486-151254664
  hyper

SEQ ID NO: 415376 - DNA, 48 bp, Homo sapiens; identical to SEQ ID NO: 227492
  chr1:151319768-151319816
  hyper

SEQ ID NO: 415377 - DNA, 232 bp, Homo sapiens; identical to SEQ ID NO: 227493
  chr1:151483994-151484226
  hyper

SEQ ID NO: 415378 - DNA, 565 bp, Homo sapiens; identical to SEQ ID NO: 197746
  chr1:151512578-151513143
  hyper

SEQ ID NO: 415379 - DNA, 259 bp, Homo sapiens; identical to SEQ ID NO: 197747
  chr1:151513212-151513471
  hyper

SEQ ID NO: 415380 - DNA, 46 bp, Homo sapiens; identical to SEQ ID NO: 387637
  chr1:151566653-151566699
  hyper

SEQ ID NO: 415381 - DNA, 289 bp, Homo sapiens; identical to SEQ ID NO: 227496
  chr1:151584377-151584666
  hyper

SEQ ID NO: 415382 - DNA, 34 bp, Homo sapiens; identical to SEQ ID NO: 197749
  chr1:151584888-151584922
  hyper

SEQ ID NO: 415383 - DNA, 146 bp, Homo sapiens; identical to SEQ ID NO: 278834
  chr1:151689189-151689335
  hyper

SEQ ID NO: 415384 - DNA, 110 bp, Homo sapiens; identical to SEQ ID NO: 197753
  chr1:151762601-151762711
  hyper

SEQ ID NO: 415385 - DNA, 303 bp, Homo sapiens; identical to SEQ ID NO: 278838
  chr1:151763859-151764162
  hyper

SEQ ID NO: 415386 - DNA, 86 bp, Homo sapiens; identical to SEQ ID NO: 278840
  chr1:151811028-151811114
  hyper

SEQ ID NO: 415387 - DNA, 45 bp, Homo sapiens; identical to SEQ ID NO: 197754
  chr1:151966778-151966823
  hyper

SEQ ID NO: 415388 - DNA, 144 bp, Homo sapiens; identical to SEQ ID NO: 227505
  chr1:152008864-152009008
  hyper

SEQ ID NO: 415389 - DNA, 83 bp, Homo sapiens; identical to SEQ ID NO: 227508
  chr1:152082878-152082961
  hyper

SEQ ID NO: 415390 - DNA, 90 bp, Homo sapiens; identical to SEQ ID NO: 278845
  chr1:152084599-152084689
  hyper

SEQ ID NO: 415391 - DNA, 46 bp, Homo sapiens; identical to SEQ ID NO: 227511
  chr1:153377336-153377382
  hyper

SEQ ID NO: 415392 - DNA, 176 bp, Homo sapiens; identical to SEQ ID NO: 227514
  chr1:153508699-153508875
  hyper

SEQ ID NO: 415393 - DNA, 75 bp, Homo sapiens; identical to SEQ ID NO: 227515
  chr1:153606602-153606677
  hyper

SEQ ID NO: 415394 - DNA, 180 bp, Homo sapiens; identical to SEQ ID NO: 227516
  chr1:153631120-153631300
  hyper

SEQ ID NO: 415395 - DNA, 419 bp, Homo sapiens; identical to SEQ ID NO: 395602
  chr1:153651023-153651442
  hyper

SEQ ID NO: 415396 - DNA, 189 bp, Homo sapiens; identical to SEQ ID NO: 227519
  chr1:153895707-153895896
  hyper

SEQ ID NO: 415397 - DNA, 208 bp, Homo sapiens; identical to SEQ ID NO: 227520
  chr1:153919195-153919403
  hyper

SEQ ID NO: 415398 - DNA, 108 bp, Homo sapiens; identical to SEQ ID NO: 227521
  chr1:153931160-153931268
  hyper

SEQ ID NO: 415399 - DNA, 172 bp, Homo sapiens; identical to SEQ ID NO: 227522
  chr1:153936113-153936285
  hyper

SEQ ID NO: 415400 - DNA, 176 bp, Homo sapiens; identical to SEQ ID NO: 197756
  chr1:153936615-153936791
  hyper

SEQ ID NO: 415401 - DNA, 156 bp, Homo sapiens; identical to SEQ ID NO: 197757
  chr1:153940532-153940688
  hyper

SEQ ID NO: 415402 - DNA, 330 bp, Homo sapiens; identical to SEQ ID NO: 197758
  chr1:153958647-153958977
  hyper

SEQ ID NO: 415403 - DNA, 308 bp, Homo sapiens; identical to SEQ ID NO: 104239
  chr1:153963300-153963608
  hyper

SEQ ID NO: 415404 - DNA, 135 bp, Homo sapiens; identical to SEQ ID NO: 227525
  chr1:154244745-154244880
  hyper

SEQ ID NO: 415405 - DNA, 215 bp, Homo sapiens; identical to SEQ ID NO: 227528
  chr1:154377607-154377822
  hyper

SEQ ID NO: 415406 - DNA, 68 bp, Homo sapiens; identical to SEQ ID NO: 227529
  chr1:154531379-154531447
  hyper

SEQ ID NO: 415407 - DNA, 53 bp, Homo sapiens; identical to SEQ ID NO: 227531
  chr1:154600442-154600495
  hyper

SEQ ID NO: 415408 - DNA, 79 bp, Homo sapiens; identical to SEQ ID NO: 197762
  chr1:154842703-154842782
  hyper

SEQ ID NO: 415409 - DNA, 643 bp, Homo sapiens; identical to SEQ ID NO: 227533
  chr1:154909302-154909945
  hyper

SEQ ID NO: 415410 - DNA, 195 bp, Homo sapiens; identical to SEQ ID NO: 197764
  chr1:154955613-154955808
  hyper

SEQ ID NO: 415411 - DNA, 812 bp, Homo sapiens; identical to SEQ ID NO: 227536
  chr1:155036005-155036817
  hyper

SEQ ID NO: 415412 - DNA, 238 bp, Homo sapiens; identical to SEQ ID NO: 227538
  chr1:155051346-155051584
  hyper

SEQ ID NO: 415413 - DNA, 537 bp, Homo sapiens; identical to SEQ ID NO: 278874
  chr1:155099556-155100093
  hyper

SEQ ID NO: 415414 - DNA, 225 bp, Homo sapiens; identical to SEQ ID NO: 197769
  chr1:155100352-155100577
  hyper

SEQ ID NO: 415415 - DNA, 63 bp, Homo sapiens; identical to SEQ ID NO: 278876
  chr1:155147170-155147233
  hyper

SEQ ID NO: 415416 - DNA, 114 bp, Homo sapiens; identical to SEQ ID NO: 36305
  chr1:155147320-155147434
  hyper

SEQ ID NO: 415417 - DNA, 443 bp, Homo sapiens; identical to SEQ ID NO: 278878
  chr1:155152069-155152512
  hyper

SEQ ID NO: 415418 - DNA, 182 bp, Homo sapiens; identical to SEQ ID NO: 197773
  chr1:155178388-155178570
  hyper

SEQ ID NO: 415419 - DNA, 117 bp, Homo sapiens; identical to SEQ ID NO: 227546
  chr1:155179121-155179238
  hyper

SEQ ID NO: 415420 - DNA, 115 bp, Homo sapiens; identical to SEQ ID NO: 227547
  chr1:155278330-155278445
  hyper

SEQ ID NO: 415421 - DNA, 34 bp, Homo sapiens; identical to SEQ ID NO: 227548
  chr1:155278672-155278706
  hyper

SEQ ID NO: 415422 - DNA, 457 bp, Homo sapiens; identical to SEQ ID NO: 221478
  chr1:155294652-155295109
  hyper

SEQ ID NO: 415423 - DNA, 265 bp, Homo sapiens; identical to SEQ ID NO: 278886
  chr1:155830059-155830324
  hyper

SEQ ID NO: 415424 - DNA, 127 bp, Homo sapiens; identical to SEQ ID NO: 197775
  chr1:155830382-155830509
  hyper

SEQ ID NO: 415425 - DNA, 179 bp, Homo sapiens; identical to SEQ ID NO: 227551
  chr1:155904142-155904321
  hyper

SEQ ID NO: 415426 - DNA, 221 bp, Homo sapiens; identical to SEQ ID NO: 227552
  chr1:155946472-155946693
  hyper

SEQ ID NO: 415427 - DNA, 65 bp, Homo sapiens; identical to SEQ ID NO: 227553
  chr1:156023928-156023993
  hyper

SEQ ID NO: 415428 - DNA, 126 bp, Homo sapiens; identical to SEQ ID NO: 227554
  chr1:156024563-156024689
  hyper

SEQ ID NO: 415429 - DNA, 157 bp, Homo sapiens; identical to SEQ ID NO: 197778
  chr1:156084256-156084413
  hyper

SEQ ID NO: 415430 - DNA, 423 bp, Homo sapiens; identical to SEQ ID NO: 278895
  chr1:156084629-156085052
  hyper

SEQ ID NO: 415431 - DNA, 169 bp, Homo sapiens; identical to SEQ ID NO: 227558
  chr1:156182942-156183111
  hyper

SEQ ID NO: 415432 - DNA, 360 bp, Homo sapiens; identical to SEQ ID NO: 227560
  chr1:156307948-156308308
  hyper

SEQ ID NO: 415433 - DNA, 95 bp, Homo sapiens; identical to SEQ ID NO: 278903
  chr1:156406613-156406708
  hyper

SEQ ID NO: 415434 - DNA, 80 bp, Homo sapiens; identical to SEQ ID NO: 227567
  chr1:156427347-156427427
  hyper

SEQ ID NO: 415435 - DNA, 205 bp, Homo sapiens; identical to SEQ ID NO: 227569
  chr1:156469263-156469468
  hyper

SEQ ID NO: 415436 - DNA, 262 bp, Homo sapiens; identical to SEQ ID NO: 278906
  chr1:156541960-156542222
  hyper

SEQ ID NO: 415437 - DNA, 113 bp, Homo sapiens; identical to SEQ ID NO: 221488
  chr1:156542391-156542504
  hyper

SEQ ID NO: 415438 - DNA, 139 bp, Homo sapiens; identical to SEQ ID NO: 227570
  chr1:156571300-156571439
  hyper

SEQ ID NO: 415439 - DNA, 38 bp, Homo sapiens; identical to SEQ ID NO: 197784
  chr1:156595265-156595303
  hyper

SEQ ID NO: 415440 - DNA, 70 bp, Homo sapiens; identical to SEQ ID NO: 278912
  chr1:156611643-156611713
  hyper

SEQ ID NO: 415441 - DNA, 47 bp, Homo sapiens; identical to SEQ ID NO: 278913
  chr1:156612119-156612166
  hyper

SEQ ID NO: 415442 - DNA, 209 bp, Homo sapiens; identical to SEQ ID NO: 227574
  chr1:156627378-156627587
  hyper

SEQ ID NO: 415443 - DNA, 62 bp, Homo sapiens; identical to SEQ ID NO: 197787
  chr1:156647957-156648019
  hyper

SEQ ID NO: 415444 - DNA, 126 bp, Homo sapiens; identical to SEQ ID NO: 197788
  chr1:156675374-156675500
  hyper

SEQ ID NO: 415445 - DNA, 618 bp, Homo sapiens; identical to SEQ ID NO: 278921
  chr1:156675831-156676449
  hyper

SEQ ID NO: 415446 - DNA, 135 bp, Homo sapiens; identical to SEQ ID NO: 197790
  chr1:156676539-156676674
  hyper

SEQ ID NO: 415447 - DNA, 222 bp, Homo sapiens; identical to SEQ ID NO: 227581
  chr1:156710901-156711123
  hyper

SEQ ID NO: 415448 - DNA, 45 bp, Homo sapiens; identical to SEQ ID NO: 197791
  chr1:156716455-156716500
  hyper

SEQ ID NO: 415449 - DNA, 60 bp, Homo sapiens; identical to SEQ ID NO: 197792
  chr1:156716530-156716590
  hyper

SEQ ID NO: 415450 - DNA, 47 bp, Homo sapiens; identical to SEQ ID NO: 227584
  chr1:156721109-156721156
  hyper

SEQ ID NO: 415451 - DNA, 209 bp, Homo sapiens; identical to SEQ ID NO: 227585
  chr1:156722050-156722259
  hyper

SEQ ID NO: 415452 - DNA, 138 bp, Homo sapiens; identical to SEQ ID NO: 227586
  chr1:156737022-156737160
  hyper

SEQ ID NO: 415453 - DNA, 110 bp, Homo sapiens; identical to SEQ ID NO: 278929
  chr1:156830840-156830950
  hyper

SEQ ID NO: 415454 - DNA, 73 bp, Homo sapiens; identical to SEQ ID NO: 278930
  chr1:156890423-156890496
  hyper

SEQ ID NO: 415455 - DNA, 177 bp, Homo sapiens; identical to SEQ ID NO: 197793
  chr1:156897224-156897401
  hyper

SEQ ID NO: 415456 - DNA, 222 bp, Homo sapiens; identical to SEQ ID NO: 197794
  chr1:156897431-156897653
  hyper

SEQ ID NO: 415457 - DNA, 126 bp, Homo sapiens; identical to SEQ ID NO: 197795
  chr1:157108692-157108818
  hyper

SEQ ID NO: 415458 - DNA, 279 bp, Homo sapiens; identical to SEQ ID NO: 278934
  chr1:157963009-157963288
  hyper

SEQ ID NO: 415459 - DNA, 221 bp, Homo sapiens; identical to SEQ ID NO: 197797
  chr1:157963516-157963737
  hyper

SEQ ID NO: 415460 - DNA, 178 bp, Homo sapiens; identical to SEQ ID NO: 227596
  chr1:158088031-158088209
  hyper

SEQ ID NO: 415461 - DNA, 429 bp, Homo sapiens; identical to SEQ ID NO: 278938
  chr1:159141761-159142190
  hyper

SEQ ID NO: 415462 - DNA, 120 bp, Homo sapiens; identical to SEQ ID NO: 278939
  chr1:159158185-159158305
  hyper

SEQ ID NO: 415463 - DNA, 32 bp, Homo sapiens; identical to SEQ ID NO: 278940
  chr1:159750347-159750379
  hyper

SEQ ID NO: 415464 - DNA, 361 bp, Homo sapiens; identical to SEQ ID NO: 278941
  chr1:159750772-159751133
  hyper

SEQ ID NO: 415465 - DNA, 68 bp, Homo sapiens; identical to SEQ ID NO: 278942
  chr1:159751247-159751315
  hyper

SEQ ID NO: 415466 - DNA, 676 bp, Homo sapiens; identical to SEQ ID NO: 104420
  chr1:159824348-159825024
  hyper

SEQ ID NO: 415467 - DNA, 386 bp, Homo sapiens; identical to SEQ ID NO: 278945
  chr1:159915360-159915746
  hyper

SEQ ID NO: 415468 - DNA, 58 bp, Homo sapiens; identical to SEQ ID NO: 278946
  chr1:159915791-159915849
  hyper

SEQ ID NO: 415469 - DNA, 223 bp, Homo sapiens; identical to SEQ ID NO: 227603
  chr1:160001425-160001648
  hyper

SEQ ID NO: 415470 - DNA, 49 bp, Homo sapiens; identical to SEQ ID NO: 197803
  chr1:160039928-160039977
  hyper

SEQ ID NO: 415471 - DNA, 401 bp, Homo sapiens; identical to SEQ ID NO: 227607
  chr1:160053733-160054134
  hyper

SEQ ID NO: 415472 - DNA, 92 bp, Homo sapiens; identical to SEQ ID NO: 227608
  chr1:160055539-160055631
  hyper

SEQ ID NO: 415473 - DNA, 43 bp, Homo sapiens; identical to SEQ ID NO: 227609
  chr1:160232422-160232465
  hyper

SEQ ID NO: 415474 - DNA, 188 bp, Homo sapiens; identical to SEQ ID NO: 197809
  chr1:160526915-160527103
  hyper

SEQ ID NO: 415475 - DNA, 148 bp, Homo sapiens; identical to SEQ ID NO: 227614
  chr1:161015808-161015956
  hyper

SEQ ID NO: 415476 - DNA, 56 bp, Homo sapiens; identical to SEQ ID NO: 278961
  chr1:161067872-161067928
  hyper

SEQ ID NO: 415477 - DNA, 152 bp, Homo sapiens; identical to SEQ ID NO: 278962
  chr1:161068574-161068726
  hyper

SEQ ID NO: 415478 - DNA, 41 bp, Homo sapiens; identical to SEQ ID NO: 227616
  chr1:161087909-161087950
  hyper

SEQ ID NO: 415479 - DNA, 106 bp, Homo sapiens; identical to SEQ ID NO: 227617
  chr1:161102589-161102695
  hyper

SEQ ID NO: 415480 - DNA, 120 bp, Homo sapiens; identical to SEQ ID NO: 227618
  chr1:161123623-161123743
  hyper

SEQ ID NO: 415481 - DNA, 60 bp, Homo sapiens; identical to SEQ ID NO: 227619
  chr1:161129125-161129185
  hyper

SEQ ID NO: 415482 - DNA, 131 bp, Homo sapiens; identical to SEQ ID NO: 227620
  chr1:161136046-161136177
  hyper

SEQ ID NO: 415483 - DNA, 99 bp, Homo sapiens; identical to SEQ ID NO: 197812
  chr1:161171825-161171924
  hyper

SEQ ID NO: 415484 - DNA, 209 bp, Homo sapiens; identical to SEQ ID NO: 278971
  chr1:161228440-161228649
  hyper

SEQ ID NO: 415485 - DNA, 190 bp, Homo sapiens; identical to SEQ ID NO: 227626
  chr1:161283831-161284021
  hyper

SEQ ID NO: 415486 - DNA, 285 bp, Homo sapiens; identical to SEQ ID NO: 227636
  chr1:161696448-161696733
  hyper

SEQ ID NO: 415487 - DNA, 35 bp, Homo sapiens; identical to SEQ ID NO: 197821
  chr1:161736084-161736119
  hyper

SEQ ID NO: 415488 - DNA, 343 bp, Homo sapiens; identical to SEQ ID NO: 227640
  chr1:162530845-162531188
  hyper

SEQ ID NO: 415489 - DNA, 125 bp, Homo sapiens; identical to SEQ ID NO: 227641
  chr1:162531409-162531534
  hyper

SEQ ID NO: 415490 - DNA, 70 bp, Homo sapiens; identical to SEQ ID NO: 227643
  chr1:163291479-163291549
  hyper

SEQ ID NO: 415491 - DNA, 131 bp, Homo sapiens; identical to SEQ ID NO: 36436
  chr1:164290723-164290854
  hyper

SEQ ID NO: 415492 - DNA, 312 bp, Homo sapiens; identical to SEQ ID NO: 227645
  chr1:164529156-164529468
  hyper

SEQ ID NO: 415493 - DNA, 393 bp, Homo sapiens; identical to SEQ ID NO: 278998
  chr1:165321203-165321596
  hyper

SEQ ID NO: 415494 - DNA, 241 bp, Homo sapiens; identical to SEQ ID NO: 278999
  chr1:165321942-165322183
  hyper

SEQ ID NO: 415495 - DNA, 177 bp, Homo sapiens; identical to SEQ ID NO: 279000
  chr1:165322220-165322397
  hyper

SEQ ID NO: 415496 - DNA, 106 bp, Homo sapiens; identical to SEQ ID NO: 104504
  chr1:165322515-165322621
  hyper

SEQ ID NO: 415497 - DNA, 42 bp, Homo sapiens; identical to SEQ ID NO: 197830
  chr1:165323109-165323151
  hyper

SEQ ID NO: 415498 - DNA, 66 bp, Homo sapiens; identical to SEQ ID NO: 197831
  chr1:165323181-165323247
  hyper

SEQ ID NO: 415499 - DNA, 38 bp, Homo sapiens; identical to SEQ ID NO: 197832
  chr1:165323481-165323519
  hyper

SEQ ID NO: 415500 - DNA, 189 bp, Homo sapiens; identical to SEQ ID NO: 279005
  chr1:165345284-165345473
  hyper

SEQ ID NO: 415501 - DNA, 55 bp, Homo sapiens; identical to SEQ ID NO: 197834
  chr1:165599887-165599942
  hyper

SEQ ID NO: 415502 - DNA, 124 bp, Homo sapiens; identical to SEQ ID NO: 227657
  chr1:165667436-165667560
  hyper

SEQ ID NO: 415503 - DNA, 189 bp, Homo sapiens; identical to SEQ ID NO: 227658
  chr1:165667892-165668081
  hyper

SEQ ID NO: 415504 - DNA, 33 bp, Homo sapiens; identical to SEQ ID NO: 227661
  chr1:166136429-166136462
  hyper

SEQ ID NO: 415505 - DNA, 95 bp, Homo sapiens; identical to SEQ ID NO: 227662
  chr1:166808337-166808432
  hyper

SEQ ID NO: 415506 - DNA, 39 bp, Homo sapiens; identical to SEQ ID NO: 279014
  chr1:166853524-166853563
  hyper

SEQ ID NO: 415507 - DNA, 61 bp, Homo sapiens; identical to SEQ ID NO: 279015
  chr1:166853592-166853653
  hyper

SEQ ID NO: 415508 - DNA, 44 bp, Homo sapiens; identical to SEQ ID NO: 279016
  chr1:166853747-166853791
  hyper

SEQ ID NO: 415509 - DNA, 208 bp, Homo sapiens; identical to SEQ ID NO: 197837
  chr1:166944964-166945172
  hyper

SEQ ID NO: 415510 - DNA, 41 bp, Homo sapiens; identical to SEQ ID NO: 197838
  chr1:167028536-167028577
  hyper

SEQ ID NO: 415511 - DNA, 108 bp, Homo sapiens; identical to SEQ ID NO: 279019
  chr1:167090757-167090865
  hyper

SEQ ID NO: 415512 - DNA, 252 bp, Homo sapiens; identical to SEQ ID NO: 227667
  chr1:167189609-167189861
  hyper

SEQ ID NO: 415513 - DNA, 237 bp, Homo sapiens; identical to SEQ ID NO: 197839
  chr1:167190164-167190401
  hyper

SEQ ID NO: 415514 - DNA, 165 bp, Homo sapiens; identical to SEQ ID NO: 197840
  chr1:167423949-167424114
  hyper

SEQ ID NO: 415515 - DNA, 131 bp, Homo sapiens; identical to SEQ ID NO: 227669
  chr1:167424548-167424679
  hyper

SEQ ID NO: 415516 - DNA, 77 bp, Homo sapiens; identical to SEQ ID NO: 197841
  chr1:167522408-167522485
  hyper

SEQ ID NO: 415517 - DNA, 34 bp, Homo sapiens; identical to SEQ ID NO: 227671
  chr1:167523050-167523084
  hyper

SEQ ID NO: 415518 - DNA, 199 bp, Homo sapiens; identical to SEQ ID NO: 227673
  chr1:167691106-167691305
  hyper

SEQ ID NO: 415519 - DNA, 390 bp, Homo sapiens; identical to SEQ ID NO: 227674
  chr1:167906376-167906766
  hyper

SEQ ID NO: 415520 - DNA, 177 bp, Homo sapiens; identical to SEQ ID NO: 227675
  chr1:168105713-168105890
  hyper

SEQ ID NO: 415521 - DNA, 243 bp, Homo sapiens; identical to SEQ ID NO: 227676
  chr1:168194875-168195118
  hyper

SEQ ID NO: 415522 - DNA, 189 bp, Homo sapiens; identical to SEQ ID NO: 227677
  chr1:168195384-168195573
  hyper

SEQ ID NO: 415523 - DNA, 332 bp, Homo sapiens; identical to SEQ ID NO: 197845
  chr1:169076042-169076374
  hyper

SEQ ID NO: 415524 - DNA, 191 bp, Homo sapiens; identical to SEQ ID NO: 227680
  chr1:169337029-169337220
  hyper

SEQ ID NO: 415525 - DNA, 150 bp, Homo sapiens; identical to SEQ ID NO: 197846
  chr1:169454465-169454615
  hyper

SEQ ID NO: 415526 - DNA, 202 bp, Homo sapiens; identical to SEQ ID NO: 227683
  chr1:169455342-169455544
  hyper

SEQ ID NO: 415527 - DNA, 358 bp, Homo sapiens; identical to SEQ ID NO: 227684
  chr1:169763976-169764334
  hyper

SEQ ID NO: 415528 - DNA, 37 bp, Homo sapiens; identical to SEQ ID NO: 197847
  chr1:170043654-170043691
  hyper

SEQ ID NO: 415529 - DNA, 92 bp, Homo sapiens; identical to SEQ ID NO: 227686
  chr1:170043982-170044074
  hyper

SEQ ID NO: 415530 - DNA, 185 bp, Homo sapiens; identical to SEQ ID NO: 279043
  chr1:170634283-170634468
  hyper

SEQ ID NO: 415531 - DNA, 31 bp, Homo sapiens; identical to SEQ ID NO: 227691
  chr1:170634835-170634866
  hyper

SEQ ID NO: 415532 - DNA, 32 bp, Homo sapiens; identical to SEQ ID NO: 383769
  chr1:171220888-171220920
  hyper

SEQ ID NO: 415533 - DNA, 97 bp, Homo sapiens; identical to SEQ ID NO: 197850
  chr1:171220980-171221077
  hyper

SEQ ID NO: 415534 - DNA, 153 bp, Homo sapiens; identical to SEQ ID NO: 197851
  chr1:171455049-171455202
  hyper

SEQ ID NO: 415535 - DNA, 271 bp, Homo sapiens; identical to SEQ ID NO: 227697
  chr1:171711247-171711518
  hyper

SEQ ID NO: 415536 - DNA, 626 bp, Homo sapiens; identical to SEQ ID NO: 227698
  chr1:171750679-171751305
  hyper

SEQ ID NO: 415537 - DNA, 116 bp, Homo sapiens; identical to SEQ ID NO: 227700
  chr1:172412823-172412939
  hyper

SEQ ID NO: 415538 - DNA, 111 bp, Homo sapiens; identical to SEQ ID NO: 279054
  chr1:172501926-172502037
  hyper

SEQ ID NO: 415539 - DNA, 350 bp, Homo sapiens; identical to SEQ ID NO: 104599
  chr1:172502085-172502435
  hyper

SEQ ID NO: 415540 - DNA, 54 bp, Homo sapiens; identical to SEQ ID NO: 197854
  chr1:173793622-173793676
  hyper

SEQ ID NO: 415541 - DNA, 345 bp, Homo sapiens; identical to SEQ ID NO: 104607
  chr1:173793729-173794074
  hyper

SEQ ID NO: 415542 - DNA, 95 bp, Homo sapiens; identical to SEQ ID NO: 197856
  chr1:173836713-173836808
  hyper

SEQ ID NO: 415543 - DNA, 37 bp, Homo sapiens; identical to SEQ ID NO: 227706
  chr1:173837159-173837196
  hyper

SEQ ID NO: 415544 - DNA, 152 bp, Homo sapiens; identical to SEQ ID NO: 227707
  chr1:174968320-174968472
  hyper

SEQ ID NO: 415545 - DNA, 134 bp, Homo sapiens; identical to SEQ ID NO: 227708
  chr1:174968762-174968896
  hyper

SEQ ID NO: 415546 - DNA, 89 bp, Homo sapiens; identical to SEQ ID NO: 227711
  chr1:176176505-176176594
  hyper

SEQ ID NO: 415547 - DNA, 212 bp, Homo sapiens; identical to SEQ ID NO: 221520
  chr1:178693954-178694166
  hyper

SEQ ID NO: 415548 - DNA, 38 bp, Homo sapiens; identical to SEQ ID NO: 279075
  chr1:179050619-179050657
  hyper

SEQ ID NO: 415549 - DNA, 39 bp, Homo sapiens; identical to SEQ ID NO: 227718
  chr1:179262758-179262797
  hyper

SEQ ID NO: 415550 - DNA, 91 bp, Homo sapiens; identical to SEQ ID NO: 279077
  chr1:179545304-179545395
  hyper

SEQ ID NO: 415551 - DNA, 42 bp, Homo sapiens; identical to SEQ ID NO: 197863
  chr1:179711890-179711932
  hyper

SEQ ID NO: 415552 - DNA, 402 bp, Homo sapiens; identical to SEQ ID NO: 279079
  chr1:179851080-179851482
  hyper

SEQ ID NO: 415553 - DNA, 96 bp, Homo sapiens; identical to SEQ ID NO: 104653
  chr1:179851494-179851590
  hyper

SEQ ID NO: 415554 - DNA, 360 bp, Homo sapiens; identical to SEQ ID NO: 227722
  chr1:179923500-179923860
  hyper

SEQ ID NO: 415555 - DNA, 68 bp, Homo sapiens; identical to SEQ ID NO: 279084
  chr1:180197993-180198061
  hyper

SEQ ID NO: 415556 - DNA, 91 bp, Homo sapiens; identical to SEQ ID NO: 197866
  chr1:180472131-180472222
  hyper

SEQ ID NO: 415557 - DNA, 45 bp, Homo sapiens; identical to SEQ ID NO: 197867
  chr1:180881296-180881341
  hyper

SEQ ID NO: 415558 - DNA, 255 bp, Homo sapiens; identical to SEQ ID NO: 197868
  chr1:180881580-180881835
  hyper

SEQ ID NO: 415559 - DNA, 140 bp, Homo sapiens; identical to SEQ ID NO: 279089
  chr1:180881864-180882004
  hyper

SEQ ID NO: 415560 - DNA, 110 bp, Homo sapiens; identical to SEQ ID NO: 279090
  chr1:180882432-180882542
  hyper

SEQ ID NO: 415561 - DNA, 38 bp, Homo sapiens; identical to SEQ ID NO: 197871
  chr1:181287267-181287305
  hyper

SEQ ID NO: 415562 - DNA, 121 bp, Homo sapiens; identical to SEQ ID NO: 279094
  chr1:181288202-181288323
  hyper

SEQ ID NO: 415563 - DNA, 82 bp, Homo sapiens; identical to SEQ ID NO: 279095
  chr1:182026347-182026429
  hyper

SEQ ID NO: 415564 - DNA, 115 bp, Homo sapiens; identical to SEQ ID NO: 227737
  chr1:182358842-182358957
  hyper

SEQ ID NO: 415565 - DNA, 89 bp, Homo sapiens; identical to SEQ ID NO: 279097
  chr1:182359608-182359697
  hyper

SEQ ID NO: 415566 - DNA, 46 bp, Homo sapiens; identical to SEQ ID NO: 279098
  chr1:182359742-182359788
  hyper

SEQ ID NO: 415567 - DNA, 57 bp, Homo sapiens; identical to SEQ ID NO: 197872
  chr1:182360260-182360317
  hyper

SEQ ID NO: 415568 - DNA, 71 bp, Homo sapiens; identical to SEQ ID NO: 197873
  chr1:182360888-182360959
  hyper

SEQ ID NO: 415569 - DNA, 435 bp, Homo sapiens; identical to SEQ ID NO: 227740
  chr1:182557967-182558402
  hyper

SEQ ID NO: 415570 - DNA, 95 bp, Homo sapiens; identical to SEQ ID NO: 279105
  chr1:182758310-182758405
  hyper

SEQ ID NO: 415571 - DNA, 225 bp, Homo sapiens; identical to SEQ ID NO: 227744
  chr1:182991637-182991862
  hyper

SEQ ID NO: 415572 - DNA, 343 bp, Homo sapiens; identical to SEQ ID NO: 197876
  chr1:182992844-182993187
  hyper

SEQ ID NO: 415573 - DNA, 291 bp, Homo sapiens; identical to SEQ ID NO: 221529
  chr1:183155179-183155470
  hyper

SEQ ID NO: 415574 - DNA, 201 bp, Homo sapiens; identical to SEQ ID NO: 227747
  chr1:183441278-183441479
  hyper

SEQ ID NO: 415575 - DNA, 193 bp, Homo sapiens; identical to SEQ ID NO: 227748
  chr1:183604496-183604689
  hyper

SEQ ID NO: 415576 - DNA, 144 bp, Homo sapiens; identical to SEQ ID NO: 227749
  chr1:183605167-183605311
  hyper

SEQ ID NO: 415577 - DNA, 332 bp, Homo sapiens; identical to SEQ ID NO: 197877
  chr1:183774429-183774761
  hyper

SEQ ID NO: 415578 - DNA, 507 bp, Homo sapiens; identical to SEQ ID NO: 197878
  chr1:184355381-184355888
  hyper

SEQ ID NO: 415579 - DNA, 278 bp, Homo sapiens; identical to SEQ ID NO: 197879
  chr1:184355936-184356214
  hyper

SEQ ID NO: 415580 - DNA, 146 bp, Homo sapiens; identical to SEQ ID NO: 197880
  chr1:184356541-184356687
  hyper

SEQ ID NO: 415581 - DNA, 60 bp, Homo sapiens; identical to SEQ ID NO: 383773
  chr1:184722970-184723030
  hyper

SEQ ID NO: 415582 - DNA, 367 bp, Homo sapiens; identical to SEQ ID NO: 227756
  chr1:184724483-184724850
  hyper

SEQ ID NO: 415583 - DNA, 254 bp, Homo sapiens; identical to SEQ ID NO: 227759
  chr1:185125952-185126206
  hyper

SEQ ID NO: 415584 - DNA, 374 bp, Homo sapiens; identical to SEQ ID NO: 227760
  chr1:185286448-185286822
  hyper

SEQ ID NO: 415585 - DNA, 176 bp, Homo sapiens; identical to SEQ ID NO: 227761
  chr1:185643478-185643654
  hyper

SEQ ID NO: 415586 - DNA, 519 bp, Homo sapiens; identical to SEQ ID NO: 227762
  chr1:185703184-185703703
  hyper

SEQ ID NO: 415587 - DNA, 65 bp, Homo sapiens; identical to SEQ ID NO: 279127
  chr1:186344948-186345013
  hyper

SEQ ID NO: 415588 - DNA, 409 bp, Homo sapiens; identical to SEQ ID NO: 197885
  chr1:186649187-186649596
  hyper

SEQ ID NO: 415589 - DNA, 258 bp, Homo sapiens; identical to SEQ ID NO: 197886
  chr1:186649698-186649956
  hyper

SEQ ID NO: 415590 - DNA, 61 bp, Homo sapiens; identical to SEQ ID NO: 279130
  chr1:186650033-186650094
  hyper

SEQ ID NO: 415591 - DNA, 493 bp, Homo sapiens; identical to SEQ ID NO: 227765
  chr1:186798092-186798585
  hyper

SEQ ID NO: 415592 - DNA, 43 bp, Homo sapiens; identical to SEQ ID NO: 197887
  chr1:190444812-190444855
  hyper

SEQ ID NO: 415593 - DNA, 45 bp, Homo sapiens; identical to SEQ ID NO: 279133
  chr1:190445093-190445138
  hyper

SEQ ID NO: 415594 - DNA, 73 bp, Homo sapiens; identical to SEQ ID NO: 227770
  chr1:190448067-190448140
  hyper

SEQ ID NO: 415595 - DNA, 139 bp, Homo sapiens; identical to SEQ ID NO: 227771
  chr1:193028795-193028934
  hyper

SEQ ID NO: 415596 - DNA, 107 bp, Homo sapiens; identical to SEQ ID NO: 227772
  chr1:193074685-193074792
  hyper

SEQ ID NO: 415597 - DNA, 93 bp, Homo sapiens; identical to SEQ ID NO: 227773
  chr1:193091321-193091414
  hyper

SEQ ID NO: 415598 - DNA, 161 bp, Homo sapiens; identical to SEQ ID NO: 279140
  chr1:196578387-196578548
  hyper

SEQ ID NO: 415599 - DNA, 59 bp, Homo sapiens; identical to SEQ ID NO: 197890
  chr1:197744743-197744802
  hyper

SEQ ID NO: 415600 - DNA, 87 bp, Homo sapiens; identical to SEQ ID NO: 197894
  chr1:197889656-197889743
  hyper

SEQ ID NO: 415601 - DNA, 82 bp, Homo sapiens; identical to SEQ ID NO: 197896
  chr1:200009450-200009532
  hyper

SEQ ID NO: 415602 - DNA, 118 bp, Homo sapiens; identical to SEQ ID NO: 227789
  chr1:200589896-200590014
  hyper

SEQ ID NO: 415603 - DNA, 235 bp, Homo sapiens; identical to SEQ ID NO: 197899
  chr1:200708632-200708867
  hyper

SEQ ID NO: 415604 - DNA, 816 bp, Homo sapiens; identical to SEQ ID NO: 279158
  chr1:201083266-201084082
  hyper

SEQ ID NO: 415605 - DNA, 233 bp, Homo sapiens; identical to SEQ ID NO: 197903
  chr1:201437933-201438166
  hyper

SEQ ID NO: 415606 - DNA, 204 bp, Homo sapiens; identical to SEQ ID NO: 279166
  chr1:201476297-201476501
  hyper

SEQ ID NO: 415607 - DNA, 453 bp, Homo sapiens; identical to SEQ ID NO: 197905
  chr1:201857901-201858354
  hyper

SEQ ID NO: 415608 - DNA, 169 bp, Homo sapiens; identical to SEQ ID NO: 279170
  chr1:201924323-201924492
  hyper

SEQ ID NO: 415609 - DNA, 549 bp, Homo sapiens; identical to SEQ ID NO: 221540
  chr1:202162904-202163453
  hyper

SEQ ID NO: 415610 - DNA, 205 bp, Homo sapiens; identical to SEQ ID NO: 227802
  chr1:202317590-202317795
  hyper

SEQ ID NO: 415611 - DNA, 83 bp, Homo sapiens; identical to SEQ ID NO: 279176
  chr1:202611678-202611761
  hyper

SEQ ID NO: 415612 - DNA, 983 bp, Homo sapiens; identical to SEQ ID NO: 279177
  chr1:202612039-202613022
  hyper

SEQ ID NO: 415613 - DNA, 62 bp, Homo sapiens; identical to SEQ ID NO: 279179
  chr1:202679708-202679770
  hyper

SEQ ID NO: 415614 - DNA, 51 bp, Homo sapiens; identical to SEQ ID NO: 197910
  chr1:202830113-202830164
  hyper

SEQ ID NO: 415615 - DNA, 394 bp, Homo sapiens; identical to SEQ ID NO: 279181
  chr1:202830481-202830875
  hyper

SEQ ID NO: 415616 - DNA, 64 bp, Homo sapiens; identical to SEQ ID NO: 197911
  chr1:202858344-202858408
  hyper

SEQ ID NO: 415617 - DNA, 148 bp, Homo sapiens; identical to SEQ ID NO: 227810
  chr1:202976330-202976478
  hyper

SEQ ID NO: 415618 - DNA, 210 bp, Homo sapiens; identical to SEQ ID NO: 227813
  chr1:203296275-203296485
  hyper

SEQ ID NO: 415619 - DNA, 159 bp, Homo sapiens; identical to SEQ ID NO: 197914
  chr1:203596926-203597085
  hyper

SEQ ID NO: 415620 - DNA, 219 bp, Homo sapiens; identical to SEQ ID NO: 227817
  chr1:203830671-203830890
  hyper

SEQ ID NO: 415621 - DNA, 33 bp, Homo sapiens; identical to SEQ ID NO: 395716
  chr1:204043041-204043074
  hyper

SEQ ID NO: 415622 - DNA, 1003 bp, Homo sapiens; identical to SEQ ID NO: 197918
  chr1:204043134-204044137
  hyper

SEQ ID NO: 415623 - DNA, 188 bp, Homo sapiens; identical to SEQ ID NO: 197919
  chr1:204332591-204332779
  hyper

SEQ ID NO: 415624 - DNA, 205 bp, Homo sapiens; identical to SEQ ID NO: 227824
  chr1:204379620-204379825
  hyper

SEQ ID NO: 415625 - DNA, 178 bp, Homo sapiens; identical to SEQ ID NO: 197921
  chr1:204380935-204381113
  hyper

SEQ ID NO: 415626 - DNA, 451 bp, Homo sapiens; identical to SEQ ID NO: 227826
  chr1:204485346-204485797
  hyper

SEQ ID NO: 415627 - DNA, 105 bp, Homo sapiens; identical to SEQ ID NO: 197922
  chr1:204487763-204487868
  hyper

SEQ ID NO: 415628 - DNA, 200 bp, Homo sapiens; identical to SEQ ID NO: 279200
  chr1:204518656-204518856
  hyper

SEQ ID NO: 415629 - DNA, 117 bp, Homo sapiens; identical to SEQ ID NO: 227829
  chr1:205091310-205091427
  hyper

SEQ ID NO: 415630 - DNA, 243 bp, Homo sapiens; identical to SEQ ID NO: 227830
  chr1:205196742-205196985
  hyper

SEQ ID NO: 415631 - DNA, 65 bp, Homo sapiens; identical to SEQ ID NO: 227831
  chr1:205290855-205290920
  hyper

SEQ ID NO: 415632 - DNA, 288 bp, Homo sapiens; identical to SEQ ID NO: 227842
  chr1:205538140-205538428
  hyper

SEQ ID NO: 415633 - DNA, 34 bp, Homo sapiens; identical to SEQ ID NO: 227843
  chr1:205560983-205561017
  hyper

SEQ ID NO: 415634 - DNA, 115 bp, Homo sapiens; identical to SEQ ID NO: 197927
  chr1:205561301-205561416
  hyper

SEQ ID NO: 415635 - DNA, 85 bp, Homo sapiens; identical to SEQ ID NO: 227845
  chr1:205719206-205719291
  hyper

SEQ ID NO: 415636 - DNA, 139 bp, Homo sapiens; identical to SEQ ID NO: 197928
  chr1:205721778-205721917
  hyper

SEQ ID NO: 415637 - DNA, 33 bp, Homo sapiens; identical to SEQ ID NO: 227846
  chr1:205744399-205744432
  hyper

SEQ ID NO: 415638 - DNA, 88 bp, Homo sapiens; identical to SEQ ID NO: 227847
  chr1:207223723-207223811
  hyper

SEQ ID NO: 415639 - DNA, 147 bp, Homo sapiens; identical to SEQ ID NO: 227850
  chr1:207925329-207925476
  hyper

SEQ ID NO: 415640 - DNA, 208 bp, Homo sapiens; identical to SEQ ID NO: 279219
  chr1:207995189-207995397
  hyper

SEQ ID NO: 415641 - DNA, 530 bp, Homo sapiens; identical to SEQ ID NO: 197931
  chr1:208416772-208417302
  hyper

SEQ ID NO: 415642 - DNA, 54 bp, Homo sapiens; identical to SEQ ID NO: 104925
  chr1:208417907-208417961
  hyper

SEQ ID NO: 415643 - DNA, 150 bp, Homo sapiens; identical to SEQ ID NO: 197932
  chr1:208418636-208418786
  hyper

SEQ ID NO: 415644 - DNA, 218 bp, Homo sapiens; identical to SEQ ID NO: 227854
  chr1:209364148-209364366
  hyper

SEQ ID NO: 415645 - DNA, 103 bp, Homo sapiens; identical to SEQ ID NO: 227856
  chr1:209743000-209743103
  hyper

SEQ ID NO: 415646 - DNA, 113 bp, Homo sapiens; identical to SEQ ID NO: 279225
  chr1:209849317-209849430
  hyper

SEQ ID NO: 415647 - DNA, 229 bp, Homo sapiens; identical to SEQ ID NO: 227860
  chr1:210001204-210001433
  hyper

SEQ ID NO: 415648 - DNA, 42 bp, Homo sapiens; identical to SEQ ID NO: 227862
  chr1:210405541-210405583
  hyper

SEQ ID NO: 415649 - DNA, 343 bp, Homo sapiens; identical to SEQ ID NO: 279231
  chr1:210405793-210406136
  hyper

SEQ ID NO: 415650 - DNA, 290 bp, Homo sapiens; identical to SEQ ID NO: 279232
  chr1:210406189-210406479
  hyper

SEQ ID NO: 415651 - DNA, 561 bp, Homo sapiens; identical to SEQ ID NO: 279233
  chr1:210406528-210407089
  hyper

SEQ ID NO: 415652 - DNA, 144 bp, Homo sapiens; identical to SEQ ID NO: 197935
  chr1:210407459-210407603
  hyper

SEQ ID NO: 415653 - DNA, 497 bp, Homo sapiens; identical to SEQ ID NO: 227865
  chr1:210424844-210425341
  hyper

SEQ ID NO: 415654 - DNA, 254 bp, Homo sapiens; identical to SEQ ID NO: 197936
  chr1:210465689-210465943
  hyper

SEQ ID NO: 415655 - DNA, 133 bp, Homo sapiens; identical to SEQ ID NO: 197937
  chr1:210466012-210466145
  hyper

SEQ ID NO: 415656 - DNA, 221 bp, Homo sapiens; identical to SEQ ID NO: 279238
  chr1:211306898-211307119
  hyper

SEQ ID NO: 415657 - DNA, 150 bp, Homo sapiens; identical to SEQ ID NO: 279239
  chr1:211307539-211307689
  hyper

SEQ ID NO: 415658 - DNA, 198 bp, Homo sapiens; identical to SEQ ID NO: 227869
  chr1:211431628-211431826
  hyper

SEQ ID NO: 415659 - DNA, 117 bp, Homo sapiens; identical to SEQ ID NO: 227870
  chr1:211434031-211434148
  hyper

SEQ ID NO: 415660 - DNA, 135 bp, Homo sapiens; identical to SEQ ID NO: 227871
  chr1:211496969-211497104
  hyper

SEQ ID NO: 415661 - DNA, 118 bp, Homo sapiens; identical to SEQ ID NO: 227872
  chr1:211499931-211500049
  hyper

SEQ ID NO: 415662 - DNA, 149 bp, Homo sapiens; identical to SEQ ID NO: 227873
  chr1:211689002-211689151
  hyper

SEQ ID NO: 415663 - DNA, 189 bp, Homo sapiens; identical to SEQ ID NO: 227874
  chr1:211750953-211751142
  hyper

SEQ ID NO: 415664 - DNA, 296 bp, Homo sapiens; identical to SEQ ID NO: 104963
  chr1:211848657-211848953
  hyper

SEQ ID NO: 415665 - DNA, 149 bp, Homo sapiens; identical to SEQ ID NO: 227876
  chr1:211872028-211872177
  hyper

SEQ ID NO: 415666 - DNA, 767 bp, Homo sapiens; identical to SEQ ID NO: 197938
  chr1:212003416-212004183
  hyper

SEQ ID NO: 415667 - DNA, 155 bp, Homo sapiens; identical to SEQ ID NO: 227878
  chr1:212209085-212209240
  hyper

SEQ ID NO: 415668 - DNA, 74 bp, Homo sapiens; identical to SEQ ID NO: 227879
  chr1:212588336-212588410
  hyper

SEQ ID NO: 415669 - DNA, 119 bp, Homo sapiens; identical to SEQ ID NO: 227880
  chr1:212781881-212782000
  hyper

SEQ ID NO: 415670 - DNA, 277 bp, Homo sapiens; identical to SEQ ID NO: 279255
  chr1:212874266-212874543
  hyper

SEQ ID NO: 415671 - DNA, 43 bp, Homo sapiens; identical to SEQ ID NO: 197942
  chr1:213189228-213189271
  hyper

SEQ ID NO: 415672 - DNA, 155 bp, Homo sapiens; identical to SEQ ID NO: 279258
  chr1:214158625-214158780
  hyper

SEQ ID NO: 415673 - DNA, 41 bp, Homo sapiens; identical to SEQ ID NO: 227889
  chr1:214160834-214160875
  hyper

SEQ ID NO: 415674 - DNA, 54 bp, Homo sapiens; identical to SEQ ID NO: 279264
  chr1:214360413-214360467
  hyper

SEQ ID NO: 415675 - DNA, 351 bp, Homo sapiens; identical to SEQ ID NO: 279272
  chr1:215740687-215741038
  hyper

SEQ ID NO: 415676 - DNA, 31 bp, Homo sapiens; identical to SEQ ID NO: 226531
  chr1:215744970-215745001
  hyper

SEQ ID NO: 415677 - DNA, 320 bp, Homo sapiens; identical to SEQ ID NO: 279275
  chr1:216896567-216896887
  hyper

SEQ ID NO: 415678 - DNA, 63 bp, Homo sapiens; identical to SEQ ID NO: 279276
  chr1:216896974-216897037
  hyper

SEQ ID NO: 415679 - DNA, 105 bp, Homo sapiens; identical to SEQ ID NO: 279277
  chr1:217262878-217262983
  hyper

SEQ ID NO: 415680 - DNA, 166 bp, Homo sapiens; identical to SEQ ID NO: 279278
  chr1:217263356-217263522
  hyper

SEQ ID NO: 415681 - DNA, 334 bp, Homo sapiens; identical to SEQ ID NO: 227910
  chr1:220267776-220268110
  hyper

SEQ ID NO: 415682 - DNA, 56 bp, Homo sapiens
  chr1:220921312-220921368
  hyper
gagtgcagaggtttagactgtgtctttgtgtgcagaaagtcctgcagttctcacag

SEQ ID NO: 415683 - DNA, 85 bp, Homo sapiens; identical to SEQ ID NO: 197966
  chr1:220959916-220960001
  hyper

SEQ ID NO: 415684 - DNA, 208 bp, Homo sapiens; identical to SEQ ID NO: 227921
  chr1:222792068-222792276
  hyper

SEQ ID NO: 415685 - DNA, 222 bp, Homo sapiens; identical to SEQ ID NO: 227922
  chr1:223254692-223254914
  hyper

SEQ ID NO: 415686 - DNA, 74 bp, Homo sapiens; identical to SEQ ID NO: 227923
  chr1:223297159-223297233
  hyper

SEQ ID NO: 415687 - DNA, 82 bp, Homo sapiens; identical to SEQ ID NO: 279297
  chr1:223302695-223302777
  hyper

SEQ ID NO: 415688 - DNA, 198 bp, Homo sapiens; identical to SEQ ID NO: 197968
  chr1:223307128-223307326
  hyper

SEQ ID NO: 415689 - DNA, 176 bp, Homo sapiens; identical to SEQ ID NO: 279299
  chr1:223537487-223537663
  hyper

SEQ ID NO: 415690 - DNA, 220 bp, Homo sapiens; identical to SEQ ID NO: 279300
  chr1:223537693-223537913
  hyper

SEQ ID NO: 415691 - DNA, 212 bp, Homo sapiens; identical to SEQ ID NO: 279301
  chr1:223537946-223538158
  hyper

SEQ ID NO: 415692 - DNA, 86 bp, Homo sapiens; identical to SEQ ID NO: 197969
  chr1:223538641-223538727
  hyper

SEQ ID NO: 415693 - DNA, 775 bp, Homo sapiens; identical to SEQ ID NO: 279303
  chr1:223899911-223900686
  hyper

SEQ ID NO: 415694 - DNA, 53 bp, Homo sapiens; identical to SEQ ID NO: 227931
  chr1:224301981-224302034
  hyper

SEQ ID NO: 415695 - DNA, 150 bp, Homo sapiens; identical to SEQ ID NO: 197972
  chr1:224302336-224302486
  hyper

SEQ ID NO: 415696 - DNA, 85 bp, Homo sapiens; identical to SEQ ID NO: 221583
  chr1:224481061-224481146
  hyper

SEQ ID NO: 415697 - DNA, 204 bp, Homo sapiens; identical to SEQ ID NO: 197973
  chr1:224622416-224622620
  hyper

SEQ ID NO: 415698 - DNA, 34 bp, Homo sapiens; identical to SEQ ID NO: 197974
  chr1:224622766-224622800
  hyper

SEQ ID NO: 415699 - DNA, 250 bp, Homo sapiens; identical to SEQ ID NO: 197975
  chr1:224691180-224691430
  hyper

SEQ ID NO: 415700 - DNA, 31 bp, Homo sapiens; identical to SEQ ID NO: 227941
  chr1:225965662-225965693
  hyper

SEQ ID NO: 415701 - DNA, 50 bp, Homo sapiens; identical to SEQ ID NO: 221589
  chr1:225998107-225998157
  hyper

SEQ ID NO: 415702 - DNA, 299 bp, Homo sapiens; identical to SEQ ID NO: 279318
  chr1:226069175-226069474
  hyper

SEQ ID NO: 415703 - DNA, 589 bp, Homo sapiens; identical to SEQ ID NO: 279319
  chr1:226069510-226070099
  hyper

SEQ ID NO: 415704 - DNA, 289 bp, Homo sapiens; identical to SEQ ID NO: 197981
  chr1:226070382-226070671
  hyper

SEQ ID NO: 415705 - DNA, 34 bp, Homo sapiens; identical to SEQ ID NO: 227944
  chr1:226249797-226249831
  hyper

SEQ ID NO: 415706 - DNA, 35 bp, Homo sapiens; identical to SEQ ID NO: 227945
  chr1:226250417-226250452
  hyper

SEQ ID NO: 415707 - DNA, 171 bp, Homo sapiens; identical to SEQ ID NO: 197982
  chr1:226297380-226297551
  hyper

SEQ ID NO: 415708 - DNA, 52 bp, Homo sapiens; identical to SEQ ID NO: 279324
  chr1:226374595-226374647
  hyper

SEQ ID NO: 415709 - DNA, 85 bp, Homo sapiens; identical to SEQ ID NO: 105119
  chr1:226374683-226374768
  hyper

SEQ ID NO: 415710 - DNA, 148 bp, Homo sapiens; identical to SEQ ID NO: 279326
  chr1:226497226-226497374
  hyper

SEQ ID NO: 415711 - DNA, 56 bp, Homo sapiens; identical to SEQ ID NO: 221594
  chr1:226497394-226497450
  hyper

SEQ ID NO: 415712 - DNA, 33 bp, Homo sapiens; identical to SEQ ID NO: 197986
  chr1:227058123-227058156
  hyper

SEQ ID NO: 415713 - DNA, 71 bp, Homo sapiens; identical to SEQ ID NO: 221598
  chr1:227058816-227058887
  hyper

SEQ ID NO: 415714 - DNA, 504 bp, Homo sapiens
  chr1:227506254-227506758
  hyper
gccctgcccgagcctcagccccagccggcggccaagccgggcggggtccggccggcgcgcccagcggaggcccccaagggggcgcgggctcggggcccgagtggctgcgccagcccgaggggaggggtgtggactgcctaggcggcgaggctgcggctgccgcagcgtggaatgcggagctgcgggagggctgagggaggcccgggcggcggtggcggagcatatggaggcgggatgaccgggccgcgccgggagctgcggcgggactgggcgcaggctgggaactgcgccaccgccgcgccgtggccccggctccccgaggcttctggtgcagatcgcgaaggggggctcctgctcgtcctcggagacatcacctgtctggcgcgtttgttaagggcgcccagaagcagagggctttaggcttccgacagagctggaggagacggtgcctttcagccccttacctgctccccaccggccccccagattcggttcgcgcacact

SEQ ID NO: 415715 - DNA, 205 bp, Homo sapiens; identical to SEQ ID NO: 197990
  chr1:227652539-227652744
  hyper

SEQ ID NO: 415716 - DNA, 477 bp, Homo sapiens; identical to SEQ ID NO: 227954
  chr1:227975252-227975729
  hyper

SEQ ID NO: 415717 - DNA, 41 bp, Homo sapiens; identical to SEQ ID NO: 279340
  chr1:227976220-227976261
  hyper

SEQ ID NO: 415718 - DNA, 34 bp, Homo sapiens; identical to SEQ ID NO: 279341
  chr1:227976621-227976655
  hyper

SEQ ID NO: 415719 - DNA, 282 bp, Homo sapiens; identical to SEQ ID NO: 279342
  chr1:228134409-228134691
  hyper

SEQ ID NO: 415720 - DNA, 216 bp, Homo sapiens; identical to SEQ ID NO: 197992
  chr1:228134891-228135107
  hyper

SEQ ID NO: 415721 - DNA, 207 bp, Homo sapiens; identical to SEQ ID NO: 197993
  chr1:228135899-228136106
  hyper

SEQ ID NO: 415722 - DNA, 119 bp, Homo sapiens; identical to SEQ ID NO: 197994
  chr1:228136152-228136271
  hyper

SEQ ID NO: 415723 - DNA, 31 bp, Homo sapiens; identical to SEQ ID NO: 227959
  chr1:228193571-228193602
  hyper

SEQ ID NO: 415724 - DNA, 149 bp, Homo sapiens; identical to SEQ ID NO: 279347
  chr1:228193977-228194126
  hyper

SEQ ID NO: 415725 - DNA, 112 bp, Homo sapiens; identical to SEQ ID NO: 279350
  chr1:228247886-228247998
  hyper

SEQ ID NO: 415726 - DNA, 33 bp, Homo sapiens; identical to SEQ ID NO: 279351
  chr1:228248269-228248302
  hyper

SEQ ID NO: 415727 - DNA, 117 bp, Homo sapiens; identical to SEQ ID NO: 227966
  chr1:228270662-228270779
  hyper

SEQ ID NO: 415728 - DNA, 302 bp, Homo sapiens; identical to SEQ ID NO: 279353
  chr1:228444468-228444770
  hyper

SEQ ID NO: 415729 - DNA, 215 bp, Homo sapiens; identical to SEQ ID NO: 279354
  chr1:228566260-228566475
  hyper

SEQ ID NO: 415730 - DNA, 75 bp, Homo sapiens; identical to SEQ ID NO: 279355
  chr1:228566547-228566622
  hyper

SEQ ID NO: 415731 - DNA, 51 bp, Homo sapiens; identical to SEQ ID NO: 279356
  chr1:228566672-228566723
  hyper

SEQ ID NO: 415732 - DNA, 87 bp, Homo sapiens; identical to SEQ ID NO: 279357
  chr1:228566969-228567056
  hyper

SEQ ID NO: 415733 - DNA, 250 bp, Homo sapiens; identical to SEQ ID NO: 227969
  chr1:228594015-228594265
  hyper

SEQ ID NO: 415734 - DNA, 178 bp, Homo sapiens; identical to SEQ ID NO: 227980
  chr1:228674803-228674981
  hyper

SEQ ID NO: 415735 - DNA, 94 bp, Homo sapiens; identical to SEQ ID NO: 227981
  chr1:228783178-228783272
  hyper

SEQ ID NO: 415736 - DNA, 708 bp, Homo sapiens; identical to SEQ ID NO: 198001
  chr1:228783332-228784040
  hyper

SEQ ID NO: 415737 - DNA, 40 bp, Homo sapiens; identical to SEQ ID NO: 105183
  chr1:228784106-228784146
  hyper

SEQ ID NO: 415738 - DNA, 477 bp, Homo sapiens; identical to SEQ ID NO: 227989
  chr1:229643803-229644280
  hyper

SEQ ID NO: 415739 - DNA, 156 bp, Homo sapiens; identical to SEQ ID NO: 227990
  chr1:229694643-229694799
  hyper

SEQ ID NO: 415740 - DNA, 94 bp, Homo sapiens; identical to SEQ ID NO: 227991
  chr1:230202416-230202510
  hyper

SEQ ID NO: 415741 - DNA, 219 bp, Homo sapiens; identical to SEQ ID NO: 198009
  chr1:230223230-230223449
  hyper

SEQ ID NO: 415742 - DNA, 123 bp, Homo sapiens
  chr1:231053185-231053308
  hyper
gttaacttggtttttcatcaacagtaccattgtgcctttcagtggaagttgacctggtacattccactaagcactttaaacactcaaatatcttgttgtatattctgctgtgtgtgccttgca

SEQ ID NO: 415743 - DNA, 32 bp, Homo sapiens; identical to SEQ ID NO: 227994
  chr1:231114517-231114549
  hyper

SEQ ID NO: 415744 - DNA, 411 bp, Homo sapiens; identical to SEQ ID NO: 227997
  chr1:231376707-231377118
  hyper

SEQ ID NO: 415745 - DNA, 34 bp, Homo sapiens; identical to SEQ ID NO: 227998
  chr1:231473772-231473806
  hyper

SEQ ID NO: 415746 - DNA, 91 bp, Homo sapiens; identical to SEQ ID NO: 198013
  chr1:231664200-231664291
  hyper

SEQ ID NO: 415747 - DNA, 102 bp, Homo sapiens; identical to SEQ ID NO: 228000
  chr1:231762650-231762752
  hyper

SEQ ID NO: 415748 - DNA, 108 bp, Homo sapiens; identical to SEQ ID NO: 228001
  chr1:231763012-231763120
  hyper

SEQ ID NO: 415749 - DNA, 478 bp, Homo sapiens
  chr1:232766006-232766484
  hyper
gtcagtctcaccgtccgcccggctccgggcgcagccggtgcgctgttcccaggccccgcggcgcgcgggagctgcgcgtccaggaggggcccggacgcccttcttggggagggggctgcggggcgcatcatgagcggcgctgggcgagctcgagggccgggcagcctacctggaccccggcttctagagagccgtcgccgtccttgtcgagactcgctttcgcccctctgaggaataagttaaaaaccgcgagtctggttctgagccgccccctggcgcaggcgcgaccccacccggccctcccgtctcccaacttgggacagacgcggcggccgggcggtcggatccgtgagcctcggccgctggggctacatacacagcccaggacgccacagaatcgccgaggccccgcgaacgcccaaacggccgcaagtcgaagtgatcccatctgaagaagacagcgcgaggaagcgagacc

SEQ ID NO: 415750 - DNA, 277 bp, Homo sapiens; identical to SEQ ID NO: 228006
  chr1:233086110-233086387
  hyper

SEQ ID NO: 415751 - DNA, 516 bp, Homo sapiens; identical to SEQ ID NO: 228013
  chr1:234508999-234509515
  hyper

SEQ ID NO: 415752 - DNA, 138 bp, Homo sapiens; identical to SEQ ID NO: 228015
  chr1:234743048-234743186
  hyper

SEQ ID NO: 415753 - DNA, 211 bp, Homo sapiens; identical to SEQ ID NO: 228016
  chr1:234744132-234744343
  hyper

SEQ ID NO: 415754 - DNA, 141 bp, Homo sapiens; identical to SEQ ID NO: 198023
  chr1:234828214-234828355
  hyper

SEQ ID NO: 415755 - DNA, 195 bp, Homo sapiens; identical to SEQ ID NO: 228018
  chr1:235257187-235257382
  hyper

SEQ ID NO: 415756 - DNA, 284 bp, Homo sapiens; identical to SEQ ID NO: 228019
  chr1:235292117-235292401
  hyper

SEQ ID NO: 415757 - DNA, 110 bp, Homo sapiens; identical to SEQ ID NO: 228020
  chr1:235491613-235491723
  hyper

SEQ ID NO: 415758 - DNA, 344 bp, Homo sapiens; identical to SEQ ID NO: 228021
  chr1:235530666-235531010
  hyper

SEQ ID NO: 415759 - DNA, 188 bp, Homo sapiens; identical to SEQ ID NO: 228022
  chr1:235667334-235667522
  hyper

SEQ ID NO: 415760 - DNA, 64 bp, Homo sapiens; identical to SEQ ID NO: 198024
  chr1:235667932-235667996
  hyper

SEQ ID NO: 415761 - DNA, 45 bp, Homo sapiens; identical to SEQ ID NO: 198027
  chr1:236305443-236305488
  hyper

SEQ ID NO: 415762 - DNA, 85 bp, Homo sapiens; identical to SEQ ID NO: 228028
  chr1:236305805-236305890
  hyper

SEQ ID NO: 415763 - DNA, 450 bp, Homo sapiens; identical to SEQ ID NO: 198030
  chr1:236445121-236445571
  hyper

SEQ ID NO: 415764 - DNA, 166 bp, Homo sapiens; identical to SEQ ID NO: 279418
  chr1:238027762-238027928
  hyper

SEQ ID NO: 415765 - DNA, 199 bp, Homo sapiens; identical to SEQ ID NO: 198035
  chr1:239551218-239551417
  hyper

SEQ ID NO: 415766 - DNA, 33 bp, Homo sapiens; identical to SEQ ID NO: 221633
  chr1:241588237-241588270
  hyper

SEQ ID NO: 415767 - DNA, 306 bp, Homo sapiens; identical to SEQ ID NO: 228040
  chr1:241682870-241683176
  hyper

SEQ ID NO: 415768 - DNA, 185 bp, Homo sapiens; identical to SEQ ID NO: 228041
  chr1:242011573-242011758
  hyper

SEQ ID NO: 415769 - DNA, 93 bp, Homo sapiens; identical to SEQ ID NO: 279430
  chr1:242161830-242161923
  hyper

SEQ ID NO: 415770 - DNA, 96 bp, Homo sapiens; identical to SEQ ID NO: 228048
  chr1:244211309-244211405
  hyper

SEQ ID NO: 415771 - DNA, 65 bp, Homo sapiens; identical to SEQ ID NO: 228049
  chr1:244615535-244615600
  hyper

SEQ ID NO: 415772 - DNA, 150 bp, Homo sapiens; identical to SEQ ID NO: 228051
  chr1:244998150-244998300
  hyper

SEQ ID NO: 415773 - DNA, 95 bp, Homo sapiens; identical to SEQ ID NO: 228052
  chr1:245028045-245028140
  hyper

SEQ ID NO: 415774 - DNA, 197 bp, Homo sapiens; identical to SEQ ID NO: 228053
  chr1:245134410-245134607
  hyper

SEQ ID NO: 415775 - DNA, 122 bp, Homo sapiens; identical to SEQ ID NO: 228054
  chr1:245474020-245474142
  hyper

SEQ ID NO: 415776 - DNA, 60 bp, Homo sapiens; identical to SEQ ID NO: 228055
  chr1:246730174-246730234
  hyper

SEQ ID NO: 415777 - DNA, 910 bp, Homo sapiens; identical to SEQ ID NO: 279443
  chr1:246887311-246888221
  hyper

SEQ ID NO: 415778 - DNA, 62 bp, Homo sapiens
  chr1:247170806-247170868
  hyper
aaaaaaaaaaagaggagaaaggaacccacagaccacagctcctcccacccaggaacctttca

SEQ ID NO: 415779 - DNA, 226 bp, Homo sapiens; identical to SEQ ID NO: 279447
  chr1:247274600-247274826
  hyper

SEQ ID NO: 415780 - DNA, 516 bp, Homo sapiens; identical to SEQ ID NO: 279448
  chr1:247275030-247275546
  hyper

SEQ ID NO: 415781 - DNA, 37 bp, Homo sapiens; identical to SEQ ID NO: 228062
  chr1:247494236-247494273
  hyper

SEQ ID NO: 415782 - DNA, 641 bp, Homo sapiens; identical to SEQ ID NO: 279450
  chr1:247495198-247495839
  hyper

SEQ ID NO: 415783 - DNA, 137 bp, Homo sapiens; identical to SEQ ID NO: 228064
  chr1:247536197-247536334
  hyper

SEQ ID NO: 415784 - DNA, 375 bp, Homo sapiens; identical to SEQ ID NO: 228067
  chr1:249120445-249120820
  hyper

SEQ ID NO: 415785 - DNA, 234 bp, Homo sapiens; identical to SEQ ID NO: 198045
  chr1:249167654-249167888
  hyper

SEQ ID NO: 415786 - DNA, 344 bp, Homo sapiens; identical to SEQ ID NO: 228072
  chr2:264740-265084
  hyper

SEQ ID NO: 415787 - DNA, 156 bp, Homo sapiens; identical to SEQ ID NO: 279462
  chr2:287344-287500
  hyper

SEQ ID NO: 415788 - DNA, 91 bp, Homo sapiens; identical to SEQ ID NO: 279463
  chr2:289132-289223
  hyper

SEQ ID NO: 415789 - DNA, 239 bp, Homo sapiens; identical to SEQ ID NO: 198052
  chr2:677555-677794
  hyper

SEQ ID NO: 415790 - DNA, 55 bp, Homo sapiens; identical to SEQ ID NO: 228079
  chr2:1610486-1610541
  hyper

SEQ ID NO: 415791 - DNA, 121 bp, Homo sapiens; identical to SEQ ID NO: 228082
  chr2:1754708-1754829
  hyper

SEQ ID NO: 415792 - DNA, 236 bp, Homo sapiens; identical to SEQ ID NO: 228085
  chr2:3381720-3381956
  hyper

SEQ ID NO: 415793 - DNA, 118 bp, Homo sapiens; identical to SEQ ID NO: 228086
  chr2:3383399-3383517
  hyper

SEQ ID NO: 415794 - DNA, 175 bp, Homo sapiens; identical to SEQ ID NO: 198054
  chr2:3465089-3465264
  hyper

SEQ ID NO: 415795 - DNA, 42 bp, Homo sapiens; identical to SEQ ID NO: 279472
  chr2:5506156-5506198
  hyper

SEQ ID NO: 415796 - DNA, 186 bp, Homo sapiens; identical to SEQ ID NO: 279473
  chr2:5813468-5813654
  hyper

SEQ ID NO: 415797 - DNA, 168 bp, Homo sapiens; identical to SEQ ID NO: 279474
  chr2:5813907-5814075
  hyper

SEQ ID NO: 415798 - DNA, 35 bp, Homo sapiens; identical to SEQ ID NO: 198055
  chr2:5832394-5832429
  hyper

SEQ ID NO: 415799 - DNA, 60 bp, Homo sapiens; identical to SEQ ID NO: 198056
  chr2:5832655-5832715
  hyper

SEQ ID NO: 415800 - DNA, 65 bp, Homo sapiens; identical to SEQ ID NO: 105426
  chr2:5837518-5837583
  hyper

SEQ ID NO: 415801 - DNA, 302 bp, Homo sapiens; identical to SEQ ID NO: 221656
  chr2:8818278-8818580
  hyper

SEQ ID NO: 415802 - DNA, 665 bp, Homo sapiens; identical to SEQ ID NO: 221657
  chr2:8818829-8819494
  hyper

SEQ ID NO: 415803 - DNA, 169 bp, Homo sapiens; identical to SEQ ID NO: 198061
  chr2:8821592-8821761
  hyper

SEQ ID NO: 415804 - DNA, 709 bp, Homo sapiens; identical to SEQ ID NO: 198062
  chr2:8821976-8822685
  hyper

SEQ ID NO: 415805 - DNA, 136 bp, Homo sapiens; identical to SEQ ID NO: 198063
  chr2:8823634-8823770
  hyper

SEQ ID NO: 415806 - DNA, 208 bp, Homo sapiens; identical to SEQ ID NO: 198064
  chr2:8825635-8825843
  hyper

SEQ ID NO: 415807 - DNA, 89 bp, Homo sapiens; identical to SEQ ID NO: 228098
  chr2:8826161-8826250
  hyper

SEQ ID NO: 415808 - DNA, 31 bp, Homo sapiens; identical to SEQ ID NO: 198065
  chr2:9143113-9143144
  hyper

SEQ ID NO: 415809 - DNA, 459 bp, Homo sapiens; identical to SEQ ID NO: 221662
  chr2:9144090-9144549
  hyper

SEQ ID NO: 415810 - DNA, 1192 bp, Homo sapiens; identical to SEQ ID NO: 198068
  chr2:9346368-9347560
  hyper

SEQ ID NO: 415811 - DNA, 316 bp, Homo sapiens; identical to SEQ ID NO: 198069
  chr2:9347677-9347993
  hyper

SEQ ID NO: 415812 - DNA, 123 bp, Homo sapiens; identical to SEQ ID NO: 279496
  chr2:9348023-9348146
  hyper

SEQ ID NO: 415813 - DNA, 196 bp, Homo sapiens; identical to SEQ ID NO: 228102
  chr2:9695939-9696135
  hyper

SEQ ID NO: 415814 - DNA, 318 bp, Homo sapiens; identical to SEQ ID NO: 228103
  chr2:10092151-10092469
  hyper

SEQ ID NO: 415815 - DNA, 144 bp, Homo sapiens; identical to SEQ ID NO: 228106
  chr2:10220229-10220373
  hyper

SEQ ID NO: 415816 - DNA, 73 bp, Homo sapiens; identical to SEQ ID NO: 198075
  chr2:10220687-10220760
  hyper

SEQ ID NO: 415817 - DNA, 202 bp, Homo sapiens; identical to SEQ ID NO: 228108
  chr2:10260352-10260554
  hyper

SEQ ID NO: 415818 - DNA, 512 bp, Homo sapiens; identical to SEQ ID NO: 279506
  chr2:10443618-10444130
  hyper

SEQ ID NO: 415819 - DNA, 165 bp, Homo sapiens; identical to SEQ ID NO: 279507
  chr2:10444193-10444358
  hyper

SEQ ID NO: 415820 - DNA, 207 bp, Homo sapiens; identical to SEQ ID NO: 279513
  chr2:10953101-10953308
  hyper

SEQ ID NO: 415821 - DNA, 52 bp, Homo sapiens; identical to SEQ ID NO: 279514
  chr2:10953334-10953386
  hyper

SEQ ID NO: 415822 - DNA, 102 bp, Homo sapiens; identical to SEQ ID NO: 279517
  chr2:11270218-11270320
  hyper

SEQ ID NO: 415823 - DNA, 33 bp, Homo sapiens; identical to SEQ ID NO: 198081
  chr2:11621413-11621446
  hyper

SEQ ID NO: 415824 - DNA, 65 bp, Homo sapiens; identical to SEQ ID NO: 279519
  chr2:11623404-11623469
  hyper

SEQ ID NO: 415825 - DNA, 98 bp, Homo sapiens; identical to SEQ ID NO: 279520
  chr2:11810287-11810385
  hyper

SEQ ID NO: 415826 - DNA, 220 bp, Homo sapiens; identical to SEQ ID NO: 228121
  chr2:11828584-11828804
  hyper

SEQ ID NO: 415827 - DNA, 113 bp, Homo sapiens; identical to SEQ ID NO: 228127
  chr2:15701352-15701465
  hyper

SEQ ID NO: 415828 - DNA, 231 bp, Homo sapiens; identical to SEQ ID NO: 198090
  chr2:16079905-16080136
  hyper

SEQ ID NO: 415829 - DNA, 87 bp, Homo sapiens; identical to SEQ ID NO: 105506
  chr2:16080304-16080391
  hyper

SEQ ID NO: 415830 - DNA, 168 bp, Homo sapiens; identical to SEQ ID NO: 279534
  chr2:16080606-16080774
  hyper

SEQ ID NO: 415831 - DNA, 35 bp, Homo sapiens; identical to SEQ ID NO: 228134
  chr2:17934473-17934508
  hyper

SEQ ID NO: 415832 - DNA, 33 bp, Homo sapiens; identical to SEQ ID NO: 228135
  chr2:17934861-17934894
  hyper

SEQ ID NO: 415833 - DNA, 35 bp, Homo sapiens; identical to SEQ ID NO: 228136
  chr2:17935192-17935227
  hyper

SEQ ID NO: 415834 - DNA, 62 bp, Homo sapiens; identical to SEQ ID NO: 279543
  chr2:18060926-18060988
  hyper

SEQ ID NO: 415835 - DNA, 193 bp, Homo sapiens; identical to SEQ ID NO: 198096
  chr2:18741865-18742058
  hyper

SEQ ID NO: 415836 - DNA, 119 bp, Homo sapiens; identical to SEQ ID NO: 198102
  chr2:20101402-20101521
  hyper

SEQ ID NO: 415837 - DNA, 193 bp, Homo sapiens; identical to SEQ ID NO: 228146
  chr2:20101765-20101958
  hyper

SEQ ID NO: 415838 - DNA, 42 bp, Homo sapiens; identical to SEQ ID NO: 198103
  chr2:20190155-20190197
  hyper

SEQ ID NO: 415839 - DNA, 329 bp, Homo sapiens; identical to SEQ ID NO: 279558
  chr2:20212119-20212448
  hyper

SEQ ID NO: 415840 - DNA, 44 bp, Homo sapiens; identical to SEQ ID NO: 279559
  chr2:20251336-20251380
  hyper

SEQ ID NO: 415841 - DNA, 164 bp, Homo sapiens; identical to SEQ ID NO: 105547
  chr2:20251427-20251591
  hyper

SEQ ID NO: 415842 - DNA, 80 bp, Homo sapiens; identical to SEQ ID NO: 228150
  chr2:20251798-20251878
  hyper

SEQ ID NO: 415843 - DNA, 737 bp, Homo sapiens; identical to SEQ ID NO: 279562
  chr2:20424156-20424893
  hyper

SEQ ID NO: 415844 - DNA, 361 bp, Homo sapiens; identical to SEQ ID NO: 198108
  chr2:20646413-20646774
  hyper

SEQ ID NO: 415845 - DNA, 36 bp, Homo sapiens
  chr2:20646843-20646879
  hyper
cgcagtctggttggagctgttgtcttgtatgctcag

SEQ ID NO: 415846 - DNA, 137 bp, Homo sapiens; identical to SEQ ID NO: 228158
  chr2:21540143-21540280
  hyper

SEQ ID NO: 415847 - DNA, 126 bp, Homo sapiens; identical to SEQ ID NO: 228159
  chr2:23607987-23608113
  hyper

SEQ ID NO: 415848 - DNA, 136 bp, Homo sapiens; identical to SEQ ID NO: 279573
  chr2:23608339-23608475
  hyper

SEQ ID NO: 415849 - DNA, 32 bp, Homo sapiens; identical to SEQ ID NO: 228161
  chr2:23886284-23886316
  hyper

SEQ ID NO: 415850 - DNA, 165 bp, Homo sapiens; identical to SEQ ID NO: 228163
  chr2:24270302-24270467
  hyper

SEQ ID NO: 415851 - DNA, 173 bp, Homo sapiens; identical to SEQ ID NO: 228165
  chr2:24299237-24299410
  hyper

SEQ ID NO: 415852 - DNA, 486 bp, Homo sapiens; identical to SEQ ID NO: 228166
  chr2:24299777-24300263
  hyper

SEQ ID NO: 415853 - DNA, 33 bp, Homo sapiens; identical to SEQ ID NO: 198118
  chr2:24307619-24307652
  hyper

SEQ ID NO: 415854 - DNA, 81 bp, Homo sapiens; identical to SEQ ID NO: 228168
  chr2:24346201-24346282
  hyper

SEQ ID NO: 415855 - DNA, 181 bp, Homo sapiens; identical to SEQ ID NO: 228169
  chr2:24583444-24583625
  hyper

SEQ ID NO: 415856 - DNA, 132 bp, Homo sapiens; identical to SEQ ID NO: 228170
  chr2:25016064-25016196
  hyper

SEQ ID NO: 415857 - DNA, 79 bp, Homo sapiens; identical to SEQ ID NO: 198120
  chr2:25265055-25265134
  hyper

SEQ ID NO: 415858 - DNA, 120 bp, Homo sapiens; identical to SEQ ID NO: 198121
  chr2:25440006-25440126
  hyper

SEQ ID NO: 415859 - DNA, 149 bp, Homo sapiens; identical to SEQ ID NO: 198122
  chr2:25457152-25457301
  hyper

SEQ ID NO: 415860 - DNA, 139 bp, Homo sapiens; identical to SEQ ID NO: 198123
  chr2:25458563-25458702
  hyper

SEQ ID NO: 415861 - DNA, 95 bp, Homo sapiens; identical to SEQ ID NO: 198124
  chr2:25459791-25459886
  hyper

SEQ ID NO: 415862 - DNA, 108 bp, Homo sapiens; identical to SEQ ID NO: 198125
  chr2:25461984-25462092
  hyper

SEQ ID NO: 415863 - DNA, 448 bp, Homo sapiens; identical to SEQ ID NO: 198126
  chr2:25463164-25463612
  hyper

SEQ ID NO: 415864 - DNA, 52 bp, Homo sapiens; identical to SEQ ID NO: 387734
  chr2:25464537-25464589
  hyper

SEQ ID NO: 415865 - DNA, 774 bp, Homo sapiens; identical to SEQ ID NO: 198128
  chr2:25466755-25467529
  hyper

SEQ ID NO: 415866 - DNA, 98 bp, Homo sapiens; identical to SEQ ID NO: 198129
  chr2:25468111-25468209
  hyper

SEQ ID NO: 415867 - DNA, 310 bp, Homo sapiens; identical to SEQ ID NO: 198130
  chr2:25468877-25469187
  hyper

SEQ ID NO: 415868 - DNA, 173 bp, Homo sapiens; identical to SEQ ID NO: 198131
  chr2:25469474-25469647
  hyper

SEQ ID NO: 415869 - DNA, 123 bp, Homo sapiens; identical to SEQ ID NO: 198132
  chr2:25469906-25470029
  hyper

SEQ ID NO: 415870 - DNA, 162 bp, Homo sapiens; identical to SEQ ID NO: 198133
  chr2:25470449-25470611
  hyper

SEQ ID NO: 415871 - DNA, 192 bp, Homo sapiens; identical to SEQ ID NO: 198134
  chr2:25470892-25471084
  hyper

SEQ ID NO: 415872 - DNA, 90 bp, Homo sapiens; identical to SEQ ID NO: 198135
  chr2:25497816-25497906
  hyper

SEQ ID NO: 415873 - DNA, 237 bp, Homo sapiens; identical to SEQ ID NO: 198136
  chr2:25505304-25505541
  hyper

SEQ ID NO: 415874 - DNA, 106 bp, Homo sapiens; identical to SEQ ID NO: 228173
  chr2:25565423-25565529
  hyper

SEQ ID NO: 415875 - DNA, 47 bp, Homo sapiens; identical to SEQ ID NO: 228174
  chr2:25896707-25896754
  hyper

SEQ ID NO: 415876 - DNA, 32 bp, Homo sapiens; identical to SEQ ID NO: 228175
  chr2:26100797-26100829
  hyper

SEQ ID NO: 415877 - DNA, 217 bp, Homo sapiens; identical to SEQ ID NO: 228176
  chr2:26101334-26101551
  hyper

SEQ ID NO: 415878 - DNA, 330 bp, Homo sapiens; identical to SEQ ID NO: 221709
  chr2:26395999-26396329
  hyper

SEQ ID NO: 415879 - DNA, 143 bp, Homo sapiens; identical to SEQ ID NO: 228179
  chr2:26467720-26467863
  hyper

SEQ ID NO: 415880 - DNA, 197 bp, Homo sapiens; identical to SEQ ID NO: 228181
  chr2:26568767-26568964
  hyper

SEQ ID NO: 415881 - DNA, 185 bp, Homo sapiens; identical to SEQ ID NO: 228182
  chr2:26726521-26726706
  hyper

SEQ ID NO: 415882 - DNA, 141 bp, Homo sapiens; identical to SEQ ID NO: 228184
  chr2:27008750-27008891
  hyper

SEQ ID NO: 415883 - DNA, 233 bp, Homo sapiens; identical to SEQ ID NO: 279619
  chr2:27071919-27072152
  hyper

SEQ ID NO: 415884 - DNA, 42 bp, Homo sapiens; identical to SEQ ID NO: 228189
  chr2:27273188-27273230
  hyper

SEQ ID NO: 415885 - DNA, 375 bp, Homo sapiens; identical to SEQ ID NO: 228190
  chr2:27274194-27274569
  hyper

SEQ ID NO: 415886 - DNA, 208 bp, Homo sapiens; identical to SEQ ID NO: 228191
  chr2:27274788-27274996
  hyper

SEQ ID NO: 415887 - DNA, 195 bp, Homo sapiens; identical to SEQ ID NO: 228192
  chr2:27294084-27294279
  hyper

SEQ ID NO: 415888 - DNA, 110 bp, Homo sapiens; identical to SEQ ID NO: 228196
  chr2:27435624-27435734
  hyper

SEQ ID NO: 415889 - DNA, 224 bp, Homo sapiens; identical to SEQ ID NO: 228197
  chr2:27440128-27440352
  hyper

SEQ ID NO: 415890 - DNA, 68 bp, Homo sapiens
  chr2:27473380-27473448
  hyper
gtggtgcaggactcaccctgggccacccccaggtgggcagccttgggagaagggcaggacctgcccat

SEQ ID NO: 415891 - DNA, 226 bp, Homo sapiens; identical to SEQ ID NO: 279632
  chr2:27485733-27485959
  hyper

SEQ ID NO: 415892 - DNA, 544 bp, Homo sapiens; identical to SEQ ID NO: 228199
  chr2:27592814-27593358
  hyper

SEQ ID NO: 415893 - DNA, 76 bp, Homo sapiens; identical to SEQ ID NO: 228200
  chr2:27603727-27603803
  hyper

SEQ ID NO: 415894 - DNA, 224 bp, Homo sapiens; identical to SEQ ID NO: 228201
  chr2:27651189-27651413
  hyper

SEQ ID NO: 415895 - DNA, 93 bp, Homo sapiens; identical to SEQ ID NO: 228202
  chr2:27712679-27712772
  hyper

SEQ ID NO: 415896 - DNA, 43 bp, Homo sapiens; identical to SEQ ID NO: 279637
  chr2:27717787-27717830
  hyper

SEQ ID NO: 415897 - DNA, 511 bp, Homo sapiens; identical to SEQ ID NO: 228204
  chr2:27805830-27806341
  hyper

SEQ ID NO: 415898 - DNA, 484 bp, Homo sapiens; identical to SEQ ID NO: 228205
  chr2:27851762-27852246
  hyper

SEQ ID NO: 415899 - DNA, 251 bp, Homo sapiens; identical to SEQ ID NO: 228206
  chr2:27886206-27886457
  hyper

SEQ ID NO: 415900 - DNA, 91 bp, Homo sapiens; identical to SEQ ID NO: 221715
  chr2:27937851-27937942
  hyper

SEQ ID NO: 415901 - DNA, 214 bp, Homo sapiens; identical to SEQ ID NO: 228208
  chr2:28113199-28113413
  hyper

SEQ ID NO: 415902 - DNA, 177 bp, Homo sapiens; identical to SEQ ID NO: 228209
  chr2:28114002-28114179
  hyper

SEQ ID NO: 415903 - DNA, 223 bp, Homo sapiens; identical to SEQ ID NO: 228210
  chr2:28617015-28617238
  hyper

SEQ ID NO: 415904 - DNA, 201 bp, Homo sapiens; identical to SEQ ID NO: 228211
  chr2:28617456-28617657
  hyper

SEQ ID NO: 415905 - DNA, 424 bp, Homo sapiens; identical to SEQ ID NO: 228212
  chr2:28789407-28789831
  hyper

SEQ ID NO: 415906 - DNA, 101 bp, Homo sapiens; identical to SEQ ID NO: 228213
  chr2:28844563-28844664
  hyper

SEQ ID NO: 415907 - DNA, 185 bp, Homo sapiens; identical to SEQ ID NO: 228215
  chr2:29093424-29093609
  hyper

SEQ ID NO: 415908 - DNA, 71 bp, Homo sapiens; identical to SEQ ID NO: 198147
  chr2:30142811-30142882
  hyper

SEQ ID NO: 415909 - DNA, 82 bp, Homo sapiens; identical to SEQ ID NO: 198148
  chr2:30142977-30143059
  hyper

SEQ ID NO: 415910 - DNA, 139 bp, Homo sapiens; identical to SEQ ID NO: 198149
  chr2:30143137-30143276
  hyper

SEQ ID NO: 415911 - DNA, 223 bp, Homo sapiens; identical to SEQ ID NO: 279657
  chr2:30369368-30369591
  hyper

SEQ ID NO: 415912 - DNA, 32 bp, Homo sapiens
  chr2:30454910-30454942
  hyper
gtgtgaatcccccccaatgaaaccaccctatg

SEQ ID NO: 415913 - DNA, 177 bp, Homo sapiens; identical to SEQ ID NO: 228224
  chr2:32234815-32234992
  hyper

SEQ ID NO: 415914 - DNA, 351 bp, Homo sapiens; identical to SEQ ID NO: 228225
  chr2:32235911-32236262
  hyper

SEQ ID NO: 415915 - DNA, 429 bp, Homo sapiens; identical to SEQ ID NO: 228226
  chr2:32264569-32264998
  hyper

SEQ ID NO: 415916 - DNA, 318 bp, Homo sapiens; identical to SEQ ID NO: 228227
  chr2:32288258-32288576
  hyper

SEQ ID NO: 415917 - DNA, 83 bp, Homo sapiens; identical to SEQ ID NO: 228228
  chr2:32502955-32503038
  hyper

SEQ ID NO: 415918 - DNA, 182 bp, Homo sapiens; identical to SEQ ID NO: 228229
  chr2:32581580-32581762
  hyper

SEQ ID NO: 415919 - DNA, 139 bp, Homo sapiens; identical to SEQ ID NO: 198160
  chr2:33171660-33171799
  hyper

SEQ ID NO: 415920 - DNA, 142 bp, Homo sapiens; identical to SEQ ID NO: 198161
  chr2:33172105-33172247
  hyper

SEQ ID NO: 415921 - DNA, 114 bp, Homo sapiens; identical to SEQ ID NO: 228233
  chr2:33824328-33824442
  hyper

SEQ ID NO: 415922 - DNA, 258 bp, Homo sapiens; identical to SEQ ID NO: 228234
  chr2:36825136-36825394
  hyper

SEQ ID NO: 415923 - DNA, 230 bp, Homo sapiens; identical to SEQ ID NO: 228235
  chr2:37194141-37194371
  hyper

SEQ ID NO: 415924 - DNA, 31 bp, Homo sapiens; identical to SEQ ID NO: 228236
  chr2:37384213-37384244
  hyper

SEQ ID NO: 415925 - DNA, 740 bp, Homo sapiens; identical to SEQ ID NO: 228237
  chr2:37458343-37459083
  hyper

SEQ ID NO: 415926 - DNA, 77 bp, Homo sapiens; identical to SEQ ID NO: 279678
  chr2:37571656-37571733
  hyper

SEQ ID NO: 415927 - DNA, 77 bp, Homo sapiens; identical to SEQ ID NO: 279679
  chr2:37571910-37571987
  hyper

SEQ ID NO: 415928 - DNA, 163 bp, Homo sapiens; identical to SEQ ID NO: 228239
  chr2:37572275-37572438
  hyper

SEQ ID NO: 415929 - DNA, 313 bp, Homo sapiens
  chr2:37898934-37899247
  hyper
ggggccaaccggtggccgggcgcgcgcgcgggggggggtcaccgttggaccctcggaggacaatgggcgcccattgttacctccccagcgccaccccccagtaggcgacttctctcggagaagatgccgctttcgactccctaagcacaaagaaaggtcgccggacgctcggtttaaagagggacccggaggtgctgccgcccgggtgcacggggacaataggactccgcccgcaccccggactcccgcactaaaactcgtgcgcccacctctcccgatcccaacaggccgacctagctgtgcgagtggcggg

SEQ ID NO: 415930 - DNA, 64 bp, Homo sapiens; identical to SEQ ID NO: 279683
  chr2:38152927-38152991
  hyper

SEQ ID NO: 415931 - DNA, 155 bp, Homo sapiens; identical to SEQ ID NO: 228244
  chr2:38604302-38604457
  hyper

SEQ ID NO: 415932 - DNA, 193 bp, Homo sapiens; identical to SEQ ID NO: 228245
  chr2:39005144-39005337
  hyper

SEQ ID NO: 415933 - DNA, 102 bp, Homo sapiens; identical to SEQ ID NO: 228247
  chr2:39847387-39847489
  hyper

SEQ ID NO: 415934 - DNA, 379 bp, Homo sapiens; identical to SEQ ID NO: 228250
  chr2:42068163-42068542
  hyper

SEQ ID NO: 415935 - DNA, 47 bp, Homo sapiens; identical to SEQ ID NO: 198170
  chr2:42329271-42329318
  hyper

SEQ ID NO: 415936 - DNA, 370 bp, Homo sapiens; identical to SEQ ID NO: 279694
  chr2:42395973-42396343
  hyper

SEQ ID NO: 415937 - DNA, 149 bp, Homo sapiens; identical to SEQ ID NO: 228255
  chr2:42588290-42588439
  hyper

SEQ ID NO: 415938 - DNA, 245 bp, Homo sapiens; identical to SEQ ID NO: 228259
  chr2:42795911-42796156
  hyper

SEQ ID NO: 415939 - DNA, 287 bp, Homo sapiens; identical to SEQ ID NO: 198175
  chr2:43445793-43446080
  hyper

SEQ ID NO: 415940 - DNA, 81 bp, Homo sapiens; identical to SEQ ID NO: 198176
  chr2:43446676-43446757
  hyper

SEQ ID NO: 415941 - DNA, 620 bp, Homo sapiens; identical to SEQ ID NO: 198177
  chr2:43446817-43447437
  hyper

SEQ ID NO: 415942 - DNA, 140 bp, Homo sapiens; identical to SEQ ID NO: 228265
  chr2:43447696-43447836
  hyper

SEQ ID NO: 415943 - DNA, 154 bp, Homo sapiens; identical to SEQ ID NO: 228269
  chr2:43453310-43453464
  hyper

SEQ ID NO: 415944 - DNA, 68 bp, Homo sapiens; identical to SEQ ID NO: 228270
  chr2:43454171-43454239
  hyper

SEQ ID NO: 415945 - DNA, 433 bp, Homo sapiens; identical to SEQ ID NO: 198179
  chr2:43822951-43823384
  hyper

SEQ ID NO: 415946 - DNA, 301 bp, Homo sapiens; identical to SEQ ID NO: 228273
  chr2:44223035-44223336
  hyper

SEQ ID NO: 415947 - DNA, 225 bp, Homo sapiens; identical to SEQ ID NO: 228274
  chr2:44588951-44589176
  hyper

SEQ ID NO: 415948 - DNA, 80 bp, Homo sapiens; identical to SEQ ID NO: 228276
  chr2:45030318-45030398
  hyper

SEQ ID NO: 415949 - DNA, 48 bp, Homo sapiens; identical to SEQ ID NO: 279716
  chr2:45163155-45163203
  hyper

SEQ ID NO: 415950 - DNA, 531 bp, Homo sapiens; identical to SEQ ID NO: 279720
  chr2:45180203-45180734
  hyper

SEQ ID NO: 415951 - DNA, 250 bp, Homo sapiens; identical to SEQ ID NO: 228288
  chr2:45182675-45182925
  hyper

SEQ ID NO: 415952 - DNA, 49 bp, Homo sapiens; identical to SEQ ID NO: 279722
  chr2:45228528-45228577
  hyper

SEQ ID NO: 415953 - DNA, 57 bp, Homo sapiens; identical to SEQ ID NO: 279723
  chr2:45231725-45231782
  hyper

SEQ ID NO: 415954 - DNA, 82 bp, Homo sapiens; identical to SEQ ID NO: 279724
  chr2:45236886-45236968
  hyper

SEQ ID NO: 415955 - DNA, 101 bp, Homo sapiens; identical to SEQ ID NO: 228298
  chr2:45837797-45837898
  hyper

SEQ ID NO: 415956 - DNA, 339 bp, Homo sapiens; identical to SEQ ID NO: 228299
  chr2:45878653-45878992
  hyper

SEQ ID NO: 415957 - DNA, 559 bp, Homo sapiens; identical to SEQ ID NO: 198187
  chr2:46524134-46524693
  hyper

SEQ ID NO: 415958 - DNA, 274 bp, Homo sapiens
  chr2:46524957-46525231
  hyper
cgggccgcggggagcggacgagggccacagccccccacccgccagggagcccaggtgctcggcgtctgaacgtctcaaagggccacagcgacaatgacagctgacaaggagaagaaaaggtaagcgggcgtccgggccgatcagggggccggtccgaggccagggccgggctgcgcggggcaggcgcgaccgagagtggttgggagaagagtgctgagaggtcttcggagctcgaggctcggtttggagggctgtgagggggagagcatgtgcc

SEQ ID NO: 415959 - DNA, 608 bp, Homo sapiens; identical to SEQ ID NO: 228302
  chr2:46727082-46727690
  hyper

SEQ ID NO: 415960 - DNA, 63 bp, Homo sapiens; identical to SEQ ID NO: 279735
  chr2:46770636-46770699
  hyper

SEQ ID NO: 415961 - DNA, 128 bp, Homo sapiens; identical to SEQ ID NO: 279736
  chr2:46770831-46770959
  hyper

SEQ ID NO: 415962 - DNA, 56 bp, Homo sapiens; identical to SEQ ID NO: 228303
  chr2:46926176-46926232
  hyper

SEQ ID NO: 415963 - DNA, 81 bp, Homo sapiens; identical to SEQ ID NO: 198192
  chr2:47167906-47167987
  hyper

SEQ ID NO: 415964 - DNA, 122 bp, Homo sapiens; identical to SEQ ID NO: 228305
  chr2:47168426-47168548
  hyper

SEQ ID NO: 415965 - DNA, 97 bp, Homo sapiens; identical to SEQ ID NO: 228306
  chr2:47169106-47169203
  hyper

SEQ ID NO: 415966 - DNA, 42 bp, Homo sapiens; identical to SEQ ID NO: 228307
  chr2:47403982-47404024
  hyper

SEQ ID NO: 415967 - DNA, 329 bp, Homo sapiens; identical to SEQ ID NO: 198194
  chr2:47596115-47596444
  hyper

SEQ ID NO: 415968 - DNA, 60 bp, Homo sapiens; identical to SEQ ID NO: 198195
  chr2:47596505-47596565
  hyper

SEQ ID NO: 415969 - DNA, 55 bp, Homo sapiens; identical to SEQ ID NO: 198196
  chr2:47596794-47596849
  hyper

SEQ ID NO: 415970 - DNA, 41 bp, Homo sapiens; identical to SEQ ID NO: 37435
  chr2:47596941-47596982
  hyper

SEQ ID NO: 415971 - DNA, 763 bp, Homo sapiens; identical to SEQ ID NO: 279748
  chr2:47629778-47630541
  hyper

SEQ ID NO: 415972 - DNA, 155 bp, Homo sapiens; identical to SEQ ID NO: 221744
  chr2:47635539-47635694
  hyper

SEQ ID NO: 415973 - DNA, 279 bp, Homo sapiens; identical to SEQ ID NO: 221745
  chr2:47637232-47637511
  hyper

SEQ ID NO: 415974 - DNA, 147 bp, Homo sapiens; identical to SEQ ID NO: 221746
  chr2:47639552-47639699
  hyper

SEQ ID NO: 415975 - DNA, 150 bp, Homo sapiens; identical to SEQ ID NO: 221747
  chr2:47641407-47641557
  hyper

SEQ ID NO: 415976 - DNA, 134 bp, Homo sapiens; identical to SEQ ID NO: 221748
  chr2:47643434-47643568
  hyper

SEQ ID NO: 415977 - DNA, 67 bp, Homo sapiens; identical to SEQ ID NO: 395893
  chr2:47656880-47656947
  hyper

SEQ ID NO: 415978 - DNA, 60 bp, Homo sapiens; identical to SEQ ID NO: 395894
  chr2:47657020-47657080
  hyper

SEQ ID NO: 415979 - DNA, 110 bp, Homo sapiens; identical to SEQ ID NO: 221750
  chr2:47672686-47672796
  hyper

SEQ ID NO: 415980 - DNA, 124 bp, Homo sapiens; identical to SEQ ID NO: 221751
  chr2:47690169-47690293
  hyper

SEQ ID NO: 415981 - DNA, 151 bp, Homo sapiens; identical to SEQ ID NO: 221752
  chr2:47693796-47693947
  hyper

SEQ ID NO: 415982 - DNA, 98 bp, Homo sapiens; identical to SEQ ID NO: 221753
  chr2:47698103-47698201
  hyper

SEQ ID NO: 415983 - DNA, 246 bp, Homo sapiens; identical to SEQ ID NO: 221754
  chr2:47702163-47702409
  hyper

SEQ ID NO: 415984 - DNA, 205 bp, Homo sapiens; identical to SEQ ID NO: 221755
  chr2:47703505-47703710
  hyper

SEQ ID NO: 415985 - DNA, 248 bp, Homo sapiens; identical to SEQ ID NO: 221756
  chr2:47705410-47705658
  hyper

SEQ ID NO: 415986 - DNA, 176 bp, Homo sapiens; identical to SEQ ID NO: 221757
  chr2:47707834-47708010
  hyper

SEQ ID NO: 415987 - DNA, 450 bp, Homo sapiens; identical to SEQ ID NO: 221758
  chr2:47709917-47710367
  hyper

SEQ ID NO: 415988 - DNA, 192 bp, Homo sapiens; identical to SEQ ID NO: 198200
  chr2:48009756-48009948
  hyper

SEQ ID NO: 415989 - DNA, 412 bp, Homo sapiens; identical to SEQ ID NO: 221761
  chr2:48010220-48010632
  hyper

SEQ ID NO: 415990 - DNA, 35 bp, Homo sapiens; identical to SEQ ID NO: 198201
  chr2:48011383-48011418
  hyper

SEQ ID NO: 415991 - DNA, 197 bp, Homo sapiens; identical to SEQ ID NO: 221762
  chr2:48018065-48018262
  hyper

SEQ ID NO: 415992 - DNA, 170 bp, Homo sapiens; identical to SEQ ID NO: 221763
  chr2:48023032-48023202
  hyper

SEQ ID NO: 415993 - DNA, 2545 bp, Homo sapiens; identical to SEQ ID NO: 221764
  chr2:48025749-48028294
  hyper

SEQ ID NO: 415994 - DNA, 266 bp, Homo sapiens; identical to SEQ ID NO: 221765
  chr2:48030558-48030824
  hyper

SEQ ID NO: 415995 - DNA, 118 bp, Homo sapiens; identical to SEQ ID NO: 221766
  chr2:48032048-48032166
  hyper

SEQ ID NO: 415996 - DNA, 90 bp, Homo sapiens; identical to SEQ ID NO: 221767
  chr2:48032756-48032846
  hyper

SEQ ID NO: 415997 - DNA, 750 bp, Homo sapiens; identical to SEQ ID NO: 221768
  chr2:48033342-48034092
  hyper

SEQ ID NO: 415998 - DNA, 227 bp, Homo sapiens; identical to SEQ ID NO: 228315
  chr2:48131259-48131486
  hyper

SEQ ID NO: 415999 - DNA, 55 bp, Homo sapiens; identical to SEQ ID NO: 228316
  chr2:48543151-48543206
  hyper

SEQ ID NO: 416000 - DNA, 152 bp, Homo sapiens; identical to SEQ ID NO: 228317
  chr2:48756956-48757108
  hyper

SEQ ID NO: 416001 - DNA, 111 bp, Homo sapiens; identical to SEQ ID NO: 279779
  chr2:48757430-48757541
  hyper

SEQ ID NO: 416002 - DNA, 267 bp, Homo sapiens; identical to SEQ ID NO: 279780
  chr2:48757626-48757893
  hyper

SEQ ID NO: 416003 - DNA, 133 bp, Homo sapiens; identical to SEQ ID NO: 198202
  chr2:50573244-50573377
  hyper

SEQ ID NO: 416004 - DNA, 251 bp, Homo sapiens; identical to SEQ ID NO: 198204
  chr2:50629607-50629858
  hyper

SEQ ID NO: 416005 - DNA, 50 bp, Homo sapiens; identical to SEQ ID NO: 279784
  chr2:51259211-51259261
  hyper

SEQ ID NO: 416006 - DNA, 235 bp, Homo sapiens; identical to SEQ ID NO: 198205
  chr2:51259566-51259801
  hyper

SEQ ID NO: 416007 - DNA, 41 bp, Homo sapiens; identical to SEQ ID NO: 198206
  chr2:54682463-54682504
  hyper

SEQ ID NO: 416008 - DNA, 140 bp, Homo sapiens; identical to SEQ ID NO: 221769
  chr2:54683032-54683172
  hyper

SEQ ID NO: 416009 - DNA, 93 bp, Homo sapiens; identical to SEQ ID NO: 228326
  chr2:54950042-54950135
  hyper

SEQ ID NO: 416010 - DNA, 94 bp, Homo sapiens; identical to SEQ ID NO: 198209
  chr2:54951619-54951713
  hyper

SEQ ID NO: 416011 - DNA, 283 bp, Homo sapiens; identical to SEQ ID NO: 198210
  chr2:54951795-54952078
  hyper

SEQ ID NO: 416012 - DNA, 89 bp, Homo sapiens; identical to SEQ ID NO: 228328
  chr2:55276442-55276531
  hyper

SEQ ID NO: 416013 - DNA, 199 bp, Homo sapiens; identical to SEQ ID NO: 228329
  chr2:55459598-55459797
  hyper

SEQ ID NO: 416014 - DNA, 375 bp, Homo sapiens; identical to SEQ ID NO: 228330
  chr2:55496130-55496505
  hyper

SEQ ID NO: 416015 - DNA, 101 bp, Homo sapiens; identical to SEQ ID NO: 279798
  chr2:55646327-55646428
  hyper

SEQ ID NO: 416016 - DNA, 680 bp, Homo sapiens; identical to SEQ ID NO: 279799
  chr2:55646458-55647138
  hyper

SEQ ID NO: 416017 - DNA, 52 bp, Homo sapiens; identical to SEQ ID NO: 228333
  chr2:55746535-55746587
  hyper

SEQ ID NO: 416018 - DNA, 71 bp, Homo sapiens; identical to SEQ ID NO: 105977
  chr2:55921038-55921109
  hyper

SEQ ID NO: 416019 - DNA, 456 bp, Homo sapiens; identical to SEQ ID NO: 279806
  chr2:56411799-56412255
  hyper

SEQ ID NO: 416020 - DNA, 284 bp, Homo sapiens; identical to SEQ ID NO: 279807
  chr2:56412327-56412611
  hyper

SEQ ID NO: 416021 - DNA, 193 bp, Homo sapiens; identical to SEQ ID NO: 198216
  chr2:56412856-56413049
  hyper

SEQ ID NO: 416022 - DNA, 160 bp, Homo sapiens; identical to SEQ ID NO: 198217
  chr2:58273538-58273698
  hyper

SEQ ID NO: 416023 - DNA, 54 bp, Homo sapiens; identical to SEQ ID NO: 228340
  chr2:58274020-58274074
  hyper

SEQ ID NO: 416024 - DNA, 232 bp, Homo sapiens; identical to SEQ ID NO: 228341
  chr2:58274307-58274539
  hyper

SEQ ID NO: 416025 - DNA, 33 bp, Homo sapiens; identical to SEQ ID NO: 198219
  chr2:58655395-58655428
  hyper

SEQ ID NO: 416026 - DNA, 348 bp, Homo sapiens; identical to SEQ ID NO: 279813
  chr2:58655631-58655979
  hyper

SEQ ID NO: 416027 - DNA, 101 bp, Homo sapiens; identical to SEQ ID NO: 198220
  chr2:58776940-58777041
  hyper

SEQ ID NO: 416028 - DNA, 175 bp, Homo sapiens; identical to SEQ ID NO: 228345
  chr2:60782018-60782193
  hyper

SEQ ID NO: 416029 - DNA, 90 bp, Homo sapiens; identical to SEQ ID NO: 106001
  chr2:60782777-60782867
  hyper

SEQ ID NO: 416030 - DNA, 405 bp, Homo sapiens; identical to SEQ ID NO: 228351
  chr2:60808827-60809232
  hyper

SEQ ID NO: 416031 - DNA, 252 bp, Homo sapiens; identical to SEQ ID NO: 228353
  chr2:60983180-60983432
  hyper

SEQ ID NO: 416032 - DNA, 213 bp, Homo sapiens; identical to SEQ ID NO: 228354
  chr2:61108072-61108285
  hyper

SEQ ID NO: 416033 - DNA, 77 bp, Homo sapiens; identical to SEQ ID NO: 198225
  chr2:61109819-61109896
  hyper

SEQ ID NO: 416034 - DNA, 253 bp, Homo sapiens; identical to SEQ ID NO: 228358
  chr2:61244606-61244859
  hyper

SEQ ID NO: 416035 - DNA, 286 bp, Homo sapiens; identical to SEQ ID NO: 228359
  chr2:61293059-61293345
  hyper

SEQ ID NO: 416036 - DNA, 138 bp, Homo sapiens; identical to SEQ ID NO: 228360
  chr2:61404133-61404271
  hyper

SEQ ID NO: 416037 - DNA, 116 bp, Homo sapiens; identical to SEQ ID NO: 228361
  chr2:61765409-61765525
  hyper

SEQ ID NO: 416038 - DNA, 95 bp, Homo sapiens; identical to SEQ ID NO: 221776
  chr2:61921788-61921883
  hyper

SEQ ID NO: 416039 - DNA, 826 bp, Homo sapiens; identical to SEQ ID NO: 279833
  chr2:61990960-61991786
  hyper

SEQ ID NO: 416040 - DNA, 67 bp, Homo sapiens; identical to SEQ ID NO: 228365
  chr2:62115906-62115973
  hyper

SEQ ID NO: 416041 - DNA, 178 bp, Homo sapiens; identical to SEQ ID NO: 228366
  chr2:62132600-62132778
  hyper

SEQ ID NO: 416042 - DNA, 423 bp, Homo sapiens; identical to SEQ ID NO: 228367
  chr2:62422576-62422999
  hyper

SEQ ID NO: 416043 - DNA, 801 bp, Homo sapiens; identical to SEQ ID NO: 228368
  chr2:62424205-62425006
  hyper

SEQ ID NO: 416044 - DNA, 637 bp, Homo sapiens; identical to SEQ ID NO: 198232
  chr2:62732953-62733590
  hyper

SEQ ID NO: 416045 - DNA, 154 bp, Homo sapiens; identical to SEQ ID NO: 198233
  chr2:62798173-62798327
  hyper

SEQ ID NO: 416046 - DNA, 83 bp, Homo sapiens; identical to SEQ ID NO: 198234
  chr2:62798526-62798609
  hyper

SEQ ID NO: 416047 - DNA, 850 bp, Homo sapiens; identical to SEQ ID NO: 279842
  chr2:63276492-63277342
  hyper

SEQ ID NO: 416048 - DNA, 489 bp, Homo sapiens; identical to SEQ ID NO: 228377
  chr2:63815746-63816235
  hyper

SEQ ID NO: 416049 - DNA, 86 bp, Homo sapiens; identical to SEQ ID NO: 228378
  chr2:64067905-64067991
  hyper

SEQ ID NO: 416050 - DNA, 83 bp, Homo sapiens; identical to SEQ ID NO: 228379
  chr2:64068891-64068974
  hyper

SEQ ID NO: 416051 - DNA, 94 bp, Homo sapiens; identical to SEQ ID NO: 198240
  chr2:64455371-64455465
  hyper

SEQ ID NO: 416052 - DNA, 34 bp, Homo sapiens; identical to SEQ ID NO: 198241
  chr2:64455661-64455695
  hyper

SEQ ID NO: 416053 - DNA, 84 bp, Homo sapiens; identical to SEQ ID NO: 228381
  chr2:64681068-64681152
  hyper

SEQ ID NO: 416054 - DNA, 293 bp, Homo sapiens; identical to SEQ ID NO: 228382
  chr2:64752068-64752361
  hyper

SEQ ID NO: 416055 - DNA, 147 bp, Homo sapiens; identical to SEQ ID NO: 228383
  chr2:64752591-64752738
  hyper

SEQ ID NO: 416056 - DNA, 142 bp, Homo sapiens; identical to SEQ ID NO: 221780
  chr2:64872367-64872509
  hyper

SEQ ID NO: 416057 - DNA, 357 bp, Homo sapiens; identical to SEQ ID NO: 221781
  chr2:65086836-65087193
  hyper

SEQ ID NO: 416058 - DNA, 482 bp, Homo sapiens; identical to SEQ ID NO: 221782
  chr2:65215348-65215830
  hyper

SEQ ID NO: 416059 - DNA, 236 bp, Homo sapiens; identical to SEQ ID NO: 228385
  chr2:65283407-65283643
  hyper

SEQ ID NO: 416060 - DNA, 40 bp, Homo sapiens; identical to SEQ ID NO: 228386
  chr2:65659688-65659728
  hyper

SEQ ID NO: 416061 - DNA, 264 bp, Homo sapiens; identical to SEQ ID NO: 198247
  chr2:66660314-66660578
  hyper

SEQ ID NO: 416062 - DNA, 48 bp, Homo sapiens
  chr2:66660888-66660936
  hyper
atacgaaaataacgccactaaatataatcacaagggagaagcttagag

SEQ ID NO: 416063 - DNA, 178 bp, Homo sapiens; identical to SEQ ID NO: 279867
  chr2:66662571-66662749
  hyper

SEQ ID NO: 416064 - DNA, 98 bp, Homo sapiens; identical to SEQ ID NO: 198251
  chr2:66662824-66662922
  hyper

SEQ ID NO: 416065 - DNA, 350 bp, Homo sapiens; identical to SEQ ID NO: 198252
  chr2:66802947-66803297
  hyper

SEQ ID NO: 416066 - DNA, 41 bp, Homo sapiens; identical to SEQ ID NO: 228395
  chr2:68384727-68384768
  hyper

SEQ ID NO: 416067 - DNA, 40 bp, Homo sapiens; identical to SEQ ID NO: 198257
  chr2:69240028-69240068
  hyper

SEQ ID NO: 416068 - DNA, 505 bp, Homo sapiens; identical to SEQ ID NO: 279875
  chr2:69240720-69241225
  hyper

SEQ ID NO: 416069 - DNA, 72 bp, Homo sapiens; identical to SEQ ID NO: 228402
  chr2:69664548-69664620
  hyper

SEQ ID NO: 416070 - DNA, 374 bp, Homo sapiens; identical to SEQ ID NO: 279879
  chr2:69968429-69968803
  hyper

SEQ ID NO: 416071 - DNA, 35 bp, Homo sapiens; identical to SEQ ID NO: 228404
  chr2:69969207-69969242
  hyper

SEQ ID NO: 416072 - DNA, 275 bp, Homo sapiens; identical to SEQ ID NO: 228405
  chr2:70056451-70056726
  hyper

SEQ ID NO: 416073 - DNA, 359 bp, Homo sapiens; identical to SEQ ID NO: 228406
  chr2:70120922-70121281
  hyper

SEQ ID NO: 416074 - DNA, 300 bp, Homo sapiens; identical to SEQ ID NO: 228407
  chr2:70141869-70142169
  hyper

SEQ ID NO: 416075 - DNA, 74 bp, Homo sapiens; identical to SEQ ID NO: 198260
  chr2:70313274-70313348
  hyper

SEQ ID NO: 416076 - DNA, 487 bp, Homo sapiens; identical to SEQ ID NO: 279885
  chr2:70313475-70313962
  hyper

SEQ ID NO: 416077 - DNA, 206 bp, Homo sapiens; identical to SEQ ID NO: 279889
  chr2:70418110-70418316
  hyper

SEQ ID NO: 416078 - DNA, 405 bp, Homo sapiens; identical to SEQ ID NO: 198266
  chr2:70485366-70485771
  hyper

SEQ ID NO: 416079 - DNA, 409 bp, Homo sapiens; identical to SEQ ID NO: 228413
  chr2:70520657-70521066
  hyper

SEQ ID NO: 416080 - DNA, 322 bp, Homo sapiens; identical to SEQ ID NO: 228414
  chr2:71295259-71295581
  hyper

SEQ ID NO: 416081 - DNA, 413 bp, Homo sapiens; identical to SEQ ID NO: 228415
  chr2:71357126-71357539
  hyper

SEQ ID NO: 416082 - DNA, 68 bp, Homo sapiens; identical to SEQ ID NO: 279896
  chr2:71502821-71502889
  hyper

SEQ ID NO: 416083 - DNA, 40 bp, Homo sapiens; identical to SEQ ID NO: 198270
  chr2:71504818-71504858
  hyper

SEQ ID NO: 416084 - DNA, 300 bp, Homo sapiens; identical to SEQ ID NO: 279899
  chr2:71693924-71694224
  hyper

SEQ ID NO: 416085 - DNA, 316 bp, Homo sapiens; identical to SEQ ID NO: 279905
  chr2:72375582-72375898
  hyper

SEQ ID NO: 416086 - DNA, 198 bp, Homo sapiens; identical to SEQ ID NO: 279906
  chr2:72376168-72376366
  hyper

SEQ ID NO: 416087 - DNA, 372 bp, Homo sapiens; identical to SEQ ID NO: 279911
  chr2:73114130-73114502
  hyper

SEQ ID NO: 416088 - DNA, 316 bp, Homo sapiens; identical to SEQ ID NO: 228430
  chr2:73114710-73115026
  hyper

SEQ ID NO: 416089 - DNA, 39 bp, Homo sapiens; identical to SEQ ID NO: 198281
  chr2:73141975-73142014
  hyper

SEQ ID NO: 416090 - DNA, 191 bp, Homo sapiens; identical to SEQ ID NO: 198282
  chr2:73142102-73142293
  hyper

SEQ ID NO: 416091 - DNA, 433 bp, Homo sapiens; identical to SEQ ID NO: 279915
  chr2:73142353-73142786
  hyper

SEQ ID NO: 416092 - DNA, 489 bp, Homo sapiens; identical to SEQ ID NO: 198284
  chr2:73142998-73143487
  hyper

SEQ ID NO: 416093 - DNA, 47 bp, Homo sapiens; identical to SEQ ID NO: 228438
  chr2:73298957-73299004
  hyper

SEQ ID NO: 416094 - DNA, 297 bp, Homo sapiens; identical to SEQ ID NO: 198292
  chr2:73511726-73512023
  hyper

SEQ ID NO: 416095 - DNA, 65 bp, Homo sapiens; identical to SEQ ID NO: 198293
  chr2:73512162-73512227
  hyper

SEQ ID NO: 416096 - DNA, 130 bp, Homo sapiens; identical to SEQ ID NO: 228442
  chr2:73612642-73612772
  hyper

SEQ ID NO: 416097 - DNA, 307 bp, Homo sapiens; identical to SEQ ID NO: 228443
  chr2:74007133-74007440
  hyper

SEQ ID NO: 416098 - DNA, 135 bp, Homo sapiens; identical to SEQ ID NO: 228444
  chr2:74055936-74056071
  hyper

SEQ ID NO: 416099 - DNA, 640 bp, Homo sapiens; identical to SEQ ID NO: 228445
  chr2:74153738-74154378
  hyper

SEQ ID NO: 416100 - DNA, 421 bp, Homo sapiens; identical to SEQ ID NO: 198296
  chr2:74405756-74406177
  hyper

SEQ ID NO: 416101 - DNA, 183 bp, Homo sapiens; identical to SEQ ID NO: 228451
  chr2:74684552-74684735
  hyper

SEQ ID NO: 416102 - DNA, 231 bp, Homo sapiens; identical to SEQ ID NO: 228452
  chr2:74685369-74685600
  hyper

SEQ ID NO: 416103 - DNA, 97 bp, Homo sapiens; identical to SEQ ID NO: 228453
  chr2:74710446-74710543
  hyper

SEQ ID NO: 416104 - DNA, 41 bp, Homo sapiens; identical to SEQ ID NO: 228456
  chr2:74735289-74735330
  hyper

SEQ ID NO: 416105 - DNA, 104 bp, Homo sapiens; identical to SEQ ID NO: 228461
  chr2:74756283-74756387
  hyper

SEQ ID NO: 416106 - DNA, 36 bp, Homo sapiens; identical to SEQ ID NO: 198305
  chr2:74776040-74776076
  hyper

SEQ ID NO: 416107 - DNA, 142 bp, Homo sapiens; identical to SEQ ID NO: 198306
  chr2:74776396-74776538
  hyper

SEQ ID NO: 416108 - DNA, 96 bp, Homo sapiens; identical to SEQ ID NO: 228464
  chr2:74942355-74942451
  hyper

SEQ ID NO: 416109 - DNA, 111 bp, Homo sapiens
  chr2:75426929-75427040
  hyper
gaggggtgctgggaggaaggaaggatttgggaaacagctggagtggaggacaatcaacttccagggaatgaagcccagagccctgagacagctctgcagaggcggcttgcc

SEQ ID NO: 416110 - DNA, 255 bp, Homo sapiens; identical to SEQ ID NO: 279957
  chr2:75427114-75427369
  hyper

SEQ ID NO: 416111 - DNA, 74 bp, Homo sapiens; identical to SEQ ID NO: 279958
  chr2:75787357-75787431
  hyper

SEQ ID NO: 416112 - DNA, 100 bp, Homo sapiens; identical to SEQ ID NO: 198311
  chr2:75787704-75787804
  hyper

SEQ ID NO: 416113 - DNA, 95 bp, Homo sapiens; identical to SEQ ID NO: 198312
  chr2:75788345-75788440
  hyper

SEQ ID NO: 416114 - DNA, 154 bp, Homo sapiens; identical to SEQ ID NO: 228470
  chr2:75873843-75873997
  hyper

SEQ ID NO: 416115 - DNA, 490 bp, Homo sapiens; identical to SEQ ID NO: 228474
  chr2:84686316-84686806
  hyper

SEQ ID NO: 416116 - DNA, 115 bp, Homo sapiens; identical to SEQ ID NO: 279966
  chr2:85107819-85107934
  hyper

SEQ ID NO: 416117 - DNA, 91 bp, Homo sapiens; identical to SEQ ID NO: 228477
  chr2:85154122-85154213
  hyper

SEQ ID NO: 416118 - DNA, 101 bp, Homo sapiens; identical to SEQ ID NO: 198314
  chr2:85359942-85360043
  hyper

SEQ ID NO: 416119 - DNA, 325 bp, Homo sapiens; identical to SEQ ID NO: 395969
  chr2:85360470-85360795
  hyper

SEQ ID NO: 416120 - DNA, 198 bp, Homo sapiens; identical to SEQ ID NO: 228479
  chr2:85553952-85554150
  hyper

SEQ ID NO: 416121 - DNA, 145 bp, Homo sapiens; identical to SEQ ID NO: 228480
  chr2:85555444-85555589
  hyper

SEQ ID NO: 416122 - DNA, 235 bp, Homo sapiens; identical to SEQ ID NO: 228481
  chr2:85581697-85581932
  hyper

SEQ ID NO: 416123 - DNA, 70 bp, Homo sapiens; identical to SEQ ID NO: 228482
  chr2:85788617-85788687
  hyper

SEQ ID NO: 416124 - DNA, 65 bp, Homo sapiens; identical to SEQ ID NO: 228483
  chr2:85788985-85789050
  hyper

SEQ ID NO: 416125 - DNA, 108 bp, Homo sapiens; identical to SEQ ID NO: 228484
  chr2:85804638-85804746
  hyper

SEQ ID NO: 416126 - DNA, 367 bp, Homo sapiens; identical to SEQ ID NO: 279976
  chr2:85822391-85822758
  hyper

SEQ ID NO: 416127 - DNA, 235 bp, Homo sapiens; identical to SEQ ID NO: 198316
  chr2:85829251-85829486
  hyper

SEQ ID NO: 416128 - DNA, 249 bp, Homo sapiens; identical to SEQ ID NO: 228486
  chr2:85829658-85829907
  hyper

SEQ ID NO: 416129 - DNA, 158 bp, Homo sapiens; identical to SEQ ID NO: 228487
  chr2:85830122-85830280
  hyper

SEQ ID NO: 416130 - DNA, 841 bp, Homo sapiens; identical to SEQ ID NO: 106285
  chr2:85980859-85981700
  hyper

SEQ ID NO: 416131 - DNA, 168 bp, Homo sapiens; identical to SEQ ID NO: 228488
  chr2:85982463-85982631
  hyper

SEQ ID NO: 416132 - DNA, 761 bp, Homo sapiens; identical to SEQ ID NO: 228489
  chr2:86114869-86115630
  hyper

SEQ ID NO: 416133 - DNA, 204 bp, Homo sapiens; identical to SEQ ID NO: 106290
  chr2:86333309-86333513
  hyper

SEQ ID NO: 416134 - DNA, 115 bp, Homo sapiens; identical to SEQ ID NO: 228491
  chr2:86565024-86565139
  hyper

SEQ ID NO: 416135 - DNA, 265 bp, Homo sapiens; identical to SEQ ID NO: 228492
  chr2:86668219-86668484
  hyper

SEQ ID NO: 416136 - DNA, 53 bp, Homo sapiens; identical to SEQ ID NO: 198319
  chr2:86850368-86850421
  hyper

SEQ ID NO: 416137 - DNA, 138 bp, Homo sapiens; identical to SEQ ID NO: 228493
  chr2:86850743-86850881
  hyper

SEQ ID NO: 416138 - DNA, 81 bp, Homo sapiens; identical to SEQ ID NO: 279988
  chr2:87016937-87017018
  hyper

SEQ ID NO: 416139 - DNA, 118 bp, Homo sapiens; identical to SEQ ID NO: 228496
  chr2:87035595-87035713
  hyper

SEQ ID NO: 416140 - DNA, 81 bp, Homo sapiens; identical to SEQ ID NO: 228499
  chr2:88355120-88355201
  hyper

SEQ ID NO: 416141 - DNA, 50 bp, Homo sapiens; identical to SEQ ID NO: 279996
  chr2:88926936-88926986
  hyper

SEQ ID NO: 416142 - DNA, 289 bp, Homo sapiens; identical to SEQ ID NO: 106315
  chr2:88927015-88927304
  hyper

SEQ ID NO: 416143 - DNA, 77 bp, Homo sapiens; identical to SEQ ID NO: 228503
  chr2:88990956-88991033
  hyper

SEQ ID NO: 416144 - DNA, 345 bp, Homo sapiens; identical to SEQ ID NO: 280001
  chr2:95825283-95825628
  hyper

SEQ ID NO: 416145 - DNA, 114 bp, Homo sapiens; identical to SEQ ID NO: 228511
  chr2:95831017-95831131
  hyper

SEQ ID NO: 416146 - DNA, 146 bp, Homo sapiens; identical to SEQ ID NO: 280003
  chr2:95873228-95873374
  hyper

SEQ ID NO: 416147 - DNA, 180 bp, Homo sapiens; identical to SEQ ID NO: 228514
  chr2:96068500-96068680
  hyper

SEQ ID NO: 416148 - DNA, 170 bp, Homo sapiens; identical to SEQ ID NO: 228517
  chr2:96874380-96874550
  hyper

SEQ ID NO: 416149 - DNA, 52 bp, Homo sapiens; identical to SEQ ID NO: 228518
  chr2:96931553-96931605
  hyper

SEQ ID NO: 416150 - DNA, 194 bp, Homo sapiens; identical to SEQ ID NO: 228519
  chr2:96931839-96932033
  hyper

SEQ ID NO: 416151 - DNA, 534 bp, Homo sapiens; identical to SEQ ID NO: 280014
  chr2:96987312-96987846
  hyper

SEQ ID NO: 416152 - DNA, 52 bp, Homo sapiens; identical to SEQ ID NO: 228523
  chr2:97001267-97001319
  hyper

SEQ ID NO: 416153 - DNA, 210 bp, Homo sapiens; identical to SEQ ID NO: 198323
  chr2:97171202-97171412
  hyper

SEQ ID NO: 416154 - DNA, 197 bp, Homo sapiens; identical to SEQ ID NO: 198324
  chr2:97173863-97174060
  hyper

SEQ ID NO: 416155 - DNA, 286 bp, Homo sapiens; identical to SEQ ID NO: 280020
  chr2:97175214-97175500
  hyper

SEQ ID NO: 416156 - DNA, 228 bp, Homo sapiens; identical to SEQ ID NO: 280023
  chr2:97303973-97304201
  hyper

SEQ ID NO: 416157 - DNA, 243 bp, Homo sapiens; identical to SEQ ID NO: 228529
  chr2:97426260-97426503
  hyper

SEQ ID NO: 416158 - DNA, 35 bp, Homo sapiens; identical to SEQ ID NO: 228530
  chr2:97427013-97427048
  hyper

SEQ ID NO: 416159 - DNA, 298 bp, Homo sapiens; identical to SEQ ID NO: 198329
  chr2:97482863-97483161
  hyper

SEQ ID NO: 416160 - DNA, 78 bp, Homo sapiens; identical to SEQ ID NO: 228532
  chr2:97523294-97523372
  hyper

SEQ ID NO: 416161 - DNA, 137 bp, Homo sapiens; identical to SEQ ID NO: 228533
  chr2:97523809-97523946
  hyper

SEQ ID NO: 416162 - DNA, 98 bp, Homo sapiens; identical to SEQ ID NO: 228534
  chr2:97534367-97534465
  hyper

SEQ ID NO: 416163 - DNA, 156 bp, Homo sapiens; identical to SEQ ID NO: 198330
  chr2:97535760-97535916
  hyper

SEQ ID NO: 416164 - DNA, 103 bp, Homo sapiens; identical to SEQ ID NO: 198331
  chr2:97779476-97779579
  hyper

SEQ ID NO: 416165 - DNA, 69 bp, Homo sapiens; identical to SEQ ID NO: 198332
  chr2:98261938-98262007
  hyper

SEQ ID NO: 416166 - DNA, 145 bp, Homo sapiens; identical to SEQ ID NO: 228536
  chr2:98262416-98262561
  hyper

SEQ ID NO: 416167 - DNA, 133 bp, Homo sapiens; identical to SEQ ID NO: 198333
  chr2:98280679-98280812
  hyper

SEQ ID NO: 416168 - DNA, 50 bp, Homo sapiens; identical to SEQ ID NO: 228538
  chr2:98612517-98612567
  hyper

SEQ ID NO: 416169 - DNA, 73 bp, Homo sapiens; identical to SEQ ID NO: 280039
  chr2:98964718-98964791
  hyper

SEQ ID NO: 416170 - DNA, 235 bp, Homo sapiens; identical to SEQ ID NO: 228543
  chr2:99061163-99061398
  hyper

SEQ ID NO: 416171 - DNA, 35 bp, Homo sapiens; identical to SEQ ID NO: 228544
  chr2:99224744-99224779
  hyper

SEQ ID NO: 416172 - DNA, 188 bp, Homo sapiens; identical to SEQ ID NO: 280044
  chr2:99553203-99553391
  hyper

SEQ ID NO: 416173 - DNA, 80 bp, Homo sapiens; identical to SEQ ID NO: 228548
  chr2:99770997-99771077
  hyper

SEQ ID NO: 416174 - DNA, 293 bp, Homo sapiens; identical to SEQ ID NO: 228549
  chr2:99797344-99797637
  hyper

SEQ ID NO: 416175 - DNA, 108 bp, Homo sapiens; identical to SEQ ID NO: 228550
  chr2:99952955-99953063
  hyper

SEQ ID NO: 416176 - DNA, 232 bp, Homo sapiens; identical to SEQ ID NO: 228551
  chr2:99953660-99953892
  hyper

SEQ ID NO: 416177 - DNA, 476 bp, Homo sapiens; identical to SEQ ID NO: 280049
  chr2:100721429-100721905
  hyper

SEQ ID NO: 416178 - DNA, 391 bp, Homo sapiens; identical to SEQ ID NO: 221837
  chr2:100898414-100898805
  hyper

SEQ ID NO: 416179 - DNA, 371 bp, Homo sapiens; identical to SEQ ID NO: 228554
  chr2:101179132-101179503
  hyper

SEQ ID NO: 416180 - DNA, 704 bp, Homo sapiens; identical to SEQ ID NO: 198348
  chr2:101767139-101767843
  hyper

SEQ ID NO: 416181 - DNA, 955 bp, Homo sapiens; identical to SEQ ID NO: 198349
  chr2:101924527-101925482
  hyper

SEQ ID NO: 416182 - DNA, 227 bp, Homo sapiens; identical to SEQ ID NO: 198350
  chr2:102003274-102003501
  hyper

SEQ ID NO: 416183 - DNA, 225 bp, Homo sapiens; identical to SEQ ID NO: 198351
  chr2:102003609-102003834
  hyper

SEQ ID NO: 416184 - DNA, 112 bp, Homo sapiens; identical to SEQ ID NO: 280061
  chr2:102004154-102004266
  hyper

SEQ ID NO: 416185 - DNA, 332 bp, Homo sapiens; identical to SEQ ID NO: 198353
  chr2:102313750-102314082
  hyper

SEQ ID NO: 416186 - DNA, 153 bp, Homo sapiens; identical to SEQ ID NO: 37826
  chr2:102314091-102314244
  hyper

SEQ ID NO: 416187 - DNA, 41 bp, Homo sapiens; identical to SEQ ID NO: 228561
  chr2:102314451-102314492
  hyper

SEQ ID NO: 416188 - DNA, 159 bp, Homo sapiens; identical to SEQ ID NO: 198355
  chr2:102314987-102315146
  hyper

SEQ ID NO: 416189 - DNA, 68 bp, Homo sapiens; identical to SEQ ID NO: 198356
  chr2:102637363-102637431
  hyper

SEQ ID NO: 416190 - DNA, 59 bp, Homo sapiens; identical to SEQ ID NO: 198357
  chr2:102637461-102637520
  hyper

SEQ ID NO: 416191 - DNA, 128 bp, Homo sapiens; identical to SEQ ID NO: 228565
  chr2:102720910-102721038
  hyper

SEQ ID NO: 416192 - DNA, 45 bp, Homo sapiens; identical to SEQ ID NO: 228568
  chr2:103095718-103095763
  hyper

SEQ ID NO: 416193 - DNA, 407 bp, Homo sapiens
  chr2:103235356-103235763
  hyper
aagaggagagaacaggattccgattccgtgggggcgtgggaacactgagttccgcgcagggagtttccctgttcagagcaccttgtgcgcgagttgataactctcggaaaggaaacaaaatttggctttcctaaactttctgtacgtccagagaatcccatgccttgtcttggcctccgcagcgccaggctggggtgacagcactcctcctccaccggcccgggcttctcctccggaccgcgagcctgtggcgcctccccgcgcgcccagcgcaccggggtgtccccttggaggagcctgcgggggcgggggaggagggaagggcgcgactcgtgggtcgcgctggttccttcactggatggacgtccgacgctgcctccggggcggagacagctccggccaccatg

SEQ ID NO: 416194 - DNA, 106 bp, Homo sapiens; identical to SEQ ID NO: 228570
  chr2:103353457-103353563
  hyper

SEQ ID NO: 416195 - DNA, 52 bp, Homo sapiens; identical to SEQ ID NO: 228573
  chr2:105460700-105460752
  hyper

SEQ ID NO: 416196 - DNA, 209 bp, Homo sapiens; identical to SEQ ID NO: 396012
  chr2:105471213-105471422
  hyper

SEQ ID NO: 416197 - DNA, 60 bp, Homo sapiens; identical to SEQ ID NO: 280079
  chr2:105471748-105471808
  hyper

SEQ ID NO: 416198 - DNA, 60 bp, Homo sapiens; identical to SEQ ID NO: 198364
  chr2:105472048-105472108
  hyper

SEQ ID NO: 416199 - DNA, 245 bp, Homo sapiens; identical to SEQ ID NO: 198366
  chr2:105478381-105478626
  hyper

SEQ ID NO: 416200 - DNA, 91 bp, Homo sapiens; identical to SEQ ID NO: 280083
  chr2:105479311-105479402
  hyper

SEQ ID NO: 416201 - DNA, 98 bp, Homo sapiens; identical to SEQ ID NO: 280084
  chr2:105480109-105480207
  hyper

SEQ ID NO: 416202 - DNA, 87 bp, Homo sapiens; identical to SEQ ID NO: 280085
  chr2:105480273-105480360
  hyper

SEQ ID NO: 416203 - DNA, 112 bp, Homo sapiens; identical to SEQ ID NO: 198367
  chr2:105483512-105483624
  hyper

SEQ ID NO: 416204 - DNA, 160 bp, Homo sapiens; identical to SEQ ID NO: 280087
  chr2:105483840-105484000
  hyper

SEQ ID NO: 416205 - DNA, 72 bp, Homo sapiens; identical to SEQ ID NO: 280088
  chr2:105484378-105484450
  hyper

SEQ ID NO: 416206 - DNA, 130 bp, Homo sapiens; identical to SEQ ID NO: 280089
  chr2:105484522-105484652
  hyper

SEQ ID NO: 416207 - DNA, 43 bp, Homo sapiens; identical to SEQ ID NO: 198371
  chr2:105654394-105654437
  hyper

SEQ ID NO: 416208 - DNA, 59 bp, Homo sapiens; identical to SEQ ID NO: 280094
  chr2:106014886-106014945
  hyper

SEQ ID NO: 416209 - DNA, 300 bp, Homo sapiens; identical to SEQ ID NO: 280095
  chr2:106015116-106015416
  hyper

SEQ ID NO: 416210 - DNA, 181 bp, Homo sapiens; identical to SEQ ID NO: 280096
  chr2:106015547-106015728
  hyper

SEQ ID NO: 416211 - DNA, 214 bp, Homo sapiens; identical to SEQ ID NO: 198372
  chr2:106362018-106362232
  hyper

SEQ ID NO: 416212 - DNA, 225 bp, Homo sapiens; identical to SEQ ID NO: 228591
  chr2:106810964-106811189
  hyper

SEQ ID NO: 416213 - DNA, 42 bp, Homo sapiens; identical to SEQ ID NO: 280099
  chr2:107501993-107502035
  hyper

SEQ ID NO: 416214 - DNA, 340 bp, Homo sapiens; identical to SEQ ID NO: 280100
  chr2:107502087-107502427
  hyper

SEQ ID NO: 416215 - DNA, 173 bp, Homo sapiens; identical to SEQ ID NO: 198375
  chr2:108603415-108603588
  hyper

SEQ ID NO: 416216 - DNA, 274 bp, Homo sapiens; identical to SEQ ID NO: 280103
  chr2:109335510-109335784
  hyper

SEQ ID NO: 416217 - DNA, 410 bp, Homo sapiens; identical to SEQ ID NO: 228595
  chr2:109402898-109403308
  hyper

SEQ ID NO: 416218 - DNA, 34 bp, Homo sapiens; identical to SEQ ID NO: 280108
  chr2:109746501-109746535
  hyper

SEQ ID NO: 416219 - DNA, 95 bp, Homo sapiens; identical to SEQ ID NO: 106488
  chr2:110372665-110372760
  hyper

SEQ ID NO: 416220 - DNA, 374 bp, Homo sapiens; identical to SEQ ID NO: 228599
  chr2:110962328-110962702
  hyper

SEQ ID NO: 416221 - DNA, 169 bp, Homo sapiens; identical to SEQ ID NO: 228600
  chr2:111435569-111435738
  hyper

SEQ ID NO: 416222 - DNA, 161 bp, Homo sapiens; identical to SEQ ID NO: 228606
  chr2:111879697-111879858
  hyper

SEQ ID NO: 416223 - DNA, 85 bp, Homo sapiens; identical to SEQ ID NO: 221856
  chr2:111880646-111880731
  hyper

SEQ ID NO: 416224 - DNA, 149 bp, Homo sapiens; identical to SEQ ID NO: 228607
  chr2:112641878-112642027
  hyper

SEQ ID NO: 416225 - DNA, 44 bp, Homo sapiens; identical to SEQ ID NO: 280127
  chr2:112895964-112896008
  hyper

SEQ ID NO: 416226 - DNA, 71 bp, Homo sapiens; identical to SEQ ID NO: 280128
  chr2:112896106-112896177
  hyper

SEQ ID NO: 416227 - DNA, 108 bp, Homo sapiens; identical to SEQ ID NO: 280129
  chr2:112939135-112939243
  hyper

SEQ ID NO: 416228 - DNA, 147 bp, Homo sapiens; identical to SEQ ID NO: 106508
  chr2:113012388-113012535
  hyper

SEQ ID NO: 416229 - DNA, 67 bp, Homo sapiens; identical to SEQ ID NO: 228611
  chr2:113239297-113239364
  hyper

SEQ ID NO: 416230 - DNA, 177 bp, Homo sapiens; identical to SEQ ID NO: 228612
  chr2:113240292-113240469
  hyper

SEQ ID NO: 416231 - DNA, 206 bp, Homo sapiens; identical to SEQ ID NO: 228614
  chr2:113522193-113522399
  hyper

SEQ ID NO: 416232 - DNA, 87 bp, Homo sapiens; identical to SEQ ID NO: 280138
  chr2:115920698-115920785
  hyper

SEQ ID NO: 416233 - DNA, 178 bp, Homo sapiens; identical to SEQ ID NO: 228620
  chr2:118572162-118572340
  hyper

SEQ ID NO: 416234 - DNA, 212 bp, Homo sapiens; identical to SEQ ID NO: 228621
  chr2:118771324-118771536
  hyper

SEQ ID NO: 416235 - DNA, 276 bp, Homo sapiens; identical to SEQ ID NO: 198396
  chr2:119532328-119532604
  hyper

SEQ ID NO: 416236 - DNA, 52 bp, Homo sapiens; identical to SEQ ID NO: 280144
  chr2:119566105-119566157
  hyper

SEQ ID NO: 416237 - DNA, 395 bp, Homo sapiens; identical to SEQ ID NO: 280145
  chr2:119591680-119592075
  hyper

SEQ ID NO: 416238 - DNA, 259 bp, Homo sapiens; identical to SEQ ID NO: 280146
  chr2:119594491-119594750
  hyper

SEQ ID NO: 416239 - DNA, 36 bp, Homo sapiens; identical to SEQ ID NO: 228628
  chr2:119599150-119599186
  hyper

SEQ ID NO: 416240 - DNA, 85 bp, Homo sapiens; identical to SEQ ID NO: 198398
  chr2:119600864-119600949
  hyper

SEQ ID NO: 416241 - DNA, 65 bp, Homo sapiens; identical to SEQ ID NO: 280149
  chr2:119604851-119604916
  hyper

SEQ ID NO: 416242 - DNA, 94 bp, Homo sapiens; identical to SEQ ID NO: 280153
  chr2:119606041-119606135
  hyper

SEQ ID NO: 416243 - DNA, 75 bp, Homo sapiens; identical to SEQ ID NO: 198402
  chr2:119606630-119606705
  hyper

SEQ ID NO: 416244 - DNA, 274 bp, Homo sapiens; identical to SEQ ID NO: 280155
  chr2:119607862-119608136
  hyper

SEQ ID NO: 416245 - DNA, 45 bp, Homo sapiens; identical to SEQ ID NO: 198403
  chr2:119609396-119609441
  hyper

SEQ ID NO: 416246 - DNA, 137 bp, Homo sapiens; identical to SEQ ID NO: 198404
  chr2:119610099-119610236
  hyper

SEQ ID NO: 416247 - DNA, 225 bp, Homo sapiens; identical to SEQ ID NO: 280158
  chr2:119610619-119610844
  hyper

SEQ ID NO: 416248 - DNA, 255 bp, Homo sapiens; identical to SEQ ID NO: 198406
  chr2:119610998-119611253
  hyper

SEQ ID NO: 416249 - DNA, 91 bp, Homo sapiens; identical to SEQ ID NO: 198407
  chr2:119611824-119611915
  hyper

SEQ ID NO: 416250 - DNA, 239 bp, Homo sapiens; identical to SEQ ID NO: 280161
  chr2:119614242-119614481
  hyper

SEQ ID NO: 416251 - DNA, 111 bp, Homo sapiens; identical to SEQ ID NO: 280163
  chr2:119769050-119769161
  hyper

SEQ ID NO: 416252 - DNA, 162 bp, Homo sapiens; identical to SEQ ID NO: 198410
  chr2:120189853-120190015
  hyper

SEQ ID NO: 416253 - DNA, 138 bp, Homo sapiens; identical to SEQ ID NO: 228649
  chr2:120516995-120517133
  hyper

SEQ ID NO: 416254 - DNA, 129 bp, Homo sapiens; identical to SEQ ID NO: 198413
  chr2:120770809-120770938
  hyper

SEQ ID NO: 416255 - DNA, 218 bp, Homo sapiens; identical to SEQ ID NO: 106596
  chr2:120770966-120771184
  hyper

SEQ ID NO: 416256 - DNA, 198 bp, Homo sapiens; identical to SEQ ID NO: 228651
  chr2:121101033-121101231
  hyper

SEQ ID NO: 416257 - DNA, 162 bp, Homo sapiens; identical to SEQ ID NO: 280174
  chr2:121101970-121102132
  hyper

SEQ ID NO: 416258 - DNA, 133 bp, Homo sapiens; identical to SEQ ID NO: 280175
  chr2:121103355-121103488
  hyper

SEQ ID NO: 416259 - DNA, 33 bp, Homo sapiens; identical to SEQ ID NO: 280176
  chr2:121105241-121105274
  hyper

SEQ ID NO: 416260 - DNA, 213 bp, Homo sapiens; identical to SEQ ID NO: 280181
  chr2:121493196-121493409
  hyper

SEQ ID NO: 416261 - DNA, 240 bp, Homo sapiens; identical to SEQ ID NO: 198420
  chr2:121495008-121495248
  hyper

SEQ ID NO: 416262 - DNA, 55 bp, Homo sapiens; identical to SEQ ID NO: 280187
  chr2:122042061-122042116
  hyper

SEQ ID NO: 416263 - DNA, 111 bp, Homo sapiens; identical to SEQ ID NO: 228662
  chr2:122288274-122288385
  hyper

SEQ ID NO: 416264 - DNA, 108 bp, Homo sapiens; identical to SEQ ID NO: 228663
  chr2:122407190-122407298
  hyper

SEQ ID NO: 416265 - DNA, 265 bp, Homo sapiens; identical to SEQ ID NO: 228664
  chr2:122408113-122408378
  hyper

SEQ ID NO: 416266 - DNA, 217 bp, Homo sapiens; identical to SEQ ID NO: 228665
  chr2:122512896-122513113
  hyper

SEQ ID NO: 416267 - DNA, 208 bp, Homo sapiens; identical to SEQ ID NO: 228667
  chr2:126339277-126339485
  hyper

SEQ ID NO: 416268 - DNA, 58 bp, Homo sapiens; identical to SEQ ID NO: 198427
  chr2:127865204-127865262
  hyper

SEQ ID NO: 416269 - DNA, 246 bp, Homo sapiens
  chr2:127977138-127977384
  hyper
ggctggggcccctccaggggacccctccctgccgccacctcccgagacacccatttcccccgcctcttcccagccgttcctttctggccccgttcctcagctccctctgcctgctgcccctctccggggtccgcttcccgaagacccctccccaacgcccccgccccgctcccggttcctgcctcctccaccccggatcgcctttccggcgtcctctccccagcgccccttcctgcgaaccttaac

SEQ ID NO: 416270 - DNA, 278 bp, Homo sapiens; identical to SEQ ID NO: 106645
  chr2:127977421-127977699
  hyper

SEQ ID NO: 416271 - DNA, 47 bp, Homo sapiens; identical to SEQ ID NO: 228675
  chr2:128051796-128051843
  hyper

SEQ ID NO: 416272 - DNA, 217 bp, Homo sapiens; identical to SEQ ID NO: 198428
  chr2:128165843-128166060
  hyper

SEQ ID NO: 416273 - DNA, 164 bp, Homo sapiens; identical to SEQ ID NO: 228678
  chr2:128284009-128284173
  hyper

SEQ ID NO: 416274 - DNA, 71 bp, Homo sapiens; identical to SEQ ID NO: 198432
  chr2:128848514-128848585
  hyper

SEQ ID NO: 416275 - DNA, 362 bp, Homo sapiens; identical to SEQ ID NO: 228683
  chr2:130635073-130635435
  hyper

SEQ ID NO: 416276 - DNA, 300 bp, Homo sapiens; identical to SEQ ID NO: 228685
  chr2:131099730-131100030
  hyper

SEQ ID NO: 416277 - DNA, 209 bp, Homo sapiens; identical to SEQ ID NO: 221870
  chr2:131113001-131113210
  hyper

SEQ ID NO: 416278 - DNA, 162 bp, Homo sapiens; identical to SEQ ID NO: 280215
  chr2:131114254-131114416
  hyper

SEQ ID NO: 416279 - DNA, 246 bp, Homo sapiens; identical to SEQ ID NO: 228686
  chr2:131129984-131130230
  hyper

SEQ ID NO: 416280 - DNA, 224 bp, Homo sapiens; identical to SEQ ID NO: 228695
  chr2:132250191-132250415
  hyper

SEQ ID NO: 416281 - DNA, 155 bp, Homo sapiens; identical to SEQ ID NO: 228696
  chr2:132439907-132440062
  hyper

SEQ ID NO: 416282 - DNA, 105 bp, Homo sapiens; identical to SEQ ID NO: 280221
  chr2:132767530-132767635
  hyper

SEQ ID NO: 416283 - DNA, 120 bp, Homo sapiens; identical to SEQ ID NO: 198435
  chr2:132795464-132795584
  hyper

SEQ ID NO: 416284 - DNA, 100 bp, Homo sapiens; identical to SEQ ID NO: 198436
  chr2:132796304-132796404
  hyper

SEQ ID NO: 416285 - DNA, 450 bp, Homo sapiens; identical to SEQ ID NO: 280224
  chr2:133173628-133174078
  hyper

SEQ ID NO: 416286 - DNA, 212 bp, Homo sapiens; identical to SEQ ID NO: 198438
  chr2:133174170-133174382
  hyper

SEQ ID NO: 416287 - DNA, 95 bp, Homo sapiens; identical to SEQ ID NO: 280226
  chr2:133426128-133426223
  hyper

SEQ ID NO: 416288 - DNA, 270 bp, Homo sapiens; identical to SEQ ID NO: 198439
  chr2:133426367-133426637
  hyper

SEQ ID NO: 416289 - DNA, 225 bp, Homo sapiens; identical to SEQ ID NO: 228705
  chr2:135809730-135809955
  hyper

SEQ ID NO: 416290 - DNA, 88 bp, Homo sapiens; identical to SEQ ID NO: 198446
  chr2:136288366-136288454
  hyper

SEQ ID NO: 416291 - DNA, 325 bp, Homo sapiens; identical to SEQ ID NO: 228706
  chr2:136289442-136289767
  hyper

SEQ ID NO: 416292 - DNA, 134 bp, Homo sapiens; identical to SEQ ID NO: 228707
  chr2:136499398-136499532
  hyper

SEQ ID NO: 416293 - DNA, 304 bp, Homo sapiens; identical to SEQ ID NO: 198451
  chr2:137522037-137522341
  hyper

SEQ ID NO: 416294 - DNA, 47 bp, Homo sapiens; identical to SEQ ID NO: 387819
  chr2:137523778-137523825
  hyper

SEQ ID NO: 416295 - DNA, 265 bp, Homo sapiens; identical to SEQ ID NO: 280247
  chr2:137523855-137524120
  hyper

SEQ ID NO: 416296 - DNA, 374 bp, Homo sapiens
  chr2:142888598-142888972
  hyper
gcaagaggggcagtgagagatgccagcggatgggaattcactgattaatcaccgaatccaccacacaccccttcgtcgttcacataaatcacatctattacttaataagaggcatttaacacaacaggaaaataccaccgcgaacggagagcgccacaaatcacaattattttaatccccttgaagggaaagtaactcgaagctggttctgtggggatttgggtctttggagaagggagagacttctgcattggcctgagccagccaggcgcctacaatgctccgcagttcacagccagctgagaaccctcagccgagcacagggctgcttctgcaggcaaaacaaagcttctcccttcgttcctcggaagctt

SEQ ID NO: 416297 - DNA, 33 bp, Homo sapiens; identical to SEQ ID NO: 198457
  chr2:145090080-145090113
  hyper

SEQ ID NO: 416298 - DNA, 76 bp, Homo sapiens; identical to SEQ ID NO: 280253
  chr2:148601211-148601287
  hyper

SEQ ID NO: 416299 - DNA, 1170 bp, Homo sapiens; identical to SEQ ID NO: 280254
  chr2:148601349-148602519
  hyper

SEQ ID NO: 416300 - DNA, 266 bp, Homo sapiens; identical to SEQ ID NO: 228726
  chr2:149267061-149267327
  hyper

SEQ ID NO: 416301 - DNA, 142 bp, Homo sapiens; identical to SEQ ID NO: 228727
  chr2:149402958-149403100
  hyper

SEQ ID NO: 416302 - DNA, 173 bp, Homo sapiens; identical to SEQ ID NO: 198465
  chr2:149894865-149895038
  hyper

SEQ ID NO: 416303 - DNA, 36 bp, Homo sapiens; identical to SEQ ID NO: 198466
  chr2:150061862-150061898
  hyper

SEQ ID NO: 416304 - DNA, 56 bp, Homo sapiens; identical to SEQ ID NO: 198467
  chr2:150061932-150061988
  hyper

SEQ ID NO: 416305 - DNA, 734 bp, Homo sapiens; identical to SEQ ID NO: 280265
  chr2:150186117-150186851
  hyper

SEQ ID NO: 416306 - DNA, 39 bp, Homo sapiens; identical to SEQ ID NO: 383865
  chr2:151342533-151342572
  hyper

SEQ ID NO: 416307 - DNA, 215 bp, Homo sapiens; identical to SEQ ID NO: 280272
  chr2:152118445-152118660
  hyper

SEQ ID NO: 416308 - DNA, 109 bp, Homo sapiens; identical to SEQ ID NO: 228738
  chr2:152685152-152685261
  hyper

SEQ ID NO: 416309 - DNA, 249 bp, Homo sapiens; identical to SEQ ID NO: 280275
  chr2:152955492-152955741
  hyper

SEQ ID NO: 416310 - DNA, 100 bp, Homo sapiens; identical to SEQ ID NO: 198475
  chr2:152956050-152956150
  hyper

SEQ ID NO: 416311 - DNA, 52 bp, Homo sapiens; identical to SEQ ID NO: 228741
  chr2:153032646-153032698
  hyper

SEQ ID NO: 416312 - DNA, 327 bp, Homo sapiens; identical to SEQ ID NO: 228742
  chr2:153191510-153191837
  hyper

SEQ ID NO: 416313 - DNA, 392 bp, Homo sapiens; identical to SEQ ID NO: 228745
  chr2:153573952-153574344
  hyper

SEQ ID NO: 416314 - DNA, 49 bp, Homo sapiens; identical to SEQ ID NO: 198479
  chr2:154729267-154729316
  hyper

SEQ ID NO: 416315 - DNA, 142 bp, Homo sapiens; identical to SEQ ID NO: 198480
  chr2:154729379-154729521
  hyper

SEQ ID NO: 416316 - DNA, 111 bp, Homo sapiens; identical to SEQ ID NO: 198481
  chr2:154730061-154730172
  hyper

SEQ ID NO: 416317 - DNA, 31 bp, Homo sapiens; identical to SEQ ID NO: 198485
  chr2:157188949-157188980
  hyper

SEQ ID NO: 416318 - DNA, 405 bp, Homo sapiens; identical to SEQ ID NO: 280290
  chr2:157189365-157189770
  hyper

SEQ ID NO: 416319 - DNA, 232 bp, Homo sapiens; identical to SEQ ID NO: 228755
  chr2:157190094-157190326
  hyper

SEQ ID NO: 416320 - DNA, 63 bp, Homo sapiens; identical to SEQ ID NO: 228756
  chr2:157198322-157198385
  hyper

SEQ ID NO: 416321 - DNA, 425 bp, Homo sapiens; identical to SEQ ID NO: 280294
  chr2:158484494-158484919
  hyper

SEQ ID NO: 416322 - DNA, 349 bp, Homo sapiens; identical to SEQ ID NO: 38109
  chr2:158484949-158485298
  hyper

SEQ ID NO: 416323 - DNA, 378 bp, Homo sapiens; identical to SEQ ID NO: 228758
  chr2:158485512-158485890
  hyper

SEQ ID NO: 416324 - DNA, 655 bp, Homo sapiens; identical to SEQ ID NO: 280299
  chr2:159825962-159826617
  hyper

SEQ ID NO: 416325 - DNA, 506 bp, Homo sapiens; identical to SEQ ID NO: 198493
  chr2:160142449-160142955
  hyper

SEQ ID NO: 416326 - DNA, 323 bp, Homo sapiens; identical to SEQ ID NO: 280301
  chr2:160472081-160472404
  hyper

SEQ ID NO: 416327 - DNA, 363 bp, Homo sapiens; identical to SEQ ID NO: 106813
  chr2:160472575-160472938
  hyper

SEQ ID NO: 416328 - DNA, 138 bp, Homo sapiens; identical to SEQ ID NO: 198494
  chr2:160569034-160569172
  hyper

SEQ ID NO: 416329 - DNA, 678 bp, Homo sapiens; identical to SEQ ID NO: 280304
  chr2:160654215-160654893
  hyper

SEQ ID NO: 416330 - DNA, 340 bp, Homo sapiens; identical to SEQ ID NO: 198496
  chr2:160919062-160919402
  hyper

SEQ ID NO: 416331 - DNA, 657 bp, Homo sapiens; identical to SEQ ID NO: 280306
  chr2:161126281-161126938
  hyper

SEQ ID NO: 416332 - DNA, 126 bp, Homo sapiens; identical to SEQ ID NO: 280307
  chr2:161263704-161263830
  hyper

SEQ ID NO: 416333 - DNA, 147 bp, Homo sapiens; identical to SEQ ID NO: 396089
  chr2:161263896-161264043
  hyper

SEQ ID NO: 416334 - DNA, 42 bp, Homo sapiens; identical to SEQ ID NO: 228767
  chr2:161349352-161349394
  hyper

SEQ ID NO: 416335 - DNA, 227 bp, Homo sapiens; identical to SEQ ID NO: 228768
  chr2:161349623-161349850
  hyper

SEQ ID NO: 416336 - DNA, 211 bp, Homo sapiens; identical to SEQ ID NO: 228769
  chr2:161350274-161350485
  hyper

SEQ ID NO: 416337 - DNA, 97 bp, Homo sapiens; identical to SEQ ID NO: 198499
  chr2:161560616-161560713
  hyper

SEQ ID NO: 416338 - DNA, 126 bp, Homo sapiens; identical to SEQ ID NO: 228772
  chr2:162164662-162164788
  hyper

SEQ ID NO: 416339 - DNA, 63 bp, Homo sapiens; identical to SEQ ID NO: 228773
  chr2:162165218-162165281
  hyper

SEQ ID NO: 416340 - DNA, 39 bp, Homo sapiens; identical to SEQ ID NO: 228780
  chr2:162281107-162281146
  hyper

SEQ ID NO: 416341 - DNA, 43 bp, Homo sapiens; identical to SEQ ID NO: 228781
  chr2:162283133-162283176
  hyper

SEQ ID NO: 416342 - DNA, 34 bp, Homo sapiens; identical to SEQ ID NO: 228787
  chr2:163174877-163174911
  hyper

SEQ ID NO: 416343 - DNA, 89 bp, Homo sapiens; identical to SEQ ID NO: 280326
  chr2:163694782-163694871
  hyper

SEQ ID NO: 416344 - DNA, 93 bp, Homo sapiens; identical to SEQ ID NO: 280327
  chr2:163695560-163695653
  hyper

SEQ ID NO: 416345 - DNA, 152 bp, Homo sapiens; identical to SEQ ID NO: 228789
  chr2:163695927-163696079
  hyper

SEQ ID NO: 416346 - DNA, 76 bp, Homo sapiens; identical to SEQ ID NO: 280329
  chr2:164592553-164592629
  hyper

SEQ ID NO: 416347 - DNA, 101 bp, Homo sapiens; identical to SEQ ID NO: 198503
  chr2:164593412-164593513
  hyper

SEQ ID NO: 416348 - DNA, 129 bp, Homo sapiens; identical to SEQ ID NO: 280331
  chr2:165477434-165477563
  hyper

SEQ ID NO: 416349 - DNA, 574 bp, Homo sapiens; identical to SEQ ID NO: 280332
  chr2:165477596-165478170
  hyper

SEQ ID NO: 416350 - DNA, 1524 bp, Homo sapiens; identical to SEQ ID NO: 280333
  chr2:165697145-165698669
  hyper

SEQ ID NO: 416351 - DNA, 197 bp, Homo sapiens; identical to SEQ ID NO: 198511
  chr2:166810403-166810600
  hyper

SEQ ID NO: 416352 - DNA, 115 bp, Homo sapiens; identical to SEQ ID NO: 280339
  chr2:167232258-167232373
  hyper

SEQ ID NO: 416353 - DNA, 257 bp, Homo sapiens; identical to SEQ ID NO: 280340
  chr2:167232453-167232710
  hyper

SEQ ID NO: 416354 - DNA, 33 bp, Homo sapiens; identical to SEQ ID NO: 280341
  chr2:167232955-167232988
  hyper

SEQ ID NO: 416355 - DNA, 197 bp, Homo sapiens; identical to SEQ ID NO: 106874
  chr2:169104341-169104538
  hyper

SEQ ID NO: 416356 - DNA, 40 bp, Homo sapiens; identical to SEQ ID NO: 280349
  chr2:170218319-170218359
  hyper

SEQ ID NO: 416357 - DNA, 268 bp, Homo sapiens; identical to SEQ ID NO: 198518
  chr2:170218861-170219129
  hyper

SEQ ID NO: 416358 - DNA, 204 bp, Homo sapiens; identical to SEQ ID NO: 198519
  chr2:170430256-170430460
  hyper

SEQ ID NO: 416359 - DNA, 87 bp, Homo sapiens; identical to SEQ ID NO: 228809
  chr2:170655249-170655336
  hyper

SEQ ID NO: 416360 - DNA, 85 bp, Homo sapiens; identical to SEQ ID NO: 228810
  chr2:170655875-170655960
  hyper

SEQ ID NO: 416361 - DNA, 49 bp, Homo sapiens; identical to SEQ ID NO: 387834
  chr2:171571797-171571846
  hyper

SEQ ID NO: 416362 - DNA, 279 bp, Homo sapiens; identical to SEQ ID NO: 198526
  chr2:171572068-171572347
  hyper

SEQ ID NO: 416363 - DNA, 49 bp, Homo sapiens; identical to SEQ ID NO: 198527
  chr2:171627264-171627313
  hyper

SEQ ID NO: 416364 - DNA, 632 bp, Homo sapiens; identical to SEQ ID NO: 38182
  chr2:171627346-171627978
  hyper

SEQ ID NO: 416365 - DNA, 250 bp, Homo sapiens; identical to SEQ ID NO: 228819
  chr2:171830079-171830329
  hyper

SEQ ID NO: 416366 - DNA, 32 bp, Homo sapiens; identical to SEQ ID NO: 228820
  chr2:172017402-172017434
  hyper

SEQ ID NO: 416367 - DNA, 75 bp, Homo sapiens; identical to SEQ ID NO: 198533
  chr2:172289937-172290012
  hyper

SEQ ID NO: 416368 - DNA, 158 bp, Homo sapiens; identical to SEQ ID NO: 228822
  chr2:172291205-172291363
  hyper

SEQ ID NO: 416369 - DNA, 193 bp, Homo sapiens; identical to SEQ ID NO: 280373
  chr2:172379339-172379532
  hyper

SEQ ID NO: 416370 - DNA, 506 bp, Homo sapiens; identical to SEQ ID NO: 280374
  chr2:172379723-172380229
  hyper

SEQ ID NO: 416371 - DNA, 152 bp, Homo sapiens; identical to SEQ ID NO: 228825
  chr2:172543932-172544084
  hyper

SEQ ID NO: 416372 - DNA, 456 bp, Homo sapiens; identical to SEQ ID NO: 198536
  chr2:172750647-172751103
  hyper

SEQ ID NO: 416373 - DNA, 162 bp, Homo sapiens; identical to SEQ ID NO: 280380
  chr2:172950953-172951115
  hyper

SEQ ID NO: 416374 - DNA, 149 bp, Homo sapiens; identical to SEQ ID NO: 198543
  chr2:172958351-172958500
  hyper

SEQ ID NO: 416375 - DNA, 147 bp, Homo sapiens; identical to SEQ ID NO: 280385
  chr2:172959062-172959209
  hyper

SEQ ID NO: 416376 - DNA, 254 bp, Homo sapiens; identical to SEQ ID NO: 280386
  chr2:172960505-172960759
  hyper

SEQ ID NO: 416377 - DNA, 388 bp, Homo sapiens; identical to SEQ ID NO: 228841
  chr2:172967606-172967994
  hyper

SEQ ID NO: 416378 - DNA, 226 bp, Homo sapiens; identical to SEQ ID NO: 228842
  chr2:172968670-172968896
  hyper

SEQ ID NO: 416379 - DNA, 38 bp, Homo sapiens; identical to SEQ ID NO: 228848
  chr2:173292254-173292292
  hyper

SEQ ID NO: 416380 - DNA, 380 bp, Homo sapiens; identical to SEQ ID NO: 228849
  chr2:173292962-173293342
  hyper

SEQ ID NO: 416381 - DNA, 319 bp, Homo sapiens; identical to SEQ ID NO: 198551
  chr2:173940416-173940735
  hyper

SEQ ID NO: 416382 - DNA, 103 bp, Homo sapiens; identical to SEQ ID NO: 221936
  chr2:174147823-174147926
  hyper

SEQ ID NO: 416383 - DNA, 217 bp, Homo sapiens; identical to SEQ ID NO: 198553
  chr2:174349951-174350168
  hyper

SEQ ID NO: 416384 - DNA, 71 bp, Homo sapiens; identical to SEQ ID NO: 198555
  chr2:175192823-175192894
  hyper

SEQ ID NO: 416385 - DNA, 323 bp, Homo sapiens; identical to SEQ ID NO: 198562
  chr2:175206394-175206717
  hyper

SEQ ID NO: 416386 - DNA, 318 bp, Homo sapiens; identical to SEQ ID NO: 198563
  chr2:175260398-175260716
  hyper

SEQ ID NO: 416387 - DNA, 91 bp, Homo sapiens; identical to SEQ ID NO: 228862
  chr2:175351635-175351726
  hyper

SEQ ID NO: 416388 - DNA, 231 bp, Homo sapiens; identical to SEQ ID NO: 228865
  chr2:175870274-175870505
  hyper

SEQ ID NO: 416389 - DNA, 94 bp, Homo sapiens; identical to SEQ ID NO: 280416
  chr2:176943767-176943861
  hyper

SEQ ID NO: 416390 - DNA, 170 bp, Homo sapiens; identical to SEQ ID NO: 280417
  chr2:176943902-176944072
  hyper

SEQ ID NO: 416391 - DNA, 280 bp, Homo sapiens; identical to SEQ ID NO: 280418
  chr2:176950481-176950761
  hyper

SEQ ID NO: 416392 - DNA, 189 bp, Homo sapiens; identical to SEQ ID NO: 228873
  chr2:176951108-176951297
  hyper

SEQ ID NO: 416393 - DNA, 49 bp, Homo sapiens; identical to SEQ ID NO: 280420
  chr2:176952675-176952724
  hyper

SEQ ID NO: 416394 - DNA, 48 bp, Homo sapiens; identical to SEQ ID NO: 280421
  chr2:176953310-176953358
  hyper

SEQ ID NO: 416395 - DNA, 146 bp, Homo sapiens; identical to SEQ ID NO: 280422
  chr2:176961517-176961663
  hyper

SEQ ID NO: 416396 - DNA, 145 bp, Homo sapiens; identical to SEQ ID NO: 280423
  chr2:176961693-176961838
  hyper

SEQ ID NO: 416397 - DNA, 185 bp, Homo sapiens; identical to SEQ ID NO: 280425
  chr2:176968750-176968935
  hyper

SEQ ID NO: 416398 - DNA, 192 bp, Homo sapiens; identical to SEQ ID NO: 280427
  chr2:176971436-176971628
  hyper

SEQ ID NO: 416399 - DNA, 92 bp, Homo sapiens; identical to SEQ ID NO: 228884
  chr2:176973290-176973382
  hyper

SEQ ID NO: 416400 - DNA, 123 bp, Homo sapiens; identical to SEQ ID NO: 280430
  chr2:176973442-176973565
  hyper

SEQ ID NO: 416401 - DNA, 116 bp, Homo sapiens; identical to SEQ ID NO: 107053
  chr2:176973598-176973714
  hyper

SEQ ID NO: 416402 - DNA, 73 bp, Homo sapiens; identical to SEQ ID NO: 280432
  chr2:176974112-176974185
  hyper

SEQ ID NO: 416403 - DNA, 72 bp, Homo sapiens; identical to SEQ ID NO: 198571
  chr2:176976744-176976816
  hyper

SEQ ID NO: 416404 - DNA, 174 bp, Homo sapiens; identical to SEQ ID NO: 280436
  chr2:176982119-176982293
  hyper

SEQ ID NO: 416405 - DNA, 71 bp, Homo sapiens; identical to SEQ ID NO: 280443
  chr2:177017375-177017446
  hyper

SEQ ID NO: 416406 - DNA, 104 bp, Homo sapiens; identical to SEQ ID NO: 280444
  chr2:177022459-177022563
  hyper

SEQ ID NO: 416407 - DNA, 368 bp, Homo sapiens; identical to SEQ ID NO: 228904
  chr2:177133916-177134284
  hyper

SEQ ID NO: 416408 - DNA, 250 bp, Homo sapiens; identical to SEQ ID NO: 228905
  chr2:178076955-178077205
  hyper

SEQ ID NO: 416409 - DNA, 39 bp, Homo sapiens; identical to SEQ ID NO: 228906
  chr2:178128653-178128692
  hyper

SEQ ID NO: 416410 - DNA, 388 bp, Homo sapiens; identical to SEQ ID NO: 228907
  chr2:178417525-178417913
  hyper

SEQ ID NO: 416411 - DNA, 41 bp, Homo sapiens; identical to SEQ ID NO: 228910
  chr2:179059426-179059467
  hyper

SEQ ID NO: 416412 - DNA, 640 bp, Homo sapiens; identical to SEQ ID NO: 221949
  chr2:179316084-179316724
  hyper

SEQ ID NO: 416413 - DNA, 85 bp, Homo sapiens; identical to SEQ ID NO: 198592
  chr2:180129611-180129696
  hyper

SEQ ID NO: 416414 - DNA, 58 bp, Homo sapiens; identical to SEQ ID NO: 228914
  chr2:180871766-180871824
  hyper

SEQ ID NO: 416415 - DNA, 218 bp, Homo sapiens; identical to SEQ ID NO: 280466
  chr2:182542630-182542848
  hyper

SEQ ID NO: 416416 - DNA, 97 bp, Homo sapiens; identical to SEQ ID NO: 280467
  chr2:182544331-182544428
  hyper

SEQ ID NO: 416417 - DNA, 207 bp, Homo sapiens; identical to SEQ ID NO: 280468
  chr2:182546085-182546292
  hyper

SEQ ID NO: 416418 - DNA, 292 bp, Homo sapiens; identical to SEQ ID NO: 228925
  chr2:182607563-182607855
  hyper

SEQ ID NO: 416419 - DNA, 168 bp, Homo sapiens; identical to SEQ ID NO: 198597
  chr2:182757468-182757636
  hyper

SEQ ID NO: 416420 - DNA, 138 bp, Homo sapiens; identical to SEQ ID NO: 228929
  chr2:183580827-183580965
  hyper

SEQ ID NO: 416421 - DNA, 163 bp, Homo sapiens; identical to SEQ ID NO: 198602
  chr2:183988919-183989082
  hyper

SEQ ID NO: 416422 - DNA, 391 bp, Homo sapiens; identical to SEQ ID NO: 228935
  chr2:187350702-187351093
  hyper

SEQ ID NO: 416423 - DNA, 284 bp, Homo sapiens; identical to SEQ ID NO: 198604
  chr2:187454990-187455274
  hyper

SEQ ID NO: 416424 - DNA, 232 bp, Homo sapiens; identical to SEQ ID NO: 198605
  chr2:189156402-189156634
  hyper

SEQ ID NO: 416425 - DNA, 132 bp, Homo sapiens; identical to SEQ ID NO: 228938
  chr2:190305689-190305821
  hyper

SEQ ID NO: 416426 - DNA, 111 bp, Homo sapiens; identical to SEQ ID NO: 198608
  chr2:190306062-190306173
  hyper

SEQ ID NO: 416427 - DNA, 313 bp, Homo sapiens; identical to SEQ ID NO: 228941
  chr2:190526051-190526364
  hyper

SEQ ID NO: 416428 - DNA, 322 bp, Homo sapiens; identical to SEQ ID NO: 228942
  chr2:190649067-190649389
  hyper

SEQ ID NO: 416429 - DNA, 93 bp, Homo sapiens; identical to SEQ ID NO: 228944
  chr2:191273656-191273749
  hyper

SEQ ID NO: 416430 - DNA, 139 bp, Homo sapiens; identical to SEQ ID NO: 198615
  chr2:191512982-191513121
  hyper

SEQ ID NO: 416431 - DNA, 248 bp, Homo sapiens; identical to SEQ ID NO: 228945
  chr2:191514202-191514450
  hyper

SEQ ID NO: 416432 - DNA, 84 bp, Homo sapiens; identical to SEQ ID NO: 198617
  chr2:191745041-191745125
  hyper

SEQ ID NO: 416433 - DNA, 413 bp, Homo sapiens; identical to SEQ ID NO: 2097
  chr2:191745184-191745597
  hyper

SEQ ID NO: 416434 - DNA, 436 bp, Homo sapiens; identical to SEQ ID NO: 198619
  chr2:191745657-191746093
  hyper

SEQ ID NO: 416435 - DNA, 80 bp, Homo sapiens; identical to SEQ ID NO: 198620
  chr2:191746519-191746599
  hyper

SEQ ID NO: 416436 - DNA, 252 bp, Homo sapiens; identical to SEQ ID NO: 228950
  chr2:191878927-191879179
  hyper

SEQ ID NO: 416437 - DNA, 54 bp, Homo sapiens; identical to SEQ ID NO: 228953
  chr2:192542863-192542917
  hyper

SEQ ID NO: 416438 - DNA, 386 bp, Homo sapiens; identical to SEQ ID NO: 198628
  chr2:197035576-197035962
  hyper

SEQ ID NO: 416439 - DNA, 90 bp, Homo sapiens; identical to SEQ ID NO: 228957
  chr2:197664294-197664384
  hyper

SEQ ID NO: 416440 - DNA, 121 bp, Homo sapiens; identical to SEQ ID NO: 198630
  chr2:198175715-198175836
  hyper

SEQ ID NO: 416441 - DNA, 121 bp, Homo sapiens; identical to SEQ ID NO: 198631
  chr2:198257786-198257907
  hyper

SEQ ID NO: 416442 - DNA, 106 bp, Homo sapiens; identical to SEQ ID NO: 198632
  chr2:198262740-198262846
  hyper

SEQ ID NO: 416443 - DNA, 148 bp, Homo sapiens; identical to SEQ ID NO: 198633
  chr2:198265015-198265163
  hyper

SEQ ID NO: 416444 - DNA, 178 bp, Homo sapiens; identical to SEQ ID NO: 198634
  chr2:198265429-198265607
  hyper

SEQ ID NO: 416445 - DNA, 341 bp, Homo sapiens; identical to SEQ ID NO: 198635
  chr2:198266479-198266820
  hyper

SEQ ID NO: 416446 - DNA, 376 bp, Homo sapiens; identical to SEQ ID NO: 198636
  chr2:198267374-198267750
  hyper

SEQ ID NO: 416447 - DNA, 70 bp, Homo sapiens; identical to SEQ ID NO: 198637
  chr2:198268366-198268436
  hyper

SEQ ID NO: 416448 - DNA, 93 bp, Homo sapiens; identical to SEQ ID NO: 198638
  chr2:198269812-198269905
  hyper

SEQ ID NO: 416449 - DNA, 81 bp, Homo sapiens; identical to SEQ ID NO: 198639
  chr2:198272718-198272799
  hyper

SEQ ID NO: 416450 - DNA, 147 bp, Homo sapiens; identical to SEQ ID NO: 198640
  chr2:198273117-198273264
  hyper

SEQ ID NO: 416451 - DNA, 414 bp, Homo sapiens; identical to SEQ ID NO: 228960
  chr2:198299572-198299986
  hyper

SEQ ID NO: 416452 - DNA, 297 bp, Homo sapiens; identical to SEQ ID NO: 228961
  chr2:198364582-198364879
  hyper

SEQ ID NO: 416453 - DNA, 62 bp, Homo sapiens; identical to SEQ ID NO: 280529
  chr2:198569898-198569960
  hyper

SEQ ID NO: 416454 - DNA, 106 bp, Homo sapiens; identical to SEQ ID NO: 280530
  chr2:198569977-198570083
  hyper

SEQ ID NO: 416455 - DNA, 1110 bp, Homo sapiens; identical to SEQ ID NO: 280531
  chr2:198669112-198670222
  hyper

SEQ ID NO: 416456 - DNA, 155 bp, Homo sapiens; identical to SEQ ID NO: 280532
  chr2:198670257-198670412
  hyper

SEQ ID NO: 416457 - DNA, 781 bp, Homo sapiens; identical to SEQ ID NO: 221975
  chr2:200323016-200323797
  hyper

SEQ ID NO: 416458 - DNA, 582 bp, Homo sapiens; identical to SEQ ID NO: 221976
  chr2:200324029-200324611
  hyper

SEQ ID NO: 416459 - DNA, 94 bp, Homo sapiens
  chr2:200328573-200328667
  hyper
gtccagaaatccgctcccacccctcgtaggggcaggcaagctcaggcagccgggtgcaagggggcccaaaccgcagttgcctcccgaacgcttt

SEQ ID NO: 416460 - DNA, 304 bp, Homo sapiens; identical to SEQ ID NO: 280547
  chr2:200333430-200333734
  hyper

SEQ ID NO: 416461 - DNA, 315 bp, Homo sapiens; identical to SEQ ID NO: 280548
  chr2:200333834-200334149
  hyper

SEQ ID NO: 416462 - DNA, 95 bp, Homo sapiens; identical to SEQ ID NO: 107244
  chr2:200334504-200334599
  hyper

SEQ ID NO: 416463 - DNA, 77 bp, Homo sapiens; identical to SEQ ID NO: 280550
  chr2:200334887-200334964
  hyper

SEQ ID NO: 416464 - DNA, 108 bp, Homo sapiens; identical to SEQ ID NO: 280551
  chr2:200336426-200336534
  hyper

SEQ ID NO: 416465 - DNA, 79 bp, Homo sapiens; identical to SEQ ID NO: 198652
  chr2:200604747-200604826
  hyper

SEQ ID NO: 416466 - DNA, 566 bp, Homo sapiens; identical to SEQ ID NO: 198653
  chr2:200715514-200716080
  hyper

SEQ ID NO: 416467 - DNA, 111 bp, Homo sapiens; identical to SEQ ID NO: 198654
  chr2:200820437-200820548
  hyper

SEQ ID NO: 416468 - DNA, 178 bp, Homo sapiens; identical to SEQ ID NO: 228978
  chr2:201170705-201170883
  hyper

SEQ ID NO: 416469 - DNA, 1349 bp, Homo sapiens; identical to SEQ ID NO: 198655
  chr2:201171095-201172444
  hyper

SEQ ID NO: 416470 - DNA, 119 bp, Homo sapiens; identical to SEQ ID NO: 198656
  chr2:201172480-201172599
  hyper

SEQ ID NO: 416471 - DNA, 166 bp, Homo sapiens; identical to SEQ ID NO: 228980
  chr2:201374886-201375052
  hyper

SEQ ID NO: 416472 - DNA, 34 bp, Homo sapiens; identical to SEQ ID NO: 228981
  chr2:201390687-201390721
  hyper

SEQ ID NO: 416473 - DNA, 250 bp, Homo sapiens; identical to SEQ ID NO: 228984
  chr2:201729265-201729515
  hyper

SEQ ID NO: 416474 - DNA, 233 bp, Homo sapiens; identical to SEQ ID NO: 228986
  chr2:201936491-201936724
  hyper

SEQ ID NO: 416475 - DNA, 42 bp, Homo sapiens; identical to SEQ ID NO: 228987
  chr2:201980840-201980882
  hyper

SEQ ID NO: 416476 - DNA, 249 bp, Homo sapiens; identical to SEQ ID NO: 228988
  chr2:201983185-201983434
  hyper

SEQ ID NO: 416477 - DNA, 79 bp, Homo sapiens; identical to SEQ ID NO: 228989
  chr2:202315793-202315872
  hyper

SEQ ID NO: 416478 - DNA, 162 bp, Homo sapiens; identical to SEQ ID NO: 280567
  chr2:202316090-202316252
  hyper

SEQ ID NO: 416479 - DNA, 204 bp, Homo sapiens; identical to SEQ ID NO: 221978
  chr2:202644945-202645149
  hyper

SEQ ID NO: 416480 - DNA, 726 bp, Homo sapiens; identical to SEQ ID NO: 198661
  chr2:202898961-202899687
  hyper

SEQ ID NO: 416481 - DNA, 34 bp, Homo sapiens; identical to SEQ ID NO: 198662
  chr2:202900077-202900111
  hyper

SEQ ID NO: 416482 - DNA, 216 bp, Homo sapiens; identical to SEQ ID NO: 228993
  chr2:203131608-203131824
  hyper

SEQ ID NO: 416483 - DNA, 104 bp, Homo sapiens; identical to SEQ ID NO: 221980
  chr2:203242328-203242432
  hyper

SEQ ID NO: 416484 - DNA, 223 bp, Homo sapiens; identical to SEQ ID NO: 228994
  chr2:203776773-203776996
  hyper

SEQ ID NO: 416485 - DNA, 123 bp, Homo sapiens; identical to SEQ ID NO: 228995
  chr2:203879447-203879570
  hyper

SEQ ID NO: 416486 - DNA, 74 bp, Homo sapiens; identical to SEQ ID NO: 228996
  chr2:204192792-204192866
  hyper

SEQ ID NO: 416487 - DNA, 195 bp, Homo sapiens; identical to SEQ ID NO: 198663
  chr2:204399768-204399963
  hyper

SEQ ID NO: 416488 - DNA, 188 bp, Homo sapiens; identical to SEQ ID NO: 198664
  chr2:205409782-205409970
  hyper

SEQ ID NO: 416489 - DNA, 898 bp, Homo sapiens; identical to SEQ ID NO: 38498
  chr2:205410026-205410924
  hyper

SEQ ID NO: 416490 - DNA, 106 bp, Homo sapiens; identical to SEQ ID NO: 280581
  chr2:206546583-206546689
  hyper

SEQ ID NO: 416491 - DNA, 476 bp, Homo sapiens; identical to SEQ ID NO: 280582
  chr2:206546770-206547246
  hyper

SEQ ID NO: 416492 - DNA, 71 bp, Homo sapiens; identical to SEQ ID NO: 280583
  chr2:206549958-206550029
  hyper

SEQ ID NO: 416493 - DNA, 33 bp, Homo sapiens; identical to SEQ ID NO: 280584
  chr2:206551480-206551513
  hyper

SEQ ID NO: 416494 - DNA, 224 bp, Homo sapiens; identical to SEQ ID NO: 229003
  chr2:206949799-206950023
  hyper

SEQ ID NO: 416495 - DNA, 152 bp, Homo sapiens; identical to SEQ ID NO: 229004
  chr2:206950964-206951116
  hyper

SEQ ID NO: 416496 - DNA, 104 bp, Homo sapiens; identical to SEQ ID NO: 280591
  chr2:207507310-207507414
  hyper

SEQ ID NO: 416497 - DNA, 168 bp, Homo sapiens; identical to SEQ ID NO: 229008
  chr2:207629920-207630088
  hyper

SEQ ID NO: 416498 - DNA, 37 bp, Homo sapiens; identical to SEQ ID NO: 229009
  chr2:207630392-207630429
  hyper

SEQ ID NO: 416499 - DNA, 469 bp, Homo sapiens; identical to SEQ ID NO: 229012
  chr2:208575825-208576294
  hyper

SEQ ID NO: 416500 - DNA, 101 bp, Homo sapiens; identical to SEQ ID NO: 198672
  chr2:208633756-208633857
  hyper

SEQ ID NO: 416501 - DNA, 78 bp, Homo sapiens; identical to SEQ ID NO: 198673
  chr2:209108240-209108318
  hyper

SEQ ID NO: 416502 - DNA, 261 bp, Homo sapiens; identical to SEQ ID NO: 198674
  chr2:209113128-209113389
  hyper

SEQ ID NO: 416503 - DNA, 211 bp, Homo sapiens; identical to SEQ ID NO: 198675
  chr2:209118761-209118972
  hyper

SEQ ID NO: 416504 - DNA, 243 bp, Homo sapiens; identical to SEQ ID NO: 229016
  chr2:209120080-209120323
  hyper

SEQ ID NO: 416505 - DNA, 118 bp, Homo sapiens; identical to SEQ ID NO: 229017
  chr2:209130875-209130993
  hyper

SEQ ID NO: 416506 - DNA, 235 bp, Homo sapiens; identical to SEQ ID NO: 229019
  chr2:210867113-210867348
  hyper

SEQ ID NO: 416507 - DNA, 96 bp, Homo sapiens; identical to SEQ ID NO: 198678
  chr2:211035494-211035590
  hyper

SEQ ID NO: 416508 - DNA, 92 bp, Homo sapiens; identical to SEQ ID NO: 198680
  chr2:211341442-211341534
  hyper

SEQ ID NO: 416509 - DNA, 137 bp, Homo sapiens; identical to SEQ ID NO: 198681
  chr2:213401042-213401179
  hyper

SEQ ID NO: 416510 - DNA, 208 bp, Homo sapiens; identical to SEQ ID NO: 280612
  chr2:214148842-214149050
  hyper

SEQ ID NO: 416511 - DNA, 311 bp, Homo sapiens; identical to SEQ ID NO: 280613
  chr2:214149129-214149440
  hyper

SEQ ID NO: 416512 - DNA, 53 bp, Homo sapiens; identical to SEQ ID NO: 229025
  chr2:216176512-216176565
  hyper

SEQ ID NO: 416513 - DNA, 245 bp, Homo sapiens; identical to SEQ ID NO: 280615
  chr2:216301172-216301417
  hyper

SEQ ID NO: 416514 - DNA, 41 bp, Homo sapiens; identical to SEQ ID NO: 198684
  chr2:217008385-217008426
  hyper

SEQ ID NO: 416515 - DNA, 310 bp, Homo sapiens; identical to SEQ ID NO: 280618
  chr2:217236253-217236563
  hyper

SEQ ID NO: 416516 - DNA, 339 bp, Homo sapiens; identical to SEQ ID NO: 198686
  chr2:217236604-217236943
  hyper

SEQ ID NO: 416517 - DNA, 40 bp, Homo sapiens; identical to SEQ ID NO: 229030
  chr2:217277057-217277097
  hyper

SEQ ID NO: 416518 - DNA, 41 bp, Homo sapiens; identical to SEQ ID NO: 229031
  chr2:217363378-217363419
  hyper

SEQ ID NO: 416519 - DNA, 329 bp, Homo sapiens
  chr2:217498574-217498903
  hyper
gctgctatccccacccgggctccgagctgcccctgcaggcgctggtcatgggcgagggcacttgtgagaagcgccgggacgccgagtatggcgccagcccggagcaggttgcaggtaacgcggtctggaacaagtagttgggagaaacttggagggcagcggagaagcccgacgggcggctggaccttacggacggttttaggggcggcagagccgagaccttggaccaaatcaagggggactgttgctagcgggacgcggaagtcaggcccggggaggggaactggagttagagcaagtggaagagccctggcgactcatttggtggg

SEQ ID NO: 416520 - DNA, 87 bp, Homo sapiens; identical to SEQ ID NO: 229034
  chr2:217499272-217499359
  hyper

SEQ ID NO: 416521 - DNA, 241 bp, Homo sapiens; identical to SEQ ID NO: 229039
  chr2:218767428-218767669
  hyper

SEQ ID NO: 416522 - DNA, 334 bp, Homo sapiens; identical to SEQ ID NO: 229040
  chr2:218899131-218899465
  hyper

SEQ ID NO: 416523 - DNA, 63 bp, Homo sapiens; identical to SEQ ID NO: 229041
  chr2:219157359-219157422
  hyper

SEQ ID NO: 416524 - DNA, 40 bp, Homo sapiens; identical to SEQ ID NO: 229043
  chr2:219261657-219261697
  hyper

SEQ ID NO: 416525 - DNA, 241 bp, Homo sapiens; identical to SEQ ID NO: 221992
  chr2:219262922-219263163
  hyper

SEQ ID NO: 416526 - DNA, 989 bp, Homo sapiens; identical to SEQ ID NO: 280637
  chr2:219263453-219264442
  hyper

SEQ ID NO: 416527 - DNA, 222 bp, Homo sapiens; identical to SEQ ID NO: 229045
  chr2:219523966-219524188
  hyper

SEQ ID NO: 416528 - DNA, 432 bp, Homo sapiens; identical to SEQ ID NO: 280639
  chr2:219723487-219723919
  hyper

SEQ ID NO: 416529 - DNA, 551 bp, Homo sapiens; identical to SEQ ID NO: 280640
  chr2:219724171-219724722
  hyper

SEQ ID NO: 416530 - DNA, 38 bp, Homo sapiens; identical to SEQ ID NO: 229048
  chr2:219725693-219725731
  hyper

SEQ ID NO: 416531 - DNA, 85 bp, Homo sapiens; identical to SEQ ID NO: 229052
  chr2:219744551-219744636
  hyper

SEQ ID NO: 416532 - DNA, 255 bp, Homo sapiens; identical to SEQ ID NO: 229056
  chr2:219761613-219761868
  hyper

SEQ ID NO: 416533 - DNA, 31 bp, Homo sapiens; identical to SEQ ID NO: 229060
  chr2:219824037-219824068
  hyper

SEQ ID NO: 416534 - DNA, 42 bp, Homo sapiens; identical to SEQ ID NO: 280654
  chr2:219825939-219825981
  hyper

SEQ ID NO: 416535 - DNA, 114 bp, Homo sapiens; identical to SEQ ID NO: 229069
  chr2:219856513-219856627
  hyper

SEQ ID NO: 416536 - DNA, 173 bp, Homo sapiens
  chr2:219858542-219858715
  hyper
gccagccttcctcggccctagtccaggcctctcttttgggcgatgctaaggcggaggtagagagggctctgcccaaaggattcgcttcatgtgctcagtcctctttttcctgggggatcggtccatcgcggcccttttcctcccaagcgtgcgttcccagatcctgcgccgcg

SEQ ID NO: 416537 - DNA, 175 bp, Homo sapiens; identical to SEQ ID NO: 198705
  chr2:219858751-219858926
  hyper

SEQ ID NO: 416538 - DNA, 198 bp, Homo sapiens; identical to SEQ ID NO: 198707
  chr2:219906102-219906300
  hyper

SEQ ID NO: 416539 - DNA, 436 bp, Homo sapiens
  chr2:219923737-219924173
  hyper
ttccccgcctctctccctcactgccaccgccccctctcgggtccagagcccgggcgtgcgctgtcaatgattgcccagcccgtggcccggatccttatctgcattcctcggcgcccggcccggcccggccaccagccaaccttcggccccgacactggccggccagccccggcgccagggtgcatgctgagggccctgagtctagctgctcttcccaacggatctagaaagccaggggcctgctttcagggggaagcctcgggagaccccgaaggaagggggtgaaggtctctcccctcgcggacctggctgctgggaaggaatttgcgcctctaagcttgggtggagcgcgggtcctactccagcatgcagagactagcgtcagccctggtccctgcctccctcggcatctcagcccctcttttccactccttcc

SEQ ID NO: 416540 - DNA, 215 bp, Homo sapiens; identical to SEQ ID NO: 198710
  chr2:219925613-219925828
  hyper

SEQ ID NO: 416541 - DNA, 36 bp, Homo sapiens; identical to SEQ ID NO: 229075
  chr2:220025698-220025734
  hyper

SEQ ID NO: 416542 - DNA, 138 bp, Homo sapiens; identical to SEQ ID NO: 229076
  chr2:220042082-220042220
  hyper

SEQ ID NO: 416543 - DNA, 53 bp, Homo sapiens; identical to SEQ ID NO: 229077
  chr2:220042710-220042763
  hyper

SEQ ID NO: 416544 - DNA, 112 bp, Homo sapiens; identical to SEQ ID NO: 229078
  chr2:220093844-220093956
  hyper

SEQ ID NO: 416545 - DNA, 327 bp, Homo sapiens; identical to SEQ ID NO: 229079
  chr2:220094205-220094532
  hyper

SEQ ID NO: 416546 - DNA, 34 bp, Homo sapiens; identical to SEQ ID NO: 198712
  chr2:220118641-220118675
  hyper

SEQ ID NO: 416547 - DNA, 101 bp, Homo sapiens; identical to SEQ ID NO: 229081
  chr2:220143826-220143927
  hyper

SEQ ID NO: 416548 - DNA, 134 bp, Homo sapiens; identical to SEQ ID NO: 198713
  chr2:220173086-220173220
  hyper

SEQ ID NO: 416549 - DNA, 63 bp, Homo sapiens; identical to SEQ ID NO: 107484
  chr2:220223794-220223857
  hyper

SEQ ID NO: 416550 - DNA, 199 bp, Homo sapiens; identical to SEQ ID NO: 198718
  chr2:220407985-220408184
  hyper

SEQ ID NO: 416551 - DNA, 56 bp, Homo sapiens; identical to SEQ ID NO: 198719
  chr2:220408723-220408779
  hyper

SEQ ID NO: 416552 - DNA, 441 bp, Homo sapiens; identical to SEQ ID NO: 229096
  chr2:220462404-220462845
  hyper

SEQ ID NO: 416553 - DNA, 237 bp, Homo sapiens; identical to SEQ ID NO: 280691
  chr2:220492470-220492707
  hyper

SEQ ID NO: 416554 - DNA, 273 bp, Homo sapiens; identical to SEQ ID NO: 229098
  chr2:222435182-222435455
  hyper

SEQ ID NO: 416555 - DNA, 377 bp, Homo sapiens; identical to SEQ ID NO: 280696
  chr2:222438480-222438857
  hyper

SEQ ID NO: 416556 - DNA, 52 bp, Homo sapiens; identical to SEQ ID NO: 280697
  chr2:222438887-222438939
  hyper

SEQ ID NO: 416557 - DNA, 426 bp, Homo sapiens; identical to SEQ ID NO: 280700
  chr2:223154494-223154920
  hyper

SEQ ID NO: 416558 - DNA, 199 bp, Homo sapiens; identical to SEQ ID NO: 280702
  chr2:223168006-223168205
  hyper

SEQ ID NO: 416559 - DNA, 146 bp, Homo sapiens; identical to SEQ ID NO: 198733
  chr2:223177678-223177824
  hyper

SEQ ID NO: 416560 - DNA, 379 bp, Homo sapiens
  chr2:223184405-223184784
  hyper
ggtggcggcacaccgggcacgcgatggcgccgggcgggcagagccagggcggcgggcgcggcgggcgctcaggcgcggcggcagcggcggcggcggcggcggcgcggagctgcagctggctcaggcactcctggcagaaggtgtgcaagcacgccagcagcttgggcgcgcgccggtccgcgtcgaagtagttgtagcagattttgcactcgtagtcctcaagcggagggaggccggagaccgtctccgctgcgtcccgggctcctgcgtctccgcagtccggggctcccttcgcggcgaccccagctccctcccggctcccggggctgctgcttgggctctgctggctgccgccgctgtcgctcgccggcgctgccat

SEQ ID NO: 416561 - DNA, 361 bp, Homo sapiens; identical to SEQ ID NO: 229122
  chr2:223520612-223520973
  hyper

SEQ ID NO: 416562 - DNA, 79 bp, Homo sapiens; identical to SEQ ID NO: 198734
  chr2:223536121-223536200
  hyper

SEQ ID NO: 416563 - DNA, 106 bp, Homo sapiens; identical to SEQ ID NO: 280711
  chr2:223536673-223536779
  hyper

SEQ ID NO: 416564 - DNA, 136 bp, Homo sapiens; identical to SEQ ID NO: 198736
  chr2:223725610-223725746
  hyper

SEQ ID NO: 416565 - DNA, 244 bp, Homo sapiens; identical to SEQ ID NO: 229126
  chr2:224821706-224821950
  hyper

SEQ ID NO: 416566 - DNA, 53 bp, Homo sapiens; identical to SEQ ID NO: 280716
  chr2:224903207-224903260
  hyper

SEQ ID NO: 416567 - DNA, 250 bp, Homo sapiens; identical to SEQ ID NO: 280717
  chr2:224903440-224903690
  hyper

SEQ ID NO: 416568 - DNA, 353 bp, Homo sapiens; identical to SEQ ID NO: 280718
  chr2:224903755-224904108
  hyper

SEQ ID NO: 416569 - DNA, 404 bp, Homo sapiens; identical to SEQ ID NO: 280719
  chr2:224904237-224904641
  hyper

SEQ ID NO: 416570 - DNA, 53 bp, Homo sapiens; identical to SEQ ID NO: 229129
  chr2:225450598-225450651
  hyper

SEQ ID NO: 416571 - DNA, 152 bp, Homo sapiens; identical to SEQ ID NO: 229131
  chr2:226895456-226895608
  hyper

SEQ ID NO: 416572 - DNA, 122 bp, Homo sapiens; identical to SEQ ID NO: 280725
  chr2:228029622-228029744
  hyper

SEQ ID NO: 416573 - DNA, 98 bp, Homo sapiens; identical to SEQ ID NO: 280726
  chr2:229044816-229044914
  hyper

SEQ ID NO: 416574 - DNA, 163 bp, Homo sapiens; identical to SEQ ID NO: 198741
  chr2:229045944-229046107
  hyper

SEQ ID NO: 416575 - DNA, 315 bp, Homo sapiens; identical to SEQ ID NO: 280728
  chr2:230135850-230136165
  hyper

SEQ ID NO: 416576 - DNA, 80 bp, Homo sapiens; identical to SEQ ID NO: 280729
  chr2:230579415-230579495
  hyper

SEQ ID NO: 416577 - DNA, 91 bp, Homo sapiens; identical to SEQ ID NO: 229142
  chr2:230786754-230786845
  hyper

SEQ ID NO: 416578 - DNA, 237 bp, Homo sapiens; identical to SEQ ID NO: 198744
  chr2:231692871-231693108
  hyper

SEQ ID NO: 416579 - DNA, 153 bp, Homo sapiens; identical to SEQ ID NO: 229149
  chr2:231921281-231921434
  hyper

SEQ ID NO: 416580 - DNA, 239 bp, Homo sapiens; identical to SEQ ID NO: 229150
  chr2:232063175-232063414
  hyper

SEQ ID NO: 416581 - DNA, 44 bp, Homo sapiens; identical to SEQ ID NO: 229152
  chr2:232329225-232329269
  hyper

SEQ ID NO: 416582 - DNA, 135 bp, Homo sapiens; identical to SEQ ID NO: 229153
  chr2:232379208-232379343
  hyper

SEQ ID NO: 416583 - DNA, 121 bp, Homo sapiens; identical to SEQ ID NO: 198749
  chr2:232478346-232478467
  hyper

SEQ ID NO: 416584 - DNA, 551 bp, Homo sapiens; identical to SEQ ID NO: 222027
  chr2:232545577-232546128
  hyper

SEQ ID NO: 416585 - DNA, 48 bp, Homo sapiens; identical to SEQ ID NO: 229157
  chr2:232571124-232571172
  hyper

SEQ ID NO: 416586 - DNA, 309 bp, Homo sapiens; identical to SEQ ID NO: 229158
  chr2:232572332-232572641
  hyper

SEQ ID NO: 416587 - DNA, 177 bp, Homo sapiens; identical to SEQ ID NO: 229159
  chr2:232573066-232573243
  hyper

SEQ ID NO: 416588 - DNA, 234 bp, Homo sapiens; identical to SEQ ID NO: 229160
  chr2:232646071-232646305
  hyper

SEQ ID NO: 416589 - DNA, 78 bp, Homo sapiens; identical to SEQ ID NO: 222030
  chr2:233251508-233251586
  hyper

SEQ ID NO: 416590 - DNA, 82 bp, Homo sapiens; identical to SEQ ID NO: 222033
  chr2:233284387-233284469
  hyper

SEQ ID NO: 416591 - DNA, 365 bp, Homo sapiens; identical to SEQ ID NO: 280759
  chr2:233284687-233285052
  hyper

SEQ ID NO: 416592 - DNA, 238 bp, Homo sapiens; identical to SEQ ID NO: 280760
  chr2:233285131-233285369
  hyper

SEQ ID NO: 416593 - DNA, 141 bp, Homo sapiens; identical to SEQ ID NO: 280761
  chr2:233285625-233285766
  hyper

SEQ ID NO: 416594 - DNA, 235 bp, Homo sapiens; identical to SEQ ID NO: 280762
  chr2:233286008-233286243
  hyper

SEQ ID NO: 416595 - DNA, 84 bp, Homo sapiens; identical to SEQ ID NO: 198757
  chr2:233414992-233415076
  hyper

SEQ ID NO: 416596 - DNA, 99 bp, Homo sapiens; identical to SEQ ID NO: 229175
  chr2:233562009-233562108
  hyper

SEQ ID NO: 416597 - DNA, 99 bp, Homo sapiens; identical to SEQ ID NO: 229176
  chr2:233562462-233562561
  hyper

SEQ ID NO: 416598 - DNA, 321 bp, Homo sapiens; identical to SEQ ID NO: 229178
  chr2:234159999-234160320
  hyper

SEQ ID NO: 416599 - DNA, 90 bp, Homo sapiens; identical to SEQ ID NO: 229180
  chr2:234763372-234763462
  hyper

SEQ ID NO: 416600 - DNA, 306 bp, Homo sapiens
  chr2:236578721-236579027
  hyper
ggggccccagcgcgcgggcgacatgtacttgttggacggcagtggcgagcccgcgtcgccacccgcggacgcgatgccgcgcgggacgccccccagaaagactgtctaccgcatctccgtgaccatggtcaggaaggagcagctggccgcgccgggctccggcggcccggacccacgcccggttcggcggccccggcccgcgcgctccccggacgcgcccgggaggcttgaggaggaggccgaggaggcggagggcgccgaggaaccggagggtccccggccgcgcgcttgggatttccgcacctt

SEQ ID NO: 416601 - DNA, 45 bp, Homo sapiens; identical to SEQ ID NO: 280786
  chr2:236579248-236579293
  hyper

SEQ ID NO: 416602 - DNA, 96 bp, Homo sapiens; identical to SEQ ID NO: 280787
  chr2:237068294-237068390
  hyper

SEQ ID NO: 416603 - DNA, 247 bp, Homo sapiens; identical to SEQ ID NO: 280788
  chr2:237074883-237075130
  hyper

SEQ ID NO: 416604 - DNA, 240 bp, Homo sapiens; identical to SEQ ID NO: 280789
  chr2:237075185-237075425
  hyper

SEQ ID NO: 416605 - DNA, 371 bp, Homo sapiens; identical to SEQ ID NO: 198773
  chr2:237076187-237076558
  hyper

SEQ ID NO: 416606 - DNA, 176 bp, Homo sapiens; identical to SEQ ID NO: 280791
  chr2:237076815-237076991
  hyper

SEQ ID NO: 416607 - DNA, 238 bp, Homo sapiens; identical to SEQ ID NO: 280792
  chr2:237077608-237077846
  hyper

SEQ ID NO: 416608 - DNA, 53 bp, Homo sapiens; identical to SEQ ID NO: 107679
  chr2:237078746-237078799
  hyper

SEQ ID NO: 416609 - DNA, 209 bp, Homo sapiens; identical to SEQ ID NO: 280794
  chr2:237079125-237079334
  hyper

SEQ ID NO: 416610 - DNA, 214 bp, Homo sapiens; identical to SEQ ID NO: 229195
  chr2:237079604-237079818
  hyper

SEQ ID NO: 416611 - DNA, 97 bp, Homo sapiens; identical to SEQ ID NO: 198778
  chr2:237436060-237436157
  hyper

SEQ ID NO: 416612 - DNA, 421 bp, Homo sapiens; identical to SEQ ID NO: 222045
  chr2:237476438-237476859
  hyper

SEQ ID NO: 416613 - DNA, 51 bp, Homo sapiens; identical to SEQ ID NO: 229204
  chr2:237994047-237994098
  hyper

SEQ ID NO: 416614 - DNA, 59 bp, Homo sapiens; identical to SEQ ID NO: 229205
  chr2:238200162-238200221
  hyper

SEQ ID NO: 416615 - DNA, 151 bp, Homo sapiens; identical to SEQ ID NO: 198779
  chr2:238384223-238384374
  hyper

SEQ ID NO: 416616 - DNA, 37 bp, Homo sapiens; identical to SEQ ID NO: 198780
  chr2:238395041-238395078
  hyper

SEQ ID NO: 416617 - DNA, 274 bp, Homo sapiens; identical to SEQ ID NO: 198781
  chr2:238395455-238395729
  hyper

SEQ ID NO: 416618 - DNA, 193 bp, Homo sapiens; identical to SEQ ID NO: 280807
  chr2:238395961-238396154
  hyper

SEQ ID NO: 416619 - DNA, 31 bp, Homo sapiens; identical to SEQ ID NO: 198783
  chr2:238536853-238536884
  hyper

SEQ ID NO: 416620 - DNA, 317 bp, Homo sapiens; identical to SEQ ID NO: 229208
  chr2:238583489-238583806
  hyper

SEQ ID NO: 416621 - DNA, 176 bp, Homo sapiens; identical to SEQ ID NO: 222048
  chr2:238599864-238600040
  hyper

SEQ ID NO: 416622 - DNA, 210 bp, Homo sapiens; identical to SEQ ID NO: 198784
  chr2:238876150-238876360
  hyper

SEQ ID NO: 416623 - DNA, 38 bp, Homo sapiens; identical to SEQ ID NO: 229211
  chr2:239112200-239112238
  hyper

SEQ ID NO: 416624 - DNA, 1056 bp, Homo sapiens; identical to SEQ ID NO: 280814
  chr2:239148240-239149296
  hyper

SEQ ID NO: 416625 - DNA, 149 bp, Homo sapiens; identical to SEQ ID NO: 229214
  chr2:239228861-239229010
  hyper

SEQ ID NO: 416626 - DNA, 148 bp, Homo sapiens; identical to SEQ ID NO: 280816
  chr2:239755506-239755654
  hyper

SEQ ID NO: 416627 - DNA, 42 bp, Homo sapiens; identical to SEQ ID NO: 280817
  chr2:239756024-239756066
  hyper

SEQ ID NO: 416628 - DNA, 33 bp, Homo sapiens; identical to SEQ ID NO: 107727
  chr2:239756230-239756263
  hyper

SEQ ID NO: 416629 - DNA, 117 bp, Homo sapiens; identical to SEQ ID NO: 280819
  chr2:239756648-239756765
  hyper

SEQ ID NO: 416630 - DNA, 245 bp, Homo sapiens; identical to SEQ ID NO: 107730
  chr2:239756815-239757060
  hyper

SEQ ID NO: 416631 - DNA, 240 bp, Homo sapiens; identical to SEQ ID NO: 38818
  chr2:240294231-240294471
  hyper

SEQ ID NO: 416632 - DNA, 142 bp, Homo sapiens; identical to SEQ ID NO: 198787
  chr2:240402418-240402560
  hyper

SEQ ID NO: 416633 - DNA, 150 bp, Homo sapiens; identical to SEQ ID NO: 229219
  chr2:241172438-241172588
  hyper

SEQ ID NO: 416634 - DNA, 264 bp, Homo sapiens; identical to SEQ ID NO: 280824
  chr2:241306313-241306577
  hyper

SEQ ID NO: 416635 - DNA, 218 bp, Homo sapiens; identical to SEQ ID NO: 280825
  chr2:241374397-241374615
  hyper

SEQ ID NO: 416636 - DNA, 331 bp, Homo sapiens; identical to SEQ ID NO: 198789
  chr2:241375298-241375629
  hyper

SEQ ID NO: 416637 - DNA, 416 bp, Homo sapiens; identical to SEQ ID NO: 280827
  chr2:241375891-241376307
  hyper

SEQ ID NO: 416638 - DNA, 168 bp, Homo sapiens; identical to SEQ ID NO: 198792
  chr2:241499837-241500005
  hyper

SEQ ID NO: 416639 - DNA, 47 bp, Homo sapiens; identical to SEQ ID NO: 198793
  chr2:241760796-241760843
  hyper

SEQ ID NO: 416640 - DNA, 35 bp, Homo sapiens; identical to SEQ ID NO: 229227
  chr2:242041821-242041856
  hyper

SEQ ID NO: 416641 - DNA, 162 bp, Homo sapiens; identical to SEQ ID NO: 198795
  chr2:242088871-242089033
  hyper

SEQ ID NO: 416642 - DNA, 214 bp, Homo sapiens; identical to SEQ ID NO: 229229
  chr2:242089533-242089747
  hyper

SEQ ID NO: 416643 - DNA, 334 bp, Homo sapiens; identical to SEQ ID NO: 198796
  chr2:242157713-242158047
  hyper

SEQ ID NO: 416644 - DNA, 84 bp, Homo sapiens; identical to SEQ ID NO: 198797
  chr2:242212408-242212492
  hyper

SEQ ID NO: 416645 - DNA, 53 bp, Homo sapiens; identical to SEQ ID NO: 229232
  chr2:242254481-242254534
  hyper

SEQ ID NO: 416646 - DNA, 181 bp, Homo sapiens; identical to SEQ ID NO: 198799
  chr2:242448319-242448500
  hyper

SEQ ID NO: 416647 - DNA, 203 bp, Homo sapiens; identical to SEQ ID NO: 198802
  chr2:242575608-242575811
  hyper

SEQ ID NO: 416648 - DNA, 43 bp, Homo sapiens; identical to SEQ ID NO: 229239
  chr2:242576795-242576838
  hyper

SEQ ID NO: 416649 - DNA, 184 bp, Homo sapiens; identical to SEQ ID NO: 229240
  chr2:242626705-242626889
  hyper

SEQ ID NO: 416650 - DNA, 113 bp, Homo sapiens; identical to SEQ ID NO: 107783
  chr2:242640751-242640864
  hyper

SEQ ID NO: 416651 - DNA, 459 bp, Homo sapiens; identical to SEQ ID NO: 229244
  chr3:3168311-3168770
  hyper

SEQ ID NO: 416652 - DNA, 71 bp, Homo sapiens; identical to SEQ ID NO: 280855
  chr3:3842608-3842679
  hyper

SEQ ID NO: 416653 - DNA, 47 bp, Homo sapiens; identical to SEQ ID NO: 280856
  chr3:3842731-3842778
  hyper

SEQ ID NO: 416654 - DNA, 339 bp, Homo sapiens; identical to SEQ ID NO: 229249
  chr3:4344935-4345274
  hyper

SEQ ID NO: 416655 - DNA, 67 bp, Homo sapiens; identical to SEQ ID NO: 229250
  chr3:4508823-4508890
  hyper

SEQ ID NO: 416656 - DNA, 313 bp, Homo sapiens; identical to SEQ ID NO: 229251
  chr3:4534777-4535090
  hyper

SEQ ID NO: 416657 - DNA, 293 bp, Homo sapiens; identical to SEQ ID NO: 229252
  chr3:4535655-4535948
  hyper

SEQ ID NO: 416658 - DNA, 293 bp, Homo sapiens; identical to SEQ ID NO: 229257
  chr3:5028396-5028689
  hyper

SEQ ID NO: 416659 - DNA, 140 bp, Homo sapiens; identical to SEQ ID NO: 229259
  chr3:5163864-5164004
  hyper

SEQ ID NO: 416660 - DNA, 161 bp, Homo sapiens
  chr3:6903264-6903425
  hyper
ggagtgccctgcggcgacatcaagagggaaaacgggatccacaggctggaagcgatgctctacgccctggaccagatcaacagtgatcccaacctactgcccaacgtgacgctgggcgcgcggatcctggacacttgttccagggacacttacgcgctcga

SEQ ID NO: 416661 - DNA, 125 bp, Homo sapiens; identical to SEQ ID NO: 280871
  chr3:6903463-6903588
  hyper

SEQ ID NO: 416662 - DNA, 235 bp, Homo sapiens; identical to SEQ ID NO: 198810
  chr3:6903907-6904142
  hyper

SEQ ID NO: 416663 - DNA, 89 bp, Homo sapiens; identical to SEQ ID NO: 107827
  chr3:6904532-6904621
  hyper

SEQ ID NO: 416664 - DNA, 185 bp, Homo sapiens; identical to SEQ ID NO: 229266
  chr3:9005099-9005284
  hyper

SEQ ID NO: 416665 - DNA, 67 bp, Homo sapiens; identical to SEQ ID NO: 229267
  chr3:9291320-9291387
  hyper

SEQ ID NO: 416666 - DNA, 212 bp, Homo sapiens; identical to SEQ ID NO: 229269
  chr3:9691035-9691247
  hyper

SEQ ID NO: 416667 - DNA, 251 bp, Homo sapiens; identical to SEQ ID NO: 280877
  chr3:9745823-9746074
  hyper

SEQ ID NO: 416668 - DNA, 204 bp, Homo sapiens; identical to SEQ ID NO: 229271
  chr3:9773215-9773419
  hyper

SEQ ID NO: 416669 - DNA, 49 bp, Homo sapiens; identical to SEQ ID NO: 229272
  chr3:9791601-9791650
  hyper

SEQ ID NO: 416670 - DNA, 64 bp, Homo sapiens; identical to SEQ ID NO: 198812
  chr3:9811685-9811749
  hyper

SEQ ID NO: 416671 - DNA, 91 bp, Homo sapiens; identical to SEQ ID NO: 198813
  chr3:9812389-9812480
  hyper

SEQ ID NO: 416672 - DNA, 33 bp, Homo sapiens; identical to SEQ ID NO: 229275
  chr3:9834430-9834463
  hyper

SEQ ID NO: 416673 - DNA, 124 bp, Homo sapiens; identical to SEQ ID NO: 198814
  chr3:9851463-9851587
  hyper

SEQ ID NO: 416674 - DNA, 55 bp, Homo sapiens; identical to SEQ ID NO: 229277
  chr3:9885761-9885816
  hyper

SEQ ID NO: 416675 - DNA, 275 bp, Homo sapiens; identical to SEQ ID NO: 229279
  chr3:9932166-9932441
  hyper

SEQ ID NO: 416676 - DNA, 226 bp, Homo sapiens; identical to SEQ ID NO: 229281
  chr3:9975322-9975548
  hyper

SEQ ID NO: 416677 - DNA, 137 bp, Homo sapiens; identical to SEQ ID NO: 198815
  chr3:10052429-10052566
  hyper

SEQ ID NO: 416678 - DNA, 33 bp, Homo sapiens; identical to SEQ ID NO: 198816
  chr3:10052882-10052915
  hyper

SEQ ID NO: 416679 - DNA, 71 bp, Homo sapiens; identical to SEQ ID NO: 280889
  chr3:10067934-10068005
  hyper

SEQ ID NO: 416680 - DNA, 99 bp, Homo sapiens; identical to SEQ ID NO: 107873
  chr3:10068058-10068157
  hyper

SEQ ID NO: 416681 - DNA, 98 bp, Homo sapiens; identical to SEQ ID NO: 229287
  chr3:10157072-10157170
  hyper

SEQ ID NO: 416682 - DNA, 66 bp, Homo sapiens; identical to SEQ ID NO: 383898
  chr3:10206277-10206343
  hyper

SEQ ID NO: 416683 - DNA, 132 bp, Homo sapiens; identical to SEQ ID NO: 229290
  chr3:10289896-10290028
  hyper

SEQ ID NO: 416684 - DNA, 70 bp, Homo sapiens; identical to SEQ ID NO: 198818
  chr3:11035434-11035504
  hyper

SEQ ID NO: 416685 - DNA, 39 bp, Homo sapiens; identical to SEQ ID NO: 229294
  chr3:11313876-11313915
  hyper

SEQ ID NO: 416686 - DNA, 214 bp, Homo sapiens; identical to SEQ ID NO: 280899
  chr3:12045467-12045681
  hyper

SEQ ID NO: 416687 - DNA, 191 bp, Homo sapiens; identical to SEQ ID NO: 280903
  chr3:12525530-12525721
  hyper

SEQ ID NO: 416688 - DNA, 50 bp, Homo sapiens; identical to SEQ ID NO: 229299
  chr3:12598378-12598428
  hyper

SEQ ID NO: 416689 - DNA, 48 bp, Homo sapiens; identical to SEQ ID NO: 198823
  chr3:12851562-12851610
  hyper

SEQ ID NO: 416690 - DNA, 223 bp, Homo sapiens; identical to SEQ ID NO: 280906
  chr3:12851692-12851915
  hyper

SEQ ID NO: 416691 - DNA, 335 bp, Homo sapiens; identical to SEQ ID NO: 229301
  chr3:12883131-12883466
  hyper

SEQ ID NO: 416692 - DNA, 218 bp, Homo sapiens; identical to SEQ ID NO: 198825
  chr3:13008720-13008938
  hyper

SEQ ID NO: 416693 - DNA, 124 bp, Homo sapiens; identical to SEQ ID NO: 280909
  chr3:13009023-13009147
  hyper

SEQ ID NO: 416694 - DNA, 102 bp, Homo sapiens; identical to SEQ ID NO: 198826
  chr3:13323321-13323423
  hyper

SEQ ID NO: 416695 - DNA, 198 bp, Homo sapiens; identical to SEQ ID NO: 229307
  chr3:13521510-13521708
  hyper

SEQ ID NO: 416696 - DNA, 156 bp, Homo sapiens; identical to SEQ ID NO: 198828
  chr3:13692028-13692184
  hyper

SEQ ID NO: 416697 - DNA, 113 bp, Homo sapiens; identical to SEQ ID NO: 229310
  chr3:13697028-13697141
  hyper

SEQ ID NO: 416698 - DNA, 440 bp, Homo sapiens; identical to SEQ ID NO: 383899
  chr3:13922041-13922481
  hyper

SEQ ID NO: 416699 - DNA, 357 bp, Homo sapiens; identical to SEQ ID NO: 229312
  chr3:14166221-14166578
  hyper

SEQ ID NO: 416700 - DNA, 520 bp, Homo sapiens; identical to SEQ ID NO: 229313
  chr3:14219841-14220361
  hyper

SEQ ID NO: 416701 - DNA, 105 bp, Homo sapiens; identical to SEQ ID NO: 222076
  chr3:14444658-14444763
  hyper

SEQ ID NO: 416702 - DNA, 46 bp, Homo sapiens; identical to SEQ ID NO: 280926
  chr3:14643706-14643752
  hyper

SEQ ID NO: 416703 - DNA, 79 bp, Homo sapiens; identical to SEQ ID NO: 229315
  chr3:14693107-14693186
  hyper

SEQ ID NO: 416704 - DNA, 35 bp, Homo sapiens; identical to SEQ ID NO: 229318
  chr3:14988815-14988850
  hyper

SEQ ID NO: 416705 - DNA, 221 bp, Homo sapiens; identical to SEQ ID NO: 229319
  chr3:15140593-15140814
  hyper

SEQ ID NO: 416706 - DNA, 155 bp, Homo sapiens; identical to SEQ ID NO: 229320
  chr3:15248302-15248457
  hyper

SEQ ID NO: 416707 - DNA, 242 bp, Homo sapiens; identical to SEQ ID NO: 229321
  chr3:15468806-15469048
  hyper

SEQ ID NO: 416708 - DNA, 372 bp, Homo sapiens; identical to SEQ ID NO: 229322
  chr3:15642964-15643336
  hyper

SEQ ID NO: 416709 - DNA, 340 bp, Homo sapiens; identical to SEQ ID NO: 229324
  chr3:15901941-15902281
  hyper

SEQ ID NO: 416710 - DNA, 218 bp, Homo sapiens; identical to SEQ ID NO: 229325
  chr3:16306495-16306713
  hyper

SEQ ID NO: 416711 - DNA, 227 bp, Homo sapiens; identical to SEQ ID NO: 229330
  chr3:18465498-18465725
  hyper

SEQ ID NO: 416712 - DNA, 668 bp, Homo sapiens; identical to SEQ ID NO: 280946
  chr3:18485652-18486320
  hyper

SEQ ID NO: 416713 - DNA, 33 bp, Homo sapiens; identical to SEQ ID NO: 280947
  chr3:18486937-18486970
  hyper

SEQ ID NO: 416714 - DNA, 190 bp, Homo sapiens; identical to SEQ ID NO: 229333
  chr3:19188895-19189085
  hyper

SEQ ID NO: 416715 - DNA, 369 bp, Homo sapiens; identical to SEQ ID NO: 229336
  chr3:19988326-19988695
  hyper

SEQ ID NO: 416716 - DNA, 37 bp, Homo sapiens; identical to SEQ ID NO: 229337
  chr3:20227787-20227824
  hyper

SEQ ID NO: 416717 - DNA, 224 bp, Homo sapiens; identical to SEQ ID NO: 198840
  chr3:22413369-22413593
  hyper

SEQ ID NO: 416718 - DNA, 215 bp, Homo sapiens; identical to SEQ ID NO: 198841
  chr3:22414323-22414538
  hyper

SEQ ID NO: 416719 - DNA, 43 bp, Homo sapiens; identical to SEQ ID NO: 229339
  chr3:23847466-23847509
  hyper

SEQ ID NO: 416720 - DNA, 56 bp, Homo sapiens; identical to SEQ ID NO: 229340
  chr3:23958863-23958919
  hyper

SEQ ID NO: 416721 - DNA, 69 bp, Homo sapiens; identical to SEQ ID NO: 198842
  chr3:23986035-23986104
  hyper

SEQ ID NO: 416722 - DNA, 204 bp, Homo sapiens; identical to SEQ ID NO: 198843
  chr3:23986746-23986950
  hyper

SEQ ID NO: 416723 - DNA, 103 bp, Homo sapiens; identical to SEQ ID NO: 280959
  chr3:24535351-24535454
  hyper

SEQ ID NO: 416724 - DNA, 254 bp, Homo sapiens; identical to SEQ ID NO: 280960
  chr3:24535595-24535849
  hyper

SEQ ID NO: 416725 - DNA, 372 bp, Homo sapiens
  chr3:24535988-24536360
  hyper
aggctgatgacacccccaccacccacgctcacccgcctgcccgcccgcgcgcgctcggcttagccgcccgcacccctccgggttcttgcgacgctccgtcaccatcccgcccaccctgtggacagttggaactgtcgccccctcctcctctcaccccgctgcctccgcgcggtcctctagccaaattaccagtgccctggagccggttgggttgagcgcccctgcccggggaaggtagcctgcgggctcttgccccgagcccgcggagcaggaggtctcttttccaagcgcactcacattattcatgcaaagttaatccccgccgcgtcacggccgcccgcccgaggatgtgcgccttccttggccaagccc

SEQ ID NO: 416726 - DNA, 654 bp, Homo sapiens; identical to SEQ ID NO: 280962
  chr3:24562965-24563619
  hyper

SEQ ID NO: 416727 - DNA, 41 bp, Homo sapiens; identical to SEQ ID NO: 198847
  chr3:24563737-24563778
  hyper

SEQ ID NO: 416728 - DNA, 195 bp, Homo sapiens
  chr3:24871594-24871789
  hyper
gagccctggaggctgaggctctaagcctggactgtcagccgcgaaggggttcttgctgtgtgcgcgctttggcaggaagaggctgtgtgtgattgtagagacgatgggcggaaaaacagagaagagagaggtacttggaatctatgtaattgcagtgtgccccagtgtgcacttttctccctccagatattttga

SEQ ID NO: 416729 - DNA, 60 bp, Homo sapiens; identical to SEQ ID NO: 198851
  chr3:24871886-24871946
  hyper

SEQ ID NO: 416730 - DNA, 121 bp, Homo sapiens; identical to SEQ ID NO: 198854
  chr3:25824793-25824914
  hyper

SEQ ID NO: 416731 - DNA, 144 bp, Homo sapiens; identical to SEQ ID NO: 229348
  chr3:25825435-25825579
  hyper

SEQ ID NO: 416732 - DNA, 161 bp, Homo sapiens; identical to SEQ ID NO: 280971
  chr3:26663871-26664032
  hyper

SEQ ID NO: 416733 - DNA, 259 bp, Homo sapiens; identical to SEQ ID NO: 396290
  chr3:27755341-27755600
  hyper

SEQ ID NO: 416734 - DNA, 116 bp, Homo sapiens; identical to SEQ ID NO: 280976
  chr3:27755601-27755717
  hyper

SEQ ID NO: 416735 - DNA, 132 bp, Homo sapiens; identical to SEQ ID NO: 198859
  chr3:27755955-27756087
  hyper

SEQ ID NO: 416736 - DNA, 74 bp, Homo sapiens; identical to SEQ ID NO: 387904
  chr3:27756242-27756316
  hyper

SEQ ID NO: 416737 - DNA, 224 bp, Homo sapiens; identical to SEQ ID NO: 280980
  chr3:27764674-27764898
  hyper

SEQ ID NO: 416738 - DNA, 200 bp, Homo sapiens; identical to SEQ ID NO: 280982
  chr3:27772590-27772790
  hyper

SEQ ID NO: 416739 - DNA, 349 bp, Homo sapiens; identical to SEQ ID NO: 229358
  chr3:28282839-28283188
  hyper

SEQ ID NO: 416740 - DNA, 146 bp, Homo sapiens; identical to SEQ ID NO: 280984
  chr3:28616516-28616662
  hyper

SEQ ID NO: 416741 - DNA, 214 bp, Homo sapiens; identical to SEQ ID NO: 198864
  chr3:28617983-28618197
  hyper

SEQ ID NO: 416742 - DNA, 354 bp, Homo sapiens; identical to SEQ ID NO: 229361
  chr3:30647759-30648113
  hyper

SEQ ID NO: 416743 - DNA, 276 bp, Homo sapiens; identical to SEQ ID NO: 229362
  chr3:31574048-31574324
  hyper

SEQ ID NO: 416744 - DNA, 42 bp, Homo sapiens; identical to SEQ ID NO: 229363
  chr3:32023042-32023084
  hyper

SEQ ID NO: 416745 - DNA, 160 bp, Homo sapiens; identical to SEQ ID NO: 198865
  chr3:32148437-32148597
  hyper

SEQ ID NO: 416746 - DNA, 137 bp, Homo sapiens; identical to SEQ ID NO: 198869
  chr3:32442878-32443015
  hyper

SEQ ID NO: 416747 - DNA, 55 bp, Homo sapiens; identical to SEQ ID NO: 198870
  chr3:32443510-32443565
  hyper

SEQ ID NO: 416748 - DNA, 329 bp, Homo sapiens; identical to SEQ ID NO: 280998
  chr3:32612447-32612776
  hyper

SEQ ID NO: 416749 - DNA, 293 bp, Homo sapiens; identical to SEQ ID NO: 229368
  chr3:32726508-32726801
  hyper

SEQ ID NO: 416750 - DNA, 124 bp, Homo sapiens; identical to SEQ ID NO: 198873
  chr3:33137820-33137944
  hyper

SEQ ID NO: 416751 - DNA, 150 bp, Homo sapiens; identical to SEQ ID NO: 229371
  chr3:33138858-33139008
  hyper

SEQ ID NO: 416752 - DNA, 242 bp, Homo sapiens; identical to SEQ ID NO: 198874
  chr3:33155230-33155472
  hyper

SEQ ID NO: 416753 - DNA, 70 bp, Homo sapiens; identical to SEQ ID NO: 229376
  chr3:33759877-33759947
  hyper

SEQ ID NO: 416754 - DNA, 264 bp, Homo sapiens; identical to SEQ ID NO: 229377
  chr3:33839852-33840116
  hyper

SEQ ID NO: 416755 - DNA, 183 bp, Homo sapiens; identical to SEQ ID NO: 198876
  chr3:36421689-36421872
  hyper

SEQ ID NO: 416756 - DNA, 156 bp, Homo sapiens; identical to SEQ ID NO: 281007
  chr3:36421902-36422058
  hyper

SEQ ID NO: 416757 - DNA, 106 bp, Homo sapiens; identical to SEQ ID NO: 281008
  chr3:36422076-36422182
  hyper

SEQ ID NO: 416758 - DNA, 251 bp, Homo sapiens; identical to SEQ ID NO: 281009
  chr3:36422223-36422474
  hyper

SEQ ID NO: 416759 - DNA, 73 bp, Homo sapiens; identical to SEQ ID NO: 281010
  chr3:36805377-36805450
  hyper

SEQ ID NO: 416760 - DNA, 91 bp, Homo sapiens; identical to SEQ ID NO: 222102
  chr3:37038109-37038200
  hyper

SEQ ID NO: 416761 - DNA, 99 bp, Homo sapiens; identical to SEQ ID NO: 222103
  chr3:37042445-37042544
  hyper

SEQ ID NO: 416762 - DNA, 74 bp, Homo sapiens; identical to SEQ ID NO: 222104
  chr3:37045891-37045965
  hyper

SEQ ID NO: 416763 - DNA, 73 bp, Homo sapiens; identical to SEQ ID NO: 222105
  chr3:37048481-37048554
  hyper

SEQ ID NO: 416764 - DNA, 92 bp, Homo sapiens; identical to SEQ ID NO: 222106
  chr3:37050304-37050396
  hyper

SEQ ID NO: 416765 - DNA, 280 bp, Homo sapiens; identical to SEQ ID NO: 222107
  chr3:37053310-37053590
  hyper

SEQ ID NO: 416766 - DNA, 113 bp, Homo sapiens; identical to SEQ ID NO: 222108
  chr3:37055922-37056035
  hyper

SEQ ID NO: 416767 - DNA, 94 bp, Homo sapiens; identical to SEQ ID NO: 222109
  chr3:37058996-37059090
  hyper

SEQ ID NO: 416768 - DNA, 154 bp, Homo sapiens; identical to SEQ ID NO: 222110
  chr3:37061800-37061954
  hyper

SEQ ID NO: 416769 - DNA, 371 bp, Homo sapiens; identical to SEQ ID NO: 222111
  chr3:37067127-37067498
  hyper

SEQ ID NO: 416770 - DNA, 149 bp, Homo sapiens; identical to SEQ ID NO: 222112
  chr3:37070274-37070423
  hyper

SEQ ID NO: 416771 - DNA, 109 bp, Homo sapiens; identical to SEQ ID NO: 222113
  chr3:37081676-37081785
  hyper

SEQ ID NO: 416772 - DNA, 64 bp, Homo sapiens; identical to SEQ ID NO: 222114
  chr3:37083758-37083822
  hyper

SEQ ID NO: 416773 - DNA, 165 bp, Homo sapiens; identical to SEQ ID NO: 222115
  chr3:37089009-37089174
  hyper

SEQ ID NO: 416774 - DNA, 93 bp, Homo sapiens; identical to SEQ ID NO: 222116
  chr3:37090007-37090100
  hyper

SEQ ID NO: 416775 - DNA, 114 bp, Homo sapiens; identical to SEQ ID NO: 222117
  chr3:37090394-37090508
  hyper

SEQ ID NO: 416776 - DNA, 361 bp, Homo sapiens; identical to SEQ ID NO: 222118
  chr3:37091976-37092337
  hyper

SEQ ID NO: 416777 - DNA, 177 bp, Homo sapiens; identical to SEQ ID NO: 229387
  chr3:37284437-37284614
  hyper

SEQ ID NO: 416778 - DNA, 418 bp, Homo sapiens; identical to SEQ ID NO: 387911
  chr3:37493091-37493509
  hyper

SEQ ID NO: 416779 - DNA, 643 bp, Homo sapiens; identical to SEQ ID NO: 229391
  chr3:37903409-37904052
  hyper

SEQ ID NO: 416780 - DNA, 153 bp, Homo sapiens; identical to SEQ ID NO: 229394
  chr3:38178729-38178882
  hyper

SEQ ID NO: 416781 - DNA, 83 bp, Homo sapiens; identical to SEQ ID NO: 281039
  chr3:38179801-38179884
  hyper

SEQ ID NO: 416782 - DNA, 147 bp, Homo sapiens; identical to SEQ ID NO: 39092
  chr3:38179984-38180131
  hyper

SEQ ID NO: 416783 - DNA, 129 bp, Homo sapiens; identical to SEQ ID NO: 198883
  chr3:38182655-38182784
  hyper

SEQ ID NO: 416784 - DNA, 45 bp, Homo sapiens; identical to SEQ ID NO: 229396
  chr3:38206259-38206304
  hyper

SEQ ID NO: 416785 - DNA, 183 bp, Homo sapiens; identical to SEQ ID NO: 108120
  chr3:38206942-38207125
  hyper

SEQ ID NO: 416786 - DNA, 78 bp, Homo sapiens; identical to SEQ ID NO: 198884
  chr3:38495097-38495175
  hyper

SEQ ID NO: 416787 - DNA, 52 bp, Homo sapiens; identical to SEQ ID NO: 39102
  chr3:38495213-38495265
  hyper

SEQ ID NO: 416788 - DNA, 101 bp, Homo sapiens; identical to SEQ ID NO: 198886
  chr3:38495679-38495780
  hyper

SEQ ID NO: 416789 - DNA, 1234 bp, Homo sapiens; identical to SEQ ID NO: 198887
  chr3:38496021-38497255
  hyper

SEQ ID NO: 416790 - DNA, 156 bp, Homo sapiens; identical to SEQ ID NO: 229401
  chr3:38537735-38537891
  hyper

SEQ ID NO: 416791 - DNA, 278 bp, Homo sapiens; identical to SEQ ID NO: 281049
  chr3:38690811-38691089
  hyper

SEQ ID NO: 416792 - DNA, 69 bp, Homo sapiens; identical to SEQ ID NO: 281050
  chr3:38691144-38691213
  hyper

SEQ ID NO: 416793 - DNA, 211 bp, Homo sapiens; identical to SEQ ID NO: 229403
  chr3:39093354-39093565
  hyper

SEQ ID NO: 416794 - DNA, 277 bp, Homo sapiens; identical to SEQ ID NO: 222128
  chr3:39148232-39148509
  hyper

SEQ ID NO: 416795 - DNA, 251 bp, Homo sapiens; identical to SEQ ID NO: 229404
  chr3:39149006-39149257
  hyper

SEQ ID NO: 416796 - DNA, 227 bp, Homo sapiens; identical to SEQ ID NO: 229406
  chr3:39448005-39448232
  hyper

SEQ ID NO: 416797 - DNA, 329 bp, Homo sapiens; identical to SEQ ID NO: 396332
  chr3:39850413-39850742
  hyper

SEQ ID NO: 416798 - DNA, 168 bp, Homo sapiens; identical to SEQ ID NO: 229410
  chr3:40494719-40494887
  hyper

SEQ ID NO: 416799 - DNA, 396 bp, Homo sapiens; identical to SEQ ID NO: 229411
  chr3:40498461-40498857
  hyper

SEQ ID NO: 416800 - DNA, 178 bp, Homo sapiens; identical to SEQ ID NO: 229413
  chr3:40566234-40566412
  hyper

SEQ ID NO: 416801 - DNA, 91 bp, Homo sapiens; identical to SEQ ID NO: 198893
  chr3:41240629-41240720
  hyper

SEQ ID NO: 416802 - DNA, 54 bp, Homo sapiens; identical to SEQ ID NO: 229415
  chr3:41240948-41241002
  hyper

SEQ ID NO: 416803 - DNA, 161 bp, Homo sapiens; identical to SEQ ID NO: 198894
  chr3:42056668-42056829
  hyper

SEQ ID NO: 416804 - DNA, 51 bp, Homo sapiens; identical to SEQ ID NO: 198895
  chr3:42304893-42304944
  hyper

SEQ ID NO: 416805 - DNA, 643 bp, Homo sapiens; identical to SEQ ID NO: 229420
  chr3:42623201-42623844
  hyper

SEQ ID NO: 416806 - DNA, 45 bp, Homo sapiens; identical to SEQ ID NO: 198896
  chr3:42641736-42641781
  hyper

SEQ ID NO: 416807 - DNA, 142 bp, Homo sapiens; identical to SEQ ID NO: 229422
  chr3:42642019-42642161
  hyper

SEQ ID NO: 416808 - DNA, 382 bp, Homo sapiens; identical to SEQ ID NO: 198897
  chr3:42696177-42696559
  hyper

SEQ ID NO: 416809 - DNA, 33 bp, Homo sapiens; identical to SEQ ID NO: 198898
  chr3:42845262-42845295
  hyper

SEQ ID NO: 416810 - DNA, 302 bp, Homo sapiens; identical to SEQ ID NO: 229426
  chr3:42845897-42846199
  hyper

SEQ ID NO: 416811 - DNA, 104 bp, Homo sapiens; identical to SEQ ID NO: 198900
  chr3:42922532-42922636
  hyper

SEQ ID NO: 416812 - DNA, 207 bp, Homo sapiens; identical to SEQ ID NO: 281078
  chr3:43020689-43020896
  hyper

SEQ ID NO: 416813 - DNA, 37 bp, Homo sapiens; identical to SEQ ID NO: 229432
  chr3:43662919-43662956
  hyper

SEQ ID NO: 416814 - DNA, 214 bp, Homo sapiens; identical to SEQ ID NO: 198903
  chr3:43663334-43663548
  hyper

SEQ ID NO: 416815 - DNA, 359 bp, Homo sapiens; identical to SEQ ID NO: 198904
  chr3:43731959-43732318
  hyper

SEQ ID NO: 416816 - DNA, 50 bp, Homo sapiens; identical to SEQ ID NO: 198908
  chr3:44379864-44379914
  hyper

SEQ ID NO: 416817 - DNA, 95 bp, Homo sapiens; identical to SEQ ID NO: 198909
  chr3:44481213-44481308
  hyper

SEQ ID NO: 416818 - DNA, 232 bp, Homo sapiens; identical to SEQ ID NO: 281089
  chr3:44518642-44518874
  hyper

SEQ ID NO: 416819 - DNA, 162 bp, Homo sapiens; identical to SEQ ID NO: 198912
  chr3:44626179-44626341
  hyper

SEQ ID NO: 416820 - DNA, 66 bp, Homo sapiens; identical to SEQ ID NO: 198914
  chr3:44690079-44690145
  hyper

SEQ ID NO: 416821 - DNA, 255 bp, Homo sapiens; identical to SEQ ID NO: 198915
  chr3:44690175-44690430
  hyper

SEQ ID NO: 416822 - DNA, 213 bp, Homo sapiens; identical to SEQ ID NO: 281095
  chr3:44690489-44690702
  hyper

SEQ ID NO: 416823 - DNA, 219 bp, Homo sapiens; identical to SEQ ID NO: 281096
  chr3:44754122-44754341
  hyper

SEQ ID NO: 416824 - DNA, 805 bp, Homo sapiens; identical to SEQ ID NO: 222139
  chr3:44802848-44803653
  hyper

SEQ ID NO: 416825 - DNA, 188 bp, Homo sapiens; identical to SEQ ID NO: 229446
  chr3:45017826-45018014
  hyper

SEQ ID NO: 416826 - DNA, 32 bp, Homo sapiens; identical to SEQ ID NO: 229448
  chr3:45635676-45635708
  hyper

SEQ ID NO: 416827 - DNA, 88 bp, Homo sapiens; identical to SEQ ID NO: 281102
  chr3:45730475-45730563
  hyper

SEQ ID NO: 416828 - DNA, 78 bp, Homo sapiens; identical to SEQ ID NO: 108217
  chr3:45730623-45730701
  hyper

SEQ ID NO: 416829 - DNA, 72 bp, Homo sapiens; identical to SEQ ID NO: 229450
  chr3:45730961-45731033
  hyper

SEQ ID NO: 416830 - DNA, 68 bp, Homo sapiens; identical to SEQ ID NO: 229451
  chr3:46037443-46037511
  hyper

SEQ ID NO: 416831 - DNA, 87 bp, Homo sapiens; identical to SEQ ID NO: 229452
  chr3:46854159-46854246
  hyper

SEQ ID NO: 416832 - DNA, 500 bp, Homo sapiens; identical to SEQ ID NO: 229453
  chr3:46886710-46887210
  hyper

SEQ ID NO: 416833 - DNA, 216 bp, Homo sapiens; identical to SEQ ID NO: 281108
  chr3:46924277-46924493
  hyper

SEQ ID NO: 416834 - DNA, 137 bp, Homo sapiens; identical to SEQ ID NO: 229456
  chr3:46933850-46933987
  hyper

SEQ ID NO: 416835 - DNA, 237 bp, Homo sapiens; identical to SEQ ID NO: 229457
  chr3:47018180-47018417
  hyper

SEQ ID NO: 416836 - DNA, 278 bp, Homo sapiens; identical to SEQ ID NO: 198920
  chr3:47020746-47021024
  hyper

SEQ ID NO: 416837 - DNA, 84 bp, Homo sapiens; identical to SEQ ID NO: 108235
  chr3:47021079-47021163
  hyper

SEQ ID NO: 416838 - DNA, 78 bp, Homo sapiens; identical to SEQ ID NO: 222142
  chr3:47050739-47050817
  hyper

SEQ ID NO: 416839 - DNA, 80 bp, Homo sapiens; identical to SEQ ID NO: 108238
  chr3:47051151-47051231
  hyper

SEQ ID NO: 416840 - DNA, 453 bp, Homo sapiens; identical to SEQ ID NO: 229460
  chr3:47205420-47205873
  hyper

SEQ ID NO: 416841 - DNA, 167 bp, Homo sapiens; identical to SEQ ID NO: 229461
  chr3:47323999-47324166
  hyper

SEQ ID NO: 416842 - DNA, 79 bp, Homo sapiens; identical to SEQ ID NO: 198922
  chr3:47324508-47324587
  hyper

SEQ ID NO: 416843 - DNA, 95 bp, Homo sapiens; identical to SEQ ID NO: 229463
  chr3:47422258-47422353
  hyper

SEQ ID NO: 416844 - DNA, 170 bp, Homo sapiens; identical to SEQ ID NO: 229464
  chr3:47844166-47844336
  hyper

SEQ ID NO: 416845 - DNA, 581 bp, Homo sapiens; identical to SEQ ID NO: 281120
  chr3:47890801-47891382
  hyper

SEQ ID NO: 416846 - DNA, 87 bp, Homo sapiens; identical to SEQ ID NO: 198924
  chr3:48130785-48130872
  hyper

SEQ ID NO: 416847 - DNA, 196 bp, Homo sapiens; identical to SEQ ID NO: 229466
  chr3:48282460-48282656
  hyper

SEQ ID NO: 416848 - DNA, 540 bp, Homo sapiens; identical to SEQ ID NO: 229467
  chr3:48342985-48343525
  hyper

SEQ ID NO: 416849 - DNA, 218 bp, Homo sapiens; identical to SEQ ID NO: 229468
  chr3:48470350-48470568
  hyper

SEQ ID NO: 416850 - DNA, 71 bp, Homo sapiens; identical to SEQ ID NO: 229469
  chr3:48471202-48471273
  hyper

SEQ ID NO: 416851 - DNA, 332 bp, Homo sapiens; identical to SEQ ID NO: 229470
  chr3:48481454-48481786
  hyper

SEQ ID NO: 416852 - DNA, 213 bp, Homo sapiens; identical to SEQ ID NO: 229471
  chr3:48487961-48488174
  hyper

SEQ ID NO: 416853 - DNA, 157 bp, Homo sapiens; identical to SEQ ID NO: 229472
  chr3:48541365-48541522
  hyper

SEQ ID NO: 416854 - DNA, 312 bp, Homo sapiens; identical to SEQ ID NO: 229473
  chr3:48594205-48594517
  hyper

SEQ ID NO: 416855 - DNA, 39 bp, Homo sapiens; identical to SEQ ID NO: 229474
  chr3:48672961-48673000
  hyper

SEQ ID NO: 416856 - DNA, 257 bp, Homo sapiens; identical to SEQ ID NO: 198926
  chr3:48700956-48701213
  hyper

SEQ ID NO: 416857 - DNA, 212 bp, Homo sapiens; identical to SEQ ID NO: 198927
  chr3:48701259-48701471
  hyper

SEQ ID NO: 416858 - DNA, 111 bp, Homo sapiens; identical to SEQ ID NO: 198928
  chr3:48701576-48701687
  hyper

SEQ ID NO: 416859 - DNA, 56 bp, Homo sapiens; identical to SEQ ID NO: 229477
  chr3:48754857-48754913
  hyper

SEQ ID NO: 416860 - DNA, 47 bp, Homo sapiens; identical to SEQ ID NO: 198929
  chr3:48885300-48885347
  hyper

SEQ ID NO: 416861 - DNA, 391 bp, Homo sapiens; identical to SEQ ID NO: 229479
  chr3:48955804-48956195
  hyper

SEQ ID NO: 416862 - DNA, 202 bp, Homo sapiens; identical to SEQ ID NO: 229480
  chr3:48956726-48956928
  hyper

SEQ ID NO: 416863 - DNA, 293 bp, Homo sapiens; identical to SEQ ID NO: 229483
  chr3:49044449-49044742
  hyper

SEQ ID NO: 416864 - DNA, 137 bp, Homo sapiens; identical to SEQ ID NO: 229484
  chr3:49057921-49058058
  hyper

SEQ ID NO: 416865 - DNA, 31 bp, Homo sapiens; identical to SEQ ID NO: 229485
  chr3:49058561-49058592
  hyper

SEQ ID NO: 416866 - DNA, 68 bp, Homo sapiens; identical to SEQ ID NO: 198933
  chr3:49066685-49066753
  hyper

SEQ ID NO: 416867 - DNA, 286 bp, Homo sapiens; identical to SEQ ID NO: 229488
  chr3:49131391-49131677
  hyper

SEQ ID NO: 416868 - DNA, 274 bp, Homo sapiens; identical to SEQ ID NO: 229489
  chr3:49142031-49142305
  hyper

SEQ ID NO: 416869 - DNA, 38 bp, Homo sapiens; identical to SEQ ID NO: 229490
  chr3:49142558-49142596
  hyper

SEQ ID NO: 416870 - DNA, 188 bp, Homo sapiens; identical to SEQ ID NO: 198934
  chr3:49158289-49158477
  hyper

SEQ ID NO: 416871 - DNA, 187 bp, Homo sapiens; identical to SEQ ID NO: 198935
  chr3:49171171-49171358
  hyper

SEQ ID NO: 416872 - DNA, 243 bp, Homo sapiens; identical to SEQ ID NO: 229493
  chr3:49203302-49203545
  hyper

SEQ ID NO: 416873 - DNA, 310 bp, Homo sapiens; identical to SEQ ID NO: 229494
  chr3:49395159-49395469
  hyper

SEQ ID NO: 416874 - DNA, 239 bp, Homo sapiens; identical to SEQ ID NO: 229495
  chr3:49395700-49395939
  hyper

SEQ ID NO: 416875 - DNA, 104 bp, Homo sapiens; identical to SEQ ID NO: 281153
  chr3:49449335-49449439
  hyper

SEQ ID NO: 416876 - DNA, 525 bp, Homo sapiens; identical to SEQ ID NO: 108317
  chr3:49449454-49449979
  hyper

SEQ ID NO: 416877 - DNA, 122 bp, Homo sapiens; identical to SEQ ID NO: 198938
  chr3:49507371-49507493
  hyper

SEQ ID NO: 416878 - DNA, 84 bp, Homo sapiens; identical to SEQ ID NO: 229498
  chr3:49577215-49577299
  hyper

SEQ ID NO: 416879 - DNA, 165 bp, Homo sapiens; identical to SEQ ID NO: 281157
  chr3:49591667-49591832
  hyper

SEQ ID NO: 416880 - DNA, 368 bp, Homo sapiens; identical to SEQ ID NO: 281158
  chr3:49592076-49592444
  hyper

SEQ ID NO: 416881 - DNA, 149 bp, Homo sapiens; identical to SEQ ID NO: 198939
  chr3:49711249-49711398
  hyper

SEQ ID NO: 416882 - DNA, 242 bp, Homo sapiens; identical to SEQ ID NO: 229501
  chr3:49761709-49761951
  hyper

SEQ ID NO: 416883 - DNA, 109 bp, Homo sapiens; identical to SEQ ID NO: 229502
  chr3:49841073-49841182
  hyper

SEQ ID NO: 416884 - DNA, 67 bp, Homo sapiens; identical to SEQ ID NO: 229506
  chr3:49977376-49977443
  hyper

SEQ ID NO: 416885 - DNA, 39 bp, Homo sapiens; identical to SEQ ID NO: 198940
  chr3:50126252-50126291
  hyper

SEQ ID NO: 416886 - DNA, 172 bp, Homo sapiens; identical to SEQ ID NO: 229508
  chr3:50192568-50192740
  hyper

SEQ ID NO: 416887 - DNA, 114 bp, Homo sapiens; identical to SEQ ID NO: 198941
  chr3:50192966-50193080
  hyper

SEQ ID NO: 416888 - DNA, 618 bp, Homo sapiens; identical to SEQ ID NO: 229514
  chr3:50387962-50388580
  hyper

SEQ ID NO: 416889 - DNA, 754 bp, Homo sapiens; identical to SEQ ID NO: 281176
  chr3:50540628-50541382
  hyper

SEQ ID NO: 416890 - DNA, 256 bp, Homo sapiens; identical to SEQ ID NO: 229519
  chr3:50606623-50606879
  hyper

SEQ ID NO: 416891 - DNA, 201 bp, Homo sapiens; identical to SEQ ID NO: 229520
  chr3:50649440-50649641
  hyper

SEQ ID NO: 416892 - DNA, 59 bp, Homo sapiens; identical to SEQ ID NO: 198949
  chr3:50654360-50654419
  hyper

SEQ ID NO: 416893 - DNA, 643 bp, Homo sapiens; identical to SEQ ID NO: 281181
  chr3:50712377-50713020
  hyper

SEQ ID NO: 416894 - DNA, 312 bp, Homo sapiens; identical to SEQ ID NO: 281182
  chr3:51975954-51976266
  hyper

SEQ ID NO: 416895 - DNA, 195 bp, Homo sapiens; identical to SEQ ID NO: 198950
  chr3:52001297-52001492
  hyper

SEQ ID NO: 416896 - DNA, 203 bp, Homo sapiens; identical to SEQ ID NO: 229526
  chr3:52001981-52002184
  hyper

SEQ ID NO: 416897 - DNA, 115 bp, Homo sapiens; identical to SEQ ID NO: 229527
  chr3:52008007-52008122
  hyper

SEQ ID NO: 416898 - DNA, 100 bp, Homo sapiens; identical to SEQ ID NO: 281188
  chr3:52009563-52009663
  hyper

SEQ ID NO: 416899 - DNA, 485 bp, Homo sapiens; identical to SEQ ID NO: 281189
  chr3:52009693-52010178
  hyper

SEQ ID NO: 416900 - DNA, 210 bp, Homo sapiens; identical to SEQ ID NO: 229529
  chr3:52017371-52017581
  hyper

SEQ ID NO: 416901 - DNA, 188 bp, Homo sapiens; identical to SEQ ID NO: 229530
  chr3:52029759-52029947
  hyper

SEQ ID NO: 416902 - DNA, 103 bp, Homo sapiens; identical to SEQ ID NO: 198951
  chr3:52273293-52273396
  hyper

SEQ ID NO: 416903 - DNA, 139 bp, Homo sapiens; identical to SEQ ID NO: 229533
  chr3:52570462-52570601
  hyper

SEQ ID NO: 416904 - DNA, 321 bp, Homo sapiens; identical to SEQ ID NO: 229534
  chr3:52720017-52720338
  hyper

SEQ ID NO: 416905 - DNA, 225 bp, Homo sapiens; identical to SEQ ID NO: 229535
  chr3:52739477-52739702
  hyper

SEQ ID NO: 416906 - DNA, 122 bp, Homo sapiens; identical to SEQ ID NO: 229536
  chr3:52740139-52740261
  hyper

SEQ ID NO: 416907 - DNA, 322 bp, Homo sapiens; identical to SEQ ID NO: 229537
  chr3:52804893-52805215
  hyper

SEQ ID NO: 416908 - DNA, 198 bp, Homo sapiens; identical to SEQ ID NO: 229538
  chr3:52931643-52931841
  hyper

SEQ ID NO: 416909 - DNA, 303 bp, Homo sapiens; identical to SEQ ID NO: 229539
  chr3:53164409-53164712
  hyper

SEQ ID NO: 416910 - DNA, 147 bp, Homo sapiens; identical to SEQ ID NO: 222158
  chr3:53190592-53190739
  hyper

SEQ ID NO: 416911 - DNA, 264 bp, Homo sapiens; identical to SEQ ID NO: 229541
  chr3:53289956-53290220
  hyper

SEQ ID NO: 416912 - DNA, 302 bp, Homo sapiens; identical to SEQ ID NO: 229542
  chr3:53381571-53381873
  hyper

SEQ ID NO: 416913 - DNA, 229 bp, Homo sapiens; identical to SEQ ID NO: 281206
  chr3:53528643-53528872
  hyper

SEQ ID NO: 416914 - DNA, 273 bp, Homo sapiens; identical to SEQ ID NO: 198958
  chr3:53925898-53926171
  hyper

SEQ ID NO: 416915 - DNA, 239 bp, Homo sapiens; identical to SEQ ID NO: 198960
  chr3:54157074-54157313
  hyper

SEQ ID NO: 416916 - DNA, 80 bp, Homo sapiens; identical to SEQ ID NO: 281212
  chr3:55518994-55519074
  hyper

SEQ ID NO: 416917 - DNA, 78 bp, Homo sapiens; identical to SEQ ID NO: 281213
  chr3:55519141-55519219
  hyper

SEQ ID NO: 416918 - DNA, 263 bp, Homo sapiens; identical to SEQ ID NO: 281214
  chr3:55519253-55519516
  hyper

SEQ ID NO: 416919 - DNA, 39 bp, Homo sapiens; identical to SEQ ID NO: 229552
  chr3:55523371-55523410
  hyper

SEQ ID NO: 416920 - DNA, 379 bp, Homo sapiens; identical to SEQ ID NO: 198963
  chr3:56501326-56501705
  hyper

SEQ ID NO: 416921 - DNA, 259 bp, Homo sapiens; identical to SEQ ID NO: 229554
  chr3:56590946-56591205
  hyper

SEQ ID NO: 416922 - DNA, 898 bp, Homo sapiens; identical to SEQ ID NO: 281220
  chr3:57112574-57113472
  hyper

SEQ ID NO: 416923 - DNA, 174 bp, Homo sapiens; identical to SEQ ID NO: 229559
  chr3:57261815-57261989
  hyper

SEQ ID NO: 416924 - DNA, 139 bp, Homo sapiens; identical to SEQ ID NO: 229560
  chr3:57262340-57262479
  hyper

SEQ ID NO: 416925 - DNA, 196 bp, Homo sapiens; identical to SEQ ID NO: 229561
  chr3:57541812-57542008
  hyper

SEQ ID NO: 416926 - DNA, 305 bp, Homo sapiens; identical to SEQ ID NO: 229562
  chr3:57583320-57583625
  hyper

SEQ ID NO: 416927 - DNA, 41 bp, Homo sapiens; identical to SEQ ID NO: 229564
  chr3:57741912-57741953
  hyper

SEQ ID NO: 416928 - DNA, 62 bp, Homo sapiens; identical to SEQ ID NO: 229565
  chr3:57742969-57743031
  hyper

SEQ ID NO: 416929 - DNA, 166 bp, Homo sapiens; identical to SEQ ID NO: 229567
  chr3:58203325-58203491
  hyper

SEQ ID NO: 416930 - DNA, 48 bp, Homo sapiens; identical to SEQ ID NO: 198969
  chr3:58223132-58223180
  hyper

SEQ ID NO: 416931 - DNA, 179 bp, Homo sapiens; identical to SEQ ID NO: 198970
  chr3:58224037-58224216
  hyper

SEQ ID NO: 416932 - DNA, 144 bp, Homo sapiens; identical to SEQ ID NO: 229570
  chr3:58292072-58292216
  hyper

SEQ ID NO: 416933 - DNA, 64 bp, Homo sapiens; identical to SEQ ID NO: 229571
  chr3:58318385-58318449
  hyper

SEQ ID NO: 416934 - DNA, 484 bp, Homo sapiens; identical to SEQ ID NO: 229572
  chr3:58419468-58419952
  hyper

SEQ ID NO: 416935 - DNA, 62 bp, Homo sapiens; identical to SEQ ID NO: 281239
  chr3:58571201-58571263
  hyper

SEQ ID NO: 416936 - DNA, 63 bp, Homo sapiens; identical to SEQ ID NO: 281240
  chr3:58572571-58572634
  hyper

SEQ ID NO: 416937 - DNA, 494 bp, Homo sapiens; identical to SEQ ID NO: 229575
  chr3:59035464-59035958
  hyper

SEQ ID NO: 416938 - DNA, 578 bp, Homo sapiens; identical to SEQ ID NO: 229576
  chr3:61237049-61237627
  hyper

SEQ ID NO: 416939 - DNA, 384 bp, Homo sapiens; identical to SEQ ID NO: 396407
  chr3:61546308-61546692
  hyper

SEQ ID NO: 416940 - DNA, 704 bp, Homo sapiens; identical to SEQ ID NO: 281244
  chr3:61548213-61548917
  hyper

SEQ ID NO: 416941 - DNA, 51 bp, Homo sapiens; identical to SEQ ID NO: 281245
  chr3:61549008-61549059
  hyper

SEQ ID NO: 416942 - DNA, 90 bp, Homo sapiens; identical to SEQ ID NO: 198973
  chr3:61656126-61656216
  hyper

SEQ ID NO: 416943 - DNA, 44 bp, Homo sapiens; identical to SEQ ID NO: 198974
  chr3:62254650-62254694
  hyper

SEQ ID NO: 416944 - DNA, 31 bp, Homo sapiens; identical to SEQ ID NO: 198975
  chr3:62254724-62254755
  hyper

SEQ ID NO: 416945 - DNA, 332 bp, Homo sapiens; identical to SEQ ID NO: 281249
  chr3:62304669-62305001
  hyper

SEQ ID NO: 416946 - DNA, 70 bp, Homo sapiens; identical to SEQ ID NO: 281250
  chr3:62305093-62305163
  hyper

SEQ ID NO: 416947 - DNA, 44 bp, Homo sapiens; identical to SEQ ID NO: 198976
  chr3:62358624-62358668
  hyper

SEQ ID NO: 416948 - DNA, 40 bp, Homo sapiens; identical to SEQ ID NO: 281252
  chr3:62360635-62360675
  hyper

SEQ ID NO: 416949 - DNA, 269 bp, Homo sapiens; identical to SEQ ID NO: 198977
  chr3:62365154-62365423
  hyper

SEQ ID NO: 416950 - DNA, 52 bp, Homo sapiens; identical to SEQ ID NO: 281257
  chr3:62861939-62861991
  hyper

SEQ ID NO: 416951 - DNA, 40 bp, Homo sapiens; identical to SEQ ID NO: 229597
  chr3:63850067-63850107
  hyper

SEQ ID NO: 416952 - DNA, 187 bp, Homo sapiens; identical to SEQ ID NO: 198989
  chr3:66023466-66023653
  hyper

SEQ ID NO: 416953 - DNA, 106 bp, Homo sapiens; identical to SEQ ID NO: 281273
  chr3:68056798-68056904
  hyper

SEQ ID NO: 416954 - DNA, 200 bp, Homo sapiens; identical to SEQ ID NO: 281274
  chr3:68057180-68057380
  hyper

SEQ ID NO: 416955 - DNA, 158 bp, Homo sapiens; identical to SEQ ID NO: 198993
  chr3:69062098-69062256
  hyper

SEQ ID NO: 416956 - DNA, 62 bp, Homo sapiens; identical to SEQ ID NO: 229614
  chr3:71633202-71633264
  hyper

SEQ ID NO: 416957 - DNA, 38 bp, Homo sapiens; identical to SEQ ID NO: 281282
  chr3:71833528-71833566
  hyper

SEQ ID NO: 416958 - DNA, 225 bp, Homo sapiens; identical to SEQ ID NO: 281283
  chr3:71833751-71833976
  hyper

SEQ ID NO: 416959 - DNA, 272 bp, Homo sapiens; identical to SEQ ID NO: 222183
  chr3:72496511-72496783
  hyper

SEQ ID NO: 416960 - DNA, 254 bp, Homo sapiens; identical to SEQ ID NO: 229621
  chr3:72897526-72897780
  hyper

SEQ ID NO: 416961 - DNA, 391 bp, Homo sapiens; identical to SEQ ID NO: 222184
  chr3:73673262-73673653
  hyper

SEQ ID NO: 416962 - DNA, 448 bp, Homo sapiens; identical to SEQ ID NO: 281292
  chr3:74663366-74663814
  hyper

SEQ ID NO: 416963 - DNA, 72 bp, Homo sapiens; identical to SEQ ID NO: 199008
  chr3:75471467-75471539
  hyper

SEQ ID NO: 416964 - DNA, 339 bp, Homo sapiens; identical to SEQ ID NO: 229625
  chr3:77087670-77088009
  hyper

SEQ ID NO: 416965 - DNA, 360 bp, Homo sapiens; identical to SEQ ID NO: 229626
  chr3:79067251-79067611
  hyper

SEQ ID NO: 416966 - DNA, 320 bp, Homo sapiens; identical to SEQ ID NO: 281296
  chr3:79067817-79068137
  hyper

SEQ ID NO: 416967 - DNA, 215 bp, Homo sapiens; identical to SEQ ID NO: 281297
  chr3:79068331-79068546
  hyper

SEQ ID NO: 416968 - DNA, 73 bp, Homo sapiens; identical to SEQ ID NO: 229628
  chr3:79068799-79068872
  hyper

SEQ ID NO: 416969 - DNA, 370 bp, Homo sapiens; identical to SEQ ID NO: 281300
  chr3:79816408-79816778
  hyper

SEQ ID NO: 416970 - DNA, 201 bp, Homo sapiens; identical to SEQ ID NO: 281301
  chr3:79817015-79817216
  hyper

SEQ ID NO: 416971 - DNA, 125 bp, Homo sapiens; identical to SEQ ID NO: 229631
  chr3:81810245-81810370
  hyper

SEQ ID NO: 416972 - DNA, 83 bp, Homo sapiens; identical to SEQ ID NO: 229632
  chr3:81810985-81811068
  hyper

SEQ ID NO: 416973 - DNA, 91 bp, Homo sapiens; identical to SEQ ID NO: 229633
  chr3:84597195-84597286
  hyper

SEQ ID NO: 416974 - DNA, 243 bp, Homo sapiens; identical to SEQ ID NO: 383925
  chr3:85008991-85009234
  hyper

SEQ ID NO: 416975 - DNA, 60 bp, Homo sapiens; identical to SEQ ID NO: 199012
  chr3:87039596-87039656
  hyper

SEQ ID NO: 416976 - DNA, 206 bp, Homo sapiens; identical to SEQ ID NO: 199013
  chr3:87040548-87040754
  hyper

SEQ ID NO: 416977 - DNA, 65 bp, Homo sapiens; identical to SEQ ID NO: 199014
  chr3:87276369-87276434
  hyper

SEQ ID NO: 416978 - DNA, 163 bp, Homo sapiens; identical to SEQ ID NO: 281312
  chr3:88198587-88198750
  hyper

SEQ ID NO: 416979 - DNA, 147 bp, Homo sapiens; identical to SEQ ID NO: 229641
  chr3:88199142-88199289
  hyper

SEQ ID NO: 416980 - DNA, 432 bp, Homo sapiens; identical to SEQ ID NO: 281314
  chr3:89156623-89157055
  hyper

SEQ ID NO: 416981 - DNA, 380 bp, Homo sapiens; identical to SEQ ID NO: 229643
  chr3:89163679-89164059
  hyper

SEQ ID NO: 416982 - DNA, 38 bp, Homo sapiens; identical to SEQ ID NO: 199017
  chr3:93692750-93692788
  hyper

SEQ ID NO: 416983 - DNA, 125 bp, Homo sapiens; identical to SEQ ID NO: 229645
  chr3:93698754-93698879
  hyper

SEQ ID NO: 416984 - DNA, 374 bp, Homo sapiens; identical to SEQ ID NO: 229646
  chr3:93781639-93782013
  hyper

SEQ ID NO: 416985 - DNA, 253 bp, Homo sapiens; identical to SEQ ID NO: 281320
  chr3:96533782-96534035
  hyper

SEQ ID NO: 416986 - DNA, 51 bp, Homo sapiens; identical to SEQ ID NO: 229648
  chr3:97483452-97483503
  hyper

SEQ ID NO: 416987 - DNA, 31 bp, Homo sapiens; identical to SEQ ID NO: 281322
  chr3:97483737-97483768
  hyper

SEQ ID NO: 416988 - DNA, 101 bp, Homo sapiens; identical to SEQ ID NO: 108591
  chr3:97483833-97483934
  hyper

SEQ ID NO: 416989 - DNA, 271 bp, Homo sapiens; identical to SEQ ID NO: 222186
  chr3:97690771-97691042
  hyper

SEQ ID NO: 416990 - DNA, 37 bp, Homo sapiens; identical to SEQ ID NO: 229650
  chr3:97691378-97691415
  hyper

SEQ ID NO: 416991 - DNA, 32 bp, Homo sapiens; identical to SEQ ID NO: 229651
  chr3:98241908-98241940
  hyper

SEQ ID NO: 416992 - DNA, 92 bp, Homo sapiens; identical to SEQ ID NO: 199021
  chr3:98311894-98311986
  hyper

SEQ ID NO: 416993 - DNA, 209 bp, Homo sapiens; identical to SEQ ID NO: 229653
  chr3:98312340-98312549
  hyper

SEQ ID NO: 416994 - DNA, 323 bp, Homo sapiens; identical to SEQ ID NO: 281329
  chr3:98451047-98451370
  hyper

SEQ ID NO: 416995 - DNA, 206 bp, Homo sapiens; identical to SEQ ID NO: 281330
  chr3:98451479-98451685
  hyper

SEQ ID NO: 416996 - DNA, 160 bp, Homo sapiens; identical to SEQ ID NO: 281331
  chr3:98452371-98452531
  hyper

SEQ ID NO: 416997 - DNA, 117 bp, Homo sapiens; identical to SEQ ID NO: 229656
  chr3:99536600-99536717
  hyper

SEQ ID NO: 416998 - DNA, 56 bp, Homo sapiens; identical to SEQ ID NO: 229657
  chr3:99787818-99787874
  hyper

SEQ ID NO: 416999 - DNA, 131 bp, Homo sapiens; identical to SEQ ID NO: 229658
  chr3:100053358-100053489
  hyper

SEQ ID NO: 417000 - DNA, 981 bp, Homo sapiens; identical to SEQ ID NO: 199027
  chr3:101231399-101232380
  hyper

SEQ ID NO: 417001 - DNA, 495 bp, Homo sapiens; identical to SEQ ID NO: 229661
  chr3:101280471-101280966
  hyper

SEQ ID NO: 417002 - DNA, 189 bp, Homo sapiens; identical to SEQ ID NO: 199028
  chr3:101292846-101293035
  hyper

SEQ ID NO: 417003 - DNA, 99 bp, Homo sapiens; identical to SEQ ID NO: 229663
  chr3:101395081-101395180
  hyper

SEQ ID NO: 417004 - DNA, 69 bp, Homo sapiens; identical to SEQ ID NO: 229664
  chr3:101396030-101396099
  hyper

SEQ ID NO: 417005 - DNA, 184 bp, Homo sapiens; identical to SEQ ID NO: 229665
  chr3:101405383-101405567
  hyper

SEQ ID NO: 417006 - DNA, 472 bp, Homo sapiens; identical to SEQ ID NO: 199029
  chr3:101443394-101443866
  hyper

SEQ ID NO: 417007 - DNA, 204 bp, Homo sapiens; identical to SEQ ID NO: 229667
  chr3:101546676-101546880
  hyper

SEQ ID NO: 417008 - DNA, 40 bp, Homo sapiens; identical to SEQ ID NO: 199032
  chr3:105587995-105588035
  hyper

SEQ ID NO: 417009 - DNA, 208 bp, Homo sapiens; identical to SEQ ID NO: 229673
  chr3:107243052-107243260
  hyper

SEQ ID NO: 417010 - DNA, 377 bp, Homo sapiens; identical to SEQ ID NO: 281356
  chr3:107244663-107245040
  hyper

SEQ ID NO: 417011 - DNA, 393 bp, Homo sapiens; identical to SEQ ID NO: 229675
  chr3:107646510-107646903
  hyper

SEQ ID NO: 417012 - DNA, 708 bp, Homo sapiens; identical to SEQ ID NO: 229676
  chr3:107940770-107941478
  hyper

SEQ ID NO: 417013 - DNA, 34 bp, Homo sapiens; identical to SEQ ID NO: 229677
  chr3:108307932-108307966
  hyper

SEQ ID NO: 417014 - DNA, 99 bp, Homo sapiens; identical to SEQ ID NO: 229678
  chr3:108308519-108308618
  hyper

SEQ ID NO: 417015 - DNA, 76 bp, Homo sapiens; identical to SEQ ID NO: 383933
  chr3:110791244-110791320
  hyper

SEQ ID NO: 417016 - DNA, 123 bp, Homo sapiens; identical to SEQ ID NO: 199038
  chr3:111393432-111393555
  hyper

SEQ ID NO: 417017 - DNA, 715 bp, Homo sapiens
  chr3:111578816-111579531
  hyper
gcagctgggtgggtgggggtggcgaaccccgttgtgcatgactctcggggggctgggtagatctccggttgaggggatcccggggagggagtgtctggtagggaagatgcttccagagtgattgtagaaaacaggcagaatgtgggggaactgggggcaactttttccagcaactctggaatgcacatggagagagggatggggatccttgggatagctccctgagaaagagaaggtccgctgctggatggtgtagggcgcgggattcagagaagactccctccccgcaaatatttggctagctgcgcttctagttccactttctttcaagagtgaacctacgagctttaaccgccaaaagcggctgatttcgatttggcctttgaccccccactgaaagtttacagtgtggccgtctcggcacccctagagatagcagctggaaggcttggggagtattttaaccctctgtttctccagctccctgcgcggcggaggcgcagctgaatcgtttgctggttcgcttaataacttagccctagcagtcatcacttattaaagcgccgaggacctggctaactcccgccaccaccaggaaattaaaaggctgacaggctgtccctcccagggttggggtttcctgtttgaaagagcttgagaagtcaaactgcttcgcggttcctcacttacctttcttatgtaaaagagggagcga

SEQ ID NO: 417018 - DNA, 249 bp, Homo sapiens; identical to SEQ ID NO: 229681
  chr3:111697740-111697989
  hyper

SEQ ID NO: 417019 - DNA, 432 bp, Homo sapiens; identical to SEQ ID NO: 229682
  chr3:111804991-111805423
  hyper

SEQ ID NO: 417020 - DNA, 35 bp, Homo sapiens; identical to SEQ ID NO: 229684
  chr3:112709773-112709808
  hyper

SEQ ID NO: 417021 - DNA, 292 bp, Homo sapiens; identical to SEQ ID NO: 281372
  chr3:112931274-112931566
  hyper

SEQ ID NO: 417022 - DNA, 93 bp, Homo sapiens; identical to SEQ ID NO: 229686
  chr3:113233979-113234072
  hyper

SEQ ID NO: 417023 - DNA, 217 bp, Homo sapiens; identical to SEQ ID NO: 229689
  chr3:113415721-113415938
  hyper

SEQ ID NO: 417024 - DNA, 252 bp, Homo sapiens; identical to SEQ ID NO: 281376
  chr3:113557555-113557807
  hyper

SEQ ID NO: 417025 - DNA, 84 bp, Homo sapiens; identical to SEQ ID NO: 229691
  chr3:113666356-113666440
  hyper

SEQ ID NO: 417026 - DNA, 377 bp, Homo sapiens; identical to SEQ ID NO: 229692
  chr3:113775219-113775596
  hyper

SEQ ID NO: 417027 - DNA, 241 bp, Homo sapiens; identical to SEQ ID NO: 229693
  chr3:114866221-114866462
  hyper

SEQ ID NO: 417028 - DNA, 52 bp, Homo sapiens; identical to SEQ ID NO: 199053
  chr3:117715651-117715703
  hyper

SEQ ID NO: 417029 - DNA, 174 bp, Homo sapiens; identical to SEQ ID NO: 229698
  chr3:118959826-118960000
  hyper

SEQ ID NO: 417030 - DNA, 33 bp, Homo sapiens; identical to SEQ ID NO: 199054
  chr3:119041464-119041497
  hyper

SEQ ID NO: 417031 - DNA, 282 bp, Homo sapiens; identical to SEQ ID NO: 229700
  chr3:119182268-119182550
  hyper

SEQ ID NO: 417032 - DNA, 253 bp, Homo sapiens; identical to SEQ ID NO: 229701
  chr3:119187877-119188130
  hyper

SEQ ID NO: 417033 - DNA, 76 bp, Homo sapiens; identical to SEQ ID NO: 281390
  chr3:119298797-119298873
  hyper

SEQ ID NO: 417034 - DNA, 224 bp, Homo sapiens; identical to SEQ ID NO: 229704
  chr3:119813913-119814137
  hyper

SEQ ID NO: 417035 - DNA, 160 bp, Homo sapiens; identical to SEQ ID NO: 281393
  chr3:120168944-120169104
  hyper

SEQ ID NO: 417036 - DNA, 218 bp, Homo sapiens; identical to SEQ ID NO: 396458
  chr3:120169149-120169367
  hyper

SEQ ID NO: 417037 - DNA, 32 bp, Homo sapiens; identical to SEQ ID NO: 229710
  chr3:120628277-120628309
  hyper

SEQ ID NO: 417038 - DNA, 33 bp, Homo sapiens; identical to SEQ ID NO: 229711
  chr3:120628526-120628559
  hyper

SEQ ID NO: 417039 - DNA, 259 bp, Homo sapiens; identical to SEQ ID NO: 229712
  chr3:121264679-121264938
  hyper

SEQ ID NO: 417040 - DNA, 197 bp, Homo sapiens; identical to SEQ ID NO: 229713
  chr3:121468538-121468735
  hyper

SEQ ID NO: 417041 - DNA, 101 bp, Homo sapiens; identical to SEQ ID NO: 229714
  chr3:121553926-121554027
  hyper

SEQ ID NO: 417042 - DNA, 285 bp, Homo sapiens; identical to SEQ ID NO: 229717
  chr3:122101937-122102222
  hyper

SEQ ID NO: 417043 - DNA, 273 bp, Homo sapiens; identical to SEQ ID NO: 229718
  chr3:122134806-122135079
  hyper

SEQ ID NO: 417044 - DNA, 353 bp, Homo sapiens; identical to SEQ ID NO: 229719
  chr3:122282989-122283342
  hyper

SEQ ID NO: 417045 - DNA, 96 bp, Homo sapiens; identical to SEQ ID NO: 229720
  chr3:122399330-122399426
  hyper

SEQ ID NO: 417046 - DNA, 254 bp, Homo sapiens; identical to SEQ ID NO: 229721
  chr3:122399767-122400021
  hyper

SEQ ID NO: 417047 - DNA, 636 bp, Homo sapiens; identical to SEQ ID NO: 281409
  chr3:122513919-122514555
  hyper

SEQ ID NO: 417048 - DNA, 360 bp, Homo sapiens; identical to SEQ ID NO: 281410
  chr3:122746181-122746541
  hyper

SEQ ID NO: 417049 - DNA, 585 bp, Homo sapiens; identical to SEQ ID NO: 281411
  chr3:122746969-122747554
  hyper

SEQ ID NO: 417050 - DNA, 163 bp, Homo sapiens; identical to SEQ ID NO: 199063
  chr3:122785820-122785983
  hyper

SEQ ID NO: 417051 - DNA, 186 bp, Homo sapiens; identical to SEQ ID NO: 229725
  chr3:122920576-122920762
  hyper

SEQ ID NO: 417052 - DNA, 120 bp, Homo sapiens; identical to SEQ ID NO: 229730
  chr3:123680449-123680569
  hyper

SEQ ID NO: 417053 - DNA, 102 bp, Homo sapiens; identical to SEQ ID NO: 199067
  chr3:123753162-123753264
  hyper

SEQ ID NO: 417054 - DNA, 523 bp, Homo sapiens; identical to SEQ ID NO: 281420
  chr3:124605380-124605903
  hyper

SEQ ID NO: 417055 - DNA, 441 bp, Homo sapiens; identical to SEQ ID NO: 108777
  chr3:125094185-125094626
  hyper

SEQ ID NO: 417056 - DNA, 33 bp, Homo sapiens; identical to SEQ ID NO: 229738
  chr3:125239049-125239082
  hyper

SEQ ID NO: 417057 - DNA, 71 bp, Homo sapiens; identical to SEQ ID NO: 229739
  chr3:125314510-125314581
  hyper

SEQ ID NO: 417058 - DNA, 178 bp, Homo sapiens; identical to SEQ ID NO: 39562
  chr3:125691029-125691207
  hyper

SEQ ID NO: 417059 - DNA, 191 bp, Homo sapiens; identical to SEQ ID NO: 281427
  chr3:125931775-125931966
  hyper

SEQ ID NO: 417060 - DNA, 232 bp, Homo sapiens; identical to SEQ ID NO: 199072
  chr3:125932020-125932252
  hyper

SEQ ID NO: 417061 - DNA, 361 bp, Homo sapiens; identical to SEQ ID NO: 281430
  chr3:126074822-126075183
  hyper

SEQ ID NO: 417062 - DNA, 306 bp, Homo sapiens; identical to SEQ ID NO: 281431
  chr3:126075653-126075959
  hyper

SEQ ID NO: 417063 - DNA, 179 bp, Homo sapiens; identical to SEQ ID NO: 281432
  chr3:126076063-126076242
  hyper

SEQ ID NO: 417064 - DNA, 318 bp, Homo sapiens; identical to SEQ ID NO: 281433
  chr3:126195083-126195401
  hyper

SEQ ID NO: 417065 - DNA, 70 bp, Homo sapiens; identical to SEQ ID NO: 281434
  chr3:126242791-126242861
  hyper

SEQ ID NO: 417066 - DNA, 327 bp, Homo sapiens; identical to SEQ ID NO: 281435
  chr3:126243058-126243385
  hyper

SEQ ID NO: 417067 - DNA, 176 bp, Homo sapiens; identical to SEQ ID NO: 281436
  chr3:126243461-126243637
  hyper

SEQ ID NO: 417068 - DNA, 202 bp, Homo sapiens; identical to SEQ ID NO: 229749
  chr3:126422878-126423080
  hyper

SEQ ID NO: 417069 - DNA, 358 bp, Homo sapiens; identical to SEQ ID NO: 199078
  chr3:126701039-126701397
  hyper

SEQ ID NO: 417070 - DNA, 113 bp, Homo sapiens; identical to SEQ ID NO: 281441
  chr3:126854312-126854425
  hyper

SEQ ID NO: 417071 - DNA, 140 bp, Homo sapiens; identical to SEQ ID NO: 229752
  chr3:127174691-127174831
  hyper

SEQ ID NO: 417072 - DNA, 90 bp, Homo sapiens; identical to SEQ ID NO: 281443
  chr3:127176067-127176157
  hyper

SEQ ID NO: 417073 - DNA, 340 bp, Homo sapiens; identical to SEQ ID NO: 229755
  chr3:127309528-127309868
  hyper

SEQ ID NO: 417074 - DNA, 39 bp, Homo sapiens; identical to SEQ ID NO: 229756
  chr3:127316969-127317008
  hyper

SEQ ID NO: 417075 - DNA, 207 bp, Homo sapiens; identical to SEQ ID NO: 199079
  chr3:127348123-127348330
  hyper

SEQ ID NO: 417076 - DNA, 45 bp, Homo sapiens; identical to SEQ ID NO: 199080
  chr3:127451716-127451761
  hyper

SEQ ID NO: 417077 - DNA, 104 bp, Homo sapiens; identical to SEQ ID NO: 281452
  chr3:127795650-127795754
  hyper

SEQ ID NO: 417078 - DNA, 313 bp, Homo sapiens; identical to SEQ ID NO: 229760
  chr3:127842608-127842921
  hyper

SEQ ID NO: 417079 - DNA, 84 bp, Homo sapiens; identical to SEQ ID NO: 229761
  chr3:127872078-127872162
  hyper

SEQ ID NO: 417080 - DNA, 334 bp, Homo sapiens; identical to SEQ ID NO: 281455
  chr3:128201959-128202293
  hyper

SEQ ID NO: 417081 - DNA, 352 bp, Homo sapiens; identical to SEQ ID NO: 281456
  chr3:128202708-128203060
  hyper

SEQ ID NO: 417082 - DNA, 350 bp, Homo sapiens; identical to SEQ ID NO: 281457
  chr3:128207363-128207713
  hyper

SEQ ID NO: 417083 - DNA, 136 bp, Homo sapiens; identical to SEQ ID NO: 229767
  chr3:128369739-128369875
  hyper

SEQ ID NO: 417084 - DNA, 46 bp, Homo sapiens; identical to SEQ ID NO: 281462
  chr3:128564768-128564814
  hyper

SEQ ID NO: 417085 - DNA, 120 bp, Homo sapiens; identical to SEQ ID NO: 229769
  chr3:128598081-128598201
  hyper

SEQ ID NO: 417086 - DNA, 86 bp, Homo sapiens; identical to SEQ ID NO: 229773
  chr3:128839594-128839680
  hyper

SEQ ID NO: 417087 - DNA, 188 bp, Homo sapiens; identical to SEQ ID NO: 199087
  chr3:128840084-128840272
  hyper

SEQ ID NO: 417088 - DNA, 120 bp, Homo sapiens; identical to SEQ ID NO: 229775
  chr3:128968529-128968649
  hyper

SEQ ID NO: 417089 - DNA, 152 bp, Homo sapiens; identical to SEQ ID NO: 229776
  chr3:129118190-129118342
  hyper

SEQ ID NO: 417090 - DNA, 159 bp, Homo sapiens; identical to SEQ ID NO: 229777
  chr3:129158870-129159029
  hyper

SEQ ID NO: 417091 - DNA, 124 bp, Homo sapiens; identical to SEQ ID NO: 199088
  chr3:129324048-129324172
  hyper

SEQ ID NO: 417092 - DNA, 365 bp, Homo sapiens; identical to SEQ ID NO: 199089
  chr3:129324202-129324567
  hyper

SEQ ID NO: 417093 - DNA, 234 bp, Homo sapiens; identical to SEQ ID NO: 199090
  chr3:129324659-129324893
  hyper

SEQ ID NO: 417094 - DNA, 288 bp, Homo sapiens; identical to SEQ ID NO: 199091
  chr3:129325045-129325333
  hyper

SEQ ID NO: 417095 - DNA, 76 bp, Homo sapiens; identical to SEQ ID NO: 229780
  chr3:129611907-129611983
  hyper

SEQ ID NO: 417096 - DNA, 84 bp, Homo sapiens; identical to SEQ ID NO: 199095
  chr3:130235709-130235793
  hyper

SEQ ID NO: 417097 - DNA, 219 bp, Homo sapiens; identical to SEQ ID NO: 229783
  chr3:130465368-130465587
  hyper

SEQ ID NO: 417098 - DNA, 182 bp, Homo sapiens; identical to SEQ ID NO: 229784
  chr3:130613296-130613478
  hyper

SEQ ID NO: 417099 - DNA, 60 bp, Homo sapiens; identical to SEQ ID NO: 229785
  chr3:130745640-130745700
  hyper

SEQ ID NO: 417100 - DNA, 428 bp, Homo sapiens; identical to SEQ ID NO: 229787
  chr3:131221628-131222056
  hyper

SEQ ID NO: 417101 - DNA, 228 bp, Homo sapiens; identical to SEQ ID NO: 281485
  chr3:131245722-131245950
  hyper

SEQ ID NO: 417102 - DNA, 70 bp, Homo sapiens; identical to SEQ ID NO: 108890
  chr3:131246019-131246089
  hyper

SEQ ID NO: 417103 - DNA, 44 bp, Homo sapiens; identical to SEQ ID NO: 281487
  chr3:131752786-131752830
  hyper

SEQ ID NO: 417104 - DNA, 84 bp, Homo sapiens; identical to SEQ ID NO: 199097
  chr3:131754152-131754236
  hyper

SEQ ID NO: 417105 - DNA, 42 bp, Homo sapiens; identical to SEQ ID NO: 229791
  chr3:132440491-132440533
  hyper

SEQ ID NO: 417106 - DNA, 281 bp, Homo sapiens; identical to SEQ ID NO: 229792
  chr3:132440593-132440874
  hyper

SEQ ID NO: 417107 - DNA, 49 bp, Homo sapiens; identical to SEQ ID NO: 199099
  chr3:133276458-133276507
  hyper

SEQ ID NO: 417108 - DNA, 140 bp, Homo sapiens; identical to SEQ ID NO: 229796
  chr3:133292198-133292338
  hyper

SEQ ID NO: 417109 - DNA, 250 bp, Homo sapiens; identical to SEQ ID NO: 281497
  chr3:133465042-133465292
  hyper

SEQ ID NO: 417110 - DNA, 385 bp, Homo sapiens; identical to SEQ ID NO: 229798
  chr3:133524471-133524856
  hyper

SEQ ID NO: 417111 - DNA, 134 bp, Homo sapiens; identical to SEQ ID NO: 281499
  chr3:133646157-133646291
  hyper

SEQ ID NO: 417112 - DNA, 266 bp, Homo sapiens; identical to SEQ ID NO: 281500
  chr3:133646451-133646717
  hyper

SEQ ID NO: 417113 - DNA, 35 bp, Homo sapiens; identical to SEQ ID NO: 281501
  chr3:133748105-133748140
  hyper

SEQ ID NO: 417114 - DNA, 74 bp, Homo sapiens; identical to SEQ ID NO: 281502
  chr3:133748245-133748319
  hyper

SEQ ID NO: 417115 - DNA, 52 bp, Homo sapiens; identical to SEQ ID NO: 199100
  chr3:133969907-133969959
  hyper

SEQ ID NO: 417116 - DNA, 61 bp, Homo sapiens; identical to SEQ ID NO: 199101
  chr3:134092503-134092564
  hyper

SEQ ID NO: 417117 - DNA, 475 bp, Homo sapiens; identical to SEQ ID NO: 199102
  chr3:134092643-134093118
  hyper

SEQ ID NO: 417118 - DNA, 404 bp, Homo sapiens; identical to SEQ ID NO: 199103
  chr3:134093148-134093552
  hyper

SEQ ID NO: 417119 - DNA, 239 bp, Homo sapiens; identical to SEQ ID NO: 39653
  chr3:134093626-134093865
  hyper

SEQ ID NO: 417120 - DNA, 72 bp, Homo sapiens; identical to SEQ ID NO: 281511
  chr3:134125148-134125220
  hyper

SEQ ID NO: 417121 - DNA, 366 bp, Homo sapiens; identical to SEQ ID NO: 229805
  chr3:134204740-134205106
  hyper

SEQ ID NO: 417122 - DNA, 78 bp, Homo sapiens; identical to SEQ ID NO: 281515
  chr3:134514788-134514866
  hyper

SEQ ID NO: 417123 - DNA, 140 bp, Homo sapiens; identical to SEQ ID NO: 281516
  chr3:134514895-134515035
  hyper

SEQ ID NO: 417124 - DNA, 278 bp, Homo sapiens; identical to SEQ ID NO: 229810
  chr3:135914741-135915019
  hyper

SEQ ID NO: 417125 - DNA, 64 bp, Homo sapiens; identical to SEQ ID NO: 199106
  chr3:136471113-136471177
  hyper

SEQ ID NO: 417126 - DNA, 100 bp, Homo sapiens
  chr3:136538485-136538585
  hyper
gtcatatgggatcaatttcaaatacaagttttaaaaaaggctggatgattttagaaatatggccaagaatttgtattttccattactctcttgtctcatg

SEQ ID NO: 417127 - DNA, 133 bp, Homo sapiens; identical to SEQ ID NO: 199107
  chr3:136538836-136538969
  hyper

SEQ ID NO: 417128 - DNA, 750 bp, Homo sapiens; identical to SEQ ID NO: 281525
  chr3:137482464-137483214
  hyper

SEQ ID NO: 417129 - DNA, 69 bp, Homo sapiens; identical to SEQ ID NO: 281526
  chr3:137483244-137483313
  hyper

SEQ ID NO: 417130 - DNA, 204 bp, Homo sapiens; identical to SEQ ID NO: 199112
  chr3:137487099-137487303
  hyper

SEQ ID NO: 417131 - DNA, 738 bp, Homo sapiens; identical to SEQ ID NO: 108956
  chr3:137833932-137834670
  hyper

SEQ ID NO: 417132 - DNA, 260 bp, Homo sapiens; identical to SEQ ID NO: 229825
  chr3:137893550-137893810
  hyper

SEQ ID NO: 417133 - DNA, 158 bp, Homo sapiens; identical to SEQ ID NO: 229826
  chr3:137906199-137906357
  hyper

SEQ ID NO: 417134 - DNA, 130 bp, Homo sapiens; identical to SEQ ID NO: 229827
  chr3:138048356-138048486
  hyper

SEQ ID NO: 417135 - DNA, 121 bp, Homo sapiens; identical to SEQ ID NO: 229828
  chr3:138048732-138048853
  hyper

SEQ ID NO: 417136 - DNA, 33 bp, Homo sapiens; identical to SEQ ID NO: 281536
  chr3:138066747-138066780
  hyper

SEQ ID NO: 417137 - DNA, 560 bp, Homo sapiens; identical to SEQ ID NO: 199116
  chr3:138153256-138153816
  hyper

SEQ ID NO: 417138 - DNA, 572 bp, Homo sapiens; identical to SEQ ID NO: 229831
  chr3:138312854-138313426
  hyper

SEQ ID NO: 417139 - DNA, 161 bp, Homo sapiens; identical to SEQ ID NO: 222238
  chr3:138327435-138327596
  hyper

SEQ ID NO: 417140 - DNA, 43 bp, Homo sapiens; identical to SEQ ID NO: 229832
  chr3:138553746-138553789
  hyper

SEQ ID NO: 417141 - DNA, 156 bp, Homo sapiens; identical to SEQ ID NO: 229833
  chr3:138634847-138635003
  hyper

SEQ ID NO: 417142 - DNA, 457 bp, Homo sapiens; identical to SEQ ID NO: 222239
  chr3:138654715-138655172
  hyper

SEQ ID NO: 417143 - DNA, 40 bp, Homo sapiens; identical to SEQ ID NO: 281545
  chr3:138656628-138656668
  hyper

SEQ ID NO: 417144 - DNA, 246 bp, Homo sapiens; identical to SEQ ID NO: 281546
  chr3:138656946-138657192
  hyper

SEQ ID NO: 417145 - DNA, 192 bp, Homo sapiens; identical to SEQ ID NO: 281547
  chr3:138657222-138657414
  hyper

SEQ ID NO: 417146 - DNA, 124 bp, Homo sapiens; identical to SEQ ID NO: 281548
  chr3:138662849-138662973
  hyper

SEQ ID NO: 417147 - DNA, 268 bp, Homo sapiens; identical to SEQ ID NO: 281549
  chr3:138668328-138668596
  hyper

SEQ ID NO: 417148 - DNA, 254 bp, Homo sapiens; identical to SEQ ID NO: 229840
  chr3:139062831-139063085
  hyper

SEQ ID NO: 417149 - DNA, 90 bp, Homo sapiens; identical to SEQ ID NO: 281552
  chr3:139396866-139396956
  hyper

SEQ ID NO: 417150 - DNA, 237 bp, Homo sapiens; identical to SEQ ID NO: 229849
  chr3:140950012-140950249
  hyper

SEQ ID NO: 417151 - DNA, 175 bp, Homo sapiens; identical to SEQ ID NO: 229850
  chr3:140951287-140951462
  hyper

SEQ ID NO: 417152 - DNA, 110 bp, Homo sapiens; identical to SEQ ID NO: 281557
  chr3:141030361-141030471
  hyper

SEQ ID NO: 417153 - DNA, 103 bp, Homo sapiens; identical to SEQ ID NO: 109000
  chr3:141030521-141030624
  hyper

SEQ ID NO: 417154 - DNA, 61 bp, Homo sapiens; identical to SEQ ID NO: 281559
  chr3:141379212-141379273
  hyper

SEQ ID NO: 417155 - DNA, 78 bp, Homo sapiens; identical to SEQ ID NO: 199121
  chr3:141457301-141457379
  hyper

SEQ ID NO: 417156 - DNA, 230 bp, Homo sapiens; identical to SEQ ID NO: 229855
  chr3:141944304-141944534
  hyper

SEQ ID NO: 417157 - DNA, 33 bp, Homo sapiens; identical to SEQ ID NO: 229856
  chr3:142166775-142166808
  hyper

SEQ ID NO: 417158 - DNA, 428 bp, Homo sapiens; identical to SEQ ID NO: 281563
  chr3:142443118-142443546
  hyper

SEQ ID NO: 417159 - DNA, 103 bp, Homo sapiens; identical to SEQ ID NO: 281564
  chr3:142443851-142443954
  hyper

SEQ ID NO: 417160 - DNA, 274 bp, Homo sapiens
  chr3:142607969-142608243
  hyper
gtctgactcgacgcttagtttcccctgaggagctgctctggcagccacaggccactgctgaatatcccgtttgttctccggcggcaggaggggcggctccgaggccagagccgccccctctcgtggggcgggcgaacgtctcctcccggcaccccgggaccgacgggtcctctctcgtccagccctcagggaccccggggagaagaggaaccccttgcggagtggcaccccagcggcccgggccccgacgcccagagacgattctcagggaggg

SEQ ID NO: 417161 - DNA, 42 bp, Homo sapiens; identical to SEQ ID NO: 281568
  chr3:143566922-143566964
  hyper

SEQ ID NO: 417162 - DNA, 356 bp, Homo sapiens; identical to SEQ ID NO: 281574
  chr3:147074101-147074457
  hyper

SEQ ID NO: 417163 - DNA, 131 bp, Homo sapiens; identical to SEQ ID NO: 281575
  chr3:147074487-147074618
  hyper

SEQ ID NO: 417164 - DNA, 41 bp, Homo sapiens; identical to SEQ ID NO: 229869
  chr3:147079786-147079827
  hyper

SEQ ID NO: 417165 - DNA, 206 bp, Homo sapiens; identical to SEQ ID NO: 281581
  chr3:147089099-147089305
  hyper

SEQ ID NO: 417166 - DNA, 431 bp, Homo sapiens; identical to SEQ ID NO: 229873
  chr3:147095403-147095834
  hyper

SEQ ID NO: 417167 - DNA, 217 bp, Homo sapiens; identical to SEQ ID NO: 281583
  chr3:147098162-147098379
  hyper

SEQ ID NO: 417168 - DNA, 168 bp, Homo sapiens; identical to SEQ ID NO: 281584
  chr3:147102697-147102865
  hyper

SEQ ID NO: 417169 - DNA, 96 bp, Homo sapiens; identical to SEQ ID NO: 229876
  chr3:147105108-147105204
  hyper

SEQ ID NO: 417170 - DNA, 43 bp, Homo sapiens; identical to SEQ ID NO: 199130
  chr3:147106268-147106311
  hyper

SEQ ID NO: 417171 - DNA, 129 bp, Homo sapiens; identical to SEQ ID NO: 229878
  chr3:147107635-147107764
  hyper

SEQ ID NO: 417172 - DNA, 292 bp, Homo sapiens; identical to SEQ ID NO: 281590
  chr3:147112343-147112635
  hyper

SEQ ID NO: 417173 - DNA, 40 bp, Homo sapiens; identical to SEQ ID NO: 199132
  chr3:147112665-147112705
  hyper

SEQ ID NO: 417174 - DNA, 214 bp, Homo sapiens; identical to SEQ ID NO: 199133
  chr3:148709993-148710207
  hyper

SEQ ID NO: 417175 - DNA, 342 bp, Homo sapiens; identical to SEQ ID NO: 281594
  chr3:148803822-148804164
  hyper

SEQ ID NO: 417176 - DNA, 365 bp, Homo sapiens; identical to SEQ ID NO: 281595
  chr3:148804199-148804564
  hyper

SEQ ID NO: 417177 - DNA, 44 bp, Homo sapiens; identical to SEQ ID NO: 281597
  chr3:149687759-149687803
  hyper

SEQ ID NO: 417178 - DNA, 372 bp, Homo sapiens; identical to SEQ ID NO: 199135
  chr3:149689311-149689683
  hyper

SEQ ID NO: 417179 - DNA, 54 bp, Homo sapiens; identical to SEQ ID NO: 199136
  chr3:150126521-150126575
  hyper

SEQ ID NO: 417180 - DNA, 357 bp, Homo sapiens; identical to SEQ ID NO: 229893
  chr3:150264352-150264709
  hyper

SEQ ID NO: 417181 - DNA, 227 bp, Homo sapiens; identical to SEQ ID NO: 199137
  chr3:150320966-150321193
  hyper

SEQ ID NO: 417182 - DNA, 348 bp, Homo sapiens; identical to SEQ ID NO: 229894
  chr3:150421685-150422033
  hyper

SEQ ID NO: 417183 - DNA, 37 bp, Homo sapiens; identical to SEQ ID NO: 229897
  chr3:151556892-151556929
  hyper

SEQ ID NO: 417184 - DNA, 108 bp, Homo sapiens; identical to SEQ ID NO: 229898
  chr3:151986596-151986704
  hyper

SEQ ID NO: 417185 - DNA, 174 bp, Homo sapiens; identical to SEQ ID NO: 229899
  chr3:152016858-152017032
  hyper

SEQ ID NO: 417186 - DNA, 32 bp, Homo sapiens; identical to SEQ ID NO: 229902
  chr3:152880084-152880116
  hyper

SEQ ID NO: 417187 - DNA, 325 bp, Homo sapiens; identical to SEQ ID NO: 229904
  chr3:154042065-154042390
  hyper

SEQ ID NO: 417188 - DNA, 1286 bp, Homo sapiens; identical to SEQ ID NO: 229907
  chr3:155461744-155463030
  hyper

SEQ ID NO: 417189 - DNA, 90 bp, Homo sapiens; identical to SEQ ID NO: 229908
  chr3:155524159-155524249
  hyper

SEQ ID NO: 417190 - DNA, 352 bp, Homo sapiens; identical to SEQ ID NO: 229909
  chr3:155572031-155572383
  hyper

SEQ ID NO: 417191 - DNA, 41 bp, Homo sapiens; identical to SEQ ID NO: 199149
  chr3:155722292-155722333
  hyper

SEQ ID NO: 417192 - DNA, 65 bp, Homo sapiens; identical to SEQ ID NO: 229911
  chr3:156273035-156273100
  hyper

SEQ ID NO: 417193 - DNA, 34 bp, Homo sapiens; identical to SEQ ID NO: 229912
  chr3:156392398-156392432
  hyper

SEQ ID NO: 417194 - DNA, 167 bp, Homo sapiens; identical to SEQ ID NO: 199152
  chr3:156799361-156799528
  hyper

SEQ ID NO: 417195 - DNA, 244 bp, Homo sapiens; identical to SEQ ID NO: 229914
  chr3:156877883-156878127
  hyper

SEQ ID NO: 417196 - DNA, 213 bp, Homo sapiens; identical to SEQ ID NO: 229915
  chr3:157154537-157154750
  hyper

SEQ ID NO: 417197 - DNA, 64 bp, Homo sapiens; identical to SEQ ID NO: 199153
  chr3:157155188-157155252
  hyper

SEQ ID NO: 417198 - DNA, 211 bp, Homo sapiens; identical to SEQ ID NO: 281630
  chr3:157155490-157155701
  hyper

SEQ ID NO: 417199 - DNA, 204 bp, Homo sapiens; identical to SEQ ID NO: 281631
  chr3:157155778-157155982
  hyper

SEQ ID NO: 417200 - DNA, 288 bp, Homo sapiens; identical to SEQ ID NO: 229926
  chr3:158362204-158362492
  hyper

SEQ ID NO: 417201 - DNA, 225 bp, Homo sapiens; identical to SEQ ID NO: 281644
  chr3:158449684-158449909
  hyper

SEQ ID NO: 417202 - DNA, 209 bp, Homo sapiens; identical to SEQ ID NO: 281645
  chr3:158450199-158450408
  hyper

SEQ ID NO: 417203 - DNA, 160 bp, Homo sapiens; identical to SEQ ID NO: 229928
  chr3:158519500-158519660
  hyper

SEQ ID NO: 417204 - DNA, 414 bp, Homo sapiens; identical to SEQ ID NO: 281649
  chr3:159482434-159482848
  hyper

SEQ ID NO: 417205 - DNA, 364 bp, Homo sapiens; identical to SEQ ID NO: 281650
  chr3:159482906-159483270
  hyper

SEQ ID NO: 417206 - DNA, 211 bp, Homo sapiens; identical to SEQ ID NO: 222257
  chr3:159706814-159707025
  hyper

SEQ ID NO: 417207 - DNA, 104 bp, Homo sapiens; identical to SEQ ID NO: 199168
  chr3:159756932-159757036
  hyper

SEQ ID NO: 417208 - DNA, 83 bp, Homo sapiens; identical to SEQ ID NO: 229933
  chr3:160117326-160117409
  hyper

SEQ ID NO: 417209 - DNA, 35 bp, Homo sapiens; identical to SEQ ID NO: 199169
  chr3:160118170-160118205
  hyper

SEQ ID NO: 417210 - DNA, 69 bp, Homo sapiens; identical to SEQ ID NO: 199170
  chr3:160167183-160167252
  hyper

SEQ ID NO: 417211 - DNA, 1581 bp, Homo sapiens; identical to SEQ ID NO: 199171
  chr3:160472497-160474078
  hyper

SEQ ID NO: 417212 - DNA, 229 bp, Homo sapiens; identical to SEQ ID NO: 199175
  chr3:161090543-161090772
  hyper

SEQ ID NO: 417213 - DNA, 288 bp, Homo sapiens; identical to SEQ ID NO: 281662
  chr3:164911333-164911621
  hyper

SEQ ID NO: 417214 - DNA, 158 bp, Homo sapiens; identical to SEQ ID NO: 199176
  chr3:164914485-164914643
  hyper

SEQ ID NO: 417215 - DNA, 33 bp, Homo sapiens; identical to SEQ ID NO: 281665
  chr3:164914763-164914796
  hyper

SEQ ID NO: 417216 - DNA, 157 bp, Homo sapiens; identical to SEQ ID NO: 199177
  chr3:164924661-164924818
  hyper

SEQ ID NO: 417217 - DNA, 351 bp, Homo sapiens; identical to SEQ ID NO: 229946
  chr3:167453720-167454071
  hyper

SEQ ID NO: 417218 - DNA, 115 bp, Homo sapiens; identical to SEQ ID NO: 281670
  chr3:167966491-167966606
  hyper

SEQ ID NO: 417219 - DNA, 200 bp, Homo sapiens; identical to SEQ ID NO: 281671
  chr3:167967246-167967446
  hyper

SEQ ID NO: 417220 - DNA, 69 bp, Homo sapiens
  chr3:167967560-167967629
  hyper
agctgctgccgttccctccgcagacagacgcgccgcgccagcctcacgagccctgcaccaacttctgcc

SEQ ID NO: 417221 - DNA, 169 bp, Homo sapiens; identical to SEQ ID NO: 281674
  chr3:168863846-168864015
  hyper

SEQ ID NO: 417222 - DNA, 521 bp, Homo sapiens; identical to SEQ ID NO: 199181
  chr3:168864062-168864583
  hyper

SEQ ID NO: 417223 - DNA, 224 bp, Homo sapiens; identical to SEQ ID NO: 199182
  chr3:168864623-168864847
  hyper

SEQ ID NO: 417224 - DNA, 350 bp, Homo sapiens; identical to SEQ ID NO: 281677
  chr3:168865103-168865453
  hyper

SEQ ID NO: 417225 - DNA, 234 bp, Homo sapiens; identical to SEQ ID NO: 229951
  chr3:168867255-168867489
  hyper

SEQ ID NO: 417226 - DNA, 53 bp, Homo sapiens; identical to SEQ ID NO: 222260
  chr3:169380561-169380614
  hyper

SEQ ID NO: 417227 - DNA, 87 bp, Homo sapiens; identical to SEQ ID NO: 222261
  chr3:169380983-169381070
  hyper

SEQ ID NO: 417228 - DNA, 262 bp, Homo sapiens; identical to SEQ ID NO: 281682
  chr3:169381408-169381670
  hyper

SEQ ID NO: 417229 - DNA, 519 bp, Homo sapiens; identical to SEQ ID NO: 199184
  chr3:169386025-169386544
  hyper

SEQ ID NO: 417230 - DNA, 73 bp, Homo sapiens; identical to SEQ ID NO: 199185
  chr3:169386633-169386706
  hyper

SEQ ID NO: 417231 - DNA, 322 bp, Homo sapiens; identical to SEQ ID NO: 229957
  chr3:169386973-169387295
  hyper

SEQ ID NO: 417232 - DNA, 270 bp, Homo sapiens; identical to SEQ ID NO: 281688
  chr3:169530401-169530671
  hyper

SEQ ID NO: 417233 - DNA, 315 bp, Homo sapiens; identical to SEQ ID NO: 229961
  chr3:169684381-169684696
  hyper

SEQ ID NO: 417234 - DNA, 405 bp, Homo sapiens; identical to SEQ ID NO: 229962
  chr3:169684928-169685333
  hyper

SEQ ID NO: 417235 - DNA, 182 bp, Homo sapiens; identical to SEQ ID NO: 229963
  chr3:169755581-169755763
  hyper

SEQ ID NO: 417236 - DNA, 56 bp, Homo sapiens; identical to SEQ ID NO: 229964
  chr3:169899556-169899612
  hyper

SEQ ID NO: 417237 - DNA, 67 bp, Homo sapiens; identical to SEQ ID NO: 229965
  chr3:169940144-169940211
  hyper

SEQ ID NO: 417238 - DNA, 32 bp, Homo sapiens; identical to SEQ ID NO: 199189
  chr3:170073884-170073916
  hyper

SEQ ID NO: 417239 - DNA, 254 bp, Homo sapiens; identical to SEQ ID NO: 199190
  chr3:170074116-170074370
  hyper

SEQ ID NO: 417240 - DNA, 77 bp, Homo sapiens; identical to SEQ ID NO: 199191
  chr3:170075432-170075509
  hyper

SEQ ID NO: 417241 - DNA, 172 bp, Homo sapiens; identical to SEQ ID NO: 281697
  chr3:170136455-170136627
  hyper

SEQ ID NO: 417242 - DNA, 349 bp, Homo sapiens; identical to SEQ ID NO: 199194
  chr3:170746074-170746423
  hyper

SEQ ID NO: 417243 - DNA, 59 bp, Homo sapiens; identical to SEQ ID NO: 229974
  chr3:170878716-170878775
  hyper

SEQ ID NO: 417244 - DNA, 60 bp, Homo sapiens; identical to SEQ ID NO: 229975
  chr3:171176895-171176955
  hyper

SEQ ID NO: 417245 - DNA, 284 bp, Homo sapiens; identical to SEQ ID NO: 229976
  chr3:171178162-171178446
  hyper

SEQ ID NO: 417246 - DNA, 196 bp, Homo sapiens; identical to SEQ ID NO: 199198
  chr3:171757155-171757351
  hyper

SEQ ID NO: 417247 - DNA, 154 bp, Homo sapiens; identical to SEQ ID NO: 199199
  chr3:171758579-171758733
  hyper

SEQ ID NO: 417248 - DNA, 52 bp, Homo sapiens; identical to SEQ ID NO: 199200
  chr3:172165380-172165432
  hyper

SEQ ID NO: 417249 - DNA, 287 bp, Homo sapiens; identical to SEQ ID NO: 199201
  chr3:172240998-172241285
  hyper

SEQ ID NO: 417250 - DNA, 162 bp, Homo sapiens; identical to SEQ ID NO: 229982
  chr3:172313933-172314095
  hyper

SEQ ID NO: 417251 - DNA, 230 bp, Homo sapiens; identical to SEQ ID NO: 229983
  chr3:172428841-172429071
  hyper

SEQ ID NO: 417252 - DNA, 120 bp, Homo sapiens; identical to SEQ ID NO: 229984
  chr3:172468995-172469115
  hyper

SEQ ID NO: 417253 - DNA, 243 bp, Homo sapiens; identical to SEQ ID NO: 281714
  chr3:173113694-173113937
  hyper

SEQ ID NO: 417254 - DNA, 174 bp, Homo sapiens; identical to SEQ ID NO: 281715
  chr3:173114587-173114761
  hyper

SEQ ID NO: 417255 - DNA, 183 bp, Homo sapiens; identical to SEQ ID NO: 396572
  chr3:173115774-173115957
  hyper

SEQ ID NO: 417256 - DNA, 196 bp, Homo sapiens; identical to SEQ ID NO: 281717
  chr3:173303225-173303421
  hyper

SEQ ID NO: 417257 - DNA, 912 bp, Homo sapiens; identical to SEQ ID NO: 281718
  chr3:174158358-174159270
  hyper

SEQ ID NO: 417258 - DNA, 125 bp, Homo sapiens; identical to SEQ ID NO: 281719
  chr3:174159306-174159431
  hyper

SEQ ID NO: 417259 - DNA, 159 bp, Homo sapiens; identical to SEQ ID NO: 199208
  chr3:178789082-178789241
  hyper

SEQ ID NO: 417260 - DNA, 321 bp, Homo sapiens; identical to SEQ ID NO: 229992
  chr3:178789520-178789841
  hyper

SEQ ID NO: 417261 - DNA, 157 bp, Homo sapiens; identical to SEQ ID NO: 229993
  chr3:178865536-178865693
  hyper

SEQ ID NO: 417262 - DNA, 176 bp, Homo sapiens; identical to SEQ ID NO: 199209
  chr3:178866990-178867166
  hyper

SEQ ID NO: 417263 - DNA, 40 bp, Homo sapiens; identical to SEQ ID NO: 199210
  chr3:179064154-179064194
  hyper

SEQ ID NO: 417264 - DNA, 444 bp, Homo sapiens; identical to SEQ ID NO: 229995
  chr3:179065418-179065862
  hyper

SEQ ID NO: 417265 - DNA, 116 bp, Homo sapiens; identical to SEQ ID NO: 229998
  chr3:179280318-179280434
  hyper

SEQ ID NO: 417266 - DNA, 127 bp, Homo sapiens; identical to SEQ ID NO: 229999
  chr3:179281448-179281575
  hyper

SEQ ID NO: 417267 - DNA, 253 bp, Homo sapiens; identical to SEQ ID NO: 230000
  chr3:179322630-179322883
  hyper

SEQ ID NO: 417268 - DNA, 79 bp, Homo sapiens; identical to SEQ ID NO: 230001
  chr3:179367505-179367584
  hyper

SEQ ID NO: 417269 - DNA, 35 bp, Homo sapiens; identical to SEQ ID NO: 230002
  chr3:179370451-179370486
  hyper

SEQ ID NO: 417270 - DNA, 53 bp, Homo sapiens; identical to SEQ ID NO: 222274
  chr3:180396751-180396804
  hyper

SEQ ID NO: 417271 - DNA, 190 bp, Homo sapiens; identical to SEQ ID NO: 230008
  chr3:180630143-180630333
  hyper

SEQ ID NO: 417272 - DNA, 39 bp, Homo sapiens; identical to SEQ ID NO: 230009
  chr3:180630766-180630805
  hyper

SEQ ID NO: 417273 - DNA, 236 bp, Homo sapiens; identical to SEQ ID NO: 230011
  chr3:181418234-181418470
  hyper

SEQ ID NO: 417274 - DNA, 95 bp, Homo sapiens; identical to SEQ ID NO: 230012
  chr3:181418702-181418797
  hyper

SEQ ID NO: 417275 - DNA, 64 bp, Homo sapiens; identical to SEQ ID NO: 199216
  chr3:181428196-181428260
  hyper

SEQ ID NO: 417276 - DNA, 320 bp, Homo sapiens
  chr3:181429281-181429601
  hyper
cgagttggacagccgccctgagccacccactgtgccctgccccacccccgcaccttagctgcttcccgcgtcccatcctcatttaagtaccctgcaccaaaaagtaaatcaatattaagtttaaagaaaaaaaaacccacgtagtcttagtgctgtttacccacttccttcgaaaaggcgtgtggtgtgacctgttgctgcgagaggggatacaaaggtttctcagtggctggcaggctggctctgggagcctcctccccctcctcgcctgccccctcctcccccggcctcccccgcgcggccggcggcgcgggaggccc

SEQ ID NO: 417277 - DNA, 209 bp, Homo sapiens; identical to SEQ ID NO: 199222
  chr3:181433437-181433646
  hyper

SEQ ID NO: 417278 - DNA, 331 bp, Homo sapiens; identical to SEQ ID NO: 230027
  chr3:182399999-182400330
  hyper

SEQ ID NO: 417279 - DNA, 292 bp, Homo sapiens; identical to SEQ ID NO: 199224
  chr3:182510867-182511159
  hyper

SEQ ID NO: 417280 - DNA, 170 bp, Homo sapiens; identical to SEQ ID NO: 199225
  chr3:182511623-182511793
  hyper

SEQ ID NO: 417281 - DNA, 36 bp, Homo sapiens; identical to SEQ ID NO: 230029
  chr3:182512112-182512148
  hyper

SEQ ID NO: 417282 - DNA, 192 bp, Homo sapiens; identical to SEQ ID NO: 199226
  chr3:182697832-182698024
  hyper

SEQ ID NO: 417283 - DNA, 145 bp, Homo sapiens; identical to SEQ ID NO: 199227
  chr3:182698591-182698736
  hyper

SEQ ID NO: 417284 - DNA, 86 bp, Homo sapiens; identical to SEQ ID NO: 199231
  chr3:182972458-182972544
  hyper

SEQ ID NO: 417285 - DNA, 53 bp, Homo sapiens
  chr3:183146344-183146397
  hyper
gctccacccccggagtggagctccggtccttactcggaaccgtggggcgggga

SEQ ID NO: 417286 - DNA, 213 bp, Homo sapiens; identical to SEQ ID NO: 281767
  chr3:183146435-183146648
  hyper

SEQ ID NO: 417287 - DNA, 153 bp, Homo sapiens; identical to SEQ ID NO: 281768
  chr3:183146677-183146830
  hyper

SEQ ID NO: 417288 - DNA, 108 bp, Homo sapiens; identical to SEQ ID NO: 230040
  chr3:183353358-183353466
  hyper

SEQ ID NO: 417289 - DNA, 79 bp, Homo sapiens; identical to SEQ ID NO: 230041
  chr3:183415419-183415498
  hyper

SEQ ID NO: 417290 - DNA, 321 bp, Homo sapiens; identical to SEQ ID NO: 281774
  chr3:183602724-183603045
  hyper

SEQ ID NO: 417291 - DNA, 116 bp, Homo sapiens; identical to SEQ ID NO: 230044
  chr3:183736070-183736186
  hyper

SEQ ID NO: 417292 - DNA, 86 bp, Homo sapiens; identical to SEQ ID NO: 199238
  chr3:183851915-183852001
  hyper

SEQ ID NO: 417293 - DNA, 45 bp, Homo sapiens; identical to SEQ ID NO: 230045
  chr3:183852315-183852360
  hyper

SEQ ID NO: 417294 - DNA, 52 bp, Homo sapiens; identical to SEQ ID NO: 230046
  chr3:183892563-183892615
  hyper

SEQ ID NO: 417295 - DNA, 123 bp, Homo sapiens; identical to SEQ ID NO: 230047
  chr3:183904302-183904425
  hyper

SEQ ID NO: 417296 - DNA, 117 bp, Homo sapiens; identical to SEQ ID NO: 230048
  chr3:183967307-183967424
  hyper

SEQ ID NO: 417297 - DNA, 135 bp, Homo sapiens; identical to SEQ ID NO: 230049
  chr3:183979774-183979909
  hyper

SEQ ID NO: 417298 - DNA, 72 bp, Homo sapiens; identical to SEQ ID NO: 199239
  chr3:184053512-184053584
  hyper

SEQ ID NO: 417299 - DNA, 249 bp, Homo sapiens; identical to SEQ ID NO: 230052
  chr3:184080988-184081237
  hyper

SEQ ID NO: 417300 - DNA, 224 bp, Homo sapiens; identical to SEQ ID NO: 281784
  chr3:184097688-184097912
  hyper

SEQ ID NO: 417301 - DNA, 280 bp, Homo sapiens; identical to SEQ ID NO: 222284
  chr3:184098372-184098652
  hyper

SEQ ID NO: 417302 - DNA, 86 bp, Homo sapiens; identical to SEQ ID NO: 281786
  chr3:184099331-184099417
  hyper

SEQ ID NO: 417303 - DNA, 34 bp, Homo sapiens; identical to SEQ ID NO: 281787
  chr3:184099446-184099480
  hyper

SEQ ID NO: 417304 - DNA, 78 bp, Homo sapiens; identical to SEQ ID NO: 396601
  chr3:184279816-184279894
  hyper

SEQ ID NO: 417305 - DNA, 242 bp, Homo sapiens; identical to SEQ ID NO: 199242
  chr3:184279929-184280171
  hyper

SEQ ID NO: 417306 - DNA, 68 bp, Homo sapiens; identical to SEQ ID NO: 281790
  chr3:184280222-184280290
  hyper

SEQ ID NO: 417307 - DNA, 69 bp, Homo sapiens; identical to SEQ ID NO: 230057
  chr3:184280320-184280389
  hyper

SEQ ID NO: 417308 - DNA, 178 bp, Homo sapiens; identical to SEQ ID NO: 281793
  chr3:184319612-184319790
  hyper

SEQ ID NO: 417309 - DNA, 135 bp, Homo sapiens; identical to SEQ ID NO: 281794
  chr3:184320096-184320231
  hyper

SEQ ID NO: 417310 - DNA, 155 bp, Homo sapiens; identical to SEQ ID NO: 230062
  chr3:184429620-184429775
  hyper

SEQ ID NO: 417311 - DNA, 63 bp, Homo sapiens; identical to SEQ ID NO: 230063
  chr3:184430244-184430307
  hyper

SEQ ID NO: 417312 - DNA, 229 bp, Homo sapiens; identical to SEQ ID NO: 230064
  chr3:184530229-184530458
  hyper

SEQ ID NO: 417313 - DNA, 165 bp, Homo sapiens; identical to SEQ ID NO: 230066
  chr3:185303809-185303974
  hyper

SEQ ID NO: 417314 - DNA, 372 bp, Homo sapiens; identical to SEQ ID NO: 230067
  chr3:185541060-185541432
  hyper

SEQ ID NO: 417315 - DNA, 137 bp, Homo sapiens; identical to SEQ ID NO: 230068
  chr3:185541795-185541932
  hyper

SEQ ID NO: 417316 - DNA, 236 bp, Homo sapiens; identical to SEQ ID NO: 199248
  chr3:185542334-185542570
  hyper

SEQ ID NO: 417317 - DNA, 360 bp, Homo sapiens; identical to SEQ ID NO: 281804
  chr3:185543197-185543557
  hyper

SEQ ID NO: 417318 - DNA, 239 bp, Homo sapiens; identical to SEQ ID NO: 199250
  chr3:185543684-185543923
  hyper

SEQ ID NO: 417319 - DNA, 713 bp, Homo sapiens; identical to SEQ ID NO: 199251
  chr3:185825460-185826173
  hyper

SEQ ID NO: 417320 - DNA, 1075 bp, Homo sapiens; identical to SEQ ID NO: 199252
  chr3:185826425-185827500
  hyper

SEQ ID NO: 417321 - DNA, 164 bp, Homo sapiens; identical to SEQ ID NO: 230079
  chr3:186285249-186285413
  hyper

SEQ ID NO: 417322 - DNA, 81 bp, Homo sapiens; identical to SEQ ID NO: 230080
  chr3:186287892-186287973
  hyper

SEQ ID NO: 417323 - DNA, 48 bp, Homo sapiens; identical to SEQ ID NO: 230081
  chr3:186288738-186288786
  hyper

SEQ ID NO: 417324 - DNA, 130 bp, Homo sapiens; identical to SEQ ID NO: 230082
  chr3:186334979-186335109
  hyper

SEQ ID NO: 417325 - DNA, 138 bp, Homo sapiens; identical to SEQ ID NO: 230083
  chr3:186500725-186500863
  hyper

SEQ ID NO: 417326 - DNA, 40 bp, Homo sapiens; identical to SEQ ID NO: 230084
  chr3:186524286-186524326
  hyper

SEQ ID NO: 417327 - DNA, 47 bp, Homo sapiens; identical to SEQ ID NO: 199254
  chr3:186544979-186545026
  hyper

SEQ ID NO: 417328 - DNA, 442 bp, Homo sapiens; identical to SEQ ID NO: 281818
  chr3:186649397-186649839
  hyper

SEQ ID NO: 417329 - DNA, 56 bp, Homo sapiens; identical to SEQ ID NO: 230092
  chr3:187461961-187462017
  hyper

SEQ ID NO: 417330 - DNA, 367 bp, Homo sapiens; identical to SEQ ID NO: 199260
  chr3:187462445-187462812
  hyper

SEQ ID NO: 417331 - DNA, 227 bp, Homo sapiens; identical to SEQ ID NO: 281825
  chr3:187463100-187463327
  hyper

SEQ ID NO: 417332 - DNA, 228 bp, Homo sapiens; identical to SEQ ID NO: 230095
  chr3:187871096-187871324
  hyper

SEQ ID NO: 417333 - DNA, 91 bp, Homo sapiens; identical to SEQ ID NO: 230096
  chr3:187871524-187871615
  hyper

SEQ ID NO: 417334 - DNA, 358 bp, Homo sapiens; identical to SEQ ID NO: 281828
  chr3:189838066-189838424
  hyper

SEQ ID NO: 417335 - DNA, 60 bp, Homo sapiens; identical to SEQ ID NO: 281829
  chr3:189838441-189838501
  hyper

SEQ ID NO: 417336 - DNA, 61 bp, Homo sapiens; identical to SEQ ID NO: 230098
  chr3:190164468-190164529
  hyper

SEQ ID NO: 417337 - DNA, 31 bp, Homo sapiens; identical to SEQ ID NO: 230100
  chr3:190231801-190231832
  hyper

SEQ ID NO: 417338 - DNA, 37 bp, Homo sapiens; identical to SEQ ID NO: 230101
  chr3:190232236-190232273
  hyper

SEQ ID NO: 417339 - DNA, 540 bp, Homo sapiens; identical to SEQ ID NO: 281835
  chr3:191046935-191047475
  hyper

SEQ ID NO: 417340 - DNA, 108 bp, Homo sapiens; identical to SEQ ID NO: 281837
  chr3:192445501-192445609
  hyper

SEQ ID NO: 417341 - DNA, 196 bp, Homo sapiens; identical to SEQ ID NO: 230112
  chr3:193310837-193311033
  hyper

SEQ ID NO: 417342 - DNA, 174 bp, Homo sapiens; identical to SEQ ID NO: 230113
  chr3:193506053-193506227
  hyper

SEQ ID NO: 417343 - DNA, 648 bp, Homo sapiens; identical to SEQ ID NO: 281842
  chr3:193721033-193721681
  hyper

SEQ ID NO: 417344 - DNA, 635 bp, Homo sapiens; identical to SEQ ID NO: 281845
  chr3:193853736-193854371
  hyper

SEQ ID NO: 417345 - DNA, 121 bp, Homo sapiens; identical to SEQ ID NO: 222312
  chr3:193859656-193859777
  hyper

SEQ ID NO: 417346 - DNA, 151 bp, Homo sapiens; identical to SEQ ID NO: 281850
  chr3:193987504-193987655
  hyper

SEQ ID NO: 417347 - DNA, 40 bp, Homo sapiens; identical to SEQ ID NO: 230120
  chr3:194207834-194207874
  hyper

SEQ ID NO: 417348 - DNA, 115 bp, Homo sapiens; identical to SEQ ID NO: 199273
  chr3:194278585-194278700
  hyper

SEQ ID NO: 417349 - DNA, 571 bp, Homo sapiens; identical to SEQ ID NO: 222316
  chr3:194353932-194354503
  hyper

SEQ ID NO: 417350 - DNA, 246 bp, Homo sapiens; identical to SEQ ID NO: 230121
  chr3:194393108-194393354
  hyper

SEQ ID NO: 417351 - DNA, 117 bp, Homo sapiens; identical to SEQ ID NO: 281855
  chr3:194406436-194406553
  hyper

SEQ ID NO: 417352 - DNA, 477 bp, Homo sapiens; identical to SEQ ID NO: 40105
  chr3:194406589-194407066
  hyper

SEQ ID NO: 417353 - DNA, 77 bp, Homo sapiens; identical to SEQ ID NO: 281860
  chr3:194827128-194827205
  hyper

SEQ ID NO: 417354 - DNA, 139 bp, Homo sapiens; identical to SEQ ID NO: 281861
  chr3:194827241-194827380
  hyper

SEQ ID NO: 417355 - DNA, 258 bp, Homo sapiens; identical to SEQ ID NO: 222317
  chr3:194980253-194980511
  hyper

SEQ ID NO: 417356 - DNA, 194 bp, Homo sapiens; identical to SEQ ID NO: 230125
  chr3:194992081-194992275
  hyper

SEQ ID NO: 417357 - DNA, 287 bp, Homo sapiens; identical to SEQ ID NO: 230126
  chr3:195163846-195164133
  hyper

SEQ ID NO: 417358 - DNA, 141 bp, Homo sapiens; identical to SEQ ID NO: 281866
  chr3:195610106-195610247
  hyper

SEQ ID NO: 417359 - DNA, 33 bp, Homo sapiens; identical to SEQ ID NO: 199281
  chr3:195636198-195636231
  hyper

SEQ ID NO: 417360 - DNA, 505 bp, Homo sapiens; identical to SEQ ID NO: 281869
  chr3:195808865-195809370
  hyper

SEQ ID NO: 417361 - DNA, 158 bp, Homo sapiens; identical to SEQ ID NO: 230130
  chr3:196014679-196014837
  hyper

SEQ ID NO: 417362 - DNA, 175 bp, Homo sapiens; identical to SEQ ID NO: 230131
  chr3:196158444-196158619
  hyper

SEQ ID NO: 417363 - DNA, 42 bp, Homo sapiens; identical to SEQ ID NO: 230132
  chr3:196230643-196230685
  hyper

SEQ ID NO: 417364 - DNA, 46 bp, Homo sapiens; identical to SEQ ID NO: 230134
  chr3:196466463-196466509
  hyper

SEQ ID NO: 417365 - DNA, 223 bp, Homo sapiens; identical to SEQ ID NO: 222323
  chr3:196695305-196695528
  hyper

SEQ ID NO: 417366 - DNA, 352 bp, Homo sapiens; identical to SEQ ID NO: 281880
  chr3:197183346-197183698
  hyper

SEQ ID NO: 417367 - DNA, 96 bp, Homo sapiens; identical to SEQ ID NO: 199284
  chr3:197222652-197222748
  hyper

SEQ ID NO: 417368 - DNA, 244 bp, Homo sapiens; identical to SEQ ID NO: 281882
  chr3:197237111-197237355
  hyper

SEQ ID NO: 417369 - DNA, 156 bp, Homo sapiens; identical to SEQ ID NO: 281883
  chr3:197281702-197281858
  hyper

SEQ ID NO: 417370 - DNA, 238 bp, Homo sapiens; identical to SEQ ID NO: 109572
  chr3:197281920-197282158
  hyper

SEQ ID NO: 417371 - DNA, 246 bp, Homo sapiens; identical to SEQ ID NO: 230140
  chr3:197476866-197477112
  hyper

SEQ ID NO: 417372 - DNA, 190 bp, Homo sapiens; identical to SEQ ID NO: 230141
  chr3:197517983-197518173
  hyper

SEQ ID NO: 417373 - DNA, 40 bp, Homo sapiens; identical to SEQ ID NO: 109581
  chr3:197808380-197808420
  hyper

SEQ ID NO: 417374 - DNA, 31 bp, Homo sapiens; identical to SEQ ID NO: 230146
  chr4:379916-379947
  hyper

SEQ ID NO: 417375 - DNA, 198 bp, Homo sapiens; identical to SEQ ID NO: 281892
  chr4:380158-380356
  hyper

SEQ ID NO: 417376 - DNA, 234 bp, Homo sapiens; identical to SEQ ID NO: 230148
  chr4:492842-493076
  hyper

SEQ ID NO: 417377 - DNA, 226 bp, Homo sapiens; identical to SEQ ID NO: 281898
  chr4:667540-667766
  hyper

SEQ ID NO: 417378 - DNA, 238 bp, Homo sapiens; identical to SEQ ID NO: 281899
  chr4:779894-780132
  hyper

SEQ ID NO: 417379 - DNA, 344 bp, Homo sapiens; identical to SEQ ID NO: 230155
  chr4:785955-786299
  hyper

SEQ ID NO: 417380 - DNA, 143 bp, Homo sapiens; identical to SEQ ID NO: 230157
  chr4:926347-926490
  hyper

SEQ ID NO: 417381 - DNA, 309 bp, Homo sapiens; identical to SEQ ID NO: 222331
  chr4:966933-967242
  hyper

SEQ ID NO: 417382 - DNA, 396 bp, Homo sapiens; identical to SEQ ID NO: 199291
  chr4:1004393-1004789
  hyper

SEQ ID NO: 417383 - DNA, 318 bp, Homo sapiens; identical to SEQ ID NO: 281906
  chr4:1049472-1049790
  hyper

SEQ ID NO: 417384 - DNA, 140 bp, Homo sapiens; identical to SEQ ID NO: 199293
  chr4:1243421-1243561
  hyper

SEQ ID NO: 417385 - DNA, 358 bp, Homo sapiens; identical to SEQ ID NO: 383987
  chr4:1397889-1398247
  hyper

SEQ ID NO: 417386 - DNA, 298 bp, Homo sapiens; identical to SEQ ID NO: 281914
  chr4:1398378-1398676
  hyper

SEQ ID NO: 417387 - DNA, 246 bp, Homo sapiens; identical to SEQ ID NO: 281915
  chr4:1399254-1399500
  hyper

SEQ ID NO: 417388 - DNA, 69 bp, Homo sapiens; identical to SEQ ID NO: 281916
  chr4:1399564-1399633
  hyper

SEQ ID NO: 417389 - DNA, 58 bp, Homo sapiens; identical to SEQ ID NO: 281917
  chr4:1399665-1399723
  hyper

SEQ ID NO: 417390 - DNA, 213 bp, Homo sapiens
  chr4:1399768-1399981
  hyper
cggcggctcagctccggcggctccgactcccccggcgccggcgagggcgcggcgctccagctcctccgcgcgtggcgggcgtcccgaggcggcgggtgcaggggcgcatggggccgaagcgcaaggggcgcacgcagcgggagccactgggcccagcagcacgcaacgacgcctcctgctgttgaacttgttggggtccaggatgtccagtac

SEQ ID NO: 417391 - DNA, 36 bp, Homo sapiens; identical to SEQ ID NO: 281920
  chr4:1402412-1402448
  hyper

SEQ ID NO: 417392 - DNA, 124 bp, Homo sapiens; identical to SEQ ID NO: 281921
  chr4:1404605-1404729
  hyper

SEQ ID NO: 417393 - DNA, 408 bp, Homo sapiens; identical to SEQ ID NO: 281922
  chr4:1407532-1407940
  hyper

SEQ ID NO: 417394 - DNA, 201 bp, Homo sapiens; identical to SEQ ID NO: 281923
  chr4:1408542-1408743
  hyper

SEQ ID NO: 417395 - DNA, 54 bp, Homo sapiens; identical to SEQ ID NO: 230172
  chr4:1714965-1715019
  hyper

SEQ ID NO: 417396 - DNA, 1331 bp, Homo sapiens
  chr4:1794972-1796303
  hyper
cgcggaccgtcccccactggctgcggcgcgcggggcagcccaggctcagtgcgcggtggcggcggcgtcgcgggcagctggcgccgcgcggtcctgctctgccggtcgcacggacgcaccggcgggccgccggccggagggacggggcgggagctgggcccgcggacagcgagccggagcgggagccgcgcgtagcgagccgggctccggcgctcgccaggtccgtgcttggggccgggcaggctcgcggaggggtccaacggtgctcgcggaggggtcggggcgcggctgtcgcggaaccacagaggtccctgcagcgggccgggccggggcgcgggcttcccgctccggaaagtttgccgccgccgccgccctgggagggctttgcagcagccagggagggaagggggaggagggagggaccgcggcggggaggaggcggccggcgccaggcggcccgggagccctgggcggcggcggcggcgggcggggcggctgggggtcggaggggtcgggacgcaggagccggccaccgccgctttcgtccctgtccgcccctctaacgagctgccttcctcctcctgtagtctcccgagcggcgcccgcctcccgccggtgcccgcgccgggccgtggggggcagcatgcccgcgcgcgctgcctgaggacgccgcggcccccgcccccgccatgggcgcccctgcctgcgccctcgcgctctgcgtggccgtggccatcgtggccggcgcctcctcggagtccttggggacggagcagcgcgtcgtggggcgagcggcaggtaagaagggacccactaggcacgggagaggccggcccgtgcgggcagaggcgttggggacgggaaccggccccgggtcggaggggccgccgggtgtgagtgacgccccggggttagagcccggattccgctgcctccttgccggagagcgcggccagagctagcgcggcgacttgtggtgcgcccggagccgcagctaccctccaagtgcgaggccaccacggggagccaggctgggggttggcgtccgcagccccgatcccctgcgactccctagccctggcctgtcgggagggcgcggggggccccatttccacgattcccgctgttgttattcgggttctgcgcagacggaaagttcccattgttggcgtccccctcccccgggccccagtttgtggccagcttcggccaaggcgagagaccggacttctaagggtgggtgtgcgcgtcagcgaagcccggcccctgcccgcccgaagaggcagcagcctccagcgtccccgctgccgaccctgcccctgcctgggggc

SEQ ID NO: 417397 - DNA, 508 bp, Homo sapiens; identical to SEQ ID NO: 281927
  chr4:1828221-1828729
  hyper

SEQ ID NO: 417398 - DNA, 42 bp, Homo sapiens; identical to SEQ ID NO: 230176
  chr4:2010687-2010729
  hyper

SEQ ID NO: 417399 - DNA, 47 bp, Homo sapiens; identical to SEQ ID NO: 230177
  chr4:2011067-2011114
  hyper

SEQ ID NO: 417400 - DNA, 66 bp, Homo sapiens
  chr4:2043016-2043082
  hyper
gcacttgccgggcgcccccgggggccactggctgcacggcgctctttaaggccaacagccctgagt

SEQ ID NO: 417401 - DNA, 230 bp, Homo sapiens; identical to SEQ ID NO: 281931
  chr4:2043187-2043417
  hyper

SEQ ID NO: 417402 - DNA, 982 bp, Homo sapiens; identical to SEQ ID NO: 281932
  chr4:2043447-2044429
  hyper

SEQ ID NO: 417403 - DNA, 84 bp, Homo sapiens; identical to SEQ ID NO: 199301
  chr4:2418904-2418988
  hyper

SEQ ID NO: 417404 - DNA, 871 bp, Homo sapiens; identical to SEQ ID NO: 281935
  chr4:2419032-2419903
  hyper

SEQ ID NO: 417405 - DNA, 68 bp, Homo sapiens; identical to SEQ ID NO: 230182
  chr4:2421165-2421233
  hyper

SEQ ID NO: 417406 - DNA, 90 bp, Homo sapiens; identical to SEQ ID NO: 230183
  chr4:2470686-2470776
  hyper

SEQ ID NO: 417407 - DNA, 330 bp, Homo sapiens; identical to SEQ ID NO: 230185
  chr4:2795141-2795471
  hyper

SEQ ID NO: 417408 - DNA, 230 bp, Homo sapiens; identical to SEQ ID NO: 230186
  chr4:2965177-2965407
  hyper

SEQ ID NO: 417409 - DNA, 136 bp, Homo sapiens; identical to SEQ ID NO: 199303
  chr4:2965827-2965963
  hyper

SEQ ID NO: 417410 - DNA, 168 bp, Homo sapiens; identical to SEQ ID NO: 230188
  chr4:3076404-3076572
  hyper

SEQ ID NO: 417411 - DNA, 154 bp, Homo sapiens; identical to SEQ ID NO: 199304
  chr4:3445267-3445421
  hyper

SEQ ID NO: 417412 - DNA, 206 bp, Homo sapiens; identical to SEQ ID NO: 230191
  chr4:3464873-3465079
  hyper

SEQ ID NO: 417413 - DNA, 117 bp, Homo sapiens; identical to SEQ ID NO: 281946
  chr4:3873848-3873965
  hyper

SEQ ID NO: 417414 - DNA, 47 bp, Homo sapiens; identical to SEQ ID NO: 109694
  chr4:3873974-3874021
  hyper

SEQ ID NO: 417415 - DNA, 74 bp, Homo sapiens; identical to SEQ ID NO: 199305
  chr4:4250037-4250111
  hyper

SEQ ID NO: 417416 - DNA, 161 bp, Homo sapiens; identical to SEQ ID NO: 199306
  chr4:4389011-4389172
  hyper

SEQ ID NO: 417417 - DNA, 467 bp, Homo sapiens; identical to SEQ ID NO: 281951
  chr4:4389297-4389764
  hyper

SEQ ID NO: 417418 - DNA, 139 bp, Homo sapiens; identical to SEQ ID NO: 281952
  chr4:4389794-4389933
  hyper

SEQ ID NO: 417419 - DNA, 239 bp, Homo sapiens; identical to SEQ ID NO: 230202
  chr4:4543750-4543989
  hyper

SEQ ID NO: 417420 - DNA, 198 bp, Homo sapiens; identical to SEQ ID NO: 199308
  chr4:4856359-4856557
  hyper

SEQ ID NO: 417421 - DNA, 769 bp, Homo sapiens; identical to SEQ ID NO: 199309
  chr4:4856593-4857362
  hyper

SEQ ID NO: 417422 - DNA, 153 bp, Homo sapiens; identical to SEQ ID NO: 199310
  chr4:4857407-4857560
  hyper

SEQ ID NO: 417423 - DNA, 236 bp, Homo sapiens; identical to SEQ ID NO: 281958
  chr4:4857871-4858107
  hyper

SEQ ID NO: 417424 - DNA, 564 bp, Homo sapiens; identical to SEQ ID NO: 281959
  chr4:4858130-4858694
  hyper

SEQ ID NO: 417425 - DNA, 39 bp, Homo sapiens; identical to SEQ ID NO: 281960
  chr4:4858867-4858906
  hyper

SEQ ID NO: 417426 - DNA, 221 bp, Homo sapiens; identical to SEQ ID NO: 281961
  chr4:4859825-4860046
  hyper

SEQ ID NO: 417427 - DNA, 61 bp, Homo sapiens; identical to SEQ ID NO: 281962
  chr4:4860075-4860136
  hyper

SEQ ID NO: 417428 - DNA, 206 bp, Homo sapiens; identical to SEQ ID NO: 281963
  chr4:4861136-4861342
  hyper

SEQ ID NO: 417429 - DNA, 212 bp, Homo sapiens; identical to SEQ ID NO: 281964
  chr4:4861568-4861780
  hyper

SEQ ID NO: 417430 - DNA, 109 bp, Homo sapiens; identical to SEQ ID NO: 281965
  chr4:4867482-4867591
  hyper

SEQ ID NO: 417431 - DNA, 138 bp, Homo sapiens; identical to SEQ ID NO: 281966
  chr4:4867886-4868024
  hyper

SEQ ID NO: 417432 - DNA, 151 bp, Homo sapiens
  chr4:4868122-4868273
  hyper
ctctggcaagaaacatgggatctaccaggcggagaggtcggccaccttccgcgctgggaggtagtgatggagcagtctgcactcacagcctactgtgtgccgggagttcccgctcacgctgactcccaacacacctaggagatttttatag

SEQ ID NO: 417433 - DNA, 71 bp, Homo sapiens; identical to SEQ ID NO: 199320
  chr4:4872706-4872777
  hyper

SEQ ID NO: 417434 - DNA, 230 bp, Homo sapiens; identical to SEQ ID NO: 199321
  chr4:4872909-4873139
  hyper

SEQ ID NO: 417435 - DNA, 143 bp, Homo sapiens; identical to SEQ ID NO: 230212
  chr4:4874973-4875116
  hyper

SEQ ID NO: 417436 - DNA, 76 bp, Homo sapiens; identical to SEQ ID NO: 199328
  chr4:5891819-5891895
  hyper

SEQ ID NO: 417437 - DNA, 204 bp, Homo sapiens; identical to SEQ ID NO: 281982
  chr4:5892316-5892520
  hyper

SEQ ID NO: 417438 - DNA, 68 bp, Homo sapiens; identical to SEQ ID NO: 281983
  chr4:5893913-5893981
  hyper

SEQ ID NO: 417439 - DNA, 34 bp, Homo sapiens; identical to SEQ ID NO: 281984
  chr4:5894599-5894633
  hyper

SEQ ID NO: 417440 - DNA, 508 bp, Homo sapiens; identical to SEQ ID NO: 281991
  chr4:6565256-6565764
  hyper

SEQ ID NO: 417441 - DNA, 426 bp, Homo sapiens; identical to SEQ ID NO: 230229
  chr4:6675573-6675999
  hyper

SEQ ID NO: 417442 - DNA, 340 bp, Homo sapiens; identical to SEQ ID NO: 230230
  chr4:6894039-6894379
  hyper

SEQ ID NO: 417443 - DNA, 223 bp, Homo sapiens; identical to SEQ ID NO: 199332
  chr4:7069843-7070066
  hyper

SEQ ID NO: 417444 - DNA, 155 bp, Homo sapiens; identical to SEQ ID NO: 230232
  chr4:7070680-7070835
  hyper

SEQ ID NO: 417445 - DNA, 42 bp, Homo sapiens; identical to SEQ ID NO: 199340
  chr4:8594310-8594352
  hyper

SEQ ID NO: 417446 - DNA, 83 bp, Homo sapiens; identical to SEQ ID NO: 199342
  chr4:8863155-8863238
  hyper

SEQ ID NO: 417447 - DNA, 153 bp, Homo sapiens; identical to SEQ ID NO: 282009
  chr4:8874787-8874940
  hyper

SEQ ID NO: 417448 - DNA, 92 bp, Homo sapiens; identical to SEQ ID NO: 199343
  chr4:8894036-8894128
  hyper

SEQ ID NO: 417449 - DNA, 715 bp, Homo sapiens; identical to SEQ ID NO: 230253
  chr4:9154789-9155504
  hyper

SEQ ID NO: 417450 - DNA, 105 bp, Homo sapiens; identical to SEQ ID NO: 199345
  chr4:9534314-9534419
  hyper

SEQ ID NO: 417451 - DNA, 209 bp, Homo sapiens; identical to SEQ ID NO: 199346
  chr4:9684933-9685142
  hyper

SEQ ID NO: 417452 - DNA, 58 bp, Homo sapiens; identical to SEQ ID NO: 199347
  chr4:10089890-10089948
  hyper

SEQ ID NO: 417453 - DNA, 93 bp, Homo sapiens; identical to SEQ ID NO: 230261
  chr4:11429925-11430018
  hyper

SEQ ID NO: 417454 - DNA, 320 bp, Homo sapiens; identical to SEQ ID NO: 199352
  chr4:11430339-11430659
  hyper

SEQ ID NO: 417455 - DNA, 569 bp, Homo sapiens; identical to SEQ ID NO: 199353
  chr4:11430707-11431276
  hyper

SEQ ID NO: 417456 - DNA, 223 bp, Homo sapiens; identical to SEQ ID NO: 230263
  chr4:13486089-13486312
  hyper

SEQ ID NO: 417457 - DNA, 84 bp, Homo sapiens; identical to SEQ ID NO: 230265
  chr4:13529795-13529879
  hyper

SEQ ID NO: 417458 - DNA, 260 bp, Homo sapiens; identical to SEQ ID NO: 230266
  chr4:13536102-13536362
  hyper

SEQ ID NO: 417459 - DNA, 147 bp, Homo sapiens; identical to SEQ ID NO: 230267
  chr4:13538786-13538933
  hyper

SEQ ID NO: 417460 - DNA, 98 bp, Homo sapiens; identical to SEQ ID NO: 282028
  chr4:13545288-13545386
  hyper

SEQ ID NO: 417461 - DNA, 44 bp, Homo sapiens; identical to SEQ ID NO: 199354
  chr4:13550560-13550604
  hyper

SEQ ID NO: 417462 - DNA, 69 bp, Homo sapiens; identical to SEQ ID NO: 230273
  chr4:13629534-13629603
  hyper

SEQ ID NO: 417463 - DNA, 33 bp, Homo sapiens; identical to SEQ ID NO: 199355
  chr4:13655883-13655916
  hyper

SEQ ID NO: 417464 - DNA, 122 bp, Homo sapiens; identical to SEQ ID NO: 230275
  chr4:15006620-15006742
  hyper

SEQ ID NO: 417465 - DNA, 80 bp, Homo sapiens; identical to SEQ ID NO: 282034
  chr4:15412561-15412641
  hyper

SEQ ID NO: 417466 - DNA, 107 bp, Homo sapiens; identical to SEQ ID NO: 230277
  chr4:15683192-15683299
  hyper

SEQ ID NO: 417467 - DNA, 126 bp, Homo sapiens; identical to SEQ ID NO: 282037
  chr4:16083804-16083930
  hyper

SEQ ID NO: 417468 - DNA, 173 bp, Homo sapiens; identical to SEQ ID NO: 199359
  chr4:17578690-17578863
  hyper

SEQ ID NO: 417469 - DNA, 271 bp, Homo sapiens; identical to SEQ ID NO: 230281
  chr4:17616177-17616448
  hyper

SEQ ID NO: 417470 - DNA, 111 bp, Homo sapiens; identical to SEQ ID NO: 282043
  chr4:17782723-17782834
  hyper

SEQ ID NO: 417471 - DNA, 250 bp, Homo sapiens; identical to SEQ ID NO: 230283
  chr4:17812338-17812588
  hyper

SEQ ID NO: 417472 - DNA, 106 bp, Homo sapiens; identical to SEQ ID NO: 199361
  chr4:18024246-18024352
  hyper

SEQ ID NO: 417473 - DNA, 174 bp, Homo sapiens; identical to SEQ ID NO: 388073
  chr4:20254519-20254693
  hyper

SEQ ID NO: 417474 - DNA, 207 bp, Homo sapiens; identical to SEQ ID NO: 199365
  chr4:20255120-20255327
  hyper

SEQ ID NO: 417475 - DNA, 152 bp, Homo sapiens; identical to SEQ ID NO: 230285
  chr4:20985813-20985965
  hyper

SEQ ID NO: 417476 - DNA, 38 bp, Homo sapiens; identical to SEQ ID NO: 282051
  chr4:21949839-21949877
  hyper

SEQ ID NO: 417477 - DNA, 1009 bp, Homo sapiens; identical to SEQ ID NO: 282052
  chr4:22517045-22518054
  hyper

SEQ ID NO: 417478 - DNA, 46 bp, Homo sapiens; identical to SEQ ID NO: 282053
  chr4:24471837-24471883
  hyper

SEQ ID NO: 417479 - DNA, 428 bp, Homo sapiens; identical to SEQ ID NO: 282054
  chr4:24471943-24472371
  hyper

SEQ ID NO: 417480 - DNA, 398 bp, Homo sapiens; identical to SEQ ID NO: 282055
  chr4:24472580-24472978
  hyper

SEQ ID NO: 417481 - DNA, 90 bp, Homo sapiens; identical to SEQ ID NO: 282056
  chr4:24473241-24473331
  hyper

SEQ ID NO: 417482 - DNA, 436 bp, Homo sapiens; identical to SEQ ID NO: 230292
  chr4:24474654-24475090
  hyper

SEQ ID NO: 417483 - DNA, 233 bp, Homo sapiens; identical to SEQ ID NO: 230296
  chr4:25161802-25162035
  hyper

SEQ ID NO: 417484 - DNA, 158 bp, Homo sapiens; identical to SEQ ID NO: 230298
  chr4:25314271-25314429
  hyper

SEQ ID NO: 417485 - DNA, 423 bp, Homo sapiens; identical to SEQ ID NO: 230300
  chr4:25915659-25916082
  hyper

SEQ ID NO: 417486 - DNA, 143 bp, Homo sapiens; identical to SEQ ID NO: 230302
  chr4:26321224-26321367
  hyper

SEQ ID NO: 417487 - DNA, 68 bp, Homo sapiens; identical to SEQ ID NO: 230303
  chr4:26585707-26585775
  hyper

SEQ ID NO: 417488 - DNA, 182 bp, Homo sapiens; identical to SEQ ID NO: 230304
  chr4:26862030-26862212
  hyper

SEQ ID NO: 417489 - DNA, 178 bp, Homo sapiens; identical to SEQ ID NO: 230305
  chr4:26862442-26862620
  hyper

SEQ ID NO: 417490 - DNA, 391 bp, Homo sapiens; identical to SEQ ID NO: 282076
  chr4:30718983-30719374
  hyper

SEQ ID NO: 417491 - DNA, 87 bp, Homo sapiens; identical to SEQ ID NO: 282077
  chr4:30719763-30719850
  hyper

SEQ ID NO: 417492 - DNA, 502 bp, Homo sapiens; identical to SEQ ID NO: 282082
  chr4:30723011-30723513
  hyper

SEQ ID NO: 417493 - DNA, 107 bp, Homo sapiens; identical to SEQ ID NO: 282087
  chr4:37245430-37245537
  hyper

SEQ ID NO: 417494 - DNA, 86 bp, Homo sapiens; identical to SEQ ID NO: 199386
  chr4:37688564-37688650
  hyper

SEQ ID NO: 417495 - DNA, 225 bp, Homo sapiens; identical to SEQ ID NO: 282091
  chr4:37891998-37892223
  hyper

SEQ ID NO: 417496 - DNA, 155 bp, Homo sapiens; identical to SEQ ID NO: 199388
  chr4:38666037-38666192
  hyper

SEQ ID NO: 417497 - DNA, 354 bp, Homo sapiens; identical to SEQ ID NO: 230315
  chr4:38666434-38666788
  hyper

SEQ ID NO: 417498 - DNA, 56 bp, Homo sapiens; identical to SEQ ID NO: 282095
  chr4:38732973-38733029
  hyper

SEQ ID NO: 417499 - DNA, 740 bp, Homo sapiens; identical to SEQ ID NO: 199390
  chr4:38868924-38869664
  hyper

SEQ ID NO: 417500 - DNA, 346 bp, Homo sapiens; identical to SEQ ID NO: 282098
  chr4:39183810-39184156
  hyper

SEQ ID NO: 417501 - DNA, 166 bp, Homo sapiens; identical to SEQ ID NO: 230319
  chr4:39367987-39368153
  hyper

SEQ ID NO: 417502 - DNA, 249 bp, Homo sapiens; identical to SEQ ID NO: 230320
  chr4:39529280-39529529
  hyper

SEQ ID NO: 417503 - DNA, 249 bp, Homo sapiens; identical to SEQ ID NO: 282101
  chr4:39529736-39529985
  hyper

SEQ ID NO: 417504 - DNA, 350 bp, Homo sapiens; identical to SEQ ID NO: 230321
  chr4:39638992-39639342
  hyper

SEQ ID NO: 417505 - DNA, 126 bp, Homo sapiens; identical to SEQ ID NO: 230322
  chr4:39639612-39639738
  hyper

SEQ ID NO: 417506 - DNA, 74 bp, Homo sapiens; identical to SEQ ID NO: 230323
  chr4:39699544-39699618
  hyper

SEQ ID NO: 417507 - DNA, 232 bp, Homo sapiens; identical to SEQ ID NO: 230324
  chr4:39978126-39978358
  hyper

SEQ ID NO: 417508 - DNA, 433 bp, Homo sapiens; identical to SEQ ID NO: 230325
  chr4:40058592-40059025
  hyper

SEQ ID NO: 417509 - DNA, 53 bp, Homo sapiens; identical to SEQ ID NO: 230326
  chr4:40631725-40631778
  hyper

SEQ ID NO: 417510 - DNA, 744 bp, Homo sapiens; identical to SEQ ID NO: 282109
  chr4:40751829-40752573
  hyper

SEQ ID NO: 417511 - DNA, 138 bp, Homo sapiens; identical to SEQ ID NO: 199395
  chr4:41216265-41216403
  hyper

SEQ ID NO: 417512 - DNA, 108 bp, Homo sapiens; identical to SEQ ID NO: 282115
  chr4:41751611-41751719
  hyper

SEQ ID NO: 417513 - DNA, 48 bp, Homo sapiens; identical to SEQ ID NO: 282117
  chr4:41867463-41867511
  hyper

SEQ ID NO: 417514 - DNA, 61 bp, Homo sapiens; identical to SEQ ID NO: 110024
  chr4:41882651-41882712
  hyper

SEQ ID NO: 417515 - DNA, 89 bp, Homo sapiens; identical to SEQ ID NO: 282120
  chr4:41884432-41884521
  hyper

SEQ ID NO: 417516 - DNA, 177 bp, Homo sapiens; identical to SEQ ID NO: 199398
  chr4:41991961-41992138
  hyper

SEQ ID NO: 417517 - DNA, 60 bp, Homo sapiens; identical to SEQ ID NO: 282122
  chr4:41993656-41993716
  hyper

SEQ ID NO: 417518 - DNA, 138 bp, Homo sapiens; identical to SEQ ID NO: 199401
  chr4:42659535-42659673
  hyper

SEQ ID NO: 417519 - DNA, 152 bp, Homo sapiens; identical to SEQ ID NO: 282126
  chr4:44448455-44448607
  hyper

SEQ ID NO: 417520 - DNA, 54 bp, Homo sapiens; identical to SEQ ID NO: 282127
  chr4:44448660-44448714
  hyper

SEQ ID NO: 417521 - DNA, 62 bp, Homo sapiens; identical to SEQ ID NO: 230358
  chr4:44680330-44680392
  hyper

SEQ ID NO: 417522 - DNA, 207 bp, Homo sapiens; identical to SEQ ID NO: 230359
  chr4:44680670-44680877
  hyper

SEQ ID NO: 417523 - DNA, 218 bp, Homo sapiens; identical to SEQ ID NO: 230360
  chr4:44728536-44728754
  hyper

SEQ ID NO: 417524 - DNA, 150 bp, Homo sapiens; identical to SEQ ID NO: 282136
  chr4:47033394-47033544
  hyper

SEQ ID NO: 417525 - DNA, 47 bp, Homo sapiens; identical to SEQ ID NO: 282137
  chr4:47033601-47033648
  hyper

SEQ ID NO: 417526 - DNA, 184 bp, Homo sapiens; identical to SEQ ID NO: 199406
  chr4:47465718-47465902
  hyper

SEQ ID NO: 417527 - DNA, 439 bp, Homo sapiens; identical to SEQ ID NO: 282140
  chr4:47487073-47487512
  hyper

SEQ ID NO: 417528 - DNA, 314 bp, Homo sapiens; identical to SEQ ID NO: 230367
  chr4:47838720-47839034
  hyper

SEQ ID NO: 417529 - DNA, 400 bp, Homo sapiens; identical to SEQ ID NO: 230369
  chr4:47916484-47916884
  hyper

SEQ ID NO: 417530 - DNA, 83 bp, Homo sapiens; identical to SEQ ID NO: 282147
  chr4:48492097-48492180
  hyper

SEQ ID NO: 417531 - DNA, 523 bp, Homo sapiens; identical to SEQ ID NO: 230373
  chr4:48833079-48833602
  hyper

SEQ ID NO: 417532 - DNA, 256 bp, Homo sapiens; identical to SEQ ID NO: 199411
  chr4:48908455-48908711
  hyper

SEQ ID NO: 417533 - DNA, 130 bp, Homo sapiens; identical to SEQ ID NO: 282150
  chr4:48988335-48988465
  hyper

SEQ ID NO: 417534 - DNA, 32 bp, Homo sapiens; identical to SEQ ID NO: 282151
  chr4:48988533-48988565
  hyper

SEQ ID NO: 417535 - DNA, 293 bp, Homo sapiens; identical to SEQ ID NO: 230376
  chr4:52710793-52711086
  hyper

SEQ ID NO: 417536 - DNA, 207 bp, Homo sapiens; identical to SEQ ID NO: 110080
  chr4:52904505-52904712
  hyper

SEQ ID NO: 417537 - DNA, 177 bp, Homo sapiens; identical to SEQ ID NO: 282154
  chr4:52917368-52917545
  hyper

SEQ ID NO: 417538 - DNA, 279 bp, Homo sapiens; identical to SEQ ID NO: 282155
  chr4:52917685-52917964
  hyper

SEQ ID NO: 417539 - DNA, 253 bp, Homo sapiens; identical to SEQ ID NO: 282156
  chr4:52918087-52918340
  hyper

SEQ ID NO: 417540 - DNA, 34 bp, Homo sapiens; identical to SEQ ID NO: 230379
  chr4:53578477-53578511
  hyper

SEQ ID NO: 417541 - DNA, 170 bp, Homo sapiens; identical to SEQ ID NO: 230382
  chr4:54244103-54244273
  hyper

SEQ ID NO: 417542 - DNA, 145 bp, Homo sapiens; identical to SEQ ID NO: 230383
  chr4:54774734-54774879
  hyper

SEQ ID NO: 417543 - DNA, 65 bp, Homo sapiens; identical to SEQ ID NO: 230384
  chr4:54930698-54930763
  hyper

SEQ ID NO: 417544 - DNA, 175 bp, Homo sapiens; identical to SEQ ID NO: 230385
  chr4:54931050-54931225
  hyper

SEQ ID NO: 417545 - DNA, 67 bp, Homo sapiens; identical to SEQ ID NO: 230386
  chr4:54961838-54961905
  hyper

SEQ ID NO: 417546 - DNA, 40 bp, Homo sapiens; identical to SEQ ID NO: 282167
  chr4:54975352-54975392
  hyper

SEQ ID NO: 417547 - DNA, 31 bp, Homo sapiens; identical to SEQ ID NO: 199417
  chr4:55095430-55095461
  hyper

SEQ ID NO: 417548 - DNA, 43 bp, Homo sapiens; identical to SEQ ID NO: 282171
  chr4:55096171-55096214
  hyper

SEQ ID NO: 417549 - DNA, 194 bp, Homo sapiens; identical to SEQ ID NO: 282172
  chr4:55096344-55096538
  hyper

SEQ ID NO: 417550 - DNA, 602 bp, Homo sapiens; identical to SEQ ID NO: 282173
  chr4:55099464-55100066
  hyper

SEQ ID NO: 417551 - DNA, 247 bp, Homo sapiens; identical to SEQ ID NO: 282174
  chr4:55523973-55524220
  hyper

SEQ ID NO: 417552 - DNA, 224 bp, Homo sapiens; identical to SEQ ID NO: 282175
  chr4:55524294-55524518
  hyper

SEQ ID NO: 417553 - DNA, 65 bp, Homo sapiens; identical to SEQ ID NO: 282176
  chr4:55525357-55525422
  hyper

SEQ ID NO: 417554 - DNA, 229 bp, Homo sapiens; identical to SEQ ID NO: 199420
  chr4:55561714-55561943
  hyper

SEQ ID NO: 417555 - DNA, 91 bp, Homo sapiens; identical to SEQ ID NO: 199421
  chr4:55564469-55564560
  hyper

SEQ ID NO: 417556 - DNA, 75 bp, Homo sapiens; identical to SEQ ID NO: 199422
  chr4:55569950-55570025
  hyper

SEQ ID NO: 417557 - DNA, 45 bp, Homo sapiens; identical to SEQ ID NO: 199423
  chr4:55592094-55592139
  hyper

SEQ ID NO: 417558 - DNA, 43 bp, Homo sapiens; identical to SEQ ID NO: 199424
  chr4:55593675-55593718
  hyper

SEQ ID NO: 417559 - DNA, 34 bp, Homo sapiens; identical to SEQ ID NO: 199425
  chr4:55598031-55598065
  hyper

SEQ ID NO: 417560 - DNA, 96 bp, Homo sapiens; identical to SEQ ID NO: 199426
  chr4:55602683-55602779
  hyper

SEQ ID NO: 417561 - DNA, 54 bp, Homo sapiens; identical to SEQ ID NO: 282184
  chr4:55990892-55990946
  hyper

SEQ ID NO: 417562 - DNA, 61 bp, Homo sapiens; identical to SEQ ID NO: 199427
  chr4:55991393-55991454
  hyper

SEQ ID NO: 417563 - DNA, 133 bp, Homo sapiens; identical to SEQ ID NO: 199428
  chr4:55991493-55991626
  hyper

SEQ ID NO: 417564 - DNA, 61 bp, Homo sapiens; identical to SEQ ID NO: 199429
  chr4:55991802-55991863
  hyper

SEQ ID NO: 417565 - DNA, 39 bp, Homo sapiens; identical to SEQ ID NO: 199430
  chr4:55992221-55992260
  hyper

SEQ ID NO: 417566 - DNA, 109 bp, Homo sapiens; identical to SEQ ID NO: 230402
  chr4:56212201-56212310
  hyper

SEQ ID NO: 417567 - DNA, 267 bp, Homo sapiens; identical to SEQ ID NO: 230403
  chr4:56261513-56261780
  hyper

SEQ ID NO: 417568 - DNA, 34 bp, Homo sapiens; identical to SEQ ID NO: 199431
  chr4:56412390-56412424
  hyper

SEQ ID NO: 417569 - DNA, 177 bp, Homo sapiens; identical to SEQ ID NO: 282193
  chr4:56501427-56501604
  hyper

SEQ ID NO: 417570 - DNA, 705 bp, Homo sapiens; identical to SEQ ID NO: 282194
  chr4:56501725-56502430
  hyper

SEQ ID NO: 417571 - DNA, 397 bp, Homo sapiens; identical to SEQ ID NO: 282195
  chr4:56502467-56502864
  hyper

SEQ ID NO: 417572 - DNA, 126 bp, Homo sapiens; identical to SEQ ID NO: 282196
  chr4:56719667-56719793
  hyper

SEQ ID NO: 417573 - DNA, 419 bp, Homo sapiens; identical to SEQ ID NO: 110145
  chr4:56719823-56720242
  hyper

SEQ ID NO: 417574 - DNA, 177 bp, Homo sapiens; identical to SEQ ID NO: 230412
  chr4:57253559-57253736
  hyper

SEQ ID NO: 417575 - DNA, 172 bp, Homo sapiens; identical to SEQ ID NO: 230413
  chr4:57301958-57302130
  hyper

SEQ ID NO: 417576 - DNA, 127 bp, Homo sapiens; identical to SEQ ID NO: 230414
  chr4:57333253-57333380
  hyper

SEQ ID NO: 417577 - DNA, 188 bp, Homo sapiens; identical to SEQ ID NO: 230415
  chr4:57333686-57333874
  hyper

SEQ ID NO: 417578 - DNA, 143 bp, Homo sapiens; identical to SEQ ID NO: 199434
  chr4:57775639-57775782
  hyper

SEQ ID NO: 417579 - DNA, 205 bp, Homo sapiens; identical to SEQ ID NO: 199435
  chr4:57843820-57844025
  hyper

SEQ ID NO: 417580 - DNA, 66 bp, Homo sapiens; identical to SEQ ID NO: 230424
  chr4:57844898-57844964
  hyper

SEQ ID NO: 417581 - DNA, 227 bp, Homo sapiens; identical to SEQ ID NO: 199436
  chr4:57977107-57977334
  hyper

SEQ ID NO: 417582 - DNA, 92 bp, Homo sapiens; identical to SEQ ID NO: 199437
  chr4:57977364-57977456
  hyper

SEQ ID NO: 417583 - DNA, 249 bp, Homo sapiens; identical to SEQ ID NO: 282212
  chr4:62067624-62067873
  hyper

SEQ ID NO: 417584 - DNA, 44 bp, Homo sapiens; identical to SEQ ID NO: 199438
  chr4:66536636-66536680
  hyper

SEQ ID NO: 417585 - DNA, 213 bp, Homo sapiens; identical to SEQ ID NO: 230434
  chr4:68411140-68411353
  hyper

SEQ ID NO: 417586 - DNA, 80 bp, Homo sapiens; identical to SEQ ID NO: 230435
  chr4:68567004-68567084
  hyper

SEQ ID NO: 417587 - DNA, 109 bp, Homo sapiens; identical to SEQ ID NO: 230436
  chr4:71479320-71479429
  hyper

SEQ ID NO: 417588 - DNA, 107 bp, Homo sapiens; identical to SEQ ID NO: 230437
  chr4:71554111-71554218
  hyper

SEQ ID NO: 417589 - DNA, 56 bp, Homo sapiens; identical to SEQ ID NO: 230438
  chr4:71705636-71705692
  hyper

SEQ ID NO: 417590 - DNA, 730 bp, Homo sapiens; identical to SEQ ID NO: 199439
  chr4:71767778-71768508
  hyper

SEQ ID NO: 417591 - DNA, 177 bp, Homo sapiens; identical to SEQ ID NO: 110197
  chr4:71768550-71768727
  hyper

SEQ ID NO: 417592 - DNA, 46 bp, Homo sapiens; identical to SEQ ID NO: 230441
  chr4:71859073-71859119
  hyper

SEQ ID NO: 417593 - DNA, 84 bp, Homo sapiens; identical to SEQ ID NO: 230442
  chr4:72052855-72052939
  hyper

SEQ ID NO: 417594 - DNA, 125 bp, Homo sapiens; identical to SEQ ID NO: 199442
  chr4:73434679-73434804
  hyper

SEQ ID NO: 417595 - DNA, 87 bp, Homo sapiens; identical to SEQ ID NO: 199443
  chr4:73435243-73435330
  hyper

SEQ ID NO: 417596 - DNA, 396 bp, Homo sapiens; identical to SEQ ID NO: 230445
  chr4:73935363-73935759
  hyper

SEQ ID NO: 417597 - DNA, 224 bp, Homo sapiens; identical to SEQ ID NO: 199444
  chr4:74702525-74702749
  hyper

SEQ ID NO: 417598 - DNA, 217 bp, Homo sapiens; identical to SEQ ID NO: 282231
  chr4:74734859-74735076
  hyper

SEQ ID NO: 417599 - DNA, 177 bp, Homo sapiens; identical to SEQ ID NO: 110211
  chr4:74735193-74735370
  hyper

SEQ ID NO: 417600 - DNA, 357 bp, Homo sapiens; identical to SEQ ID NO: 388098
  chr4:74904790-74905147
  hyper

SEQ ID NO: 417601 - DNA, 711 bp, Homo sapiens; identical to SEQ ID NO: 230450
  chr4:74964529-74965240
  hyper

SEQ ID NO: 417602 - DNA, 340 bp, Homo sapiens; identical to SEQ ID NO: 230451
  chr4:75023526-75023866
  hyper

SEQ ID NO: 417603 - DNA, 91 bp, Homo sapiens; identical to SEQ ID NO: 230453
  chr4:75719943-75720034
  hyper

SEQ ID NO: 417604 - DNA, 362 bp, Homo sapiens; identical to SEQ ID NO: 388099
  chr4:75859572-75859934
  hyper

SEQ ID NO: 417605 - DNA, 35 bp, Homo sapiens; identical to SEQ ID NO: 230455
  chr4:76439684-76439719
  hyper

SEQ ID NO: 417606 - DNA, 278 bp, Homo sapiens; identical to SEQ ID NO: 230457
  chr4:76598656-76598934
  hyper

SEQ ID NO: 417607 - DNA, 71 bp, Homo sapiens; identical to SEQ ID NO: 230458
  chr4:76649921-76649992
  hyper

SEQ ID NO: 417608 - DNA, 112 bp, Homo sapiens; identical to SEQ ID NO: 230459
  chr4:76650652-76650764
  hyper

SEQ ID NO: 417609 - DNA, 128 bp, Homo sapiens; identical to SEQ ID NO: 230460
  chr4:77069657-77069785
  hyper

SEQ ID NO: 417610 - DNA, 349 bp, Homo sapiens; identical to SEQ ID NO: 230461
  chr4:77135172-77135521
  hyper

SEQ ID NO: 417611 - DNA, 202 bp, Homo sapiens; identical to SEQ ID NO: 199457
  chr4:77227271-77227473
  hyper

SEQ ID NO: 417612 - DNA, 143 bp, Homo sapiens
  chr4:77227525-77227668
  hyper
cctcgcgggcagcaggcggaagaaggaagggcggtggggcaggtcccggctgcgcggggcagttgtgcgcacttgggttcttcacgcgggacacacgtggaacgccgacccctgcgcccctggccgctggcaactggcaaggc

SEQ ID NO: 417613 - DNA, 472 bp, Homo sapiens; identical to SEQ ID NO: 199460
  chr4:77818185-77818657
  hyper

SEQ ID NO: 417614 - DNA, 131 bp, Homo sapiens; identical to SEQ ID NO: 384011
  chr4:77818754-77818885
  hyper

SEQ ID NO: 417615 - DNA, 42 bp, Homo sapiens; identical to SEQ ID NO: 230467
  chr4:77997174-77997216
  hyper

SEQ ID NO: 417616 - DNA, 111 bp, Homo sapiens; identical to SEQ ID NO: 230468
  chr4:78079532-78079643
  hyper

SEQ ID NO: 417617 - DNA, 43 bp, Homo sapiens; identical to SEQ ID NO: 230469
  chr4:78978694-78978737
  hyper

SEQ ID NO: 417618 - DNA, 267 bp, Homo sapiens; identical to SEQ ID NO: 230470
  chr4:78979307-78979574
  hyper

SEQ ID NO: 417619 - DNA, 784 bp, Homo sapiens; identical to SEQ ID NO: 282264
  chr4:78979792-78980576
  hyper

SEQ ID NO: 417620 - DNA, 100 bp, Homo sapiens; identical to SEQ ID NO: 282265
  chr4:79472691-79472791
  hyper

SEQ ID NO: 417621 - DNA, 86 bp, Homo sapiens; identical to SEQ ID NO: 282266
  chr4:79473111-79473197
  hyper

SEQ ID NO: 417622 - DNA, 533 bp, Homo sapiens; identical to SEQ ID NO: 230473
  chr4:79860213-79860746
  hyper

SEQ ID NO: 417623 - DNA, 933 bp, Homo sapiens; identical to SEQ ID NO: 282269
  chr4:81105153-81106086
  hyper

SEQ ID NO: 417624 - DNA, 364 bp, Homo sapiens; identical to SEQ ID NO: 230489
  chr4:83293752-83294116
  hyper

SEQ ID NO: 417625 - DNA, 374 bp, Homo sapiens; identical to SEQ ID NO: 230492
  chr4:83719881-83720255
  hyper

SEQ ID NO: 417626 - DNA, 283 bp, Homo sapiens; identical to SEQ ID NO: 230493
  chr4:83812351-83812634
  hyper

SEQ ID NO: 417627 - DNA, 234 bp, Homo sapiens; identical to SEQ ID NO: 230494
  chr4:83821698-83821932
  hyper

SEQ ID NO: 417628 - DNA, 201 bp, Homo sapiens; identical to SEQ ID NO: 230495
  chr4:83956037-83956238
  hyper

SEQ ID NO: 417629 - DNA, 267 bp, Homo sapiens; identical to SEQ ID NO: 230497
  chr4:84205947-84206214
  hyper

SEQ ID NO: 417630 - DNA, 85 bp, Homo sapiens; identical to SEQ ID NO: 222435
  chr4:84292570-84292655
  hyper

SEQ ID NO: 417631 - DNA, 571 bp, Homo sapiens; identical to SEQ ID NO: 230498
  chr4:84376736-84377307
  hyper

SEQ ID NO: 417632 - DNA, 61 bp, Homo sapiens; identical to SEQ ID NO: 230499
  chr4:84406474-84406535
  hyper

SEQ ID NO: 417633 - DNA, 210 bp, Homo sapiens; identical to SEQ ID NO: 230500
  chr4:84456995-84457205
  hyper

SEQ ID NO: 417634 - DNA, 144 bp, Homo sapiens; identical to SEQ ID NO: 282296
  chr4:85416760-85416904
  hyper

SEQ ID NO: 417635 - DNA, 48 bp, Homo sapiens; identical to SEQ ID NO: 282297
  chr4:85417564-85417612
  hyper

SEQ ID NO: 417636 - DNA, 234 bp, Homo sapiens; identical to SEQ ID NO: 282298
  chr4:85417719-85417953
  hyper

SEQ ID NO: 417637 - DNA, 42 bp, Homo sapiens; identical to SEQ ID NO: 230507
  chr4:85421916-85421958
  hyper

SEQ ID NO: 417638 - DNA, 101 bp, Homo sapiens; identical to SEQ ID NO: 222440
  chr4:86396088-86396189
  hyper

SEQ ID NO: 417639 - DNA, 543 bp, Homo sapiens; identical to SEQ ID NO: 222441
  chr4:86396422-86396965
  hyper

SEQ ID NO: 417640 - DNA, 233 bp, Homo sapiens; identical to SEQ ID NO: 230515
  chr4:86851207-86851440
  hyper

SEQ ID NO: 417641 - DNA, 45 bp, Homo sapiens; identical to SEQ ID NO: 230518
  chr4:87516267-87516312
  hyper

SEQ ID NO: 417642 - DNA, 74 bp, Homo sapiens; identical to SEQ ID NO: 230520
  chr4:87855923-87855997
  hyper

SEQ ID NO: 417643 - DNA, 1019 bp, Homo sapiens; identical to SEQ ID NO: 230521
  chr4:87856414-87857433
  hyper

SEQ ID NO: 417644 - DNA, 42 bp, Homo sapiens; identical to SEQ ID NO: 199487
  chr4:88887030-88887072
  hyper

SEQ ID NO: 417645 - DNA, 235 bp, Homo sapiens; identical to SEQ ID NO: 282319
  chr4:89079573-89079808
  hyper

SEQ ID NO: 417646 - DNA, 512 bp, Homo sapiens; identical to SEQ ID NO: 40681
  chr4:89079844-89080356
  hyper

SEQ ID NO: 417647 - DNA, 441 bp, Homo sapiens; identical to SEQ ID NO: 230524
  chr4:89299895-89300336
  hyper

SEQ ID NO: 417648 - DNA, 274 bp, Homo sapiens
  chr4:89377924-89378198
  hyper
caacgcttaacaaactttggcttccgttatccctccctctggaaatgcgtgtgtcagggtgcctcctagtggaactgcagcgtttcctcgaaagccattccgtccaggagttaaggtggccgctgcccgcccgggacactttctcagtccagcccatcggcctttaccccagccaacgacctgttgcctttggccgcctgccaagtcactctcattacagtttccttttccttttcgattccgccccctaaaaacaacaacaaacattatgttt

SEQ ID NO: 417649 - DNA, 177 bp, Homo sapiens; identical to SEQ ID NO: 230526
  chr4:89444420-89444597
  hyper

SEQ ID NO: 417650 - DNA, 274 bp, Homo sapiens; identical to SEQ ID NO: 230527
  chr4:89444895-89445169
  hyper

SEQ ID NO: 417651 - DNA, 151 bp, Homo sapiens; identical to SEQ ID NO: 199490
  chr4:89513528-89513679
  hyper

SEQ ID NO: 417652 - DNA, 120 bp, Homo sapiens; identical to SEQ ID NO: 282327
  chr4:90757397-90757517
  hyper

SEQ ID NO: 417653 - DNA, 234 bp, Homo sapiens; identical to SEQ ID NO: 199492
  chr4:91048333-91048567
  hyper

SEQ ID NO: 417654 - DNA, 91 bp, Homo sapiens; identical to SEQ ID NO: 199493
  chr4:91048568-91048659
  hyper

SEQ ID NO: 417655 - DNA, 51 bp, Homo sapiens; identical to SEQ ID NO: 199494
  chr4:91048895-91048946
  hyper

SEQ ID NO: 417656 - DNA, 436 bp, Homo sapiens; identical to SEQ ID NO: 110365
  chr4:91049201-91049637
  hyper

SEQ ID NO: 417657 - DNA, 78 bp, Homo sapiens; identical to SEQ ID NO: 282332
  chr4:91049697-91049775
  hyper

SEQ ID NO: 417658 - DNA, 169 bp, Homo sapiens; identical to SEQ ID NO: 282333
  chr4:91760071-91760240
  hyper

SEQ ID NO: 417659 - DNA, 87 bp, Homo sapiens; identical to SEQ ID NO: 199496
  chr4:92905822-92905909
  hyper

SEQ ID NO: 417660 - DNA, 91 bp, Homo sapiens; identical to SEQ ID NO: 199497
  chr4:93224881-93224972
  hyper

SEQ ID NO: 417661 - DNA, 269 bp, Homo sapiens; identical to SEQ ID NO: 282336
  chr4:93225440-93225709
  hyper

SEQ ID NO: 417662 - DNA, 236 bp, Homo sapiens; identical to SEQ ID NO: 282337
  chr4:93225739-93225975
  hyper

SEQ ID NO: 417663 - DNA, 279 bp, Homo sapiens; identical to SEQ ID NO: 282341
  chr4:94750277-94750556
  hyper

SEQ ID NO: 417664 - DNA, 71 bp, Homo sapiens; identical to SEQ ID NO: 230541
  chr4:95372822-95372893
  hyper

SEQ ID NO: 417665 - DNA, 130 bp, Homo sapiens; identical to SEQ ID NO: 230542
  chr4:95373288-95373418
  hyper

SEQ ID NO: 417666 - DNA, 233 bp, Homo sapiens; identical to SEQ ID NO: 222444
  chr4:95373794-95374027
  hyper

SEQ ID NO: 417667 - DNA, 221 bp, Homo sapiens; identical to SEQ ID NO: 199503
  chr4:96469413-96469634
  hyper

SEQ ID NO: 417668 - DNA, 133 bp, Homo sapiens; identical to SEQ ID NO: 199504
  chr4:96469635-96469768
  hyper

SEQ ID NO: 417669 - DNA, 113 bp, Homo sapiens
  chr4:96470264-96470377
  hyper
cacttgggaagtccagggaggcgcaaggcggccacctccgccgctccccccagcagcaggagcagccgcagctccgccgcacgccgaagtctggactgctctccgggtcccct

SEQ ID NO: 417670 - DNA, 66 bp, Homo sapiens; identical to SEQ ID NO: 230545
  chr4:99850237-99850303
  hyper

SEQ ID NO: 417671 - DNA, 76 bp, Homo sapiens; identical to SEQ ID NO: 199507
  chr4:99850526-99850602
  hyper

SEQ ID NO: 417672 - DNA, 164 bp, Homo sapiens; identical to SEQ ID NO: 230547
  chr4:99916362-99916526
  hyper

SEQ ID NO: 417673 - DNA, 235 bp, Homo sapiens; identical to SEQ ID NO: 230548
  chr4:100009991-100010226
  hyper

SEQ ID NO: 417674 - DNA, 49 bp, Homo sapiens; identical to SEQ ID NO: 230549
  chr4:100484871-100484920
  hyper

SEQ ID NO: 417675 - DNA, 55 bp, Homo sapiens; identical to SEQ ID NO: 230550
  chr4:100485194-100485249
  hyper

SEQ ID NO: 417676 - DNA, 31 bp, Homo sapiens; identical to SEQ ID NO: 230553
  chr4:100871520-100871551
  hyper

SEQ ID NO: 417677 - DNA, 119 bp, Homo sapiens; identical to SEQ ID NO: 199510
  chr4:101111126-101111245
  hyper

SEQ ID NO: 417678 - DNA, 216 bp, Homo sapiens; identical to SEQ ID NO: 199511
  chr4:101111971-101112187
  hyper

SEQ ID NO: 417679 - DNA, 80 bp, Homo sapiens; identical to SEQ ID NO: 199512
  chr4:102269360-102269440
  hyper

SEQ ID NO: 417680 - DNA, 251 bp, Homo sapiens; identical to SEQ ID NO: 230556
  chr4:102269669-102269920
  hyper

SEQ ID NO: 417681 - DNA, 407 bp, Homo sapiens; identical to SEQ ID NO: 230558
  chr4:103266029-103266436
  hyper

SEQ ID NO: 417682 - DNA, 220 bp, Homo sapiens; identical to SEQ ID NO: 222446
  chr4:103266878-103267098
  hyper

SEQ ID NO: 417683 - DNA, 79 bp, Homo sapiens; identical to SEQ ID NO: 230559
  chr4:103422182-103422261
  hyper

SEQ ID NO: 417684 - DNA, 381 bp, Homo sapiens; identical to SEQ ID NO: 230560
  chr4:103681575-103681956
  hyper

SEQ ID NO: 417685 - DNA, 109 bp, Homo sapiens; identical to SEQ ID NO: 230561
  chr4:103682320-103682429
  hyper

SEQ ID NO: 417686 - DNA, 406 bp, Homo sapiens; identical to SEQ ID NO: 230562
  chr4:103748279-103748685
  hyper

SEQ ID NO: 417687 - DNA, 138 bp, Homo sapiens; identical to SEQ ID NO: 230563
  chr4:103749252-103749390
  hyper

SEQ ID NO: 417688 - DNA, 103 bp, Homo sapiens; identical to SEQ ID NO: 199515
  chr4:104020935-104021038
  hyper

SEQ ID NO: 417689 - DNA, 203 bp, Homo sapiens; identical to SEQ ID NO: 230565
  chr4:105412285-105412488
  hyper

SEQ ID NO: 417690 - DNA, 61 bp, Homo sapiens; identical to SEQ ID NO: 230566
  chr4:105412786-105412847
  hyper

SEQ ID NO: 417691 - DNA, 295 bp, Homo sapiens; identical to SEQ ID NO: 199518
  chr4:106067841-106068136
  hyper

SEQ ID NO: 417692 - DNA, 277 bp, Homo sapiens; identical to SEQ ID NO: 199519
  chr4:106068588-106068865
  hyper

SEQ ID NO: 417693 - DNA, 146 bp, Homo sapiens; identical to SEQ ID NO: 199520
  chr4:106111516-106111662
  hyper

SEQ ID NO: 417694 - DNA, 1085 bp, Homo sapiens; identical to SEQ ID NO: 396799
  chr4:106155053-106156138
  hyper

SEQ ID NO: 417695 - DNA, 2024 bp, Homo sapiens; identical to SEQ ID NO: 396800
  chr4:106157490-106159514
  hyper

SEQ ID NO: 417696 - DNA, 240 bp, Homo sapiens; identical to SEQ ID NO: 199522
  chr4:106159634-106159874
  hyper

SEQ ID NO: 417697 - DNA, 180 bp, Homo sapiens; identical to SEQ ID NO: 199523
  chr4:106160114-106160294
  hyper

SEQ ID NO: 417698 - DNA, 120 bp, Homo sapiens; identical to SEQ ID NO: 199524
  chr4:106161134-106161254
  hyper

SEQ ID NO: 417699 - DNA, 2721 bp, Homo sapiens; identical to SEQ ID NO: 199525
  chr4:106161374-106164095
  hyper

SEQ ID NO: 417700 - DNA, 230 bp, Homo sapiens; identical to SEQ ID NO: 199526
  chr4:106164712-106164942
  hyper

SEQ ID NO: 417701 - DNA, 177 bp, Homo sapiens; identical to SEQ ID NO: 199527
  chr4:106180762-106180939
  hyper

SEQ ID NO: 417702 - DNA, 107 bp, Homo sapiens; identical to SEQ ID NO: 199528
  chr4:106182911-106183018
  hyper

SEQ ID NO: 417703 - DNA, 161 bp, Homo sapiens; identical to SEQ ID NO: 199529
  chr4:106190752-106190913
  hyper

SEQ ID NO: 417704 - DNA, 376 bp, Homo sapiens; identical to SEQ ID NO: 199530
  chr4:106193708-106194084
  hyper

SEQ ID NO: 417705 - DNA, 3101 bp, Homo sapiens; identical to SEQ ID NO: 199531
  chr4:106196198-106199299
  hyper

SEQ ID NO: 417706 - DNA, 1601 bp, Homo sapiens; identical to SEQ ID NO: 199532
  chr4:106199359-106200960
  hyper

SEQ ID NO: 417707 - DNA, 475 bp, Homo sapiens; identical to SEQ ID NO: 230570
  chr4:106629648-106630123
  hyper

SEQ ID NO: 417708 - DNA, 181 bp, Homo sapiens; identical to SEQ ID NO: 199534
  chr4:106816201-106816382
  hyper

SEQ ID NO: 417709 - DNA, 329 bp, Homo sapiens; identical to SEQ ID NO: 282398
  chr4:106816425-106816754
  hyper

SEQ ID NO: 417710 - DNA, 1102 bp, Homo sapiens; identical to SEQ ID NO: 282399
  chr4:106816801-106817903
  hyper

SEQ ID NO: 417711 - DNA, 334 bp, Homo sapiens; identical to SEQ ID NO: 230572
  chr4:107237672-107238006
  hyper

SEQ ID NO: 417712 - DNA, 148 bp, Homo sapiens; identical to SEQ ID NO: 282401
  chr4:108745572-108745720
  hyper

SEQ ID NO: 417713 - DNA, 264 bp, Homo sapiens; identical to SEQ ID NO: 199537
  chr4:108745750-108746014
  hyper

SEQ ID NO: 417714 - DNA, 320 bp, Homo sapiens; identical to SEQ ID NO: 199538
  chr4:108746071-108746391
  hyper

SEQ ID NO: 417715 - DNA, 191 bp, Homo sapiens; identical to SEQ ID NO: 199539
  chr4:108746519-108746710
  hyper

SEQ ID NO: 417716 - DNA, 231 bp, Homo sapiens; identical to SEQ ID NO: 282405
  chr4:108852945-108853176
  hyper

SEQ ID NO: 417717 - DNA, 107 bp, Homo sapiens; identical to SEQ ID NO: 282406
  chr4:108853287-108853394
  hyper

SEQ ID NO: 417718 - DNA, 203 bp, Homo sapiens; identical to SEQ ID NO: 199540
  chr4:108911333-108911536
  hyper

SEQ ID NO: 417719 - DNA, 266 bp, Homo sapiens
  chr4:109089757-109090023
  hyper
ggggagtcacagcgggggcctcgggcccaaatgcctctgcccggagctcgagccgacacacacactcagtccgacccctctttgttcccggctcgagtttctcagcctggctcgccggctcgccgctctgcacgcctccgccggccagctctgtcaaagcaaagagctgcgccccttgagttcgcccggccgaggggaggggacgccccgagcttggccgcgtgcgaggctccgggcgcgtcctggttcctcggcccgagagcgcg

SEQ ID NO: 417720 - DNA, 416 bp, Homo sapiens; identical to SEQ ID NO: 199541
  chr4:109092685-109093101
  hyper

SEQ ID NO: 417721 - DNA, 246 bp, Homo sapiens; identical to SEQ ID NO: 282411
  chr4:109094283-109094529
  hyper

SEQ ID NO: 417722 - DNA, 236 bp, Homo sapiens; identical to SEQ ID NO: 230581
  chr4:109541581-109541817
  hyper

SEQ ID NO: 417723 - DNA, 78 bp, Homo sapiens; identical to SEQ ID NO: 199544
  chr4:109571439-109571517
  hyper

SEQ ID NO: 417724 - DNA, 250 bp, Homo sapiens; identical to SEQ ID NO: 199545
  chr4:109684115-109684365
  hyper

SEQ ID NO: 417725 - DNA, 56 bp, Homo sapiens; identical to SEQ ID NO: 384025
  chr4:110343800-110343856
  hyper

SEQ ID NO: 417726 - DNA, 211 bp, Homo sapiens; identical to SEQ ID NO: 199548
  chr4:110651657-110651868
  hyper

SEQ ID NO: 417727 - DNA, 381 bp, Homo sapiens; identical to SEQ ID NO: 230587
  chr4:110736301-110736682
  hyper

SEQ ID NO: 417728 - DNA, 440 bp, Homo sapiens; identical to SEQ ID NO: 282419
  chr4:111117165-111117605
  hyper

SEQ ID NO: 417729 - DNA, 522 bp, Homo sapiens; identical to SEQ ID NO: 282420
  chr4:111119712-111120234
  hyper

SEQ ID NO: 417730 - DNA, 163 bp, Homo sapiens; identical to SEQ ID NO: 199550
  chr4:111537244-111537407
  hyper

SEQ ID NO: 417731 - DNA, 94 bp, Homo sapiens; identical to SEQ ID NO: 199551
  chr4:111537497-111537591
  hyper

SEQ ID NO: 417732 - DNA, 99 bp, Homo sapiens; identical to SEQ ID NO: 282423
  chr4:111539229-111539328
  hyper

SEQ ID NO: 417733 - DNA, 214 bp, Homo sapiens; identical to SEQ ID NO: 282424
  chr4:111539595-111539809
  hyper

SEQ ID NO: 417734 - DNA, 327 bp, Homo sapiens; identical to SEQ ID NO: 110508
  chr4:111540782-111541109
  hyper

SEQ ID NO: 417735 - DNA, 51 bp, Homo sapiens; identical to SEQ ID NO: 199552
  chr4:111542042-111542093
  hyper

SEQ ID NO: 417736 - DNA, 52 bp, Homo sapiens; identical to SEQ ID NO: 199553
  chr4:111542757-111542809
  hyper

SEQ ID NO: 417737 - DNA, 444 bp, Homo sapiens; identical to SEQ ID NO: 282429
  chr4:111551628-111552072
  hyper

SEQ ID NO: 417738 - DNA, 141 bp, Homo sapiens; identical to SEQ ID NO: 282430
  chr4:111552211-111552352
  hyper

SEQ ID NO: 417739 - DNA, 260 bp, Homo sapiens; identical to SEQ ID NO: 199555
  chr4:111554139-111554399
  hyper

SEQ ID NO: 417740 - DNA, 289 bp, Homo sapiens; identical to SEQ ID NO: 199556
  chr4:111554661-111554950
  hyper

SEQ ID NO: 417741 - DNA, 190 bp, Homo sapiens; identical to SEQ ID NO: 282433
  chr4:111562152-111562342
  hyper

SEQ ID NO: 417742 - DNA, 221 bp, Homo sapiens; identical to SEQ ID NO: 282434
  chr4:111562690-111562911
  hyper

SEQ ID NO: 417743 - DNA, 156 bp, Homo sapiens; identical to SEQ ID NO: 230607
  chr4:113152695-113152851
  hyper

SEQ ID NO: 417744 - DNA, 174 bp, Homo sapiens; identical to SEQ ID NO: 230608
  chr4:113153417-113153591
  hyper

SEQ ID NO: 417745 - DNA, 42 bp, Homo sapiens; identical to SEQ ID NO: 230617
  chr4:113443712-113443754
  hyper

SEQ ID NO: 417746 - DNA, 218 bp, Homo sapiens; identical to SEQ ID NO: 230620
  chr4:113558091-113558309
  hyper

SEQ ID NO: 417747 - DNA, 286 bp, Homo sapiens; identical to SEQ ID NO: 230621
  chr4:113558540-113558826
  hyper

SEQ ID NO: 417748 - DNA, 159 bp, Homo sapiens; identical to SEQ ID NO: 230624
  chr4:113739235-113739394
  hyper

SEQ ID NO: 417749 - DNA, 119 bp, Homo sapiens; identical to SEQ ID NO: 282453
  chr4:114900467-114900586
  hyper

SEQ ID NO: 417750 - DNA, 552 bp, Homo sapiens; identical to SEQ ID NO: 199565
  chr4:114900650-114901202
  hyper

SEQ ID NO: 417751 - DNA, 33 bp, Homo sapiens; identical to SEQ ID NO: 282455
  chr4:115519422-115519455
  hyper

SEQ ID NO: 417752 - DNA, 85 bp, Homo sapiens; identical to SEQ ID NO: 199566
  chr4:115519971-115520056
  hyper

SEQ ID NO: 417753 - DNA, 304 bp, Homo sapiens; identical to SEQ ID NO: 199569
  chr4:119200550-119200854
  hyper

SEQ ID NO: 417754 - DNA, 50 bp, Homo sapiens; identical to SEQ ID NO: 230634
  chr4:119757206-119757256
  hyper

SEQ ID NO: 417755 - DNA, 221 bp, Homo sapiens; identical to SEQ ID NO: 110565
  chr4:119757549-119757770
  hyper

SEQ ID NO: 417756 - DNA, 250 bp, Homo sapiens; identical to SEQ ID NO: 230637
  chr4:120133569-120133819
  hyper

SEQ ID NO: 417757 - DNA, 36 bp, Homo sapiens; identical to SEQ ID NO: 199575
  chr4:120221341-120221377
  hyper

SEQ ID NO: 417758 - DNA, 50 bp, Homo sapiens; identical to SEQ ID NO: 199576
  chr4:120221611-120221661
  hyper

SEQ ID NO: 417759 - DNA, 635 bp, Homo sapiens; identical to SEQ ID NO: 230641
  chr4:120988004-120988639
  hyper

SEQ ID NO: 417760 - DNA, 282 bp, Homo sapiens
  chr4:121992696-121992978
  hyper
tggaaagggaggcaacagccctcttggcaggcgggcaaagtaagtgtccaggctaagtccgggataaaggctccgcggctccccagaccccactgcaccccgagctcccgggtcccaggtcttccccgcccttgcgctgtctgtccacctcctcacatctctccgggccgcccagcttcgaaagcagctaaattaaaaacaaacaaacaaacaaacaacaacaacaataaaaaaaaaaaaacgagggaaacctgctcctgcccctcatgccctcagctccta

SEQ ID NO: 417761 - DNA, 39 bp, Homo sapiens; identical to SEQ ID NO: 282480
  chr4:122685768-122685807
  hyper

SEQ ID NO: 417762 - DNA, 52 bp, Homo sapiens; identical to SEQ ID NO: 230648
  chr4:122722576-122722628
  hyper

SEQ ID NO: 417763 - DNA, 330 bp, Homo sapiens; identical to SEQ ID NO: 230649
  chr4:122744981-122745311
  hyper

SEQ ID NO: 417764 - DNA, 524 bp, Homo sapiens; identical to SEQ ID NO: 230650
  chr4:122791300-122791824
  hyper

SEQ ID NO: 417765 - DNA, 178 bp, Homo sapiens; identical to SEQ ID NO: 199585
  chr4:123653964-123654142
  hyper

SEQ ID NO: 417766 - DNA, 657 bp, Homo sapiens; identical to SEQ ID NO: 230657
  chr4:123843158-123843815
  hyper

SEQ ID NO: 417767 - DNA, 178 bp, Homo sapiens; identical to SEQ ID NO: 230658
  chr4:123844085-123844263
  hyper

SEQ ID NO: 417768 - DNA, 338 bp, Homo sapiens; identical to SEQ ID NO: 230661
  chr4:124319560-124319898
  hyper

SEQ ID NO: 417769 - DNA, 209 bp, Homo sapiens; identical to SEQ ID NO: 282491
  chr4:124426861-124427070
  hyper

SEQ ID NO: 417770 - DNA, 79 bp, Homo sapiens; identical to SEQ ID NO: 282492
  chr4:124427137-124427216
  hyper

SEQ ID NO: 417771 - DNA, 196 bp, Homo sapiens; identical to SEQ ID NO: 199588
  chr4:124778304-124778500
  hyper

SEQ ID NO: 417772 - DNA, 620 bp, Homo sapiens; identical to SEQ ID NO: 282494
  chr4:125633097-125633717
  hyper

SEQ ID NO: 417773 - DNA, 283 bp, Homo sapiens; identical to SEQ ID NO: 282495
  chr4:125633784-125634067
  hyper

SEQ ID NO: 417774 - DNA, 242 bp, Homo sapiens; identical to SEQ ID NO: 282496
  chr4:126236000-126236242
  hyper

SEQ ID NO: 417775 - DNA, 250 bp, Homo sapiens; identical to SEQ ID NO: 282497
  chr4:126237060-126237310
  hyper

SEQ ID NO: 417776 - DNA, 43 bp, Homo sapiens; identical to SEQ ID NO: 199592
  chr4:126237611-126237654
  hyper

SEQ ID NO: 417777 - DNA, 118 bp, Homo sapiens; identical to SEQ ID NO: 282499
  chr4:126238436-126238554
  hyper

SEQ ID NO: 417778 - DNA, 45 bp, Homo sapiens; identical to SEQ ID NO: 199593
  chr4:128554021-128554066
  hyper

SEQ ID NO: 417779 - DNA, 137 bp, Homo sapiens; identical to SEQ ID NO: 199594
  chr4:128703235-128703372
  hyper

SEQ ID NO: 417780 - DNA, 245 bp, Homo sapiens; identical to SEQ ID NO: 230668
  chr4:128801996-128802241
  hyper

SEQ ID NO: 417781 - DNA, 385 bp, Homo sapiens; identical to SEQ ID NO: 110609
  chr4:128886040-128886425
  hyper

SEQ ID NO: 417782 - DNA, 130 bp, Homo sapiens; identical to SEQ ID NO: 199595
  chr4:128887030-128887160
  hyper

SEQ ID NO: 417783 - DNA, 316 bp, Homo sapiens; identical to SEQ ID NO: 230672
  chr4:130014786-130015102
  hyper

SEQ ID NO: 417784 - DNA, 144 bp, Homo sapiens; identical to SEQ ID NO: 230673
  chr4:134067330-134067474
  hyper

SEQ ID NO: 417785 - DNA, 57 bp, Homo sapiens; identical to SEQ ID NO: 199597
  chr4:134067733-134067790
  hyper

SEQ ID NO: 417786 - DNA, 147 bp, Homo sapiens; identical to SEQ ID NO: 282511
  chr4:134069142-134069289
  hyper

SEQ ID NO: 417787 - DNA, 297 bp, Homo sapiens; identical to SEQ ID NO: 199598
  chr4:134069896-134070193
  hyper

SEQ ID NO: 417788 - DNA, 158 bp, Homo sapiens; identical to SEQ ID NO: 282513
  chr4:134070455-134070613
  hyper

SEQ ID NO: 417789 - DNA, 157 bp, Homo sapiens; identical to SEQ ID NO: 282514
  chr4:134073705-134073862
  hyper

SEQ ID NO: 417790 - DNA, 111 bp, Homo sapiens; identical to SEQ ID NO: 282515
  chr4:134073919-134074030
  hyper

SEQ ID NO: 417791 - DNA, 130 bp, Homo sapiens; identical to SEQ ID NO: 230678
  chr4:134074354-134074484
  hyper

SEQ ID NO: 417792 - DNA, 95 bp, Homo sapiens; identical to SEQ ID NO: 230679
  chr4:139773302-139773397
  hyper

SEQ ID NO: 417793 - DNA, 92 bp, Homo sapiens; identical to SEQ ID NO: 230680
  chr4:140005146-140005238
  hyper

SEQ ID NO: 417794 - DNA, 44 bp, Homo sapiens; identical to SEQ ID NO: 230681
  chr4:140005729-140005773
  hyper

SEQ ID NO: 417795 - DNA, 102 bp, Homo sapiens; identical to SEQ ID NO: 199600
  chr4:140097254-140097356
  hyper

SEQ ID NO: 417796 - DNA, 186 bp, Homo sapiens; identical to SEQ ID NO: 230682
  chr4:140187863-140188049
  hyper

SEQ ID NO: 417797 - DNA, 403 bp, Homo sapiens; identical to SEQ ID NO: 230684
  chr4:140222258-140222661
  hyper

SEQ ID NO: 417798 - DNA, 251 bp, Homo sapiens; identical to SEQ ID NO: 282523
  chr4:140374762-140375013
  hyper

SEQ ID NO: 417799 - DNA, 180 bp, Homo sapiens; identical to SEQ ID NO: 222492
  chr4:140587058-140587238
  hyper

SEQ ID NO: 417800 - DNA, 36 bp, Homo sapiens; identical to SEQ ID NO: 230687
  chr4:140969978-140970014
  hyper

SEQ ID NO: 417801 - DNA, 1319 bp, Homo sapiens; identical to SEQ ID NO: 199602
  chr4:141071488-141072807
  hyper

SEQ ID NO: 417802 - DNA, 2282 bp, Homo sapiens; identical to SEQ ID NO: 282529
  chr4:141073109-141075391
  hyper

SEQ ID NO: 417803 - DNA, 61 bp, Homo sapiens; identical to SEQ ID NO: 230691
  chr4:141173821-141173882
  hyper

SEQ ID NO: 417804 - DNA, 224 bp, Homo sapiens; identical to SEQ ID NO: 282535
  chr4:141348840-141349064
  hyper

SEQ ID NO: 417805 - DNA, 121 bp, Homo sapiens; identical to SEQ ID NO: 230695
  chr4:141445663-141445784
  hyper

SEQ ID NO: 417806 - DNA, 1308 bp, Homo sapiens; identical to SEQ ID NO: 222498
  chr4:141676913-141678221
  hyper

SEQ ID NO: 417807 - DNA, 71 bp, Homo sapiens; identical to SEQ ID NO: 199614
  chr4:142141958-142142029
  hyper

SEQ ID NO: 417808 - DNA, 67 bp, Homo sapiens; identical to SEQ ID NO: 230705
  chr4:144105725-144105792
  hyper

SEQ ID NO: 417809 - DNA, 540 bp, Homo sapiens; identical to SEQ ID NO: 199619
  chr4:144256959-144257499
  hyper

SEQ ID NO: 417810 - DNA, 189 bp, Homo sapiens; identical to SEQ ID NO: 199620
  chr4:144257937-144258126
  hyper

SEQ ID NO: 417811 - DNA, 300 bp, Homo sapiens; identical to SEQ ID NO: 199621
  chr4:144258375-144258675
  hyper

SEQ ID NO: 417812 - DNA, 270 bp, Homo sapiens; identical to SEQ ID NO: 230708
  chr4:144434324-144434594
  hyper

SEQ ID NO: 417813 - DNA, 182 bp, Homo sapiens; identical to SEQ ID NO: 230709
  chr4:144434957-144435139
  hyper

SEQ ID NO: 417814 - DNA, 130 bp, Homo sapiens; identical to SEQ ID NO: 282551
  chr4:144480192-144480322
  hyper

SEQ ID NO: 417815 - DNA, 371 bp, Homo sapiens; identical to SEQ ID NO: 282552
  chr4:144480364-144480735
  hyper

SEQ ID NO: 417816 - DNA, 201 bp, Homo sapiens; identical to SEQ ID NO: 282554
  chr4:145566944-145567145
  hyper

SEQ ID NO: 417817 - DNA, 223 bp, Homo sapiens; identical to SEQ ID NO: 282555
  chr4:145567402-145567625
  hyper

SEQ ID NO: 417818 - DNA, 171 bp, Homo sapiens; identical to SEQ ID NO: 230713
  chr4:146018850-146019021
  hyper

SEQ ID NO: 417819 - DNA, 1185 bp, Homo sapiens; identical to SEQ ID NO: 282558
  chr4:146402704-146403889
  hyper

SEQ ID NO: 417820 - DNA, 43 bp, Homo sapiens; identical to SEQ ID NO: 199626
  chr4:147443081-147443124
  hyper

SEQ ID NO: 417821 - DNA, 91 bp, Homo sapiens; identical to SEQ ID NO: 282562
  chr4:148402121-148402212
  hyper

SEQ ID NO: 417822 - DNA, 174 bp, Homo sapiens; identical to SEQ ID NO: 199628
  chr4:148402740-148402914
  hyper

SEQ ID NO: 417823 - DNA, 33 bp, Homo sapiens; identical to SEQ ID NO: 199629
  chr4:148538935-148538968
  hyper

SEQ ID NO: 417824 - DNA, 120 bp, Homo sapiens; identical to SEQ ID NO: 199631
  chr4:149363664-149363784
  hyper

SEQ ID NO: 417825 - DNA, 93 bp, Homo sapiens; identical to SEQ ID NO: 199632
  chr4:149364560-149364653
  hyper

SEQ ID NO: 417826 - DNA, 123 bp, Homo sapiens; identical to SEQ ID NO: 230731
  chr4:152020631-152020754
  hyper

SEQ ID NO: 417827 - DNA, 239 bp, Homo sapiens; identical to SEQ ID NO: 230732
  chr4:152021090-152021329
  hyper

SEQ ID NO: 417828 - DNA, 184 bp, Homo sapiens; identical to SEQ ID NO: 199646
  chr4:154073356-154073540
  hyper

SEQ ID NO: 417829 - DNA, 86 bp, Homo sapiens; identical to SEQ ID NO: 230739
  chr4:154073798-154073884
  hyper

SEQ ID NO: 417830 - DNA, 117 bp, Homo sapiens; identical to SEQ ID NO: 230741
  chr4:154387146-154387263
  hyper

SEQ ID NO: 417831 - DNA, 226 bp, Homo sapiens; identical to SEQ ID NO: 282589
  chr4:154387970-154388196
  hyper

SEQ ID NO: 417832 - DNA, 47 bp, Homo sapiens; identical to SEQ ID NO: 230743
  chr4:154605244-154605291
  hyper

SEQ ID NO: 417833 - DNA, 271 bp, Homo sapiens; identical to SEQ ID NO: 282591
  chr4:154710914-154711185
  hyper

SEQ ID NO: 417834 - DNA, 348 bp, Homo sapiens; identical to SEQ ID NO: 230754
  chr4:155471470-155471818
  hyper

SEQ ID NO: 417835 - DNA, 53 bp, Homo sapiens; identical to SEQ ID NO: 230755
  chr4:155662823-155662876
  hyper

SEQ ID NO: 417836 - DNA, 164 bp, Homo sapiens; identical to SEQ ID NO: 199655
  chr4:156589109-156589273
  hyper

SEQ ID NO: 417837 - DNA, 42 bp, Homo sapiens; identical to SEQ ID NO: 199656
  chr4:156589363-156589405
  hyper

SEQ ID NO: 417838 - DNA, 178 bp, Homo sapiens; identical to SEQ ID NO: 199659
  chr4:157891924-157892102
  hyper

SEQ ID NO: 417839 - DNA, 246 bp, Homo sapiens; identical to SEQ ID NO: 199660
  chr4:157892475-157892721
  hyper

SEQ ID NO: 417840 - DNA, 465 bp, Homo sapiens; identical to SEQ ID NO: 282608
  chr4:157892762-157893227
  hyper

SEQ ID NO: 417841 - DNA, 170 bp, Homo sapiens; identical to SEQ ID NO: 199662
  chr4:157997215-157997385
  hyper

SEQ ID NO: 417842 - DNA, 102 bp, Homo sapiens; identical to SEQ ID NO: 199663
  chr4:157997663-157997765
  hyper

SEQ ID NO: 417843 - DNA, 103 bp, Homo sapiens; identical to SEQ ID NO: 396882
  chr4:158143917-158144020
  hyper

SEQ ID NO: 417844 - DNA, 129 bp, Homo sapiens; identical to SEQ ID NO: 230768
  chr4:159593505-159593634
  hyper

SEQ ID NO: 417845 - DNA, 150 bp, Homo sapiens; identical to SEQ ID NO: 230771
  chr4:164088008-164088158
  hyper

SEQ ID NO: 417846 - DNA, 64 bp, Homo sapiens; identical to SEQ ID NO: 230774
  chr4:164415572-164415636
  hyper

SEQ ID NO: 417847 - DNA, 48 bp, Homo sapiens; identical to SEQ ID NO: 230775
  chr4:164415908-164415956
  hyper

SEQ ID NO: 417848 - DNA, 140 bp, Homo sapiens; identical to SEQ ID NO: 282625
  chr4:165305190-165305330
  hyper

SEQ ID NO: 417849 - DNA, 79 bp, Homo sapiens; identical to SEQ ID NO: 230777
  chr4:166248060-166248139
  hyper

SEQ ID NO: 417850 - DNA, 280 bp, Homo sapiens; identical to SEQ ID NO: 282629
  chr4:168155508-168155788
  hyper

SEQ ID NO: 417851 - DNA, 228 bp, Homo sapiens; identical to SEQ ID NO: 282630
  chr4:168155867-168156095
  hyper

SEQ ID NO: 417852 - DNA, 467 bp, Homo sapiens; identical to SEQ ID NO: 230783
  chr4:169401169-169401636
  hyper

SEQ ID NO: 417853 - DNA, 115 bp, Homo sapiens; identical to SEQ ID NO: 199674
  chr4:169552932-169553047
  hyper

SEQ ID NO: 417854 - DNA, 178 bp, Homo sapiens; identical to SEQ ID NO: 230787
  chr4:169931434-169931612
  hyper

SEQ ID NO: 417855 - DNA, 73 bp, Homo sapiens; identical to SEQ ID NO: 199677
  chr4:170192274-170192347
  hyper

SEQ ID NO: 417856 - DNA, 40 bp, Homo sapiens; identical to SEQ ID NO: 199678
  chr4:170192665-170192705
  hyper

SEQ ID NO: 417857 - DNA, 260 bp, Homo sapiens; identical to SEQ ID NO: 388158
  chr4:170946845-170947105
  hyper

SEQ ID NO: 417858 - DNA, 42 bp, Homo sapiens; identical to SEQ ID NO: 230795
  chr4:174254798-174254840
  hyper

SEQ ID NO: 417859 - DNA, 180 bp, Homo sapiens; identical to SEQ ID NO: 230796
  chr4:174291979-174292159
  hyper

SEQ ID NO: 417860 - DNA, 514 bp, Homo sapiens; identical to SEQ ID NO: 230797
  chr4:174415375-174415889
  hyper

SEQ ID NO: 417861 - DNA, 76 bp, Homo sapiens; identical to SEQ ID NO: 282650
  chr4:174429791-174429867
  hyper

SEQ ID NO: 417862 - DNA, 43 bp, Homo sapiens; identical to SEQ ID NO: 110864
  chr4:174429949-174429992
  hyper

SEQ ID NO: 417863 - DNA, 398 bp, Homo sapiens; identical to SEQ ID NO: 110869
  chr4:174439053-174439451
  hyper

SEQ ID NO: 417864 - DNA, 237 bp, Homo sapiens; identical to SEQ ID NO: 282658
  chr4:174449662-174449899
  hyper

SEQ ID NO: 417865 - DNA, 205 bp, Homo sapiens; identical to SEQ ID NO: 230816
  chr4:175204404-175204609
  hyper

SEQ ID NO: 417866 - DNA, 639 bp, Homo sapiens; identical to SEQ ID NO: 230817
  chr4:175204865-175205504
  hyper

SEQ ID NO: 417867 - DNA, 114 bp, Homo sapiens; identical to SEQ ID NO: 230818
  chr4:175444082-175444196
  hyper

SEQ ID NO: 417868 - DNA, 99 bp, Homo sapiens; identical to SEQ ID NO: 199694
  chr4:177240753-177240852
  hyper

SEQ ID NO: 417869 - DNA, 98 bp, Homo sapiens; identical to SEQ ID NO: 230823
  chr4:177241206-177241304
  hyper

SEQ ID NO: 417870 - DNA, 69 bp, Homo sapiens; identical to SEQ ID NO: 199695
  chr4:177713159-177713228
  hyper

SEQ ID NO: 417871 - DNA, 168 bp, Homo sapiens; identical to SEQ ID NO: 199696
  chr4:178230844-178231012
  hyper

SEQ ID NO: 417872 - DNA, 236 bp, Homo sapiens; identical to SEQ ID NO: 230826
  chr4:178363508-178363744
  hyper

SEQ ID NO: 417873 - DNA, 126 bp, Homo sapiens; identical to SEQ ID NO: 230827
  chr4:178363969-178364095
  hyper

SEQ ID NO: 417874 - DNA, 48 bp, Homo sapiens; identical to SEQ ID NO: 222534
  chr4:179699960-179700008
  hyper

SEQ ID NO: 417875 - DNA, 226 bp, Homo sapiens; identical to SEQ ID NO: 282676
  chr4:180978997-180979223
  hyper

SEQ ID NO: 417876 - DNA, 574 bp, Homo sapiens; identical to SEQ ID NO: 282678
  chr4:180980410-180980984
  hyper

SEQ ID NO: 417877 - DNA, 211 bp, Homo sapiens; identical to SEQ ID NO: 282679
  chr4:183063455-183063666
  hyper

SEQ ID NO: 417878 - DNA, 429 bp, Homo sapiens; identical to SEQ ID NO: 282680
  chr4:183065517-183065946
  hyper

SEQ ID NO: 417879 - DNA, 318 bp, Homo sapiens; identical to SEQ ID NO: 282681
  chr4:183066306-183066624
  hyper

SEQ ID NO: 417880 - DNA, 41 bp, Homo sapiens; identical to SEQ ID NO: 282682
  chr4:183369220-183369261
  hyper

SEQ ID NO: 417881 - DNA, 241 bp, Homo sapiens; identical to SEQ ID NO: 282683
  chr4:183370318-183370559
  hyper

SEQ ID NO: 417882 - DNA, 321 bp, Homo sapiens; identical to SEQ ID NO: 282688
  chr4:184328290-184328611
  hyper

SEQ ID NO: 417883 - DNA, 36 bp, Homo sapiens; identical to SEQ ID NO: 230836
  chr4:184365599-184365635
  hyper

SEQ ID NO: 417884 - DNA, 50 bp, Homo sapiens; identical to SEQ ID NO: 230837
  chr4:184580352-184580402
  hyper

SEQ ID NO: 417885 - DNA, 75 bp, Homo sapiens; identical to SEQ ID NO: 282693
  chr4:184826163-184826238
  hyper

SEQ ID NO: 417886 - DNA, 47 bp, Homo sapiens; identical to SEQ ID NO: 199704
  chr4:184826657-184826704
  hyper

SEQ ID NO: 417887 - DNA, 233 bp, Homo sapiens; identical to SEQ ID NO: 199705
  chr4:184826705-184826938
  hyper

SEQ ID NO: 417888 - DNA, 266 bp, Homo sapiens; identical to SEQ ID NO: 199706
  chr4:184827291-184827557
  hyper

SEQ ID NO: 417889 - DNA, 136 bp, Homo sapiens; identical to SEQ ID NO: 282697
  chr4:184827659-184827795
  hyper

SEQ ID NO: 417890 - DNA, 40 bp, Homo sapiens; identical to SEQ ID NO: 110933
  chr4:184828122-184828162
  hyper

SEQ ID NO: 417891 - DNA, 101 bp, Homo sapiens; identical to SEQ ID NO: 199708
  chr4:185396094-185396195
  hyper

SEQ ID NO: 417892 - DNA, 40 bp, Homo sapiens; identical to SEQ ID NO: 230842
  chr4:185747361-185747401
  hyper

SEQ ID NO: 417893 - DNA, 64 bp, Homo sapiens; identical to SEQ ID NO: 199710
  chr4:185937209-185937273
  hyper

SEQ ID NO: 417894 - DNA, 402 bp, Homo sapiens; identical to SEQ ID NO: 282703
  chr4:185938975-185939377
  hyper

SEQ ID NO: 417895 - DNA, 69 bp, Homo sapiens; identical to SEQ ID NO: 230848
  chr4:185961214-185961283
  hyper

SEQ ID NO: 417896 - DNA, 54 bp, Homo sapiens; identical to SEQ ID NO: 230850
  chr4:186064211-186064265
  hyper

SEQ ID NO: 417897 - DNA, 68 bp, Homo sapiens; identical to SEQ ID NO: 199713
  chr4:186130483-186130551
  hyper

SEQ ID NO: 417898 - DNA, 79 bp, Homo sapiens; identical to SEQ ID NO: 230851
  chr4:186317080-186317159
  hyper

SEQ ID NO: 417899 - DNA, 344 bp, Homo sapiens; identical to SEQ ID NO: 230852
  chr4:186347192-186347536
  hyper

SEQ ID NO: 417900 - DNA, 108 bp, Homo sapiens; identical to SEQ ID NO: 199714
  chr4:186434979-186435087
  hyper

SEQ ID NO: 417901 - DNA, 501 bp, Homo sapiens; identical to SEQ ID NO: 282712
  chr4:186456226-186456727
  hyper

SEQ ID NO: 417902 - DNA, 112 bp, Homo sapiens; identical to SEQ ID NO: 199715
  chr4:186706061-186706173
  hyper

SEQ ID NO: 417903 - DNA, 880 bp, Homo sapiens; identical to SEQ ID NO: 230858
  chr4:187644343-187645223
  hyper

SEQ ID NO: 417904 - DNA, 565 bp, Homo sapiens; identical to SEQ ID NO: 199716
  chr4:187645505-187646070
  hyper

SEQ ID NO: 417905 - DNA, 176 bp, Homo sapiens; identical to SEQ ID NO: 199717
  chr4:187646285-187646461
  hyper

SEQ ID NO: 417906 - DNA, 331 bp, Homo sapiens; identical to SEQ ID NO: 396924
  chr4:187646716-187647047
  hyper

SEQ ID NO: 417907 - DNA, 86 bp, Homo sapiens; identical to SEQ ID NO: 199722
  chr4:190123535-190123621
  hyper

SEQ ID NO: 417908 - DNA, 166 bp, Homo sapiens; identical to SEQ ID NO: 282723
  chr5:54097-54263
  hyper

SEQ ID NO: 417909 - DNA, 68 bp, Homo sapiens; identical to SEQ ID NO: 282724
  chr5:54264-54332
  hyper

SEQ ID NO: 417910 - DNA, 191 bp, Homo sapiens; identical to SEQ ID NO: 199723
  chr5:92399-92590
  hyper

SEQ ID NO: 417911 - DNA, 64 bp, Homo sapiens; identical to SEQ ID NO: 282726
  chr5:343971-344035
  hyper

SEQ ID NO: 417912 - DNA, 207 bp, Homo sapiens; identical to SEQ ID NO: 282727
  chr5:344297-344504
  hyper

SEQ ID NO: 417913 - DNA, 82 bp, Homo sapiens; identical to SEQ ID NO: 199724
  chr5:368381-368463
  hyper

SEQ ID NO: 417914 - DNA, 259 bp, Homo sapiens; identical to SEQ ID NO: 199725
  chr5:373104-373363
  hyper

SEQ ID NO: 417915 - DNA, 285 bp, Homo sapiens; identical to SEQ ID NO: 199726
  chr5:374579-374864
  hyper

SEQ ID NO: 417916 - DNA, 267 bp, Homo sapiens; identical to SEQ ID NO: 222548
  chr5:377105-377372
  hyper

SEQ ID NO: 417917 - DNA, 51 bp, Homo sapiens; identical to SEQ ID NO: 222554
  chr5:612241-612292
  hyper

SEQ ID NO: 417918 - DNA, 35 bp, Homo sapiens; identical to SEQ ID NO: 199731
  chr5:693798-693833
  hyper

SEQ ID NO: 417919 - DNA, 225 bp, Homo sapiens; identical to SEQ ID NO: 230869
  chr5:923604-923829
  hyper

SEQ ID NO: 417920 - DNA, 370 bp, Homo sapiens; identical to SEQ ID NO: 388174
  chr5:1064042-1064412
  hyper

SEQ ID NO: 417921 - DNA, 57 bp, Homo sapiens; identical to SEQ ID NO: 282745
  chr5:1104736-1104793
  hyper

SEQ ID NO: 417922 - DNA, 163 bp, Homo sapiens; identical to SEQ ID NO: 282746
  chr5:1104884-1105047
  hyper

SEQ ID NO: 417923 - DNA, 35 bp, Homo sapiens; identical to SEQ ID NO: 199738
  chr5:1140552-1140587
  hyper

SEQ ID NO: 417924 - DNA, 369 bp, Homo sapiens; identical to SEQ ID NO: 282750
  chr5:1279435-1279804
  hyper

SEQ ID NO: 417925 - DNA, 111 bp, Homo sapiens; identical to SEQ ID NO: 282751
  chr5:1294071-1294182
  hyper

SEQ ID NO: 417926 - DNA, 45 bp, Homo sapiens; identical to SEQ ID NO: 199739
  chr5:1345798-1345843
  hyper

SEQ ID NO: 417927 - DNA, 91 bp, Homo sapiens; identical to SEQ ID NO: 282755
  chr5:1852001-1852092
  hyper

SEQ ID NO: 417928 - DNA, 94 bp, Homo sapiens; identical to SEQ ID NO: 282758
  chr5:1879045-1879139
  hyper

SEQ ID NO: 417929 - DNA, 89 bp, Homo sapiens; identical to SEQ ID NO: 282760
  chr5:1882047-1882136
  hyper

SEQ ID NO: 417930 - DNA, 99 bp, Homo sapiens; identical to SEQ ID NO: 111084
  chr5:2741122-2741221
  hyper

SEQ ID NO: 417931 - DNA, 48 bp, Homo sapiens; identical to SEQ ID NO: 282763
  chr5:2749729-2749777
  hyper

SEQ ID NO: 417932 - DNA, 109 bp, Homo sapiens; identical to SEQ ID NO: 111092
  chr5:2749840-2749949
  hyper

SEQ ID NO: 417933 - DNA, 619 bp, Homo sapiens; identical to SEQ ID NO: 396937
  chr5:2753746-2754365
  hyper

SEQ ID NO: 417934 - DNA, 40 bp, Homo sapiens; identical to SEQ ID NO: 282766
  chr5:2754767-2754807
  hyper

SEQ ID NO: 417935 - DNA, 234 bp, Homo sapiens; identical to SEQ ID NO: 282767
  chr5:2754908-2755142
  hyper

SEQ ID NO: 417936 - DNA, 265 bp, Homo sapiens; identical to SEQ ID NO: 230906
  chr5:2757844-2758109
  hyper

SEQ ID NO: 417937 - DNA, 208 bp, Homo sapiens; identical to SEQ ID NO: 282771
  chr5:3590903-3591111
  hyper

SEQ ID NO: 417938 - DNA, 94 bp, Homo sapiens; identical to SEQ ID NO: 199747
  chr5:3591458-3591552
  hyper

SEQ ID NO: 417939 - DNA, 244 bp, Homo sapiens; identical to SEQ ID NO: 199748
  chr5:3591613-3591857
  hyper

SEQ ID NO: 417940 - DNA, 79 bp, Homo sapiens; identical to SEQ ID NO: 282774
  chr5:3592384-3592463
  hyper

SEQ ID NO: 417941 - DNA, 302 bp, Homo sapiens; identical to SEQ ID NO: 282775
  chr5:3592881-3593183
  hyper

SEQ ID NO: 417942 - DNA, 243 bp, Homo sapiens; identical to SEQ ID NO: 282776
  chr5:3601905-3602148
  hyper

SEQ ID NO: 417943 - DNA, 95 bp, Homo sapiens; identical to SEQ ID NO: 282778
  chr5:5887042-5887137
  hyper

SEQ ID NO: 417944 - DNA, 98 bp, Homo sapiens; identical to SEQ ID NO: 282779
  chr5:5887246-5887344
  hyper

SEQ ID NO: 417945 - DNA, 78 bp, Homo sapiens; identical to SEQ ID NO: 230925
  chr5:6378229-6378307
  hyper

SEQ ID NO: 417946 - DNA, 70 bp, Homo sapiens; identical to SEQ ID NO: 199750
  chr5:6687057-6687127
  hyper

SEQ ID NO: 417947 - DNA, 129 bp, Homo sapiens; identical to SEQ ID NO: 230929
  chr5:6714973-6715102
  hyper

SEQ ID NO: 417948 - DNA, 209 bp, Homo sapiens; identical to SEQ ID NO: 199751
  chr5:7396264-7396473
  hyper

SEQ ID NO: 417949 - DNA, 85 bp, Homo sapiens; identical to SEQ ID NO: 282786
  chr5:7851299-7851384
  hyper

SEQ ID NO: 417950 - DNA, 71 bp, Homo sapiens; identical to SEQ ID NO: 199752
  chr5:9544614-9544685
  hyper

SEQ ID NO: 417951 - DNA, 125 bp, Homo sapiens
  chr5:9546439-9546564
  hyper
gctgcaccccaggagttccattccagcctccccagtgcgagtgcggccgagcgctgacttttgggggctccctcccccgtctcactgggtccctctgcggctcccccgcccgctgtcccggttca

SEQ ID NO: 417952 - DNA, 88 bp, Homo sapiens; identical to SEQ ID NO: 282790
  chr5:9546688-9546776
  hyper

SEQ ID NO: 417953 - DNA, 55 bp, Homo sapiens; identical to SEQ ID NO: 230933
  chr5:10250264-10250319
  hyper

SEQ ID NO: 417954 - DNA, 902 bp, Homo sapiens; identical to SEQ ID NO: 282794
  chr5:10441403-10442305
  hyper

SEQ ID NO: 417955 - DNA, 96 bp, Homo sapiens; identical to SEQ ID NO: 230941
  chr5:10627880-10627976
  hyper

SEQ ID NO: 417956 - DNA, 170 bp, Homo sapiens; identical to SEQ ID NO: 199758
  chr5:10988184-10988354
  hyper

SEQ ID NO: 417957 - DNA, 58 bp, Homo sapiens; identical to SEQ ID NO: 199761
  chr5:14108555-14108613
  hyper

SEQ ID NO: 417958 - DNA, 53 bp, Homo sapiens; identical to SEQ ID NO: 199762
  chr5:14108840-14108893
  hyper

SEQ ID NO: 417959 - DNA, 572 bp, Homo sapiens
  chr5:14143533-14144105
  hyper
gactgcgcgtccgggaggcgcgtgctgctgcccgcgctccggccggcgcccgggaggccgtggctccgcgcctccgcccctcggccagctcgcggctaccgggcggagtcctcgtctatgtgggcgcgctccttgggccgagccgccgccgccgccccccgccgccccggggctctgcgtccgcgcgccgggcgcgggcagctgggtgctcggcgccgccaggcccggcgcggagcgggcggcacgcggcgctaggggcgcggggcccgaggcgggcgcggccgcgggcgccgccgcagccatgagcggcagcagcggcggagccgccgcccccgccgcgtcctccggccccgccgcggcggccagcgcggctggctcgggctgcgggggcggtgccggcgagggggcagaggaggcggccaaggacctggccgacatcgcggccttcttccgatccggtgagtgcaactgcggccggcccgcccagcggcgctgccccaagcgctcggccgacccgccgcggagctgccgagctccggccaccgcgcgctggtgcccgcccgtccgtccgt

SEQ ID NO: 417960 - DNA, 124 bp, Homo sapiens; identical to SEQ ID NO: 3833
  chr5:14144285-14144409
  hyper

SEQ ID NO: 417961 - DNA, 45 bp, Homo sapiens; identical to SEQ ID NO: 199766
  chr5:14145000-14145045
  hyper

SEQ ID NO: 417962 - DNA, 94 bp, Homo sapiens; identical to SEQ ID NO: 230950
  chr5:14810079-14810173
  hyper

SEQ ID NO: 417963 - DNA, 93 bp, Homo sapiens; identical to SEQ ID NO: 199768
  chr5:15499745-15499838
  hyper

SEQ ID NO: 417964 - DNA, 129 bp, Homo sapiens; identical to SEQ ID NO: 396955
  chr5:15499947-15500076
  hyper

SEQ ID NO: 417965 - DNA, 292 bp, Homo sapiens; identical to SEQ ID NO: 282813
  chr5:16616791-16617083
  hyper

SEQ ID NO: 417966 - DNA, 31 bp, Homo sapiens; identical to SEQ ID NO: 384061
  chr5:17217142-17217173
  hyper

SEQ ID NO: 417967 - DNA, 38 bp, Homo sapiens; identical to SEQ ID NO: 230958
  chr5:17217233-17217271
  hyper

SEQ ID NO: 417968 - DNA, 76 bp, Homo sapiens; identical to SEQ ID NO: 199779
  chr5:17987028-17987104
  hyper

SEQ ID NO: 417969 - DNA, 84 bp, Homo sapiens; identical to SEQ ID NO: 230960
  chr5:21459584-21459668
  hyper

SEQ ID NO: 417970 - DNA, 188 bp, Homo sapiens; identical to SEQ ID NO: 199780
  chr5:24644974-24645162
  hyper

SEQ ID NO: 417971 - DNA, 121 bp, Homo sapiens; identical to SEQ ID NO: 199781
  chr5:29296854-29296975
  hyper

SEQ ID NO: 417972 - DNA, 54 bp, Homo sapiens; identical to SEQ ID NO: 199782
  chr5:31194641-31194695
  hyper

SEQ ID NO: 417973 - DNA, 54 bp, Homo sapiens; identical to SEQ ID NO: 111231
  chr5:31194760-31194814
  hyper

SEQ ID NO: 417974 - DNA, 158 bp, Homo sapiens; identical to SEQ ID NO: 230964
  chr5:31532167-31532325
  hyper

SEQ ID NO: 417975 - DNA, 139 bp, Homo sapiens; identical to SEQ ID NO: 282836
  chr5:32313003-32313142
  hyper

SEQ ID NO: 417976 - DNA, 252 bp, Homo sapiens; identical to SEQ ID NO: 111238
  chr5:32313198-32313450
  hyper

SEQ ID NO: 417977 - DNA, 214 bp, Homo sapiens; identical to SEQ ID NO: 199785
  chr5:32709879-32710093
  hyper

SEQ ID NO: 417978 - DNA, 72 bp, Homo sapiens; identical to SEQ ID NO: 282839
  chr5:32713505-32713577
  hyper

SEQ ID NO: 417979 - DNA, 193 bp, Homo sapiens; identical to SEQ ID NO: 230975
  chr5:34007307-34007500
  hyper

SEQ ID NO: 417980 - DNA, 52 bp, Homo sapiens; identical to SEQ ID NO: 199787
  chr5:34008090-34008142
  hyper

SEQ ID NO: 417981 - DNA, 79 bp, Homo sapiens; identical to SEQ ID NO: 199788
  chr5:34486431-34486510
  hyper

SEQ ID NO: 417982 - DNA, 182 bp, Homo sapiens; identical to SEQ ID NO: 111256
  chr5:34915469-34915651
  hyper

SEQ ID NO: 417983 - DNA, 188 bp, Homo sapiens; identical to SEQ ID NO: 230980
  chr5:34915876-34916064
  hyper

SEQ ID NO: 417984 - DNA, 88 bp, Homo sapiens; identical to SEQ ID NO: 230981
  chr5:34929946-34930034
  hyper

SEQ ID NO: 417985 - DNA, 175 bp, Homo sapiens; identical to SEQ ID NO: 282853
  chr5:36066734-36066909
  hyper

SEQ ID NO: 417986 - DNA, 53 bp, Homo sapiens; identical to SEQ ID NO: 230984
  chr5:36151263-36151316
  hyper

SEQ ID NO: 417987 - DNA, 87 bp, Homo sapiens; identical to SEQ ID NO: 230985
  chr5:36152364-36152451
  hyper

SEQ ID NO: 417988 - DNA, 228 bp, Homo sapiens; identical to SEQ ID NO: 230986
  chr5:36242122-36242350
  hyper

SEQ ID NO: 417989 - DNA, 103 bp, Homo sapiens; identical to SEQ ID NO: 230987
  chr5:36606432-36606535
  hyper

SEQ ID NO: 417990 - DNA, 69 bp, Homo sapiens; identical to SEQ ID NO: 199794
  chr5:36607363-36607432
  hyper

SEQ ID NO: 417991 - DNA, 172 bp, Homo sapiens; identical to SEQ ID NO: 282860
  chr5:36693072-36693244
  hyper

SEQ ID NO: 417992 - DNA, 246 bp, Homo sapiens; identical to SEQ ID NO: 199797
  chr5:36693274-36693520
  hyper

SEQ ID NO: 417993 - DNA, 316 bp, Homo sapiens; identical to SEQ ID NO: 230994
  chr5:37370926-37371242
  hyper

SEQ ID NO: 417994 - DNA, 170 bp, Homo sapiens; identical to SEQ ID NO: 282865
  chr5:37371575-37371745
  hyper

SEQ ID NO: 417995 - DNA, 153 bp, Homo sapiens; identical to SEQ ID NO: 230996
  chr5:37379258-37379411
  hyper

SEQ ID NO: 417996 - DNA, 265 bp, Homo sapiens; identical to SEQ ID NO: 199800
  chr5:38258958-38259223
  hyper

SEQ ID NO: 417997 - DNA, 158 bp, Homo sapiens; identical to SEQ ID NO: 231003
  chr5:39075114-39075272
  hyper

SEQ ID NO: 417998 - DNA, 42 bp, Homo sapiens; identical to SEQ ID NO: 199804
  chr5:39424510-39424552
  hyper

SEQ ID NO: 417999 - DNA, 41 bp, Homo sapiens; identical to SEQ ID NO: 199805
  chr5:39424612-39424653
  hyper

SEQ ID NO: 418000 - DNA, 189 bp, Homo sapiens; identical to SEQ ID NO: 199808
  chr5:40798280-40798469
  hyper

SEQ ID NO: 418001 - DNA, 104 bp, Homo sapiens; identical to SEQ ID NO: 231009
  chr5:40835228-40835332
  hyper

SEQ ID NO: 418002 - DNA, 343 bp, Homo sapiens; identical to SEQ ID NO: 231012
  chr5:41904222-41904565
  hyper

SEQ ID NO: 418003 - DNA, 316 bp, Homo sapiens; identical to SEQ ID NO: 231013
  chr5:41925471-41925787
  hyper

SEQ ID NO: 418004 - DNA, 236 bp, Homo sapiens; identical to SEQ ID NO: 199812
  chr5:42423573-42423809
  hyper

SEQ ID NO: 418005 - DNA, 119 bp, Homo sapiens; identical to SEQ ID NO: 199813
  chr5:42423971-42424090
  hyper

SEQ ID NO: 418006 - DNA, 729 bp, Homo sapiens; identical to SEQ ID NO: 282886
  chr5:42949351-42950080
  hyper

SEQ ID NO: 418007 - DNA, 34 bp, Homo sapiens; identical to SEQ ID NO: 199816
  chr5:42993813-42993847
  hyper

SEQ ID NO: 418008 - DNA, 91 bp, Homo sapiens; identical to SEQ ID NO: 199823
  chr5:43040739-43040830
  hyper

SEQ ID NO: 418009 - DNA, 195 bp, Homo sapiens; identical to SEQ ID NO: 199824
  chr5:43041028-43041223
  hyper

SEQ ID NO: 418010 - DNA, 349 bp, Homo sapiens; identical to SEQ ID NO: 231028
  chr5:43041474-43041823
  hyper

SEQ ID NO: 418011 - DNA, 1169 bp, Homo sapiens; identical to SEQ ID NO: 199825
  chr5:43042087-43043256
  hyper

SEQ ID NO: 418012 - DNA, 253 bp, Homo sapiens; identical to SEQ ID NO: 199826
  chr5:43043288-43043541
  hyper

SEQ ID NO: 418013 - DNA, 444 bp, Homo sapiens; identical to SEQ ID NO: 231030
  chr5:43067119-43067563
  hyper

SEQ ID NO: 418014 - DNA, 36 bp, Homo sapiens; identical to SEQ ID NO: 231031
  chr5:43120913-43120949
  hyper

SEQ ID NO: 418015 - DNA, 32 bp, Homo sapiens; identical to SEQ ID NO: 231032
  chr5:43121558-43121590
  hyper

SEQ ID NO: 418016 - DNA, 35 bp, Homo sapiens; identical to SEQ ID NO: 199827
  chr5:43193140-43193175
  hyper

SEQ ID NO: 418017 - DNA, 200 bp, Homo sapiens; identical to SEQ ID NO: 231034
  chr5:43313630-43313830
  hyper

SEQ ID NO: 418018 - DNA, 284 bp, Homo sapiens; identical to SEQ ID NO: 231036
  chr5:43484116-43484400
  hyper

SEQ ID NO: 418019 - DNA, 266 bp, Homo sapiens; identical to SEQ ID NO: 231037
  chr5:43514901-43515167
  hyper

SEQ ID NO: 418020 - DNA, 274 bp, Homo sapiens; identical to SEQ ID NO: 199829
  chr5:44389052-44389326
  hyper

SEQ ID NO: 418021 - DNA, 41 bp, Homo sapiens; identical to SEQ ID NO: 282910
  chr5:44390394-44390435
  hyper

SEQ ID NO: 418022 - DNA, 348 bp, Homo sapiens; identical to SEQ ID NO: 231041
  chr5:44808978-44809326
  hyper

SEQ ID NO: 418023 - DNA, 220 bp, Homo sapiens; identical to SEQ ID NO: 282912
  chr5:45695686-45695906
  hyper

SEQ ID NO: 418024 - DNA, 162 bp, Homo sapiens; identical to SEQ ID NO: 282913
  chr5:45696137-45696299
  hyper

SEQ ID NO: 418025 - DNA, 166 bp, Homo sapiens; identical to SEQ ID NO: 199830
  chr5:45696558-45696724
  hyper

SEQ ID NO: 418026 - DNA, 64 bp, Homo sapiens; identical to SEQ ID NO: 231043
  chr5:50259395-50259459
  hyper

SEQ ID NO: 418027 - DNA, 97 bp, Homo sapiens; identical to SEQ ID NO: 231047
  chr5:50673162-50673259
  hyper

SEQ ID NO: 418028 - DNA, 413 bp, Homo sapiens; identical to SEQ ID NO: 282919
  chr5:50673739-50674152
  hyper

SEQ ID NO: 418029 - DNA, 43 bp, Homo sapiens; identical to SEQ ID NO: 282920
  chr5:50674188-50674231
  hyper

SEQ ID NO: 418030 - DNA, 905 bp, Homo sapiens; identical to SEQ ID NO: 282923
  chr5:50678490-50679395
  hyper

SEQ ID NO: 418031 - DNA, 46 bp, Homo sapiens; identical to SEQ ID NO: 231052
  chr5:50679667-50679713
  hyper

SEQ ID NO: 418032 - DNA, 183 bp, Homo sapiens; identical to SEQ ID NO: 231053
  chr5:50684684-50684867
  hyper

SEQ ID NO: 418033 - DNA, 223 bp, Homo sapiens; identical to SEQ ID NO: 199836
  chr5:50694001-50694224
  hyper

SEQ ID NO: 418034 - DNA, 57 bp, Homo sapiens; identical to SEQ ID NO: 282927
  chr5:50694660-50694717
  hyper

SEQ ID NO: 418035 - DNA, 205 bp, Homo sapiens; identical to SEQ ID NO: 282928
  chr5:50695463-50695668
  hyper

SEQ ID NO: 418036 - DNA, 382 bp, Homo sapiens; identical to SEQ ID NO: 282929
  chr5:52083691-52084073
  hyper

SEQ ID NO: 418037 - DNA, 294 bp, Homo sapiens; identical to SEQ ID NO: 282930
  chr5:52084134-52084428
  hyper

SEQ ID NO: 418038 - DNA, 745 bp, Homo sapiens; identical to SEQ ID NO: 282931
  chr5:52284771-52285516
  hyper

SEQ ID NO: 418039 - DNA, 39 bp, Homo sapiens; identical to SEQ ID NO: 199839
  chr5:52285808-52285847
  hyper

SEQ ID NO: 418040 - DNA, 53 bp, Homo sapiens; identical to SEQ ID NO: 231059
  chr5:52405480-52405533
  hyper

SEQ ID NO: 418041 - DNA, 119 bp, Homo sapiens; identical to SEQ ID NO: 231060
  chr5:52405741-52405860
  hyper

SEQ ID NO: 418042 - DNA, 107 bp, Homo sapiens; identical to SEQ ID NO: 199840
  chr5:52776321-52776428
  hyper

SEQ ID NO: 418043 - DNA, 257 bp, Homo sapiens; identical to SEQ ID NO: 282938
  chr5:53606115-53606372
  hyper

SEQ ID NO: 418044 - DNA, 239 bp, Homo sapiens; identical to SEQ ID NO: 41529
  chr5:53606415-53606654
  hyper

SEQ ID NO: 418045 - DNA, 232 bp, Homo sapiens; identical to SEQ ID NO: 199843
  chr5:53813366-53813598
  hyper

SEQ ID NO: 418046 - DNA, 107 bp, Homo sapiens; identical to SEQ ID NO: 199844
  chr5:54469036-54469143
  hyper

SEQ ID NO: 418047 - DNA, 61 bp, Homo sapiens; identical to SEQ ID NO: 231065
  chr5:54469486-54469547
  hyper

SEQ ID NO: 418048 - DNA, 135 bp, Homo sapiens; identical to SEQ ID NO: 199845
  chr5:54472071-54472206
  hyper

SEQ ID NO: 418049 - DNA, 210 bp, Homo sapiens; identical to SEQ ID NO: 199846
  chr5:54472542-54472752
  hyper

SEQ ID NO: 418050 - DNA, 224 bp, Homo sapiens; identical to SEQ ID NO: 231069
  chr5:54523518-54523742
  hyper

SEQ ID NO: 418051 - DNA, 257 bp, Homo sapiens; identical to SEQ ID NO: 199849
  chr5:54528085-54528342
  hyper

SEQ ID NO: 418052 - DNA, 197 bp, Homo sapiens; identical to SEQ ID NO: 199850
  chr5:54528383-54528580
  hyper

SEQ ID NO: 418053 - DNA, 238 bp, Homo sapiens; identical to SEQ ID NO: 199851
  chr5:54529891-54530129
  hyper

SEQ ID NO: 418054 - DNA, 108 bp, Homo sapiens; identical to SEQ ID NO: 231073
  chr5:54603781-54603889
  hyper

SEQ ID NO: 418055 - DNA, 78 bp, Homo sapiens; identical to SEQ ID NO: 231074
  chr5:54604144-54604222
  hyper

SEQ ID NO: 418056 - DNA, 91 bp, Homo sapiens; identical to SEQ ID NO: 282953
  chr5:54830957-54831048
  hyper

SEQ ID NO: 418057 - DNA, 49 bp, Homo sapiens; identical to SEQ ID NO: 111420
  chr5:54831085-54831134
  hyper

SEQ ID NO: 418058 - DNA, 206 bp, Homo sapiens; identical to SEQ ID NO: 231078
  chr5:56204903-56205109
  hyper

SEQ ID NO: 418059 - DNA, 71 bp, Homo sapiens; identical to SEQ ID NO: 231079
  chr5:56206157-56206228
  hyper

SEQ ID NO: 418060 - DNA, 138 bp, Homo sapiens; identical to SEQ ID NO: 282959
  chr5:56246408-56246546
  hyper

SEQ ID NO: 418061 - DNA, 481 bp, Homo sapiens; identical to SEQ ID NO: 282960
  chr5:56246575-56247056
  hyper

SEQ ID NO: 418062 - DNA, 1274 bp, Homo sapiens; identical to SEQ ID NO: 282961
  chr5:57755330-57756604
  hyper

SEQ ID NO: 418063 - DNA, 41 bp, Homo sapiens; identical to SEQ ID NO: 111443
  chr5:59105973-59106014
  hyper

SEQ ID NO: 418064 - DNA, 244 bp, Homo sapiens; identical to SEQ ID NO: 199863
  chr5:59187968-59188212
  hyper

SEQ ID NO: 418065 - DNA, 49 bp, Homo sapiens; identical to SEQ ID NO: 199864
  chr5:59188327-59188376
  hyper

SEQ ID NO: 418066 - DNA, 369 bp, Homo sapiens; identical to SEQ ID NO: 231087
  chr5:59996101-59996470
  hyper

SEQ ID NO: 418067 - DNA, 262 bp, Homo sapiens; identical to SEQ ID NO: 231088
  chr5:60458162-60458424
  hyper

SEQ ID NO: 418068 - DNA, 203 bp, Homo sapiens; identical to SEQ ID NO: 199868
  chr5:60626141-60626344
  hyper

SEQ ID NO: 418069 - DNA, 252 bp, Homo sapiens; identical to SEQ ID NO: 282976
  chr5:60626723-60626975
  hyper

SEQ ID NO: 418070 - DNA, 51 bp, Homo sapiens; identical to SEQ ID NO: 231090
  chr5:60627994-60628045
  hyper

SEQ ID NO: 418071 - DNA, 158 bp, Homo sapiens; identical to SEQ ID NO: 231091
  chr5:60704664-60704822
  hyper

SEQ ID NO: 418072 - DNA, 159 bp, Homo sapiens; identical to SEQ ID NO: 231093
  chr5:61699272-61699431
  hyper

SEQ ID NO: 418073 - DNA, 74 bp, Homo sapiens; identical to SEQ ID NO: 231094
  chr5:61708381-61708455
  hyper

SEQ ID NO: 418074 - DNA, 387 bp, Homo sapiens; identical to SEQ ID NO: 41580
  chr5:63255315-63255702
  hyper

SEQ ID NO: 418075 - DNA, 219 bp, Homo sapiens; identical to SEQ ID NO: 199869
  chr5:63257392-63257611
  hyper

SEQ ID NO: 418076 - DNA, 95 bp, Homo sapiens; identical to SEQ ID NO: 199870
  chr5:63257861-63257956
  hyper

SEQ ID NO: 418077 - DNA, 132 bp, Homo sapiens; identical to SEQ ID NO: 282986
  chr5:63462119-63462251
  hyper

SEQ ID NO: 418078 - DNA, 404 bp, Homo sapiens; identical to SEQ ID NO: 282987
  chr5:63802607-63803011
  hyper

SEQ ID NO: 418079 - DNA, 58 bp, Homo sapiens; identical to SEQ ID NO: 199872
  chr5:63986116-63986174
  hyper

SEQ ID NO: 418080 - DNA, 49 bp, Homo sapiens; identical to SEQ ID NO: 199873
  chr5:63986984-63987033
  hyper

SEQ ID NO: 418081 - DNA, 532 bp, Homo sapiens; identical to SEQ ID NO: 231101
  chr5:64064488-64065020
  hyper

SEQ ID NO: 418082 - DNA, 189 bp, Homo sapiens; identical to SEQ ID NO: 199875
  chr5:64777664-64777853
  hyper

SEQ ID NO: 418083 - DNA, 46 bp, Homo sapiens; identical to SEQ ID NO: 231104
  chr5:64859099-64859145
  hyper

SEQ ID NO: 418084 - DNA, 162 bp, Homo sapiens; identical to SEQ ID NO: 231105
  chr5:64920140-64920302
  hyper

SEQ ID NO: 418085 - DNA, 162 bp, Homo sapiens; identical to SEQ ID NO: 199876
  chr5:65017234-65017396
  hyper

SEQ ID NO: 418086 - DNA, 41 bp, Homo sapiens; identical to SEQ ID NO: 231107
  chr5:65017860-65017901
  hyper

SEQ ID NO: 418087 - DNA, 149 bp, Homo sapiens; identical to SEQ ID NO: 231109
  chr5:65439856-65440005
  hyper

SEQ ID NO: 418088 - DNA, 47 bp, Homo sapiens; identical to SEQ ID NO: 231110
  chr5:65891728-65891775
  hyper

SEQ ID NO: 418089 - DNA, 708 bp, Homo sapiens; identical to SEQ ID NO: 283001
  chr5:65892690-65893398
  hyper

SEQ ID NO: 418090 - DNA, 33 bp, Homo sapiens; identical to SEQ ID NO: 283002
  chr5:65893469-65893502
  hyper

SEQ ID NO: 418091 - DNA, 189 bp, Homo sapiens; identical to SEQ ID NO: 199878
  chr5:66124999-66125188
  hyper

SEQ ID NO: 418092 - DNA, 41 bp, Homo sapiens; identical to SEQ ID NO: 199880
  chr5:68179341-68179382
  hyper

SEQ ID NO: 418093 - DNA, 185 bp, Homo sapiens; identical to SEQ ID NO: 283007
  chr5:71404207-71404392
  hyper

SEQ ID NO: 418094 - DNA, 37 bp, Homo sapiens; identical to SEQ ID NO: 283008
  chr5:71404881-71404918
  hyper

SEQ ID NO: 418095 - DNA, 229 bp, Homo sapiens; identical to SEQ ID NO: 231119
  chr5:71616291-71616520
  hyper

SEQ ID NO: 418096 - DNA, 130 bp, Homo sapiens; identical to SEQ ID NO: 199882
  chr5:72113263-72113393
  hyper

SEQ ID NO: 418097 - DNA, 217 bp, Homo sapiens; identical to SEQ ID NO: 231121
  chr5:72143776-72143993
  hyper

SEQ ID NO: 418098 - DNA, 139 bp, Homo sapiens; identical to SEQ ID NO: 283014
  chr5:72511609-72511748
  hyper

SEQ ID NO: 418099 - DNA, 419 bp, Homo sapiens; identical to SEQ ID NO: 283015
  chr5:72511765-72512184
  hyper

SEQ ID NO: 418100 - DNA, 64 bp, Homo sapiens; identical to SEQ ID NO: 283016
  chr5:72526700-72526764
  hyper

SEQ ID NO: 418101 - DNA, 133 bp, Homo sapiens; identical to SEQ ID NO: 231127
  chr5:72593807-72593940
  hyper

SEQ ID NO: 418102 - DNA, 217 bp, Homo sapiens; identical to SEQ ID NO: 283019
  chr5:72597813-72598030
  hyper

SEQ ID NO: 418103 - DNA, 104 bp, Homo sapiens; identical to SEQ ID NO: 283020
  chr5:72598102-72598206
  hyper

SEQ ID NO: 418104 - DNA, 359 bp, Homo sapiens; identical to SEQ ID NO: 231131
  chr5:72607509-72607868
  hyper

SEQ ID NO: 418105 - DNA, 632 bp, Homo sapiens; identical to SEQ ID NO: 283023
  chr5:72676273-72676905
  hyper

SEQ ID NO: 418106 - DNA, 49 bp, Homo sapiens; identical to SEQ ID NO: 111542
  chr5:72678365-72678414
  hyper

SEQ ID NO: 418107 - DNA, 97 bp, Homo sapiens; identical to SEQ ID NO: 283025
  chr5:72716180-72716277
  hyper

SEQ ID NO: 418108 - DNA, 452 bp, Homo sapiens; identical to SEQ ID NO: 283028
  chr5:72739651-72740103
  hyper

SEQ ID NO: 418109 - DNA, 45 bp, Homo sapiens; identical to SEQ ID NO: 231141
  chr5:72745569-72745614
  hyper

SEQ ID NO: 418110 - DNA, 1143 bp, Homo sapiens; identical to SEQ ID NO: 199891
  chr5:72921423-72922566
  hyper

SEQ ID NO: 418111 - DNA, 264 bp, Homo sapiens; identical to SEQ ID NO: 199893
  chr5:73935724-73935988
  hyper

SEQ ID NO: 418112 - DNA, 516 bp, Homo sapiens; identical to SEQ ID NO: 41639
  chr5:73936032-73936548
  hyper

SEQ ID NO: 418113 - DNA, 285 bp, Homo sapiens; identical to SEQ ID NO: 283039
  chr5:73936774-73937059
  hyper

SEQ ID NO: 418114 - DNA, 302 bp, Homo sapiens; identical to SEQ ID NO: 199896
  chr5:74161900-74162202
  hyper

SEQ ID NO: 418115 - DNA, 103 bp, Homo sapiens; identical to SEQ ID NO: 199897
  chr5:74162616-74162719
  hyper

SEQ ID NO: 418116 - DNA, 260 bp, Homo sapiens; identical to SEQ ID NO: 199898
  chr5:74348635-74348895
  hyper

SEQ ID NO: 418117 - DNA, 222 bp, Homo sapiens
  chr5:74348906-74349128
  hyper
cgttatccaggacacgctccgcgcccgccgcccgctgccctttccccccgctggcctcggggaacttccccgcgtctggccgcaggcggcggctgccgcggggagccccgaagttgcggcgtctgctaggcgcgcgccgggtcgcccacccggcccgtgacgctgtgtccgtccgccgcgcgctctggtggccccggggctcctgcaggcgcggagagaggc

SEQ ID NO: 418118 - DNA, 111 bp, Homo sapiens; identical to SEQ ID NO: 231151
  chr5:74632844-74632955
  hyper

SEQ ID NO: 418119 - DNA, 391 bp, Homo sapiens; identical to SEQ ID NO: 231152
  chr5:74807675-74808066
  hyper

SEQ ID NO: 418120 - DNA, 119 bp, Homo sapiens; identical to SEQ ID NO: 231153
  chr5:74965024-74965143
  hyper

SEQ ID NO: 418121 - DNA, 186 bp, Homo sapiens; identical to SEQ ID NO: 231154
  chr5:75013171-75013357
  hyper

SEQ ID NO: 418122 - DNA, 98 bp, Homo sapiens; identical to SEQ ID NO: 231159
  chr5:76010895-76010993
  hyper

SEQ ID NO: 418123 - DNA, 202 bp, Homo sapiens; identical to SEQ ID NO: 283063
  chr5:76250150-76250352
  hyper

SEQ ID NO: 418124 - DNA, 254 bp, Homo sapiens; identical to SEQ ID NO: 231163
  chr5:76326226-76326480
  hyper

SEQ ID NO: 418125 - DNA, 182 bp, Homo sapiens; identical to SEQ ID NO: 199911
  chr5:76383033-76383215
  hyper

SEQ ID NO: 418126 - DNA, 177 bp, Homo sapiens; identical to SEQ ID NO: 283066
  chr5:76476058-76476235
  hyper

SEQ ID NO: 418127 - DNA, 46 bp, Homo sapiens; identical to SEQ ID NO: 231177
  chr5:76937948-76937994
  hyper

SEQ ID NO: 418128 - DNA, 106 bp, Homo sapiens; identical to SEQ ID NO: 231178
  chr5:76938270-76938376
  hyper

SEQ ID NO: 418129 - DNA, 48 bp, Homo sapiens; identical to SEQ ID NO: 388220
  chr5:77591340-77591388
  hyper

SEQ ID NO: 418130 - DNA, 68 bp, Homo sapiens; identical to SEQ ID NO: 231186
  chr5:77656465-77656533
  hyper

SEQ ID NO: 418131 - DNA, 50 bp, Homo sapiens; identical to SEQ ID NO: 283080
  chr5:77805996-77806046
  hyper

SEQ ID NO: 418132 - DNA, 76 bp, Homo sapiens; identical to SEQ ID NO: 283081
  chr5:77806320-77806396
  hyper

SEQ ID NO: 418133 - DNA, 122 bp, Homo sapiens; identical to SEQ ID NO: 199917
  chr5:78281720-78281842
  hyper

SEQ ID NO: 418134 - DNA, 35 bp, Homo sapiens; identical to SEQ ID NO: 231192
  chr5:78908116-78908151
  hyper

SEQ ID NO: 418135 - DNA, 291 bp, Homo sapiens; identical to SEQ ID NO: 283086
  chr5:79551152-79551443
  hyper

SEQ ID NO: 418136 - DNA, 111 bp, Homo sapiens; identical to SEQ ID NO: 231196
  chr5:79703638-79703749
  hyper

SEQ ID NO: 418137 - DNA, 86 bp, Homo sapiens; identical to SEQ ID NO: 231197
  chr5:79704429-79704515
  hyper

SEQ ID NO: 418138 - DNA, 329 bp, Homo sapiens; identical to SEQ ID NO: 199921
  chr5:79783875-79784204
  hyper

SEQ ID NO: 418139 - DNA, 265 bp, Homo sapiens; identical to SEQ ID NO: 231201
  chr5:80597468-80597733
  hyper

SEQ ID NO: 418140 - DNA, 110 bp, Homo sapiens; identical to SEQ ID NO: 199925
  chr5:82372772-82372882
  hyper

SEQ ID NO: 418141 - DNA, 235 bp, Homo sapiens; identical to SEQ ID NO: 231204
  chr5:82373208-82373443
  hyper

SEQ ID NO: 418142 - DNA, 171 bp, Homo sapiens; identical to SEQ ID NO: 231207
  chr5:83018266-83018437
  hyper

SEQ ID NO: 418143 - DNA, 90 bp, Homo sapiens; identical to SEQ ID NO: 283101
  chr5:83678127-83678217
  hyper

SEQ ID NO: 418144 - DNA, 678 bp, Homo sapiens; identical to SEQ ID NO: 283102
  chr5:83678311-83678989
  hyper

SEQ ID NO: 418145 - DNA, 193 bp, Homo sapiens; identical to SEQ ID NO: 397047
  chr5:83679254-83679447
  hyper

SEQ ID NO: 418146 - DNA, 171 bp, Homo sapiens; identical to SEQ ID NO: 397048
  chr5:83680444-83680615
  hyper

SEQ ID NO: 418147 - DNA, 148 bp, Homo sapiens; identical to SEQ ID NO: 231209
  chr5:86564357-86564505
  hyper

SEQ ID NO: 418148 - DNA, 393 bp, Homo sapiens; identical to SEQ ID NO: 231210
  chr5:86708645-86709038
  hyper

SEQ ID NO: 418149 - DNA, 44 bp, Homo sapiens; identical to SEQ ID NO: 199932
  chr5:87437944-87437988
  hyper

SEQ ID NO: 418150 - DNA, 175 bp, Homo sapiens; identical to SEQ ID NO: 231214
  chr5:87438273-87438448
  hyper

SEQ ID NO: 418151 - DNA, 79 bp, Homo sapiens; identical to SEQ ID NO: 231215
  chr5:87439124-87439203
  hyper

SEQ ID NO: 418152 - DNA, 263 bp, Homo sapiens; identical to SEQ ID NO: 231216
  chr5:87564866-87565129
  hyper

SEQ ID NO: 418153 - DNA, 79 bp, Homo sapiens
  chr5:87982594-87982673
  hyper
gaggatcatattttaccaacccaggtggtgttttaaaaattctttcaggcaacagtgataagagaggaagcaaagagca

SEQ ID NO: 418154 - DNA, 39 bp, Homo sapiens; identical to SEQ ID NO: 231232
  chr5:87986628-87986667
  hyper

SEQ ID NO: 418155 - DNA, 365 bp, Homo sapiens; identical to SEQ ID NO: 283131
  chr5:87987787-87988152
  hyper

SEQ ID NO: 418156 - DNA, 67 bp, Homo sapiens; identical to SEQ ID NO: 283132
  chr5:87988651-87988718
  hyper

SEQ ID NO: 418157 - DNA, 231 bp, Homo sapiens; identical to SEQ ID NO: 231235
  chr5:87988974-87989205
  hyper

SEQ ID NO: 418158 - DNA, 353 bp, Homo sapiens; identical to SEQ ID NO: 283134
  chr5:87989955-87990308
  hyper

SEQ ID NO: 418159 - DNA, 73 bp, Homo sapiens; identical to SEQ ID NO: 231240
  chr5:89705880-89705953
  hyper

SEQ ID NO: 418160 - DNA, 43 bp, Homo sapiens; identical to SEQ ID NO: 199942
  chr5:89770671-89770714
  hyper

SEQ ID NO: 418161 - DNA, 121 bp, Homo sapiens; identical to SEQ ID NO: 199945
  chr5:90676143-90676264
  hyper

SEQ ID NO: 418162 - DNA, 49 bp, Homo sapiens; identical to SEQ ID NO: 199946
  chr5:90678446-90678495
  hyper

SEQ ID NO: 418163 - DNA, 283 bp, Homo sapiens; identical to SEQ ID NO: 231245
  chr5:90679120-90679403
  hyper

SEQ ID NO: 418164 - DNA, 105 bp, Homo sapiens; identical to SEQ ID NO: 41777
  chr5:92908770-92908875
  hyper

SEQ ID NO: 418165 - DNA, 100 bp, Homo sapiens; identical to SEQ ID NO: 283146
  chr5:92914942-92915042
  hyper

SEQ ID NO: 418166 - DNA, 317 bp, Homo sapiens; identical to SEQ ID NO: 283147
  chr5:92915128-92915445
  hyper

SEQ ID NO: 418167 - DNA, 242 bp, Homo sapiens; identical to SEQ ID NO: 283148
  chr5:92915595-92915837
  hyper

SEQ ID NO: 418168 - DNA, 443 bp, Homo sapiens; identical to SEQ ID NO: 283149
  chr5:92916165-92916608
  hyper

SEQ ID NO: 418169 - DNA, 102 bp, Homo sapiens; identical to SEQ ID NO: 231249
  chr5:92916848-92916950
  hyper

SEQ ID NO: 418170 - DNA, 62 bp, Homo sapiens; identical to SEQ ID NO: 199949
  chr5:92918896-92918958
  hyper

SEQ ID NO: 418171 - DNA, 89 bp, Homo sapiens; identical to SEQ ID NO: 231251
  chr5:92935166-92935255
  hyper

SEQ ID NO: 418172 - DNA, 62 bp, Homo sapiens; identical to SEQ ID NO: 231254
  chr5:92943194-92943256
  hyper

SEQ ID NO: 418173 - DNA, 44 bp, Homo sapiens; identical to SEQ ID NO: 4111
  chr5:92946750-92946794
  hyper

SEQ ID NO: 418174 - DNA, 269 bp, Homo sapiens; identical to SEQ ID NO: 231257
  chr5:92947618-92947887
  hyper

SEQ ID NO: 418175 - DNA, 134 bp, Homo sapiens; identical to SEQ ID NO: 199951
  chr5:92957179-92957313
  hyper

SEQ ID NO: 418176 - DNA, 382 bp, Homo sapiens; identical to SEQ ID NO: 231259
  chr5:93954161-93954543
  hyper

SEQ ID NO: 418177 - DNA, 129 bp, Homo sapiens; identical to SEQ ID NO: 283160
  chr5:94621134-94621263
  hyper

SEQ ID NO: 418178 - DNA, 152 bp, Homo sapiens; identical to SEQ ID NO: 231261
  chr5:94890673-94890825
  hyper

SEQ ID NO: 418179 - DNA, 277 bp, Homo sapiens; identical to SEQ ID NO: 222646
  chr5:95066554-95066831
  hyper

SEQ ID NO: 418180 - DNA, 65 bp, Homo sapiens; identical to SEQ ID NO: 231264
  chr5:95157378-95157443
  hyper

SEQ ID NO: 418181 - DNA, 505 bp, Homo sapiens; identical to SEQ ID NO: 231265
  chr5:95157904-95158409
  hyper

SEQ ID NO: 418182 - DNA, 108 bp, Homo sapiens; identical to SEQ ID NO: 199955
  chr5:95194595-95194703
  hyper

SEQ ID NO: 418183 - DNA, 236 bp, Homo sapiens; identical to SEQ ID NO: 283168
  chr5:95768384-95768620
  hyper

SEQ ID NO: 418184 - DNA, 147 bp, Homo sapiens; identical to SEQ ID NO: 283169
  chr5:96038225-96038372
  hyper

SEQ ID NO: 418185 - DNA, 375 bp, Homo sapiens; identical to SEQ ID NO: 283170
  chr5:96038415-96038790
  hyper

SEQ ID NO: 418186 - DNA, 242 bp, Homo sapiens; identical to SEQ ID NO: 231273
  chr5:98104049-98104291
  hyper

SEQ ID NO: 418187 - DNA, 242 bp, Homo sapiens; identical to SEQ ID NO: 283172
  chr5:98104604-98104846
  hyper

SEQ ID NO: 418188 - DNA, 524 bp, Homo sapiens; identical to SEQ ID NO: 283173
  chr5:98104891-98105415
  hyper

SEQ ID NO: 418189 - DNA, 95 bp, Homo sapiens; identical to SEQ ID NO: 199956
  chr5:98107032-98107127
  hyper

SEQ ID NO: 418190 - DNA, 208 bp, Homo sapiens; identical to SEQ ID NO: 199957
  chr5:98108684-98108892
  hyper

SEQ ID NO: 418191 - DNA, 447 bp, Homo sapiens; identical to SEQ ID NO: 199958
  chr5:98109213-98109660
  hyper

SEQ ID NO: 418192 - DNA, 695 bp, Homo sapiens; identical to SEQ ID NO: 283177
  chr5:98109927-98110622
  hyper

SEQ ID NO: 418193 - DNA, 224 bp, Homo sapiens; identical to SEQ ID NO: 199963
  chr5:100240289-100240513
  hyper

SEQ ID NO: 418194 - DNA, 49 bp, Homo sapiens; identical to SEQ ID NO: 199966
  chr5:102090424-102090473
  hyper

SEQ ID NO: 418195 - DNA, 102 bp, Homo sapiens; identical to SEQ ID NO: 231286
  chr5:102091104-102091206
  hyper

SEQ ID NO: 418196 - DNA, 518 bp, Homo sapiens; identical to SEQ ID NO: 222651
  chr5:102201407-102201925
  hyper

SEQ ID NO: 418197 - DNA, 125 bp, Homo sapiens; identical to SEQ ID NO: 199968
  chr5:107005046-107005171
  hyper

SEQ ID NO: 418198 - DNA, 227 bp, Homo sapiens; identical to SEQ ID NO: 283190
  chr5:107007427-107007654
  hyper

SEQ ID NO: 418199 - DNA, 102 bp, Homo sapiens; identical to SEQ ID NO: 199971
  chr5:107007963-107008065
  hyper

SEQ ID NO: 418200 - DNA, 145 bp, Homo sapiens; identical to SEQ ID NO: 199972
  chr5:107008360-107008505
  hyper

SEQ ID NO: 418201 - DNA, 206 bp, Homo sapiens; identical to SEQ ID NO: 199973
  chr5:107359033-107359239
  hyper

SEQ ID NO: 418202 - DNA, 173 bp, Homo sapiens; identical to SEQ ID NO: 231291
  chr5:108064027-108064200
  hyper

SEQ ID NO: 418203 - DNA, 53 bp, Homo sapiens
  chr5:109024677-109024730
  hyper
ctcctttcccccaggttttaacaggctgtcaccaaaggaggaaatagtgagcc

SEQ ID NO: 418204 - DNA, 1028 bp, Homo sapiens; identical to SEQ ID NO: 111805
  chr5:110074272-110075300
  hyper

SEQ ID NO: 418205 - DNA, 214 bp, Homo sapiens; identical to SEQ ID NO: 231295
  chr5:110428255-110428469
  hyper

SEQ ID NO: 418206 - DNA, 279 bp, Homo sapiens
  chr5:110848376-110848655
  hyper
gtgtggagggctgattggtggccgataaatggaatgattccgcgtgggtgtgggctggcccgagccgcgccagggttccctggatgtctggggttgcctgcaggtttggattggttgggttgggttgtcctgtgatcacttaattgtgaaagaattttgtcaagcagtaaaccgactgggagaaattgaaacagaaggcgaagtgaaggatcacagtgagggataaggtccaaattcatcccgcttgtggatatcctagtatctcgcaactacgctact

SEQ ID NO: 418207 - DNA, 38 bp, Homo sapiens; identical to SEQ ID NO: 231299
  chr5:111093185-111093223
  hyper

SEQ ID NO: 418208 - DNA, 78 bp, Homo sapiens; identical to SEQ ID NO: 283200
  chr5:111093930-111094008
  hyper

SEQ ID NO: 418209 - DNA, 99 bp, Homo sapiens; identical to SEQ ID NO: 111818
  chr5:111496549-111496648
  hyper

SEQ ID NO: 418210 - DNA, 192 bp, Homo sapiens; identical to SEQ ID NO: 283202
  chr5:111754513-111754705
  hyper

SEQ ID NO: 418211 - DNA, 314 bp, Homo sapiens; identical to SEQ ID NO: 283203
  chr5:111755081-111755395
  hyper

SEQ ID NO: 418212 - DNA, 192 bp, Homo sapiens; identical to SEQ ID NO: 199979
  chr5:112257954-112258146
  hyper

SEQ ID NO: 418213 - DNA, 120 bp, Homo sapiens; identical to SEQ ID NO: 231304
  chr5:112312392-112312512
  hyper

SEQ ID NO: 418214 - DNA, 232 bp, Homo sapiens; identical to SEQ ID NO: 231307
  chr5:113028782-113029014
  hyper

SEQ ID NO: 418215 - DNA, 126 bp, Homo sapiens; identical to SEQ ID NO: 199984
  chr5:113391139-113391265
  hyper

SEQ ID NO: 418216 - DNA, 251 bp, Homo sapiens; identical to SEQ ID NO: 199988
  chr5:113699119-113699370
  hyper

SEQ ID NO: 418217 - DNA, 35 bp, Homo sapiens; identical to SEQ ID NO: 199989
  chr5:113699663-113699698
  hyper

SEQ ID NO: 418218 - DNA, 34 bp, Homo sapiens; identical to SEQ ID NO: 231311
  chr5:114598419-114598453
  hyper

SEQ ID NO: 418219 - DNA, 289 bp, Homo sapiens; identical to SEQ ID NO: 199993
  chr5:114632026-114632315
  hyper

SEQ ID NO: 418220 - DNA, 180 bp, Homo sapiens; identical to SEQ ID NO: 283224
  chr5:114938164-114938344
  hyper

SEQ ID NO: 418221 - DNA, 107 bp, Homo sapiens; identical to SEQ ID NO: 231314
  chr5:115177406-115177513
  hyper

SEQ ID NO: 418222 - DNA, 67 bp, Homo sapiens; identical to SEQ ID NO: 231316
  chr5:115420530-115420597
  hyper

SEQ ID NO: 418223 - DNA, 146 bp, Homo sapiens; identical to SEQ ID NO: 199994
  chr5:115421021-115421167
  hyper

SEQ ID NO: 418224 - DNA, 378 bp, Homo sapiens; identical to SEQ ID NO: 283228
  chr5:115909339-115909717
  hyper

SEQ ID NO: 418225 - DNA, 351 bp, Homo sapiens; identical to SEQ ID NO: 231322
  chr5:118406922-118407273
  hyper

SEQ ID NO: 418226 - DNA, 285 bp, Homo sapiens; identical to SEQ ID NO: 231323
  chr5:118604723-118605008
  hyper

SEQ ID NO: 418227 - DNA, 40 bp, Homo sapiens; identical to SEQ ID NO: 283236
  chr5:121412480-121412520
  hyper

SEQ ID NO: 418228 - DNA, 223 bp, Homo sapiens; identical to SEQ ID NO: 200001
  chr5:121413811-121414034
  hyper

SEQ ID NO: 418229 - DNA, 136 bp, Homo sapiens; identical to SEQ ID NO: 200002
  chr5:121414090-121414226
  hyper

SEQ ID NO: 418230 - DNA, 76 bp, Homo sapiens; identical to SEQ ID NO: 283239
  chr5:121648493-121648569
  hyper

SEQ ID NO: 418231 - DNA, 887 bp, Homo sapiens; identical to SEQ ID NO: 231332
  chr5:122110539-122111426
  hyper

SEQ ID NO: 418232 - DNA, 59 bp, Homo sapiens; identical to SEQ ID NO: 231333
  chr5:122180920-122180979
  hyper

SEQ ID NO: 418233 - DNA, 117 bp, Homo sapiens; identical to SEQ ID NO: 283242
  chr5:122371100-122371217
  hyper

SEQ ID NO: 418234 - DNA, 193 bp, Homo sapiens; identical to SEQ ID NO: 283243
  chr5:122371257-122371450
  hyper

SEQ ID NO: 418235 - DNA, 134 bp, Homo sapiens; identical to SEQ ID NO: 200003
  chr5:122371731-122371865
  hyper

SEQ ID NO: 418236 - DNA, 479 bp, Homo sapiens; identical to SEQ ID NO: 283245
  chr5:122372079-122372558
  hyper

SEQ ID NO: 418237 - DNA, 369 bp, Homo sapiens; identical to SEQ ID NO: 283246
  chr5:122372588-122372957
  hyper

SEQ ID NO: 418238 - DNA, 97 bp, Homo sapiens; identical to SEQ ID NO: 283247
  chr5:122422064-122422161
  hyper

SEQ ID NO: 418239 - DNA, 53 bp, Homo sapiens; identical to SEQ ID NO: 283248
  chr5:122422184-122422237
  hyper

SEQ ID NO: 418240 - DNA, 56 bp, Homo sapiens; identical to SEQ ID NO: 283249
  chr5:122423376-122423432
  hyper

SEQ ID NO: 418241 - DNA, 55 bp, Homo sapiens; identical to SEQ ID NO: 231341
  chr5:122430020-122430075
  hyper

SEQ ID NO: 418242 - DNA, 166 bp, Homo sapiens; identical to SEQ ID NO: 283253
  chr5:122434262-122434428
  hyper

SEQ ID NO: 418243 - DNA, 146 bp, Homo sapiens
  chr5:122434730-122434876
  hyper
tggcacccgcgatagactggccgtctcccccaccccgccccgtctggtgattttaaatcgtctcctgtgtaattgtaaaaagaggaaagctgaatacccagacgaccagtatagaatctcttcgagacagcagattgggcaagaga

SEQ ID NO: 418244 - DNA, 77 bp, Homo sapiens; identical to SEQ ID NO: 231345
  chr5:122621428-122621505
  hyper

SEQ ID NO: 418245 - DNA, 52 bp, Homo sapiens; identical to SEQ ID NO: 231346
  chr5:122759250-122759302
  hyper

SEQ ID NO: 418246 - DNA, 113 bp, Homo sapiens; identical to SEQ ID NO: 231347
  chr5:122759572-122759685
  hyper

SEQ ID NO: 418247 - DNA, 41 bp, Homo sapiens; identical to SEQ ID NO: 231348
  chr5:122847730-122847771
  hyper

SEQ ID NO: 418248 - DNA, 298 bp, Homo sapiens; identical to SEQ ID NO: 222668
  chr5:123987437-123987735
  hyper

SEQ ID NO: 418249 - DNA, 233 bp, Homo sapiens; identical to SEQ ID NO: 231355
  chr5:127420001-127420234
  hyper

SEQ ID NO: 418250 - DNA, 55 bp, Homo sapiens; identical to SEQ ID NO: 200023
  chr5:130970375-130970430
  hyper

SEQ ID NO: 418251 - DNA, 115 bp, Homo sapiens; identical to SEQ ID NO: 200024
  chr5:130970643-130970758
  hyper

SEQ ID NO: 418252 - DNA, 79 bp, Homo sapiens; identical to SEQ ID NO: 231367
  chr5:130971007-130971086
  hyper

SEQ ID NO: 418253 - DNA, 66 bp, Homo sapiens; identical to SEQ ID NO: 283283
  chr5:131131878-131131944
  hyper

SEQ ID NO: 418254 - DNA, 197 bp, Homo sapiens; identical to SEQ ID NO: 200025
  chr5:131133198-131133395
  hyper

SEQ ID NO: 418255 - DNA, 390 bp, Homo sapiens; identical to SEQ ID NO: 283285
  chr5:131347237-131347627
  hyper

SEQ ID NO: 418256 - DNA, 490 bp, Homo sapiens; identical to SEQ ID NO: 200026
  chr5:131563041-131563531
  hyper

SEQ ID NO: 418257 - DNA, 278 bp, Homo sapiens; identical to SEQ ID NO: 41939
  chr5:131563558-131563836
  hyper

SEQ ID NO: 418258 - DNA, 286 bp, Homo sapiens; identical to SEQ ID NO: 231373
  chr5:131705174-131705460
  hyper

SEQ ID NO: 418259 - DNA, 250 bp, Homo sapiens; identical to SEQ ID NO: 231375
  chr5:131825630-131825880
  hyper

SEQ ID NO: 418260 - DNA, 168 bp, Homo sapiens; identical to SEQ ID NO: 231380
  chr5:132073294-132073462
  hyper

SEQ ID NO: 418261 - DNA, 82 bp, Homo sapiens; identical to SEQ ID NO: 283295
  chr5:132148851-132148933
  hyper

SEQ ID NO: 418262 - DNA, 83 bp, Homo sapiens; identical to SEQ ID NO: 111981
  chr5:132148947-132149030
  hyper

SEQ ID NO: 418263 - DNA, 63 bp, Homo sapiens; identical to SEQ ID NO: 283298
  chr5:133449610-133449673
  hyper

SEQ ID NO: 418264 - DNA, 329 bp, Homo sapiens; identical to SEQ ID NO: 283299
  chr5:133449924-133450253
  hyper

SEQ ID NO: 418265 - DNA, 129 bp, Homo sapiens; identical to SEQ ID NO: 231388
  chr5:133706907-133707036
  hyper

SEQ ID NO: 418266 - DNA, 154 bp, Homo sapiens; identical to SEQ ID NO: 231391
  chr5:133968282-133968436
  hyper

SEQ ID NO: 418267 - DNA, 35 bp, Homo sapiens; identical to SEQ ID NO: 231392
  chr5:133984158-133984193
  hyper

SEQ ID NO: 418268 - DNA, 97 bp, Homo sapiens; identical to SEQ ID NO: 231393
  chr5:134074104-134074201
  hyper

SEQ ID NO: 418269 - DNA, 356 bp, Homo sapiens; identical to SEQ ID NO: 231394
  chr5:134094187-134094543
  hyper

SEQ ID NO: 418270 - DNA, 74 bp, Homo sapiens; identical to SEQ ID NO: 231395
  chr5:134210444-134210518
  hyper

SEQ ID NO: 418271 - DNA, 49 bp, Homo sapiens; identical to SEQ ID NO: 283317
  chr5:134376163-134376212
  hyper

SEQ ID NO: 418272 - DNA, 182 bp, Homo sapiens; identical to SEQ ID NO: 283318
  chr5:134376375-134376557
  hyper

SEQ ID NO: 418273 - DNA, 219 bp, Homo sapiens; identical to SEQ ID NO: 200039
  chr5:134463605-134463824
  hyper

SEQ ID NO: 418274 - DNA, 204 bp, Homo sapiens; identical to SEQ ID NO: 283323
  chr5:134825179-134825383
  hyper

SEQ ID NO: 418275 - DNA, 209 bp, Homo sapiens; identical to SEQ ID NO: 231411
  chr5:134844204-134844413
  hyper

SEQ ID NO: 418276 - DNA, 251 bp, Homo sapiens; identical to SEQ ID NO: 283329
  chr5:135170546-135170797
  hyper

SEQ ID NO: 418277 - DNA, 230 bp, Homo sapiens; identical to SEQ ID NO: 200047
  chr5:135468336-135468566
  hyper

SEQ ID NO: 418278 - DNA, 239 bp, Homo sapiens; identical to SEQ ID NO: 231420
  chr5:135700986-135701225
  hyper

SEQ ID NO: 418279 - DNA, 152 bp, Homo sapiens; identical to SEQ ID NO: 112064
  chr5:137090063-137090215
  hyper

SEQ ID NO: 418280 - DNA, 225 bp, Homo sapiens; identical to SEQ ID NO: 231424
  chr5:137369084-137369309
  hyper

SEQ ID NO: 418281 - DNA, 238 bp, Homo sapiens; identical to SEQ ID NO: 231426
  chr5:137514786-137515024
  hyper

SEQ ID NO: 418282 - DNA, 266 bp, Homo sapiens; identical to SEQ ID NO: 231428
  chr5:137667421-137667687
  hyper

SEQ ID NO: 418283 - DNA, 131 bp, Homo sapiens; identical to SEQ ID NO: 231429
  chr5:137673655-137673786
  hyper

SEQ ID NO: 418284 - DNA, 161 bp, Homo sapiens; identical to SEQ ID NO: 283341
  chr5:137774493-137774654
  hyper

SEQ ID NO: 418285 - DNA, 192 bp, Homo sapiens; identical to SEQ ID NO: 222693
  chr5:137774864-137775056
  hyper

SEQ ID NO: 418286 - DNA, 95 bp, Homo sapiens; identical to SEQ ID NO: 222694
  chr5:137801267-137801362
  hyper

SEQ ID NO: 418287 - DNA, 106 bp, Homo sapiens; identical to SEQ ID NO: 231430
  chr5:137879232-137879338
  hyper

SEQ ID NO: 418288 - DNA, 60 bp, Homo sapiens; identical to SEQ ID NO: 231431
  chr5:137910697-137910757
  hyper

SEQ ID NO: 418289 - DNA, 113 bp, Homo sapiens; identical to SEQ ID NO: 200053
  chr5:137911538-137911651
  hyper

SEQ ID NO: 418290 - DNA, 81 bp, Homo sapiens; identical to SEQ ID NO: 200054
  chr5:138088596-138088677
  hyper

SEQ ID NO: 418291 - DNA, 302 bp, Homo sapiens; identical to SEQ ID NO: 283348
  chr5:138089642-138089944
  hyper

SEQ ID NO: 418292 - DNA, 376 bp, Homo sapiens; identical to SEQ ID NO: 231433
  chr5:138609205-138609581
  hyper

SEQ ID NO: 418293 - DNA, 124 bp, Homo sapiens; identical to SEQ ID NO: 231434
  chr5:138677832-138677956
  hyper

SEQ ID NO: 418294 - DNA, 36 bp, Homo sapiens; identical to SEQ ID NO: 231435
  chr5:138775186-138775222
  hyper

SEQ ID NO: 418295 - DNA, 273 bp, Homo sapiens; identical to SEQ ID NO: 231437
  chr5:138940460-138940733
  hyper

SEQ ID NO: 418296 - DNA, 1166 bp, Homo sapiens; identical to SEQ ID NO: 283354
  chr5:139016856-139018022
  hyper

SEQ ID NO: 418297 - DNA, 64 bp, Homo sapiens; identical to SEQ ID NO: 200058
  chr5:139039951-139040015
  hyper

SEQ ID NO: 418298 - DNA, 75 bp, Homo sapiens; identical to SEQ ID NO: 231441
  chr5:139051074-139051149
  hyper

SEQ ID NO: 418299 - DNA, 144 bp, Homo sapiens; identical to SEQ ID NO: 283359
  chr5:139089534-139089678
  hyper

SEQ ID NO: 418300 - DNA, 61 bp, Homo sapiens; identical to SEQ ID NO: 200061
  chr5:139091111-139091172
  hyper

SEQ ID NO: 418301 - DNA, 934 bp, Homo sapiens; identical to SEQ ID NO: 231443
  chr5:139126893-139127827
  hyper

SEQ ID NO: 418302 - DNA, 235 bp, Homo sapiens; identical to SEQ ID NO: 283363
  chr5:139143822-139144057
  hyper

SEQ ID NO: 418303 - DNA, 36 bp, Homo sapiens; identical to SEQ ID NO: 200062
  chr5:139175356-139175392
  hyper

SEQ ID NO: 418304 - DNA, 91 bp, Homo sapiens; identical to SEQ ID NO: 283367
  chr5:139283459-139283550
  hyper

SEQ ID NO: 418305 - DNA, 122 bp, Homo sapiens; identical to SEQ ID NO: 200065
  chr5:139284463-139284585
  hyper

SEQ ID NO: 418306 - DNA, 91 bp, Homo sapiens; identical to SEQ ID NO: 231450
  chr5:139423001-139423092
  hyper

SEQ ID NO: 418307 - DNA, 111 bp, Homo sapiens; identical to SEQ ID NO: 231453
  chr5:139682661-139682772
  hyper

SEQ ID NO: 418308 - DNA, 63 bp, Homo sapiens; identical to SEQ ID NO: 222706
  chr5:139725675-139725738
  hyper

SEQ ID NO: 418309 - DNA, 151 bp, Homo sapiens; identical to SEQ ID NO: 200068
  chr5:139725997-139726148
  hyper

SEQ ID NO: 418310 - DNA, 274 bp, Homo sapiens; identical to SEQ ID NO: 283377
  chr5:139726430-139726704
  hyper

SEQ ID NO: 418311 - DNA, 422 bp, Homo sapiens; identical to SEQ ID NO: 200069
  chr5:139927089-139927511
  hyper

SEQ ID NO: 418312 - DNA, 98 bp, Homo sapiens; identical to SEQ ID NO: 231457
  chr5:139944032-139944130
  hyper

SEQ ID NO: 418313 - DNA, 132 bp, Homo sapiens; identical to SEQ ID NO: 200072
  chr5:140027367-140027499
  hyper

SEQ ID NO: 418314 - DNA, 34 bp, Homo sapiens; identical to SEQ ID NO: 231460
  chr5:140044228-140044262
  hyper

SEQ ID NO: 418315 - DNA, 272 bp, Homo sapiens; identical to SEQ ID NO: 231461
  chr5:140071090-140071362
  hyper

SEQ ID NO: 418316 - DNA, 52 bp, Homo sapiens; identical to SEQ ID NO: 283386
  chr5:140187031-140187083
  hyper

SEQ ID NO: 418317 - DNA, 271 bp, Homo sapiens; identical to SEQ ID NO: 231465
  chr5:140381529-140381800
  hyper

SEQ ID NO: 418318 - DNA, 209 bp, Homo sapiens; identical to SEQ ID NO: 231467
  chr5:140431053-140431262
  hyper

SEQ ID NO: 418319 - DNA, 80 bp, Homo sapiens; identical to SEQ ID NO: 283391
  chr5:140613724-140613804
  hyper

SEQ ID NO: 418320 - DNA, 533 bp, Homo sapiens; identical to SEQ ID NO: 231470
  chr5:140700004-140700537
  hyper

SEQ ID NO: 418321 - DNA, 193 bp, Homo sapiens; identical to SEQ ID NO: 231476
  chr5:140892330-140892523
  hyper

SEQ ID NO: 418322 - DNA, 102 bp, Homo sapiens; identical to SEQ ID NO: 200075
  chr5:140904508-140904610
  hyper

SEQ ID NO: 418323 - DNA, 60 bp, Homo sapiens; identical to SEQ ID NO: 200076
  chr5:141030747-141030807
  hyper

SEQ ID NO: 418324 - DNA, 216 bp, Homo sapiens; identical to SEQ ID NO: 200077
  chr5:141030884-141031100
  hyper

SEQ ID NO: 418325 - DNA, 80 bp, Homo sapiens; identical to SEQ ID NO: 200078
  chr5:141031150-141031230
  hyper

SEQ ID NO: 418326 - DNA, 68 bp, Homo sapiens; identical to SEQ ID NO: 231478
  chr5:141061849-141061917
  hyper

SEQ ID NO: 418327 - DNA, 224 bp, Homo sapiens; identical to SEQ ID NO: 200079
  chr5:141255434-141255658
  hyper

SEQ ID NO: 418328 - DNA, 990 bp, Homo sapiens; identical to SEQ ID NO: 200080
  chr5:141255691-141256681
  hyper

SEQ ID NO: 418329 - DNA, 881 bp, Homo sapiens; identical to SEQ ID NO: 283402
  chr5:141257149-141258030
  hyper

SEQ ID NO: 418330 - DNA, 175 bp, Homo sapiens; identical to SEQ ID NO: 231481
  chr5:141258623-141258798
  hyper

SEQ ID NO: 418331 - DNA, 54 bp, Homo sapiens; identical to SEQ ID NO: 231483
  chr5:141348500-141348554
  hyper

SEQ ID NO: 418332 - DNA, 61 bp, Homo sapiens; identical to SEQ ID NO: 283405
  chr5:141703944-141704005
  hyper

SEQ ID NO: 418333 - DNA, 265 bp, Homo sapiens; identical to SEQ ID NO: 200082
  chr5:141704448-141704713
  hyper

SEQ ID NO: 418334 - DNA, 84 bp, Homo sapiens; identical to SEQ ID NO: 200083
  chr5:141705342-141705426
  hyper

SEQ ID NO: 418335 - DNA, 341 bp, Homo sapiens; identical to SEQ ID NO: 200084
  chr5:141736299-141736640
  hyper

SEQ ID NO: 418336 - DNA, 255 bp, Homo sapiens; identical to SEQ ID NO: 231491
  chr5:143550289-143550544
  hyper

SEQ ID NO: 418337 - DNA, 75 bp, Homo sapiens; identical to SEQ ID NO: 283417
  chr5:143584759-143584834
  hyper

SEQ ID NO: 418338 - DNA, 292 bp, Homo sapiens; identical to SEQ ID NO: 231495
  chr5:145583394-145583686
  hyper

SEQ ID NO: 418339 - DNA, 350 bp, Homo sapiens; identical to SEQ ID NO: 283421
  chr5:145718045-145718395
  hyper

SEQ ID NO: 418340 - DNA, 301 bp, Homo sapiens; identical to SEQ ID NO: 283422
  chr5:145718501-145718802
  hyper

SEQ ID NO: 418341 - DNA, 165 bp, Homo sapiens; identical to SEQ ID NO: 200096
  chr5:146256762-146256927
  hyper

SEQ ID NO: 418342 - DNA, 148 bp, Homo sapiens; identical to SEQ ID NO: 200097
  chr5:146258482-146258630
  hyper

SEQ ID NO: 418343 - DNA, 66 bp, Homo sapiens; identical to SEQ ID NO: 283425
  chr5:146614040-146614106
  hyper

SEQ ID NO: 418344 - DNA, 158 bp, Homo sapiens; identical to SEQ ID NO: 283426
  chr5:146614481-146614639
  hyper

SEQ ID NO: 418345 - DNA, 150 bp, Homo sapiens; identical to SEQ ID NO: 283427
  chr5:146832504-146832654
  hyper

SEQ ID NO: 418346 - DNA, 322 bp, Homo sapiens; identical to SEQ ID NO: 283428
  chr5:146832690-146833012
  hyper

SEQ ID NO: 418347 - DNA, 48 bp, Homo sapiens; identical to SEQ ID NO: 231509
  chr5:147763270-147763318
  hyper

SEQ ID NO: 418348 - DNA, 61 bp, Homo sapiens; identical to SEQ ID NO: 231513
  chr5:148931073-148931134
  hyper

SEQ ID NO: 418349 - DNA, 87 bp, Homo sapiens; identical to SEQ ID NO: 283438
  chr5:149109659-149109746
  hyper

SEQ ID NO: 418350 - DNA, 192 bp, Homo sapiens; identical to SEQ ID NO: 112268
  chr5:149109802-149109994
  hyper

SEQ ID NO: 418351 - DNA, 476 bp, Homo sapiens; identical to SEQ ID NO: 231515
  chr5:149111288-149111764
  hyper

SEQ ID NO: 418352 - DNA, 254 bp, Homo sapiens; identical to SEQ ID NO: 231516
  chr5:149340038-149340292
  hyper

SEQ ID NO: 418353 - DNA, 148 bp, Homo sapiens; identical to SEQ ID NO: 200105
  chr5:149379996-149380144
  hyper

SEQ ID NO: 418354 - DNA, 103 bp, Homo sapiens; identical to SEQ ID NO: 231521
  chr5:149682902-149683005
  hyper

SEQ ID NO: 418355 - DNA, 107 bp, Homo sapiens; identical to SEQ ID NO: 200108
  chr5:149829576-149829683
  hyper

SEQ ID NO: 418356 - DNA, 129 bp, Homo sapiens; identical to SEQ ID NO: 231525
  chr5:150051900-150052029
  hyper

SEQ ID NO: 418357 - DNA, 44 bp, Homo sapiens; identical to SEQ ID NO: 231526
  chr5:150080673-150080717
  hyper

SEQ ID NO: 418358 - DNA, 70 bp, Homo sapiens; identical to SEQ ID NO: 283452
  chr5:150158135-150158205
  hyper

SEQ ID NO: 418359 - DNA, 330 bp, Homo sapiens; identical to SEQ ID NO: 283453
  chr5:150158451-150158781
  hyper

SEQ ID NO: 418360 - DNA, 32 bp, Homo sapiens; identical to SEQ ID NO: 200109
  chr5:150400618-150400650
  hyper

SEQ ID NO: 418361 - DNA, 41 bp, Homo sapiens; identical to SEQ ID NO: 231531
  chr5:150826986-150827027
  hyper

SEQ ID NO: 418362 - DNA, 227 bp, Homo sapiens; identical to SEQ ID NO: 231534
  chr5:151152045-151152272
  hyper

SEQ ID NO: 418363 - DNA, 36 bp, Homo sapiens; identical to SEQ ID NO: 283464
  chr5:153853519-153853555
  hyper

SEQ ID NO: 418364 - DNA, 41 bp, Homo sapiens; identical to SEQ ID NO: 200116
  chr5:153854289-153854330
  hyper

SEQ ID NO: 418365 - DNA, 55 bp, Homo sapiens; identical to SEQ ID NO: 200117
  chr5:153854360-153854415
  hyper

SEQ ID NO: 418366 - DNA, 52 bp, Homo sapiens; identical to SEQ ID NO: 200119
  chr5:153857881-153857933
  hyper

SEQ ID NO: 418367 - DNA, 322 bp, Homo sapiens; identical to SEQ ID NO: 283471
  chr5:153863650-153863972
  hyper

SEQ ID NO: 418368 - DNA, 315 bp, Homo sapiens; identical to SEQ ID NO: 231548
  chr5:154026798-154027113
  hyper

SEQ ID NO: 418369 - DNA, 147 bp, Homo sapiens; identical to SEQ ID NO: 231549
  chr5:154136122-154136269
  hyper

SEQ ID NO: 418370 - DNA, 86 bp, Homo sapiens; identical to SEQ ID NO: 231550
  chr5:154237359-154237445
  hyper

SEQ ID NO: 418371 - DNA, 389 bp, Homo sapiens; identical to SEQ ID NO: 231551
  chr5:154317541-154317930
  hyper

SEQ ID NO: 418372 - DNA, 57 bp, Homo sapiens; identical to SEQ ID NO: 283477
  chr5:155107331-155107388
  hyper

SEQ ID NO: 418373 - DNA, 33 bp, Homo sapiens; identical to SEQ ID NO: 283480
  chr5:156887016-156887049
  hyper

SEQ ID NO: 418374 - DNA, 207 bp, Homo sapiens; identical to SEQ ID NO: 231556
  chr5:157158249-157158456
  hyper

SEQ ID NO: 418375 - DNA, 64 bp, Homo sapiens; identical to SEQ ID NO: 200127
  chr5:157285888-157285952
  hyper

SEQ ID NO: 418376 - DNA, 108 bp, Homo sapiens; identical to SEQ ID NO: 200128
  chr5:158526600-158526708
  hyper

SEQ ID NO: 418377 - DNA, 83 bp, Homo sapiens; identical to SEQ ID NO: 283489
  chr5:158533459-158533542
  hyper

SEQ ID NO: 418378 - DNA, 105 bp, Homo sapiens; identical to SEQ ID NO: 283490
  chr5:158533788-158533893
  hyper

SEQ ID NO: 418379 - DNA, 345 bp, Homo sapiens; identical to SEQ ID NO: 231564
  chr5:158689916-158690261
  hyper

SEQ ID NO: 418380 - DNA, 166 bp, Homo sapiens; identical to SEQ ID NO: 231565
  chr5:158758339-158758505
  hyper

SEQ ID NO: 418381 - DNA, 219 bp, Homo sapiens; identical to SEQ ID NO: 283494
  chr5:159200452-159200671
  hyper

SEQ ID NO: 418382 - DNA, 78 bp, Homo sapiens; identical to SEQ ID NO: 231570
  chr5:159545792-159545870
  hyper

SEQ ID NO: 418383 - DNA, 142 bp, Homo sapiens; identical to SEQ ID NO: 200131
  chr5:159546857-159546999
  hyper

SEQ ID NO: 418384 - DNA, 73 bp, Homo sapiens; identical to SEQ ID NO: 283501
  chr5:159615598-159615671
  hyper

SEQ ID NO: 418385 - DNA, 143 bp, Homo sapiens; identical to SEQ ID NO: 283502
  chr5:159738773-159738916
  hyper

SEQ ID NO: 418386 - DNA, 132 bp, Homo sapiens; identical to SEQ ID NO: 283503
  chr5:159738917-159739049
  hyper

SEQ ID NO: 418387 - DNA, 247 bp, Homo sapiens; identical to SEQ ID NO: 200133
  chr5:159739186-159739433
  hyper

SEQ ID NO: 418388 - DNA, 154 bp, Homo sapiens; identical to SEQ ID NO: 231574
  chr5:159797261-159797415
  hyper

SEQ ID NO: 418389 - DNA, 173 bp, Homo sapiens; identical to SEQ ID NO: 200134
  chr5:159826416-159826589
  hyper

SEQ ID NO: 418390 - DNA, 540 bp, Homo sapiens; identical to SEQ ID NO: 231575
  chr5:159826808-159827348
  hyper

SEQ ID NO: 418391 - DNA, 360 bp, Homo sapiens; identical to SEQ ID NO: 283511
  chr5:160975998-160976358
  hyper

SEQ ID NO: 418392 - DNA, 34 bp, Homo sapiens; identical to SEQ ID NO: 283512
  chr5:161274276-161274310
  hyper

SEQ ID NO: 418393 - DNA, 51 bp, Homo sapiens; identical to SEQ ID NO: 283513
  chr5:161274554-161274605
  hyper

SEQ ID NO: 418394 - DNA, 43 bp, Homo sapiens; identical to SEQ ID NO: 283514
  chr5:161275109-161275152
  hyper

SEQ ID NO: 418395 - DNA, 223 bp, Homo sapiens; identical to SEQ ID NO: 283515
  chr5:161275590-161275813
  hyper

SEQ ID NO: 418396 - DNA, 357 bp, Homo sapiens; identical to SEQ ID NO: 231583
  chr5:162887185-162887542
  hyper

SEQ ID NO: 418397 - DNA, 118 bp, Homo sapiens; identical to SEQ ID NO: 200138
  chr5:162930156-162930274
  hyper

SEQ ID NO: 418398 - DNA, 63 bp, Homo sapiens; identical to SEQ ID NO: 200139
  chr5:162930320-162930383
  hyper

SEQ ID NO: 418399 - DNA, 48 bp, Homo sapiens; identical to SEQ ID NO: 200140
  chr5:162931957-162932005
  hyper

SEQ ID NO: 418400 - DNA, 46 bp, Homo sapiens; identical to SEQ ID NO: 231586
  chr5:162932441-162932487
  hyper

SEQ ID NO: 418401 - DNA, 384 bp, Homo sapiens; identical to SEQ ID NO: 283521
  chr5:166406476-166406860
  hyper

SEQ ID NO: 418402 - DNA, 152 bp, Homo sapiens; identical to SEQ ID NO: 200142
  chr5:167000608-167000760
  hyper

SEQ ID NO: 418403 - DNA, 223 bp, Homo sapiens; identical to SEQ ID NO: 200143
  chr5:167718508-167718731
  hyper

SEQ ID NO: 418404 - DNA, 377 bp, Homo sapiens; identical to SEQ ID NO: 200144
  chr5:167718952-167719329
  hyper

SEQ ID NO: 418405 - DNA, 247 bp, Homo sapiens; identical to SEQ ID NO: 231591
  chr5:167913520-167913767
  hyper

SEQ ID NO: 418406 - DNA, 88 bp, Homo sapiens; identical to SEQ ID NO: 231594
  chr5:168006688-168006776
  hyper

SEQ ID NO: 418407 - DNA, 44 bp, Homo sapiens; identical to SEQ ID NO: 231596
  chr5:168728508-168728552
  hyper

SEQ ID NO: 418408 - DNA, 134 bp, Homo sapiens; identical to SEQ ID NO: 231597
  chr5:169010586-169010720
  hyper

SEQ ID NO: 418409 - DNA, 64 bp, Homo sapiens; identical to SEQ ID NO: 200148
  chr5:170289638-170289702
  hyper

SEQ ID NO: 418410 - DNA, 42 bp, Homo sapiens; identical to SEQ ID NO: 200149
  chr5:170289734-170289776
  hyper

SEQ ID NO: 418411 - DNA, 105 bp, Homo sapiens; identical to SEQ ID NO: 231609
  chr5:170744958-170745063
  hyper

SEQ ID NO: 418412 - DNA, 80 bp, Homo sapiens; identical to SEQ ID NO: 283539
  chr5:170745480-170745560
  hyper

SEQ ID NO: 418413 - DNA, 115 bp, Homo sapiens; identical to SEQ ID NO: 231611
  chr5:170814440-170814555
  hyper

SEQ ID NO: 418414 - DNA, 1106 bp, Homo sapiens; identical to SEQ ID NO: 231612
  chr5:170845701-170846807
  hyper

SEQ ID NO: 418415 - DNA, 146 bp, Homo sapiens; identical to SEQ ID NO: 200152
  chr5:170847120-170847266
  hyper

SEQ ID NO: 418416 - DNA, 113 bp, Homo sapiens; identical to SEQ ID NO: 200153
  chr5:170847375-170847488
  hyper

SEQ ID NO: 418417 - DNA, 85 bp, Homo sapiens; identical to SEQ ID NO: 200154
  chr5:171541758-171541843
  hyper

SEQ ID NO: 418418 - DNA, 93 bp, Homo sapiens; identical to SEQ ID NO: 283545
  chr5:172068057-172068150
  hyper

SEQ ID NO: 418419 - DNA, 445 bp, Homo sapiens; identical to SEQ ID NO: 231615
  chr5:172068385-172068830
  hyper

SEQ ID NO: 418420 - DNA, 161 bp, Homo sapiens; identical to SEQ ID NO: 200156
  chr5:172197154-172197315
  hyper

SEQ ID NO: 418421 - DNA, 446 bp, Homo sapiens; identical to SEQ ID NO: 200158
  chr5:172385502-172385948
  hyper

SEQ ID NO: 418422 - DNA, 249 bp, Homo sapiens; identical to SEQ ID NO: 283551
  chr5:172386283-172386532
  hyper

SEQ ID NO: 418423 - DNA, 232 bp, Homo sapiens; identical to SEQ ID NO: 231620
  chr5:172410475-172410707
  hyper

SEQ ID NO: 418424 - DNA, 102 bp, Homo sapiens; identical to SEQ ID NO: 283553
  chr5:172444179-172444281
  hyper

SEQ ID NO: 418425 - DNA, 274 bp, Homo sapiens; identical to SEQ ID NO: 231621
  chr5:172483102-172483376
  hyper

SEQ ID NO: 418426 - DNA, 297 bp, Homo sapiens; identical to SEQ ID NO: 231622
  chr5:172571552-172571849
  hyper

SEQ ID NO: 418427 - DNA, 259 bp, Homo sapiens; identical to SEQ ID NO: 283558
  chr5:172663579-172663838
  hyper

SEQ ID NO: 418428 - DNA, 151 bp, Homo sapiens; identical to SEQ ID NO: 200166
  chr5:172672326-172672477
  hyper

SEQ ID NO: 418429 - DNA, 55 bp, Homo sapiens; identical to SEQ ID NO: 283563
  chr5:172710794-172710849
  hyper

SEQ ID NO: 418430 - DNA, 157 bp, Homo sapiens; identical to SEQ ID NO: 283564
  chr5:172710958-172711115
  hyper

SEQ ID NO: 418431 - DNA, 133 bp, Homo sapiens; identical to SEQ ID NO: 200167
  chr5:172721006-172721139
  hyper

SEQ ID NO: 418432 - DNA, 214 bp, Homo sapiens; identical to SEQ ID NO: 200168
  chr5:172755663-172755877
  hyper

SEQ ID NO: 418433 - DNA, 72 bp, Homo sapiens; identical to SEQ ID NO: 200169
  chr5:173043700-173043772
  hyper

SEQ ID NO: 418434 - DNA, 360 bp, Homo sapiens; identical to SEQ ID NO: 231638
  chr5:173314918-173315278
  hyper

SEQ ID NO: 418435 - DNA, 192 bp, Homo sapiens; identical to SEQ ID NO: 200170
  chr5:173345561-173345753
  hyper

SEQ ID NO: 418436 - DNA, 32 bp, Homo sapiens; identical to SEQ ID NO: 231643
  chr5:174147150-174147182
  hyper

SEQ ID NO: 418437 - DNA, 217 bp, Homo sapiens; identical to SEQ ID NO: 231645
  chr5:174149051-174149268
  hyper

SEQ ID NO: 418438 - DNA, 44 bp, Homo sapiens; identical to SEQ ID NO: 231647
  chr5:174158416-174158460
  hyper

SEQ ID NO: 418439 - DNA, 208 bp, Homo sapiens; identical to SEQ ID NO: 283581
  chr5:174159593-174159801
  hyper

SEQ ID NO: 418440 - DNA, 228 bp, Homo sapiens; identical to SEQ ID NO: 200182
  chr5:175200304-175200532
  hyper

SEQ ID NO: 418441 - DNA, 32 bp, Homo sapiens; identical to SEQ ID NO: 231661
  chr5:175788708-175788740
  hyper

SEQ ID NO: 418442 - DNA, 378 bp, Homo sapiens; identical to SEQ ID NO: 231663
  chr5:175875017-175875395
  hyper

SEQ ID NO: 418443 - DNA, 82 bp, Homo sapiens; identical to SEQ ID NO: 283595
  chr5:176046196-176046278
  hyper

SEQ ID NO: 418444 - DNA, 47 bp, Homo sapiens; identical to SEQ ID NO: 231668
  chr5:176074452-176074499
  hyper

SEQ ID NO: 418445 - DNA, 44 bp, Homo sapiens; identical to SEQ ID NO: 200187
  chr5:176074862-176074906
  hyper

SEQ ID NO: 418446 - DNA, 135 bp, Homo sapiens; identical to SEQ ID NO: 283599
  chr5:176237259-176237394
  hyper

SEQ ID NO: 418447 - DNA, 91 bp, Homo sapiens; identical to SEQ ID NO: 231674
  chr5:176245002-176245093
  hyper

SEQ ID NO: 418448 - DNA, 45 bp, Homo sapiens; identical to SEQ ID NO: 231676
  chr5:176433877-176433922
  hyper

SEQ ID NO: 418449 - DNA, 330 bp, Homo sapiens; identical to SEQ ID NO: 231677
  chr5:176449527-176449857
  hyper

SEQ ID NO: 418450 - DNA, 294 bp, Homo sapiens; identical to SEQ ID NO: 200189
  chr5:176738658-176738952
  hyper

SEQ ID NO: 418451 - DNA, 394 bp, Homo sapiens; identical to SEQ ID NO: 231680
  chr5:176739158-176739552
  hyper

SEQ ID NO: 418452 - DNA, 90 bp, Homo sapiens; identical to SEQ ID NO: 222761
  chr5:176827093-176827183
  hyper

SEQ ID NO: 418453 - DNA, 288 bp, Homo sapiens; identical to SEQ ID NO: 222762
  chr5:176830417-176830705
  hyper

SEQ ID NO: 418454 - DNA, 147 bp, Homo sapiens; identical to SEQ ID NO: 222763
  chr5:176830933-176831080
  hyper

SEQ ID NO: 418455 - DNA, 210 bp, Homo sapiens; identical to SEQ ID NO: 231682
  chr5:176853271-176853481
  hyper

SEQ ID NO: 418456 - DNA, 191 bp, Homo sapiens; identical to SEQ ID NO: 231683
  chr5:176873632-176873823
  hyper

SEQ ID NO: 418457 - DNA, 124 bp, Homo sapiens; identical to SEQ ID NO: 231684
  chr5:176882534-176882658
  hyper

SEQ ID NO: 418458 - DNA, 267 bp, Homo sapiens; identical to SEQ ID NO: 231685
  chr5:176943952-176944219
  hyper

SEQ ID NO: 418459 - DNA, 126 bp, Homo sapiens; identical to SEQ ID NO: 231686
  chr5:176944482-176944608
  hyper

SEQ ID NO: 418460 - DNA, 50 bp, Homo sapiens; identical to SEQ ID NO: 200191
  chr5:177019030-177019080
  hyper

SEQ ID NO: 418461 - DNA, 257 bp, Homo sapiens; identical to SEQ ID NO: 283617
  chr5:177540465-177540722
  hyper

SEQ ID NO: 418462 - DNA, 243 bp, Homo sapiens; identical to SEQ ID NO: 42413
  chr5:177540787-177541030
  hyper

SEQ ID NO: 418463 - DNA, 59 bp, Homo sapiens; identical to SEQ ID NO: 231691
  chr5:177558239-177558298
  hyper

SEQ ID NO: 418464 - DNA, 257 bp, Homo sapiens; identical to SEQ ID NO: 231692
  chr5:177580326-177580583
  hyper

SEQ ID NO: 418465 - DNA, 195 bp, Homo sapiens; identical to SEQ ID NO: 231693
  chr5:177591086-177591281
  hyper

SEQ ID NO: 418466 - DNA, 130 bp, Homo sapiens; identical to SEQ ID NO: 231694
  chr5:177631399-177631529
  hyper

SEQ ID NO: 418467 - DNA, 311 bp, Homo sapiens; identical to SEQ ID NO: 231695
  chr5:177706982-177707293
  hyper

SEQ ID NO: 418468 - DNA, 64 bp, Homo sapiens; identical to SEQ ID NO: 283627
  chr5:178054094-178054158
  hyper

SEQ ID NO: 418469 - DNA, 149 bp, Homo sapiens; identical to SEQ ID NO: 112631
  chr5:178054178-178054327
  hyper

SEQ ID NO: 418470 - DNA, 564 bp, Homo sapiens; identical to SEQ ID NO: 200196
  chr5:178287036-178287600
  hyper

SEQ ID NO: 418471 - DNA, 295 bp, Homo sapiens; identical to SEQ ID NO: 283630
  chr5:178322844-178323139
  hyper

SEQ ID NO: 418472 - DNA, 271 bp, Homo sapiens; identical to SEQ ID NO: 283631
  chr5:178323249-178323520
  hyper

SEQ ID NO: 418473 - DNA, 245 bp, Homo sapiens; identical to SEQ ID NO: 283632
  chr5:178367636-178367881
  hyper

SEQ ID NO: 418474 - DNA, 214 bp, Homo sapiens; identical to SEQ ID NO: 200197
  chr5:178423619-178423833
  hyper

SEQ ID NO: 418475 - DNA, 88 bp, Homo sapiens; identical to SEQ ID NO: 283634
  chr5:178450491-178450579
  hyper

SEQ ID NO: 418476 - DNA, 38 bp, Homo sapiens; identical to SEQ ID NO: 283635
  chr5:178487776-178487814
  hyper

SEQ ID NO: 418477 - DNA, 168 bp, Homo sapiens; identical to SEQ ID NO: 231706
  chr5:178977222-178977390
  hyper

SEQ ID NO: 418478 - DNA, 166 bp, Homo sapiens; identical to SEQ ID NO: 231707
  chr5:179050812-179050978
  hyper

SEQ ID NO: 418479 - DNA, 283 bp, Homo sapiens; identical to SEQ ID NO: 283640
  chr5:179223440-179223723
  hyper

SEQ ID NO: 418480 - DNA, 48 bp, Homo sapiens; identical to SEQ ID NO: 231708
  chr5:179233842-179233890
  hyper

SEQ ID NO: 418481 - DNA, 149 bp, Homo sapiens; identical to SEQ ID NO: 200200
  chr5:179234473-179234622
  hyper

SEQ ID NO: 418482 - DNA, 136 bp, Homo sapiens; identical to SEQ ID NO: 200207
  chr5:179781292-179781428
  hyper

SEQ ID NO: 418483 - DNA, 39 bp, Homo sapiens; identical to SEQ ID NO: 283652
  chr5:180017079-180017118
  hyper

SEQ ID NO: 418484 - DNA, 62 bp, Homo sapiens; identical to SEQ ID NO: 200210
  chr5:180230099-180230161
  hyper

SEQ ID NO: 418485 - DNA, 53 bp, Homo sapiens; identical to SEQ ID NO: 231720
  chr5:180234903-180234956
  hyper

SEQ ID NO: 418486 - DNA, 61 bp, Homo sapiens; identical to SEQ ID NO: 200213
  chr5:180595002-180595063
  hyper

SEQ ID NO: 418487 - DNA, 164 bp, Homo sapiens; identical to SEQ ID NO: 231728
  chr5:180600256-180600420
  hyper

SEQ ID NO: 418488 - DNA, 180 bp, Homo sapiens; identical to SEQ ID NO: 231729
  chr5:180600480-180600660
  hyper

SEQ ID NO: 418489 - DNA, 272 bp, Homo sapiens; identical to SEQ ID NO: 231730
  chr5:180614836-180615108
  hyper

SEQ ID NO: 418490 - DNA, 512 bp, Homo sapiens; identical to SEQ ID NO: 231734
  chr5:180670801-180671313
  hyper

SEQ ID NO: 418491 - DNA, 338 bp, Homo sapiens; identical to SEQ ID NO: 200216
  chr5:180673932-180674270
  hyper

SEQ ID NO: 418492 - DNA, 67 bp, Homo sapiens; identical to SEQ ID NO: 283682
  chr6:1316703-1316770
  hyper

SEQ ID NO: 418493 - DNA, 352 bp, Homo sapiens; identical to SEQ ID NO: 283683
  chr6:1316810-1317162
  hyper

SEQ ID NO: 418494 - DNA, 113 bp, Homo sapiens; identical to SEQ ID NO: 200228
  chr6:1379978-1380091
  hyper

SEQ ID NO: 418495 - DNA, 281 bp, Homo sapiens; identical to SEQ ID NO: 397242
  chr6:1382712-1382993
  hyper

SEQ ID NO: 418496 - DNA, 227 bp, Homo sapiens; identical to SEQ ID NO: 200229
  chr6:1383450-1383677
  hyper

SEQ ID NO: 418497 - DNA, 222 bp, Homo sapiens; identical to SEQ ID NO: 231748
  chr6:1388651-1388873
  hyper

SEQ ID NO: 418498 - DNA, 87 bp, Homo sapiens; identical to SEQ ID NO: 200230
  chr6:1439168-1439255
  hyper

SEQ ID NO: 418499 - DNA, 93 bp, Homo sapiens; identical to SEQ ID NO: 283691
  chr6:1605543-1605636
  hyper

SEQ ID NO: 418500 - DNA, 633 bp, Homo sapiens; identical to SEQ ID NO: 283692
  chr6:1610183-1610816
  hyper

SEQ ID NO: 418501 - DNA, 334 bp, Homo sapiens; identical to SEQ ID NO: 200232
  chr6:1610864-1611198
  hyper

SEQ ID NO: 418502 - DNA, 65 bp, Homo sapiens; identical to SEQ ID NO: 283694
  chr6:1612131-1612196
  hyper

SEQ ID NO: 418503 - DNA, 186 bp, Homo sapiens; identical to SEQ ID NO: 112753
  chr6:1612300-1612486
  hyper

SEQ ID NO: 418504 - DNA, 42 bp, Homo sapiens; identical to SEQ ID NO: 200235
  chr6:1614120-1614162
  hyper

SEQ ID NO: 418505 - DNA, 134 bp, Homo sapiens; identical to SEQ ID NO: 283697
  chr6:1619970-1620104
  hyper

SEQ ID NO: 418506 - DNA, 44 bp, Homo sapiens; identical to SEQ ID NO: 231760
  chr6:2246048-2246092
  hyper

SEQ ID NO: 418507 - DNA, 168 bp, Homo sapiens; identical to SEQ ID NO: 231761
  chr6:2764960-2765128
  hyper

SEQ ID NO: 418508 - DNA, 208 bp, Homo sapiens; identical to SEQ ID NO: 283705
  chr6:2999193-2999401
  hyper

SEQ ID NO: 418509 - DNA, 205 bp, Homo sapiens; identical to SEQ ID NO: 231764
  chr6:3118559-3118764
  hyper

SEQ ID NO: 418510 - DNA, 254 bp, Homo sapiens; identical to SEQ ID NO: 200241
  chr6:3162842-3163096
  hyper

SEQ ID NO: 418511 - DNA, 560 bp, Homo sapiens; identical to SEQ ID NO: 231765
  chr6:3227011-3227571
  hyper

SEQ ID NO: 418512 - DNA, 1366 bp, Homo sapiens; identical to SEQ ID NO: 283714
  chr6:3455898-3457264
  hyper

SEQ ID NO: 418513 - DNA, 122 bp, Homo sapiens; identical to SEQ ID NO: 231773
  chr6:5004398-5004520
  hyper

SEQ ID NO: 418514 - DNA, 399 bp, Homo sapiens; identical to SEQ ID NO: 283730
  chr6:5999609-6000008
  hyper

SEQ ID NO: 418515 - DNA, 93 bp, Homo sapiens; identical to SEQ ID NO: 283731
  chr6:6000046-6000139
  hyper

SEQ ID NO: 418516 - DNA, 739 bp, Homo sapiens; identical to SEQ ID NO: 283735
  chr6:7051921-7052660
  hyper

SEQ ID NO: 418517 - DNA, 111 bp, Homo sapiens; identical to SEQ ID NO: 200258
  chr6:7389807-7389918
  hyper

SEQ ID NO: 418518 - DNA, 206 bp, Homo sapiens; identical to SEQ ID NO: 231784
  chr6:7390149-7390355
  hyper

SEQ ID NO: 418519 - DNA, 1272 bp, Homo sapiens
  chr6:7541428-7542700
  hyper
gcgtggtaggtagcgtttccagtgatcaacaaaagtaaatatttgaccagtaagtctccaatcgagaggcccctccattccagctatttccgcccggggaccgaggaaatcctcaaaagccgggccacgcattcccagcccgagaggccccagcgcagagcgcagcagcccccgcgagcgcaggtcctccccgcggtggcttcgcccagggcgcttgggtctcggggaccccgcccccgccccgcccggtgttactcaggcctcggtggcgcagggcggagtcgcgggcggcgggcgcaggtggggaggggcggccggagcgcgtcggtgacacccgcgggggggcggggaaggcgcggcggccgcaccccaccctgggaagaaaccggccaggtgtggcctaggcgcccagtgccagcggggaggagactcgctccgccgccgaccaacaccaacacccagctccgacgcagctcctctgcgcccttgccgccctccgagccacagctttcctcccgctcctgcccccggcccgtcgccgtctccgcgctcgcagcggcctcgggagggcccaggtagcgagcagcgacctcgcgagccttccgcactcccgcccggttccccggccgtccgcctatccttggccccctccgctttctccgcgccggcccgcctcgcttatgcctcggcgctgagccgctctcccgattgcccgccgacatgagctgcaacggaggctcccacccgcggatcaacactctgggccgcatgatccgcgccgagtctggcccggacctgcgctacgaggtgaccagcggcggcgggggcaccagcaggatgtactattctcggcgcggcgtgatcaccgaccagaactcggacggctactggtgggtacctgcccggagagcgcgggctgcggggctcgcgggacagggagggaccgtcctcctctggacgactgggagactcgggtcccgaaggtggaaaggtttttttgccccaggtcccgaaagaacttcccggccgcgctgggagcaggaccgggtgtcctgacgcgtgcggggacaggttggcccctgtcctgcgaacagggactcggtcgtacctttctcccctcccgcgagcccgggcgggtggtcagagggggcgtcgggcccgcgcggggctgtcccctgcctgctggacacggctgcagccgcctttgtcccagcccgcgaatgggaggtcaggcgaggtggggctgcgaccacaaaacccaacctctccaac

SEQ ID NO: 418520 - DNA, 238 bp, Homo sapiens; identical to SEQ ID NO: 231787
  chr6:7590298-7590536
  hyper

SEQ ID NO: 418521 - DNA, 86 bp, Homo sapiens; identical to SEQ ID NO: 231790
  chr6:8064729-8064815
  hyper

SEQ ID NO: 418522 - DNA, 87 bp, Homo sapiens; identical to SEQ ID NO: 283743
  chr6:10383111-10383198
  hyper

SEQ ID NO: 418523 - DNA, 192 bp, Homo sapiens; identical to SEQ ID NO: 200264
  chr6:10391456-10391648
  hyper

SEQ ID NO: 418524 - DNA, 146 bp, Homo sapiens; identical to SEQ ID NO: 231798
  chr6:10395822-10395968
  hyper

SEQ ID NO: 418525 - DNA, 125 bp, Homo sapiens
  chr6:10412890-10413015
  hyper
gggcgctcgtggggctctcggcgcggcaggcgcttcccggccctgtctggccgcgggctccgccgcttcgcagccgagtctgggactcgggactcggctgcccgctgctgcgcggctcctccatg

SEQ ID NO: 418526 - DNA, 515 bp, Homo sapiens; identical to SEQ ID NO: 283753
  chr6:10413314-10413829
  hyper

SEQ ID NO: 418527 - DNA, 31 bp, Homo sapiens; identical to SEQ ID NO: 200270
  chr6:10414549-10414580
  hyper

SEQ ID NO: 418528 - DNA, 169 bp, Homo sapiens; identical to SEQ ID NO: 231803
  chr6:10418727-10418896
  hyper

SEQ ID NO: 418529 - DNA, 180 bp, Homo sapiens; identical to SEQ ID NO: 231809
  chr6:10529013-10529193
  hyper

SEQ ID NO: 418530 - DNA, 362 bp, Homo sapiens; identical to SEQ ID NO: 231810
  chr6:10694859-10695221
  hyper

SEQ ID NO: 418531 - DNA, 110 bp, Homo sapiens; identical to SEQ ID NO: 200281
  chr6:10723051-10723161
  hyper

SEQ ID NO: 418532 - DNA, 221 bp, Homo sapiens; identical to SEQ ID NO: 231814
  chr6:11232919-11233140
  hyper

SEQ ID NO: 418533 - DNA, 116 bp, Homo sapiens; identical to SEQ ID NO: 200283
  chr6:11537480-11537596
  hyper

SEQ ID NO: 418534 - DNA, 352 bp, Homo sapiens; identical to SEQ ID NO: 283772
  chr6:11537920-11538272
  hyper

SEQ ID NO: 418535 - DNA, 608 bp, Homo sapiens; identical to SEQ ID NO: 112888
  chr6:11538299-11538907
  hyper

SEQ ID NO: 418536 - DNA, 149 bp, Homo sapiens; identical to SEQ ID NO: 231819
  chr6:13328435-13328584
  hyper

SEQ ID NO: 418537 - DNA, 146 bp, Homo sapiens; identical to SEQ ID NO: 283777
  chr6:13488242-13488388
  hyper

SEQ ID NO: 418538 - DNA, 83 bp, Homo sapiens; identical to SEQ ID NO: 283778
  chr6:13488595-13488678
  hyper

SEQ ID NO: 418539 - DNA, 146 bp, Homo sapiens; identical to SEQ ID NO: 200285
  chr6:13574018-13574164
  hyper

SEQ ID NO: 418540 - DNA, 90 bp, Homo sapiens; identical to SEQ ID NO: 231822
  chr6:13614827-13614917
  hyper

SEQ ID NO: 418541 - DNA, 66 bp, Homo sapiens; identical to SEQ ID NO: 200286
  chr6:13615519-13615585
  hyper

SEQ ID NO: 418542 - DNA, 292 bp, Homo sapiens; identical to SEQ ID NO: 283782
  chr6:14117386-14117678
  hyper

SEQ ID NO: 418543 - DNA, 128 bp, Homo sapiens; identical to SEQ ID NO: 200288
  chr6:14211103-14211231
  hyper

SEQ ID NO: 418544 - DNA, 343 bp, Homo sapiens; identical to SEQ ID NO: 231826
  chr6:15663120-15663463
  hyper

SEQ ID NO: 418545 - DNA, 227 bp, Homo sapiens; identical to SEQ ID NO: 231827
  chr6:16129890-16130117
  hyper

SEQ ID NO: 418546 - DNA, 153 bp, Homo sapiens; identical to SEQ ID NO: 231828
  chr6:16238456-16238609
  hyper

SEQ ID NO: 418547 - DNA, 378 bp, Homo sapiens; identical to SEQ ID NO: 112922
  chr6:16238860-16239238
  hyper

SEQ ID NO: 418548 - DNA, 252 bp, Homo sapiens; identical to SEQ ID NO: 231830
  chr6:16761654-16761906
  hyper

SEQ ID NO: 418549 - DNA, 152 bp, Homo sapiens; identical to SEQ ID NO: 200291
  chr6:16763513-16763665
  hyper

SEQ ID NO: 418550 - DNA, 48 bp, Homo sapiens; identical to SEQ ID NO: 200297
  chr6:17393745-17393793
  hyper

SEQ ID NO: 418551 - DNA, 759 bp, Homo sapiens; identical to SEQ ID NO: 112932
  chr6:17393824-17394583
  hyper

SEQ ID NO: 418552 - DNA, 100 bp, Homo sapiens; identical to SEQ ID NO: 231835
  chr6:17706854-17706954
  hyper

SEQ ID NO: 418553 - DNA, 201 bp, Homo sapiens; identical to SEQ ID NO: 200299
  chr6:17987165-17987366
  hyper

SEQ ID NO: 418554 - DNA, 190 bp, Homo sapiens; identical to SEQ ID NO: 231837
  chr6:17988449-17988639
  hyper

SEQ ID NO: 418555 - DNA, 55 bp, Homo sapiens; identical to SEQ ID NO: 200301
  chr6:18277378-18277433
  hyper

SEQ ID NO: 418556 - DNA, 39 bp, Homo sapiens; identical to SEQ ID NO: 200302
  chr6:18278043-18278082
  hyper

SEQ ID NO: 418557 - DNA, 187 bp, Homo sapiens; identical to SEQ ID NO: 231841
  chr6:18387299-18387486
  hyper

SEQ ID NO: 418558 - DNA, 62 bp, Homo sapiens; identical to SEQ ID NO: 200303
  chr6:19691576-19691638
  hyper

SEQ ID NO: 418559 - DNA, 114 bp, Homo sapiens; identical to SEQ ID NO: 283806
  chr6:19692318-19692432
  hyper

SEQ ID NO: 418560 - DNA, 326 bp, Homo sapiens
  chr6:20211953-20212279
  hyper
gtctacagattcatcgcgcttgttttttaagtagggtcatctaaattaaaaacaataacgacttgaggacactgatgaaagaaacactggtttcatgtatcagactacttcagaacttgattacaggaaacgaggcaatcccaaacttaaagaaaaaaaagttcagtagaacttgccgcgcaggctgtaccaatattttttcacacttacaaggagaaaaacactaacaccaactcaagaagggaaaacacacacacacacacacacacacacacacacacaaaaaccaactgtctagtgtgtggctgtaaaatacgccatggagg

SEQ ID NO: 418561 - DNA, 324 bp, Homo sapiens; identical to SEQ ID NO: 200307
  chr6:20401055-20401379
  hyper

SEQ ID NO: 418562 - DNA, 459 bp, Homo sapiens; identical to SEQ ID NO: 231848
  chr6:20401709-20402168
  hyper

SEQ ID NO: 418563 - DNA, 188 bp, Homo sapiens; identical to SEQ ID NO: 231849
  chr6:20534532-20534720
  hyper

SEQ ID NO: 418564 - DNA, 1131 bp, Homo sapiens; identical to SEQ ID NO: 200308
  chr6:21594475-21595606
  hyper

SEQ ID NO: 418565 - DNA, 482 bp, Homo sapiens; identical to SEQ ID NO: 231850
  chr6:21595891-21596373
  hyper

SEQ ID NO: 418566 - DNA, 263 bp, Homo sapiens; identical to SEQ ID NO: 200314
  chr6:22146853-22147116
  hyper

SEQ ID NO: 418567 - DNA, 201 bp, Homo sapiens; identical to SEQ ID NO: 200315
  chr6:24360170-24360371
  hyper

SEQ ID NO: 418568 - DNA, 97 bp, Homo sapiens; identical to SEQ ID NO: 231853
  chr6:24403048-24403145
  hyper

SEQ ID NO: 418569 - DNA, 262 bp, Homo sapiens; identical to SEQ ID NO: 231854
  chr6:24403465-24403727
  hyper

SEQ ID NO: 418570 - DNA, 203 bp, Homo sapiens; identical to SEQ ID NO: 231856
  chr6:24667302-24667505
  hyper

SEQ ID NO: 418571 - DNA, 265 bp, Homo sapiens; identical to SEQ ID NO: 231857
  chr6:24721642-24721907
  hyper

SEQ ID NO: 418572 - DNA, 213 bp, Homo sapiens; identical to SEQ ID NO: 231859
  chr6:25278942-25279155
  hyper

SEQ ID NO: 418573 - DNA, 167 bp, Homo sapiens; identical to SEQ ID NO: 231860
  chr6:25280013-25280180
  hyper

SEQ ID NO: 418574 - DNA, 153 bp, Homo sapiens; identical to SEQ ID NO: 283828
  chr6:25652226-25652379
  hyper

SEQ ID NO: 418575 - DNA, 224 bp, Homo sapiens; identical to SEQ ID NO: 283829
  chr6:25652505-25652729
  hyper

SEQ ID NO: 418576 - DNA, 125 bp, Homo sapiens; identical to SEQ ID NO: 283830
  chr6:26020588-26020713
  hyper

SEQ ID NO: 418577 - DNA, 128 bp, Homo sapiens; identical to SEQ ID NO: 283831
  chr6:26020763-26020891
  hyper

SEQ ID NO: 418578 - DNA, 178 bp, Homo sapiens; identical to SEQ ID NO: 283832
  chr6:26021528-26021706
  hyper

SEQ ID NO: 418579 - DNA, 110 bp, Homo sapiens; identical to SEQ ID NO: 283833
  chr6:26022178-26022288
  hyper

SEQ ID NO: 418580 - DNA, 505 bp, Homo sapiens; identical to SEQ ID NO: 200317
  chr6:26027158-26027663
  hyper

SEQ ID NO: 418581 - DNA, 936 bp, Homo sapiens; identical to SEQ ID NO: 200318
  chr6:26031787-26032723
  hyper

SEQ ID NO: 418582 - DNA, 35 bp, Homo sapiens; identical to SEQ ID NO: 200319
  chr6:26032843-26032878
  hyper

SEQ ID NO: 418583 - DNA, 795 bp, Homo sapiens; identical to SEQ ID NO: 231868
  chr6:26045208-26046003
  hyper

SEQ ID NO: 418584 - DNA, 231 bp, Homo sapiens; identical to SEQ ID NO: 231869
  chr6:26056526-26056757
  hyper

SEQ ID NO: 418585 - DNA, 247 bp, Homo sapiens; identical to SEQ ID NO: 231871
  chr6:26104171-26104418
  hyper

SEQ ID NO: 418586 - DNA, 44 bp, Homo sapiens; identical to SEQ ID NO: 231872
  chr6:26123722-26123766
  hyper

SEQ ID NO: 418587 - DNA, 44 bp, Homo sapiens; identical to SEQ ID NO: 231873
  chr6:26123886-26123930
  hyper

SEQ ID NO: 418588 - DNA, 180 bp, Homo sapiens; identical to SEQ ID NO: 200322
  chr6:26125817-26125997
  hyper

SEQ ID NO: 418589 - DNA, 328 bp, Homo sapiens; identical to SEQ ID NO: 200323
  chr6:26126237-26126565
  hyper

SEQ ID NO: 418590 - DNA, 154 bp, Homo sapiens; identical to SEQ ID NO: 200324
  chr6:26156348-26156502
  hyper

SEQ ID NO: 418591 - DNA, 132 bp, Homo sapiens; identical to SEQ ID NO: 200325
  chr6:26171886-26172018
  hyper

SEQ ID NO: 418592 - DNA, 36 bp, Homo sapiens; identical to SEQ ID NO: 200326
  chr6:26172371-26172407
  hyper

SEQ ID NO: 418593 - DNA, 401 bp, Homo sapiens; identical to SEQ ID NO: 231878
  chr6:26172707-26173108
  hyper

SEQ ID NO: 418594 - DNA, 137 bp, Homo sapiens; identical to SEQ ID NO: 283851
  chr6:26183884-26184021
  hyper

SEQ ID NO: 418595 - DNA, 506 bp, Homo sapiens; identical to SEQ ID NO: 231889
  chr6:26223780-26224286
  hyper

SEQ ID NO: 418596 - DNA, 163 bp, Homo sapiens; identical to SEQ ID NO: 231890
  chr6:26224588-26224751
  hyper

SEQ ID NO: 418597 - DNA, 225 bp, Homo sapiens; identical to SEQ ID NO: 231901
  chr6:26286645-26286870
  hyper

SEQ ID NO: 418598 - DNA, 120 bp, Homo sapiens; identical to SEQ ID NO: 231903
  chr6:26322183-26322303
  hyper

SEQ ID NO: 418599 - DNA, 78 bp, Homo sapiens; identical to SEQ ID NO: 200347
  chr6:26322843-26322921
  hyper

SEQ ID NO: 418600 - DNA, 118 bp, Homo sapiens; identical to SEQ ID NO: 200351
  chr6:26383468-26383586
  hyper

SEQ ID NO: 418601 - DNA, 141 bp, Homo sapiens; identical to SEQ ID NO: 200352
  chr6:26458199-26458340
  hyper

SEQ ID NO: 418602 - DNA, 142 bp, Homo sapiens; identical to SEQ ID NO: 231913
  chr6:26521258-26521400
  hyper

SEQ ID NO: 418603 - DNA, 80 bp, Homo sapiens; identical to SEQ ID NO: 200354
  chr6:26521682-26521762
  hyper

SEQ ID NO: 418604 - DNA, 60 bp, Homo sapiens; identical to SEQ ID NO: 397291
  chr6:27099525-27099585
  hyper

SEQ ID NO: 418605 - DNA, 43 bp, Homo sapiens; identical to SEQ ID NO: 200362
  chr6:27100142-27100185
  hyper

SEQ ID NO: 418606 - DNA, 118 bp, Homo sapiens; identical to SEQ ID NO: 231927
  chr6:27101539-27101657
  hyper

SEQ ID NO: 418607 - DNA, 168 bp, Homo sapiens
  chr6:27219427-27219595
  hyper
gctaggggaaagtggggaacccaaggaggacgcaggtcctgggtagggaaagccgaggcccagcctaagtcttggcggacatcgcctcttgcttcccacagtgccgggcggcggtgtccgtcgccttcgctgaagtggagcggcggctgcgctcgggtggggcggctc

SEQ ID NO: 418608 - DNA, 171 bp, Homo sapiens; identical to SEQ ID NO: 200372
  chr6:27219656-27219827
  hyper

SEQ ID NO: 418609 - DNA, 38 bp, Homo sapiens; identical to SEQ ID NO: 283909
  chr6:27248068-27248106
  hyper

SEQ ID NO: 418610 - DNA, 267 bp, Homo sapiens; identical to SEQ ID NO: 283911
  chr6:27264051-27264318
  hyper

SEQ ID NO: 418611 - DNA, 89 bp, Homo sapiens; identical to SEQ ID NO: 283913
  chr6:27342362-27342451
  hyper

SEQ ID NO: 418612 - DNA, 167 bp, Homo sapiens; identical to SEQ ID NO: 283914
  chr6:27343029-27343196
  hyper

SEQ ID NO: 418613 - DNA, 533 bp, Homo sapiens; identical to SEQ ID NO: 283917
  chr6:27440466-27440999
  hyper

SEQ ID NO: 418614 - DNA, 216 bp, Homo sapiens; identical to SEQ ID NO: 200375
  chr6:27447357-27447573
  hyper

SEQ ID NO: 418615 - DNA, 295 bp, Homo sapiens
  chr6:27470527-27470822
  hyper
ttccgggcgccgacgggagctcgctcactgtttactaacgtgaagtttgtattctttgtttggaacgctgatgatgctcatcctcacgcgggagtactctcattccagtgctcttgtccaggtggcacaggaggttggctttttttgcttttttttttttaaccaaactctcgttgtacctgaaagtttgcgttcaactcacaaagcccattttcttgtacctagatagtaattatcctgatttgcattttctcatgtctataccgtgaaaaaaaacgttgtgattctgtgtagt

SEQ ID NO: 418616 - DNA, 134 bp, Homo sapiens; identical to SEQ ID NO: 231952
  chr6:27486949-27487083
  hyper

SEQ ID NO: 418617 - DNA, 31 bp, Homo sapiens; identical to SEQ ID NO: 231958
  chr6:27561177-27561208
  hyper

SEQ ID NO: 418618 - DNA, 79 bp, Homo sapiens; identical to SEQ ID NO: 231967
  chr6:27648346-27648425
  hyper

SEQ ID NO: 418619 - DNA, 103 bp, Homo sapiens; identical to SEQ ID NO: 200381
  chr6:27661581-27661684
  hyper

SEQ ID NO: 418620 - DNA, 113 bp, Homo sapiens; identical to SEQ ID NO: 231972
  chr6:27776275-27776388
  hyper

SEQ ID NO: 418621 - DNA, 124 bp, Homo sapiens; identical to SEQ ID NO: 200387
  chr6:27782099-27782223
  hyper

SEQ ID NO: 418622 - DNA, 438 bp, Homo sapiens; identical to SEQ ID NO: 231976
  chr6:27792190-27792628
  hyper

SEQ ID NO: 418623 - DNA, 267 bp, Homo sapiens; identical to SEQ ID NO: 200391
  chr6:27804768-27805035
  hyper

SEQ ID NO: 418624 - DNA, 271 bp, Homo sapiens; identical to SEQ ID NO: 231980
  chr6:27805258-27805529
  hyper

SEQ ID NO: 418625 - DNA, 40 bp, Homo sapiens; identical to SEQ ID NO: 397303
  chr6:27806471-27806511
  hyper

SEQ ID NO: 418626 - DNA, 240 bp, Homo sapiens; identical to SEQ ID NO: 200394
  chr6:27806811-27807051
  hyper

SEQ ID NO: 418627 - DNA, 79 bp, Homo sapiens; identical to SEQ ID NO: 231984
  chr6:27833430-27833509
  hyper

SEQ ID NO: 418628 - DNA, 71 bp, Homo sapiens; identical to SEQ ID NO: 231989
  chr6:27860879-27860950
  hyper

SEQ ID NO: 418629 - DNA, 65 bp, Homo sapiens; identical to SEQ ID NO: 200398
  chr6:28109924-28109989
  hyper

SEQ ID NO: 418630 - DNA, 34 bp, Homo sapiens; identical to SEQ ID NO: 231992
  chr6:28186864-28186898
  hyper

SEQ ID NO: 418631 - DNA, 93 bp, Homo sapiens; identical to SEQ ID NO: 200399
  chr6:28219718-28219811
  hyper

SEQ ID NO: 418632 - DNA, 191 bp, Homo sapiens; identical to SEQ ID NO: 200400
  chr6:28220077-28220268
  hyper

SEQ ID NO: 418633 - DNA, 176 bp, Homo sapiens; identical to SEQ ID NO: 232002
  chr6:33547966-33548142
  hyper

SEQ ID NO: 418634 - DNA, 43 bp, Homo sapiens; identical to SEQ ID NO: 200410
  chr6:34113557-34113600
  hyper

SEQ ID NO: 418635 - DNA, 41 bp, Homo sapiens; identical to SEQ ID NO: 283969
  chr6:34119317-34119358
  hyper

SEQ ID NO: 418636 - DNA, 344 bp, Homo sapiens; identical to SEQ ID NO: 232007
  chr6:34191991-34192335
  hyper

SEQ ID NO: 418637 - DNA, 249 bp, Homo sapiens; identical to SEQ ID NO: 200412
  chr6:34359487-34359736
  hyper

SEQ ID NO: 418638 - DNA, 76 bp, Homo sapiens; identical to SEQ ID NO: 200413
  chr6:34405060-34405136
  hyper

SEQ ID NO: 418639 - DNA, 39 bp, Homo sapiens; identical to SEQ ID NO: 200414
  chr6:34405256-34405295
  hyper

SEQ ID NO: 418640 - DNA, 59 bp, Homo sapiens; identical to SEQ ID NO: 200415
  chr6:34856883-34856942
  hyper

SEQ ID NO: 418641 - DNA, 307 bp, Homo sapiens; identical to SEQ ID NO: 232012
  chr6:35227367-35227674
  hyper

SEQ ID NO: 418642 - DNA, 1084 bp, Homo sapiens; identical to SEQ ID NO: 232013
  chr6:35435672-35436756
  hyper

SEQ ID NO: 418643 - DNA, 313 bp, Homo sapiens; identical to SEQ ID NO: 232014
  chr6:35464273-35464586
  hyper

SEQ ID NO: 418644 - DNA, 67 bp, Homo sapiens; identical to SEQ ID NO: 283981
  chr6:35744105-35744172
  hyper

SEQ ID NO: 418645 - DNA, 90 bp, Homo sapiens; identical to SEQ ID NO: 200417
  chr6:35995284-35995374
  hyper

SEQ ID NO: 418646 - DNA, 113 bp, Homo sapiens; identical to SEQ ID NO: 232022
  chr6:36354418-36354531
  hyper

SEQ ID NO: 418647 - DNA, 270 bp, Homo sapiens; identical to SEQ ID NO: 283988
  chr6:36391057-36391327
  hyper

SEQ ID NO: 418648 - DNA, 97 bp, Homo sapiens; identical to SEQ ID NO: 200420
  chr6:36410471-36410568
  hyper

SEQ ID NO: 418649 - DNA, 142 bp, Homo sapiens; identical to SEQ ID NO: 232026
  chr6:36563963-36564105
  hyper

SEQ ID NO: 418650 - DNA, 343 bp, Homo sapiens; identical to SEQ ID NO: 232028
  chr6:36646212-36646555
  hyper

SEQ ID NO: 418651 - DNA, 129 bp, Homo sapiens; identical to SEQ ID NO: 232029
  chr6:36703003-36703132
  hyper

SEQ ID NO: 418652 - DNA, 126 bp, Homo sapiens; identical to SEQ ID NO: 283994
  chr6:36954119-36954245
  hyper

SEQ ID NO: 418653 - DNA, 629 bp, Homo sapiens; identical to SEQ ID NO: 283995
  chr6:37138570-37139199
  hyper

SEQ ID NO: 418654 - DNA, 328 bp, Homo sapiens; identical to SEQ ID NO: 283996
  chr6:37139229-37139557
  hyper

SEQ ID NO: 418655 - DNA, 167 bp, Homo sapiens; identical to SEQ ID NO: 232035
  chr6:37225492-37225659
  hyper

SEQ ID NO: 418656 - DNA, 45 bp, Homo sapiens; identical to SEQ ID NO: 232036
  chr6:37226110-37226155
  hyper

SEQ ID NO: 418657 - DNA, 138 bp, Homo sapiens; identical to SEQ ID NO: 232037
  chr6:37483957-37484095
  hyper

SEQ ID NO: 418658 - DNA, 113 bp, Homo sapiens; identical to SEQ ID NO: 232042
  chr6:38607281-38607394
  hyper

SEQ ID NO: 418659 - DNA, 76 bp, Homo sapiens; identical to SEQ ID NO: 232043
  chr6:38670958-38671034
  hyper

SEQ ID NO: 418660 - DNA, 224 bp, Homo sapiens; identical to SEQ ID NO: 232045
  chr6:39082798-39083022
  hyper

SEQ ID NO: 418661 - DNA, 46 bp, Homo sapiens; identical to SEQ ID NO: 200426
  chr6:39271082-39271128
  hyper

SEQ ID NO: 418662 - DNA, 667 bp, Homo sapiens; identical to SEQ ID NO: 284010
  chr6:39692723-39693390
  hyper

SEQ ID NO: 418663 - DNA, 62 bp, Homo sapiens; identical to SEQ ID NO: 284014
  chr6:40555854-40555916
  hyper

SEQ ID NO: 418664 - DNA, 232 bp, Homo sapiens; identical to SEQ ID NO: 284015
  chr6:41039968-41040200
  hyper

SEQ ID NO: 418665 - DNA, 170 bp, Homo sapiens; identical to SEQ ID NO: 200431
  chr6:41040504-41040674
  hyper

SEQ ID NO: 418666 - DNA, 320 bp, Homo sapiens
  chr6:41340387-41340707
  hyper
gctagggtgcattgtctcatctaatcctgacagcaactcaaggagcaaagcactatactatacccatttgagagtcgaggaaactgagtcacaaaggtgacttgaccaaggtcgtggagctaaaaaccgaggaggagaaactgaaacccaaggcgaccaaacaccaaacccaaagagcttaaccgcttcgctgccccggctcaggcaaggtcaaagctaaggtatgataactctggcaggagaaagtctgttttcctacgtggtagaaagtccttgggcccgccacgacccttcccccatcccggccgctggggcaccgg

SEQ ID NO: 418667 - DNA, 90 bp, Homo sapiens; identical to SEQ ID NO: 232059
  chr6:41343716-41343806
  hyper

SEQ ID NO: 418668 - DNA, 68 bp, Homo sapiens; identical to SEQ ID NO: 232062
  chr6:41513949-41514017
  hyper

SEQ ID NO: 418669 - DNA, 112 bp, Homo sapiens; identical to SEQ ID NO: 232064
  chr6:41651428-41651540
  hyper

SEQ ID NO: 418670 - DNA, 35 bp, Homo sapiens; identical to SEQ ID NO: 200435
  chr6:41747771-41747806
  hyper

SEQ ID NO: 418671 - DNA, 123 bp, Homo sapiens; identical to SEQ ID NO: 232066
  chr6:41754978-41755101
  hyper

SEQ ID NO: 418672 - DNA, 256 bp, Homo sapiens; identical to SEQ ID NO: 232067
  chr6:41755385-41755641
  hyper

SEQ ID NO: 418673 - DNA, 170 bp, Homo sapiens; identical to SEQ ID NO: 232068
  chr6:41862277-41862447
  hyper

SEQ ID NO: 418674 - DNA, 156 bp, Homo sapiens; identical to SEQ ID NO: 200437
  chr6:41888908-41889064
  hyper

SEQ ID NO: 418675 - DNA, 50 bp, Homo sapiens; identical to SEQ ID NO: 113330
  chr6:42072647-42072697
  hyper

SEQ ID NO: 418676 - DNA, 176 bp, Homo sapiens; identical to SEQ ID NO: 200438
  chr6:42418934-42419110
  hyper

SEQ ID NO: 418677 - DNA, 105 bp, Homo sapiens; identical to SEQ ID NO: 42964
  chr6:42531901-42532006
  hyper

SEQ ID NO: 418678 - DNA, 49 bp, Homo sapiens; identical to SEQ ID NO: 232077
  chr6:42896709-42896758
  hyper

SEQ ID NO: 418679 - DNA, 321 bp, Homo sapiens; identical to SEQ ID NO: 232080
  chr6:42952280-42952601
  hyper

SEQ ID NO: 418680 - DNA, 273 bp, Homo sapiens; identical to SEQ ID NO: 232081
  chr6:42981636-42981909
  hyper

SEQ ID NO: 418681 - DNA, 35 bp, Homo sapiens; identical to SEQ ID NO: 232082
  chr6:42989814-42989849
  hyper

SEQ ID NO: 418682 - DNA, 303 bp, Homo sapiens; identical to SEQ ID NO: 232083
  chr6:43027111-43027414
  hyper

SEQ ID NO: 418683 - DNA, 125 bp, Homo sapiens; identical to SEQ ID NO: 222857
  chr6:43081636-43081761
  hyper

SEQ ID NO: 418684 - DNA, 168 bp, Homo sapiens; identical to SEQ ID NO: 200442
  chr6:43138368-43138536
  hyper

SEQ ID NO: 418685 - DNA, 572 bp, Homo sapiens; identical to SEQ ID NO: 232085
  chr6:43138813-43139385
  hyper

SEQ ID NO: 418686 - DNA, 173 bp, Homo sapiens; identical to SEQ ID NO: 232086
  chr6:43196993-43197166
  hyper

SEQ ID NO: 418687 - DNA, 35 bp, Homo sapiens; identical to SEQ ID NO: 200443
  chr6:43237210-43237245
  hyper

SEQ ID NO: 418688 - DNA, 121 bp, Homo sapiens; identical to SEQ ID NO: 284052
  chr6:43276399-43276520
  hyper

SEQ ID NO: 418689 - DNA, 67 bp, Homo sapiens; identical to SEQ ID NO: 284053
  chr6:43276612-43276679
  hyper

SEQ ID NO: 418690 - DNA, 75 bp, Homo sapiens; identical to SEQ ID NO: 232092
  chr6:43337694-43337769
  hyper

SEQ ID NO: 418691 - DNA, 56 bp, Homo sapiens; identical to SEQ ID NO: 200447
  chr6:43423048-43423104
  hyper

SEQ ID NO: 418692 - DNA, 92 bp, Homo sapiens; identical to SEQ ID NO: 222858
  chr6:43477369-43477461
  hyper

SEQ ID NO: 418693 - DNA, 38 bp, Homo sapiens; identical to SEQ ID NO: 200448
  chr6:43478199-43478237
  hyper

SEQ ID NO: 418694 - DNA, 252 bp, Homo sapiens; identical to SEQ ID NO: 232095
  chr6:43543534-43543786
  hyper

SEQ ID NO: 418695 - DNA, 98 bp, Homo sapiens; identical to SEQ ID NO: 200449
  chr6:43596713-43596811
  hyper

SEQ ID NO: 418696 - DNA, 126 bp, Homo sapiens; identical to SEQ ID NO: 232096
  chr6:43597011-43597137
  hyper

SEQ ID NO: 418697 - DNA, 141 bp, Homo sapiens; identical to SEQ ID NO: 232097
  chr6:43597646-43597787
  hyper

SEQ ID NO: 418698 - DNA, 133 bp, Homo sapiens; identical to SEQ ID NO: 232098
  chr6:43598079-43598212
  hyper

SEQ ID NO: 418699 - DNA, 152 bp, Homo sapiens; identical to SEQ ID NO: 232099
  chr6:43603409-43603561
  hyper

SEQ ID NO: 418700 - DNA, 270 bp, Homo sapiens; identical to SEQ ID NO: 200451
  chr6:44095871-44096141
  hyper

SEQ ID NO: 418701 - DNA, 42 bp, Homo sapiens; identical to SEQ ID NO: 232105
  chr6:44225458-44225500
  hyper

SEQ ID NO: 418702 - DNA, 261 bp, Homo sapiens; identical to SEQ ID NO: 200454
  chr6:44265267-44265528
  hyper

SEQ ID NO: 418703 - DNA, 34 bp, Homo sapiens; identical to SEQ ID NO: 232107
  chr6:44355180-44355214
  hyper

SEQ ID NO: 418704 - DNA, 127 bp, Homo sapiens; identical to SEQ ID NO: 232108
  chr6:45345432-45345559
  hyper

SEQ ID NO: 418705 - DNA, 43 bp, Homo sapiens; identical to SEQ ID NO: 232110
  chr6:45390376-45390419
  hyper

SEQ ID NO: 418706 - DNA, 538 bp, Homo sapiens; identical to SEQ ID NO: 232115
  chr6:46459377-46459915
  hyper

SEQ ID NO: 418707 - DNA, 87 bp, Homo sapiens; identical to SEQ ID NO: 200463
  chr6:46816765-46816852
  hyper

SEQ ID NO: 418708 - DNA, 996 bp, Homo sapiens; identical to SEQ ID NO: 232117
  chr6:47276365-47277361
  hyper

SEQ ID NO: 418709 - DNA, 78 bp, Homo sapiens; identical to SEQ ID NO: 232119
  chr6:47755947-47756025
  hyper

SEQ ID NO: 418710 - DNA, 188 bp, Homo sapiens; identical to SEQ ID NO: 232124
  chr6:50683584-50683772
  hyper

SEQ ID NO: 418711 - DNA, 85 bp, Homo sapiens; identical to SEQ ID NO: 284095
  chr6:50684820-50684905
  hyper

SEQ ID NO: 418712 - DNA, 88 bp, Homo sapiens; identical to SEQ ID NO: 284096
  chr6:50684969-50685057
  hyper

SEQ ID NO: 418713 - DNA, 195 bp, Homo sapiens; identical to SEQ ID NO: 232129
  chr6:50785153-50785348
  hyper

SEQ ID NO: 418714 - DNA, 105 bp, Homo sapiens; identical to SEQ ID NO: 284103
  chr6:50793882-50793987
  hyper

SEQ ID NO: 418715 - DNA, 33 bp, Homo sapiens; identical to SEQ ID NO: 232134
  chr6:50794270-50794303
  hyper

SEQ ID NO: 418716 - DNA, 124 bp, Homo sapiens; identical to SEQ ID NO: 284111
  chr6:50814599-50814723
  hyper

SEQ ID NO: 418717 - DNA, 61 bp, Homo sapiens; identical to SEQ ID NO: 284113
  chr6:50817757-50817818
  hyper

SEQ ID NO: 418718 - DNA, 273 bp, Homo sapiens; identical to SEQ ID NO: 232147
  chr6:52149493-52149766
  hyper

SEQ ID NO: 418719 - DNA, 318 bp, Homo sapiens
  chr6:52226797-52227115
  hyper
tcctcgcagcggcggcagcggcgcgggctgcagcggagcgcgcgggtctgcgcatcccgcccccgggtcgggaaggggcggagctgggcgtcacccgcccccggcggtctcctcctcccggccgctcccccgagccgagcccgccgcggtcacagccacccgcgggaagctcgtggccgggaccccgaggcgggagcgcgggctgggccgggctgggctacgcgcacgggctcggccgccgcccctgccggtgagtcccgccgcgggaggcgcggaacgggtcgagttgggtattgggaccgcgaggtcggggagccc

SEQ ID NO: 418720 - DNA, 405 bp, Homo sapiens; identical to SEQ ID NO: 232149
  chr6:52284759-52285164
  hyper

SEQ ID NO: 418721 - DNA, 199 bp, Homo sapiens; identical to SEQ ID NO: 284118
  chr6:52441278-52441477
  hyper

SEQ ID NO: 418722 - DNA, 282 bp, Homo sapiens; identical to SEQ ID NO: 232151
  chr6:52535661-52535943
  hyper

SEQ ID NO: 418723 - DNA, 140 bp, Homo sapiens; identical to SEQ ID NO: 222868
  chr6:52859558-52859698
  hyper

SEQ ID NO: 418724 - DNA, 34 bp, Homo sapiens; identical to SEQ ID NO: 232152
  chr6:52926828-52926862
  hyper

SEQ ID NO: 418725 - DNA, 420 bp, Homo sapiens; identical to SEQ ID NO: 232153
  chr6:52929646-52930066
  hyper

SEQ ID NO: 418726 - DNA, 186 bp, Homo sapiens; identical to SEQ ID NO: 232156
  chr6:53224377-53224563
  hyper

SEQ ID NO: 418727 - DNA, 623 bp, Homo sapiens; identical to SEQ ID NO: 284126
  chr6:53408897-53409520
  hyper

SEQ ID NO: 418728 - DNA, 539 bp, Homo sapiens; identical to SEQ ID NO: 43077
  chr6:53409552-53410091
  hyper

SEQ ID NO: 418729 - DNA, 291 bp, Homo sapiens; identical to SEQ ID NO: 200482
  chr6:53659861-53660152
  hyper

SEQ ID NO: 418730 - DNA, 470 bp, Homo sapiens; identical to SEQ ID NO: 284129
  chr6:53660404-53660874
  hyper

SEQ ID NO: 418731 - DNA, 62 bp, Homo sapiens; identical to SEQ ID NO: 113504
  chr6:53660908-53660970
  hyper

SEQ ID NO: 418732 - DNA, 336 bp, Homo sapiens; identical to SEQ ID NO: 113506
  chr6:54711661-54711997
  hyper

SEQ ID NO: 418733 - DNA, 145 bp, Homo sapiens; identical to SEQ ID NO: 284134
  chr6:56820270-56820415
  hyper

SEQ ID NO: 418734 - DNA, 168 bp, Homo sapiens; identical to SEQ ID NO: 200487
  chr6:57086140-57086308
  hyper

SEQ ID NO: 418735 - DNA, 233 bp, Homo sapiens; identical to SEQ ID NO: 232168
  chr6:57087024-57087257
  hyper

SEQ ID NO: 418736 - DNA, 197 bp, Homo sapiens; identical to SEQ ID NO: 284139
  chr6:58149331-58149528
  hyper

SEQ ID NO: 418737 - DNA, 52 bp, Homo sapiens; identical to SEQ ID NO: 200489
  chr6:64283088-64283140
  hyper

SEQ ID NO: 418738 - DNA, 71 bp, Homo sapiens; identical to SEQ ID NO: 232174
  chr6:64345435-64345506
  hyper

SEQ ID NO: 418739 - DNA, 484 bp, Homo sapiens; identical to SEQ ID NO: 232178
  chr6:70506529-70507013
  hyper

SEQ ID NO: 418740 - DNA, 78 bp, Homo sapiens; identical to SEQ ID NO: 232183
  chr6:71377331-71377409
  hyper

SEQ ID NO: 418741 - DNA, 285 bp, Homo sapiens; identical to SEQ ID NO: 232195
  chr6:75911844-75912129
  hyper

SEQ ID NO: 418742 - DNA, 91 bp, Homo sapiens; identical to SEQ ID NO: 284168
  chr6:75914015-75914106
  hyper

SEQ ID NO: 418743 - DNA, 303 bp, Homo sapiens; identical to SEQ ID NO: 284169
  chr6:75914158-75914461
  hyper

SEQ ID NO: 418744 - DNA, 106 bp, Homo sapiens; identical to SEQ ID NO: 200508
  chr6:75914599-75914705
  hyper

SEQ ID NO: 418745 - DNA, 143 bp, Homo sapiens; identical to SEQ ID NO: 200509
  chr6:75914738-75914881
  hyper

SEQ ID NO: 418746 - DNA, 206 bp, Homo sapiens; identical to SEQ ID NO: 200511
  chr6:75916810-75917016
  hyper

SEQ ID NO: 418747 - DNA, 299 bp, Homo sapiens; identical to SEQ ID NO: 232199
  chr6:75994549-75994848
  hyper

SEQ ID NO: 418748 - DNA, 86 bp, Homo sapiens; identical to SEQ ID NO: 200513
  chr6:76458864-76458950
  hyper

SEQ ID NO: 418749 - DNA, 33 bp, Homo sapiens; identical to SEQ ID NO: 232200
  chr6:76459159-76459192
  hyper

SEQ ID NO: 418750 - DNA, 432 bp, Homo sapiens; identical to SEQ ID NO: 200514
  chr6:78173264-78173696
  hyper

SEQ ID NO: 418751 - DNA, 132 bp, Homo sapiens; identical to SEQ ID NO: 200515
  chr6:78174056-78174188
  hyper

SEQ ID NO: 418752 - DNA, 124 bp, Homo sapiens; identical to SEQ ID NO: 200516
  chr6:78175791-78175915
  hyper

SEQ ID NO: 418753 - DNA, 296 bp, Homo sapiens; identical to SEQ ID NO: 200517
  chr6:78176149-78176445
  hyper

SEQ ID NO: 418754 - DNA, 94 bp, Homo sapiens; identical to SEQ ID NO: 232203
  chr6:79577181-79577275
  hyper

SEQ ID NO: 418755 - DNA, 526 bp, Homo sapiens; identical to SEQ ID NO: 232205
  chr6:79788062-79788588
  hyper

SEQ ID NO: 418756 - DNA, 155 bp, Homo sapiens; identical to SEQ ID NO: 284184
  chr6:80246696-80246851
  hyper

SEQ ID NO: 418757 - DNA, 517 bp, Homo sapiens; identical to SEQ ID NO: 113601
  chr6:80246889-80247406
  hyper

SEQ ID NO: 418758 - DNA, 389 bp, Homo sapiens; identical to SEQ ID NO: 200520
  chr6:80340635-80341024
  hyper

SEQ ID NO: 418759 - DNA, 220 bp, Homo sapiens; identical to SEQ ID NO: 200521
  chr6:80341054-80341274
  hyper

SEQ ID NO: 418760 - DNA, 231 bp, Homo sapiens; identical to SEQ ID NO: 200522
  chr6:80341326-80341557
  hyper

SEQ ID NO: 418761 - DNA, 347 bp, Homo sapiens; identical to SEQ ID NO: 232210
  chr6:80714142-80714489
  hyper

SEQ ID NO: 418762 - DNA, 107 bp, Homo sapiens; identical to SEQ ID NO: 232211
  chr6:80816125-80816232
  hyper

SEQ ID NO: 418763 - DNA, 165 bp, Homo sapiens; identical to SEQ ID NO: 232212
  chr6:80816657-80816822
  hyper

SEQ ID NO: 418764 - DNA, 92 bp, Homo sapiens; identical to SEQ ID NO: 284194
  chr6:82461597-82461689
  hyper

SEQ ID NO: 418765 - DNA, 1071 bp, Homo sapiens; identical to SEQ ID NO: 284195
  chr6:82461728-82462799
  hyper

SEQ ID NO: 418766 - DNA, 441 bp, Homo sapiens; identical to SEQ ID NO: 200525
  chr6:82462829-82463270
  hyper

SEQ ID NO: 418767 - DNA, 501 bp, Homo sapiens; identical to SEQ ID NO: 200526
  chr6:82463310-82463811
  hyper

SEQ ID NO: 418768 - DNA, 215 bp, Homo sapiens; identical to SEQ ID NO: 200532
  chr6:83775565-83775780
  hyper

SEQ ID NO: 418769 - DNA, 91 bp, Homo sapiens; identical to SEQ ID NO: 232216
  chr6:83902912-83903003
  hyper

SEQ ID NO: 418770 - DNA, 196 bp, Homo sapiens; identical to SEQ ID NO: 232217
  chr6:83903545-83903741
  hyper

SEQ ID NO: 418771 - DNA, 138 bp, Homo sapiens; identical to SEQ ID NO: 232218
  chr6:84221725-84221863
  hyper

SEQ ID NO: 418772 - DNA, 71 bp, Homo sapiens; identical to SEQ ID NO: 200533
  chr6:84419415-84419486
  hyper

SEQ ID NO: 418773 - DNA, 70 bp, Homo sapiens; identical to SEQ ID NO: 200534
  chr6:84569263-84569333
  hyper

SEQ ID NO: 418774 - DNA, 157 bp, Homo sapiens; identical to SEQ ID NO: 200535
  chr6:84743222-84743379
  hyper

SEQ ID NO: 418775 - DNA, 651 bp, Homo sapiens; identical to SEQ ID NO: 232225
  chr6:84743595-84744246
  hyper

SEQ ID NO: 418776 - DNA, 102 bp, Homo sapiens; identical to SEQ ID NO: 232226
  chr6:84937361-84937463
  hyper

SEQ ID NO: 418777 - DNA, 31 bp, Homo sapiens; identical to SEQ ID NO: 200536
  chr6:85472293-85472324
  hyper

SEQ ID NO: 418778 - DNA, 164 bp, Homo sapiens; identical to SEQ ID NO: 200537
  chr6:85475698-85475862
  hyper

SEQ ID NO: 418779 - DNA, 39 bp, Homo sapiens; identical to SEQ ID NO: 200538
  chr6:85476132-85476171
  hyper

SEQ ID NO: 418780 - DNA, 191 bp, Homo sapiens; identical to SEQ ID NO: 200539
  chr6:85476714-85476905
  hyper

SEQ ID NO: 418781 - DNA, 76 bp, Homo sapiens; identical to SEQ ID NO: 200540
  chr6:85476922-85476998
  hyper

SEQ ID NO: 418782 - DNA, 70 bp, Homo sapiens; identical to SEQ ID NO: 232232
  chr6:85481724-85481794
  hyper

SEQ ID NO: 418783 - DNA, 243 bp, Homo sapiens; identical to SEQ ID NO: 284220
  chr6:85482158-85482401
  hyper

SEQ ID NO: 418784 - DNA, 1516 bp, Homo sapiens; identical to SEQ ID NO: 232236
  chr6:86302912-86304428
  hyper

SEQ ID NO: 418785 - DNA, 103 bp, Homo sapiens; identical to SEQ ID NO: 232237
  chr6:86388826-86388929
  hyper

SEQ ID NO: 418786 - DNA, 145 bp, Homo sapiens; identical to SEQ ID NO: 222892
  chr6:87832386-87832531
  hyper

SEQ ID NO: 418787 - DNA, 40 bp, Homo sapiens; identical to SEQ ID NO: 200549
  chr6:88032035-88032075
  hyper

SEQ ID NO: 418788 - DNA, 251 bp, Homo sapiens; identical to SEQ ID NO: 232241
  chr6:88117490-88117741
  hyper

SEQ ID NO: 418789 - DNA, 168 bp, Homo sapiens; identical to SEQ ID NO: 113664
  chr6:88182441-88182609
  hyper

SEQ ID NO: 418790 - DNA, 329 bp, Homo sapiens; identical to SEQ ID NO: 232243
  chr6:88299609-88299938
  hyper

SEQ ID NO: 418791 - DNA, 36 bp, Homo sapiens; identical to SEQ ID NO: 232244
  chr6:88410992-88411028
  hyper

SEQ ID NO: 418792 - DNA, 332 bp, Homo sapiens; identical to SEQ ID NO: 284237
  chr6:89827121-89827453
  hyper

SEQ ID NO: 418793 - DNA, 244 bp, Homo sapiens; identical to SEQ ID NO: 284238
  chr6:89827501-89827745
  hyper

SEQ ID NO: 418794 - DNA, 142 bp, Homo sapiens; identical to SEQ ID NO: 200550
  chr6:89827793-89827935
  hyper

SEQ ID NO: 418795 - DNA, 337 bp, Homo sapiens; identical to SEQ ID NO: 284241
  chr6:90062614-90062951
  hyper

SEQ ID NO: 418796 - DNA, 97 bp, Homo sapiens; identical to SEQ ID NO: 232255
  chr6:90348368-90348465
  hyper

SEQ ID NO: 418797 - DNA, 149 bp, Homo sapiens; identical to SEQ ID NO: 232256
  chr6:90529581-90529730
  hyper

SEQ ID NO: 418798 - DNA, 245 bp, Homo sapiens; identical to SEQ ID NO: 232257
  chr6:90539225-90539470
  hyper

SEQ ID NO: 418799 - DNA, 191 bp, Homo sapiens; identical to SEQ ID NO: 232259
  chr6:91297176-91297367
  hyper

SEQ ID NO: 418800 - DNA, 368 bp, Homo sapiens; identical to SEQ ID NO: 200559
  chr6:94127997-94128365
  hyper

SEQ ID NO: 418801 - DNA, 31 bp, Homo sapiens; identical to SEQ ID NO: 200560
  chr6:94128399-94128430
  hyper

SEQ ID NO: 418802 - DNA, 260 bp, Homo sapiens; identical to SEQ ID NO: 200561
  chr6:94128907-94129167
  hyper

SEQ ID NO: 418803 - DNA, 31 bp, Homo sapiens; identical to SEQ ID NO: 200562
  chr6:94130101-94130132
  hyper

SEQ ID NO: 418804 - DNA, 79 bp, Homo sapiens; identical to SEQ ID NO: 200563
  chr6:96463090-96463169
  hyper

SEQ ID NO: 418805 - DNA, 222 bp, Homo sapiens; identical to SEQ ID NO: 200564
  chr6:96463860-96464082
  hyper

SEQ ID NO: 418806 - DNA, 253 bp, Homo sapiens; identical to SEQ ID NO: 284260
  chr6:96464204-96464457
  hyper

SEQ ID NO: 418807 - DNA, 149 bp, Homo sapiens; identical to SEQ ID NO: 232265
  chr6:96839753-96839902
  hyper

SEQ ID NO: 418808 - DNA, 118 bp, Homo sapiens; identical to SEQ ID NO: 200566
  chr6:96969409-96969527
  hyper

SEQ ID NO: 418809 - DNA, 113 bp, Homo sapiens; identical to SEQ ID NO: 200567
  chr6:97284791-97284904
  hyper

SEQ ID NO: 418810 - DNA, 126 bp, Homo sapiens; identical to SEQ ID NO: 232268
  chr6:97345804-97345930
  hyper

SEQ ID NO: 418811 - DNA, 143 bp, Homo sapiens; identical to SEQ ID NO: 232269
  chr6:97372842-97372985
  hyper

SEQ ID NO: 418812 - DNA, 151 bp, Homo sapiens; identical to SEQ ID NO: 200568
  chr6:97731282-97731433
  hyper

SEQ ID NO: 418813 - DNA, 241 bp, Homo sapiens; identical to SEQ ID NO: 384148
  chr6:99273607-99273848
  hyper

SEQ ID NO: 418814 - DNA, 126 bp, Homo sapiens; identical to SEQ ID NO: 200572
  chr6:99273901-99274027
  hyper

SEQ ID NO: 418815 - DNA, 67 bp, Homo sapiens; identical to SEQ ID NO: 232274
  chr6:99275314-99275381
  hyper

SEQ ID NO: 418816 - DNA, 211 bp, Homo sapiens; identical to SEQ ID NO: 200573
  chr6:99275630-99275841
  hyper

SEQ ID NO: 418817 - DNA, 50 bp, Homo sapiens; identical to SEQ ID NO: 200574
  chr6:99276008-99276058
  hyper

SEQ ID NO: 418818 - DNA, 252 bp, Homo sapiens; identical to SEQ ID NO: 200578
  chr6:99279098-99279350
  hyper

SEQ ID NO: 418819 - DNA, 354 bp, Homo sapiens; identical to SEQ ID NO: 284278
  chr6:99281492-99281846
  hyper

SEQ ID NO: 418820 - DNA, 478 bp, Homo sapiens; identical to SEQ ID NO: 284279
  chr6:99282053-99282531
  hyper

SEQ ID NO: 418821 - DNA, 206 bp, Homo sapiens; identical to SEQ ID NO: 284280
  chr6:99282572-99282778
  hyper

SEQ ID NO: 418822 - DNA, 38 bp, Homo sapiens; identical to SEQ ID NO: 200580
  chr6:99283080-99283118
  hyper

SEQ ID NO: 418823 - DNA, 161 bp, Homo sapiens; identical to SEQ ID NO: 200581
  chr6:99283178-99283339
  hyper

SEQ ID NO: 418824 - DNA, 82 bp, Homo sapiens; identical to SEQ ID NO: 5009
  chr6:99290709-99290791
  hyper

SEQ ID NO: 418825 - DNA, 569 bp, Homo sapiens; identical to SEQ ID NO: 200585
  chr6:99292688-99293257
  hyper

SEQ ID NO: 418826 - DNA, 345 bp, Homo sapiens; identical to SEQ ID NO: 200586
  chr6:99293287-99293632
  hyper

SEQ ID NO: 418827 - DNA, 183 bp, Homo sapiens; identical to SEQ ID NO: 200587
  chr6:99872772-99872955
  hyper

SEQ ID NO: 418828 - DNA, 66 bp, Homo sapiens; identical to SEQ ID NO: 200588
  chr6:99962859-99962925
  hyper

SEQ ID NO: 418829 - DNA, 219 bp, Homo sapiens; identical to SEQ ID NO: 232287
  chr6:99963448-99963667
  hyper

SEQ ID NO: 418830 - DNA, 247 bp, Homo sapiens; identical to SEQ ID NO: 232288
  chr6:100016525-100016772
  hyper

SEQ ID NO: 418831 - DNA, 229 bp, Homo sapiens; identical to SEQ ID NO: 284296
  chr6:100050525-100050754
  hyper

SEQ ID NO: 418832 - DNA, 102 bp, Homo sapiens; identical to SEQ ID NO: 284297
  chr6:100052347-100052449
  hyper

SEQ ID NO: 418833 - DNA, 167 bp, Homo sapiens; identical to SEQ ID NO: 284298
  chr6:100054672-100054839
  hyper

SEQ ID NO: 418834 - DNA, 227 bp, Homo sapiens; identical to SEQ ID NO: 284299
  chr6:100055831-100056058
  hyper

SEQ ID NO: 418835 - DNA, 400 bp, Homo sapiens; identical to SEQ ID NO: 232299
  chr6:100676760-100677160
  hyper

SEQ ID NO: 418836 - DNA, 67 bp, Homo sapiens; identical to SEQ ID NO: 232301
  chr6:100902142-100902209
  hyper

SEQ ID NO: 418837 - DNA, 157 bp, Homo sapiens; identical to SEQ ID NO: 284302
  chr6:100902484-100902641
  hyper

SEQ ID NO: 418838 - DNA, 47 bp, Homo sapiens; identical to SEQ ID NO: 284303
  chr6:100905736-100905783
  hyper

SEQ ID NO: 418839 - DNA, 268 bp, Homo sapiens; identical to SEQ ID NO: 284304
  chr6:100911729-100911997
  hyper

SEQ ID NO: 418840 - DNA, 125 bp, Homo sapiens; identical to SEQ ID NO: 200593
  chr6:101329394-101329519
  hyper

SEQ ID NO: 418841 - DNA, 226 bp, Homo sapiens; identical to SEQ ID NO: 284307
  chr6:101840315-101840541
  hyper

SEQ ID NO: 418842 - DNA, 192 bp, Homo sapiens; identical to SEQ ID NO: 284308
  chr6:101841974-101842166
  hyper

SEQ ID NO: 418843 - DNA, 90 bp, Homo sapiens; identical to SEQ ID NO: 284309
  chr6:101846692-101846782
  hyper

SEQ ID NO: 418844 - DNA, 273 bp, Homo sapiens; identical to SEQ ID NO: 284310
  chr6:101846865-101847138
  hyper

SEQ ID NO: 418845 - DNA, 239 bp, Homo sapiens; identical to SEQ ID NO: 113793
  chr6:101847638-101847877
  hyper

SEQ ID NO: 418846 - DNA, 233 bp, Homo sapiens; identical to SEQ ID NO: 284312
  chr6:101849705-101849938
  hyper

SEQ ID NO: 418847 - DNA, 200 bp, Homo sapiens; identical to SEQ ID NO: 284313
  chr6:101850275-101850475
  hyper

SEQ ID NO: 418848 - DNA, 56 bp, Homo sapiens; identical to SEQ ID NO: 43308
  chr6:101850938-101850994
  hyper

SEQ ID NO: 418849 - DNA, 59 bp, Homo sapiens; identical to SEQ ID NO: 222906
  chr6:105307082-105307141
  hyper

SEQ ID NO: 418850 - DNA, 100 bp, Homo sapiens; identical to SEQ ID NO: 232315
  chr6:105307822-105307922
  hyper

SEQ ID NO: 418851 - DNA, 62 bp, Homo sapiens; identical to SEQ ID NO: 232316
  chr6:105388540-105388602
  hyper

SEQ ID NO: 418852 - DNA, 203 bp, Homo sapiens; identical to SEQ ID NO: 284319
  chr6:105404674-105404877
  hyper

SEQ ID NO: 418853 - DNA, 66 bp, Homo sapiens; identical to SEQ ID NO: 232332
  chr6:107077423-107077489
  hyper

SEQ ID NO: 418854 - DNA, 74 bp, Homo sapiens; identical to SEQ ID NO: 200608
  chr6:107780253-107780327
  hyper

SEQ ID NO: 418855 - DNA, 112 bp, Homo sapiens; identical to SEQ ID NO: 232336
  chr6:108169775-108169887
  hyper

SEQ ID NO: 418856 - DNA, 58 bp, Homo sapiens; identical to SEQ ID NO: 232337
  chr6:108396125-108396183
  hyper

SEQ ID NO: 418857 - DNA, 93 bp, Homo sapiens; identical to SEQ ID NO: 284338
  chr6:108434832-108434925
  hyper

SEQ ID NO: 418858 - DNA, 104 bp, Homo sapiens; identical to SEQ ID NO: 284339
  chr6:108435263-108435367
  hyper

SEQ ID NO: 418859 - DNA, 349 bp, Homo sapiens; identical to SEQ ID NO: 284341
  chr6:108436829-108437178
  hyper

SEQ ID NO: 418860 - DNA, 179 bp, Homo sapiens; identical to SEQ ID NO: 284342
  chr6:108438577-108438756
  hyper

SEQ ID NO: 418861 - DNA, 39 bp, Homo sapiens; identical to SEQ ID NO: 200613
  chr6:108487482-108487521
  hyper

SEQ ID NO: 418862 - DNA, 216 bp, Homo sapiens; identical to SEQ ID NO: 284348
  chr6:108491987-108492203
  hyper

SEQ ID NO: 418863 - DNA, 83 bp, Homo sapiens; identical to SEQ ID NO: 232350
  chr6:108492638-108492721
  hyper

SEQ ID NO: 418864 - DNA, 106 bp, Homo sapiens; identical to SEQ ID NO: 200615
  chr6:108582547-108582653
  hyper

SEQ ID NO: 418865 - DNA, 35 bp, Homo sapiens; identical to SEQ ID NO: 232354
  chr6:108881856-108881891
  hyper

SEQ ID NO: 418866 - DNA, 183 bp, Homo sapiens; identical to SEQ ID NO: 200616
  chr6:108882164-108882347
  hyper

SEQ ID NO: 418867 - DNA, 59 bp, Homo sapiens; identical to SEQ ID NO: 232356
  chr6:109169455-109169514
  hyper

SEQ ID NO: 418868 - DNA, 34 bp, Homo sapiens; identical to SEQ ID NO: 232358
  chr6:109416223-109416257
  hyper

SEQ ID NO: 418869 - DNA, 241 bp, Homo sapiens; identical to SEQ ID NO: 232359
  chr6:109703795-109704036
  hyper

SEQ ID NO: 418870 - DNA, 53 bp, Homo sapiens; identical to SEQ ID NO: 200618
  chr6:109776898-109776951
  hyper

SEQ ID NO: 418871 - DNA, 429 bp, Homo sapiens; identical to SEQ ID NO: 200619
  chr6:109777177-109777606
  hyper

SEQ ID NO: 418872 - DNA, 320 bp, Homo sapiens; identical to SEQ ID NO: 232362
  chr6:110012081-110012401
  hyper

SEQ ID NO: 418873 - DNA, 60 bp, Homo sapiens; identical to SEQ ID NO: 200621
  chr6:110500677-110500737
  hyper

SEQ ID NO: 418874 - DNA, 95 bp, Homo sapiens; identical to SEQ ID NO: 232364
  chr6:110501273-110501368
  hyper

SEQ ID NO: 418875 - DNA, 125 bp, Homo sapiens; identical to SEQ ID NO: 232365
  chr6:110501596-110501721
  hyper

SEQ ID NO: 418876 - DNA, 126 bp, Homo sapiens; identical to SEQ ID NO: 284366
  chr6:111136354-111136480
  hyper

SEQ ID NO: 418877 - DNA, 40 bp, Homo sapiens; identical to SEQ ID NO: 232368
  chr6:111195962-111196002
  hyper

SEQ ID NO: 418878 - DNA, 48 bp, Homo sapiens; identical to SEQ ID NO: 232370
  chr6:111580350-111580398
  hyper

SEQ ID NO: 418879 - DNA, 211 bp, Homo sapiens; identical to SEQ ID NO: 232371
  chr6:111580690-111580901
  hyper

SEQ ID NO: 418880 - DNA, 89 bp, Homo sapiens; identical to SEQ ID NO: 200624
  chr6:111804030-111804119
  hyper

SEQ ID NO: 418881 - DNA, 40 bp, Homo sapiens; identical to SEQ ID NO: 232373
  chr6:111927298-111927338
  hyper

SEQ ID NO: 418882 - DNA, 100 bp, Homo sapiens; identical to SEQ ID NO: 284376
  chr6:114177462-114177562
  hyper

SEQ ID NO: 418883 - DNA, 112 bp, Homo sapiens; identical to SEQ ID NO: 284377
  chr6:114177615-114177727
  hyper

SEQ ID NO: 418884 - DNA, 31 bp, Homo sapiens; identical to SEQ ID NO: 232377
  chr6:114178491-114178522
  hyper

SEQ ID NO: 418885 - DNA, 52 bp, Homo sapiens; identical to SEQ ID NO: 200626
  chr6:114194490-114194542
  hyper

SEQ ID NO: 418886 - DNA, 39 bp, Homo sapiens; identical to SEQ ID NO: 232379
  chr6:114292435-114292474
  hyper

SEQ ID NO: 418887 - DNA, 199 bp, Homo sapiens; identical to SEQ ID NO: 200627
  chr6:114662113-114662312
  hyper

SEQ ID NO: 418888 - DNA, 404 bp, Homo sapiens; identical to SEQ ID NO: 284382
  chr6:114662599-114663003
  hyper

SEQ ID NO: 418889 - DNA, 121 bp, Homo sapiens; identical to SEQ ID NO: 232383
  chr6:116421722-116421843
  hyper

SEQ ID NO: 418890 - DNA, 57 bp, Homo sapiens; identical to SEQ ID NO: 232384
  chr6:116575297-116575354
  hyper

SEQ ID NO: 418891 - DNA, 203 bp, Homo sapiens; identical to SEQ ID NO: 232386
  chr6:116692734-116692937
  hyper

SEQ ID NO: 418892 - DNA, 53 bp, Homo sapiens; identical to SEQ ID NO: 284387
  chr6:116938062-116938115
  hyper

SEQ ID NO: 418893 - DNA, 114 bp, Homo sapiens; identical to SEQ ID NO: 232388
  chr6:117002085-117002199
  hyper

SEQ ID NO: 418894 - DNA, 40 bp, Homo sapiens; identical to SEQ ID NO: 284389
  chr6:117086156-117086196
  hyper

SEQ ID NO: 418895 - DNA, 44 bp, Homo sapiens; identical to SEQ ID NO: 113942
  chr6:117086902-117086946
  hyper

SEQ ID NO: 418896 - DNA, 351 bp, Homo sapiens; identical to SEQ ID NO: 284391
  chr6:117197786-117198137
  hyper

SEQ ID NO: 418897 - DNA, 205 bp, Homo sapiens; identical to SEQ ID NO: 284392
  chr6:117198339-117198544
  hyper

SEQ ID NO: 418898 - DNA, 184 bp, Homo sapiens; identical to SEQ ID NO: 200630
  chr6:117198574-117198758
  hyper

SEQ ID NO: 418899 - DNA, 126 bp, Homo sapiens; identical to SEQ ID NO: 284394
  chr6:117585720-117585846
  hyper

SEQ ID NO: 418900 - DNA, 166 bp, Homo sapiens; identical to SEQ ID NO: 284395
  chr6:117592207-117592373
  hyper

SEQ ID NO: 418901 - DNA, 821 bp, Homo sapiens; identical to SEQ ID NO: 284396
  chr6:117803613-117804434
  hyper

SEQ ID NO: 418902 - DNA, 298 bp, Homo sapiens; identical to SEQ ID NO: 43413
  chr6:117804487-117804785
  hyper

SEQ ID NO: 418903 - DNA, 85 bp, Homo sapiens; identical to SEQ ID NO: 232397
  chr6:118973007-118973092
  hyper

SEQ ID NO: 418904 - DNA, 857 bp, Homo sapiens; identical to SEQ ID NO: 284401
  chr6:119399619-119400476
  hyper

SEQ ID NO: 418905 - DNA, 246 bp, Homo sapiens; identical to SEQ ID NO: 232400
  chr6:119670868-119671114
  hyper

SEQ ID NO: 418906 - DNA, 575 bp, Homo sapiens; identical to SEQ ID NO: 232401
  chr6:119671587-119672162
  hyper

SEQ ID NO: 418907 - DNA, 40 bp, Homo sapiens; identical to SEQ ID NO: 222921
  chr6:119762016-119762056
  hyper

SEQ ID NO: 418908 - DNA, 214 bp, Homo sapiens; identical to SEQ ID NO: 232402
  chr6:121757804-121758018
  hyper

SEQ ID NO: 418909 - DNA, 69 bp, Homo sapiens; identical to SEQ ID NO: 284406
  chr6:121758306-121758375
  hyper

SEQ ID NO: 418910 - DNA, 151 bp, Homo sapiens; identical to SEQ ID NO: 200636
  chr6:121758994-121759145
  hyper

SEQ ID NO: 418911 - DNA, 155 bp, Homo sapiens; identical to SEQ ID NO: 232405
  chr6:122720534-122720689
  hyper

SEQ ID NO: 418912 - DNA, 143 bp, Homo sapiens; identical to SEQ ID NO: 232406
  chr6:122792745-122792888
  hyper

SEQ ID NO: 418913 - DNA, 182 bp, Homo sapiens; identical to SEQ ID NO: 232407
  chr6:122793171-122793353
  hyper

SEQ ID NO: 418914 - DNA, 105 bp, Homo sapiens; identical to SEQ ID NO: 222922
  chr6:123110275-123110380
  hyper

SEQ ID NO: 418915 - DNA, 420 bp, Homo sapiens; identical to SEQ ID NO: 222923
  chr6:123110438-123110858
  hyper

SEQ ID NO: 418916 - DNA, 376 bp, Homo sapiens; identical to SEQ ID NO: 284416
  chr6:124123917-124124293
  hyper

SEQ ID NO: 418917 - DNA, 278 bp, Homo sapiens; identical to SEQ ID NO: 284418
  chr6:125282855-125283133
  hyper

SEQ ID NO: 418918 - DNA, 54 bp, Homo sapiens; identical to SEQ ID NO: 200642
  chr6:125284305-125284359
  hyper

SEQ ID NO: 418919 - DNA, 78 bp, Homo sapiens; identical to SEQ ID NO: 284420
  chr6:125420731-125420809
  hyper

SEQ ID NO: 418920 - DNA, 517 bp, Homo sapiens; identical to SEQ ID NO: 284421
  chr6:125475030-125475547
  hyper

SEQ ID NO: 418921 - DNA, 134 bp, Homo sapiens; identical to SEQ ID NO: 113988
  chr6:125475739-125475873
  hyper

SEQ ID NO: 418922 - DNA, 279 bp, Homo sapiens; identical to SEQ ID NO: 232416
  chr6:125622712-125622991
  hyper

SEQ ID NO: 418923 - DNA, 33 bp, Homo sapiens; identical to SEQ ID NO: 284424
  chr6:125684496-125684529
  hyper

SEQ ID NO: 418924 - DNA, 98 bp, Homo sapiens; identical to SEQ ID NO: 284425
  chr6:125684697-125684795
  hyper

SEQ ID NO: 418925 - DNA, 155 bp, Homo sapiens; identical to SEQ ID NO: 200643
  chr6:126067852-126068007
  hyper

SEQ ID NO: 418926 - DNA, 177 bp, Homo sapiens; identical to SEQ ID NO: 200644
  chr6:126068252-126068429
  hyper

SEQ ID NO: 418927 - DNA, 275 bp, Homo sapiens; identical to SEQ ID NO: 232421
  chr6:126307441-126307716
  hyper

SEQ ID NO: 418928 - DNA, 262 bp, Homo sapiens; identical to SEQ ID NO: 232422
  chr6:126661122-126661384
  hyper

SEQ ID NO: 418929 - DNA, 51 bp, Homo sapiens; identical to SEQ ID NO: 284434
  chr6:127439527-127439578
  hyper

SEQ ID NO: 418930 - DNA, 53 bp, Homo sapiens; identical to SEQ ID NO: 232427
  chr6:127468330-127468383
  hyper

SEQ ID NO: 418931 - DNA, 209 bp, Homo sapiens; identical to SEQ ID NO: 232428
  chr6:127587640-127587849
  hyper

SEQ ID NO: 418932 - DNA, 723 bp, Homo sapiens; identical to SEQ ID NO: 200645
  chr6:127664172-127664895
  hyper

SEQ ID NO: 418933 - DNA, 77 bp, Homo sapiens; identical to SEQ ID NO: 200648
  chr6:127840693-127840770
  hyper

SEQ ID NO: 418934 - DNA, 217 bp, Homo sapiens; identical to SEQ ID NO: 200649
  chr6:128840108-128840325
  hyper

SEQ ID NO: 418935 - DNA, 148 bp, Homo sapiens; identical to SEQ ID NO: 397470
  chr6:128840373-128840521
  hyper

SEQ ID NO: 418936 - DNA, 55 bp, Homo sapiens; identical to SEQ ID NO: 284447
  chr6:129204234-129204289
  hyper

SEQ ID NO: 418937 - DNA, 56 bp, Homo sapiens; identical to SEQ ID NO: 284449
  chr6:130339514-130339570
  hyper

SEQ ID NO: 418938 - DNA, 390 bp, Homo sapiens; identical to SEQ ID NO: 284450
  chr6:130339684-130340074
  hyper

SEQ ID NO: 418939 - DNA, 55 bp, Homo sapiens; identical to SEQ ID NO: 232437
  chr6:130342006-130342061
  hyper

SEQ ID NO: 418940 - DNA, 55 bp, Homo sapiens; identical to SEQ ID NO: 284453
  chr6:131602722-131602777
  hyper

SEQ ID NO: 418941 - DNA, 389 bp, Homo sapiens; identical to SEQ ID NO: 284454
  chr6:132128670-132129059
  hyper

SEQ ID NO: 418942 - DNA, 196 bp, Homo sapiens; identical to SEQ ID NO: 232440
  chr6:132129409-132129605
  hyper

SEQ ID NO: 418943 - DNA, 209 bp, Homo sapiens; identical to SEQ ID NO: 200655
  chr6:132271777-132271986
  hyper

SEQ ID NO: 418944 - DNA, 93 bp, Homo sapiens; identical to SEQ ID NO: 200656
  chr6:132272531-132272624
  hyper

SEQ ID NO: 418945 - DNA, 194 bp, Homo sapiens; identical to SEQ ID NO: 284458
  chr6:132721835-132722029
  hyper

SEQ ID NO: 418946 - DNA, 262 bp, Homo sapiens; identical to SEQ ID NO: 232444
  chr6:132834326-132834588
  hyper

SEQ ID NO: 418947 - DNA, 193 bp, Homo sapiens; identical to SEQ ID NO: 222933
  chr6:133146628-133146821
  hyper

SEQ ID NO: 418948 - DNA, 58 bp, Homo sapiens; identical to SEQ ID NO: 232447
  chr6:133890489-133890547
  hyper

SEQ ID NO: 418949 - DNA, 159 bp, Homo sapiens; identical to SEQ ID NO: 232448
  chr6:134175362-134175521
  hyper

SEQ ID NO: 418950 - DNA, 178 bp, Homo sapiens; identical to SEQ ID NO: 284463
  chr6:134176054-134176232
  hyper

SEQ ID NO: 418951 - DNA, 139 bp, Homo sapiens; identical to SEQ ID NO: 43490
  chr6:134176376-134176515
  hyper

SEQ ID NO: 418952 - DNA, 697 bp, Homo sapiens; identical to SEQ ID NO: 284465
  chr6:134212421-134213118
  hyper

SEQ ID NO: 418953 - DNA, 142 bp, Homo sapiens; identical to SEQ ID NO: 200657
  chr6:134216762-134216904
  hyper

SEQ ID NO: 418954 - DNA, 369 bp, Homo sapiens; identical to SEQ ID NO: 200658
  chr6:134217001-134217370
  hyper

SEQ ID NO: 418955 - DNA, 77 bp, Homo sapiens; identical to SEQ ID NO: 200659
  chr6:134217461-134217538
  hyper

SEQ ID NO: 418956 - DNA, 149 bp, Homo sapiens; identical to SEQ ID NO: 232454
  chr6:134496207-134496356
  hyper

SEQ ID NO: 418957 - DNA, 166 bp, Homo sapiens; identical to SEQ ID NO: 232457
  chr6:135501660-135501826
  hyper

SEQ ID NO: 418958 - DNA, 445 bp, Homo sapiens; identical to SEQ ID NO: 232458
  chr6:135502364-135502809
  hyper

SEQ ID NO: 418959 - DNA, 44 bp, Homo sapiens; identical to SEQ ID NO: 200662
  chr6:135503608-135503652
  hyper

SEQ ID NO: 418960 - DNA, 214 bp, Homo sapiens; identical to SEQ ID NO: 200663
  chr6:135503875-135504089
  hyper

SEQ ID NO: 418961 - DNA, 56 bp, Homo sapiens; identical to SEQ ID NO: 232460
  chr6:135504369-135504425
  hyper

SEQ ID NO: 418962 - DNA, 111 bp, Homo sapiens; identical to SEQ ID NO: 232461
  chr6:135504753-135504864
  hyper

SEQ ID NO: 418963 - DNA, 69 bp, Homo sapiens; identical to SEQ ID NO: 232462
  chr6:136571551-136571620
  hyper

SEQ ID NO: 418964 - DNA, 210 bp, Homo sapiens; identical to SEQ ID NO: 232463
  chr6:136610843-136611053
  hyper

SEQ ID NO: 418965 - DNA, 112 bp, Homo sapiens; identical to SEQ ID NO: 232464
  chr6:136611539-136611651
  hyper

SEQ ID NO: 418966 - DNA, 563 bp, Homo sapiens; identical to SEQ ID NO: 200664
  chr6:136870742-136871305
  hyper

SEQ ID NO: 418967 - DNA, 551 bp, Homo sapiens; identical to SEQ ID NO: 200665
  chr6:136871695-136872246
  hyper

SEQ ID NO: 418968 - DNA, 194 bp, Homo sapiens; identical to SEQ ID NO: 232467
  chr6:137143483-137143677
  hyper

SEQ ID NO: 418969 - DNA, 44 bp, Homo sapiens; identical to SEQ ID NO: 232471
  chr6:137365286-137365330
  hyper

SEQ ID NO: 418970 - DNA, 193 bp, Homo sapiens; identical to SEQ ID NO: 232480
  chr6:138188397-138188590
  hyper

SEQ ID NO: 418971 - DNA, 227 bp, Homo sapiens; identical to SEQ ID NO: 284494
  chr6:138428363-138428590
  hyper

SEQ ID NO: 418972 - DNA, 444 bp, Homo sapiens; identical to SEQ ID NO: 200673
  chr6:138482425-138482869
  hyper

SEQ ID NO: 418973 - DNA, 822 bp, Homo sapiens; identical to SEQ ID NO: 114116
  chr6:138482902-138483724
  hyper

SEQ ID NO: 418974 - DNA, 357 bp, Homo sapiens; identical to SEQ ID NO: 232485
  chr6:138725857-138726214
  hyper

SEQ ID NO: 418975 - DNA, 324 bp, Homo sapiens; identical to SEQ ID NO: 232486
  chr6:138914348-138914672
  hyper

SEQ ID NO: 418976 - DNA, 483 bp, Homo sapiens; identical to SEQ ID NO: 284501
  chr6:139013361-139013844
  hyper

SEQ ID NO: 418977 - DNA, 205 bp, Homo sapiens; identical to SEQ ID NO: 114124
  chr6:139094532-139094737
  hyper

SEQ ID NO: 418978 - DNA, 81 bp, Homo sapiens; identical to SEQ ID NO: 232490
  chr6:139309544-139309625
  hyper

SEQ ID NO: 418979 - DNA, 236 bp, Homo sapiens; identical to SEQ ID NO: 232491
  chr6:139349617-139349853
  hyper

SEQ ID NO: 418980 - DNA, 294 bp, Homo sapiens; identical to SEQ ID NO: 232492
  chr6:139350905-139351199
  hyper

SEQ ID NO: 418981 - DNA, 407 bp, Homo sapiens; identical to SEQ ID NO: 284507
  chr6:139694964-139695371
  hyper

SEQ ID NO: 418982 - DNA, 447 bp, Homo sapiens; identical to SEQ ID NO: 232496
  chr6:139695584-139696031
  hyper

SEQ ID NO: 418983 - DNA, 264 bp, Homo sapiens; identical to SEQ ID NO: 232498
  chr6:142468183-142468447
  hyper

SEQ ID NO: 418984 - DNA, 54 bp, Homo sapiens; identical to SEQ ID NO: 397499
  chr6:142622529-142622583
  hyper

SEQ ID NO: 418985 - DNA, 198 bp, Homo sapiens; identical to SEQ ID NO: 200681
  chr6:143266117-143266315
  hyper

SEQ ID NO: 418986 - DNA, 173 bp, Homo sapiens; identical to SEQ ID NO: 232503
  chr6:143267435-143267608
  hyper

SEQ ID NO: 418987 - DNA, 35 bp, Homo sapiens; identical to SEQ ID NO: 232504
  chr6:143268449-143268484
  hyper

SEQ ID NO: 418988 - DNA, 458 bp, Homo sapiens; identical to SEQ ID NO: 232506
  chr6:143771538-143771996
  hyper

SEQ ID NO: 418989 - DNA, 713 bp, Homo sapiens; identical to SEQ ID NO: 222946
  chr6:143998943-143999656
  hyper

SEQ ID NO: 418990 - DNA, 314 bp, Homo sapiens; identical to SEQ ID NO: 232507
  chr6:144164206-144164520
  hyper

SEQ ID NO: 418991 - DNA, 358 bp, Homo sapiens; identical to SEQ ID NO: 200685
  chr6:144384552-144384910
  hyper

SEQ ID NO: 418992 - DNA, 46 bp, Homo sapiens; identical to SEQ ID NO: 200686
  chr6:144537939-144537985
  hyper

SEQ ID NO: 418993 - DNA, 155 bp, Homo sapiens; identical to SEQ ID NO: 232509
  chr6:144605317-144605472
  hyper

SEQ ID NO: 418994 - DNA, 96 bp, Homo sapiens; identical to SEQ ID NO: 232510
  chr6:144605682-144605778
  hyper

SEQ ID NO: 418995 - DNA, 487 bp, Homo sapiens; identical to SEQ ID NO: 200687
  chr6:144606893-144607380
  hyper

SEQ ID NO: 418996 - DNA, 304 bp, Homo sapiens; identical to SEQ ID NO: 232513
  chr6:146285325-146285629
  hyper

SEQ ID NO: 418997 - DNA, 471 bp, Homo sapiens; identical to SEQ ID NO: 284529
  chr6:146348676-146349147
  hyper

SEQ ID NO: 418998 - DNA, 63 bp, Homo sapiens; identical to SEQ ID NO: 284530
  chr6:146349296-146349359
  hyper

SEQ ID NO: 418999 - DNA, 36 bp, Homo sapiens
  chr6:146349419-146349455
  hyper
taaagaactcagaggagggaggttgaaagagcaaag

SEQ ID NO: 419000 - DNA, 254 bp, Homo sapiens; identical to SEQ ID NO: 200691
  chr6:146864508-146864762
  hyper

SEQ ID NO: 419001 - DNA, 399 bp, Homo sapiens; identical to SEQ ID NO: 284533
  chr6:146864878-146865277
  hyper

SEQ ID NO: 419002 - DNA, 570 bp, Homo sapiens; identical to SEQ ID NO: 284534
  chr6:147828685-147829255
  hyper

SEQ ID NO: 419003 - DNA, 258 bp, Homo sapiens; identical to SEQ ID NO: 284535
  chr6:147829501-147829759
  hyper

SEQ ID NO: 419004 - DNA, 241 bp, Homo sapiens; identical to SEQ ID NO: 284536
  chr6:147829798-147830039
  hyper

SEQ ID NO: 419005 - DNA, 349 bp, Homo sapiens; identical to SEQ ID NO: 284537
  chr6:147830113-147830462
  hyper

SEQ ID NO: 419006 - DNA, 277 bp, Homo sapiens; identical to SEQ ID NO: 232519
  chr6:149067613-149067890
  hyper

SEQ ID NO: 419007 - DNA, 352 bp, Homo sapiens; identical to SEQ ID NO: 232520
  chr6:149068102-149068454
  hyper

SEQ ID NO: 419008 - DNA, 189 bp, Homo sapiens; identical to SEQ ID NO: 232522
  chr6:149637867-149638056
  hyper

SEQ ID NO: 419009 - DNA, 324 bp, Homo sapiens; identical to SEQ ID NO: 284546
  chr6:149771949-149772273
  hyper

SEQ ID NO: 419010 - DNA, 169 bp, Homo sapiens; identical to SEQ ID NO: 114190
  chr6:149772292-149772461
  hyper

SEQ ID NO: 419011 - DNA, 48 bp, Homo sapiens; identical to SEQ ID NO: 232523
  chr6:149867345-149867393
  hyper

SEQ ID NO: 419012 - DNA, 51 bp, Homo sapiens; identical to SEQ ID NO: 232524
  chr6:149887282-149887333
  hyper

SEQ ID NO: 419013 - DNA, 235 bp, Homo sapiens; identical to SEQ ID NO: 232525
  chr6:149969554-149969789
  hyper

SEQ ID NO: 419014 - DNA, 580 bp, Homo sapiens; identical to SEQ ID NO: 232526
  chr6:150039176-150039756
  hyper

SEQ ID NO: 419015 - DNA, 31 bp, Homo sapiens; identical to SEQ ID NO: 200700
  chr6:150071940-150071971
  hyper

SEQ ID NO: 419016 - DNA, 135 bp, Homo sapiens; identical to SEQ ID NO: 200701
  chr6:150072001-150072136
  hyper

SEQ ID NO: 419017 - DNA, 286 bp, Homo sapiens; identical to SEQ ID NO: 284554
  chr6:150185355-150185641
  hyper

SEQ ID NO: 419018 - DNA, 648 bp, Homo sapiens; identical to SEQ ID NO: 232532
  chr6:150259501-150260149
  hyper

SEQ ID NO: 419019 - DNA, 659 bp, Homo sapiens; identical to SEQ ID NO: 284557
  chr6:150262844-150263503
  hyper

SEQ ID NO: 419020 - DNA, 122 bp, Homo sapiens; identical to SEQ ID NO: 284559
  chr6:150311445-150311567
  hyper

SEQ ID NO: 419021 - DNA, 236 bp, Homo sapiens; identical to SEQ ID NO: 232538
  chr6:150326375-150326611
  hyper

SEQ ID NO: 419022 - DNA, 70 bp, Homo sapiens; identical to SEQ ID NO: 232539
  chr6:150336633-150336703
  hyper

SEQ ID NO: 419023 - DNA, 598 bp, Homo sapiens; identical to SEQ ID NO: 232541
  chr6:150463460-150464058
  hyper

SEQ ID NO: 419024 - DNA, 332 bp, Homo sapiens; identical to SEQ ID NO: 200705
  chr6:150920422-150920754
  hyper

SEQ ID NO: 419025 - DNA, 82 bp, Homo sapiens; identical to SEQ ID NO: 200706
  chr6:150920982-150921064
  hyper

SEQ ID NO: 419026 - DNA, 57 bp, Homo sapiens; identical to SEQ ID NO: 232549
  chr6:153022495-153022552
  hyper

SEQ ID NO: 419027 - DNA, 193 bp, Homo sapiens; identical to SEQ ID NO: 232550
  chr6:153304117-153304310
  hyper

SEQ ID NO: 419028 - DNA, 79 bp, Homo sapiens; identical to SEQ ID NO: 200713
  chr6:153304958-153305037
  hyper

SEQ ID NO: 419029 - DNA, 264 bp, Homo sapiens; identical to SEQ ID NO: 200714
  chr6:153323865-153324129
  hyper

SEQ ID NO: 419030 - DNA, 244 bp, Homo sapiens; identical to SEQ ID NO: 200716
  chr6:154360330-154360574
  hyper

SEQ ID NO: 419031 - DNA, 45 bp, Homo sapiens; identical to SEQ ID NO: 284579
  chr6:154830547-154830592
  hyper

SEQ ID NO: 419032 - DNA, 1435 bp, Homo sapiens; identical to SEQ ID NO: 284580
  chr6:154830765-154832200
  hyper

SEQ ID NO: 419033 - DNA, 412 bp, Homo sapiens; identical to SEQ ID NO: 232558
  chr6:155635391-155635803
  hyper

SEQ ID NO: 419034 - DNA, 341 bp, Homo sapiens; identical to SEQ ID NO: 232559
  chr6:157098324-157098665
  hyper

SEQ ID NO: 419035 - DNA, 40 bp, Homo sapiens; identical to SEQ ID NO: 232561
  chr6:157744526-157744566
  hyper

SEQ ID NO: 419036 - DNA, 84 bp, Homo sapiens; identical to SEQ ID NO: 232562
  chr6:157745202-157745286
  hyper

SEQ ID NO: 419037 - DNA, 37 bp, Homo sapiens; identical to SEQ ID NO: 232563
  chr6:157802482-157802519
  hyper

SEQ ID NO: 419038 - DNA, 59 bp, Homo sapiens; identical to SEQ ID NO: 200718
  chr6:157802884-157802943
  hyper

SEQ ID NO: 419039 - DNA, 168 bp, Homo sapiens; identical to SEQ ID NO: 222962
  chr6:157803299-157803467
  hyper

SEQ ID NO: 419040 - DNA, 571 bp, Homo sapiens; identical to SEQ ID NO: 284588
  chr6:158244130-158244701
  hyper

SEQ ID NO: 419041 - DNA, 155 bp, Homo sapiens; identical to SEQ ID NO: 200721
  chr6:158402898-158403053
  hyper

SEQ ID NO: 419042 - DNA, 362 bp, Homo sapiens; identical to SEQ ID NO: 284591
  chr6:158588748-158589110
  hyper

SEQ ID NO: 419043 - DNA, 325 bp, Homo sapiens; identical to SEQ ID NO: 114279
  chr6:158589138-158589463
  hyper

SEQ ID NO: 419044 - DNA, 75 bp, Homo sapiens; identical to SEQ ID NO: 200723
  chr6:158957207-158957282
  hyper

SEQ ID NO: 419045 - DNA, 391 bp, Homo sapiens
  chr6:158957317-158957708
  hyper
ttttccttcgtgctcccacctccagtgtcttcccttcccagcgctgccaatggcgagggcggcactgagatttttgtcctgggcggcagacgaccttgtgttgcacttcctcccccgccttctgcctctcccggggcggcggcggatgggcgcggaggcggatgggcgcggctccctcccccactcaggcctcttcacggggcggggggccgggtcccccagcccccacccgcgccgtgtccagctcctcgcgtgctcgcggcggagccctgagcgcactgggtccgagtcctgcgcgccccctcaccacctcccccgcacctgctcctcctcctcggtcccgcccagcgcgccagcagcccgatccccagtgctgggagaagagaggggg

SEQ ID NO: 419046 - DNA, 139 bp, Homo sapiens; identical to SEQ ID NO: 284596
  chr6:159290684-159290823
  hyper

SEQ ID NO: 419047 - DNA, 311 bp, Homo sapiens; identical to SEQ ID NO: 284597
  chr6:159290852-159291163
  hyper

SEQ ID NO: 419048 - DNA, 42 bp, Homo sapiens; identical to SEQ ID NO: 232569
  chr6:159421501-159421543
  hyper

SEQ ID NO: 419049 - DNA, 58 bp, Homo sapiens; identical to SEQ ID NO: 232573
  chr6:160112589-160112647
  hyper

SEQ ID NO: 419050 - DNA, 40 bp, Homo sapiens; identical to SEQ ID NO: 232574
  chr6:160182804-160182844
  hyper

SEQ ID NO: 419051 - DNA, 196 bp, Homo sapiens; identical to SEQ ID NO: 232575
  chr6:160209889-160210085
  hyper

SEQ ID NO: 419052 - DNA, 470 bp, Homo sapiens; identical to SEQ ID NO: 284607
  chr6:160389587-160390057
  hyper

SEQ ID NO: 419053 - DNA, 131 bp, Homo sapiens; identical to SEQ ID NO: 284608
  chr6:160402882-160403013
  hyper

SEQ ID NO: 419054 - DNA, 287 bp, Homo sapiens; identical to SEQ ID NO: 284609
  chr6:160769014-160769301
  hyper

SEQ ID NO: 419055 - DNA, 304 bp, Homo sapiens; identical to SEQ ID NO: 200733
  chr6:160769935-160770239
  hyper

SEQ ID NO: 419056 - DNA, 67 bp, Homo sapiens; identical to SEQ ID NO: 200734
  chr6:160770300-160770367
  hyper

SEQ ID NO: 419057 - DNA, 80 bp, Homo sapiens; identical to SEQ ID NO: 200735
  chr6:161413419-161413499
  hyper

SEQ ID NO: 419058 - DNA, 181 bp, Homo sapiens; identical to SEQ ID NO: 284614
  chr6:163148704-163148885
  hyper

SEQ ID NO: 419059 - DNA, 120 bp, Homo sapiens; identical to SEQ ID NO: 232586
  chr6:164377731-164377851
  hyper

SEQ ID NO: 419060 - DNA, 205 bp, Homo sapiens; identical to SEQ ID NO: 200742
  chr6:165722844-165723049
  hyper

SEQ ID NO: 419061 - DNA, 243 bp, Homo sapiens; identical to SEQ ID NO: 284622
  chr6:166075524-166075767
  hyper

SEQ ID NO: 419062 - DNA, 163 bp, Homo sapiens; identical to SEQ ID NO: 232590
  chr6:166188884-166189047
  hyper

SEQ ID NO: 419063 - DNA, 367 bp, Homo sapiens; identical to SEQ ID NO: 284626
  chr6:166218179-166218546
  hyper

SEQ ID NO: 419064 - DNA, 75 bp, Homo sapiens; identical to SEQ ID NO: 284629
  chr6:166400480-166400555
  hyper

SEQ ID NO: 419065 - DNA, 434 bp, Homo sapiens; identical to SEQ ID NO: 284630
  chr6:166401500-166401934
  hyper

SEQ ID NO: 419066 - DNA, 151 bp, Homo sapiens; identical to SEQ ID NO: 5249
  chr6:166402752-166402903
  hyper

SEQ ID NO: 419067 - DNA, 32 bp, Homo sapiens; identical to SEQ ID NO: 284637
  chr6:166721134-166721166
  hyper

SEQ ID NO: 419068 - DNA, 214 bp, Homo sapiens; identical to SEQ ID NO: 284638
  chr6:166721444-166721658
  hyper

SEQ ID NO: 419069 - DNA, 41 bp, Homo sapiens; identical to SEQ ID NO: 284639
  chr6:166722138-166722179
  hyper

SEQ ID NO: 419070 - DNA, 85 bp, Homo sapiens; identical to SEQ ID NO: 232603
  chr6:166755972-166756057
  hyper

SEQ ID NO: 419071 - DNA, 326 bp, Homo sapiens; identical to SEQ ID NO: 232604
  chr6:166797106-166797432
  hyper

SEQ ID NO: 419072 - DNA, 49 bp, Homo sapiens; identical to SEQ ID NO: 284644
  chr6:167276260-167276309
  hyper

SEQ ID NO: 419073 - DNA, 930 bp, Homo sapiens; identical to SEQ ID NO: 284647
  chr6:168226538-168227468
  hyper

SEQ ID NO: 419074 - DNA, 33 bp, Homo sapiens; identical to SEQ ID NO: 200752
  chr6:168227910-168227943
  hyper

SEQ ID NO: 419075 - DNA, 84 bp, Homo sapiens; identical to SEQ ID NO: 200753
  chr6:168228222-168228306
  hyper

SEQ ID NO: 419076 - DNA, 33 bp, Homo sapiens; identical to SEQ ID NO: 200754
  chr6:168228539-168228572
  hyper

SEQ ID NO: 419077 - DNA, 622 bp, Homo sapiens; identical to SEQ ID NO: 284651
  chr6:168720072-168720694
  hyper

SEQ ID NO: 419078 - DNA, 329 bp, Homo sapiens; identical to SEQ ID NO: 284652
  chr6:168842518-168842847
  hyper

SEQ ID NO: 419079 - DNA, 224 bp, Homo sapiens; identical to SEQ ID NO: 200756
  chr6:169613106-169613330
  hyper

SEQ ID NO: 419080 - DNA, 339 bp, Homo sapiens; identical to SEQ ID NO: 232617
  chr6:170151379-170151718
  hyper

SEQ ID NO: 419081 - DNA, 441 bp, Homo sapiens; identical to SEQ ID NO: 232619
  chr6:170599640-170600081
  hyper

SEQ ID NO: 419082 - DNA, 155 bp, Homo sapiens; identical to SEQ ID NO: 232620
  chr6:170604989-170605144
  hyper

SEQ ID NO: 419083 - DNA, 98 bp, Homo sapiens; identical to SEQ ID NO: 284661
  chr6:170605422-170605520
  hyper

SEQ ID NO: 419084 - DNA, 132 bp, Homo sapiens; identical to SEQ ID NO: 284662
  chr6:170605940-170606072
  hyper

SEQ ID NO: 419085 - DNA, 136 bp, Homo sapiens; identical to SEQ ID NO: 232621
  chr6:170615733-170615869
  hyper

SEQ ID NO: 419086 - DNA, 43 bp, Homo sapiens; identical to SEQ ID NO: 200760
  chr6:170862217-170862260
  hyper

SEQ ID NO: 419087 - DNA, 323 bp, Homo sapiens; identical to SEQ ID NO: 232623
  chr6:170863273-170863596
  hyper

SEQ ID NO: 419088 - DNA, 99 bp, Homo sapiens; identical to SEQ ID NO: 232624
  chr6:170893981-170894080
  hyper

SEQ ID NO: 419089 - DNA, 101 bp, Homo sapiens; identical to SEQ ID NO: 232626
  chr7:362170-362271
  hyper

SEQ ID NO: 419090 - DNA, 472 bp, Homo sapiens; identical to SEQ ID NO: 232627
  chr7:372708-373180
  hyper

SEQ ID NO: 419091 - DNA, 213 bp, Homo sapiens; identical to SEQ ID NO: 232628
  chr7:402448-402661
  hyper

SEQ ID NO: 419092 - DNA, 36 bp, Homo sapiens; identical to SEQ ID NO: 222989
  chr7:558727-558763
  hyper

SEQ ID NO: 419093 - DNA, 505 bp, Homo sapiens; identical to SEQ ID NO: 222990
  chr7:558986-559491
  hyper

SEQ ID NO: 419094 - DNA, 212 bp, Homo sapiens; identical to SEQ ID NO: 284684
  chr7:560342-560554
  hyper

SEQ ID NO: 419095 - DNA, 35 bp, Homo sapiens; identical to SEQ ID NO: 200771
  chr7:560650-560685
  hyper

SEQ ID NO: 419096 - DNA, 51 bp, Homo sapiens; identical to SEQ ID NO: 200772
  chr7:560731-560782
  hyper

SEQ ID NO: 419097 - DNA, 42 bp, Homo sapiens; identical to SEQ ID NO: 200774
  chr7:852899-852941
  hyper

SEQ ID NO: 419098 - DNA, 198 bp, Homo sapiens; identical to SEQ ID NO: 114434
  chr7:853018-853216
  hyper

SEQ ID NO: 419099 - DNA, 99 bp, Homo sapiens; identical to SEQ ID NO: 232636
  chr7:915758-915857
  hyper

SEQ ID NO: 419100 - DNA, 473 bp, Homo sapiens; identical to SEQ ID NO: 284694
  chr7:932819-933292
  hyper

SEQ ID NO: 419101 - DNA, 804 bp, Homo sapiens; identical to SEQ ID NO: 284696
  chr7:1007358-1008162
  hyper

SEQ ID NO: 419102 - DNA, 332 bp, Homo sapiens; identical to SEQ ID NO: 284697
  chr7:1069637-1069969
  hyper

SEQ ID NO: 419103 - DNA, 338 bp, Homo sapiens; identical to SEQ ID NO: 284698
  chr7:1083896-1084234
  hyper

SEQ ID NO: 419104 - DNA, 256 bp, Homo sapiens; identical to SEQ ID NO: 284699
  chr7:1105259-1105515
  hyper

SEQ ID NO: 419105 - DNA, 104 bp, Homo sapiens; identical to SEQ ID NO: 284700
  chr7:1263476-1263580
  hyper

SEQ ID NO: 419106 - DNA, 105 bp, Homo sapiens; identical to SEQ ID NO: 284701
  chr7:1264273-1264378
  hyper

SEQ ID NO: 419107 - DNA, 56 bp, Homo sapiens; identical to SEQ ID NO: 232641
  chr7:1265621-1265677
  hyper

SEQ ID NO: 419108 - DNA, 56 bp, Homo sapiens; identical to SEQ ID NO: 232642
  chr7:1268389-1268445
  hyper

SEQ ID NO: 419109 - DNA, 292 bp, Homo sapiens; identical to SEQ ID NO: 200779
  chr7:1269808-1270100
  hyper

SEQ ID NO: 419110 - DNA, 146 bp, Homo sapiens; identical to SEQ ID NO: 200780
  chr7:1272152-1272298
  hyper

SEQ ID NO: 419111 - DNA, 275 bp, Homo sapiens; identical to SEQ ID NO: 284707
  chr7:1275268-1275543
  hyper

SEQ ID NO: 419112 - DNA, 157 bp, Homo sapiens; identical to SEQ ID NO: 284710
  chr7:1278131-1278288
  hyper

SEQ ID NO: 419113 - DNA, 46 bp, Homo sapiens; identical to SEQ ID NO: 284711
  chr7:1279053-1279099
  hyper

SEQ ID NO: 419114 - DNA, 356 bp, Homo sapiens; identical to SEQ ID NO: 284713
  chr7:1282150-1282506
  hyper

SEQ ID NO: 419115 - DNA, 119 bp, Homo sapiens; identical to SEQ ID NO: 200783
  chr7:1283941-1284060
  hyper

SEQ ID NO: 419116 - DNA, 102 bp, Homo sapiens; identical to SEQ ID NO: 284715
  chr7:1286444-1286546
  hyper

SEQ ID NO: 419117 - DNA, 58 bp, Homo sapiens; identical to SEQ ID NO: 284716
  chr7:1286612-1286670
  hyper

SEQ ID NO: 419118 - DNA, 186 bp, Homo sapiens; identical to SEQ ID NO: 232658
  chr7:1546635-1546821
  hyper

SEQ ID NO: 419119 - DNA, 458 bp, Homo sapiens; identical to SEQ ID NO: 200786
  chr7:1571091-1571549
  hyper

SEQ ID NO: 419120 - DNA, 400 bp, Homo sapiens; identical to SEQ ID NO: 232660
  chr7:1572209-1572609
  hyper

SEQ ID NO: 419121 - DNA, 94 bp, Homo sapiens; identical to SEQ ID NO: 232661
  chr7:1609779-1609873
  hyper

SEQ ID NO: 419122 - DNA, 186 bp, Homo sapiens
  chr7:1706753-1706939
  hyper
ggggtgtcggcccccccccgaactttttctcttcccaaactgcacggtggccacccggtcacggccctgggccgtacccgcgcaatctcagcaccattcccgaccgagtcctccgccgcgggctgagcgcgagtccccggggccaggctgcccagggaggagcagggacttcctacaatccgcgcc

SEQ ID NO: 419123 - DNA, 310 bp, Homo sapiens; identical to SEQ ID NO: 284727
  chr7:1707309-1707619
  hyper

SEQ ID NO: 419124 - DNA, 146 bp, Homo sapiens; identical to SEQ ID NO: 284729
  chr7:1710370-1710516
  hyper

SEQ ID NO: 419125 - DNA, 463 bp, Homo sapiens; identical to SEQ ID NO: 284730
  chr7:1785930-1786393
  hyper

SEQ ID NO: 419126 - DNA, 103 bp, Homo sapiens; identical to SEQ ID NO: 284731
  chr7:1786899-1787002
  hyper

SEQ ID NO: 419127 - DNA, 151 bp, Homo sapiens; identical to SEQ ID NO: 284732
  chr7:2018616-2018767
  hyper

SEQ ID NO: 419128 - DNA, 50 bp, Homo sapiens; identical to SEQ ID NO: 232668
  chr7:2027579-2027629
  hyper

SEQ ID NO: 419129 - DNA, 202 bp, Homo sapiens; identical to SEQ ID NO: 200791
  chr7:2195725-2195927
  hyper

SEQ ID NO: 419130 - DNA, 359 bp, Homo sapiens; identical to SEQ ID NO: 232669
  chr7:2443784-2444143
  hyper

SEQ ID NO: 419131 - DNA, 77 bp, Homo sapiens; identical to SEQ ID NO: 223010
  chr7:2555344-2555421
  hyper

SEQ ID NO: 419132 - DNA, 268 bp, Homo sapiens; identical to SEQ ID NO: 232673
  chr7:2561982-2562250
  hyper

SEQ ID NO: 419133 - DNA, 81 bp, Homo sapiens; identical to SEQ ID NO: 232674
  chr7:2595523-2595604
  hyper

SEQ ID NO: 419134 - DNA, 50 bp, Homo sapiens; identical to SEQ ID NO: 200795
  chr7:4770079-4770129
  hyper

SEQ ID NO: 419135 - DNA, 119 bp, Homo sapiens; identical to SEQ ID NO: 284747
  chr7:4770153-4770272
  hyper

SEQ ID NO: 419136 - DNA, 203 bp, Homo sapiens; identical to SEQ ID NO: 200798
  chr7:5085238-5085441
  hyper

SEQ ID NO: 419137 - DNA, 83 bp, Homo sapiens; identical to SEQ ID NO: 232684
  chr7:5125291-5125374
  hyper

SEQ ID NO: 419138 - DNA, 42 bp, Homo sapiens; identical to SEQ ID NO: 232685
  chr7:5229794-5229836
  hyper

SEQ ID NO: 419139 - DNA, 158 bp, Homo sapiens; identical to SEQ ID NO: 232686
  chr7:5230315-5230473
  hyper

SEQ ID NO: 419140 - DNA, 880 bp, Homo sapiens; identical to SEQ ID NO: 200799
  chr7:5459600-5460480
  hyper

SEQ ID NO: 419141 - DNA, 859 bp, Homo sapiens; identical to SEQ ID NO: 284756
  chr7:5460573-5461432
  hyper

SEQ ID NO: 419142 - DNA, 221 bp, Homo sapiens; identical to SEQ ID NO: 200801
  chr7:5462090-5462311
  hyper

SEQ ID NO: 419143 - DNA, 93 bp, Homo sapiens; identical to SEQ ID NO: 232689
  chr7:5463270-5463363
  hyper

SEQ ID NO: 419144 - DNA, 419 bp, Homo sapiens; identical to SEQ ID NO: 200802
  chr7:5464580-5464999
  hyper

SEQ ID NO: 419145 - DNA, 1428 bp, Homo sapiens; identical to SEQ ID NO: 284760
  chr7:5465049-5466477
  hyper

SEQ ID NO: 419146 - DNA, 92 bp, Homo sapiens; identical to SEQ ID NO: 397577
  chr7:5466507-5466599
  hyper

SEQ ID NO: 419147 - DNA, 54 bp, Homo sapiens; identical to SEQ ID NO: 284763
  chr7:5526404-5526458
  hyper

SEQ ID NO: 419148 - DNA, 633 bp, Homo sapiens; identical to SEQ ID NO: 284764
  chr7:5594638-5595271
  hyper

SEQ ID NO: 419149 - DNA, 120 bp, Homo sapiens; identical to SEQ ID NO: 232693
  chr7:5595699-5595819
  hyper

SEQ ID NO: 419150 - DNA, 141 bp, Homo sapiens; identical to SEQ ID NO: 232694
  chr7:5602625-5602766
  hyper

SEQ ID NO: 419151 - DNA, 148 bp, Homo sapiens; identical to SEQ ID NO: 232697
  chr7:6098848-6098996
  hyper

SEQ ID NO: 419152 - DNA, 61 bp, Homo sapiens; identical to SEQ ID NO: 232698
  chr7:6144353-6144414
  hyper

SEQ ID NO: 419153 - DNA, 123 bp, Homo sapiens; identical to SEQ ID NO: 232699
  chr7:6388587-6388710
  hyper

SEQ ID NO: 419154 - DNA, 35 bp, Homo sapiens; identical to SEQ ID NO: 232700
  chr7:6414182-6414217
  hyper

SEQ ID NO: 419155 - DNA, 60 bp, Homo sapiens; identical to SEQ ID NO: 200810
  chr7:6523872-6523932
  hyper

SEQ ID NO: 419156 - DNA, 92 bp, Homo sapiens; identical to SEQ ID NO: 284777
  chr7:6575941-6576033
  hyper

SEQ ID NO: 419157 - DNA, 90 bp, Homo sapiens; identical to SEQ ID NO: 232705
  chr7:6677419-6677509
  hyper

SEQ ID NO: 419158 - DNA, 71 bp, Homo sapiens; identical to SEQ ID NO: 284782
  chr7:6966984-6967055
  hyper

SEQ ID NO: 419159 - DNA, 68 bp, Homo sapiens; identical to SEQ ID NO: 232707
  chr7:7222007-7222075
  hyper

SEQ ID NO: 419160 - DNA, 257 bp, Homo sapiens; identical to SEQ ID NO: 232708
  chr7:7606359-7606616
  hyper

SEQ ID NO: 419161 - DNA, 246 bp, Homo sapiens; identical to SEQ ID NO: 232709
  chr7:8008152-8008398
  hyper

SEQ ID NO: 419162 - DNA, 618 bp, Homo sapiens; identical to SEQ ID NO: 200812
  chr7:8009322-8009940
  hyper

SEQ ID NO: 419163 - DNA, 77 bp, Homo sapiens; identical to SEQ ID NO: 284787
  chr7:8301294-8301371
  hyper

SEQ ID NO: 419164 - DNA, 68 bp, Homo sapiens; identical to SEQ ID NO: 200815
  chr7:8480572-8480640
  hyper

SEQ ID NO: 419165 - DNA, 151 bp, Homo sapiens; identical to SEQ ID NO: 200816
  chr7:8481159-8481310
  hyper

SEQ ID NO: 419166 - DNA, 138 bp, Homo sapiens; identical to SEQ ID NO: 232719
  chr7:10979885-10980023
  hyper

SEQ ID NO: 419167 - DNA, 69 bp, Homo sapiens; identical to SEQ ID NO: 232720
  chr7:10980264-10980333
  hyper

SEQ ID NO: 419168 - DNA, 273 bp, Homo sapiens; identical to SEQ ID NO: 284796
  chr7:11871119-11871392
  hyper

SEQ ID NO: 419169 - DNA, 72 bp, Homo sapiens; identical to SEQ ID NO: 200818
  chr7:11871857-11871929
  hyper

SEQ ID NO: 419170 - DNA, 233 bp, Homo sapiens; identical to SEQ ID NO: 232724
  chr7:12250503-12250736
  hyper

SEQ ID NO: 419171 - DNA, 149 bp, Homo sapiens; identical to SEQ ID NO: 200821
  chr7:12610063-12610212
  hyper

SEQ ID NO: 419172 - DNA, 97 bp, Homo sapiens; identical to SEQ ID NO: 200822
  chr7:12610242-12610339
  hyper

SEQ ID NO: 419173 - DNA, 160 bp, Homo sapiens; identical to SEQ ID NO: 200823
  chr7:12610476-12610636
  hyper

SEQ ID NO: 419174 - DNA, 121 bp, Homo sapiens; identical to SEQ ID NO: 114645
  chr7:12610726-12610847
  hyper

SEQ ID NO: 419175 - DNA, 1160 bp, Homo sapiens; identical to SEQ ID NO: 200824
  chr7:12726287-12727447
  hyper

SEQ ID NO: 419176 - DNA, 52 bp, Homo sapiens; identical to SEQ ID NO: 397598
  chr7:14029441-14029493
  hyper

SEQ ID NO: 419177 - DNA, 330 bp, Homo sapiens; identical to SEQ ID NO: 200827
  chr7:14029555-14029885
  hyper

SEQ ID NO: 419178 - DNA, 929 bp, Homo sapiens; identical to SEQ ID NO: 284810
  chr7:14030269-14031198
  hyper

SEQ ID NO: 419179 - DNA, 58 bp, Homo sapiens; identical to SEQ ID NO: 232731
  chr7:15727422-15727480
  hyper

SEQ ID NO: 419180 - DNA, 499 bp, Homo sapiens; identical to SEQ ID NO: 232733
  chr7:16685459-16685958
  hyper

SEQ ID NO: 419181 - DNA, 1038 bp, Homo sapiens; identical to SEQ ID NO: 200834
  chr7:17338062-17339100
  hyper

SEQ ID NO: 419182 - DNA, 272 bp, Homo sapiens; identical to SEQ ID NO: 200841
  chr7:20370484-20370756
  hyper

SEQ ID NO: 419183 - DNA, 79 bp, Homo sapiens; identical to SEQ ID NO: 397603
  chr7:20826019-20826098
  hyper

SEQ ID NO: 419184 - DNA, 40 bp, Homo sapiens; identical to SEQ ID NO: 284839
  chr7:20828444-20828484
  hyper

SEQ ID NO: 419185 - DNA, 50 bp, Homo sapiens; identical to SEQ ID NO: 200849
  chr7:20833039-20833089
  hyper

SEQ ID NO: 419186 - DNA, 102 bp, Homo sapiens; identical to SEQ ID NO: 200850
  chr7:20833543-20833645
  hyper

SEQ ID NO: 419187 - DNA, 70 bp, Homo sapiens; identical to SEQ ID NO: 200851
  chr7:20837557-20837627
  hyper

SEQ ID NO: 419188 - DNA, 182 bp, Homo sapiens; identical to SEQ ID NO: 43954
  chr7:20837650-20837832
  hyper

SEQ ID NO: 419189 - DNA, 115 bp, Homo sapiens; identical to SEQ ID NO: 200853
  chr7:20838169-20838284
  hyper

SEQ ID NO: 419190 - DNA, 184 bp, Homo sapiens; identical to SEQ ID NO: 284851
  chr7:22143358-22143542
  hyper

SEQ ID NO: 419191 - DNA, 149 bp, Homo sapiens; identical to SEQ ID NO: 232771
  chr7:23636896-23637045
  hyper

SEQ ID NO: 419192 - DNA, 146 bp, Homo sapiens; identical to SEQ ID NO: 200870
  chr7:24323183-24323329
  hyper

SEQ ID NO: 419193 - DNA, 155 bp, Homo sapiens; identical to SEQ ID NO: 200871
  chr7:24323343-24323498
  hyper

SEQ ID NO: 419194 - DNA, 235 bp, Homo sapiens; identical to SEQ ID NO: 200872
  chr7:24323528-24323763
  hyper

SEQ ID NO: 419195 - DNA, 89 bp, Homo sapiens; identical to SEQ ID NO: 200873
  chr7:24323939-24324028
  hyper

SEQ ID NO: 419196 - DNA, 34 bp, Homo sapiens; identical to SEQ ID NO: 200874
  chr7:24324151-24324185
  hyper

SEQ ID NO: 419197 - DNA, 441 bp, Homo sapiens; identical to SEQ ID NO: 284872
  chr7:24324248-24324689
  hyper

SEQ ID NO: 419198 - DNA, 211 bp, Homo sapiens; identical to SEQ ID NO: 284873
  chr7:24324754-24324965
  hyper

SEQ ID NO: 419199 - DNA, 302 bp, Homo sapiens; identical to SEQ ID NO: 232778
  chr7:24612554-24612856
  hyper

SEQ ID NO: 419200 - DNA, 96 bp, Homo sapiens; identical to SEQ ID NO: 232782
  chr7:25165221-25165317
  hyper

SEQ ID NO: 419201 - DNA, 571 bp, Homo sapiens; identical to SEQ ID NO: 200876
  chr7:25219529-25220100
  hyper

SEQ ID NO: 419202 - DNA, 153 bp, Homo sapiens; identical to SEQ ID NO: 232788
  chr7:25897850-25898003
  hyper

SEQ ID NO: 419203 - DNA, 316 bp, Homo sapiens; identical to SEQ ID NO: 284885
  chr7:25900061-25900377
  hyper

SEQ ID NO: 419204 - DNA, 76 bp, Homo sapiens; identical to SEQ ID NO: 114749
  chr7:25900433-25900509
  hyper

SEQ ID NO: 419205 - DNA, 181 bp, Homo sapiens; identical to SEQ ID NO: 232792
  chr7:25935087-25935268
  hyper

SEQ ID NO: 419206 - DNA, 252 bp, Homo sapiens; identical to SEQ ID NO: 232797
  chr7:26240889-26241141
  hyper

SEQ ID NO: 419207 - DNA, 162 bp, Homo sapiens; identical to SEQ ID NO: 232798
  chr7:26331325-26331487
  hyper

SEQ ID NO: 419208 - DNA, 55 bp, Homo sapiens; identical to SEQ ID NO: 232800
  chr7:26904456-26904511
  hyper

SEQ ID NO: 419209 - DNA, 32 bp, Homo sapiens; identical to SEQ ID NO: 114773
  chr7:27146541-27146573
  hyper

SEQ ID NO: 419210 - DNA, 477 bp, Homo sapiens; identical to SEQ ID NO: 284901
  chr7:27191584-27192061
  hyper

SEQ ID NO: 419211 - DNA, 320 bp, Homo sapiens; identical to SEQ ID NO: 284902
  chr7:27192098-27192418
  hyper

SEQ ID NO: 419212 - DNA, 122 bp, Homo sapiens
  chr7:27225296-27225418
  hyper
gtcgctgtgtggcctgtggtctcggagtctgttctcctggagtctcgcatttgcacccccttcttcgcagtccccctcccatagacttgctctgggaagcgcctctgcctccgaccctagcc

SEQ ID NO: 419213 - DNA, 281 bp, Homo sapiens; identical to SEQ ID NO: 200896
  chr7:27227348-27227629
  hyper

SEQ ID NO: 419214 - DNA, 632 bp, Homo sapiens; identical to SEQ ID NO: 284913
  chr7:27228044-27228676
  hyper

SEQ ID NO: 419215 - DNA, 172 bp, Homo sapiens; identical to SEQ ID NO: 284915
  chr7:27237358-27237530
  hyper

SEQ ID NO: 419216 - DNA, 45 bp, Homo sapiens; identical to SEQ ID NO: 200901
  chr7:27241173-27241218
  hyper

SEQ ID NO: 419217 - DNA, 32 bp, Homo sapiens; identical to SEQ ID NO: 284922
  chr7:27274930-27274962
  hyper

SEQ ID NO: 419218 - DNA, 47 bp, Homo sapiens; identical to SEQ ID NO: 200904
  chr7:27275466-27275513
  hyper

SEQ ID NO: 419219 - DNA, 103 bp, Homo sapiens; identical to SEQ ID NO: 200905
  chr7:27275543-27275646
  hyper

SEQ ID NO: 419220 - DNA, 362 bp, Homo sapiens; identical to SEQ ID NO: 397623
  chr7:27279795-27280157
  hyper

SEQ ID NO: 419221 - DNA, 60 bp, Homo sapiens; identical to SEQ ID NO: 284928
  chr7:27284595-27284655
  hyper

SEQ ID NO: 419222 - DNA, 32 bp, Homo sapiens; identical to SEQ ID NO: 200909
  chr7:27288913-27288945
  hyper

SEQ ID NO: 419223 - DNA, 193 bp, Homo sapiens; identical to SEQ ID NO: 223061
  chr7:27701810-27702003
  hyper

SEQ ID NO: 419224 - DNA, 114 bp, Homo sapiens; identical to SEQ ID NO: 232832
  chr7:27702686-27702800
  hyper

SEQ ID NO: 419225 - DNA, 113 bp, Homo sapiens; identical to SEQ ID NO: 232833
  chr7:27779469-27779582
  hyper

SEQ ID NO: 419226 - DNA, 59 bp, Homo sapiens; identical to SEQ ID NO: 200910
  chr7:28725632-28725691
  hyper

SEQ ID NO: 419227 - DNA, 41 bp, Homo sapiens; identical to SEQ ID NO: 397626
  chr7:29602676-29602717
  hyper

SEQ ID NO: 419228 - DNA, 369 bp, Homo sapiens; identical to SEQ ID NO: 200920
  chr7:29724332-29724701
  hyper

SEQ ID NO: 419229 - DNA, 54 bp, Homo sapiens; identical to SEQ ID NO: 200921
  chr7:29725077-29725131
  hyper

SEQ ID NO: 419230 - DNA, 205 bp, Homo sapiens; identical to SEQ ID NO: 200922
  chr7:29845997-29846202
  hyper

SEQ ID NO: 419231 - DNA, 47 bp, Homo sapiens; identical to SEQ ID NO: 200923
  chr7:29846749-29846796
  hyper

SEQ ID NO: 419232 - DNA, 369 bp, Homo sapiens; identical to SEQ ID NO: 200924
  chr7:30028879-30029248
  hyper

SEQ ID NO: 419233 - DNA, 400 bp, Homo sapiens; identical to SEQ ID NO: 284951
  chr7:30029302-30029702
  hyper

SEQ ID NO: 419234 - DNA, 217 bp, Homo sapiens; identical to SEQ ID NO: 232842
  chr7:30065744-30065961
  hyper

SEQ ID NO: 419235 - DNA, 304 bp, Homo sapiens; identical to SEQ ID NO: 232843
  chr7:30066334-30066638
  hyper

SEQ ID NO: 419236 - DNA, 246 bp, Homo sapiens; identical to SEQ ID NO: 200927
  chr7:30067778-30068024
  hyper

SEQ ID NO: 419237 - DNA, 256 bp, Homo sapiens; identical to SEQ ID NO: 200928
  chr7:30517956-30518212
  hyper

SEQ ID NO: 419238 - DNA, 76 bp, Homo sapiens; identical to SEQ ID NO: 284958
  chr7:31232602-31232678
  hyper

SEQ ID NO: 419239 - DNA, 191 bp, Homo sapiens; identical to SEQ ID NO: 200932
  chr7:31232718-31232909
  hyper

SEQ ID NO: 419240 - DNA, 48 bp, Homo sapiens; identical to SEQ ID NO: 200933
  chr7:31232939-31232987
  hyper

SEQ ID NO: 419241 - DNA, 263 bp, Homo sapiens; identical to SEQ ID NO: 200934
  chr7:31375702-31375965
  hyper

SEQ ID NO: 419242 - DNA, 109 bp, Homo sapiens; identical to SEQ ID NO: 200935
  chr7:31376218-31376327
  hyper

SEQ ID NO: 419243 - DNA, 40 bp, Homo sapiens; identical to SEQ ID NO: 232857
  chr7:32468314-32468354
  hyper

SEQ ID NO: 419244 - DNA, 291 bp, Homo sapiens; identical to SEQ ID NO: 232858
  chr7:32767520-32767811
  hyper

SEQ ID NO: 419245 - DNA, 375 bp, Homo sapiens; identical to SEQ ID NO: 284966
  chr7:32768220-32768595
  hyper

SEQ ID NO: 419246 - DNA, 110 bp, Homo sapiens; identical to SEQ ID NO: 232868
  chr7:35288337-35288447
  hyper

SEQ ID NO: 419247 - DNA, 55 bp, Homo sapiens; identical to SEQ ID NO: 284973
  chr7:35298172-35298227
  hyper

SEQ ID NO: 419248 - DNA, 257 bp, Homo sapiens; identical to SEQ ID NO: 232875
  chr7:35734777-35735034
  hyper

SEQ ID NO: 419249 - DNA, 1059 bp, Homo sapiens; identical to SEQ ID NO: 284978
  chr7:36192233-36193292
  hyper

SEQ ID NO: 419250 - DNA, 86 bp, Homo sapiens; identical to SEQ ID NO: 232878
  chr7:36406996-36407082
  hyper

SEQ ID NO: 419251 - DNA, 244 bp, Homo sapiens; identical to SEQ ID NO: 232879
  chr7:36429677-36429921
  hyper

SEQ ID NO: 419252 - DNA, 206 bp, Homo sapiens; identical to SEQ ID NO: 232880
  chr7:37873162-37873368
  hyper

SEQ ID NO: 419253 - DNA, 719 bp, Homo sapiens; identical to SEQ ID NO: 232882
  chr7:38217488-38218207
  hyper

SEQ ID NO: 419254 - DNA, 359 bp, Homo sapiens; identical to SEQ ID NO: 232886
  chr7:39605669-39606028
  hyper

SEQ ID NO: 419255 - DNA, 109 bp, Homo sapiens; identical to SEQ ID NO: 232887
  chr7:40174396-40174505
  hyper

SEQ ID NO: 419256 - DNA, 119 bp, Homo sapiens; identical to SEQ ID NO: 114938
  chr7:40174877-40174996
  hyper

SEQ ID NO: 419257 - DNA, 139 bp, Homo sapiens; identical to SEQ ID NO: 284992
  chr7:41745252-41745391
  hyper

SEQ ID NO: 419258 - DNA, 265 bp, Homo sapiens; identical to SEQ ID NO: 232897
  chr7:42951543-42951808
  hyper

SEQ ID NO: 419259 - DNA, 109 bp, Homo sapiens; identical to SEQ ID NO: 200957
  chr7:43153584-43153693
  hyper

SEQ ID NO: 419260 - DNA, 108 bp, Homo sapiens; identical to SEQ ID NO: 200958
  chr7:43622286-43622394
  hyper

SEQ ID NO: 419261 - DNA, 107 bp, Homo sapiens; identical to SEQ ID NO: 232901
  chr7:43769000-43769107
  hyper

SEQ ID NO: 419262 - DNA, 67 bp, Homo sapiens; identical to SEQ ID NO: 285003
  chr7:43798005-43798072
  hyper

SEQ ID NO: 419263 - DNA, 213 bp, Homo sapiens; identical to SEQ ID NO: 232903
  chr7:43798608-43798821
  hyper

SEQ ID NO: 419264 - DNA, 77 bp, Homo sapiens; identical to SEQ ID NO: 232904
  chr7:43909236-43909313
  hyper

SEQ ID NO: 419265 - DNA, 34 bp, Homo sapiens; identical to SEQ ID NO: 200959
  chr7:44122205-44122239
  hyper

SEQ ID NO: 419266 - DNA, 232 bp, Homo sapiens; identical to SEQ ID NO: 232907
  chr7:44240366-44240598
  hyper

SEQ ID NO: 419267 - DNA, 55 bp, Homo sapiens; identical to SEQ ID NO: 232909
  chr7:44530400-44530455
  hyper

SEQ ID NO: 419268 - DNA, 157 bp, Homo sapiens; identical to SEQ ID NO: 285012
  chr7:44621889-44622046
  hyper

SEQ ID NO: 419269 - DNA, 191 bp, Homo sapiens; identical to SEQ ID NO: 232911
  chr7:44645927-44646118
  hyper

SEQ ID NO: 419270 - DNA, 43 bp, Homo sapiens; identical to SEQ ID NO: 232912
  chr7:44646791-44646834
  hyper

SEQ ID NO: 419271 - DNA, 623 bp, Homo sapiens; identical to SEQ ID NO: 223093
  chr7:45026005-45026628
  hyper

SEQ ID NO: 419272 - DNA, 178 bp, Homo sapiens; identical to SEQ ID NO: 232915
  chr7:45151426-45151604
  hyper

SEQ ID NO: 419273 - DNA, 72 bp, Homo sapiens; identical to SEQ ID NO: 285020
  chr7:45197304-45197376
  hyper

SEQ ID NO: 419274 - DNA, 182 bp, Homo sapiens; identical to SEQ ID NO: 200963
  chr7:45927932-45928114
  hyper

SEQ ID NO: 419275 - DNA, 202 bp, Homo sapiens; identical to SEQ ID NO: 200964
  chr7:45928147-45928349
  hyper

SEQ ID NO: 419276 - DNA, 180 bp, Homo sapiens; identical to SEQ ID NO: 285025
  chr7:45961576-45961756
  hyper

SEQ ID NO: 419277 - DNA, 277 bp, Homo sapiens; identical to SEQ ID NO: 285026
  chr7:45961974-45962251
  hyper

SEQ ID NO: 419278 - DNA, 153 bp, Homo sapiens; identical to SEQ ID NO: 223096
  chr7:47293661-47293814
  hyper

SEQ ID NO: 419279 - DNA, 173 bp, Homo sapiens; identical to SEQ ID NO: 200965
  chr7:47294081-47294254
  hyper

SEQ ID NO: 419280 - DNA, 335 bp, Homo sapiens; identical to SEQ ID NO: 200966
  chr7:47621011-47621346
  hyper

SEQ ID NO: 419281 - DNA, 262 bp, Homo sapiens; identical to SEQ ID NO: 200969
  chr7:48127995-48128257
  hyper

SEQ ID NO: 419282 - DNA, 67 bp, Homo sapiens; identical to SEQ ID NO: 200977
  chr7:54610336-54610403
  hyper

SEQ ID NO: 419283 - DNA, 223 bp, Homo sapiens; identical to SEQ ID NO: 285041
  chr7:54614157-54614380
  hyper

SEQ ID NO: 419284 - DNA, 206 bp, Homo sapiens; identical to SEQ ID NO: 200978
  chr7:54614533-54614739
  hyper

SEQ ID NO: 419285 - DNA, 34 bp, Homo sapiens; identical to SEQ ID NO: 200979
  chr7:54614777-54614811
  hyper

SEQ ID NO: 419286 - DNA, 199 bp, Homo sapiens; identical to SEQ ID NO: 285044
  chr7:54731845-54732044
  hyper

SEQ ID NO: 419287 - DNA, 115 bp, Homo sapiens; identical to SEQ ID NO: 200983
  chr7:55593336-55593451
  hyper

SEQ ID NO: 419288 - DNA, 189 bp, Homo sapiens; identical to SEQ ID NO: 200984
  chr7:55639104-55639293
  hyper

SEQ ID NO: 419289 - DNA, 169 bp, Homo sapiens; identical to SEQ ID NO: 232936
  chr7:56019824-56019993
  hyper

SEQ ID NO: 419290 - DNA, 209 bp, Homo sapiens; identical to SEQ ID NO: 232937
  chr7:56119352-56119561
  hyper

SEQ ID NO: 419291 - DNA, 211 bp, Homo sapiens; identical to SEQ ID NO: 232938
  chr7:56174011-56174222
  hyper

SEQ ID NO: 419292 - DNA, 44 bp, Homo sapiens; identical to SEQ ID NO: 285054
  chr7:56355744-56355788
  hyper

SEQ ID NO: 419293 - DNA, 64 bp, Homo sapiens; identical to SEQ ID NO: 285055
  chr7:57928159-57928223
  hyper

SEQ ID NO: 419294 - DNA, 80 bp, Homo sapiens; identical to SEQ ID NO: 285056
  chr7:57928240-57928320
  hyper

SEQ ID NO: 419295 - DNA, 318 bp, Homo sapiens; identical to SEQ ID NO: 232944
  chr7:63774383-63774701
  hyper

SEQ ID NO: 419296 - DNA, 46 bp, Homo sapiens; identical to SEQ ID NO: 285059
  chr7:64030435-64030481
  hyper

SEQ ID NO: 419297 - DNA, 143 bp, Homo sapiens; identical to SEQ ID NO: 285061
  chr7:64337834-64337977
  hyper

SEQ ID NO: 419298 - DNA, 357 bp, Homo sapiens; identical to SEQ ID NO: 285062
  chr7:64348611-64348968
  hyper

SEQ ID NO: 419299 - DNA, 135 bp, Homo sapiens; identical to SEQ ID NO: 285066
  chr7:64700148-64700283
  hyper

SEQ ID NO: 419300 - DNA, 36 bp, Homo sapiens; identical to SEQ ID NO: 232953
  chr7:64838772-64838808
  hyper

SEQ ID NO: 419301 - DNA, 120 bp, Homo sapiens; identical to SEQ ID NO: 200991
  chr7:64974034-64974154
  hyper

SEQ ID NO: 419302 - DNA, 38 bp, Homo sapiens; identical to SEQ ID NO: 200996
  chr7:65541037-65541075
  hyper

SEQ ID NO: 419303 - DNA, 37 bp, Homo sapiens; identical to SEQ ID NO: 200997
  chr7:65579919-65579956
  hyper

SEQ ID NO: 419304 - DNA, 104 bp, Homo sapiens; identical to SEQ ID NO: 232957
  chr7:66093260-66093364
  hyper

SEQ ID NO: 419305 - DNA, 137 bp, Homo sapiens; identical to SEQ ID NO: 200998
  chr7:66094049-66094186
  hyper

SEQ ID NO: 419306 - DNA, 494 bp, Homo sapiens; identical to SEQ ID NO: 232958
  chr7:66309613-66310107
  hyper

SEQ ID NO: 419307 - DNA, 551 bp, Homo sapiens; identical to SEQ ID NO: 232959
  chr7:66386845-66387396
  hyper

SEQ ID NO: 419308 - DNA, 43 bp, Homo sapiens; identical to SEQ ID NO: 232964
  chr7:70294497-70294540
  hyper

SEQ ID NO: 419309 - DNA, 89 bp, Homo sapiens; identical to SEQ ID NO: 285088
  chr7:70596058-70596147
  hyper

SEQ ID NO: 419310 - DNA, 39 bp, Homo sapiens; identical to SEQ ID NO: 285089
  chr7:70597367-70597406
  hyper

SEQ ID NO: 419311 - DNA, 39 bp, Homo sapiens; identical to SEQ ID NO: 285090
  chr7:70597451-70597490
  hyper

SEQ ID NO: 419312 - DNA, 177 bp, Homo sapiens; identical to SEQ ID NO: 201006
  chr7:70597658-70597835
  hyper

SEQ ID NO: 419313 - DNA, 88 bp, Homo sapiens; identical to SEQ ID NO: 223123
  chr7:71198521-71198609
  hyper

SEQ ID NO: 419314 - DNA, 37 bp, Homo sapiens; identical to SEQ ID NO: 201007
  chr7:71217332-71217369
  hyper

SEQ ID NO: 419315 - DNA, 1003 bp, Homo sapiens; identical to SEQ ID NO: 232972
  chr7:75931592-75932595
  hyper

SEQ ID NO: 419316 - DNA, 343 bp, Homo sapiens; identical to SEQ ID NO: 232973
  chr7:75932655-75932998
  hyper

SEQ ID NO: 419317 - DNA, 421 bp, Homo sapiens; identical to SEQ ID NO: 285099
  chr7:77167456-77167877
  hyper

SEQ ID NO: 419318 - DNA, 178 bp, Homo sapiens; identical to SEQ ID NO: 232978
  chr7:77325999-77326177
  hyper

SEQ ID NO: 419319 - DNA, 102 bp, Homo sapiens; identical to SEQ ID NO: 232979
  chr7:77427837-77427939
  hyper

SEQ ID NO: 419320 - DNA, 148 bp, Homo sapiens; identical to SEQ ID NO: 201011
  chr7:77428716-77428864
  hyper

SEQ ID NO: 419321 - DNA, 36 bp, Homo sapiens; identical to SEQ ID NO: 201012
  chr7:77649269-77649305
  hyper

SEQ ID NO: 419322 - DNA, 235 bp, Homo sapiens; identical to SEQ ID NO: 201013
  chr7:79081510-79081745
  hyper

SEQ ID NO: 419323 - DNA, 415 bp, Homo sapiens; identical to SEQ ID NO: 285116
  chr7:82791563-82791978
  hyper

SEQ ID NO: 419324 - DNA, 297 bp, Homo sapiens; identical to SEQ ID NO: 44343
  chr7:82792128-82792425
  hyper

SEQ ID NO: 419325 - DNA, 102 bp, Homo sapiens; identical to SEQ ID NO: 285120
  chr7:84815039-84815141
  hyper

SEQ ID NO: 419326 - DNA, 266 bp, Homo sapiens; identical to SEQ ID NO: 285121
  chr7:84815451-84815717
  hyper

SEQ ID NO: 419327 - DNA, 41 bp, Homo sapiens; identical to SEQ ID NO: 201024
  chr7:84816488-84816529
  hyper

SEQ ID NO: 419328 - DNA, 164 bp, Homo sapiens; identical to SEQ ID NO: 201025
  chr7:86273044-86273208
  hyper

SEQ ID NO: 419329 - DNA, 155 bp, Homo sapiens; identical to SEQ ID NO: 232995
  chr7:86781443-86781598
  hyper

SEQ ID NO: 419330 - DNA, 60 bp, Homo sapiens; identical to SEQ ID NO: 232996
  chr7:86782566-86782626
  hyper

SEQ ID NO: 419331 - DNA, 148 bp, Homo sapiens; identical to SEQ ID NO: 201026
  chr7:86848939-86849087
  hyper

SEQ ID NO: 419332 - DNA, 109 bp, Homo sapiens; identical to SEQ ID NO: 201027
  chr7:86849527-86849636
  hyper

SEQ ID NO: 419333 - DNA, 277 bp, Homo sapiens; identical to SEQ ID NO: 232998
  chr7:86974660-86974937
  hyper

SEQ ID NO: 419334 - DNA, 31 bp, Homo sapiens; identical to SEQ ID NO: 201028
  chr7:87104710-87104741
  hyper

SEQ ID NO: 419335 - DNA, 67 bp, Homo sapiens; identical to SEQ ID NO: 233002
  chr7:87505447-87505514
  hyper

SEQ ID NO: 419336 - DNA, 203 bp, Homo sapiens; identical to SEQ ID NO: 233005
  chr7:87849003-87849206
  hyper

SEQ ID NO: 419337 - DNA, 481 bp, Homo sapiens; identical to SEQ ID NO: 201030
  chr7:87849420-87849901
  hyper

SEQ ID NO: 419338 - DNA, 195 bp, Homo sapiens; identical to SEQ ID NO: 201033
  chr7:88387787-88387982
  hyper

SEQ ID NO: 419339 - DNA, 36 bp, Homo sapiens; identical to SEQ ID NO: 201034
  chr7:88388246-88388282
  hyper

SEQ ID NO: 419340 - DNA, 48 bp, Homo sapiens; identical to SEQ ID NO: 285142
  chr7:88389356-88389404
  hyper

SEQ ID NO: 419341 - DNA, 53 bp, Homo sapiens; identical to SEQ ID NO: 285143
  chr7:89747943-89747996
  hyper

SEQ ID NO: 419342 - DNA, 110 bp, Homo sapiens; identical to SEQ ID NO: 285144
  chr7:89748563-89748673
  hyper

SEQ ID NO: 419343 - DNA, 207 bp, Homo sapiens; identical to SEQ ID NO: 285145
  chr7:89748718-89748925
  hyper

SEQ ID NO: 419344 - DNA, 126 bp, Homo sapiens; identical to SEQ ID NO: 201035
  chr7:89783802-89783928
  hyper

SEQ ID NO: 419345 - DNA, 1025 bp, Homo sapiens; identical to SEQ ID NO: 233012
  chr7:89874391-89875416
  hyper

SEQ ID NO: 419346 - DNA, 146 bp, Homo sapiens; identical to SEQ ID NO: 233014
  chr7:90032703-90032849
  hyper

SEQ ID NO: 419347 - DNA, 194 bp, Homo sapiens; identical to SEQ ID NO: 201041
  chr7:90893324-90893518
  hyper

SEQ ID NO: 419348 - DNA, 377 bp, Homo sapiens; identical to SEQ ID NO: 285155
  chr7:90894561-90894938
  hyper

SEQ ID NO: 419349 - DNA, 311 bp, Homo sapiens; identical to SEQ ID NO: 233018
  chr7:91569809-91570120
  hyper

SEQ ID NO: 419350 - DNA, 381 bp, Homo sapiens; identical to SEQ ID NO: 233019
  chr7:91763723-91764104
  hyper

SEQ ID NO: 419351 - DNA, 49 bp, Homo sapiens; identical to SEQ ID NO: 233020
  chr7:91875200-91875249
  hyper

SEQ ID NO: 419352 - DNA, 143 bp, Homo sapiens; identical to SEQ ID NO: 201043
  chr7:92219764-92219907
  hyper

SEQ ID NO: 419353 - DNA, 1229 bp, Homo sapiens; identical to SEQ ID NO: 44386
  chr7:92462187-92463416
  hyper

SEQ ID NO: 419354 - DNA, 247 bp, Homo sapiens; identical to SEQ ID NO: 201045
  chr7:92463701-92463948
  hyper

SEQ ID NO: 419355 - DNA, 262 bp, Homo sapiens; identical to SEQ ID NO: 285162
  chr7:92464877-92465139
  hyper

SEQ ID NO: 419356 - DNA, 47 bp, Homo sapiens; identical to SEQ ID NO: 201046
  chr7:92466481-92466528
  hyper

SEQ ID NO: 419357 - DNA, 421 bp, Homo sapiens; identical to SEQ ID NO: 233022
  chr7:92861272-92861693
  hyper

SEQ ID NO: 419358 - DNA, 46 bp, Homo sapiens; identical to SEQ ID NO: 384190
  chr7:93203796-93203842
  hyper

SEQ ID NO: 419359 - DNA, 133 bp, Homo sapiens; identical to SEQ ID NO: 201049
  chr7:93633682-93633815
  hyper

SEQ ID NO: 419360 - DNA, 437 bp, Homo sapiens; identical to SEQ ID NO: 201052
  chr7:95064141-95064578
  hyper

SEQ ID NO: 419361 - DNA, 211 bp, Homo sapiens; identical to SEQ ID NO: 285174
  chr7:95401814-95402025
  hyper

SEQ ID NO: 419362 - DNA, 767 bp, Homo sapiens; identical to SEQ ID NO: 201053
  chr7:95704890-95705657
  hyper

SEQ ID NO: 419363 - DNA, 39 bp, Homo sapiens; identical to SEQ ID NO: 285176
  chr7:96622655-96622694
  hyper

SEQ ID NO: 419364 - DNA, 202 bp, Homo sapiens; identical to SEQ ID NO: 285177
  chr7:96626212-96626414
  hyper

SEQ ID NO: 419365 - DNA, 607 bp, Homo sapiens; identical to SEQ ID NO: 285178
  chr7:96627434-96628041
  hyper

SEQ ID NO: 419366 - DNA, 149 bp, Homo sapiens; identical to SEQ ID NO: 285179
  chr7:96628077-96628226
  hyper

SEQ ID NO: 419367 - DNA, 117 bp, Homo sapiens; identical to SEQ ID NO: 285184
  chr7:96639201-96639318
  hyper

SEQ ID NO: 419368 - DNA, 150 bp, Homo sapiens; identical to SEQ ID NO: 285185
  chr7:96639348-96639498
  hyper

SEQ ID NO: 419369 - DNA, 55 bp, Homo sapiens; identical to SEQ ID NO: 285186
  chr7:96642693-96642748
  hyper

SEQ ID NO: 419370 - DNA, 203 bp, Homo sapiens; identical to SEQ ID NO: 285187
  chr7:96647337-96647540
  hyper

SEQ ID NO: 419371 - DNA, 147 bp, Homo sapiens; identical to SEQ ID NO: 285188
  chr7:96652430-96652577
  hyper

SEQ ID NO: 419372 - DNA, 31 bp, Homo sapiens; identical to SEQ ID NO: 201056
  chr7:96654166-96654197
  hyper

SEQ ID NO: 419373 - DNA, 365 bp, Homo sapiens; identical to SEQ ID NO: 285191
  chr7:96746747-96747112
  hyper

SEQ ID NO: 419374 - DNA, 417 bp, Homo sapiens; identical to SEQ ID NO: 285192
  chr7:96747151-96747568
  hyper

SEQ ID NO: 419375 - DNA, 188 bp, Homo sapiens; identical to SEQ ID NO: 201057
  chr7:97361999-97362187
  hyper

SEQ ID NO: 419376 - DNA, 674 bp, Homo sapiens; identical to SEQ ID NO: 223150
  chr7:97501249-97501923
  hyper

SEQ ID NO: 419377 - DNA, 41 bp, Homo sapiens; identical to SEQ ID NO: 233059
  chr7:97736112-97736153
  hyper

SEQ ID NO: 419378 - DNA, 51 bp, Homo sapiens; identical to SEQ ID NO: 233060
  chr7:98030099-98030150
  hyper

SEQ ID NO: 419379 - DNA, 145 bp, Homo sapiens; identical to SEQ ID NO: 233063
  chr7:98923236-98923381
  hyper

SEQ ID NO: 419380 - DNA, 231 bp, Homo sapiens; identical to SEQ ID NO: 233064
  chr7:99006252-99006483
  hyper

SEQ ID NO: 419381 - DNA, 457 bp, Homo sapiens; identical to SEQ ID NO: 233065
  chr7:99036314-99036771
  hyper

SEQ ID NO: 419382 - DNA, 127 bp, Homo sapiens; identical to SEQ ID NO: 115320
  chr7:99097908-99098035
  hyper

SEQ ID NO: 419383 - DNA, 119 bp, Homo sapiens; identical to SEQ ID NO: 233067
  chr7:99102377-99102496
  hyper

SEQ ID NO: 419384 - DNA, 489 bp, Homo sapiens; identical to SEQ ID NO: 285205
  chr7:99149422-99149911
  hyper

SEQ ID NO: 419385 - DNA, 126 bp, Homo sapiens; identical to SEQ ID NO: 285209
  chr7:99613133-99613259
  hyper

SEQ ID NO: 419386 - DNA, 140 bp, Homo sapiens; identical to SEQ ID NO: 201066
  chr7:99679773-99679913
  hyper

SEQ ID NO: 419387 - DNA, 334 bp, Homo sapiens; identical to SEQ ID NO: 285212
  chr7:99698203-99698537
  hyper

SEQ ID NO: 419388 - DNA, 226 bp, Homo sapiens; identical to SEQ ID NO: 233075
  chr7:99699434-99699660
  hyper

SEQ ID NO: 419389 - DNA, 52 bp, Homo sapiens; identical to SEQ ID NO: 233076
  chr7:99717143-99717195
  hyper

SEQ ID NO: 419390 - DNA, 169 bp, Homo sapiens; identical to SEQ ID NO: 285215
  chr7:99725637-99725806
  hyper

SEQ ID NO: 419391 - DNA, 122 bp, Homo sapiens; identical to SEQ ID NO: 201068
  chr7:100027394-100027516
  hyper

SEQ ID NO: 419392 - DNA, 237 bp, Homo sapiens; identical to SEQ ID NO: 233084
  chr7:100271101-100271338
  hyper

SEQ ID NO: 419393 - DNA, 141 bp, Homo sapiens; identical to SEQ ID NO: 201074
  chr7:100303156-100303297
  hyper

SEQ ID NO: 419394 - DNA, 1470 bp, Homo sapiens; identical to SEQ ID NO: 285228
  chr7:100424341-100425811
  hyper

SEQ ID NO: 419395 - DNA, 133 bp, Homo sapiens; identical to SEQ ID NO: 285229
  chr7:100546904-100547037
  hyper

SEQ ID NO: 419396 - DNA, 83 bp, Homo sapiens; identical to SEQ ID NO: 285230
  chr7:100547073-100547156
  hyper

SEQ ID NO: 419397 - DNA, 152 bp, Homo sapiens; identical to SEQ ID NO: 201076
  chr7:100608956-100609108
  hyper

SEQ ID NO: 419398 - DNA, 137 bp, Homo sapiens; identical to SEQ ID NO: 285232
  chr7:100609361-100609498
  hyper

SEQ ID NO: 419399 - DNA, 233 bp, Homo sapiens; identical to SEQ ID NO: 233093
  chr7:100728513-100728746
  hyper

SEQ ID NO: 419400 - DNA, 191 bp, Homo sapiens; identical to SEQ ID NO: 201078
  chr7:100770300-100770491
  hyper

SEQ ID NO: 419401 - DNA, 37 bp, Homo sapiens; identical to SEQ ID NO: 233095
  chr7:100797581-100797618
  hyper

SEQ ID NO: 419402 - DNA, 272 bp, Homo sapiens; identical to SEQ ID NO: 397719
  chr7:100806065-100806337
  hyper

SEQ ID NO: 419403 - DNA, 101 bp, Homo sapiens; identical to SEQ ID NO: 201080
  chr7:100808059-100808160
  hyper

SEQ ID NO: 419404 - DNA, 562 bp, Homo sapiens; identical to SEQ ID NO: 285240
  chr7:100808502-100809064
  hyper

SEQ ID NO: 419405 - DNA, 41 bp, Homo sapiens; identical to SEQ ID NO: 233099
  chr7:100809971-100810012
  hyper

SEQ ID NO: 419406 - DNA, 40 bp, Homo sapiens; identical to SEQ ID NO: 233103
  chr7:100861069-100861109
  hyper

SEQ ID NO: 419407 - DNA, 287 bp, Homo sapiens; identical to SEQ ID NO: 285249
  chr7:100951542-100951829
  hyper

SEQ ID NO: 419408 - DNA, 83 bp, Homo sapiens; identical to SEQ ID NO: 233106
  chr7:101268843-101268926
  hyper

SEQ ID NO: 419409 - DNA, 198 bp, Homo sapiens; identical to SEQ ID NO: 201085
  chr7:101447357-101447555
  hyper

SEQ ID NO: 419410 - DNA, 336 bp, Homo sapiens; identical to SEQ ID NO: 201086
  chr7:101457433-101457769
  hyper

SEQ ID NO: 419411 - DNA, 467 bp, Homo sapiens; identical to SEQ ID NO: 201087
  chr7:101458246-101458713
  hyper

SEQ ID NO: 419412 - DNA, 190 bp, Homo sapiens; identical to SEQ ID NO: 201088
  chr7:101459183-101459373
  hyper

SEQ ID NO: 419413 - DNA, 166 bp, Homo sapiens; identical to SEQ ID NO: 201090
  chr7:101499970-101500136
  hyper

SEQ ID NO: 419414 - DNA, 88 bp, Homo sapiens; identical to SEQ ID NO: 233111
  chr7:101500354-101500442
  hyper

SEQ ID NO: 419415 - DNA, 111 bp, Homo sapiens; identical to SEQ ID NO: 201091
  chr7:101559394-101559505
  hyper

SEQ ID NO: 419416 - DNA, 48 bp, Homo sapiens; identical to SEQ ID NO: 201092
  chr7:101671377-101671425
  hyper

SEQ ID NO: 419417 - DNA, 79 bp, Homo sapiens; identical to SEQ ID NO: 201093
  chr7:101713618-101713697
  hyper

SEQ ID NO: 419418 - DNA, 138 bp, Homo sapiens; identical to SEQ ID NO: 201094
  chr7:101740643-101740781
  hyper

SEQ ID NO: 419419 - DNA, 124 bp, Homo sapiens; identical to SEQ ID NO: 201095
  chr7:101747615-101747739
  hyper

SEQ ID NO: 419420 - DNA, 77 bp, Homo sapiens; identical to SEQ ID NO: 201096
  chr7:101754977-101755054
  hyper

SEQ ID NO: 419421 - DNA, 67 bp, Homo sapiens; identical to SEQ ID NO: 201097
  chr7:101758486-101758553
  hyper

SEQ ID NO: 419422 - DNA, 49 bp, Homo sapiens; identical to SEQ ID NO: 201098
  chr7:101801839-101801888
  hyper

SEQ ID NO: 419423 - DNA, 105 bp, Homo sapiens; identical to SEQ ID NO: 201099
  chr7:101813725-101813830
  hyper

SEQ ID NO: 419424 - DNA, 189 bp, Homo sapiens; identical to SEQ ID NO: 201100
  chr7:101821748-101821937
  hyper

SEQ ID NO: 419425 - DNA, 59 bp, Homo sapiens; identical to SEQ ID NO: 201101
  chr7:101833092-101833151
  hyper

SEQ ID NO: 419426 - DNA, 49 bp, Homo sapiens; identical to SEQ ID NO: 201102
  chr7:101837121-101837170
  hyper

SEQ ID NO: 419427 - DNA, 97 bp, Homo sapiens; identical to SEQ ID NO: 201103
  chr7:101838786-101838883
  hyper

SEQ ID NO: 419428 - DNA, 672 bp, Homo sapiens; identical to SEQ ID NO: 201104
  chr7:101839913-101840585
  hyper

SEQ ID NO: 419429 - DNA, 66 bp, Homo sapiens; identical to SEQ ID NO: 201105
  chr7:101842081-101842147
  hyper

SEQ ID NO: 419430 - DNA, 102 bp, Homo sapiens; identical to SEQ ID NO: 201106
  chr7:101843350-101843452
  hyper

SEQ ID NO: 419431 - DNA, 845 bp, Homo sapiens; identical to SEQ ID NO: 201107
  chr7:101844639-101845484
  hyper

SEQ ID NO: 419432 - DNA, 166 bp, Homo sapiens; identical to SEQ ID NO: 201108
  chr7:101847670-101847836
  hyper

SEQ ID NO: 419433 - DNA, 57 bp, Homo sapiens; identical to SEQ ID NO: 201109
  chr7:101848393-101848450
  hyper

SEQ ID NO: 419434 - DNA, 303 bp, Homo sapiens; identical to SEQ ID NO: 201110
  chr7:101870646-101870949
  hyper

SEQ ID NO: 419435 - DNA, 189 bp, Homo sapiens; identical to SEQ ID NO: 201111
  chr7:101877331-101877520
  hyper

SEQ ID NO: 419436 - DNA, 265 bp, Homo sapiens; identical to SEQ ID NO: 201112
  chr7:101882599-101882864
  hyper

SEQ ID NO: 419437 - DNA, 9822 bp, Homo sapiens; identical to SEQ ID NO: 201113
  chr7:101891691-101901513
  hyper

SEQ ID NO: 419438 - DNA, 128 bp, Homo sapiens; identical to SEQ ID NO: 201114
  chr7:101916636-101916764
  hyper

SEQ ID NO: 419439 - DNA, 67 bp, Homo sapiens; identical to SEQ ID NO: 201115
  chr7:101917514-101917581
  hyper

SEQ ID NO: 419440 - DNA, 113 bp, Homo sapiens; identical to SEQ ID NO: 201116
  chr7:101918517-101918630
  hyper

SEQ ID NO: 419441 - DNA, 117 bp, Homo sapiens; identical to SEQ ID NO: 201117
  chr7:101921219-101921336
  hyper

SEQ ID NO: 419442 - DNA, 84 bp, Homo sapiens; identical to SEQ ID NO: 201118
  chr7:101923328-101923412
  hyper

SEQ ID NO: 419443 - DNA, 57 bp, Homo sapiens; identical to SEQ ID NO: 201119
  chr7:101924095-101924152
  hyper

SEQ ID NO: 419444 - DNA, 81 bp, Homo sapiens; identical to SEQ ID NO: 201120
  chr7:101925131-101925212
  hyper

SEQ ID NO: 419445 - DNA, 65 bp, Homo sapiens; identical to SEQ ID NO: 201121
  chr7:101926003-101926068
  hyper

SEQ ID NO: 419446 - DNA, 938 bp, Homo sapiens; identical to SEQ ID NO: 201122
  chr7:101926312-101927250
  hyper

SEQ ID NO: 419447 - DNA, 346 bp, Homo sapiens; identical to SEQ ID NO: 233112
  chr7:102104793-102105139
  hyper

SEQ ID NO: 419448 - DNA, 230 bp, Homo sapiens; identical to SEQ ID NO: 233113
  chr7:102389177-102389407
  hyper

SEQ ID NO: 419449 - DNA, 142 bp, Homo sapiens; identical to SEQ ID NO: 233114
  chr7:102789382-102789524
  hyper

SEQ ID NO: 419450 - DNA, 544 bp, Homo sapiens; identical to SEQ ID NO: 285294
  chr7:102920838-102921382
  hyper

SEQ ID NO: 419451 - DNA, 52 bp, Homo sapiens; identical to SEQ ID NO: 285295
  chr7:102937735-102937787
  hyper

SEQ ID NO: 419452 - DNA, 87 bp, Homo sapiens; identical to SEQ ID NO: 233116
  chr7:102985260-102985347
  hyper

SEQ ID NO: 419453 - DNA, 86 bp, Homo sapiens; identical to SEQ ID NO: 233119
  chr7:103087709-103087795
  hyper

SEQ ID NO: 419454 - DNA, 101 bp, Homo sapiens; identical to SEQ ID NO: 201125
  chr7:103631018-103631119
  hyper

SEQ ID NO: 419455 - DNA, 38 bp, Homo sapiens; identical to SEQ ID NO: 233124
  chr7:104652243-104652281
  hyper

SEQ ID NO: 419456 - DNA, 37 bp, Homo sapiens; identical to SEQ ID NO: 233125
  chr7:104652581-104652618
  hyper

SEQ ID NO: 419457 - DNA, 278 bp, Homo sapiens; identical to SEQ ID NO: 233126
  chr7:104654732-104655010
  hyper

SEQ ID NO: 419458 - DNA, 165 bp, Homo sapiens; identical to SEQ ID NO: 201126
  chr7:105162864-105163029
  hyper

SEQ ID NO: 419459 - DNA, 195 bp, Homo sapiens; identical to SEQ ID NO: 233128
  chr7:105221811-105222006
  hyper

SEQ ID NO: 419460 - DNA, 137 bp, Homo sapiens; identical to SEQ ID NO: 201127
  chr7:105331662-105331799
  hyper

SEQ ID NO: 419461 - DNA, 626 bp, Homo sapiens; identical to SEQ ID NO: 233130
  chr7:105332030-105332656
  hyper

SEQ ID NO: 419462 - DNA, 189 bp, Homo sapiens; identical to SEQ ID NO: 201128
  chr7:105516545-105516734
  hyper

SEQ ID NO: 419463 - DNA, 241 bp, Homo sapiens; identical to SEQ ID NO: 285309
  chr7:105517690-105517931
  hyper

SEQ ID NO: 419464 - DNA, 39 bp, Homo sapiens; identical to SEQ ID NO: 233132
  chr7:106239344-106239383
  hyper

SEQ ID NO: 419465 - DNA, 411 bp, Homo sapiens; identical to SEQ ID NO: 201129
  chr7:106508245-106508656
  hyper

SEQ ID NO: 419466 - DNA, 197 bp, Homo sapiens; identical to SEQ ID NO: 201133
  chr7:106808942-106809139
  hyper

SEQ ID NO: 419467 - DNA, 272 bp, Homo sapiens; identical to SEQ ID NO: 233135
  chr7:107220331-107220603
  hyper

SEQ ID NO: 419468 - DNA, 186 bp, Homo sapiens; identical to SEQ ID NO: 201134
  chr7:107302345-107302531
  hyper

SEQ ID NO: 419469 - DNA, 94 bp, Homo sapiens; identical to SEQ ID NO: 233137
  chr7:107383748-107383842
  hyper

SEQ ID NO: 419470 - DNA, 182 bp, Homo sapiens; identical to SEQ ID NO: 233138
  chr7:107384544-107384726
  hyper

SEQ ID NO: 419471 - DNA, 322 bp, Homo sapiens; identical to SEQ ID NO: 201135
  chr7:107531675-107531997
  hyper

SEQ ID NO: 419472 - DNA, 71 bp, Homo sapiens; identical to SEQ ID NO: 384205
  chr7:107642740-107642811
  hyper

SEQ ID NO: 419473 - DNA, 76 bp, Homo sapiens; identical to SEQ ID NO: 201138
  chr7:107643995-107644071
  hyper

SEQ ID NO: 419474 - DNA, 87 bp, Homo sapiens; identical to SEQ ID NO: 285326
  chr7:108210024-108210111
  hyper

SEQ ID NO: 419475 - DNA, 58 bp, Homo sapiens; identical to SEQ ID NO: 115518
  chr7:108210172-108210230
  hyper

SEQ ID NO: 419476 - DNA, 45 bp, Homo sapiens; identical to SEQ ID NO: 233144
  chr7:111202652-111202697
  hyper

SEQ ID NO: 419477 - DNA, 66 bp, Homo sapiens; identical to SEQ ID NO: 233146
  chr7:111846864-111846930
  hyper

SEQ ID NO: 419478 - DNA, 57 bp, Homo sapiens; identical to SEQ ID NO: 233147
  chr7:112090452-112090509
  hyper

SEQ ID NO: 419479 - DNA, 253 bp, Homo sapiens; identical to SEQ ID NO: 233149
  chr7:112579978-112580231
  hyper

SEQ ID NO: 419480 - DNA, 41 bp, Homo sapiens; identical to SEQ ID NO: 201150
  chr7:115850424-115850465
  hyper

SEQ ID NO: 419481 - DNA, 81 bp, Homo sapiens; identical to SEQ ID NO: 285343
  chr7:116139783-116139864
  hyper

SEQ ID NO: 419482 - DNA, 61 bp, Homo sapiens; identical to SEQ ID NO: 201151
  chr7:116140191-116140252
  hyper

SEQ ID NO: 419483 - DNA, 163 bp, Homo sapiens; identical to SEQ ID NO: 201152
  chr7:116164619-116164782
  hyper

SEQ ID NO: 419484 - DNA, 387 bp, Homo sapiens; identical to SEQ ID NO: 285346
  chr7:116166325-116166712
  hyper

SEQ ID NO: 419485 - DNA, 77 bp, Homo sapiens; identical to SEQ ID NO: 233160
  chr7:116503304-116503381
  hyper

SEQ ID NO: 419486 - DNA, 302 bp, Homo sapiens; identical to SEQ ID NO: 201154
  chr7:116592940-116593242
  hyper

SEQ ID NO: 419487 - DNA, 100 bp, Homo sapiens; identical to SEQ ID NO: 115556
  chr7:116593274-116593374
  hyper

SEQ ID NO: 419488 - DNA, 226 bp, Homo sapiens; identical to SEQ ID NO: 233162
  chr7:116594407-116594633
  hyper

SEQ ID NO: 419489 - DNA, 183 bp, Homo sapiens; identical to SEQ ID NO: 285354
  chr7:117513849-117514032
  hyper

SEQ ID NO: 419490 - DNA, 548 bp, Homo sapiens; identical to SEQ ID NO: 201158
  chr7:120497836-120498384
  hyper

SEQ ID NO: 419491 - DNA, 140 bp, Homo sapiens; identical to SEQ ID NO: 233171
  chr7:120627988-120628128
  hyper

SEQ ID NO: 419492 - DNA, 532 bp, Homo sapiens; identical to SEQ ID NO: 201159
  chr7:120628558-120629090
  hyper

SEQ ID NO: 419493 - DNA, 89 bp, Homo sapiens; identical to SEQ ID NO: 233174
  chr7:121036655-121036744
  hyper

SEQ ID NO: 419494 - DNA, 130 bp, Homo sapiens; identical to SEQ ID NO: 201162
  chr7:121513393-121513523
  hyper

SEQ ID NO: 419495 - DNA, 154 bp, Homo sapiens; identical to SEQ ID NO: 285366
  chr7:121783354-121783508
  hyper

SEQ ID NO: 419496 - DNA, 89 bp, Homo sapiens; identical to SEQ ID NO: 285367
  chr7:121784282-121784371
  hyper

SEQ ID NO: 419497 - DNA, 130 bp, Homo sapiens; identical to SEQ ID NO: 201163
  chr7:121863466-121863596
  hyper

SEQ ID NO: 419498 - DNA, 67 bp, Homo sapiens; identical to SEQ ID NO: 233180
  chr7:121943301-121943368
  hyper

SEQ ID NO: 419499 - DNA, 229 bp, Homo sapiens; identical to SEQ ID NO: 285371
  chr7:121944392-121944621
  hyper

SEQ ID NO: 419500 - DNA, 278 bp, Homo sapiens; identical to SEQ ID NO: 285372
  chr7:121944651-121944929
  hyper

SEQ ID NO: 419501 - DNA, 326 bp, Homo sapiens; identical to SEQ ID NO: 285375
  chr7:121954944-121955270
  hyper

SEQ ID NO: 419502 - DNA, 60 bp, Homo sapiens; identical to SEQ ID NO: 285376
  chr7:121955315-121955375
  hyper

SEQ ID NO: 419503 - DNA, 75 bp, Homo sapiens; identical to SEQ ID NO: 285377
  chr7:121955840-121955915
  hyper

SEQ ID NO: 419504 - DNA, 468 bp, Homo sapiens; identical to SEQ ID NO: 397768
  chr7:122525746-122526214
  hyper

SEQ ID NO: 419505 - DNA, 116 bp, Homo sapiens; identical to SEQ ID NO: 201169
  chr7:122527423-122527539
  hyper

SEQ ID NO: 419506 - DNA, 157 bp, Homo sapiens; identical to SEQ ID NO: 201170
  chr7:123174506-123174663
  hyper

SEQ ID NO: 419507 - DNA, 46 bp, Homo sapiens; identical to SEQ ID NO: 201173
  chr7:124405510-124405556
  hyper

SEQ ID NO: 419508 - DNA, 219 bp, Homo sapiens; identical to SEQ ID NO: 285387
  chr7:124406227-124406446
  hyper

SEQ ID NO: 419509 - DNA, 163 bp, Homo sapiens; identical to SEQ ID NO: 233194
  chr7:124570033-124570196
  hyper

SEQ ID NO: 419510 - DNA, 115 bp, Homo sapiens; identical to SEQ ID NO: 233199
  chr7:127032409-127032524
  hyper

SEQ ID NO: 419511 - DNA, 258 bp, Homo sapiens; identical to SEQ ID NO: 233200
  chr7:127033347-127033605
  hyper

SEQ ID NO: 419512 - DNA, 109 bp, Homo sapiens; identical to SEQ ID NO: 233201
  chr7:127228128-127228237
  hyper

SEQ ID NO: 419513 - DNA, 183 bp, Homo sapiens; identical to SEQ ID NO: 233202
  chr7:127228671-127228854
  hyper

SEQ ID NO: 419514 - DNA, 653 bp, Homo sapiens; identical to SEQ ID NO: 285401
  chr7:127775616-127776269
  hyper

SEQ ID NO: 419515 - DNA, 45 bp, Homo sapiens; identical to SEQ ID NO: 285402
  chr7:127776410-127776455
  hyper

SEQ ID NO: 419516 - DNA, 315 bp, Homo sapiens; identical to SEQ ID NO: 201178
  chr7:127807163-127807478
  hyper

SEQ ID NO: 419517 - DNA, 251 bp, Homo sapiens; identical to SEQ ID NO: 233209
  chr7:128001888-128002139
  hyper

SEQ ID NO: 419518 - DNA, 120 bp, Homo sapiens; identical to SEQ ID NO: 201180
  chr7:128049871-128049991
  hyper

SEQ ID NO: 419519 - DNA, 143 bp, Homo sapiens; identical to SEQ ID NO: 233213
  chr7:128379663-128379806
  hyper

SEQ ID NO: 419520 - DNA, 262 bp, Homo sapiens; identical to SEQ ID NO: 233216
  chr7:128502879-128503141
  hyper

SEQ ID NO: 419521 - DNA, 112 bp, Homo sapiens; identical to SEQ ID NO: 285410
  chr7:128509598-128509710
  hyper

SEQ ID NO: 419522 - DNA, 55 bp, Homo sapiens; identical to SEQ ID NO: 201181
  chr7:128579008-128579063
  hyper

SEQ ID NO: 419523 - DNA, 318 bp, Homo sapiens; identical to SEQ ID NO: 233218
  chr7:128695028-128695346
  hyper

SEQ ID NO: 419524 - DNA, 52 bp, Homo sapiens; identical to SEQ ID NO: 201182
  chr7:128784405-128784457
  hyper

SEQ ID NO: 419525 - DNA, 248 bp, Homo sapiens; identical to SEQ ID NO: 233220
  chr7:128784698-128784946
  hyper

SEQ ID NO: 419526 - DNA, 119 bp, Homo sapiens; identical to SEQ ID NO: 233227
  chr7:129709789-129709908
  hyper

SEQ ID NO: 419527 - DNA, 90 bp, Homo sapiens; identical to SEQ ID NO: 233228
  chr7:129710295-129710385
  hyper

SEQ ID NO: 419528 - DNA, 114 bp, Homo sapiens; identical to SEQ ID NO: 233229
  chr7:129845324-129845438
  hyper

SEQ ID NO: 419529 - DNA, 37 bp, Homo sapiens; identical to SEQ ID NO: 233232
  chr7:130791783-130791820
  hyper

SEQ ID NO: 419530 - DNA, 282 bp, Homo sapiens; identical to SEQ ID NO: 233233
  chr7:130794764-130795046
  hyper

SEQ ID NO: 419531 - DNA, 95 bp, Homo sapiens; identical to SEQ ID NO: 233234
  chr7:131012269-131012364
  hyper

SEQ ID NO: 419532 - DNA, 47 bp, Homo sapiens; identical to SEQ ID NO: 233235
  chr7:131013175-131013222
  hyper

SEQ ID NO: 419533 - DNA, 49 bp, Homo sapiens; identical to SEQ ID NO: 201190
  chr7:132260161-132260210
  hyper

SEQ ID NO: 419534 - DNA, 38 bp, Homo sapiens; identical to SEQ ID NO: 285434
  chr7:132262442-132262480
  hyper

SEQ ID NO: 419535 - DNA, 59 bp, Homo sapiens; identical to SEQ ID NO: 201191
  chr7:132340334-132340393
  hyper

SEQ ID NO: 419536 - DNA, 125 bp, Homo sapiens; identical to SEQ ID NO: 233243
  chr7:132766985-132767110
  hyper

SEQ ID NO: 419537 - DNA, 201 bp, Homo sapiens; identical to SEQ ID NO: 285437
  chr7:132937609-132937810
  hyper

SEQ ID NO: 419538 - DNA, 121 bp, Homo sapiens; identical to SEQ ID NO: 233246
  chr7:134001194-134001315
  hyper

SEQ ID NO: 419539 - DNA, 96 bp, Homo sapiens; identical to SEQ ID NO: 201192
  chr7:134001929-134002025
  hyper

SEQ ID NO: 419540 - DNA, 177 bp, Homo sapiens; identical to SEQ ID NO: 201193
  chr7:134331362-134331539
  hyper

SEQ ID NO: 419541 - DNA, 294 bp, Homo sapiens; identical to SEQ ID NO: 201195
  chr7:134855495-134855789
  hyper

SEQ ID NO: 419542 - DNA, 153 bp, Homo sapiens; identical to SEQ ID NO: 233252
  chr7:135194963-135195116
  hyper

SEQ ID NO: 419543 - DNA, 330 bp, Homo sapiens; identical to SEQ ID NO: 201196
  chr7:137028151-137028481
  hyper

SEQ ID NO: 419544 - DNA, 57 bp, Homo sapiens; identical to SEQ ID NO: 233257
  chr7:137685726-137685783
  hyper

SEQ ID NO: 419545 - DNA, 177 bp, Homo sapiens; identical to SEQ ID NO: 201198
  chr7:137686993-137687170
  hyper

SEQ ID NO: 419546 - DNA, 100 bp, Homo sapiens; identical to SEQ ID NO: 201199
  chr7:138665269-138665369
  hyper

SEQ ID NO: 419547 - DNA, 176 bp, Homo sapiens; identical to SEQ ID NO: 233260
  chr7:138666618-138666794
  hyper

SEQ ID NO: 419548 - DNA, 325 bp, Homo sapiens; identical to SEQ ID NO: 285450
  chr7:138720460-138720785
  hyper

SEQ ID NO: 419549 - DNA, 43 bp, Homo sapiens; identical to SEQ ID NO: 201201
  chr7:138720909-138720952
  hyper

SEQ ID NO: 419550 - DNA, 115 bp, Homo sapiens; identical to SEQ ID NO: 233261
  chr7:138794419-138794534
  hyper

SEQ ID NO: 419551 - DNA, 32 bp, Homo sapiens; identical to SEQ ID NO: 233262
  chr7:138818580-138818612
  hyper

SEQ ID NO: 419552 - DNA, 215 bp, Homo sapiens; identical to SEQ ID NO: 233263
  chr7:139024981-139025196
  hyper

SEQ ID NO: 419553 - DNA, 545 bp, Homo sapiens; identical to SEQ ID NO: 285456
  chr7:139477943-139478488
  hyper

SEQ ID NO: 419554 - DNA, 190 bp, Homo sapiens; identical to SEQ ID NO: 285459
  chr7:140098064-140098254
  hyper

SEQ ID NO: 419555 - DNA, 179 bp, Homo sapiens; identical to SEQ ID NO: 115791
  chr7:140098296-140098475
  hyper

SEQ ID NO: 419556 - DNA, 86 bp, Homo sapiens; identical to SEQ ID NO: 233271
  chr7:140373221-140373307
  hyper

SEQ ID NO: 419557 - DNA, 37 bp, Homo sapiens; identical to SEQ ID NO: 233272
  chr7:140624448-140624485
  hyper

SEQ ID NO: 419558 - DNA, 287 bp, Homo sapiens; identical to SEQ ID NO: 233273
  chr7:140714398-140714685
  hyper

SEQ ID NO: 419559 - DNA, 395 bp, Homo sapiens; identical to SEQ ID NO: 233279
  chr7:143059279-143059674
  hyper

SEQ ID NO: 419560 - DNA, 93 bp, Homo sapiens; identical to SEQ ID NO: 233280
  chr7:143077218-143077311
  hyper

SEQ ID NO: 419561 - DNA, 144 bp, Homo sapiens; identical to SEQ ID NO: 285478
  chr7:143579479-143579623
  hyper

SEQ ID NO: 419562 - DNA, 195 bp, Homo sapiens; identical to SEQ ID NO: 285479
  chr7:143580095-143580290
  hyper

SEQ ID NO: 419563 - DNA, 126 bp, Homo sapiens; identical to SEQ ID NO: 233283
  chr7:143598479-143598605
  hyper

SEQ ID NO: 419564 - DNA, 308 bp, Homo sapiens; identical to SEQ ID NO: 233284
  chr7:143599064-143599372
  hyper

SEQ ID NO: 419565 - DNA, 257 bp, Homo sapiens; identical to SEQ ID NO: 223241
  chr7:144100839-144101096
  hyper

SEQ ID NO: 419566 - DNA, 152 bp, Homo sapiens; identical to SEQ ID NO: 201215
  chr7:145981901-145982053
  hyper

SEQ ID NO: 419567 - DNA, 79 bp, Homo sapiens; identical to SEQ ID NO: 201217
  chr7:148506412-148506491
  hyper

SEQ ID NO: 419568 - DNA, 89 bp, Homo sapiens; identical to SEQ ID NO: 201218
  chr7:148507424-148507513
  hyper

SEQ ID NO: 419569 - DNA, 71 bp, Homo sapiens; identical to SEQ ID NO: 201219
  chr7:148508741-148508812
  hyper

SEQ ID NO: 419570 - DNA, 184 bp, Homo sapiens; identical to SEQ ID NO: 201220
  chr7:148511050-148511234
  hyper

SEQ ID NO: 419571 - DNA, 107 bp, Homo sapiens; identical to SEQ ID NO: 201221
  chr7:148512014-148512121
  hyper

SEQ ID NO: 419572 - DNA, 34 bp, Homo sapiens; identical to SEQ ID NO: 201222
  chr7:148513818-148513852
  hyper

SEQ ID NO: 419573 - DNA, 121 bp, Homo sapiens; identical to SEQ ID NO: 201223
  chr7:148514301-148514422
  hyper

SEQ ID NO: 419574 - DNA, 76 bp, Homo sapiens; identical to SEQ ID NO: 201224
  chr7:148515086-148515162
  hyper

SEQ ID NO: 419575 - DNA, 119 bp, Homo sapiens; identical to SEQ ID NO: 201226
  chr7:148526816-148526935
  hyper

SEQ ID NO: 419576 - DNA, 67 bp, Homo sapiens; identical to SEQ ID NO: 233289
  chr7:148580444-148580511
  hyper

SEQ ID NO: 419577 - DNA, 240 bp, Homo sapiens; identical to SEQ ID NO: 233290
  chr7:148762866-148763106
  hyper

SEQ ID NO: 419578 - DNA, 56 bp, Homo sapiens; identical to SEQ ID NO: 233291
  chr7:148822680-148822736
  hyper

SEQ ID NO: 419579 - DNA, 151 bp, Homo sapiens; identical to SEQ ID NO: 201227
  chr7:148892417-148892568
  hyper

SEQ ID NO: 419580 - DNA, 158 bp, Homo sapiens; identical to SEQ ID NO: 201228
  chr7:148936558-148936716
  hyper

SEQ ID NO: 419581 - DNA, 266 bp, Homo sapiens; identical to SEQ ID NO: 285502
  chr7:148959355-148959621
  hyper

SEQ ID NO: 419582 - DNA, 358 bp, Homo sapiens; identical to SEQ ID NO: 201229
  chr7:148982135-148982493
  hyper

SEQ ID NO: 419583 - DNA, 202 bp, Homo sapiens; identical to SEQ ID NO: 233297
  chr7:149157616-149157818
  hyper

SEQ ID NO: 419584 - DNA, 185 bp, Homo sapiens; identical to SEQ ID NO: 233299
  chr7:149535232-149535417
  hyper

SEQ ID NO: 419585 - DNA, 114 bp, Homo sapiens; identical to SEQ ID NO: 233305
  chr7:150065156-150065270
  hyper

SEQ ID NO: 419586 - DNA, 184 bp, Homo sapiens; identical to SEQ ID NO: 233306
  chr7:150065987-150066171
  hyper

SEQ ID NO: 419587 - DNA, 552 bp, Homo sapiens; identical to SEQ ID NO: 201234
  chr7:150497095-150497647
  hyper

SEQ ID NO: 419588 - DNA, 318 bp, Homo sapiens; identical to SEQ ID NO: 285517
  chr7:150497885-150498203
  hyper

SEQ ID NO: 419589 - DNA, 219 bp, Homo sapiens; identical to SEQ ID NO: 233314
  chr7:150685652-150685871
  hyper

SEQ ID NO: 419590 - DNA, 449 bp, Homo sapiens; identical to SEQ ID NO: 233317
  chr7:150725069-150725518
  hyper

SEQ ID NO: 419591 - DNA, 165 bp, Homo sapiens; identical to SEQ ID NO: 233319
  chr7:150754922-150755087
  hyper

SEQ ID NO: 419592 - DNA, 56 bp, Homo sapiens; identical to SEQ ID NO: 233320
  chr7:150756477-150756533
  hyper

SEQ ID NO: 419593 - DNA, 152 bp, Homo sapiens; identical to SEQ ID NO: 233321
  chr7:150757073-150757225
  hyper

SEQ ID NO: 419594 - DNA, 115 bp, Homo sapiens; identical to SEQ ID NO: 201239
  chr7:150778108-150778223
  hyper

SEQ ID NO: 419595 - DNA, 588 bp, Homo sapiens; identical to SEQ ID NO: 285530
  chr7:150864924-150865512
  hyper

SEQ ID NO: 419596 - DNA, 33 bp, Homo sapiens; identical to SEQ ID NO: 201242
  chr7:150869804-150869837
  hyper

SEQ ID NO: 419597 - DNA, 123 bp, Homo sapiens; identical to SEQ ID NO: 233325
  chr7:150924342-150924465
  hyper

SEQ ID NO: 419598 - DNA, 252 bp, Homo sapiens; identical to SEQ ID NO: 233326
  chr7:150929281-150929533
  hyper

SEQ ID NO: 419599 - DNA, 64 bp, Homo sapiens; identical to SEQ ID NO: 223266
  chr7:150948746-150948810
  hyper

SEQ ID NO: 419600 - DNA, 111 bp, Homo sapiens; identical to SEQ ID NO: 233327
  chr7:150974357-150974468
  hyper

SEQ ID NO: 419601 - DNA, 198 bp, Homo sapiens; identical to SEQ ID NO: 233330
  chr7:151215383-151215581
  hyper

SEQ ID NO: 419602 - DNA, 347 bp, Homo sapiens; identical to SEQ ID NO: 285540
  chr7:151217153-151217500
  hyper

SEQ ID NO: 419603 - DNA, 168 bp, Homo sapiens; identical to SEQ ID NO: 233336
  chr7:152161044-152161212
  hyper

SEQ ID NO: 419604 - DNA, 159 bp, Homo sapiens; identical to SEQ ID NO: 233337
  chr7:152161898-152162057
  hyper

SEQ ID NO: 419605 - DNA, 119 bp, Homo sapiens; identical to SEQ ID NO: 233338
  chr7:152373449-152373568
  hyper

SEQ ID NO: 419606 - DNA, 100 bp, Homo sapiens; identical to SEQ ID NO: 285548
  chr7:152622355-152622455
  hyper

SEQ ID NO: 419607 - DNA, 40 bp, Homo sapiens; identical to SEQ ID NO: 285549
  chr7:152622456-152622496
  hyper

SEQ ID NO: 419608 - DNA, 94 bp, Homo sapiens; identical to SEQ ID NO: 233341
  chr7:152890309-152890403
  hyper

SEQ ID NO: 419609 - DNA, 44 bp, Homo sapiens; identical to SEQ ID NO: 285551
  chr7:153585206-153585250
  hyper

SEQ ID NO: 419610 - DNA, 103 bp, Homo sapiens; identical to SEQ ID NO: 285552
  chr7:153585293-153585396
  hyper

SEQ ID NO: 419611 - DNA, 65 bp, Homo sapiens; identical to SEQ ID NO: 201249
  chr7:154705761-154705826
  hyper

SEQ ID NO: 419612 - DNA, 109 bp, Homo sapiens; identical to SEQ ID NO: 233348
  chr7:155090929-155091038
  hyper

SEQ ID NO: 419613 - DNA, 208 bp, Homo sapiens; identical to SEQ ID NO: 201250
  chr7:155168321-155168529
  hyper

SEQ ID NO: 419614 - DNA, 35 bp, Homo sapiens; identical to SEQ ID NO: 201251
  chr7:155170943-155170978
  hyper

SEQ ID NO: 419615 - DNA, 287 bp, Homo sapiens; identical to SEQ ID NO: 285560
  chr7:155261377-155261664
  hyper

SEQ ID NO: 419616 - DNA, 62 bp, Homo sapiens; identical to SEQ ID NO: 201256
  chr7:155264017-155264079
  hyper

SEQ ID NO: 419617 - DNA, 290 bp, Homo sapiens; identical to SEQ ID NO: 201257
  chr7:155264356-155264646
  hyper

SEQ ID NO: 419618 - DNA, 151 bp, Homo sapiens; identical to SEQ ID NO: 285563
  chr7:155283784-155283935
  hyper

SEQ ID NO: 419619 - DNA, 187 bp, Homo sapiens; identical to SEQ ID NO: 201258
  chr7:155326541-155326728
  hyper

SEQ ID NO: 419620 - DNA, 140 bp, Homo sapiens; identical to SEQ ID NO: 233375
  chr7:155437084-155437224
  hyper

SEQ ID NO: 419621 - DNA, 57 bp, Homo sapiens; identical to SEQ ID NO: 285567
  chr7:155580355-155580412
  hyper

SEQ ID NO: 419622 - DNA, 297 bp, Homo sapiens; identical to SEQ ID NO: 201259
  chr7:155600723-155601020
  hyper

SEQ ID NO: 419623 - DNA, 85 bp, Homo sapiens
  chr7:155601410-155601495
  hyper
aagcccgactctgtgcagccaccgtgaagcccagcagggccgccggggccgggctttgtgtcggcggaggccaagttgttcccca

SEQ ID NO: 419624 - DNA, 285 bp, Homo sapiens; identical to SEQ ID NO: 285571
  chr7:155603127-155603412
  hyper

SEQ ID NO: 419625 - DNA, 46 bp, Homo sapiens; identical to SEQ ID NO: 233382
  chr7:156742210-156742256
  hyper

SEQ ID NO: 419626 - DNA, 338 bp, Homo sapiens; identical to SEQ ID NO: 201263
  chr7:156792492-156792830
  hyper

SEQ ID NO: 419627 - DNA, 244 bp, Homo sapiens; identical to SEQ ID NO: 233387
  chr7:156800318-156800562
  hyper

SEQ ID NO: 419628 - DNA, 972 bp, Homo sapiens; identical to SEQ ID NO: 397839
  chr7:156802750-156803722
  hyper

SEQ ID NO: 419629 - DNA, 818 bp, Homo sapiens; identical to SEQ ID NO: 285585
  chr7:156803796-156804614
  hyper

SEQ ID NO: 419630 - DNA, 216 bp, Homo sapiens; identical to SEQ ID NO: 285586
  chr7:156812026-156812242
  hyper

SEQ ID NO: 419631 - DNA, 31 bp, Homo sapiens; identical to SEQ ID NO: 285587
  chr7:156812279-156812310
  hyper

SEQ ID NO: 419632 - DNA, 92 bp, Homo sapiens; identical to SEQ ID NO: 233398
  chr7:156815538-156815630
  hyper

SEQ ID NO: 419633 - DNA, 76 bp, Homo sapiens; identical to SEQ ID NO: 233400
  chr7:157129624-157129700
  hyper

SEQ ID NO: 419634 - DNA, 333 bp, Homo sapiens; identical to SEQ ID NO: 201270
  chr7:157130634-157130967
  hyper

SEQ ID NO: 419635 - DNA, 104 bp, Homo sapiens; identical to SEQ ID NO: 223290
  chr7:157150797-157150901
  hyper

SEQ ID NO: 419636 - DNA, 45 bp, Homo sapiens; identical to SEQ ID NO: 285597
  chr7:157486671-157486716
  hyper

SEQ ID NO: 419637 - DNA, 169 bp, Homo sapiens; identical to SEQ ID NO: 201274
  chr7:157731890-157732059
  hyper

SEQ ID NO: 419638 - DNA, 223 bp, Homo sapiens; identical to SEQ ID NO: 233407
  chr7:158769733-158769956
  hyper

SEQ ID NO: 419639 - DNA, 51 bp, Homo sapiens; identical to SEQ ID NO: 201275
  chr7:158937995-158938046
  hyper

SEQ ID NO: 419640 - DNA, 64 bp, Homo sapiens; identical to SEQ ID NO: 201276
  chr7:158938146-158938210
  hyper

SEQ ID NO: 419641 - DNA, 76 bp, Homo sapiens; identical to SEQ ID NO: 233411
  chr8:356768-356844
  hyper

SEQ ID NO: 419642 - DNA, 46 bp, Homo sapiens; identical to SEQ ID NO: 201277
  chr8:494135-494181
  hyper

SEQ ID NO: 419643 - DNA, 93 bp, Homo sapiens; identical to SEQ ID NO: 285610
  chr8:495072-495165
  hyper

SEQ ID NO: 419644 - DNA, 164 bp, Homo sapiens; identical to SEQ ID NO: 233414
  chr8:681198-681362
  hyper

SEQ ID NO: 419645 - DNA, 41 bp, Homo sapiens; identical to SEQ ID NO: 233421
  chr8:6264167-6264208
  hyper

SEQ ID NO: 419646 - DNA, 72 bp, Homo sapiens; identical to SEQ ID NO: 285630
  chr8:8559447-8559519
  hyper

SEQ ID NO: 419647 - DNA, 110 bp, Homo sapiens; identical to SEQ ID NO: 285631
  chr8:8559542-8559652
  hyper

SEQ ID NO: 419648 - DNA, 375 bp, Homo sapiens; identical to SEQ ID NO: 285633
  chr8:8750284-8750659
  hyper

SEQ ID NO: 419649 - DNA, 462 bp, Homo sapiens; identical to SEQ ID NO: 223306
  chr8:8820810-8821272
  hyper

SEQ ID NO: 419650 - DNA, 33 bp, Homo sapiens; identical to SEQ ID NO: 285635
  chr8:9756515-9756548
  hyper

SEQ ID NO: 419651 - DNA, 185 bp, Homo sapiens; identical to SEQ ID NO: 223311
  chr8:10058672-10058857
  hyper

SEQ ID NO: 419652 - DNA, 217 bp, Homo sapiens; identical to SEQ ID NO: 233433
  chr8:10447760-10447977
  hyper

SEQ ID NO: 419653 - DNA, 54 bp, Homo sapiens; identical to SEQ ID NO: 233437
  chr8:10872634-10872688
  hyper

SEQ ID NO: 419654 - DNA, 319 bp, Homo sapiens; identical to SEQ ID NO: 285645
  chr8:10916680-10916999
  hyper

SEQ ID NO: 419655 - DNA, 191 bp, Homo sapiens; identical to SEQ ID NO: 201298
  chr8:10950049-10950240
  hyper

SEQ ID NO: 419656 - DNA, 124 bp, Homo sapiens; identical to SEQ ID NO: 285649
  chr8:11206068-11206192
  hyper

SEQ ID NO: 419657 - DNA, 174 bp, Homo sapiens; identical to SEQ ID NO: 201300
  chr8:11536631-11536805
  hyper

SEQ ID NO: 419658 - DNA, 200 bp, Homo sapiens; identical to SEQ ID NO: 388523
  chr8:11537283-11537483
  hyper

SEQ ID NO: 419659 - DNA, 146 bp, Homo sapiens; identical to SEQ ID NO: 233447
  chr8:11539330-11539476
  hyper

SEQ ID NO: 419660 - DNA, 290 bp, Homo sapiens; identical to SEQ ID NO: 285661
  chr8:11557848-11558138
  hyper

SEQ ID NO: 419661 - DNA, 37 bp, Homo sapiens; identical to SEQ ID NO: 45110
  chr8:11559706-11559743
  hyper

SEQ ID NO: 419662 - DNA, 95 bp, Homo sapiens; identical to SEQ ID NO: 201309
  chr8:11665928-11666023
  hyper

SEQ ID NO: 419663 - DNA, 152 bp, Homo sapiens; identical to SEQ ID NO: 233456
  chr8:11801273-11801425
  hyper

SEQ ID NO: 419664 - DNA, 208 bp, Homo sapiens; identical to SEQ ID NO: 397862
  chr8:12990178-12990386
  hyper

SEQ ID NO: 419665 - DNA, 68 bp, Homo sapiens; identical to SEQ ID NO: 201312
  chr8:12990431-12990499
  hyper

SEQ ID NO: 419666 - DNA, 157 bp, Homo sapiens; identical to SEQ ID NO: 285673
  chr8:12991337-12991494
  hyper

SEQ ID NO: 419667 - DNA, 43 bp, Homo sapiens; identical to SEQ ID NO: 233460
  chr8:13424066-13424109
  hyper

SEQ ID NO: 419668 - DNA, 220 bp, Homo sapiens; identical to SEQ ID NO: 201314
  chr8:15095136-15095356
  hyper

SEQ ID NO: 419669 - DNA, 226 bp, Homo sapiens; identical to SEQ ID NO: 285677
  chr8:15397991-15398217
  hyper

SEQ ID NO: 419670 - DNA, 128 bp, Homo sapiens; identical to SEQ ID NO: 201317
  chr8:17013473-17013601
  hyper

SEQ ID NO: 419671 - DNA, 399 bp, Homo sapiens; identical to SEQ ID NO: 285682
  chr8:17434527-17434926
  hyper

SEQ ID NO: 419672 - DNA, 1354 bp, Homo sapiens; identical to SEQ ID NO: 285683
  chr8:17657928-17659282
  hyper

SEQ ID NO: 419673 - DNA, 90 bp, Homo sapiens; identical to SEQ ID NO: 201320
  chr8:17659329-17659419
  hyper

SEQ ID NO: 419674 - DNA, 91 bp, Homo sapiens; identical to SEQ ID NO: 233468
  chr8:17780092-17780183
  hyper

SEQ ID NO: 419675 - DNA, 40 bp, Homo sapiens; identical to SEQ ID NO: 233470
  chr8:17941543-17941583
  hyper

SEQ ID NO: 419676 - DNA, 373 bp, Homo sapiens; identical to SEQ ID NO: 233471
  chr8:17942225-17942598
  hyper

SEQ ID NO: 419677 - DNA, 70 bp, Homo sapiens; identical to SEQ ID NO: 233475
  chr8:19125228-19125298
  hyper

SEQ ID NO: 419678 - DNA, 56 bp, Homo sapiens; identical to SEQ ID NO: 285693
  chr8:19615264-19615320
  hyper

SEQ ID NO: 419679 - DNA, 163 bp, Homo sapiens; identical to SEQ ID NO: 233478
  chr8:19674699-19674862
  hyper

SEQ ID NO: 419680 - DNA, 70 bp, Homo sapiens; identical to SEQ ID NO: 201324
  chr8:19798019-19798089
  hyper

SEQ ID NO: 419681 - DNA, 147 bp, Homo sapiens; identical to SEQ ID NO: 233481
  chr8:20054942-20055089
  hyper

SEQ ID NO: 419682 - DNA, 215 bp, Homo sapiens; identical to SEQ ID NO: 233482
  chr8:20126214-20126429
  hyper

SEQ ID NO: 419683 - DNA, 241 bp, Homo sapiens; identical to SEQ ID NO: 233483
  chr8:21776837-21777078
  hyper

SEQ ID NO: 419684 - DNA, 363 bp, Homo sapiens; identical to SEQ ID NO: 233484
  chr8:21779567-21779930
  hyper

SEQ ID NO: 419685 - DNA, 82 bp, Homo sapiens; identical to SEQ ID NO: 285701
  chr8:21868699-21868781
  hyper

SEQ ID NO: 419686 - DNA, 124 bp, Homo sapiens; identical to SEQ ID NO: 201326
  chr8:21906319-21906443
  hyper

SEQ ID NO: 419687 - DNA, 100 bp, Homo sapiens; identical to SEQ ID NO: 201327
  chr8:21987761-21987861
  hyper

SEQ ID NO: 419688 - DNA, 337 bp, Homo sapiens; identical to SEQ ID NO: 201328
  chr8:21988075-21988412
  hyper

SEQ ID NO: 419689 - DNA, 206 bp, Homo sapiens; identical to SEQ ID NO: 201329
  chr8:21988468-21988674
  hyper

SEQ ID NO: 419690 - DNA, 328 bp, Homo sapiens; identical to SEQ ID NO: 233488
  chr8:22102411-22102739
  hyper

SEQ ID NO: 419691 - DNA, 451 bp, Homo sapiens; identical to SEQ ID NO: 233489
  chr8:22224959-22225410
  hyper

SEQ ID NO: 419692 - DNA, 244 bp, Homo sapiens; identical to SEQ ID NO: 233490
  chr8:22298226-22298470
  hyper

SEQ ID NO: 419693 - DNA, 235 bp, Homo sapiens; identical to SEQ ID NO: 233491
  chr8:22298921-22299156
  hyper

SEQ ID NO: 419694 - DNA, 107 bp, Homo sapiens; identical to SEQ ID NO: 285712
  chr8:22408652-22408759
  hyper

SEQ ID NO: 419695 - DNA, 142 bp, Homo sapiens; identical to SEQ ID NO: 285713
  chr8:22409076-22409218
  hyper

SEQ ID NO: 419696 - DNA, 142 bp, Homo sapiens; identical to SEQ ID NO: 116287
  chr8:22409253-22409395
  hyper

SEQ ID NO: 419697 - DNA, 70 bp, Homo sapiens; identical to SEQ ID NO: 201331
  chr8:22419405-22419475
  hyper

SEQ ID NO: 419698 - DNA, 217 bp, Homo sapiens; identical to SEQ ID NO: 223331
  chr8:22550331-22550548
  hyper

SEQ ID NO: 419699 - DNA, 256 bp, Homo sapiens; identical to SEQ ID NO: 223332
  chr8:22550912-22551168
  hyper

SEQ ID NO: 419700 - DNA, 226 bp, Homo sapiens; identical to SEQ ID NO: 233496
  chr8:22552610-22552836
  hyper

SEQ ID NO: 419701 - DNA, 168 bp, Homo sapiens; identical to SEQ ID NO: 285720
  chr8:22613669-22613837
  hyper

SEQ ID NO: 419702 - DNA, 55 bp, Homo sapiens; identical to SEQ ID NO: 285721
  chr8:22613867-22613922
  hyper

SEQ ID NO: 419703 - DNA, 568 bp, Homo sapiens; identical to SEQ ID NO: 285723
  chr8:22722724-22723292
  hyper

SEQ ID NO: 419704 - DNA, 309 bp, Homo sapiens; identical to SEQ ID NO: 223333
  chr8:22925472-22925781
  hyper

SEQ ID NO: 419705 - DNA, 31 bp, Homo sapiens; identical to SEQ ID NO: 233501
  chr8:22926895-22926926
  hyper

SEQ ID NO: 419706 - DNA, 201 bp, Homo sapiens; identical to SEQ ID NO: 285730
  chr8:23261046-23261247
  hyper

SEQ ID NO: 419707 - DNA, 76 bp, Homo sapiens; identical to SEQ ID NO: 285731
  chr8:23261271-23261347
  hyper

SEQ ID NO: 419708 - DNA, 338 bp, Homo sapiens; identical to SEQ ID NO: 285732
  chr8:23386092-23386430
  hyper

SEQ ID NO: 419709 - DNA, 44 bp, Homo sapiens; identical to SEQ ID NO: 201339
  chr8:23539860-23539904
  hyper

SEQ ID NO: 419710 - DNA, 47 bp, Homo sapiens; identical to SEQ ID NO: 233508
  chr8:23540842-23540889
  hyper

SEQ ID NO: 419711 - DNA, 182 bp, Homo sapiens; identical to SEQ ID NO: 116333
  chr8:23563265-23563447
  hyper

SEQ ID NO: 419712 - DNA, 92 bp, Homo sapiens; identical to SEQ ID NO: 201340
  chr8:23563699-23563791
  hyper

SEQ ID NO: 419713 - DNA, 182 bp, Homo sapiens; identical to SEQ ID NO: 201341
  chr8:23564470-23564652
  hyper

SEQ ID NO: 419714 - DNA, 159 bp, Homo sapiens; identical to SEQ ID NO: 233513
  chr8:23568380-23568539
  hyper

SEQ ID NO: 419715 - DNA, 60 bp, Homo sapiens; identical to SEQ ID NO: 201342
  chr8:23572273-23572333
  hyper

SEQ ID NO: 419716 - DNA, 38 bp, Homo sapiens; identical to SEQ ID NO: 285740
  chr8:23585198-23585236
  hyper

SEQ ID NO: 419717 - DNA, 121 bp, Homo sapiens; identical to SEQ ID NO: 285741
  chr8:24272711-24272832
  hyper

SEQ ID NO: 419718 - DNA, 300 bp, Homo sapiens; identical to SEQ ID NO: 397896
  chr8:24772304-24772604
  hyper

SEQ ID NO: 419719 - DNA, 477 bp, Homo sapiens; identical to SEQ ID NO: 285743
  chr8:24772741-24773218
  hyper

SEQ ID NO: 419720 - DNA, 121 bp, Homo sapiens; identical to SEQ ID NO: 233525
  chr8:25316378-25316499
  hyper

SEQ ID NO: 419721 - DNA, 229 bp, Homo sapiens; identical to SEQ ID NO: 285754
  chr8:25897085-25897314
  hyper

SEQ ID NO: 419722 - DNA, 36 bp, Homo sapiens; identical to SEQ ID NO: 285755
  chr8:25898087-25898123
  hyper

SEQ ID NO: 419723 - DNA, 74 bp, Homo sapiens; identical to SEQ ID NO: 45220
  chr8:25898395-25898469
  hyper

SEQ ID NO: 419724 - DNA, 636 bp, Homo sapiens; identical to SEQ ID NO: 233528
  chr8:25899444-25900080
  hyper

SEQ ID NO: 419725 - DNA, 144 bp, Homo sapiens; identical to SEQ ID NO: 285758
  chr8:25902185-25902329
  hyper

SEQ ID NO: 419726 - DNA, 94 bp, Homo sapiens; identical to SEQ ID NO: 285761
  chr8:25904804-25904898
  hyper

SEQ ID NO: 419727 - DNA, 155 bp, Homo sapiens; identical to SEQ ID NO: 285762
  chr8:25905838-25905993
  hyper

SEQ ID NO: 419728 - DNA, 231 bp, Homo sapiens; identical to SEQ ID NO: 285763
  chr8:25906743-25906974
  hyper

SEQ ID NO: 419729 - DNA, 210 bp, Homo sapiens; identical to SEQ ID NO: 201353
  chr8:25907061-25907271
  hyper

SEQ ID NO: 419730 - DNA, 66 bp, Homo sapiens; identical to SEQ ID NO: 201355
  chr8:26150336-26150402
  hyper

SEQ ID NO: 419731 - DNA, 105 bp, Homo sapiens; identical to SEQ ID NO: 285770
  chr8:26305932-26306037
  hyper

SEQ ID NO: 419732 - DNA, 50 bp, Homo sapiens; identical to SEQ ID NO: 201356
  chr8:26370013-26370063
  hyper

SEQ ID NO: 419733 - DNA, 166 bp, Homo sapiens; identical to SEQ ID NO: 201357
  chr8:26370101-26370267
  hyper

SEQ ID NO: 419734 - DNA, 68 bp, Homo sapiens; identical to SEQ ID NO: 201358
  chr8:26370481-26370549
  hyper

SEQ ID NO: 419735 - DNA, 205 bp, Homo sapiens; identical to SEQ ID NO: 201359
  chr8:26371212-26371417
  hyper

SEQ ID NO: 419736 - DNA, 270 bp, Homo sapiens; identical to SEQ ID NO: 201360
  chr8:26372150-26372420
  hyper

SEQ ID NO: 419737 - DNA, 64 bp, Homo sapiens; identical to SEQ ID NO: 223345
  chr8:26435020-26435084
  hyper

SEQ ID NO: 419738 - DNA, 220 bp, Homo sapiens; identical to SEQ ID NO: 233547
  chr8:26435404-26435624
  hyper

SEQ ID NO: 419739 - DNA, 287 bp, Homo sapiens
  chr8:26724706-26724993
  hyper
ggtaactccacaatcacccttttaatattcagctccccgacaccagaaaagaatagcaaggaactttgcagctctcgctgacgtaactcaggcagtagcccagctagtaccgtaatctcctgctgctaccgtattactctacggcaacaggcacaagtgcgtatacagctgtaatgttttcctctggcctagagggggttgggttctagcgtttctttaaaaaggtttgtgtgtgtgtgtgtgtgtgtgtgcgcgcgcgcgcgcgcgtgtgtgtgtgtagagtcatt

SEQ ID NO: 419740 - DNA, 78 bp, Homo sapiens; identical to SEQ ID NO: 201364
  chr8:27168528-27168606
  hyper

SEQ ID NO: 419741 - DNA, 156 bp, Homo sapiens; identical to SEQ ID NO: 233550
  chr8:27168866-27169022
  hyper

SEQ ID NO: 419742 - DNA, 250 bp, Homo sapiens; identical to SEQ ID NO: 285782
  chr8:27327202-27327452
  hyper

SEQ ID NO: 419743 - DNA, 204 bp, Homo sapiens; identical to SEQ ID NO: 201365
  chr8:27348568-27348772
  hyper

SEQ ID NO: 419744 - DNA, 38 bp, Homo sapiens; identical to SEQ ID NO: 285784
  chr8:27449813-27449851
  hyper

SEQ ID NO: 419745 - DNA, 181 bp, Homo sapiens; identical to SEQ ID NO: 285785
  chr8:27449881-27450062
  hyper

SEQ ID NO: 419746 - DNA, 90 bp, Homo sapiens; identical to SEQ ID NO: 233553
  chr8:27472371-27472461
  hyper

SEQ ID NO: 419747 - DNA, 127 bp, Homo sapiens; identical to SEQ ID NO: 201366
  chr8:27491564-27491691
  hyper

SEQ ID NO: 419748 - DNA, 31 bp, Homo sapiens; identical to SEQ ID NO: 233555
  chr8:27950284-27950315
  hyper

SEQ ID NO: 419749 - DNA, 226 bp, Homo sapiens; identical to SEQ ID NO: 285789
  chr8:28242659-28242885
  hyper

SEQ ID NO: 419750 - DNA, 78 bp, Homo sapiens; identical to SEQ ID NO: 201368
  chr8:28258795-28258873
  hyper

SEQ ID NO: 419751 - DNA, 113 bp, Homo sapiens; identical to SEQ ID NO: 233558
  chr8:28352545-28352658
  hyper

SEQ ID NO: 419752 - DNA, 126 bp, Homo sapiens; identical to SEQ ID NO: 201369
  chr8:28560085-28560211
  hyper

SEQ ID NO: 419753 - DNA, 562 bp, Homo sapiens; identical to SEQ ID NO: 233560
  chr8:28747285-28747847
  hyper

SEQ ID NO: 419754 - DNA, 333 bp, Homo sapiens; identical to SEQ ID NO: 201370
  chr8:28748909-28749242
  hyper

SEQ ID NO: 419755 - DNA, 62 bp, Homo sapiens; identical to SEQ ID NO: 201371
  chr8:29120734-29120796
  hyper

SEQ ID NO: 419756 - DNA, 390 bp, Homo sapiens
  chr8:29207871-29208261
  hyper
gggcgagagctaagaagggacgcctgcagaagtggccgcaaacttggtcctcaagggctcccgcgggagagcctcttcttccctgtccccttcctcccgcagcctcgcggtcacatagcagtcggagcggcctcgggcgcccagccgggcggcgcgcagagcggagggggaggcgccggtggaggagagtgtgtttacgagagaggaccgcggactcttttcggcgacggcctcccgtgtatttttgccggtcgcgcggctcctgtcgccactggcgccagcgctgccctgcctacgctcctccggcgctcagcgcactgccccagccagagttttctcctcggcttagaggtttattaatgctcctccgcgctcccgggggagggggcg

SEQ ID NO: 419757 - DNA, 266 bp, Homo sapiens; identical to SEQ ID NO: 285798
  chr8:29209537-29209803
  hyper

SEQ ID NO: 419758 - DNA, 135 bp, Homo sapiens; identical to SEQ ID NO: 233568
  chr8:29952641-29952776
  hyper

SEQ ID NO: 419759 - DNA, 84 bp, Homo sapiens; identical to SEQ ID NO: 201375
  chr8:30241417-30241501
  hyper

SEQ ID NO: 419760 - DNA, 1018 bp, Homo sapiens; identical to SEQ ID NO: 201376
  chr8:30241612-30242630
  hyper

SEQ ID NO: 419761 - DNA, 361 bp, Homo sapiens; identical to SEQ ID NO: 201377
  chr8:30242697-30243058
  hyper

SEQ ID NO: 419762 - DNA, 213 bp, Homo sapiens; identical to SEQ ID NO: 201378
  chr8:30243175-30243388
  hyper

SEQ ID NO: 419763 - DNA, 128 bp, Homo sapiens; identical to SEQ ID NO: 201379
  chr8:30243547-30243675
  hyper

SEQ ID NO: 419764 - DNA, 385 bp, Homo sapiens; identical to SEQ ID NO: 233572
  chr8:30601508-30601893
  hyper

SEQ ID NO: 419765 - DNA, 34 bp, Homo sapiens; identical to SEQ ID NO: 285808
  chr8:30890058-30890092
  hyper

SEQ ID NO: 419766 - DNA, 239 bp, Homo sapiens; identical to SEQ ID NO: 201380
  chr8:30890888-30891127
  hyper

SEQ ID NO: 419767 - DNA, 274 bp, Homo sapiens; identical to SEQ ID NO: 201381
  chr8:31497152-31497426
  hyper

SEQ ID NO: 419768 - DNA, 627 bp, Homo sapiens; identical to SEQ ID NO: 233578
  chr8:32077881-32078508
  hyper

SEQ ID NO: 419769 - DNA, 43 bp, Homo sapiens; identical to SEQ ID NO: 233580
  chr8:33330280-33330323
  hyper

SEQ ID NO: 419770 - DNA, 102 bp, Homo sapiens; identical to SEQ ID NO: 201383
  chr8:33370085-33370187
  hyper

SEQ ID NO: 419771 - DNA, 35 bp, Homo sapiens; identical to SEQ ID NO: 285817
  chr8:35093916-35093951
  hyper

SEQ ID NO: 419772 - DNA, 157 bp, Homo sapiens; identical to SEQ ID NO: 285818
  chr8:37552160-37552317
  hyper

SEQ ID NO: 419773 - DNA, 91 bp, Homo sapiens; identical to SEQ ID NO: 397928
  chr8:37552811-37552902
  hyper

SEQ ID NO: 419774 - DNA, 72 bp, Homo sapiens; identical to SEQ ID NO: 116490
  chr8:37823789-37823861
  hyper

SEQ ID NO: 419775 - DNA, 109 bp, Homo sapiens; identical to SEQ ID NO: 201391
  chr8:37887621-37887730
  hyper

SEQ ID NO: 419776 - DNA, 215 bp, Homo sapiens; identical to SEQ ID NO: 233593
  chr8:37888750-37888965
  hyper

SEQ ID NO: 419777 - DNA, 62 bp, Homo sapiens; identical to SEQ ID NO: 233594
  chr8:37963270-37963332
  hyper

SEQ ID NO: 419778 - DNA, 42 bp, Homo sapiens; identical to SEQ ID NO: 233596
  chr8:38034153-38034195
  hyper

SEQ ID NO: 419779 - DNA, 43 bp, Homo sapiens; identical to SEQ ID NO: 233597
  chr8:38034987-38035030
  hyper

SEQ ID NO: 419780 - DNA, 43 bp, Homo sapiens; identical to SEQ ID NO: 201393
  chr8:38089777-38089820
  hyper

SEQ ID NO: 419781 - DNA, 254 bp, Homo sapiens; identical to SEQ ID NO: 233599
  chr8:38240655-38240909
  hyper

SEQ ID NO: 419782 - DNA, 269 bp, Homo sapiens; identical to SEQ ID NO: 285837
  chr8:38614519-38614788
  hyper

SEQ ID NO: 419783 - DNA, 103 bp, Homo sapiens; identical to SEQ ID NO: 285838
  chr8:38615060-38615163
  hyper

SEQ ID NO: 419784 - DNA, 124 bp, Homo sapiens; identical to SEQ ID NO: 233605
  chr8:38645089-38645213
  hyper

SEQ ID NO: 419785 - DNA, 245 bp, Homo sapiens; identical to SEQ ID NO: 233606
  chr8:38853840-38854085
  hyper

SEQ ID NO: 419786 - DNA, 140 bp, Homo sapiens; identical to SEQ ID NO: 233608
  chr8:40809174-40809314
  hyper

SEQ ID NO: 419787 - DNA, 264 bp, Homo sapiens; identical to SEQ ID NO: 201397
  chr8:41168154-41168418
  hyper

SEQ ID NO: 419788 - DNA, 39 bp, Homo sapiens; identical to SEQ ID NO: 233613
  chr8:41347781-41347820
  hyper

SEQ ID NO: 419789 - DNA, 47 bp, Homo sapiens; identical to SEQ ID NO: 233614
  chr8:41436144-41436191
  hyper

SEQ ID NO: 419790 - DNA, 89 bp, Homo sapiens; identical to SEQ ID NO: 285846
  chr8:41511240-41511329
  hyper

SEQ ID NO: 419791 - DNA, 52 bp, Homo sapiens; identical to SEQ ID NO: 285847
  chr8:41625341-41625393
  hyper

SEQ ID NO: 419792 - DNA, 114 bp, Homo sapiens; identical to SEQ ID NO: 233620
  chr8:42010325-42010439
  hyper

SEQ ID NO: 419793 - DNA, 34 bp, Homo sapiens; identical to SEQ ID NO: 201399
  chr8:42040329-42040363
  hyper

SEQ ID NO: 419794 - DNA, 146 bp, Homo sapiens; identical to SEQ ID NO: 233621
  chr8:42751623-42751769
  hyper

SEQ ID NO: 419795 - DNA, 432 bp, Homo sapiens; identical to SEQ ID NO: 285852
  chr8:42996735-42997167
  hyper

SEQ ID NO: 419796 - DNA, 60 bp, Homo sapiens; identical to SEQ ID NO: 285853
  chr8:48100697-48100757
  hyper

SEQ ID NO: 419797 - DNA, 96 bp, Homo sapiens; identical to SEQ ID NO: 116566
  chr8:48100826-48100922
  hyper

SEQ ID NO: 419798 - DNA, 76 bp, Homo sapiens; identical to SEQ ID NO: 201400
  chr8:48604790-48604866
  hyper

SEQ ID NO: 419799 - DNA, 1723 bp, Homo sapiens; identical to SEQ ID NO: 285856
  chr8:48649725-48651448
  hyper

SEQ ID NO: 419800 - DNA, 50 bp, Homo sapiens; identical to SEQ ID NO: 201403
  chr8:48872787-48872837
  hyper

SEQ ID NO: 419801 - DNA, 69 bp, Homo sapiens; identical to SEQ ID NO: 233630
  chr8:48920804-48920873
  hyper

SEQ ID NO: 419802 - DNA, 50 bp, Homo sapiens; identical to SEQ ID NO: 233631
  chr8:49292489-49292539
  hyper

SEQ ID NO: 419803 - DNA, 68 bp, Homo sapiens; identical to SEQ ID NO: 285862
  chr8:49647749-49647817
  hyper

SEQ ID NO: 419804 - DNA, 68 bp, Homo sapiens; identical to SEQ ID NO: 285863
  chr8:49647853-49647921
  hyper

SEQ ID NO: 419805 - DNA, 209 bp, Homo sapiens; identical to SEQ ID NO: 285865
  chr8:50823925-50824134
  hyper

SEQ ID NO: 419806 - DNA, 35 bp, Homo sapiens; identical to SEQ ID NO: 201407
  chr8:50824409-50824444
  hyper

SEQ ID NO: 419807 - DNA, 86 bp, Homo sapiens; identical to SEQ ID NO: 233641
  chr8:52811697-52811783
  hyper

SEQ ID NO: 419808 - DNA, 349 bp, Homo sapiens; identical to SEQ ID NO: 285868
  chr8:53852565-53852914
  hyper

SEQ ID NO: 419809 - DNA, 75 bp, Homo sapiens; identical to SEQ ID NO: 201410
  chr8:54754915-54754990
  hyper

SEQ ID NO: 419810 - DNA, 293 bp, Homo sapiens; identical to SEQ ID NO: 233650
  chr8:54755405-54755698
  hyper

SEQ ID NO: 419811 - DNA, 249 bp, Homo sapiens; identical to SEQ ID NO: 233662
  chr8:56686112-56686361
  hyper

SEQ ID NO: 419812 - DNA, 124 bp, Homo sapiens; identical to SEQ ID NO: 233664
  chr8:56987181-56987305
  hyper

SEQ ID NO: 419813 - DNA, 39 bp, Homo sapiens; identical to SEQ ID NO: 285882
  chr8:57025552-57025591
  hyper

SEQ ID NO: 419814 - DNA, 155 bp, Homo sapiens; identical to SEQ ID NO: 285884
  chr8:57123315-57123470
  hyper

SEQ ID NO: 419815 - DNA, 258 bp, Homo sapiens; identical to SEQ ID NO: 285885
  chr8:57232275-57232533
  hyper

SEQ ID NO: 419816 - DNA, 91 bp, Homo sapiens; identical to SEQ ID NO: 201417
  chr8:57906841-57906932
  hyper

SEQ ID NO: 419817 - DNA, 1143 bp, Homo sapiens; identical to SEQ ID NO: 285898
  chr8:62626290-62627433
  hyper

SEQ ID NO: 419818 - DNA, 255 bp, Homo sapiens; identical to SEQ ID NO: 233682
  chr8:63951628-63951883
  hyper

SEQ ID NO: 419819 - DNA, 185 bp, Homo sapiens; identical to SEQ ID NO: 201430
  chr8:63998150-63998335
  hyper

SEQ ID NO: 419820 - DNA, 314 bp, Homo sapiens; identical to SEQ ID NO: 285901
  chr8:63998568-63998882
  hyper

SEQ ID NO: 419821 - DNA, 72 bp, Homo sapiens; identical to SEQ ID NO: 384250
  chr8:65283690-65283762
  hyper

SEQ ID NO: 419822 - DNA, 157 bp, Homo sapiens; identical to SEQ ID NO: 285903
  chr8:65285899-65286056
  hyper

SEQ ID NO: 419823 - DNA, 93 bp, Homo sapiens; identical to SEQ ID NO: 388576
  chr8:65490370-65490463
  hyper

SEQ ID NO: 419824 - DNA, 216 bp, Homo sapiens; identical to SEQ ID NO: 285907
  chr8:65490493-65490709
  hyper

SEQ ID NO: 419825 - DNA, 67 bp, Homo sapiens; identical to SEQ ID NO: 45459
  chr8:65490762-65490829
  hyper

SEQ ID NO: 419826 - DNA, 133 bp, Homo sapiens; identical to SEQ ID NO: 116701
  chr8:65491294-65491427
  hyper

SEQ ID NO: 419827 - DNA, 181 bp, Homo sapiens; identical to SEQ ID NO: 285913
  chr8:65498841-65499022
  hyper

SEQ ID NO: 419828 - DNA, 45 bp, Homo sapiens; identical to SEQ ID NO: 285914
  chr8:65499067-65499112
  hyper

SEQ ID NO: 419829 - DNA, 183 bp, Homo sapiens; identical to SEQ ID NO: 233703
  chr8:66546065-66546248
  hyper

SEQ ID NO: 419830 - DNA, 162 bp, Homo sapiens; identical to SEQ ID NO: 233704
  chr8:66546468-66546630
  hyper

SEQ ID NO: 419831 - DNA, 194 bp, Homo sapiens; identical to SEQ ID NO: 233705
  chr8:66556751-66556945
  hyper

SEQ ID NO: 419832 - DNA, 32 bp, Homo sapiens; identical to SEQ ID NO: 233710
  chr8:67090319-67090351
  hyper

SEQ ID NO: 419833 - DNA, 42 bp, Homo sapiens; identical to SEQ ID NO: 285925
  chr8:67090411-67090453
  hyper

SEQ ID NO: 419834 - DNA, 449 bp, Homo sapiens; identical to SEQ ID NO: 201440
  chr8:67417575-67418024
  hyper

SEQ ID NO: 419835 - DNA, 51 bp, Homo sapiens; identical to SEQ ID NO: 201441
  chr8:67524786-67524837
  hyper

SEQ ID NO: 419836 - DNA, 148 bp, Homo sapiens; identical to SEQ ID NO: 233714
  chr8:67687304-67687452
  hyper

SEQ ID NO: 419837 - DNA, 43 bp, Homo sapiens; identical to SEQ ID NO: 201442
  chr8:67837266-67837309
  hyper

SEQ ID NO: 419838 - DNA, 98 bp, Homo sapiens; identical to SEQ ID NO: 285931
  chr8:67941010-67941108
  hyper

SEQ ID NO: 419839 - DNA, 221 bp, Homo sapiens; identical to SEQ ID NO: 116746
  chr8:67974225-67974446
  hyper

SEQ ID NO: 419840 - DNA, 143 bp, Homo sapiens; identical to SEQ ID NO: 233718
  chr8:68256145-68256288
  hyper

SEQ ID NO: 419841 - DNA, 45 bp, Homo sapiens; identical to SEQ ID NO: 201443
  chr8:68863998-68864043
  hyper

SEQ ID NO: 419842 - DNA, 60 bp, Homo sapiens; identical to SEQ ID NO: 201444
  chr8:68864119-68864179
  hyper

SEQ ID NO: 419843 - DNA, 276 bp, Homo sapiens; identical to SEQ ID NO: 201445
  chr8:68864195-68864471
  hyper

SEQ ID NO: 419844 - DNA, 318 bp, Homo sapiens; identical to SEQ ID NO: 116751
  chr8:68864942-68865260
  hyper

SEQ ID NO: 419845 - DNA, 232 bp, Homo sapiens; identical to SEQ ID NO: 201450
  chr8:69244779-69245011
  hyper

SEQ ID NO: 419846 - DNA, 484 bp, Homo sapiens
  chr8:70746783-70747267
  hyper
gtgaggagccggggaatcccagcaaactctcgccgctcgcggggggcgtccgaaccccctgcttaggcgagcgccctcacagcatcgcagactcggatggacacgcggatcccggcagggagctcttggagcaggcgtggaatcccagggacaccccctgcgcgcacatcacatacacgcacatcctacacacacacacacacacacacacacacacacacacacacacacagagcccgtgggaagacaagaccgccggcgacagcccgccgcgctgcccgggcgctcaagccgccgctactcactagcgagtctgtcagtctgtctgcctggctgagtagagcggcgggaggggggcactgagctacgggaatagttgggagccgcgtgaggaggcagcctccgtccagccgaagagaaatcagtgaatgagactgtgactcaggctgaactcttccccccacccctcgcctgtcacccaagc

SEQ ID NO: 419847 - DNA, 73 bp, Homo sapiens; identical to SEQ ID NO: 285943
  chr8:70945214-70945287
  hyper

SEQ ID NO: 419848 - DNA, 44 bp, Homo sapiens; identical to SEQ ID NO: 201454
  chr8:71315999-71316043
  hyper

SEQ ID NO: 419849 - DNA, 38 bp, Homo sapiens; identical to SEQ ID NO: 285946
  chr8:72274270-72274308
  hyper

SEQ ID NO: 419850 - DNA, 39 bp, Homo sapiens; identical to SEQ ID NO: 285947
  chr8:72466298-72466337
  hyper

SEQ ID NO: 419851 - DNA, 396 bp, Homo sapiens; identical to SEQ ID NO: 233733
  chr8:72466618-72467014
  hyper

SEQ ID NO: 419852 - DNA, 77 bp, Homo sapiens; identical to SEQ ID NO: 201455
  chr8:72470259-72470336
  hyper

SEQ ID NO: 419853 - DNA, 218 bp, Homo sapiens; identical to SEQ ID NO: 285950
  chr8:72470835-72471053
  hyper

SEQ ID NO: 419854 - DNA, 33 bp, Homo sapiens; identical to SEQ ID NO: 285951
  chr8:72471083-72471116
  hyper

SEQ ID NO: 419855 - DNA, 37 bp, Homo sapiens; identical to SEQ ID NO: 285952
  chr8:72471195-72471232
  hyper

SEQ ID NO: 419856 - DNA, 209 bp, Homo sapiens; identical to SEQ ID NO: 201458
  chr8:72917126-72917335
  hyper

SEQ ID NO: 419857 - DNA, 164 bp, Homo sapiens; identical to SEQ ID NO: 201459
  chr8:72917515-72917679
  hyper

SEQ ID NO: 419858 - DNA, 96 bp, Homo sapiens; identical to SEQ ID NO: 201460
  chr8:72917709-72917805
  hyper

SEQ ID NO: 419859 - DNA, 82 bp, Homo sapiens; identical to SEQ ID NO: 201461
  chr8:72987460-72987542
  hyper

SEQ ID NO: 419860 - DNA, 93 bp, Homo sapiens; identical to SEQ ID NO: 285963
  chr8:73450590-73450683
  hyper

SEQ ID NO: 419861 - DNA, 110 bp, Homo sapiens; identical to SEQ ID NO: 233743
  chr8:73920991-73921101
  hyper

SEQ ID NO: 419862 - DNA, 183 bp, Homo sapiens; identical to SEQ ID NO: 223418
  chr8:74208009-74208192
  hyper

SEQ ID NO: 419863 - DNA, 165 bp, Homo sapiens; identical to SEQ ID NO: 201467
  chr8:74791235-74791400
  hyper

SEQ ID NO: 419864 - DNA, 71 bp, Homo sapiens; identical to SEQ ID NO: 233746
  chr8:74884738-74884809
  hyper

SEQ ID NO: 419865 - DNA, 244 bp, Homo sapiens; identical to SEQ ID NO: 233747
  chr8:74888248-74888492
  hyper

SEQ ID NO: 419866 - DNA, 92 bp, Homo sapiens; identical to SEQ ID NO: 201468
  chr8:75232542-75232634
  hyper

SEQ ID NO: 419867 - DNA, 267 bp, Homo sapiens; identical to SEQ ID NO: 201469
  chr8:75232671-75232938
  hyper

SEQ ID NO: 419868 - DNA, 628 bp, Homo sapiens; identical to SEQ ID NO: 201470
  chr8:75233098-75233726
  hyper

SEQ ID NO: 419869 - DNA, 46 bp, Homo sapiens; identical to SEQ ID NO: 285975
  chr8:75233938-75233984
  hyper

SEQ ID NO: 419870 - DNA, 122 bp, Homo sapiens; identical to SEQ ID NO: 285976
  chr8:75234041-75234163
  hyper

SEQ ID NO: 419871 - DNA, 280 bp, Homo sapiens; identical to SEQ ID NO: 233752
  chr8:76318950-76319230
  hyper

SEQ ID NO: 419872 - DNA, 419 bp, Homo sapiens; identical to SEQ ID NO: 201475
  chr8:76319437-76319856
  hyper

SEQ ID NO: 419873 - DNA, 316 bp, Homo sapiens; identical to SEQ ID NO: 201476
  chr8:76319920-76320236
  hyper

SEQ ID NO: 419874 - DNA, 85 bp, Homo sapiens; identical to SEQ ID NO: 285983
  chr8:76320292-76320377
  hyper

SEQ ID NO: 419875 - DNA, 44 bp, Homo sapiens; identical to SEQ ID NO: 285984
  chr8:77586691-77586735
  hyper

SEQ ID NO: 419876 - DNA, 271 bp, Homo sapiens; identical to SEQ ID NO: 233758
  chr8:77912576-77912847
  hyper

SEQ ID NO: 419877 - DNA, 556 bp, Homo sapiens; identical to SEQ ID NO: 233760
  chr8:79716726-79717282
  hyper

SEQ ID NO: 419878 - DNA, 231 bp, Homo sapiens; identical to SEQ ID NO: 285989
  chr8:80677512-80677743
  hyper

SEQ ID NO: 419879 - DNA, 235 bp, Homo sapiens; identical to SEQ ID NO: 285990
  chr8:80677781-80678016
  hyper

SEQ ID NO: 419880 - DNA, 289 bp, Homo sapiens; identical to SEQ ID NO: 116839
  chr8:80942045-80942334
  hyper

SEQ ID NO: 419881 - DNA, 364 bp, Homo sapiens; identical to SEQ ID NO: 285999
  chr8:81490259-81490623
  hyper

SEQ ID NO: 419882 - DNA, 119 bp, Homo sapiens; identical to SEQ ID NO: 223427
  chr8:81599502-81599621
  hyper

SEQ ID NO: 419883 - DNA, 300 bp, Homo sapiens; identical to SEQ ID NO: 201486
  chr8:81785141-81785441
  hyper

SEQ ID NO: 419884 - DNA, 448 bp, Homo sapiens
  chr8:81785467-81785915
  hyper
cccaagttccccacctcactggggagaagcgccctttcccggcacccacaccaaacaacaaacccgacacggcctttgaggaaagcgggagccgccgcctgggagagacgcaggggcccaaggcgcaggcaaatcaacagttcctcgcgctgccccgcgcggccgcccgcgccgcctgacacacccctcctggccgggtctctccccggcgccgctgaccgtcctcggccaggcgccttgccccggggcccgggcccgtccccctccccgggctggcgggtcccacgcgcgccaccgcgcccaacacgcaccttcaacgcgccccgggccgggcccctggggactgcgtggccgggtccgaggggcacgaaacgctcctcgccgtcctcgtcgtcttcgtcgccgtccaccacctcgacgaccacctcctcgtcctcctcttcctcgt

SEQ ID NO: 419885 - DNA, 192 bp, Homo sapiens; identical to SEQ ID NO: 233775
  chr8:82598487-82598679
  hyper

SEQ ID NO: 419886 - DNA, 33 bp, Homo sapiens; identical to SEQ ID NO: 201491
  chr8:82633554-82633587
  hyper

SEQ ID NO: 419887 - DNA, 74 bp, Homo sapiens; identical to SEQ ID NO: 233777
  chr8:82692881-82692955
  hyper

SEQ ID NO: 419888 - DNA, 103 bp, Homo sapiens; identical to SEQ ID NO: 233778
  chr8:82754299-82754402
  hyper

SEQ ID NO: 419889 - DNA, 132 bp, Homo sapiens; identical to SEQ ID NO: 201492
  chr8:85094384-85094516
  hyper

SEQ ID NO: 419890 - DNA, 118 bp, Homo sapiens; identical to SEQ ID NO: 45583
  chr8:85094922-85095040
  hyper

SEQ ID NO: 419891 - DNA, 196 bp, Homo sapiens; identical to SEQ ID NO: 201495
  chr8:86089319-86089515
  hyper

SEQ ID NO: 419892 - DNA, 67 bp, Homo sapiens; identical to SEQ ID NO: 233784
  chr8:86090172-86090239
  hyper

SEQ ID NO: 419893 - DNA, 250 bp, Homo sapiens; identical to SEQ ID NO: 286014
  chr8:86132759-86133009
  hyper

SEQ ID NO: 419894 - DNA, 66 bp, Homo sapiens; identical to SEQ ID NO: 201497
  chr8:86157559-86157625
  hyper

SEQ ID NO: 419895 - DNA, 57 bp, Homo sapiens; identical to SEQ ID NO: 116870
  chr8:86350926-86350983
  hyper

SEQ ID NO: 419896 - DNA, 89 bp, Homo sapiens; identical to SEQ ID NO: 201499
  chr8:87527032-87527121
  hyper

SEQ ID NO: 419897 - DNA, 169 bp, Homo sapiens; identical to SEQ ID NO: 233790
  chr8:90769556-90769725
  hyper

SEQ ID NO: 419898 - DNA, 219 bp, Homo sapiens; identical to SEQ ID NO: 233791
  chr8:90770542-90770761
  hyper

SEQ ID NO: 419899 - DNA, 210 bp, Homo sapiens; identical to SEQ ID NO: 233792
  chr8:90914087-90914297
  hyper

SEQ ID NO: 419900 - DNA, 153 bp, Homo sapiens; identical to SEQ ID NO: 233793
  chr8:90996934-90997087
  hyper

SEQ ID NO: 419901 - DNA, 198 bp, Homo sapiens; identical to SEQ ID NO: 233794
  chr8:91012993-91013191
  hyper

SEQ ID NO: 419902 - DNA, 238 bp, Homo sapiens; identical to SEQ ID NO: 233801
  chr8:92082264-92082502
  hyper

SEQ ID NO: 419903 - DNA, 82 bp, Homo sapiens; identical to SEQ ID NO: 286028
  chr8:93113864-93113946
  hyper

SEQ ID NO: 419904 - DNA, 242 bp, Homo sapiens; identical to SEQ ID NO: 201502
  chr8:93115140-93115382
  hyper

SEQ ID NO: 419905 - DNA, 492 bp, Homo sapiens; identical to SEQ ID NO: 286030
  chr8:93977674-93978166
  hyper

SEQ ID NO: 419906 - DNA, 315 bp, Homo sapiens; identical to SEQ ID NO: 201503
  chr8:93978235-93978550
  hyper

SEQ ID NO: 419907 - DNA, 180 bp, Homo sapiens; identical to SEQ ID NO: 233805
  chr8:94766989-94767169
  hyper

SEQ ID NO: 419908 - DNA, 209 bp, Homo sapiens; identical to SEQ ID NO: 201506
  chr8:94929137-94929346
  hyper

SEQ ID NO: 419909 - DNA, 163 bp, Homo sapiens; identical to SEQ ID NO: 201513
  chr8:95653853-95654016
  hyper

SEQ ID NO: 419910 - DNA, 416 bp, Homo sapiens; identical to SEQ ID NO: 286045
  chr8:95654337-95654753
  hyper

SEQ ID NO: 419911 - DNA, 52 bp, Homo sapiens; identical to SEQ ID NO: 233811
  chr8:95835299-95835351
  hyper

SEQ ID NO: 419912 - DNA, 1024 bp, Homo sapiens; identical to SEQ ID NO: 286047
  chr8:96145958-96146982
  hyper

SEQ ID NO: 419913 - DNA, 136 bp, Homo sapiens; identical to SEQ ID NO: 233813
  chr8:96147206-96147342
  hyper

SEQ ID NO: 419914 - DNA, 73 bp, Homo sapiens; identical to SEQ ID NO: 286050
  chr8:97165551-97165624
  hyper

SEQ ID NO: 419915 - DNA, 69 bp, Homo sapiens; identical to SEQ ID NO: 233823
  chr8:97174101-97174170
  hyper

SEQ ID NO: 419916 - DNA, 33 bp, Homo sapiens; identical to SEQ ID NO: 233825
  chr8:97657330-97657363
  hyper

SEQ ID NO: 419917 - DNA, 191 bp, Homo sapiens; identical to SEQ ID NO: 233828
  chr8:98657023-98657214
  hyper

SEQ ID NO: 419918 - DNA, 407 bp, Homo sapiens; identical to SEQ ID NO: 233829
  chr8:98657501-98657908
  hyper

SEQ ID NO: 419919 - DNA, 119 bp, Homo sapiens; identical to SEQ ID NO: 233835
  chr8:99129466-99129585
  hyper

SEQ ID NO: 419920 - DNA, 54 bp, Homo sapiens; identical to SEQ ID NO: 223447
  chr8:99837477-99837531
  hyper

SEQ ID NO: 419921 - DNA, 274 bp, Homo sapiens; identical to SEQ ID NO: 398022
  chr8:99953787-99954061
  hyper

SEQ ID NO: 419922 - DNA, 140 bp, Homo sapiens; identical to SEQ ID NO: 201529
  chr8:99955428-99955568
  hyper

SEQ ID NO: 419923 - DNA, 126 bp, Homo sapiens; identical to SEQ ID NO: 286075
  chr8:99956023-99956149
  hyper

SEQ ID NO: 419924 - DNA, 100 bp, Homo sapiens; identical to SEQ ID NO: 201533
  chr8:99963900-99964000
  hyper

SEQ ID NO: 419925 - DNA, 433 bp, Homo sapiens; identical to SEQ ID NO: 233851
  chr8:101170171-101170604
  hyper

SEQ ID NO: 419926 - DNA, 107 bp, Homo sapiens; identical to SEQ ID NO: 233852
  chr8:101322699-101322806
  hyper

SEQ ID NO: 419927 - DNA, 82 bp, Homo sapiens; identical to SEQ ID NO: 233853
  chr8:101572036-101572118
  hyper

SEQ ID NO: 419928 - DNA, 43 bp, Homo sapiens; identical to SEQ ID NO: 201539
  chr8:101920619-101920662
  hyper

SEQ ID NO: 419929 - DNA, 85 bp, Homo sapiens; identical to SEQ ID NO: 201540
  chr8:101962307-101962392
  hyper

SEQ ID NO: 419930 - DNA, 285 bp, Homo sapiens; identical to SEQ ID NO: 233859
  chr8:101965389-101965674
  hyper

SEQ ID NO: 419931 - DNA, 90 bp, Homo sapiens; identical to SEQ ID NO: 233860
  chr8:102038370-102038460
  hyper

SEQ ID NO: 419932 - DNA, 106 bp, Homo sapiens; identical to SEQ ID NO: 233862
  chr8:102218020-102218126
  hyper

SEQ ID NO: 419933 - DNA, 270 bp, Homo sapiens; identical to SEQ ID NO: 233864
  chr8:103136687-103136957
  hyper

SEQ ID NO: 419934 - DNA, 231 bp, Homo sapiens; identical to SEQ ID NO: 233865
  chr8:103424261-103424492
  hyper

SEQ ID NO: 419935 - DNA, 276 bp, Homo sapiens; identical to SEQ ID NO: 233866
  chr8:103667886-103668162
  hyper

SEQ ID NO: 419936 - DNA, 223 bp, Homo sapiens; identical to SEQ ID NO: 233867
  chr8:103822601-103822824
  hyper

SEQ ID NO: 419937 - DNA, 31 bp, Homo sapiens; identical to SEQ ID NO: 201547
  chr8:103876453-103876484
  hyper

SEQ ID NO: 419938 - DNA, 189 bp, Homo sapiens; identical to SEQ ID NO: 233869
  chr8:104033104-104033293
  hyper

SEQ ID NO: 419939 - DNA, 171 bp, Homo sapiens; identical to SEQ ID NO: 286103
  chr8:104310699-104310870
  hyper

SEQ ID NO: 419940 - DNA, 63 bp, Homo sapiens; identical to SEQ ID NO: 286104
  chr8:104310963-104311026
  hyper

SEQ ID NO: 419941 - DNA, 117 bp, Homo sapiens; identical to SEQ ID NO: 286105
  chr8:104311421-104311538
  hyper

SEQ ID NO: 419942 - DNA, 79 bp, Homo sapiens; identical to SEQ ID NO: 233873
  chr8:104427306-104427385
  hyper

SEQ ID NO: 419943 - DNA, 42 bp, Homo sapiens; identical to SEQ ID NO: 388611
  chr8:106331801-106331843
  hyper

SEQ ID NO: 419944 - DNA, 166 bp, Homo sapiens; identical to SEQ ID NO: 233885
  chr8:109260968-109261134
  hyper

SEQ ID NO: 419945 - DNA, 87 bp, Homo sapiens; identical to SEQ ID NO: 201562
  chr8:110346426-110346513
  hyper

SEQ ID NO: 419946 - DNA, 68 bp, Homo sapiens; identical to SEQ ID NO: 201563
  chr8:110703933-110704001
  hyper

SEQ ID NO: 419947 - DNA, 45 bp, Homo sapiens; identical to SEQ ID NO: 201564
  chr8:110704144-110704189
  hyper

SEQ ID NO: 419948 - DNA, 51 bp, Homo sapiens; identical to SEQ ID NO: 286134
  chr8:114446354-114446405
  hyper

SEQ ID NO: 419949 - DNA, 99 bp, Homo sapiens; identical to SEQ ID NO: 286135
  chr8:114446435-114446534
  hyper

SEQ ID NO: 419950 - DNA, 102 bp, Homo sapiens; identical to SEQ ID NO: 286137
  chr8:114448651-114448753
  hyper

SEQ ID NO: 419951 - DNA, 218 bp, Homo sapiens; identical to SEQ ID NO: 233898
  chr8:116680622-116680840
  hyper

SEQ ID NO: 419952 - DNA, 151 bp, Homo sapiens; identical to SEQ ID NO: 201570
  chr8:116681608-116681759
  hyper

SEQ ID NO: 419953 - DNA, 391 bp, Homo sapiens; identical to SEQ ID NO: 233900
  chr8:117767860-117768251
  hyper

SEQ ID NO: 419954 - DNA, 327 bp, Homo sapiens; identical to SEQ ID NO: 233901
  chr8:117778474-117778801
  hyper

SEQ ID NO: 419955 - DNA, 1758 bp, Homo sapiens; identical to SEQ ID NO: 201571
  chr8:117858172-117859930
  hyper

SEQ ID NO: 419956 - DNA, 84 bp, Homo sapiens; identical to SEQ ID NO: 201572
  chr8:117861184-117861268
  hyper

SEQ ID NO: 419957 - DNA, 161 bp, Homo sapiens; identical to SEQ ID NO: 201573
  chr8:117862856-117863017
  hyper

SEQ ID NO: 419958 - DNA, 149 bp, Homo sapiens; identical to SEQ ID NO: 201574
  chr8:117864186-117864335
  hyper

SEQ ID NO: 419959 - DNA, 174 bp, Homo sapiens; identical to SEQ ID NO: 201575
  chr8:117864773-117864947
  hyper

SEQ ID NO: 419960 - DNA, 224 bp, Homo sapiens; identical to SEQ ID NO: 201576
  chr8:117866483-117866707
  hyper

SEQ ID NO: 419961 - DNA, 123 bp, Homo sapiens; identical to SEQ ID NO: 201577
  chr8:117868404-117868527
  hyper

SEQ ID NO: 419962 - DNA, 133 bp, Homo sapiens; identical to SEQ ID NO: 201578
  chr8:117868877-117869010
  hyper

SEQ ID NO: 419963 - DNA, 221 bp, Homo sapiens; identical to SEQ ID NO: 201579
  chr8:117869491-117869712
  hyper

SEQ ID NO: 419964 - DNA, 107 bp, Homo sapiens; identical to SEQ ID NO: 201580
  chr8:117870590-117870697
  hyper

SEQ ID NO: 419965 - DNA, 112 bp, Homo sapiens; identical to SEQ ID NO: 201581
  chr8:117874067-117874179
  hyper

SEQ ID NO: 419966 - DNA, 130 bp, Homo sapiens; identical to SEQ ID NO: 201582
  chr8:117875368-117875498
  hyper

SEQ ID NO: 419967 - DNA, 176 bp, Homo sapiens; identical to SEQ ID NO: 201583
  chr8:117878824-117879000
  hyper

SEQ ID NO: 419968 - DNA, 114 bp, Homo sapiens; identical to SEQ ID NO: 201584
  chr8:117886849-117886963
  hyper

SEQ ID NO: 419969 - DNA, 237 bp, Homo sapiens; identical to SEQ ID NO: 117113
  chr8:117887066-117887303
  hyper

SEQ ID NO: 419970 - DNA, 103 bp, Homo sapiens; identical to SEQ ID NO: 286161
  chr8:120428388-120428491
  hyper

SEQ ID NO: 419971 - DNA, 201 bp, Homo sapiens; identical to SEQ ID NO: 286162
  chr8:120428722-120428923
  hyper

SEQ ID NO: 419972 - DNA, 128 bp, Homo sapiens; identical to SEQ ID NO: 286163
  chr8:120429056-120429184
  hyper

SEQ ID NO: 419973 - DNA, 175 bp, Homo sapiens; identical to SEQ ID NO: 233907
  chr8:120844818-120844993
  hyper

SEQ ID NO: 419974 - DNA, 365 bp, Homo sapiens; identical to SEQ ID NO: 233908
  chr8:120885801-120886166
  hyper

SEQ ID NO: 419975 - DNA, 210 bp, Homo sapiens; identical to SEQ ID NO: 201590
  chr8:121137782-121137992
  hyper

SEQ ID NO: 419976 - DNA, 117 bp, Homo sapiens; identical to SEQ ID NO: 233910
  chr8:121457554-121457671
  hyper

SEQ ID NO: 419977 - DNA, 261 bp, Homo sapiens; identical to SEQ ID NO: 201593
  chr8:122651465-122651726
  hyper

SEQ ID NO: 419978 - DNA, 49 bp, Homo sapiens; identical to SEQ ID NO: 233915
  chr8:122653605-122653654
  hyper

SEQ ID NO: 419979 - DNA, 188 bp, Homo sapiens; identical to SEQ ID NO: 233916
  chr8:123792666-123792854
  hyper

SEQ ID NO: 419980 - DNA, 44 bp, Homo sapiens; identical to SEQ ID NO: 233917
  chr8:123793463-123793507
  hyper

SEQ ID NO: 419981 - DNA, 178 bp, Homo sapiens; identical to SEQ ID NO: 233918
  chr8:124054654-124054832
  hyper

SEQ ID NO: 419982 - DNA, 108 bp, Homo sapiens; identical to SEQ ID NO: 233919
  chr8:124170646-124170754
  hyper

SEQ ID NO: 419983 - DNA, 86 bp, Homo sapiens; identical to SEQ ID NO: 233921
  chr8:124253464-124253550
  hyper

SEQ ID NO: 419984 - DNA, 199 bp, Homo sapiens; identical to SEQ ID NO: 201594
  chr8:124408729-124408928
  hyper

SEQ ID NO: 419985 - DNA, 259 bp, Homo sapiens; identical to SEQ ID NO: 223478
  chr8:124552598-124552857
  hyper

SEQ ID NO: 419986 - DNA, 158 bp, Homo sapiens; identical to SEQ ID NO: 233924
  chr8:125385116-125385274
  hyper

SEQ ID NO: 419987 - DNA, 227 bp, Homo sapiens; identical to SEQ ID NO: 233925
  chr8:125551279-125551506
  hyper

SEQ ID NO: 419988 - DNA, 75 bp, Homo sapiens; identical to SEQ ID NO: 201595
  chr8:126010222-126010297
  hyper

SEQ ID NO: 419989 - DNA, 655 bp, Homo sapiens; identical to SEQ ID NO: 233927
  chr8:126010860-126011515
  hyper

SEQ ID NO: 419990 - DNA, 67 bp, Homo sapiens; identical to SEQ ID NO: 233929
  chr8:126442420-126442487
  hyper

SEQ ID NO: 419991 - DNA, 194 bp, Homo sapiens; identical to SEQ ID NO: 201597
  chr8:127569427-127569621
  hyper

SEQ ID NO: 419992 - DNA, 261 bp, Homo sapiens; identical to SEQ ID NO: 398058
  chr8:127569676-127569937
  hyper

SEQ ID NO: 419993 - DNA, 582 bp, Homo sapiens; identical to SEQ ID NO: 233932
  chr8:128747187-128747769
  hyper

SEQ ID NO: 419994 - DNA, 168 bp, Homo sapiens; identical to SEQ ID NO: 233933
  chr8:128747994-128748162
  hyper

SEQ ID NO: 419995 - DNA, 126 bp, Homo sapiens; identical to SEQ ID NO: 233934
  chr8:128749400-128749526
  hyper

SEQ ID NO: 419996 - DNA, 121 bp, Homo sapiens; identical to SEQ ID NO: 201600
  chr8:132917187-132917308
  hyper

SEQ ID NO: 419997 - DNA, 606 bp, Homo sapiens; identical to SEQ ID NO: 233943
  chr8:133687388-133687994
  hyper

SEQ ID NO: 419998 - DNA, 364 bp, Homo sapiens; identical to SEQ ID NO: 201605
  chr8:134232709-134233073
  hyper

SEQ ID NO: 419999 - DNA, 677 bp, Homo sapiens; identical to SEQ ID NO: 286202
  chr8:134308718-134309395
  hyper

SEQ ID NO: 420000 - DNA, 144 bp, Homo sapiens; identical to SEQ ID NO: 201607
  chr8:134465706-134465850
  hyper

SEQ ID NO: 420001 - DNA, 56 bp, Homo sapiens; identical to SEQ ID NO: 201608
  chr8:134581293-134581349
  hyper

SEQ ID NO: 420002 - DNA, 504 bp, Homo sapiens
  chr8:134581732-134582236
  hyper
tatagaaactgagacgccgagaggttaagtctggcgaccaaagagagacagagacagagagacgggagactagaagaggccccacgctgtacccagatattggcagaggctgaggggcacggagtggtgaactctagtcagtcatttcagccaaccatgggatttcagaaaacagccggcaggggtcctaatgtttggggcaggaaggggaggtgcgggaaggcactgagggacccccgcactgggcgccccttccccaccgcagagacaagcggcagtttccacagcagccggcagggggcagtgcaccttgccttttcgaagcctctgggcgcttgggcagcgcggggtaaagaaaatcaggaggctccgcccgcagcttctacgaacaggccaggagtagagcccccgcacgtagtaggtgctccaggcacgtctagaagcctaaagggcttggtcgatacatttgaactccattttagagactggaagggaagaaggggg

SEQ ID NO: 420003 - DNA, 485 bp, Homo sapiens; identical to SEQ ID NO: 286207
  chr8:134584529-134585014
  hyper

SEQ ID NO: 420004 - DNA, 90 bp, Homo sapiens; identical to SEQ ID NO: 286208
  chr8:134585080-134585170
  hyper

SEQ ID NO: 420005 - DNA, 37 bp, Homo sapiens; identical to SEQ ID NO: 233950
  chr8:135844538-135844575
  hyper

SEQ ID NO: 420006 - DNA, 111 bp, Homo sapiens; identical to SEQ ID NO: 286210
  chr8:136468961-136469072
  hyper

SEQ ID NO: 420007 - DNA, 203 bp, Homo sapiens; identical to SEQ ID NO: 201610
  chr8:140716452-140716655
  hyper

SEQ ID NO: 420008 - DNA, 188 bp, Homo sapiens; identical to SEQ ID NO: 223497
  chr8:141260487-141260675
  hyper

SEQ ID NO: 420009 - DNA, 81 bp, Homo sapiens; identical to SEQ ID NO: 201611
  chr8:141644414-141644495
  hyper

SEQ ID NO: 420010 - DNA, 145 bp, Homo sapiens; identical to SEQ ID NO: 233958
  chr8:141647528-141647673
  hyper

SEQ ID NO: 420011 - DNA, 761 bp, Homo sapiens; identical to SEQ ID NO: 201612
  chr8:142010302-142011063
  hyper

SEQ ID NO: 420012 - DNA, 1210 bp, Homo sapiens; identical to SEQ ID NO: 45893
  chr8:142011091-142012301
  hyper

SEQ ID NO: 420013 - DNA, 57 bp, Homo sapiens; identical to SEQ ID NO: 233965
  chr8:142140082-142140139
  hyper

SEQ ID NO: 420014 - DNA, 42 bp, Homo sapiens; identical to SEQ ID NO: 226542
  chr8:142141062-142141104
  hyper

SEQ ID NO: 420015 - DNA, 159 bp, Homo sapiens; identical to SEQ ID NO: 286224
  chr8:142297598-142297757
  hyper

SEQ ID NO: 420016 - DNA, 233 bp, Homo sapiens; identical to SEQ ID NO: 286227
  chr8:142425567-142425800
  hyper

SEQ ID NO: 420017 - DNA, 41 bp, Homo sapiens; identical to SEQ ID NO: 201620
  chr8:143429133-143429174
  hyper

SEQ ID NO: 420018 - DNA, 49 bp, Homo sapiens; identical to SEQ ID NO: 286234
  chr8:143592687-143592736
  hyper

SEQ ID NO: 420019 - DNA, 1065 bp, Homo sapiens; identical to SEQ ID NO: 286238
  chr8:144099693-144100758
  hyper

SEQ ID NO: 420020 - DNA, 240 bp, Homo sapiens; identical to SEQ ID NO: 233981
  chr8:144162347-144162587
  hyper

SEQ ID NO: 420021 - DNA, 273 bp, Homo sapiens; identical to SEQ ID NO: 233985
  chr8:144373098-144373371
  hyper

SEQ ID NO: 420022 - DNA, 135 bp, Homo sapiens; identical to SEQ ID NO: 223520
  chr8:144484160-144484295
  hyper

SEQ ID NO: 420023 - DNA, 96 bp, Homo sapiens; identical to SEQ ID NO: 286245
  chr8:144503284-144503380
  hyper

SEQ ID NO: 420024 - DNA, 96 bp, Homo sapiens; identical to SEQ ID NO: 286246
  chr8:144503726-144503822
  hyper

SEQ ID NO: 420025 - DNA, 268 bp, Homo sapiens; identical to SEQ ID NO: 201627
  chr8:144508751-144509019
  hyper

SEQ ID NO: 420026 - DNA, 303 bp, Homo sapiens; identical to SEQ ID NO: 384271
  chr8:144512510-144512813
  hyper

SEQ ID NO: 420027 - DNA, 65 bp, Homo sapiens; identical to SEQ ID NO: 201628
  chr8:144594949-144595014
  hyper

SEQ ID NO: 420028 - DNA, 170 bp, Homo sapiens; identical to SEQ ID NO: 201629
  chr8:144614411-144614581
  hyper

SEQ ID NO: 420029 - DNA, 281 bp, Homo sapiens; identical to SEQ ID NO: 233992
  chr8:144635847-144636128
  hyper

SEQ ID NO: 420030 - DNA, 56 bp, Homo sapiens; identical to SEQ ID NO: 398081
  chr8:144640321-144640377
  hyper

SEQ ID NO: 420031 - DNA, 32 bp, Homo sapiens; identical to SEQ ID NO: 286256
  chr8:144653958-144653990
  hyper

SEQ ID NO: 420032 - DNA, 85 bp, Homo sapiens; identical to SEQ ID NO: 223525
  chr8:144680874-144680959
  hyper

SEQ ID NO: 420033 - DNA, 53 bp, Homo sapiens; identical to SEQ ID NO: 201633
  chr8:144691796-144691849
  hyper

SEQ ID NO: 420034 - DNA, 44 bp, Homo sapiens; identical to SEQ ID NO: 233996
  chr8:144692239-144692283
  hyper

SEQ ID NO: 420035 - DNA, 200 bp, Homo sapiens; identical to SEQ ID NO: 233997
  chr8:145149554-145149754
  hyper

SEQ ID NO: 420036 - DNA, 61 bp, Homo sapiens; identical to SEQ ID NO: 201634
  chr8:145687374-145687435
  hyper

SEQ ID NO: 420037 - DNA, 207 bp, Homo sapiens; identical to SEQ ID NO: 286263
  chr8:145697349-145697556
  hyper

SEQ ID NO: 420038 - DNA, 41 bp, Homo sapiens; identical to SEQ ID NO: 286265
  chr8:145700801-145700842
  hyper

SEQ ID NO: 420039 - DNA, 477 bp, Homo sapiens; identical to SEQ ID NO: 223529
  chr8:145726121-145726598
  hyper

SEQ ID NO: 420040 - DNA, 390 bp, Homo sapiens; identical to SEQ ID NO: 234005
  chr8:145909602-145909992
  hyper

SEQ ID NO: 420041 - DNA, 95 bp, Homo sapiens; identical to SEQ ID NO: 201639
  chr8:145910220-145910315
  hyper

SEQ ID NO: 420042 - DNA, 249 bp, Homo sapiens; identical to SEQ ID NO: 286271
  chr8:145910532-145910781
  hyper

SEQ ID NO: 420043 - DNA, 94 bp, Homo sapiens; identical to SEQ ID NO: 234008
  chr8:145981131-145981225
  hyper

SEQ ID NO: 420044 - DNA, 184 bp, Homo sapiens; identical to SEQ ID NO: 286274
  chr8:146052022-146052206
  hyper

SEQ ID NO: 420045 - DNA, 36 bp, Homo sapiens; identical to SEQ ID NO: 201641
  chr8:146078071-146078107
  hyper

SEQ ID NO: 420046 - DNA, 69 bp, Homo sapiens; identical to SEQ ID NO: 234011
  chr8:146278304-146278373
  hyper

SEQ ID NO: 420047 - DNA, 243 bp, Homo sapiens; identical to SEQ ID NO: 234014
  chr9:470095-470338
  hyper

SEQ ID NO: 420048 - DNA, 138 bp, Homo sapiens; identical to SEQ ID NO: 286284
  chr9:706973-707111
  hyper

SEQ ID NO: 420049 - DNA, 239 bp, Homo sapiens; identical to SEQ ID NO: 45981
  chr9:707165-707404
  hyper

SEQ ID NO: 420050 - DNA, 115 bp, Homo sapiens; identical to SEQ ID NO: 234019
  chr9:968066-968181
  hyper

SEQ ID NO: 420051 - DNA, 214 bp, Homo sapiens; identical to SEQ ID NO: 286288
  chr9:971638-971852
  hyper

SEQ ID NO: 420052 - DNA, 87 bp, Homo sapiens; identical to SEQ ID NO: 286289
  chr9:974427-974514
  hyper

SEQ ID NO: 420053 - DNA, 47 bp, Homo sapiens; identical to SEQ ID NO: 286290
  chr9:975070-975117
  hyper

SEQ ID NO: 420054 - DNA, 114 bp, Homo sapiens; identical to SEQ ID NO: 388630
  chr9:975167-975281
  hyper

SEQ ID NO: 420055 - DNA, 210 bp, Homo sapiens; identical to SEQ ID NO: 201646
  chr9:976961-977171
  hyper

SEQ ID NO: 420056 - DNA, 263 bp, Homo sapiens; identical to SEQ ID NO: 286293
  chr9:1049910-1050173
  hyper

SEQ ID NO: 420057 - DNA, 283 bp, Homo sapiens; identical to SEQ ID NO: 46004
  chr9:1050390-1050673
  hyper

SEQ ID NO: 420058 - DNA, 161 bp, Homo sapiens; identical to SEQ ID NO: 234028
  chr9:2014343-2014504
  hyper

SEQ ID NO: 420059 - DNA, 182 bp, Homo sapiens; identical to SEQ ID NO: 234029
  chr9:2015621-2015803
  hyper

SEQ ID NO: 420060 - DNA, 98 bp, Homo sapiens; identical to SEQ ID NO: 286297
  chr9:2621195-2621293
  hyper

SEQ ID NO: 420061 - DNA, 207 bp, Homo sapiens; identical to SEQ ID NO: 286298
  chr9:2621726-2621933
  hyper

SEQ ID NO: 420062 - DNA, 686 bp, Homo sapiens; identical to SEQ ID NO: 286299
  chr9:2622256-2622942
  hyper

SEQ ID NO: 420063 - DNA, 438 bp, Homo sapiens; identical to SEQ ID NO: 201650
  chr9:2623022-2623460
  hyper

SEQ ID NO: 420064 - DNA, 320 bp, Homo sapiens; identical to SEQ ID NO: 234035
  chr9:4491100-4491420
  hyper

SEQ ID NO: 420065 - DNA, 99 bp, Homo sapiens; identical to SEQ ID NO: 201655
  chr9:5022028-5022127
  hyper

SEQ ID NO: 420066 - DNA, 248 bp, Homo sapiens; identical to SEQ ID NO: 201656
  chr9:5054640-5054888
  hyper

SEQ ID NO: 420067 - DNA, 82 bp, Homo sapiens; identical to SEQ ID NO: 201657
  chr9:5069924-5070006
  hyper

SEQ ID NO: 420068 - DNA, 152 bp, Homo sapiens; identical to SEQ ID NO: 201658
  chr9:5080228-5080380
  hyper

SEQ ID NO: 420069 - DNA, 99 bp, Homo sapiens; identical to SEQ ID NO: 201659
  chr9:5081712-5081811
  hyper

SEQ ID NO: 420070 - DNA, 248 bp, Homo sapiens; identical to SEQ ID NO: 234037
  chr9:6414082-6414330
  hyper

SEQ ID NO: 420071 - DNA, 155 bp, Homo sapiens; identical to SEQ ID NO: 234041
  chr9:12775118-12775273
  hyper

SEQ ID NO: 420072 - DNA, 178 bp, Homo sapiens; identical to SEQ ID NO: 286319
  chr9:12775486-12775664
  hyper

SEQ ID NO: 420073 - DNA, 337 bp, Homo sapiens; identical to SEQ ID NO: 286320
  chr9:12775826-12776163
  hyper

SEQ ID NO: 420074 - DNA, 369 bp, Homo sapiens; identical to SEQ ID NO: 286321
  chr9:12776216-12776585
  hyper

SEQ ID NO: 420075 - DNA, 335 bp, Homo sapiens; identical to SEQ ID NO: 201668
  chr9:13034172-13034507
  hyper

SEQ ID NO: 420076 - DNA, 186 bp, Homo sapiens; identical to SEQ ID NO: 286326
  chr9:13568805-13568991
  hyper

SEQ ID NO: 420077 - DNA, 63 bp, Homo sapiens; identical to SEQ ID NO: 286327
  chr9:13569061-13569124
  hyper

SEQ ID NO: 420078 - DNA, 223 bp, Homo sapiens; identical to SEQ ID NO: 201671
  chr9:14313096-14313319
  hyper

SEQ ID NO: 420079 - DNA, 845 bp, Homo sapiens; identical to SEQ ID NO: 201674
  chr9:14322293-14323138
  hyper

SEQ ID NO: 420080 - DNA, 77 bp, Homo sapiens; identical to SEQ ID NO: 234052
  chr9:14347274-14347351
  hyper

SEQ ID NO: 420081 - DNA, 623 bp, Homo sapiens; identical to SEQ ID NO: 286334
  chr9:15306323-15306946
  hyper

SEQ ID NO: 420082 - DNA, 393 bp, Homo sapiens; identical to SEQ ID NO: 117474
  chr9:15306998-15307391
  hyper

SEQ ID NO: 420083 - DNA, 308 bp, Homo sapiens; identical to SEQ ID NO: 286339
  chr9:16870325-16870633
  hyper

SEQ ID NO: 420084 - DNA, 85 bp, Homo sapiens
  chr9:16871199-16871284
  hyper
ggcttgtttgttgtttgggttgttcttgctctctctttctggggatggaaaaaacaactttgtggggatggaaaaacaaccctgg

SEQ ID NO: 420085 - DNA, 38 bp, Homo sapiens; identical to SEQ ID NO: 286341
  chr9:17134993-17135031
  hyper

SEQ ID NO: 420086 - DNA, 62 bp, Homo sapiens; identical to SEQ ID NO: 286342
  chr9:17579748-17579810
  hyper

SEQ ID NO: 420087 - DNA, 301 bp, Homo sapiens; identical to SEQ ID NO: 234064
  chr9:18473916-18474217
  hyper

SEQ ID NO: 420088 - DNA, 149 bp, Homo sapiens; identical to SEQ ID NO: 234066
  chr9:19229764-19229913
  hyper

SEQ ID NO: 420089 - DNA, 1027 bp, Homo sapiens
  chr9:20621345-20622372
  hyper
gaaatggaaactacaggcagcctctgctgatgggcacaaactcccgtgctcttgccacggggttcgtgcacaacaaaaatgagacgtcgtcatacacactgaaacacacacacacgcccgcaggaaaacacgccgaggcatccataacttagagcaccccgcaccccccagcgaaaagccccacgcgatcggcgaggccagtcgaaccgagcccccgcaacacactttcaagagcccaagtggctccaaagtatctcccacctccccccaaaaaatgaaattcagaaaggcagggcggcgggcggacagccgccgagcctcggctcgcgctcagcacctcccggcgctggggcaaagttgcgtgcggccccgccgctgtcagccccgcacacttcggctcacacacgcgcgccgcggagaacgcaccatcgtagcggccgcggcgctttgcggaggtgcggccgccgaggctgctcgccgcgtccccggactgtgcccgcagctcccggcggcggcggctgaaatatggctgagttattattcgcctccttccaccgtgtgtgtgtgtgtgtgtgagtgcgcgcgtgtgagcgagagggagtgtgtgagtgcgcttcttgtgactgcaaagaggcgaggagggagggaggcgcggggggtggaggggcgagtgtgagcgtgtgtgagtgtgtgtgtgtctgtgtgtctgtgtgcgcgccgggggggggtgggggaggaggggagcggaggctgagggagaggcggcagctccctgcaagccgtaccaacctttctctaattggaaccgcggagcgctggcgctgtctgggctgcggcggcgcagggcgaggaaggaaagtgggggagggcttttattattatttttgcgcgtacttaccgagctagccatgcctgggggcccggaggtttgctggggtgttgtgtggtacccccccctcctccgccccccctcagctgtaattcatgaagaggctgctatgaatgagagcgcgcccaggagcggagg

SEQ ID NO: 420090 - DNA, 35 bp, Homo sapiens; identical to SEQ ID NO: 223568
  chr9:21032003-21032038
  hyper

SEQ ID NO: 420091 - DNA, 68 bp, Homo sapiens; identical to SEQ ID NO: 223569
  chr9:21802584-21802652
  hyper

SEQ ID NO: 420092 - DNA, 136 bp, Homo sapiens; identical to SEQ ID NO: 286358
  chr9:21967409-21967545
  hyper

SEQ ID NO: 420093 - DNA, 161 bp, Homo sapiens; identical to SEQ ID NO: 286360
  chr9:21995749-21995910
  hyper

SEQ ID NO: 420094 - DNA, 90 bp, Homo sapiens; identical to SEQ ID NO: 286361
  chr9:22005969-22006059
  hyper

SEQ ID NO: 420095 - DNA, 59 bp, Homo sapiens; identical to SEQ ID NO: 388639
  chr9:22447429-22447488
  hyper

SEQ ID NO: 420096 - DNA, 72 bp, Homo sapiens; identical to SEQ ID NO: 286364
  chr9:23821662-23821734
  hyper

SEQ ID NO: 420097 - DNA, 95 bp, Homo sapiens; identical to SEQ ID NO: 286365
  chr9:23822017-23822112
  hyper

SEQ ID NO: 420098 - DNA, 353 bp, Homo sapiens; identical to SEQ ID NO: 286366
  chr9:23825940-23826293
  hyper

SEQ ID NO: 420099 - DNA, 47 bp, Homo sapiens; identical to SEQ ID NO: 286367
  chr9:23826475-23826522
  hyper

SEQ ID NO: 420100 - DNA, 37 bp, Homo sapiens; identical to SEQ ID NO: 234086
  chr9:23830865-23830902
  hyper

SEQ ID NO: 420101 - DNA, 169 bp, Homo sapiens; identical to SEQ ID NO: 286371
  chr9:23850241-23850410
  hyper

SEQ ID NO: 420102 - DNA, 293 bp, Homo sapiens; identical to SEQ ID NO: 286372
  chr9:23851182-23851475
  hyper

SEQ ID NO: 420103 - DNA, 92 bp, Homo sapiens; identical to SEQ ID NO: 286373
  chr9:25677513-25677605
  hyper

SEQ ID NO: 420104 - DNA, 426 bp, Homo sapiens; identical to SEQ ID NO: 286374
  chr9:25677627-25678053
  hyper

SEQ ID NO: 420105 - DNA, 490 bp, Homo sapiens; identical to SEQ ID NO: 286375
  chr9:25678127-25678617
  hyper

SEQ ID NO: 420106 - DNA, 688 bp, Homo sapiens; identical to SEQ ID NO: 234093
  chr9:26892268-26892956
  hyper

SEQ ID NO: 420107 - DNA, 63 bp, Homo sapiens; identical to SEQ ID NO: 234094
  chr9:26956461-26956524
  hyper

SEQ ID NO: 420108 - DNA, 225 bp, Homo sapiens; identical to SEQ ID NO: 234100
  chr9:33166527-33166752
  hyper

SEQ ID NO: 420109 - DNA, 85 bp, Homo sapiens; identical to SEQ ID NO: 234101
  chr9:33290497-33290582
  hyper

SEQ ID NO: 420110 - DNA, 60 bp, Homo sapiens; identical to SEQ ID NO: 286384
  chr9:33524278-33524338
  hyper

SEQ ID NO: 420111 - DNA, 121 bp, Homo sapiens; identical to SEQ ID NO: 234104
  chr9:33816693-33816814
  hyper

SEQ ID NO: 420112 - DNA, 191 bp, Homo sapiens; identical to SEQ ID NO: 234105
  chr9:34178911-34179102
  hyper

SEQ ID NO: 420113 - DNA, 51 bp, Homo sapiens; identical to SEQ ID NO: 201695
  chr9:34377388-34377439
  hyper

SEQ ID NO: 420114 - DNA, 155 bp, Homo sapiens; identical to SEQ ID NO: 234109
  chr9:34458519-34458674
  hyper

SEQ ID NO: 420115 - DNA, 291 bp, Homo sapiens; identical to SEQ ID NO: 286391
  chr9:34589598-34589889
  hyper

SEQ ID NO: 420116 - DNA, 77 bp, Homo sapiens; identical to SEQ ID NO: 201697
  chr9:34646925-34647002
  hyper

SEQ ID NO: 420117 - DNA, 82 bp, Homo sapiens; identical to SEQ ID NO: 201698
  chr9:34647225-34647307
  hyper

SEQ ID NO: 420118 - DNA, 172 bp, Homo sapiens; identical to SEQ ID NO: 286399
  chr9:34957704-34957876
  hyper

SEQ ID NO: 420119 - DNA, 345 bp, Homo sapiens; identical to SEQ ID NO: 286400
  chr9:34958128-34958473
  hyper

SEQ ID NO: 420120 - DNA, 36 bp, Homo sapiens; identical to SEQ ID NO: 234116
  chr9:34989007-34989043
  hyper

SEQ ID NO: 420121 - DNA, 33 bp, Homo sapiens; identical to SEQ ID NO: 201699
  chr9:35072284-35072317
  hyper

SEQ ID NO: 420122 - DNA, 228 bp, Homo sapiens; identical to SEQ ID NO: 234117
  chr9:35096044-35096272
  hyper

SEQ ID NO: 420123 - DNA, 179 bp, Homo sapiens; identical to SEQ ID NO: 201700
  chr9:35116361-35116540
  hyper

SEQ ID NO: 420124 - DNA, 131 bp, Homo sapiens; identical to SEQ ID NO: 201703
  chr9:35489689-35489820
  hyper

SEQ ID NO: 420125 - DNA, 46 bp, Homo sapiens; identical to SEQ ID NO: 234121
  chr9:35490107-35490153
  hyper

SEQ ID NO: 420126 - DNA, 59 bp, Homo sapiens; identical to SEQ ID NO: 286409
  chr9:35617365-35617424
  hyper

SEQ ID NO: 420127 - DNA, 73 bp, Homo sapiens; identical to SEQ ID NO: 234125
  chr9:35676258-35676331
  hyper

SEQ ID NO: 420128 - DNA, 145 bp, Homo sapiens; identical to SEQ ID NO: 201705
  chr9:35814690-35814835
  hyper

SEQ ID NO: 420129 - DNA, 231 bp, Homo sapiens; identical to SEQ ID NO: 234127
  chr9:35815225-35815456
  hyper

SEQ ID NO: 420130 - DNA, 998 bp, Homo sapiens; identical to SEQ ID NO: 234129
  chr9:36136266-36137264
  hyper

SEQ ID NO: 420131 - DNA, 70 bp, Homo sapiens; identical to SEQ ID NO: 201708
  chr9:36257445-36257515
  hyper

SEQ ID NO: 420132 - DNA, 220 bp, Homo sapiens; identical to SEQ ID NO: 234132
  chr9:36572867-36573087
  hyper

SEQ ID NO: 420133 - DNA, 50 bp, Homo sapiens; identical to SEQ ID NO: 201709
  chr9:37030790-37030840
  hyper

SEQ ID NO: 420134 - DNA, 111 bp, Homo sapiens; identical to SEQ ID NO: 234147
  chr9:37465508-37465619
  hyper

SEQ ID NO: 420135 - DNA, 148 bp, Homo sapiens; identical to SEQ ID NO: 234148
  chr9:37466215-37466363
  hyper

SEQ ID NO: 420136 - DNA, 104 bp, Homo sapiens; identical to SEQ ID NO: 234149
  chr9:37485788-37485892
  hyper

SEQ ID NO: 420137 - DNA, 43 bp, Homo sapiens; identical to SEQ ID NO: 286426
  chr9:37576015-37576058
  hyper

SEQ ID NO: 420138 - DNA, 234 bp, Homo sapiens; identical to SEQ ID NO: 286427
  chr9:37576349-37576583
  hyper

SEQ ID NO: 420139 - DNA, 45 bp, Homo sapiens; identical to SEQ ID NO: 286428
  chr9:37998720-37998765
  hyper

SEQ ID NO: 420140 - DNA, 95 bp, Homo sapiens; identical to SEQ ID NO: 201712
  chr9:38067583-38067678
  hyper

SEQ ID NO: 420141 - DNA, 413 bp, Homo sapiens; identical to SEQ ID NO: 201713
  chr9:38067708-38068121
  hyper

SEQ ID NO: 420142 - DNA, 749 bp, Homo sapiens; identical to SEQ ID NO: 201714
  chr9:38068158-38068907
  hyper

SEQ ID NO: 420143 - DNA, 188 bp, Homo sapiens; identical to SEQ ID NO: 201715
  chr9:38069786-38069974
  hyper

SEQ ID NO: 420144 - DNA, 40 bp, Homo sapiens; identical to SEQ ID NO: 286433
  chr9:38424026-38424066
  hyper

SEQ ID NO: 420145 - DNA, 221 bp, Homo sapiens; identical to SEQ ID NO: 286434
  chr9:38424081-38424302
  hyper

SEQ ID NO: 420146 - DNA, 42 bp, Homo sapiens; identical to SEQ ID NO: 398155
  chr9:38620839-38620881
  hyper

SEQ ID NO: 420147 - DNA, 343 bp, Homo sapiens; identical to SEQ ID NO: 286438
  chr9:38621986-38622329
  hyper

SEQ ID NO: 420148 - DNA, 120 bp, Homo sapiens; identical to SEQ ID NO: 234157
  chr9:66455089-66455209
  hyper

SEQ ID NO: 420149 - DNA, 52 bp, Homo sapiens; identical to SEQ ID NO: 286440
  chr9:66455877-66455929
  hyper

SEQ ID NO: 420150 - DNA, 477 bp, Homo sapiens; identical to SEQ ID NO: 234161
  chr9:71319341-71319818
  hyper

SEQ ID NO: 420151 - DNA, 35 bp, Homo sapiens; identical to SEQ ID NO: 201719
  chr9:71320186-71320221
  hyper

SEQ ID NO: 420152 - DNA, 42 bp, Homo sapiens; identical to SEQ ID NO: 223596
  chr9:71736563-71736605
  hyper

SEQ ID NO: 420153 - DNA, 308 bp, Homo sapiens; identical to SEQ ID NO: 234165
  chr9:71736985-71737293
  hyper

SEQ ID NO: 420154 - DNA, 229 bp, Homo sapiens; identical to SEQ ID NO: 286451
  chr9:71939504-71939733
  hyper

SEQ ID NO: 420155 - DNA, 232 bp, Homo sapiens; identical to SEQ ID NO: 286452
  chr9:71939984-71940216
  hyper

SEQ ID NO: 420156 - DNA, 381 bp, Homo sapiens; identical to SEQ ID NO: 117678
  chr9:71940263-71940644
  hyper

SEQ ID NO: 420157 - DNA, 52 bp, Homo sapiens; identical to SEQ ID NO: 234169
  chr9:72288142-72288194
  hyper

SEQ ID NO: 420158 - DNA, 189 bp, Homo sapiens; identical to SEQ ID NO: 234170
  chr9:72435610-72435799
  hyper

SEQ ID NO: 420159 - DNA, 178 bp, Homo sapiens; identical to SEQ ID NO: 286456
  chr9:72874088-72874266
  hyper

SEQ ID NO: 420160 - DNA, 385 bp, Homo sapiens; identical to SEQ ID NO: 201725
  chr9:73027584-73027969
  hyper

SEQ ID NO: 420161 - DNA, 733 bp, Homo sapiens; identical to SEQ ID NO: 201726
  chr9:73028305-73029038
  hyper

SEQ ID NO: 420162 - DNA, 254 bp, Homo sapiens; identical to SEQ ID NO: 234174
  chr9:73033410-73033664
  hyper

SEQ ID NO: 420163 - DNA, 35 bp, Homo sapiens; identical to SEQ ID NO: 234175
  chr9:74382903-74382938
  hyper

SEQ ID NO: 420164 - DNA, 96 bp, Homo sapiens
  chr9:74640165-74640261
  hyper
gagtcctgttgtcccttctcatgcaaagagacttctatggtggtcaactttagagatcctgacttgatttaattaaaggatattgctggttttttt

SEQ ID NO: 420165 - DNA, 49 bp, Homo sapiens; identical to SEQ ID NO: 201730
  chr9:74979547-74979596
  hyper

SEQ ID NO: 420166 - DNA, 32 bp, Homo sapiens; identical to SEQ ID NO: 234178
  chr9:74980723-74980755
  hyper

SEQ ID NO: 420167 - DNA, 118 bp, Homo sapiens; identical to SEQ ID NO: 286468
  chr9:77114952-77115070
  hyper

SEQ ID NO: 420168 - DNA, 173 bp, Homo sapiens; identical to SEQ ID NO: 286469
  chr9:77115484-77115657
  hyper

SEQ ID NO: 420169 - DNA, 77 bp, Homo sapiens; identical to SEQ ID NO: 234186
  chr9:77567960-77568037
  hyper

SEQ ID NO: 420170 - DNA, 498 bp, Homo sapiens
  chr9:78504963-78505461
  hyper
ctcacttccaaggccggaattgtactctcccgtggcgttgcctagtatcgcagatttcgaaagtgagcaggcaacagacttggctttcgagccaattctaggagtcgatgcgacttactgtcctgtgtggtagcttctcccgggagcagaaagtgtaaaataaacagctgctgaaaagcatgaagaattaacgaagtgaaaatctcgagttatttgttcggcaattgacacgtaagtgacctccttaaatgcctagttatttaaggacgtttagaacgaggatgaatgaatcttcagggcggttaattcgcaccggcgtgtaaatttctttagtctttcgggaagtggcggtaaattcatacaaatccagcagggagggaagagaagggagtaaaaccacgatctcggagcgctcttctcagtcctttggaaagacttgcctttactgcccggaaccctggaggttacagctgggcgaacccggaggcgctaggacct

SEQ ID NO: 420171 - DNA, 620 bp, Homo sapiens; identical to SEQ ID NO: 286475
  chr9:78506732-78507352
  hyper

SEQ ID NO: 420172 - DNA, 231 bp, Homo sapiens; identical to SEQ ID NO: 201737
  chr9:78507353-78507584
  hyper

SEQ ID NO: 420173 - DNA, 142 bp, Homo sapiens; identical to SEQ ID NO: 234189
  chr9:79306756-79306898
  hyper

SEQ ID NO: 420174 - DNA, 284 bp, Homo sapiens; identical to SEQ ID NO: 398169
  chr9:80912480-80912764
  hyper

SEQ ID NO: 420175 - DNA, 505 bp, Homo sapiens; identical to SEQ ID NO: 398170
  chr9:82186172-82186677
  hyper

SEQ ID NO: 420176 - DNA, 492 bp, Homo sapiens; identical to SEQ ID NO: 286497
  chr9:82187755-82188247
  hyper

SEQ ID NO: 420177 - DNA, 1035 bp, Homo sapiens; identical to SEQ ID NO: 286499
  chr9:84302131-84303166
  hyper

SEQ ID NO: 420178 - DNA, 673 bp, Homo sapiens; identical to SEQ ID NO: 201755
  chr9:84303267-84303940
  hyper

SEQ ID NO: 420179 - DNA, 196 bp, Homo sapiens; identical to SEQ ID NO: 234211
  chr9:84304433-84304629
  hyper

SEQ ID NO: 420180 - DNA, 346 bp, Homo sapiens; identical to SEQ ID NO: 388661
  chr9:85677094-85677440
  hyper

SEQ ID NO: 420181 - DNA, 68 bp, Homo sapiens; identical to SEQ ID NO: 286504
  chr9:86152304-86152372
  hyper

SEQ ID NO: 420182 - DNA, 368 bp, Homo sapiens; identical to SEQ ID NO: 286505
  chr9:86152964-86153332
  hyper

SEQ ID NO: 420183 - DNA, 227 bp, Homo sapiens; identical to SEQ ID NO: 286506
  chr9:86153544-86153771
  hyper

SEQ ID NO: 420184 - DNA, 339 bp, Homo sapiens; identical to SEQ ID NO: 201757
  chr9:86238306-86238645
  hyper

SEQ ID NO: 420185 - DNA, 309 bp, Homo sapiens; identical to SEQ ID NO: 286508
  chr9:87282690-87282999
  hyper

SEQ ID NO: 420186 - DNA, 261 bp, Homo sapiens; identical to SEQ ID NO: 286510
  chr9:87284294-87284555
  hyper

SEQ ID NO: 420187 - DNA, 89 bp, Homo sapiens
  chr9:87284994-87285083
  hyper
tcccctttaaagggtccttcgcccggcctgtaccatggaatcctgtcttggggaccctttccctacctcccctcccttggcctcaggct

SEQ ID NO: 420188 - DNA, 59 bp, Homo sapiens
  chr9:88356012-88356071
  hyper
gcaattcaggaaggaagacactaaggaaactctgcactgtcatccagggtgatctgatt

SEQ ID NO: 420189 - DNA, 224 bp, Homo sapiens; identical to SEQ ID NO: 234221
  chr9:88713662-88713886
  hyper

SEQ ID NO: 420190 - DNA, 267 bp, Homo sapiens; identical to SEQ ID NO: 234222
  chr9:88714740-88715007
  hyper

SEQ ID NO: 420191 - DNA, 219 bp, Homo sapiens; identical to SEQ ID NO: 201762
  chr9:89560475-89560694
  hyper

SEQ ID NO: 420192 - DNA, 289 bp, Homo sapiens
  chr9:89562273-89562562
  hyper
ggcctccgcagagctccggggagctctttccgggaagcgcggggagaacaagaaagtcggcgctgccggagagcggctccctggcttcactcggcggcagcttctcgggtgaccaagagcccggggagcggatccgctgagcccggctgcagactcgttagcagcgaggctttaaatacaaaagtgggccgggagcccccgcgtggtgccgcggtgccccctcattatgcatgcatggaaaagcaaacaaacaaaaacattagcaacgctcctccggctcgccgagccc

SEQ ID NO: 420193 - DNA, 66 bp, Homo sapiens; identical to SEQ ID NO: 286520
  chr9:90112364-90112430
  hyper

SEQ ID NO: 420194 - DNA, 305 bp, Homo sapiens; identical to SEQ ID NO: 286527
  chr9:90589287-90589592
  hyper

SEQ ID NO: 420195 - DNA, 44 bp, Homo sapiens; identical to SEQ ID NO: 286528
  chr9:90589776-90589820
  hyper

SEQ ID NO: 420196 - DNA, 785 bp, Homo sapiens; identical to SEQ ID NO: 286529
  chr9:90691187-90691972
  hyper

SEQ ID NO: 420197 - DNA, 308 bp, Homo sapiens; identical to SEQ ID NO: 234229
  chr9:91002684-91002992
  hyper

SEQ ID NO: 420198 - DNA, 137 bp, Homo sapiens; identical to SEQ ID NO: 201777
  chr9:91793599-91793736
  hyper

SEQ ID NO: 420199 - DNA, 183 bp, Homo sapiens; identical to SEQ ID NO: 234234
  chr9:92220603-92220786
  hyper

SEQ ID NO: 420200 - DNA, 31 bp, Homo sapiens; identical to SEQ ID NO: 234236
  chr9:93563762-93563793
  hyper

SEQ ID NO: 420201 - DNA, 275 bp, Homo sapiens; identical to SEQ ID NO: 286539
  chr9:93564135-93564410
  hyper

SEQ ID NO: 420202 - DNA, 343 bp, Homo sapiens; identical to SEQ ID NO: 286543
  chr9:94186868-94187211
  hyper

SEQ ID NO: 420203 - DNA, 110 bp, Homo sapiens; identical to SEQ ID NO: 286544
  chr9:94187243-94187353
  hyper

SEQ ID NO: 420204 - DNA, 130 bp, Homo sapiens; identical to SEQ ID NO: 234244
  chr9:95056116-95056246
  hyper

SEQ ID NO: 420205 - DNA, 136 bp, Homo sapiens; identical to SEQ ID NO: 234245
  chr9:95088346-95088482
  hyper

SEQ ID NO: 420206 - DNA, 60 bp, Homo sapiens; identical to SEQ ID NO: 201782
  chr9:95570721-95570781
  hyper

SEQ ID NO: 420207 - DNA, 54 bp, Homo sapiens; identical to SEQ ID NO: 286549
  chr9:95572268-95572322
  hyper

SEQ ID NO: 420208 - DNA, 65 bp, Homo sapiens; identical to SEQ ID NO: 286550
  chr9:95709628-95709693
  hyper

SEQ ID NO: 420209 - DNA, 40 bp, Homo sapiens
  chr9:95946789-95946829
  hyper
gggccactgccttcctcccacccccgggcttccctatccc

SEQ ID NO: 420210 - DNA, 271 bp, Homo sapiens; identical to SEQ ID NO: 201786
  chr9:95946859-95947130
  hyper

SEQ ID NO: 420211 - DNA, 176 bp, Homo sapiens; identical to SEQ ID NO: 201787
  chr9:95947296-95947472
  hyper

SEQ ID NO: 420212 - DNA, 89 bp, Homo sapiens; identical to SEQ ID NO: 117831
  chr9:95947484-95947573
  hyper

SEQ ID NO: 420213 - DNA, 244 bp, Homo sapiens; identical to SEQ ID NO: 234252
  chr9:96215823-96216067
  hyper

SEQ ID NO: 420214 - DNA, 34 bp, Homo sapiens; identical to SEQ ID NO: 201790
  chr9:96712753-96712787
  hyper

SEQ ID NO: 420215 - DNA, 383 bp, Homo sapiens; identical to SEQ ID NO: 201791
  chr9:96714479-96714862
  hyper

SEQ ID NO: 420216 - DNA, 86 bp, Homo sapiens; identical to SEQ ID NO: 286563
  chr9:96716245-96716331
  hyper

SEQ ID NO: 420217 - DNA, 255 bp, Homo sapiens; identical to SEQ ID NO: 234264
  chr9:96929092-96929347
  hyper

SEQ ID NO: 420218 - DNA, 189 bp, Homo sapiens; identical to SEQ ID NO: 286567
  chr9:97402080-97402269
  hyper

SEQ ID NO: 420219 - DNA, 471 bp, Homo sapiens; identical to SEQ ID NO: 286569
  chr9:97810932-97811403
  hyper

SEQ ID NO: 420220 - DNA, 60 bp, Homo sapiens; identical to SEQ ID NO: 223636
  chr9:98189305-98189365
  hyper

SEQ ID NO: 420221 - DNA, 46 bp, Homo sapiens; identical to SEQ ID NO: 201798
  chr9:98268140-98268186
  hyper

SEQ ID NO: 420222 - DNA, 313 bp, Homo sapiens; identical to SEQ ID NO: 286573
  chr9:98278353-98278666
  hyper

SEQ ID NO: 420223 - DNA, 468 bp, Homo sapiens; identical to SEQ ID NO: 286574
  chr9:98278719-98279187
  hyper

SEQ ID NO: 420224 - DNA, 151 bp, Homo sapiens; identical to SEQ ID NO: 234270
  chr9:98637318-98637469
  hyper

SEQ ID NO: 420225 - DNA, 491 bp, Homo sapiens; identical to SEQ ID NO: 286578
  chr9:99145529-99146020
  hyper

SEQ ID NO: 420226 - DNA, 238 bp, Homo sapiens; identical to SEQ ID NO: 117890
  chr9:99181499-99181737
  hyper

SEQ ID NO: 420227 - DNA, 155 bp, Homo sapiens; identical to SEQ ID NO: 286580
  chr9:99380838-99380993
  hyper

SEQ ID NO: 420228 - DNA, 426 bp, Homo sapiens; identical to SEQ ID NO: 286581
  chr9:99381077-99381503
  hyper

SEQ ID NO: 420229 - DNA, 629 bp, Homo sapiens; identical to SEQ ID NO: 201802
  chr9:99381680-99382309
  hyper

SEQ ID NO: 420230 - DNA, 240 bp, Homo sapiens; identical to SEQ ID NO: 201803
  chr9:99416950-99417190
  hyper

SEQ ID NO: 420231 - DNA, 409 bp, Homo sapiens; identical to SEQ ID NO: 201804
  chr9:99417397-99417806
  hyper

SEQ ID NO: 420232 - DNA, 74 bp, Homo sapiens; identical to SEQ ID NO: 286585
  chr9:99449021-99449095
  hyper

SEQ ID NO: 420233 - DNA, 121 bp, Homo sapiens; identical to SEQ ID NO: 201805
  chr9:99539844-99539965
  hyper

SEQ ID NO: 420234 - DNA, 646 bp, Homo sapiens; identical to SEQ ID NO: 286587
  chr9:99540006-99540652
  hyper

SEQ ID NO: 420235 - DNA, 450 bp, Homo sapiens; identical to SEQ ID NO: 201807
  chr9:99801107-99801557
  hyper

SEQ ID NO: 420236 - DNA, 229 bp, Homo sapiens; identical to SEQ ID NO: 234288
  chr9:100459620-100459849
  hyper

SEQ ID NO: 420237 - DNA, 303 bp, Homo sapiens; identical to SEQ ID NO: 201811
  chr9:100565762-100566065
  hyper

SEQ ID NO: 420238 - DNA, 194 bp, Homo sapiens; identical to SEQ ID NO: 234295
  chr9:100818670-100818864
  hyper

SEQ ID NO: 420239 - DNA, 78 bp, Homo sapiens; identical to SEQ ID NO: 286601
  chr9:101472009-101472087
  hyper

SEQ ID NO: 420240 - DNA, 64 bp, Homo sapiens; identical to SEQ ID NO: 201814
  chr9:101558886-101558950
  hyper

SEQ ID NO: 420241 - DNA, 42 bp, Homo sapiens; identical to SEQ ID NO: 286604
  chr9:101559227-101559269
  hyper

SEQ ID NO: 420242 - DNA, 55 bp, Homo sapiens; identical to SEQ ID NO: 286606
  chr9:101706896-101706951
  hyper

SEQ ID NO: 420243 - DNA, 96 bp, Homo sapiens; identical to SEQ ID NO: 201817
  chr9:101866822-101866918
  hyper

SEQ ID NO: 420244 - DNA, 147 bp, Homo sapiens; identical to SEQ ID NO: 234306
  chr9:102585801-102585948
  hyper

SEQ ID NO: 420245 - DNA, 89 bp, Homo sapiens; identical to SEQ ID NO: 286611
  chr9:103190036-103190125
  hyper

SEQ ID NO: 420246 - DNA, 412 bp, Homo sapiens; identical to SEQ ID NO: 286612
  chr9:103235930-103236342
  hyper

SEQ ID NO: 420247 - DNA, 36 bp, Homo sapiens; identical to SEQ ID NO: 201822
  chr9:103791704-103791740
  hyper

SEQ ID NO: 420248 - DNA, 156 bp, Homo sapiens; identical to SEQ ID NO: 286616
  chr9:103792080-103792236
  hyper

SEQ ID NO: 420249 - DNA, 227 bp, Homo sapiens; identical to SEQ ID NO: 234311
  chr9:104161277-104161504
  hyper

SEQ ID NO: 420250 - DNA, 79 bp, Homo sapiens; identical to SEQ ID NO: 286620
  chr9:107526188-107526267
  hyper

SEQ ID NO: 420251 - DNA, 330 bp, Homo sapiens; identical to SEQ ID NO: 234315
  chr9:108455719-108456049
  hyper

SEQ ID NO: 420252 - DNA, 140 bp, Homo sapiens; identical to SEQ ID NO: 201826
  chr9:109623658-109623798
  hyper

SEQ ID NO: 420253 - DNA, 349 bp, Homo sapiens; identical to SEQ ID NO: 286626
  chr9:109624113-109624462
  hyper

SEQ ID NO: 420254 - DNA, 164 bp, Homo sapiens; identical to SEQ ID NO: 201828
  chr9:109624564-109624728
  hyper

SEQ ID NO: 420255 - DNA, 267 bp, Homo sapiens; identical to SEQ ID NO: 398209
  chr9:110250832-110251099
  hyper

SEQ ID NO: 420256 - DNA, 259 bp, Homo sapiens; identical to SEQ ID NO: 201831
  chr9:110251129-110251388
  hyper

SEQ ID NO: 420257 - DNA, 44 bp, Homo sapiens; identical to SEQ ID NO: 201832
  chr9:110251418-110251462
  hyper

SEQ ID NO: 420258 - DNA, 189 bp, Homo sapiens; identical to SEQ ID NO: 234323
  chr9:111696912-111697101
  hyper

SEQ ID NO: 420259 - DNA, 869 bp, Homo sapiens
  chr9:112082633-112083502
  hyper
gtcccccagcccggcggccccgcgccccgccgcgccccgcgcgtagcgctgcatggagcggcggccaaaggtccggcgcaggaaccgcagcatcctggctgggggcgccccctgcctccgccccctgcgctgccgctgccgctgccgctgccgctgcgccgccgcccgggagcgtcccgcgacgccgtcagtgccctcggccgcccgcgccgcctctcgcgggctacggcccggggcaagcccgcgccgaggccgaggccgcgctctagccgcctgcggggcgcgccggcccggccagcgccggctgcgagtggccgcaggcgggagggcgcgctcggggccgtcccgccgccgccgccgccgcgcgctctcccgggccggcggcctgcgcgggctgccgaggggctgctccggacgggcggctgcgggctgccagggggctgccgggggcgcgggaggcgggctgcgggctgctcccgcgccgcgcgccggccgagggccagccggagcagggcgcctgcgtggtcctggcgcgctcgctcccactcgccgcgccgcgcccggggcccgaggaggccccgccgagcgcccgctcccaaggcgccttttcctgcgcccgcagcccccgcctcccacctgggaggctgcacctccagccgccgccgccgccgccgccgccgctgccgccgggactgcagcacgccctcctccctcggggctgcgccgggtaattgcaagccgggtctgtgctgccccctgccggcccgagcgccccctgctgctgtaggtgtgctcacgtgtgtacacgtaggtgagcacacacgtgtttccggcgcccagagccctggaggcgccgagtgcccctttgc

SEQ ID NO: 420260 - DNA, 292 bp, Homo sapiens; identical to SEQ ID NO: 234328
  chr9:112262008-112262300
  hyper

SEQ ID NO: 420261 - DNA, 108 bp, Homo sapiens; identical to SEQ ID NO: 201842
  chr9:112542127-112542235
  hyper

SEQ ID NO: 420262 - DNA, 56 bp, Homo sapiens
  chr9:113017643-113017699
  hyper
gttaggctctgggtttcccagtctacaaggttttaggcttgcaataactttcaaac

SEQ ID NO: 420263 - DNA, 31 bp, Homo sapiens; identical to SEQ ID NO: 286647
  chr9:113017729-113017760
  hyper

SEQ ID NO: 420264 - DNA, 101 bp, Homo sapiens; identical to SEQ ID NO: 286648
  chr9:113017835-113017936
  hyper

SEQ ID NO: 420265 - DNA, 220 bp, Homo sapiens; identical to SEQ ID NO: 201843
  chr9:113799864-113800084
  hyper

SEQ ID NO: 420266 - DNA, 269 bp, Homo sapiens; identical to SEQ ID NO: 201847
  chr9:114360505-114360774
  hyper

SEQ ID NO: 420267 - DNA, 109 bp, Homo sapiens; identical to SEQ ID NO: 286654
  chr9:114361074-114361183
  hyper

SEQ ID NO: 420268 - DNA, 341 bp, Homo sapiens; identical to SEQ ID NO: 201848
  chr9:114361444-114361785
  hyper

SEQ ID NO: 420269 - DNA, 238 bp, Homo sapiens; identical to SEQ ID NO: 286656
  chr9:114361815-114362053
  hyper

SEQ ID NO: 420270 - DNA, 192 bp, Homo sapiens; identical to SEQ ID NO: 223662
  chr9:114937755-114937947
  hyper

SEQ ID NO: 420271 - DNA, 43 bp, Homo sapiens; identical to SEQ ID NO: 234337
  chr9:115095506-115095549
  hyper

SEQ ID NO: 420272 - DNA, 34 bp, Homo sapiens; identical to SEQ ID NO: 234338
  chr9:115480611-115480645
  hyper

SEQ ID NO: 420273 - DNA, 68 bp, Homo sapiens; identical to SEQ ID NO: 234339
  chr9:115607127-115607195
  hyper

SEQ ID NO: 420274 - DNA, 232 bp, Homo sapiens; identical to SEQ ID NO: 201850
  chr9:115774339-115774571
  hyper

SEQ ID NO: 420275 - DNA, 183 bp, Homo sapiens; identical to SEQ ID NO: 286662
  chr9:115818681-115818864
  hyper

SEQ ID NO: 420276 - DNA, 332 bp, Homo sapiens; identical to SEQ ID NO: 286663
  chr9:115818917-115819249
  hyper

SEQ ID NO: 420277 - DNA, 215 bp, Homo sapiens; identical to SEQ ID NO: 234343
  chr9:116102325-116102540
  hyper

SEQ ID NO: 420278 - DNA, 137 bp, Homo sapiens; identical to SEQ ID NO: 234344
  chr9:116163725-116163862
  hyper

SEQ ID NO: 420279 - DNA, 242 bp, Homo sapiens; identical to SEQ ID NO: 286668
  chr9:116638746-116638988
  hyper

SEQ ID NO: 420280 - DNA, 94 bp, Homo sapiens; identical to SEQ ID NO: 201853
  chr9:116860421-116860515
  hyper

SEQ ID NO: 420281 - DNA, 135 bp, Homo sapiens; identical to SEQ ID NO: 286670
  chr9:116916214-116916349
  hyper

SEQ ID NO: 420282 - DNA, 347 bp, Homo sapiens; identical to SEQ ID NO: 286671
  chr9:116916570-116916917
  hyper

SEQ ID NO: 420283 - DNA, 145 bp, Homo sapiens; identical to SEQ ID NO: 286672
  chr9:116917003-116917148
  hyper

SEQ ID NO: 420284 - DNA, 157 bp, Homo sapiens; identical to SEQ ID NO: 201855
  chr9:117268030-117268187
  hyper

SEQ ID NO: 420285 - DNA, 109 bp, Homo sapiens; identical to SEQ ID NO: 201856
  chr9:118917079-118917188
  hyper

SEQ ID NO: 420286 - DNA, 161 bp, Homo sapiens; identical to SEQ ID NO: 234357
  chr9:120249908-120250069
  hyper

SEQ ID NO: 420287 - DNA, 162 bp, Homo sapiens; identical to SEQ ID NO: 286681
  chr9:122130811-122130973
  hyper

SEQ ID NO: 420288 - DNA, 334 bp, Homo sapiens; identical to SEQ ID NO: 234360
  chr9:123883882-123884216
  hyper

SEQ ID NO: 420289 - DNA, 45 bp, Homo sapiens; identical to SEQ ID NO: 201859
  chr9:124262330-124262375
  hyper

SEQ ID NO: 420290 - DNA, 253 bp, Homo sapiens; identical to SEQ ID NO: 201860
  chr9:124361930-124362183
  hyper

SEQ ID NO: 420291 - DNA, 35 bp, Homo sapiens; identical to SEQ ID NO: 201861
  chr9:124362324-124362359
  hyper

SEQ ID NO: 420292 - DNA, 181 bp, Homo sapiens; identical to SEQ ID NO: 223669
  chr9:124622036-124622217
  hyper

SEQ ID NO: 420293 - DNA, 63 bp, Homo sapiens; identical to SEQ ID NO: 286691
  chr9:124981571-124981634
  hyper

SEQ ID NO: 420294 - DNA, 140 bp, Homo sapiens; identical to SEQ ID NO: 118090
  chr9:124981877-124982017
  hyper

SEQ ID NO: 420295 - DNA, 85 bp, Homo sapiens; identical to SEQ ID NO: 286695
  chr9:126135525-126135610
  hyper

SEQ ID NO: 420296 - DNA, 127 bp, Homo sapiens; identical to SEQ ID NO: 286697
  chr9:126761349-126761476
  hyper

SEQ ID NO: 420297 - DNA, 165 bp, Homo sapiens; identical to SEQ ID NO: 286698
  chr9:126762044-126762209
  hyper

SEQ ID NO: 420298 - DNA, 299 bp, Homo sapiens; identical to SEQ ID NO: 286699
  chr9:126762231-126762530
  hyper

SEQ ID NO: 420299 - DNA, 67 bp, Homo sapiens; identical to SEQ ID NO: 286700
  chr9:126762606-126762673
  hyper

SEQ ID NO: 420300 - DNA, 251 bp, Homo sapiens; identical to SEQ ID NO: 234373
  chr9:126769112-126769363
  hyper

SEQ ID NO: 420301 - DNA, 127 bp, Homo sapiens; identical to SEQ ID NO: 286705
  chr9:126775917-126776044
  hyper

SEQ ID NO: 420302 - DNA, 45 bp, Homo sapiens; identical to SEQ ID NO: 286706
  chr9:126776386-126776431
  hyper

SEQ ID NO: 420303 - DNA, 227 bp, Homo sapiens; identical to SEQ ID NO: 286707
  chr9:126777302-126777529
  hyper

SEQ ID NO: 420304 - DNA, 133 bp, Homo sapiens; identical to SEQ ID NO: 286708
  chr9:126778106-126778239
  hyper

SEQ ID NO: 420305 - DNA, 124 bp, Homo sapiens; identical to SEQ ID NO: 286709
  chr9:126778518-126778642
  hyper

SEQ ID NO: 420306 - DNA, 84 bp, Homo sapiens; identical to SEQ ID NO: 286710
  chr9:126778685-126778769
  hyper

SEQ ID NO: 420307 - DNA, 94 bp, Homo sapiens; identical to SEQ ID NO: 286717
  chr9:126794701-126794795
  hyper

SEQ ID NO: 420308 - DNA, 39 bp, Homo sapiens; identical to SEQ ID NO: 201871
  chr9:126872740-126872779
  hyper

SEQ ID NO: 420309 - DNA, 171 bp, Homo sapiens; identical to SEQ ID NO: 201872
  chr9:127005138-127005309
  hyper

SEQ ID NO: 420310 - DNA, 278 bp, Homo sapiens; identical to SEQ ID NO: 286720
  chr9:127215312-127215590
  hyper

SEQ ID NO: 420311 - DNA, 124 bp, Homo sapiens; identical to SEQ ID NO: 286721
  chr9:127215678-127215802
  hyper

SEQ ID NO: 420312 - DNA, 49 bp, Homo sapiens; identical to SEQ ID NO: 286722
  chr9:127215973-127216022
  hyper

SEQ ID NO: 420313 - DNA, 140 bp, Homo sapiens; identical to SEQ ID NO: 286723
  chr9:127421529-127421669
  hyper

SEQ ID NO: 420314 - DNA, 427 bp, Homo sapiens; identical to SEQ ID NO: 234393
  chr9:127531978-127532405
  hyper

SEQ ID NO: 420315 - DNA, 92 bp, Homo sapiens; identical to SEQ ID NO: 234394
  chr9:127533784-127533876
  hyper

SEQ ID NO: 420316 - DNA, 127 bp, Homo sapiens; identical to SEQ ID NO: 201874
  chr9:127534416-127534543
  hyper

SEQ ID NO: 420317 - DNA, 96 bp, Homo sapiens; identical to SEQ ID NO: 234395
  chr9:127905903-127905999
  hyper

SEQ ID NO: 420318 - DNA, 248 bp, Homo sapiens; identical to SEQ ID NO: 234396
  chr9:127962948-127963196
  hyper

SEQ ID NO: 420319 - DNA, 224 bp, Homo sapiens; identical to SEQ ID NO: 234397
  chr9:128510756-128510980
  hyper

SEQ ID NO: 420320 - DNA, 327 bp, Homo sapiens; identical to SEQ ID NO: 286730
  chr9:128985077-128985404
  hyper

SEQ ID NO: 420321 - DNA, 320 bp, Homo sapiens; identical to SEQ ID NO: 201876
  chr9:129372402-129372722
  hyper

SEQ ID NO: 420322 - DNA, 33 bp, Homo sapiens; identical to SEQ ID NO: 384294
  chr9:129373385-129373418
  hyper

SEQ ID NO: 420323 - DNA, 110 bp, Homo sapiens; identical to SEQ ID NO: 286734
  chr9:129375185-129375295
  hyper

SEQ ID NO: 420324 - DNA, 91 bp, Homo sapiens; identical to SEQ ID NO: 286736
  chr9:129376798-129376889
  hyper

SEQ ID NO: 420325 - DNA, 35 bp, Homo sapiens; identical to SEQ ID NO: 286737
  chr9:129376918-129376953
  hyper

SEQ ID NO: 420326 - DNA, 166 bp, Homo sapiens; identical to SEQ ID NO: 234406
  chr9:129384573-129384739
  hyper

SEQ ID NO: 420327 - DNA, 62 bp, Homo sapiens; identical to SEQ ID NO: 286739
  chr9:129385810-129385872
  hyper

SEQ ID NO: 420328 - DNA, 520 bp, Homo sapiens; identical to SEQ ID NO: 398244
  chr9:129386782-129387302
  hyper

SEQ ID NO: 420329 - DNA, 361 bp, Homo sapiens; identical to SEQ ID NO: 234410
  chr9:129439099-129439460
  hyper

SEQ ID NO: 420330 - DNA, 658 bp, Homo sapiens; identical to SEQ ID NO: 223678
  chr9:130158818-130159476
  hyper

SEQ ID NO: 420331 - DNA, 254 bp, Homo sapiens; identical to SEQ ID NO: 234413
  chr9:130213934-130214188
  hyper

SEQ ID NO: 420332 - DNA, 209 bp, Homo sapiens; identical to SEQ ID NO: 234414
  chr9:130308066-130308275
  hyper

SEQ ID NO: 420333 - DNA, 473 bp, Homo sapiens; identical to SEQ ID NO: 201885
  chr9:130330786-130331259
  hyper

SEQ ID NO: 420334 - DNA, 158 bp, Homo sapiens; identical to SEQ ID NO: 223680
  chr9:130374196-130374354
  hyper

SEQ ID NO: 420335 - DNA, 36 bp, Homo sapiens; identical to SEQ ID NO: 223681
  chr9:130374657-130374693
  hyper

SEQ ID NO: 420336 - DNA, 203 bp, Homo sapiens; identical to SEQ ID NO: 234417
  chr9:130477657-130477860
  hyper

SEQ ID NO: 420337 - DNA, 141 bp, Homo sapiens; identical to SEQ ID NO: 286753
  chr9:130616612-130616753
  hyper

SEQ ID NO: 420338 - DNA, 376 bp, Homo sapiens; identical to SEQ ID NO: 201890
  chr9:130679368-130679744
  hyper

SEQ ID NO: 420339 - DNA, 83 bp, Homo sapiens; identical to SEQ ID NO: 226543
  chr9:131132510-131132593
  hyper

SEQ ID NO: 420340 - DNA, 182 bp, Homo sapiens; identical to SEQ ID NO: 234422
  chr9:131133703-131133885
  hyper

SEQ ID NO: 420341 - DNA, 220 bp, Homo sapiens; identical to SEQ ID NO: 286764
  chr9:131183034-131183254
  hyper

SEQ ID NO: 420342 - DNA, 89 bp, Homo sapiens; identical to SEQ ID NO: 201893
  chr9:131219288-131219377
  hyper

SEQ ID NO: 420343 - DNA, 86 bp, Homo sapiens; identical to SEQ ID NO: 234425
  chr9:131419086-131419172
  hyper

SEQ ID NO: 420344 - DNA, 251 bp, Homo sapiens; identical to SEQ ID NO: 234426
  chr9:131486506-131486757
  hyper

SEQ ID NO: 420345 - DNA, 399 bp, Homo sapiens; identical to SEQ ID NO: 286768
  chr9:131709401-131709800
  hyper

SEQ ID NO: 420346 - DNA, 277 bp, Homo sapiens; identical to SEQ ID NO: 286771
  chr9:131940269-131940546
  hyper

SEQ ID NO: 420347 - DNA, 390 bp, Homo sapiens; identical to SEQ ID NO: 46623
  chr9:131940585-131940975
  hyper

SEQ ID NO: 420348 - DNA, 118 bp, Homo sapiens; identical to SEQ ID NO: 234434
  chr9:131965405-131965523
  hyper

SEQ ID NO: 420349 - DNA, 80 bp, Homo sapiens; identical to SEQ ID NO: 234437
  chr9:132200925-132201005
  hyper

SEQ ID NO: 420350 - DNA, 34 bp, Homo sapiens; identical to SEQ ID NO: 223691
  chr9:132222864-132222898
  hyper

SEQ ID NO: 420351 - DNA, 56 bp, Homo sapiens; identical to SEQ ID NO: 223693
  chr9:132250698-132250754
  hyper

SEQ ID NO: 420352 - DNA, 551 bp, Homo sapiens; identical to SEQ ID NO: 286787
  chr9:132330680-132331231
  hyper

SEQ ID NO: 420353 - DNA, 321 bp, Homo sapiens; identical to SEQ ID NO: 286788
  chr9:132331336-132331657
  hyper

SEQ ID NO: 420354 - DNA, 174 bp, Homo sapiens; identical to SEQ ID NO: 201903
  chr9:132373579-132373753
  hyper

SEQ ID NO: 420355 - DNA, 162 bp, Homo sapiens; identical to SEQ ID NO: 234443
  chr9:132387303-132387465
  hyper

SEQ ID NO: 420356 - DNA, 65 bp, Homo sapiens; identical to SEQ ID NO: 286791
  chr9:132427556-132427621
  hyper

SEQ ID NO: 420357 - DNA, 142 bp, Homo sapiens; identical to SEQ ID NO: 286792
  chr9:132427910-132428052
  hyper

SEQ ID NO: 420358 - DNA, 197 bp, Homo sapiens; identical to SEQ ID NO: 286793
  chr9:132428123-132428320
  hyper

SEQ ID NO: 420359 - DNA, 475 bp, Homo sapiens; identical to SEQ ID NO: 234447
  chr9:132499948-132500423
  hyper

SEQ ID NO: 420360 - DNA, 181 bp, Homo sapiens; identical to SEQ ID NO: 286805
  chr9:133319785-133319966
  hyper

SEQ ID NO: 420361 - DNA, 55 bp, Homo sapiens; identical to SEQ ID NO: 286806
  chr9:133320002-133320057
  hyper

SEQ ID NO: 420362 - DNA, 331 bp, Homo sapiens; identical to SEQ ID NO: 286807
  chr9:133540728-133541059
  hyper

SEQ ID NO: 420363 - DNA, 274 bp, Homo sapiens; identical to SEQ ID NO: 234461
  chr9:133568977-133569251
  hyper

SEQ ID NO: 420364 - DNA, 400 bp, Homo sapiens; identical to SEQ ID NO: 286810
  chr9:133814235-133814635
  hyper

SEQ ID NO: 420365 - DNA, 496 bp, Homo sapiens; identical to SEQ ID NO: 286814
  chr9:133972138-133972634
  hyper

SEQ ID NO: 420366 - DNA, 173 bp, Homo sapiens; identical to SEQ ID NO: 201913
  chr9:134158023-134158196
  hyper

SEQ ID NO: 420367 - DNA, 203 bp, Homo sapiens; identical to SEQ ID NO: 286817
  chr9:134421320-134421523
  hyper

SEQ ID NO: 420368 - DNA, 239 bp, Homo sapiens; identical to SEQ ID NO: 286818
  chr9:134421558-134421797
  hyper

SEQ ID NO: 420369 - DNA, 71 bp, Homo sapiens; identical to SEQ ID NO: 286819
  chr9:134421835-134421906
  hyper

SEQ ID NO: 420370 - DNA, 363 bp, Homo sapiens; identical to SEQ ID NO: 286820
  chr9:134421967-134422330
  hyper

SEQ ID NO: 420371 - DNA, 80 bp, Homo sapiens; identical to SEQ ID NO: 234469
  chr9:134989616-134989696
  hyper

SEQ ID NO: 420372 - DNA, 161 bp, Homo sapiens; identical to SEQ ID NO: 223714
  chr9:135395349-135395510
  hyper

SEQ ID NO: 420373 - DNA, 60 bp, Homo sapiens; identical to SEQ ID NO: 286827
  chr9:135456936-135456996
  hyper

SEQ ID NO: 420374 - DNA, 37 bp, Homo sapiens; identical to SEQ ID NO: 286828
  chr9:135464627-135464664
  hyper

SEQ ID NO: 420375 - DNA, 65 bp, Homo sapiens; identical to SEQ ID NO: 286829
  chr9:135465126-135465191
  hyper

SEQ ID NO: 420376 - DNA, 180 bp, Homo sapiens; identical to SEQ ID NO: 201921
  chr9:135906376-135906556
  hyper

SEQ ID NO: 420377 - DNA, 115 bp, Homo sapiens; identical to SEQ ID NO: 201923
  chr9:136856335-136856450
  hyper

SEQ ID NO: 420378 - DNA, 159 bp, Homo sapiens; identical to SEQ ID NO: 234487
  chr9:136890934-136891093
  hyper

SEQ ID NO: 420379 - DNA, 219 bp, Homo sapiens; identical to SEQ ID NO: 286838
  chr9:137273878-137274097
  hyper

SEQ ID NO: 420380 - DNA, 62 bp, Homo sapiens; identical to SEQ ID NO: 201925
  chr9:137967132-137967194
  hyper

SEQ ID NO: 420381 - DNA, 151 bp, Homo sapiens; identical to SEQ ID NO: 223720
  chr9:138372138-138372289
  hyper

SEQ ID NO: 420382 - DNA, 40 bp, Homo sapiens; identical to SEQ ID NO: 201929
  chr9:139001729-139001769
  hyper

SEQ ID NO: 420383 - DNA, 56 bp, Homo sapiens; identical to SEQ ID NO: 201930
  chr9:139294771-139294827
  hyper

SEQ ID NO: 420384 - DNA, 247 bp, Homo sapiens; identical to SEQ ID NO: 286849
  chr9:139334259-139334506
  hyper

SEQ ID NO: 420385 - DNA, 119 bp, Homo sapiens; identical to SEQ ID NO: 201932
  chr9:139377007-139377126
  hyper

SEQ ID NO: 420386 - DNA, 104 bp, Homo sapiens; identical to SEQ ID NO: 201934
  chr9:139519836-139519940
  hyper

SEQ ID NO: 420387 - DNA, 109 bp, Homo sapiens; identical to SEQ ID NO: 201935
  chr9:139580674-139580783
  hyper

SEQ ID NO: 420388 - DNA, 283 bp, Homo sapiens; identical to SEQ ID NO: 286855
  chr9:139580987-139581270
  hyper

SEQ ID NO: 420389 - DNA, 144 bp, Homo sapiens; identical to SEQ ID NO: 223733
  chr9:139581731-139581875
  hyper

SEQ ID NO: 420390 - DNA, 243 bp, Homo sapiens; identical to SEQ ID NO: 286857
  chr9:139606720-139606963
  hyper

SEQ ID NO: 420391 - DNA, 403 bp, Homo sapiens; identical to SEQ ID NO: 286858
  chr9:139607299-139607702
  hyper

SEQ ID NO: 420392 - DNA, 102 bp, Homo sapiens; identical to SEQ ID NO: 234507
  chr9:139621210-139621312
  hyper

SEQ ID NO: 420393 - DNA, 238 bp, Homo sapiens; identical to SEQ ID NO: 234508
  chr9:139694853-139695091
  hyper

SEQ ID NO: 420394 - DNA, 155 bp, Homo sapiens; identical to SEQ ID NO: 201937
  chr9:139838241-139838396
  hyper

SEQ ID NO: 420395 - DNA, 194 bp, Homo sapiens; identical to SEQ ID NO: 201938
  chr9:139923388-139923582
  hyper

SEQ ID NO: 420396 - DNA, 59 bp, Homo sapiens; identical to SEQ ID NO: 234515
  chr9:139940159-139940218
  hyper

SEQ ID NO: 420397 - DNA, 54 bp, Homo sapiens; identical to SEQ ID NO: 286867
  chr9:139943294-139943348
  hyper

SEQ ID NO: 420398 - DNA, 360 bp, Homo sapiens; identical to SEQ ID NO: 46772
  chr9:139964731-139965091
  hyper

SEQ ID NO: 420399 - DNA, 143 bp, Homo sapiens; identical to SEQ ID NO: 234520
  chr9:140095337-140095480
  hyper

SEQ ID NO: 420400 - DNA, 98 bp, Homo sapiens; identical to SEQ ID NO: 234521
  chr9:140100291-140100389
  hyper

SEQ ID NO: 420401 - DNA, 91 bp, Homo sapiens; identical to SEQ ID NO: 118518
  chr9:140172875-140172966
  hyper

SEQ ID NO: 420402 - DNA, 98 bp, Homo sapiens; identical to SEQ ID NO: 201942
  chr9:140195121-140195219
  hyper

SEQ ID NO: 420403 - DNA, 614 bp, Homo sapiens; identical to SEQ ID NO: 201943
  chr9:140195552-140196166
  hyper

SEQ ID NO: 420404 - DNA, 290 bp, Homo sapiens; identical to SEQ ID NO: 398280
  chr9:140196196-140196486
  hyper

SEQ ID NO: 420405 - DNA, 729 bp, Homo sapiens; identical to SEQ ID NO: 286878
  chr9:140445746-140446475
  hyper

SEQ ID NO: 420406 - DNA, 122 bp, Homo sapiens; identical to SEQ ID NO: 201948
  chr9:140473437-140473559
  hyper

SEQ ID NO: 420407 - DNA, 162 bp, Homo sapiens; identical to SEQ ID NO: 234527
  chr9:140500666-140500828
  hyper

SEQ ID NO: 420408 - DNA, 57 bp, Homo sapiens; identical to SEQ ID NO: 286886
  chr10:830674-830731
  hyper

SEQ ID NO: 420409 - DNA, 168 bp, Homo sapiens; identical to SEQ ID NO: 286887
  chr10:830910-831078
  hyper

SEQ ID NO: 420410 - DNA, 101 bp, Homo sapiens; identical to SEQ ID NO: 234531
  chr10:1034387-1034488
  hyper

SEQ ID NO: 420411 - DNA, 152 bp, Homo sapiens; identical to SEQ ID NO: 234532
  chr10:1094292-1094444
  hyper

SEQ ID NO: 420412 - DNA, 66 bp, Homo sapiens; identical to SEQ ID NO: 118547
  chr10:1095030-1095096
  hyper

SEQ ID NO: 420413 - DNA, 89 bp, Homo sapiens; identical to SEQ ID NO: 234534
  chr10:1102299-1102388
  hyper

SEQ ID NO: 420414 - DNA, 231 bp, Homo sapiens; identical to SEQ ID NO: 234535
  chr10:1462892-1463123
  hyper

SEQ ID NO: 420415 - DNA, 115 bp, Homo sapiens; identical to SEQ ID NO: 7163
  chr10:3214966-3215081
  hyper

SEQ ID NO: 420416 - DNA, 43 bp, Homo sapiens; identical to SEQ ID NO: 201957
  chr10:3239422-3239465
  hyper

SEQ ID NO: 420417 - DNA, 99 bp, Homo sapiens; identical to SEQ ID NO: 201958
  chr10:3239495-3239594
  hyper

SEQ ID NO: 420418 - DNA, 78 bp, Homo sapiens; identical to SEQ ID NO: 201959
  chr10:3827581-3827659
  hyper

SEQ ID NO: 420419 - DNA, 255 bp, Homo sapiens; identical to SEQ ID NO: 286901
  chr10:3862675-3862930
  hyper

SEQ ID NO: 420420 - DNA, 238 bp, Homo sapiens; identical to SEQ ID NO: 201961
  chr10:5454341-5454579
  hyper

SEQ ID NO: 420421 - DNA, 157 bp, Homo sapiens; identical to SEQ ID NO: 223749
  chr10:5488421-5488578
  hyper

SEQ ID NO: 420422 - DNA, 855 bp, Homo sapiens; identical to SEQ ID NO: 286904
  chr10:5707985-5708840
  hyper

SEQ ID NO: 420423 - DNA, 106 bp, Homo sapiens; identical to SEQ ID NO: 234547
  chr10:6130773-6130879
  hyper

SEQ ID NO: 420424 - DNA, 199 bp, Homo sapiens; identical to SEQ ID NO: 234548
  chr10:6244500-6244699
  hyper

SEQ ID NO: 420425 - DNA, 282 bp, Homo sapiens; identical to SEQ ID NO: 234549
  chr10:6245257-6245539
  hyper

SEQ ID NO: 420426 - DNA, 202 bp, Homo sapiens; identical to SEQ ID NO: 234559
  chr10:7829457-7829659
  hyper

SEQ ID NO: 420427 - DNA, 41 bp, Homo sapiens; identical to SEQ ID NO: 234560
  chr10:7829885-7829926
  hyper

SEQ ID NO: 420428 - DNA, 114 bp, Homo sapiens; identical to SEQ ID NO: 286921
  chr10:8078243-8078357
  hyper

SEQ ID NO: 420429 - DNA, 75 bp, Homo sapiens; identical to SEQ ID NO: 286922
  chr10:8079315-8079390
  hyper

SEQ ID NO: 420430 - DNA, 66 bp, Homo sapiens; identical to SEQ ID NO: 201970
  chr10:8079655-8079721
  hyper

SEQ ID NO: 420431 - DNA, 62 bp, Homo sapiens; identical to SEQ ID NO: 234566
  chr10:8079998-8080060
  hyper

SEQ ID NO: 420432 - DNA, 371 bp, Homo sapiens; identical to SEQ ID NO: 286925
  chr10:8082851-8083222
  hyper

SEQ ID NO: 420433 - DNA, 117 bp, Homo sapiens; identical to SEQ ID NO: 286927
  chr10:8086740-8086857
  hyper

SEQ ID NO: 420434 - DNA, 601 bp, Homo sapiens; identical to SEQ ID NO: 286928
  chr10:8090758-8091359
  hyper

SEQ ID NO: 420435 - DNA, 53 bp, Homo sapiens; identical to SEQ ID NO: 286937
  chr10:8374272-8374325
  hyper

SEQ ID NO: 420436 - DNA, 105 bp, Homo sapiens; identical to SEQ ID NO: 201981
  chr10:11652860-11652965
  hyper

SEQ ID NO: 420437 - DNA, 168 bp, Homo sapiens; identical to SEQ ID NO: 234578
  chr10:11653475-11653643
  hyper

SEQ ID NO: 420438 - DNA, 870 bp, Homo sapiens; identical to SEQ ID NO: 286943
  chr10:11865127-11865997
  hyper

SEQ ID NO: 420439 - DNA, 47 bp, Homo sapiens; identical to SEQ ID NO: 234580
  chr10:12110722-12110769
  hyper

SEQ ID NO: 420440 - DNA, 194 bp, Homo sapiens; identical to SEQ ID NO: 234581
  chr10:12237744-12237938
  hyper

SEQ ID NO: 420441 - DNA, 53 bp, Homo sapiens; identical to SEQ ID NO: 234582
  chr10:12238327-12238380
  hyper

SEQ ID NO: 420442 - DNA, 82 bp, Homo sapiens; identical to SEQ ID NO: 234587
  chr10:13141818-13141900
  hyper

SEQ ID NO: 420443 - DNA, 241 bp, Homo sapiens; identical to SEQ ID NO: 201985
  chr10:13341387-13341628
  hyper

SEQ ID NO: 420444 - DNA, 145 bp, Homo sapiens; identical to SEQ ID NO: 234588
  chr10:13570123-13570268
  hyper

SEQ ID NO: 420445 - DNA, 33 bp, Homo sapiens; identical to SEQ ID NO: 201986
  chr10:13629001-13629034
  hyper

SEQ ID NO: 420446 - DNA, 277 bp, Homo sapiens; identical to SEQ ID NO: 286957
  chr10:14215913-14216190
  hyper

SEQ ID NO: 420447 - DNA, 114 bp, Homo sapiens; identical to SEQ ID NO: 234593
  chr10:14879967-14880081
  hyper

SEQ ID NO: 420448 - DNA, 773 bp, Homo sapiens; identical to SEQ ID NO: 201988
  chr10:14995671-14996444
  hyper

SEQ ID NO: 420449 - DNA, 39 bp, Homo sapiens; identical to SEQ ID NO: 234595
  chr10:15130885-15130924
  hyper

SEQ ID NO: 420450 - DNA, 342 bp, Homo sapiens; identical to SEQ ID NO: 234596
  chr10:15481461-15481803
  hyper

SEQ ID NO: 420451 - DNA, 41 bp, Homo sapiens; identical to SEQ ID NO: 234599
  chr10:15902579-15902620
  hyper

SEQ ID NO: 420452 - DNA, 329 bp, Homo sapiens; identical to SEQ ID NO: 234600
  chr10:16478540-16478869
  hyper

SEQ ID NO: 420453 - DNA, 148 bp, Homo sapiens; identical to SEQ ID NO: 201991
  chr10:16870093-16870241
  hyper

SEQ ID NO: 420454 - DNA, 52 bp, Homo sapiens; identical to SEQ ID NO: 201992
  chr10:17243812-17243864
  hyper

SEQ ID NO: 420455 - DNA, 273 bp, Homo sapiens
  chr10:20104362-20104635
  hyper
gagctgaaaaaacaaaaacaaactggggagccagagcccctgaaagctccggtaggaaattcaatgggcctcctgttcctttaaactctcgctttcgcccccgctgacactttgcaaagccgcggcggcagcggcggggaccacgctgcggtgcaccaccttccgccaccctcccgcgctgggctggggtcgagggggcttcgcagagtcggtaaccgaaccggctctggtttgctttctccactccctagccactaccagaaccagcctccg

SEQ ID NO: 420456 - DNA, 51 bp, Homo sapiens
  chr10:20106104-20106155
  hyper
ggagaccaaatccttggtaagtaagatgcactttagcttgctgattttgtg

SEQ ID NO: 420457 - DNA, 282 bp, Homo sapiens; identical to SEQ ID NO: 384306
  chr10:21463291-21463573
  hyper

SEQ ID NO: 420458 - DNA, 421 bp, Homo sapiens; identical to SEQ ID NO: 286982
  chr10:21783758-21784179
  hyper

SEQ ID NO: 420459 - DNA, 334 bp, Homo sapiens; identical to SEQ ID NO: 286983
  chr10:21784246-21784580
  hyper

SEQ ID NO: 420460 - DNA, 203 bp, Homo sapiens; identical to SEQ ID NO: 202007
  chr10:21785547-21785750
  hyper

SEQ ID NO: 420461 - DNA, 49 bp, Homo sapiens; identical to SEQ ID NO: 286985
  chr10:21785786-21785835
  hyper

SEQ ID NO: 420462 - DNA, 54 bp, Homo sapiens; identical to SEQ ID NO: 286986
  chr10:21805363-21805417
  hyper

SEQ ID NO: 420463 - DNA, 153 bp, Homo sapiens; identical to SEQ ID NO: 223775
  chr10:21805907-21806060
  hyper

SEQ ID NO: 420464 - DNA, 318 bp, Homo sapiens; identical to SEQ ID NO: 286988
  chr10:21814235-21814553
  hyper

SEQ ID NO: 420465 - DNA, 129 bp, Homo sapiens; identical to SEQ ID NO: 234615
  chr10:21822289-21822418
  hyper

SEQ ID NO: 420466 - DNA, 67 bp, Homo sapiens; identical to SEQ ID NO: 234616
  chr10:21823423-21823490
  hyper

SEQ ID NO: 420467 - DNA, 142 bp, Homo sapiens; identical to SEQ ID NO: 223778
  chr10:21824264-21824406
  hyper

SEQ ID NO: 420468 - DNA, 240 bp, Homo sapiens; identical to SEQ ID NO: 286993
  chr10:22032716-22032956
  hyper

SEQ ID NO: 420469 - DNA, 213 bp, Homo sapiens; identical to SEQ ID NO: 234617
  chr10:22292569-22292782
  hyper

SEQ ID NO: 420470 - DNA, 266 bp, Homo sapiens; identical to SEQ ID NO: 234620
  chr10:22519355-22519621
  hyper

SEQ ID NO: 420471 - DNA, 44 bp, Homo sapiens; identical to SEQ ID NO: 234622
  chr10:22609889-22609933
  hyper

SEQ ID NO: 420472 - DNA, 966 bp, Homo sapiens; identical to SEQ ID NO: 287001
  chr10:22614079-22615045
  hyper

SEQ ID NO: 420473 - DNA, 184 bp, Homo sapiens; identical to SEQ ID NO: 234627
  chr10:22726716-22726900
  hyper

SEQ ID NO: 420474 - DNA, 41 bp, Homo sapiens; identical to SEQ ID NO: 234629
  chr10:23001787-23001828
  hyper

SEQ ID NO: 420475 - DNA, 96 bp, Homo sapiens; identical to SEQ ID NO: 287007
  chr10:23460471-23460567
  hyper

SEQ ID NO: 420476 - DNA, 71 bp, Homo sapiens; identical to SEQ ID NO: 287008
  chr10:23491090-23491161
  hyper

SEQ ID NO: 420477 - DNA, 92 bp, Homo sapiens; identical to SEQ ID NO: 287009
  chr10:23491237-23491329
  hyper

SEQ ID NO: 420478 - DNA, 241 bp, Homo sapiens; identical to SEQ ID NO: 287011
  chr10:25011170-25011411
  hyper

SEQ ID NO: 420479 - DNA, 239 bp, Homo sapiens; identical to SEQ ID NO: 234647
  chr10:25011795-25012034
  hyper

SEQ ID NO: 420480 - DNA, 164 bp, Homo sapiens; identical to SEQ ID NO: 202016
  chr10:25012546-25012710
  hyper

SEQ ID NO: 420481 - DNA, 49 bp, Homo sapiens; identical to SEQ ID NO: 234649
  chr10:25305303-25305352
  hyper

SEQ ID NO: 420482 - DNA, 112 bp, Homo sapiens; identical to SEQ ID NO: 287016
  chr10:25463329-25463441
  hyper

SEQ ID NO: 420483 - DNA, 65 bp, Homo sapiens; identical to SEQ ID NO: 287020
  chr10:26055994-26056059
  hyper

SEQ ID NO: 420484 - DNA, 139 bp, Homo sapiens; identical to SEQ ID NO: 287022
  chr10:26501589-26501728
  hyper

SEQ ID NO: 420485 - DNA, 239 bp, Homo sapiens; identical to SEQ ID NO: 234662
  chr10:26986366-26986605
  hyper

SEQ ID NO: 420486 - DNA, 241 bp, Homo sapiens; identical to SEQ ID NO: 234663
  chr10:27444473-27444714
  hyper

SEQ ID NO: 420487 - DNA, 70 bp, Homo sapiens; identical to SEQ ID NO: 287028
  chr10:27529644-27529714
  hyper

SEQ ID NO: 420488 - DNA, 149 bp, Homo sapiens; identical to SEQ ID NO: 287032
  chr10:28287169-28287318
  hyper

SEQ ID NO: 420489 - DNA, 220 bp, Homo sapiens; identical to SEQ ID NO: 287033
  chr10:28287557-28287777
  hyper

SEQ ID NO: 420490 - DNA, 160 bp, Homo sapiens; identical to SEQ ID NO: 234670
  chr10:28591947-28592107
  hyper

SEQ ID NO: 420491 - DNA, 166 bp, Homo sapiens; identical to SEQ ID NO: 234671
  chr10:28821230-28821396
  hyper

SEQ ID NO: 420492 - DNA, 35 bp, Homo sapiens; identical to SEQ ID NO: 287036
  chr10:28957388-28957423
  hyper

SEQ ID NO: 420493 - DNA, 420 bp, Homo sapiens; identical to SEQ ID NO: 287037
  chr10:28965881-28966301
  hyper

SEQ ID NO: 420494 - DNA, 239 bp, Homo sapiens; identical to SEQ ID NO: 202029
  chr10:28966598-28966837
  hyper

SEQ ID NO: 420495 - DNA, 78 bp, Homo sapiens; identical to SEQ ID NO: 202031
  chr10:29738055-29738133
  hyper

SEQ ID NO: 420496 - DNA, 70 bp, Homo sapiens; identical to SEQ ID NO: 234682
  chr10:30722681-30722751
  hyper

SEQ ID NO: 420497 - DNA, 126 bp, Homo sapiens; identical to SEQ ID NO: 234683
  chr10:30723838-30723964
  hyper

SEQ ID NO: 420498 - DNA, 251 bp, Homo sapiens; identical to SEQ ID NO: 287047
  chr10:31072973-31073224
  hyper

SEQ ID NO: 420499 - DNA, 33 bp, Homo sapiens; identical to SEQ ID NO: 287048
  chr10:31073481-31073514
  hyper

SEQ ID NO: 420500 - DNA, 224 bp, Homo sapiens; identical to SEQ ID NO: 202033
  chr10:31073881-31074105
  hyper

SEQ ID NO: 420501 - DNA, 99 bp, Homo sapiens; identical to SEQ ID NO: 234688
  chr10:32049025-32049124
  hyper

SEQ ID NO: 420502 - DNA, 69 bp, Homo sapiens; identical to SEQ ID NO: 202038
  chr10:32217899-32217968
  hyper

SEQ ID NO: 420503 - DNA, 106 bp, Homo sapiens; identical to SEQ ID NO: 234690
  chr10:32345462-32345568
  hyper

SEQ ID NO: 420504 - DNA, 32 bp, Homo sapiens; identical to SEQ ID NO: 398331
  chr10:33623806-33623838
  hyper

SEQ ID NO: 420505 - DNA, 94 bp, Homo sapiens; identical to SEQ ID NO: 398332
  chr10:35104766-35104860
  hyper

SEQ ID NO: 420506 - DNA, 340 bp, Homo sapiens; identical to SEQ ID NO: 287067
  chr10:35105213-35105553
  hyper

SEQ ID NO: 420507 - DNA, 334 bp, Homo sapiens; identical to SEQ ID NO: 234695
  chr10:35415501-35415835
  hyper

SEQ ID NO: 420508 - DNA, 468 bp, Homo sapiens; identical to SEQ ID NO: 287069
  chr10:35930558-35931026
  hyper

SEQ ID NO: 420509 - DNA, 343 bp, Homo sapiens; identical to SEQ ID NO: 287070
  chr10:35931061-35931404
  hyper

SEQ ID NO: 420510 - DNA, 344 bp, Homo sapiens; identical to SEQ ID NO: 287071
  chr10:35931434-35931778
  hyper

SEQ ID NO: 420511 - DNA, 214 bp, Homo sapiens; identical to SEQ ID NO: 202050
  chr10:35932020-35932234
  hyper

SEQ ID NO: 420512 - DNA, 111 bp, Homo sapiens; identical to SEQ ID NO: 234698
  chr10:38146150-38146261
  hyper

SEQ ID NO: 420513 - DNA, 101 bp, Homo sapiens; identical to SEQ ID NO: 202051
  chr10:38146491-38146592
  hyper

SEQ ID NO: 420514 - DNA, 427 bp, Homo sapiens; identical to SEQ ID NO: 234700
  chr10:38265525-38265952
  hyper

SEQ ID NO: 420515 - DNA, 225 bp, Homo sapiens; identical to SEQ ID NO: 287076
  chr10:38299277-38299502
  hyper

SEQ ID NO: 420516 - DNA, 307 bp, Homo sapiens; identical to SEQ ID NO: 234702
  chr10:43133483-43133790
  hyper

SEQ ID NO: 420517 - DNA, 163 bp, Homo sapiens; identical to SEQ ID NO: 234703
  chr10:43134086-43134249
  hyper

SEQ ID NO: 420518 - DNA, 257 bp, Homo sapiens; identical to SEQ ID NO: 287079
  chr10:43361723-43361980
  hyper

SEQ ID NO: 420519 - DNA, 258 bp, Homo sapiens; identical to SEQ ID NO: 202052
  chr10:43428636-43428894
  hyper

SEQ ID NO: 420520 - DNA, 36 bp, Homo sapiens; identical to SEQ ID NO: 202053
  chr10:43429438-43429474
  hyper

SEQ ID NO: 420521 - DNA, 228 bp, Homo sapiens; identical to SEQ ID NO: 287089
  chr10:43800185-43800413
  hyper

SEQ ID NO: 420522 - DNA, 73 bp, Homo sapiens; identical to SEQ ID NO: 234716
  chr10:43904392-43904465
  hyper

SEQ ID NO: 420523 - DNA, 255 bp, Homo sapiens; identical to SEQ ID NO: 234717
  chr10:43932226-43932481
  hyper

SEQ ID NO: 420524 - DNA, 254 bp, Homo sapiens; identical to SEQ ID NO: 398340
  chr10:44879396-44879650
  hyper

SEQ ID NO: 420525 - DNA, 281 bp, Homo sapiens; identical to SEQ ID NO: 234722
  chr10:45470472-45470753
  hyper

SEQ ID NO: 420526 - DNA, 50 bp, Homo sapiens; identical to SEQ ID NO: 202066
  chr10:49514479-49514529
  hyper

SEQ ID NO: 420527 - DNA, 33 bp, Homo sapiens; identical to SEQ ID NO: 287105
  chr10:49731361-49731394
  hyper

SEQ ID NO: 420528 - DNA, 325 bp, Homo sapiens; identical to SEQ ID NO: 287108
  chr10:50603423-50603748
  hyper

SEQ ID NO: 420529 - DNA, 128 bp, Homo sapiens; identical to SEQ ID NO: 287112
  chr10:50819280-50819408
  hyper

SEQ ID NO: 420530 - DNA, 35 bp, Homo sapiens; identical to SEQ ID NO: 202071
  chr10:50821017-50821052
  hyper

SEQ ID NO: 420531 - DNA, 98 bp, Homo sapiens; identical to SEQ ID NO: 287116
  chr10:50976517-50976615
  hyper

SEQ ID NO: 420532 - DNA, 53 bp, Homo sapiens; identical to SEQ ID NO: 234742
  chr10:52383839-52383892
  hyper

SEQ ID NO: 420533 - DNA, 167 bp, Homo sapiens; identical to SEQ ID NO: 202075
  chr10:52750721-52750888
  hyper

SEQ ID NO: 420534 - DNA, 281 bp, Homo sapiens; identical to SEQ ID NO: 202076
  chr10:52751102-52751383
  hyper

SEQ ID NO: 420535 - DNA, 233 bp, Homo sapiens; identical to SEQ ID NO: 202077
  chr10:52751562-52751795
  hyper

SEQ ID NO: 420536 - DNA, 64 bp, Homo sapiens; identical to SEQ ID NO: 287122
  chr10:52751961-52752025
  hyper

SEQ ID NO: 420537 - DNA, 139 bp, Homo sapiens; identical to SEQ ID NO: 287123
  chr10:52833429-52833568
  hyper

SEQ ID NO: 420538 - DNA, 280 bp, Homo sapiens; identical to SEQ ID NO: 202079
  chr10:52834081-52834361
  hyper

SEQ ID NO: 420539 - DNA, 109 bp, Homo sapiens; identical to SEQ ID NO: 202080
  chr10:52834756-52834865
  hyper

SEQ ID NO: 420540 - DNA, 450 bp, Homo sapiens; identical to SEQ ID NO: 234745
  chr10:53459323-53459773
  hyper

SEQ ID NO: 420541 - DNA, 339 bp, Homo sapiens; identical to SEQ ID NO: 388733
  chr10:54073859-54074198
  hyper

SEQ ID NO: 420542 - DNA, 296 bp, Homo sapiens; identical to SEQ ID NO: 287128
  chr10:54074418-54074714
  hyper

SEQ ID NO: 420543 - DNA, 457 bp, Homo sapiens; identical to SEQ ID NO: 202082
  chr10:57390676-57391133
  hyper

SEQ ID NO: 420544 - DNA, 57 bp, Homo sapiens; identical to SEQ ID NO: 234750
  chr10:58121111-58121168
  hyper

SEQ ID NO: 420545 - DNA, 312 bp, Homo sapiens; identical to SEQ ID NO: 202083
  chr10:60028787-60029099
  hyper

SEQ ID NO: 420546 - DNA, 496 bp, Homo sapiens; identical to SEQ ID NO: 287137
  chr10:61121994-61122490
  hyper

SEQ ID NO: 420547 - DNA, 95 bp, Homo sapiens; identical to SEQ ID NO: 287138
  chr10:61122636-61122731
  hyper

SEQ ID NO: 420548 - DNA, 202 bp, Homo sapiens; identical to SEQ ID NO: 287139
  chr10:61468534-61468736
  hyper

SEQ ID NO: 420549 - DNA, 76 bp, Homo sapiens; identical to SEQ ID NO: 287140
  chr10:61468771-61468847
  hyper

SEQ ID NO: 420550 - DNA, 85 bp, Homo sapiens; identical to SEQ ID NO: 202089
  chr10:62538165-62538250
  hyper

SEQ ID NO: 420551 - DNA, 192 bp, Homo sapiens; identical to SEQ ID NO: 287144
  chr10:62703331-62703523
  hyper

SEQ ID NO: 420552 - DNA, 180 bp, Homo sapiens; identical to SEQ ID NO: 202090
  chr10:62703652-62703832
  hyper

SEQ ID NO: 420553 - DNA, 101 bp, Homo sapiens; identical to SEQ ID NO: 287146
  chr10:62704082-62704183
  hyper

SEQ ID NO: 420554 - DNA, 32 bp, Homo sapiens; identical to SEQ ID NO: 202091
  chr10:63211995-63212027
  hyper

SEQ ID NO: 420555 - DNA, 206 bp, Homo sapiens; identical to SEQ ID NO: 223828
  chr10:64028003-64028209
  hyper

SEQ ID NO: 420556 - DNA, 43 bp, Homo sapiens; identical to SEQ ID NO: 234765
  chr10:64564430-64564473
  hyper

SEQ ID NO: 420557 - DNA, 238 bp, Homo sapiens; identical to SEQ ID NO: 234766
  chr10:64576165-64576403
  hyper

SEQ ID NO: 420558 - DNA, 82 bp, Homo sapiens; identical to SEQ ID NO: 234768
  chr10:65029101-65029183
  hyper

SEQ ID NO: 420559 - DNA, 115 bp, Homo sapiens; identical to SEQ ID NO: 234769
  chr10:65225530-65225645
  hyper

SEQ ID NO: 420560 - DNA, 444 bp, Homo sapiens; identical to SEQ ID NO: 287159
  chr10:65225896-65226340
  hyper

SEQ ID NO: 420561 - DNA, 396 bp, Homo sapiens; identical to SEQ ID NO: 234772
  chr10:68687786-68688182
  hyper

SEQ ID NO: 420562 - DNA, 457 bp, Homo sapiens; identical to SEQ ID NO: 234773
  chr10:69523830-69524287
  hyper

SEQ ID NO: 420563 - DNA, 80 bp, Homo sapiens; identical to SEQ ID NO: 202096
  chr10:69834887-69834967
  hyper

SEQ ID NO: 420564 - DNA, 120 bp, Homo sapiens; identical to SEQ ID NO: 234776
  chr10:69835218-69835338
  hyper

SEQ ID NO: 420565 - DNA, 71 bp, Homo sapiens; identical to SEQ ID NO: 234777
  chr10:69991508-69991579
  hyper

SEQ ID NO: 420566 - DNA, 152 bp, Homo sapiens; identical to SEQ ID NO: 119025
  chr10:70091480-70091632
  hyper

SEQ ID NO: 420567 - DNA, 436 bp, Homo sapiens; identical to SEQ ID NO: 234779
  chr10:70092802-70093238
  hyper

SEQ ID NO: 420568 - DNA, 139 bp, Homo sapiens; identical to SEQ ID NO: 234780
  chr10:70166193-70166332
  hyper

SEQ ID NO: 420569 - DNA, 32 bp, Homo sapiens; identical to SEQ ID NO: 234781
  chr10:70167001-70167033
  hyper

SEQ ID NO: 420570 - DNA, 35 bp, Homo sapiens; identical to SEQ ID NO: 234782
  chr10:70167244-70167279
  hyper

SEQ ID NO: 420571 - DNA, 493 bp, Homo sapiens; identical to SEQ ID NO: 234784
  chr10:70660994-70661487
  hyper

SEQ ID NO: 420572 - DNA, 231 bp, Homo sapiens; identical to SEQ ID NO: 234785
  chr10:70715515-70715746
  hyper

SEQ ID NO: 420573 - DNA, 352 bp, Homo sapiens; identical to SEQ ID NO: 234786
  chr10:70748247-70748599
  hyper

SEQ ID NO: 420574 - DNA, 324 bp, Homo sapiens; identical to SEQ ID NO: 234787
  chr10:70748846-70749170
  hyper

SEQ ID NO: 420575 - DNA, 57 bp, Homo sapiens; identical to SEQ ID NO: 202101
  chr10:70883516-70883573
  hyper

SEQ ID NO: 420576 - DNA, 146 bp, Homo sapiens; identical to SEQ ID NO: 234789
  chr10:70939962-70940108
  hyper

SEQ ID NO: 420577 - DNA, 112 bp, Homo sapiens; identical to SEQ ID NO: 202103
  chr10:71211454-71211566
  hyper

SEQ ID NO: 420578 - DNA, 109 bp, Homo sapiens; identical to SEQ ID NO: 287182
  chr10:71327766-71327875
  hyper

SEQ ID NO: 420579 - DNA, 74 bp, Homo sapiens; identical to SEQ ID NO: 287183
  chr10:71328699-71328773
  hyper

SEQ ID NO: 420580 - DNA, 188 bp, Homo sapiens; identical to SEQ ID NO: 287185
  chr10:71334639-71334827
  hyper

SEQ ID NO: 420581 - DNA, 86 bp, Homo sapiens; identical to SEQ ID NO: 287186
  chr10:71334956-71335042
  hyper

SEQ ID NO: 420582 - DNA, 493 bp, Homo sapiens; identical to SEQ ID NO: 287187
  chr10:71336491-71336984
  hyper

SEQ ID NO: 420583 - DNA, 218 bp, Homo sapiens; identical to SEQ ID NO: 287188
  chr10:71337422-71337640
  hyper

SEQ ID NO: 420584 - DNA, 43 bp, Homo sapiens; identical to SEQ ID NO: 287189
  chr10:71337670-71337713
  hyper

SEQ ID NO: 420585 - DNA, 375 bp, Homo sapiens; identical to SEQ ID NO: 287190
  chr10:71337726-71338101
  hyper

SEQ ID NO: 420586 - DNA, 249 bp, Homo sapiens; identical to SEQ ID NO: 287191
  chr10:71338326-71338575
  hyper

SEQ ID NO: 420587 - DNA, 348 bp, Homo sapiens; identical to SEQ ID NO: 202109
  chr10:71561445-71561793
  hyper

SEQ ID NO: 420588 - DNA, 269 bp, Homo sapiens; identical to SEQ ID NO: 287195
  chr10:71561837-71562106
  hyper

SEQ ID NO: 420589 - DNA, 44 bp, Homo sapiens; identical to SEQ ID NO: 287196
  chr10:71562793-71562837
  hyper

SEQ ID NO: 420590 - DNA, 58 bp, Homo sapiens; identical to SEQ ID NO: 398379
  chr10:71892801-71892859
  hyper

SEQ ID NO: 420591 - DNA, 128 bp, Homo sapiens; identical to SEQ ID NO: 287199
  chr10:71892896-71893024
  hyper

SEQ ID NO: 420592 - DNA, 388 bp, Homo sapiens; identical to SEQ ID NO: 234805
  chr10:71906296-71906684
  hyper

SEQ ID NO: 420593 - DNA, 195 bp, Homo sapiens; identical to SEQ ID NO: 234806
  chr10:71993193-71993388
  hyper

SEQ ID NO: 420594 - DNA, 149 bp, Homo sapiens; identical to SEQ ID NO: 234809
  chr10:72142502-72142651
  hyper

SEQ ID NO: 420595 - DNA, 89 bp, Homo sapiens; identical to SEQ ID NO: 287206
  chr10:72972345-72972434
  hyper

SEQ ID NO: 420596 - DNA, 271 bp, Homo sapiens; identical to SEQ ID NO: 287207
  chr10:72972543-72972814
  hyper

SEQ ID NO: 420597 - DNA, 180 bp, Homo sapiens; identical to SEQ ID NO: 287208
  chr10:72972950-72973130
  hyper

SEQ ID NO: 420598 - DNA, 43 bp, Homo sapiens; identical to SEQ ID NO: 202114
  chr10:72973180-72973223
  hyper

SEQ ID NO: 420599 - DNA, 217 bp, Homo sapiens; identical to SEQ ID NO: 287210
  chr10:72973382-72973599
  hyper

SEQ ID NO: 420600 - DNA, 37 bp, Homo sapiens; identical to SEQ ID NO: 202115
  chr10:73113223-73113260
  hyper

SEQ ID NO: 420601 - DNA, 103 bp, Homo sapiens; identical to SEQ ID NO: 234815
  chr10:73610994-73611097
  hyper

SEQ ID NO: 420602 - DNA, 340 bp, Homo sapiens; identical to SEQ ID NO: 287213
  chr10:73723762-73724102
  hyper

SEQ ID NO: 420603 - DNA, 194 bp, Homo sapiens; identical to SEQ ID NO: 202117
  chr10:73724616-73724810
  hyper

SEQ ID NO: 420604 - DNA, 147 bp, Homo sapiens; identical to SEQ ID NO: 287217
  chr10:73848222-73848369
  hyper

SEQ ID NO: 420605 - DNA, 466 bp, Homo sapiens; identical to SEQ ID NO: 287219
  chr10:74032435-74032901
  hyper

SEQ ID NO: 420606 - DNA, 199 bp, Homo sapiens; identical to SEQ ID NO: 202127
  chr10:74114846-74115045
  hyper

SEQ ID NO: 420607 - DNA, 69 bp, Homo sapiens; identical to SEQ ID NO: 234825
  chr10:74386146-74386215
  hyper

SEQ ID NO: 420608 - DNA, 116 bp, Homo sapiens; identical to SEQ ID NO: 202128
  chr10:74451757-74451873
  hyper

SEQ ID NO: 420609 - DNA, 147 bp, Homo sapiens; identical to SEQ ID NO: 234827
  chr10:74927731-74927878
  hyper

SEQ ID NO: 420610 - DNA, 33 bp, Homo sapiens; identical to SEQ ID NO: 234828
  chr10:75007237-75007270
  hyper

SEQ ID NO: 420611 - DNA, 184 bp, Homo sapiens; identical to SEQ ID NO: 234829
  chr10:75012129-75012313
  hyper

SEQ ID NO: 420612 - DNA, 84 bp, Homo sapiens; identical to SEQ ID NO: 234830
  chr10:75012575-75012659
  hyper

SEQ ID NO: 420613 - DNA, 224 bp, Homo sapiens; identical to SEQ ID NO: 234831
  chr10:75173165-75173389
  hyper

SEQ ID NO: 420614 - DNA, 284 bp, Homo sapiens; identical to SEQ ID NO: 234832
  chr10:75173746-75174030
  hyper

SEQ ID NO: 420615 - DNA, 179 bp, Homo sapiens; identical to SEQ ID NO: 202129
  chr10:75385748-75385927
  hyper

SEQ ID NO: 420616 - DNA, 276 bp, Homo sapiens; identical to SEQ ID NO: 287235
  chr10:75408169-75408445
  hyper

SEQ ID NO: 420617 - DNA, 145 bp, Homo sapiens; identical to SEQ ID NO: 234835
  chr10:75503717-75503862
  hyper

SEQ ID NO: 420618 - DNA, 157 bp, Homo sapiens; identical to SEQ ID NO: 234836
  chr10:75504289-75504446
  hyper

SEQ ID NO: 420619 - DNA, 227 bp, Homo sapiens; identical to SEQ ID NO: 234837
  chr10:75531957-75532184
  hyper

SEQ ID NO: 420620 - DNA, 95 bp, Homo sapiens; identical to SEQ ID NO: 234838
  chr10:75542070-75542165
  hyper

SEQ ID NO: 420621 - DNA, 39 bp, Homo sapiens; identical to SEQ ID NO: 202131
  chr10:75639673-75639712
  hyper

SEQ ID NO: 420622 - DNA, 113 bp, Homo sapiens; identical to SEQ ID NO: 202134
  chr10:75671364-75671477
  hyper

SEQ ID NO: 420623 - DNA, 161 bp, Homo sapiens; identical to SEQ ID NO: 234842
  chr10:75910774-75910935
  hyper

SEQ ID NO: 420624 - DNA, 150 bp, Homo sapiens; identical to SEQ ID NO: 234843
  chr10:75936204-75936354
  hyper

SEQ ID NO: 420625 - DNA, 103 bp, Homo sapiens; identical to SEQ ID NO: 234844
  chr10:76586294-76586397
  hyper

SEQ ID NO: 420626 - DNA, 206 bp, Homo sapiens; identical to SEQ ID NO: 202135
  chr10:76970482-76970688
  hyper

SEQ ID NO: 420627 - DNA, 389 bp, Homo sapiens; identical to SEQ ID NO: 287248
  chr10:77054513-77054902
  hyper

SEQ ID NO: 420628 - DNA, 253 bp, Homo sapiens; identical to SEQ ID NO: 287259
  chr10:79471071-79471324
  hyper

SEQ ID NO: 420629 - DNA, 73 bp, Homo sapiens; identical to SEQ ID NO: 202148
  chr10:79606676-79606749
  hyper

SEQ ID NO: 420630 - DNA, 220 bp, Homo sapiens; identical to SEQ ID NO: 202149
  chr10:79685704-79685924
  hyper

SEQ ID NO: 420631 - DNA, 45 bp, Homo sapiens; identical to SEQ ID NO: 223849
  chr10:79686268-79686313
  hyper

SEQ ID NO: 420632 - DNA, 469 bp, Homo sapiens; identical to SEQ ID NO: 223850
  chr10:79686575-79687044
  hyper

SEQ ID NO: 420633 - DNA, 34 bp, Homo sapiens; identical to SEQ ID NO: 234856
  chr10:79793411-79793445
  hyper

SEQ ID NO: 420634 - DNA, 115 bp, Homo sapiens; identical to SEQ ID NO: 202151
  chr10:80733746-80733861
  hyper

SEQ ID NO: 420635 - DNA, 115 bp, Homo sapiens; identical to SEQ ID NO: 202152
  chr10:80827233-80827348
  hyper

SEQ ID NO: 420636 - DNA, 407 bp, Homo sapiens; identical to SEQ ID NO: 287267
  chr10:80828532-80828939
  hyper

SEQ ID NO: 420637 - DNA, 189 bp, Homo sapiens; identical to SEQ ID NO: 287268
  chr10:80830746-80830935
  hyper

SEQ ID NO: 420638 - DNA, 146 bp, Homo sapiens; identical to SEQ ID NO: 119197
  chr10:81002562-81002708
  hyper

SEQ ID NO: 420639 - DNA, 57 bp, Homo sapiens; identical to SEQ ID NO: 234859
  chr10:81107046-81107103
  hyper

SEQ ID NO: 420640 - DNA, 250 bp, Homo sapiens; identical to SEQ ID NO: 234860
  chr10:81107654-81107904
  hyper

SEQ ID NO: 420641 - DNA, 140 bp, Homo sapiens; identical to SEQ ID NO: 234861
  chr10:81204444-81204584
  hyper

SEQ ID NO: 420642 - DNA, 62 bp, Homo sapiens; identical to SEQ ID NO: 287273
  chr10:81664375-81664437
  hyper

SEQ ID NO: 420643 - DNA, 107 bp, Homo sapiens; identical to SEQ ID NO: 287274
  chr10:81741259-81741366
  hyper

SEQ ID NO: 420644 - DNA, 349 bp, Homo sapiens; identical to SEQ ID NO: 202154
  chr10:81741931-81742280
  hyper

SEQ ID NO: 420645 - DNA, 322 bp, Homo sapiens; identical to SEQ ID NO: 234864
  chr10:81838726-81839048
  hyper

SEQ ID NO: 420646 - DNA, 98 bp, Homo sapiens; identical to SEQ ID NO: 234866
  chr10:81965474-81965572
  hyper

SEQ ID NO: 420647 - DNA, 146 bp, Homo sapiens; identical to SEQ ID NO: 202156
  chr10:82213597-82213743
  hyper

SEQ ID NO: 420648 - DNA, 213 bp, Homo sapiens
  chr10:83634546-83634759
  hyper
ggccaggcaggccctctgtgtcggaatgcgggtggcgggcacccggcaccccgcgaccggccgccggggccactgaaggcggcgcgaggcccaggcgcggcgcgagcgggcgccccagggagcgggctgggcgcggtgccccgaggatgtcggcgctcctggagcgcacgcaggcggcgggcagcagcagcagcagcgggcgcggggacccgg

SEQ ID NO: 420649 - DNA, 122 bp, Homo sapiens; identical to SEQ ID NO: 287281
  chr10:83634796-83634918
  hyper

SEQ ID NO: 420650 - DNA, 130 bp, Homo sapiens; identical to SEQ ID NO: 202159
  chr10:85899676-85899806
  hyper

SEQ ID NO: 420651 - DNA, 42 bp, Homo sapiens; identical to SEQ ID NO: 202161
  chr10:86088147-86088189
  hyper

SEQ ID NO: 420652 - DNA, 56 bp, Homo sapiens; identical to SEQ ID NO: 223859
  chr10:87493570-87493626
  hyper

SEQ ID NO: 420653 - DNA, 58 bp, Homo sapiens; identical to SEQ ID NO: 202162
  chr10:88124922-88124980
  hyper

SEQ ID NO: 420654 - DNA, 82 bp, Homo sapiens; identical to SEQ ID NO: 287290
  chr10:88224575-88224657
  hyper

SEQ ID NO: 420655 - DNA, 316 bp, Homo sapiens; identical to SEQ ID NO: 234876
  chr10:88281851-88282167
  hyper

SEQ ID NO: 420656 - DNA, 212 bp, Homo sapiens; identical to SEQ ID NO: 287292
  chr10:88294492-88294704
  hyper

SEQ ID NO: 420657 - DNA, 383 bp, Homo sapiens; identical to SEQ ID NO: 202164
  chr10:88515316-88515699
  hyper

SEQ ID NO: 420658 - DNA, 179 bp, Homo sapiens; identical to SEQ ID NO: 234879
  chr10:88853594-88853773
  hyper

SEQ ID NO: 420659 - DNA, 113 bp, Homo sapiens; identical to SEQ ID NO: 234880
  chr10:89265586-89265699
  hyper

SEQ ID NO: 420660 - DNA, 469 bp, Homo sapiens; identical to SEQ ID NO: 234881
  chr10:89577722-89578191
  hyper

SEQ ID NO: 420661 - DNA, 232 bp, Homo sapiens; identical to SEQ ID NO: 234883
  chr10:89623143-89623375
  hyper

SEQ ID NO: 420662 - DNA, 174 bp, Homo sapiens; identical to SEQ ID NO: 234885
  chr10:90639670-90639844
  hyper

SEQ ID NO: 420663 - DNA, 53 bp, Homo sapiens; identical to SEQ ID NO: 234886
  chr10:90735036-90735089
  hyper

SEQ ID NO: 420664 - DNA, 156 bp, Homo sapiens; identical to SEQ ID NO: 234887
  chr10:90749778-90749934
  hyper

SEQ ID NO: 420665 - DNA, 79 bp, Homo sapiens; identical to SEQ ID NO: 47395
  chr10:90750154-90750233
  hyper

SEQ ID NO: 420666 - DNA, 183 bp, Homo sapiens; identical to SEQ ID NO: 287308
  chr10:90750730-90750913
  hyper

SEQ ID NO: 420667 - DNA, 273 bp, Homo sapiens; identical to SEQ ID NO: 234893
  chr10:91461093-91461366
  hyper

SEQ ID NO: 420668 - DNA, 219 bp, Homo sapiens; identical to SEQ ID NO: 234897
  chr10:92631512-92631731
  hyper

SEQ ID NO: 420669 - DNA, 177 bp, Homo sapiens; identical to SEQ ID NO: 234898
  chr10:92979925-92980102
  hyper

SEQ ID NO: 420670 - DNA, 356 bp, Homo sapiens; identical to SEQ ID NO: 234899
  chr10:92980921-92981277
  hyper

SEQ ID NO: 420671 - DNA, 49 bp, Homo sapiens; identical to SEQ ID NO: 202174
  chr10:93393014-93393063
  hyper

SEQ ID NO: 420672 - DNA, 33 bp, Homo sapiens; identical to SEQ ID NO: 202175
  chr10:93557957-93557990
  hyper

SEQ ID NO: 420673 - DNA, 66 bp, Homo sapiens; identical to SEQ ID NO: 234903
  chr10:93669233-93669299
  hyper

SEQ ID NO: 420674 - DNA, 188 bp, Homo sapiens; identical to SEQ ID NO: 202177
  chr10:94000529-94000717
  hyper

SEQ ID NO: 420675 - DNA, 230 bp, Homo sapiens; identical to SEQ ID NO: 234905
  chr10:94051615-94051845
  hyper

SEQ ID NO: 420676 - DNA, 319 bp, Homo sapiens; identical to SEQ ID NO: 234907
  chr10:94333923-94334242
  hyper

SEQ ID NO: 420677 - DNA, 83 bp, Homo sapiens; identical to SEQ ID NO: 234908
  chr10:94352686-94352769
  hyper

SEQ ID NO: 420678 - DNA, 155 bp, Homo sapiens; identical to SEQ ID NO: 234911
  chr10:94459542-94459697
  hyper

SEQ ID NO: 420679 - DNA, 283 bp, Homo sapiens; identical to SEQ ID NO: 287330
  chr10:94832388-94832671
  hyper

SEQ ID NO: 420680 - DNA, 143 bp, Homo sapiens; identical to SEQ ID NO: 287331
  chr10:94832701-94832844
  hyper

SEQ ID NO: 420681 - DNA, 205 bp, Homo sapiens; identical to SEQ ID NO: 234919
  chr10:95242142-95242347
  hyper

SEQ ID NO: 420682 - DNA, 791 bp, Homo sapiens; identical to SEQ ID NO: 287334
  chr10:95326192-95326983
  hyper

SEQ ID NO: 420683 - DNA, 141 bp, Homo sapiens; identical to SEQ ID NO: 287335
  chr10:95360575-95360716
  hyper

SEQ ID NO: 420684 - DNA, 409 bp, Homo sapiens; identical to SEQ ID NO: 287336
  chr10:95360750-95361159
  hyper

SEQ ID NO: 420685 - DNA, 151 bp, Homo sapiens; identical to SEQ ID NO: 202189
  chr10:96122665-96122816
  hyper

SEQ ID NO: 420686 - DNA, 1666 bp, Homo sapiens; identical to SEQ ID NO: 287341
  chr10:96161937-96163603
  hyper

SEQ ID NO: 420687 - DNA, 267 bp, Homo sapiens; identical to SEQ ID NO: 202192
  chr10:97055029-97055296
  hyper

SEQ ID NO: 420688 - DNA, 191 bp, Homo sapiens; identical to SEQ ID NO: 202193
  chr10:97321201-97321392
  hyper

SEQ ID NO: 420689 - DNA, 144 bp, Homo sapiens; identical to SEQ ID NO: 234928
  chr10:97416708-97416852
  hyper

SEQ ID NO: 420690 - DNA, 364 bp, Homo sapiens
  chr10:97803763-97804127
  hyper
gggagaactccagccccggacgcagggagccccagccgggcctcccccagctcttcccgagctcgcacctggctccgcgctttggcaactcagggcccgagtggatccccttttgcccgacacatagtcgagcagtgagtctcagagtccttcggctcttcctgcgggggcagacccggcttcgcgtgtggcgttgggggaaacgactcgggtcgggctgggttgaggaagagtcaagtgaagatgagcagccacaccgggtggcctgaggtcacaccccccggggagggggcgcagagggtcgcgggggagccggcagtgaccgcgcctggggtgtgtcttacagactcgagttgccgcgtcg

SEQ ID NO: 420691 - DNA, 104 bp, Homo sapiens; identical to SEQ ID NO: 234930
  chr10:98135071-98135175
  hyper

SEQ ID NO: 420692 - DNA, 37 bp, Homo sapiens; identical to SEQ ID NO: 202196
  chr10:98273889-98273926
  hyper

SEQ ID NO: 420693 - DNA, 31 bp, Homo sapiens; identical to SEQ ID NO: 234933
  chr10:98347034-98347065
  hyper

SEQ ID NO: 420694 - DNA, 228 bp, Homo sapiens; identical to SEQ ID NO: 223880
  chr10:98593370-98593598
  hyper

SEQ ID NO: 420695 - DNA, 47 bp, Homo sapiens; identical to SEQ ID NO: 234935
  chr10:98841573-98841620
  hyper

SEQ ID NO: 420696 - DNA, 37 bp, Homo sapiens; identical to SEQ ID NO: 202198
  chr10:98945010-98945047
  hyper

SEQ ID NO: 420697 - DNA, 220 bp, Homo sapiens; identical to SEQ ID NO: 202199
  chr10:98945252-98945472
  hyper

SEQ ID NO: 420698 - DNA, 60 bp, Homo sapiens; identical to SEQ ID NO: 202200
  chr10:98945746-98945806
  hyper

SEQ ID NO: 420699 - DNA, 94 bp, Homo sapiens; identical to SEQ ID NO: 119391
  chr10:98956313-98956407
  hyper

SEQ ID NO: 420700 - DNA, 214 bp, Homo sapiens; identical to SEQ ID NO: 234939
  chr10:99052454-99052668
  hyper

SEQ ID NO: 420701 - DNA, 123 bp, Homo sapiens; identical to SEQ ID NO: 202201
  chr10:99080677-99080800
  hyper

SEQ ID NO: 420702 - DNA, 34 bp, Homo sapiens; identical to SEQ ID NO: 234942
  chr10:99093445-99093479
  hyper

SEQ ID NO: 420703 - DNA, 49 bp, Homo sapiens; identical to SEQ ID NO: 234943
  chr10:99185972-99186021
  hyper

SEQ ID NO: 420704 - DNA, 228 bp, Homo sapiens; identical to SEQ ID NO: 234944
  chr10:99258429-99258657
  hyper

SEQ ID NO: 420705 - DNA, 336 bp, Homo sapiens; identical to SEQ ID NO: 223881
  chr10:99259373-99259709
  hyper

SEQ ID NO: 420706 - DNA, 84 bp, Homo sapiens; identical to SEQ ID NO: 234945
  chr10:99400380-99400464
  hyper

SEQ ID NO: 420707 - DNA, 122 bp, Homo sapiens; identical to SEQ ID NO: 223882
  chr10:99447292-99447414
  hyper

SEQ ID NO: 420708 - DNA, 231 bp, Homo sapiens; identical to SEQ ID NO: 234946
  chr10:99473543-99473774
  hyper

SEQ ID NO: 420709 - DNA, 71 bp, Homo sapiens; identical to SEQ ID NO: 202203
  chr10:99496833-99496904
  hyper

SEQ ID NO: 420710 - DNA, 123 bp, Homo sapiens; identical to SEQ ID NO: 234952
  chr10:99894650-99894773
  hyper

SEQ ID NO: 420711 - DNA, 43 bp, Homo sapiens; identical to SEQ ID NO: 202204
  chr10:100206321-100206364
  hyper

SEQ ID NO: 420712 - DNA, 47 bp, Homo sapiens; identical to SEQ ID NO: 234954
  chr10:100206738-100206785
  hyper

SEQ ID NO: 420713 - DNA, 176 bp, Homo sapiens; identical to SEQ ID NO: 287376
  chr10:100991731-100991907
  hyper

SEQ ID NO: 420714 - DNA, 83 bp, Homo sapiens; identical to SEQ ID NO: 398445
  chr10:100992799-100992882
  hyper

SEQ ID NO: 420715 - DNA, 206 bp, Homo sapiens; identical to SEQ ID NO: 287379
  chr10:100992916-100993122
  hyper

SEQ ID NO: 420716 - DNA, 93 bp, Homo sapiens; identical to SEQ ID NO: 202210
  chr10:101190597-101190690
  hyper

SEQ ID NO: 420717 - DNA, 219 bp, Homo sapiens; identical to SEQ ID NO: 234966
  chr10:101295810-101296029
  hyper

SEQ ID NO: 420718 - DNA, 264 bp, Homo sapiens; identical to SEQ ID NO: 287389
  chr10:101296800-101297064
  hyper

SEQ ID NO: 420719 - DNA, 236 bp, Homo sapiens; identical to SEQ ID NO: 287390
  chr10:101297130-101297366
  hyper

SEQ ID NO: 420720 - DNA, 111 bp, Homo sapiens; identical to SEQ ID NO: 202212
  chr10:101381346-101381457
  hyper

SEQ ID NO: 420721 - DNA, 55 bp, Homo sapiens; identical to SEQ ID NO: 234970
  chr10:101491584-101491639
  hyper

SEQ ID NO: 420722 - DNA, 501 bp, Homo sapiens; identical to SEQ ID NO: 234971
  chr10:101945663-101946164
  hyper

SEQ ID NO: 420723 - DNA, 388 bp, Homo sapiens; identical to SEQ ID NO: 234972
  chr10:102046129-102046517
  hyper

SEQ ID NO: 420724 - DNA, 190 bp, Homo sapiens; identical to SEQ ID NO: 234973
  chr10:102106582-102106772
  hyper

SEQ ID NO: 420725 - DNA, 52 bp, Homo sapiens; identical to SEQ ID NO: 234975
  chr10:102133791-102133843
  hyper

SEQ ID NO: 420726 - DNA, 705 bp, Homo sapiens; identical to SEQ ID NO: 234978
  chr10:102415928-102416633
  hyper

SEQ ID NO: 420727 - DNA, 98 bp, Homo sapiens; identical to SEQ ID NO: 202216
  chr10:102441134-102441232
  hyper

SEQ ID NO: 420728 - DNA, 247 bp, Homo sapiens; identical to SEQ ID NO: 202217
  chr10:102469792-102470039
  hyper

SEQ ID NO: 420729 - DNA, 101 bp, Homo sapiens; identical to SEQ ID NO: 234991
  chr10:102497995-102498096
  hyper

SEQ ID NO: 420730 - DNA, 181 bp, Homo sapiens; identical to SEQ ID NO: 287410
  chr10:102504567-102504748
  hyper

SEQ ID NO: 420731 - DNA, 112 bp, Homo sapiens; identical to SEQ ID NO: 234995
  chr10:102505252-102505364
  hyper

SEQ ID NO: 420732 - DNA, 263 bp, Homo sapiens; identical to SEQ ID NO: 235002
  chr10:102671979-102672242
  hyper

SEQ ID NO: 420733 - DNA, 360 bp, Homo sapiens; identical to SEQ ID NO: 235003
  chr10:102746984-102747344
  hyper

SEQ ID NO: 420734 - DNA, 189 bp, Homo sapiens; identical to SEQ ID NO: 235004
  chr10:102758641-102758830
  hyper

SEQ ID NO: 420735 - DNA, 381 bp, Homo sapiens; identical to SEQ ID NO: 287423
  chr10:102802620-102803001
  hyper

SEQ ID NO: 420736 - DNA, 403 bp, Homo sapiens; identical to SEQ ID NO: 235008
  chr10:102809890-102810293
  hyper

SEQ ID NO: 420737 - DNA, 204 bp, Homo sapiens; identical to SEQ ID NO: 235009
  chr10:102826290-102826494
  hyper

SEQ ID NO: 420738 - DNA, 120 bp, Homo sapiens; identical to SEQ ID NO: 202233
  chr10:102973524-102973644
  hyper

SEQ ID NO: 420739 - DNA, 221 bp, Homo sapiens; identical to SEQ ID NO: 287428
  chr10:102975334-102975555
  hyper

SEQ ID NO: 420740 - DNA, 270 bp, Homo sapiens; identical to SEQ ID NO: 287429
  chr10:102975880-102976150
  hyper

SEQ ID NO: 420741 - DNA, 234 bp, Homo sapiens; identical to SEQ ID NO: 287430
  chr10:102976180-102976414
  hyper

SEQ ID NO: 420742 - DNA, 325 bp, Homo sapiens; identical to SEQ ID NO: 287431
  chr10:102976669-102976994
  hyper

SEQ ID NO: 420743 - DNA, 71 bp, Homo sapiens; identical to SEQ ID NO: 287433
  chr10:102984234-102984305
  hyper

SEQ ID NO: 420744 - DNA, 244 bp, Homo sapiens; identical to SEQ ID NO: 287434
  chr10:102984541-102984785
  hyper

SEQ ID NO: 420745 - DNA, 245 bp, Homo sapiens; identical to SEQ ID NO: 235028
  chr10:102997850-102998095
  hyper

SEQ ID NO: 420746 - DNA, 164 bp, Homo sapiens; identical to SEQ ID NO: 287439
  chr10:103052147-103052311
  hyper

SEQ ID NO: 420747 - DNA, 199 bp, Homo sapiens; identical to SEQ ID NO: 287440
  chr10:103052440-103052639
  hyper

SEQ ID NO: 420748 - DNA, 91 bp, Homo sapiens; identical to SEQ ID NO: 287441
  chr10:103326426-103326517
  hyper

SEQ ID NO: 420749 - DNA, 138 bp, Homo sapiens; identical to SEQ ID NO: 235034
  chr10:103329326-103329464
  hyper

SEQ ID NO: 420750 - DNA, 439 bp, Homo sapiens; identical to SEQ ID NO: 235035
  chr10:103347719-103348158
  hyper

SEQ ID NO: 420751 - DNA, 202 bp, Homo sapiens; identical to SEQ ID NO: 202237
  chr10:103348788-103348990
  hyper

SEQ ID NO: 420752 - DNA, 47 bp, Homo sapiens; identical to SEQ ID NO: 202238
  chr10:103454953-103455000
  hyper

SEQ ID NO: 420753 - DNA, 140 bp, Homo sapiens; identical to SEQ ID NO: 202240
  chr10:103543156-103543296
  hyper

SEQ ID NO: 420754 - DNA, 31 bp, Homo sapiens; identical to SEQ ID NO: 235041
  chr10:103575733-103575764
  hyper

SEQ ID NO: 420755 - DNA, 31 bp, Homo sapiens; identical to SEQ ID NO: 202241
  chr10:103576004-103576035
  hyper

SEQ ID NO: 420756 - DNA, 257 bp, Homo sapiens; identical to SEQ ID NO: 235043
  chr10:103600530-103600787
  hyper

SEQ ID NO: 420757 - DNA, 198 bp, Homo sapiens; identical to SEQ ID NO: 287452
  chr10:103824903-103825101
  hyper

SEQ ID NO: 420758 - DNA, 116 bp, Homo sapiens; identical to SEQ ID NO: 235046
  chr10:103880250-103880366
  hyper

SEQ ID NO: 420759 - DNA, 174 bp, Homo sapiens; identical to SEQ ID NO: 235047
  chr10:103892295-103892469
  hyper

SEQ ID NO: 420760 - DNA, 199 bp, Homo sapiens; identical to SEQ ID NO: 202242
  chr10:103912112-103912311
  hyper

SEQ ID NO: 420761 - DNA, 31 bp, Homo sapiens; identical to SEQ ID NO: 235050
  chr10:104005226-104005257
  hyper

SEQ ID NO: 420762 - DNA, 217 bp, Homo sapiens; identical to SEQ ID NO: 202243
  chr10:104178852-104179069
  hyper

SEQ ID NO: 420763 - DNA, 99 bp, Homo sapiens; identical to SEQ ID NO: 235053
  chr10:104179457-104179556
  hyper

SEQ ID NO: 420764 - DNA, 292 bp, Homo sapiens; identical to SEQ ID NO: 235054
  chr10:104181705-104181997
  hyper

SEQ ID NO: 420765 - DNA, 111 bp, Homo sapiens; identical to SEQ ID NO: 235055
  chr10:104192423-104192534
  hyper

SEQ ID NO: 420766 - DNA, 111 bp, Homo sapiens; identical to SEQ ID NO: 235056
  chr10:104210002-104210113
  hyper

SEQ ID NO: 420767 - DNA, 46 bp, Homo sapiens; identical to SEQ ID NO: 202244
  chr10:104220986-104221032
  hyper

SEQ ID NO: 420768 - DNA, 142 bp, Homo sapiens; identical to SEQ ID NO: 235059
  chr10:104262487-104262629
  hyper

SEQ ID NO: 420769 - DNA, 120 bp, Homo sapiens; identical to SEQ ID NO: 235060
  chr10:104263674-104263794
  hyper

SEQ ID NO: 420770 - DNA, 45 bp, Homo sapiens; identical to SEQ ID NO: 235061
  chr10:104474158-104474203
  hyper

SEQ ID NO: 420771 - DNA, 64 bp, Homo sapiens; identical to SEQ ID NO: 235062
  chr10:104474416-104474480
  hyper

SEQ ID NO: 420772 - DNA, 235 bp, Homo sapiens; identical to SEQ ID NO: 235063
  chr10:104613987-104614222
  hyper

SEQ ID NO: 420773 - DNA, 164 bp, Homo sapiens; identical to SEQ ID NO: 235064
  chr10:104678001-104678165
  hyper

SEQ ID NO: 420774 - DNA, 50 bp, Homo sapiens; identical to SEQ ID NO: 235065
  chr10:105025610-105025660
  hyper

SEQ ID NO: 420775 - DNA, 202 bp, Homo sapiens; identical to SEQ ID NO: 235068
  chr10:105110864-105111066
  hyper

SEQ ID NO: 420776 - DNA, 120 bp, Homo sapiens; identical to SEQ ID NO: 235069
  chr10:105156273-105156393
  hyper

SEQ ID NO: 420777 - DNA, 249 bp, Homo sapiens; identical to SEQ ID NO: 287479
  chr10:105615413-105615662
  hyper

SEQ ID NO: 420778 - DNA, 64 bp, Homo sapiens; identical to SEQ ID NO: 202247
  chr10:105615718-105615782
  hyper

SEQ ID NO: 420779 - DNA, 256 bp, Homo sapiens; identical to SEQ ID NO: 235073
  chr10:105727531-105727787
  hyper

SEQ ID NO: 420780 - DNA, 376 bp, Homo sapiens; identical to SEQ ID NO: 235074
  chr10:105991885-105992261
  hyper

SEQ ID NO: 420781 - DNA, 31 bp, Homo sapiens; identical to SEQ ID NO: 287483
  chr10:106014281-106014312
  hyper

SEQ ID NO: 420782 - DNA, 343 bp, Homo sapiens; identical to SEQ ID NO: 287484
  chr10:106014356-106014699
  hyper

SEQ ID NO: 420783 - DNA, 158 bp, Homo sapiens; identical to SEQ ID NO: 235076
  chr10:106014939-106015097
  hyper

SEQ ID NO: 420784 - DNA, 88 bp, Homo sapiens; identical to SEQ ID NO: 287486
  chr10:106034508-106034596
  hyper

SEQ ID NO: 420785 - DNA, 110 bp, Homo sapiens; identical to SEQ ID NO: 287487
  chr10:106034651-106034761
  hyper

SEQ ID NO: 420786 - DNA, 516 bp, Homo sapiens
  chr10:106098190-106098706
  hyper
ggctctactgaacttcagagttactcatttcctggatgtcacaaaaactttttcctccttataagaacaaaacacccgcctctacccgcggccccggaagctccttaaggaggaccgtgtgggtttcggtggttgggcccaggatccgccgggaagaccttcccagtgagcccccagaaacttccccggcacggcagaactggagagtgactgggagagacggaatcaggccagtggagtaaactggagcgagtggacaggggcgcggggaggacgcccttaaaagtcgtcctaagccgcggagcggaaggggttaagtccttaccagtcggggagagttttctgcggcgcgttttacaagtggcggaattcctggggccacctatttagtctcttggaggaaaatataactctagacaaaacgccagcctttttctcttttgcagcttgaaaggattaaaatagcttactaccgtttttttttttttttgagaaggagtttcgctcttgttgccc

SEQ ID NO: 420787 - DNA, 102 bp, Homo sapiens; identical to SEQ ID NO: 223913
  chr10:106098946-106099048
  hyper

SEQ ID NO: 420788 - DNA, 173 bp, Homo sapiens; identical to SEQ ID NO: 202252
  chr10:109674972-109675145
  hyper

SEQ ID NO: 420789 - DNA, 149 bp, Homo sapiens; identical to SEQ ID NO: 235090
  chr10:111683213-111683362
  hyper

SEQ ID NO: 420790 - DNA, 98 bp, Homo sapiens; identical to SEQ ID NO: 202255
  chr10:111768340-111768438
  hyper

SEQ ID NO: 420791 - DNA, 48 bp, Homo sapiens; identical to SEQ ID NO: 202256
  chr10:111968983-111969031
  hyper

SEQ ID NO: 420792 - DNA, 46 bp, Homo sapiens; identical to SEQ ID NO: 202257
  chr10:111969325-111969371
  hyper

SEQ ID NO: 420793 - DNA, 249 bp, Homo sapiens; identical to SEQ ID NO: 235095
  chr10:112064510-112064759
  hyper

SEQ ID NO: 420794 - DNA, 385 bp, Homo sapiens; identical to SEQ ID NO: 287505
  chr10:112327397-112327782
  hyper

SEQ ID NO: 420795 - DNA, 76 bp, Homo sapiens; identical to SEQ ID NO: 202262
  chr10:112328695-112328771
  hyper

SEQ ID NO: 420796 - DNA, 39 bp, Homo sapiens; identical to SEQ ID NO: 202263
  chr10:112333464-112333503
  hyper

SEQ ID NO: 420797 - DNA, 68 bp, Homo sapiens; identical to SEQ ID NO: 202264
  chr10:112335093-112335161
  hyper

SEQ ID NO: 420798 - DNA, 72 bp, Homo sapiens; identical to SEQ ID NO: 202265
  chr10:112337178-112337250
  hyper

SEQ ID NO: 420799 - DNA, 80 bp, Homo sapiens; identical to SEQ ID NO: 202266
  chr10:112337592-112337672
  hyper

SEQ ID NO: 420800 - DNA, 79 bp, Homo sapiens; identical to SEQ ID NO: 202267
  chr10:112338385-112338464
  hyper

SEQ ID NO: 420801 - DNA, 118 bp, Homo sapiens; identical to SEQ ID NO: 202268
  chr10:112340661-112340779
  hyper

SEQ ID NO: 420802 - DNA, 176 bp, Homo sapiens; identical to SEQ ID NO: 202269
  chr10:112341680-112341856
  hyper

SEQ ID NO: 420803 - DNA, 81 bp, Homo sapiens; identical to SEQ ID NO: 202270
  chr10:112342319-112342400
  hyper

SEQ ID NO: 420804 - DNA, 165 bp, Homo sapiens; identical to SEQ ID NO: 202271
  chr10:112343141-112343306
  hyper

SEQ ID NO: 420805 - DNA, 122 bp, Homo sapiens; identical to SEQ ID NO: 202272
  chr10:112343598-112343720
  hyper

SEQ ID NO: 420806 - DNA, 214 bp, Homo sapiens; identical to SEQ ID NO: 202273
  chr10:112343940-112344154
  hyper

SEQ ID NO: 420807 - DNA, 387 bp, Homo sapiens; identical to SEQ ID NO: 202274
  chr10:112349362-112349749
  hyper

SEQ ID NO: 420808 - DNA, 161 bp, Homo sapiens; identical to SEQ ID NO: 202275
  chr10:112350169-112350330
  hyper

SEQ ID NO: 420809 - DNA, 142 bp, Homo sapiens; identical to SEQ ID NO: 202276
  chr10:112350748-112350890
  hyper

SEQ ID NO: 420810 - DNA, 151 bp, Homo sapiens; identical to SEQ ID NO: 202277
  chr10:112352830-112352981
  hyper

SEQ ID NO: 420811 - DNA, 153 bp, Homo sapiens; identical to SEQ ID NO: 202278
  chr10:112356155-112356308
  hyper

SEQ ID NO: 420812 - DNA, 152 bp, Homo sapiens; identical to SEQ ID NO: 202279
  chr10:112357896-112358048
  hyper

SEQ ID NO: 420813 - DNA, 159 bp, Homo sapiens; identical to SEQ ID NO: 202280
  chr10:112359411-112359570
  hyper

SEQ ID NO: 420814 - DNA, 108 bp, Homo sapiens; identical to SEQ ID NO: 202281
  chr10:112360196-112360304
  hyper

SEQ ID NO: 420815 - DNA, 109 bp, Homo sapiens; identical to SEQ ID NO: 202282
  chr10:112360779-112360888
  hyper

SEQ ID NO: 420816 - DNA, 542 bp, Homo sapiens; identical to SEQ ID NO: 202283
  chr10:112361394-112361936
  hyper

SEQ ID NO: 420817 - DNA, 817 bp, Homo sapiens; identical to SEQ ID NO: 202284
  chr10:112362231-112363048
  hyper

SEQ ID NO: 420818 - DNA, 404 bp, Homo sapiens; identical to SEQ ID NO: 202285
  chr10:112363988-112364392
  hyper

SEQ ID NO: 420819 - DNA, 106 bp, Homo sapiens; identical to SEQ ID NO: 202289
  chr10:112631244-112631350
  hyper

SEQ ID NO: 420820 - DNA, 148 bp, Homo sapiens; identical to SEQ ID NO: 202290
  chr10:112632548-112632696
  hyper

SEQ ID NO: 420821 - DNA, 69 bp, Homo sapiens; identical to SEQ ID NO: 235101
  chr10:112678715-112678784
  hyper

SEQ ID NO: 420822 - DNA, 136 bp, Homo sapiens; identical to SEQ ID NO: 235102
  chr10:112678992-112679128
  hyper

SEQ ID NO: 420823 - DNA, 877 bp, Homo sapiens; identical to SEQ ID NO: 287537
  chr10:112835845-112836722
  hyper

SEQ ID NO: 420824 - DNA, 339 bp, Homo sapiens; identical to SEQ ID NO: 287538
  chr10:112836799-112837138
  hyper

SEQ ID NO: 420825 - DNA, 691 bp, Homo sapiens; identical to SEQ ID NO: 287539
  chr10:112837170-112837861
  hyper

SEQ ID NO: 420826 - DNA, 181 bp, Homo sapiens; identical to SEQ ID NO: 287541
  chr10:114206543-114206724
  hyper

SEQ ID NO: 420827 - DNA, 33 bp, Homo sapiens; identical to SEQ ID NO: 202295
  chr10:114709864-114709897
  hyper

SEQ ID NO: 420828 - DNA, 56 bp, Homo sapiens; identical to SEQ ID NO: 223949
  chr10:114710115-114710171
  hyper

SEQ ID NO: 420829 - DNA, 290 bp, Homo sapiens; identical to SEQ ID NO: 287545
  chr10:114710660-114710950
  hyper

SEQ ID NO: 420830 - DNA, 46 bp, Homo sapiens; identical to SEQ ID NO: 223951
  chr10:114711334-114711380
  hyper

SEQ ID NO: 420831 - DNA, 31 bp, Homo sapiens; identical to SEQ ID NO: 235109
  chr10:115613973-115614004
  hyper

SEQ ID NO: 420832 - DNA, 262 bp, Homo sapiens; identical to SEQ ID NO: 235110
  chr10:115614294-115614556
  hyper

SEQ ID NO: 420833 - DNA, 147 bp, Homo sapiens; identical to SEQ ID NO: 235111
  chr10:115802989-115803136
  hyper

SEQ ID NO: 420834 - DNA, 241 bp, Homo sapiens; identical to SEQ ID NO: 202296
  chr10:115803386-115803627
  hyper

SEQ ID NO: 420835 - DNA, 329 bp, Homo sapiens; identical to SEQ ID NO: 287553
  chr10:115803681-115804010
  hyper

SEQ ID NO: 420836 - DNA, 64 bp, Homo sapiens; identical to SEQ ID NO: 235113
  chr10:115804304-115804368
  hyper

SEQ ID NO: 420837 - DNA, 141 bp, Homo sapiens; identical to SEQ ID NO: 287555
  chr10:115804398-115804539
  hyper

SEQ ID NO: 420838 - DNA, 201 bp, Homo sapiens; identical to SEQ ID NO: 202298
  chr10:115805287-115805488
  hyper

SEQ ID NO: 420839 - DNA, 189 bp, Homo sapiens; identical to SEQ ID NO: 235115
  chr10:115860785-115860974
  hyper

SEQ ID NO: 420840 - DNA, 161 bp, Homo sapiens; identical to SEQ ID NO: 235116
  chr10:115933903-115934064
  hyper

SEQ ID NO: 420841 - DNA, 49 bp, Homo sapiens; identical to SEQ ID NO: 235117
  chr10:115934454-115934503
  hyper

SEQ ID NO: 420842 - DNA, 130 bp, Homo sapiens; identical to SEQ ID NO: 398534
  chr10:116164444-116164574
  hyper

SEQ ID NO: 420843 - DNA, 85 bp, Homo sapiens; identical to SEQ ID NO: 202302
  chr10:116164654-116164739
  hyper

SEQ ID NO: 420844 - DNA, 369 bp, Homo sapiens; identical to SEQ ID NO: 235120
  chr10:116286487-116286856
  hyper

SEQ ID NO: 420845 - DNA, 175 bp, Homo sapiens; identical to SEQ ID NO: 287567
  chr10:116391551-116391726
  hyper

SEQ ID NO: 420846 - DNA, 204 bp, Homo sapiens; identical to SEQ ID NO: 287568
  chr10:116391813-116392017
  hyper

SEQ ID NO: 420847 - DNA, 43 bp, Homo sapiens; identical to SEQ ID NO: 235123
  chr10:116581330-116581373
  hyper

SEQ ID NO: 420848 - DNA, 108 bp, Homo sapiens; identical to SEQ ID NO: 235124
  chr10:116697880-116697988
  hyper

SEQ ID NO: 420849 - DNA, 74 bp, Homo sapiens; identical to SEQ ID NO: 287572
  chr10:116852172-116852246
  hyper

SEQ ID NO: 420850 - DNA, 185 bp, Homo sapiens; identical to SEQ ID NO: 398541
  chr10:116852441-116852626
  hyper

SEQ ID NO: 420851 - DNA, 82 bp, Homo sapiens; identical to SEQ ID NO: 202306
  chr10:118034168-118034250
  hyper

SEQ ID NO: 420852 - DNA, 143 bp, Homo sapiens; identical to SEQ ID NO: 287576
  chr10:118547596-118547739
  hyper

SEQ ID NO: 420853 - DNA, 571 bp, Homo sapiens; identical to SEQ ID NO: 287578
  chr10:118764187-118764758
  hyper

SEQ ID NO: 420854 - DNA, 180 bp, Homo sapiens; identical to SEQ ID NO: 287579
  chr10:118764980-118765160
  hyper

SEQ ID NO: 420855 - DNA, 88 bp, Homo sapiens; identical to SEQ ID NO: 202309
  chr10:118922943-118923031
  hyper

SEQ ID NO: 420856 - DNA, 308 bp, Homo sapiens; identical to SEQ ID NO: 202311
  chr10:119256046-119256354
  hyper

SEQ ID NO: 420857 - DNA, 220 bp, Homo sapiens; identical to SEQ ID NO: 287585
  chr10:119292343-119292563
  hyper

SEQ ID NO: 420858 - DNA, 87 bp, Homo sapiens; identical to SEQ ID NO: 202314
  chr10:119295683-119295770
  hyper

SEQ ID NO: 420859 - DNA, 31 bp, Homo sapiens; identical to SEQ ID NO: 202315
  chr10:119295809-119295840
  hyper

SEQ ID NO: 420860 - DNA, 37 bp, Homo sapiens; identical to SEQ ID NO: 202316
  chr10:119295872-119295909
  hyper

SEQ ID NO: 420861 - DNA, 41 bp, Homo sapiens; identical to SEQ ID NO: 202317
  chr10:119295951-119295992
  hyper

SEQ ID NO: 420862 - DNA, 39 bp, Homo sapiens; identical to SEQ ID NO: 202318
  chr10:119296131-119296170
  hyper

SEQ ID NO: 420863 - DNA, 60 bp, Homo sapiens; identical to SEQ ID NO: 202323
  chr10:119301840-119301900
  hyper

SEQ ID NO: 420864 - DNA, 95 bp, Homo sapiens; identical to SEQ ID NO: 202324
  chr10:119302046-119302141
  hyper

SEQ ID NO: 420865 - DNA, 147 bp, Homo sapiens; identical to SEQ ID NO: 202325
  chr10:119302266-119302413
  hyper

SEQ ID NO: 420866 - DNA, 31 bp, Homo sapiens
  chr10:119302459-119302490
  hyper
aaaaaaaaagaaaaaaaattaccccaatcca

SEQ ID NO: 420867 - DNA, 89 bp, Homo sapiens; identical to SEQ ID NO: 398554
  chr10:119303861-119303950
  hyper

SEQ ID NO: 420868 - DNA, 97 bp, Homo sapiens; identical to SEQ ID NO: 287602
  chr10:119305284-119305381
  hyper

SEQ ID NO: 420869 - DNA, 141 bp, Homo sapiens; identical to SEQ ID NO: 202328
  chr10:119305975-119306116
  hyper

SEQ ID NO: 420870 - DNA, 57 bp, Homo sapiens; identical to SEQ ID NO: 287604
  chr10:119306372-119306429
  hyper

SEQ ID NO: 420871 - DNA, 377 bp, Homo sapiens; identical to SEQ ID NO: 287605
  chr10:119306645-119307022
  hyper

SEQ ID NO: 420872 - DNA, 248 bp, Homo sapiens; identical to SEQ ID NO: 287606
  chr10:119307582-119307830
  hyper

SEQ ID NO: 420873 - DNA, 55 bp, Homo sapiens; identical to SEQ ID NO: 287607
  chr10:119307898-119307953
  hyper

SEQ ID NO: 420874 - DNA, 141 bp, Homo sapiens; identical to SEQ ID NO: 235153
  chr10:119309782-119309923
  hyper

SEQ ID NO: 420875 - DNA, 112 bp, Homo sapiens; identical to SEQ ID NO: 202330
  chr10:119310263-119310375
  hyper

SEQ ID NO: 420876 - DNA, 223 bp, Homo sapiens; identical to SEQ ID NO: 235158
  chr10:119805618-119805841
  hyper

SEQ ID NO: 420877 - DNA, 73 bp, Homo sapiens; identical to SEQ ID NO: 235159
  chr10:119806446-119806519
  hyper

SEQ ID NO: 420878 - DNA, 171 bp, Homo sapiens; identical to SEQ ID NO: 235160
  chr10:120101736-120101907
  hyper

SEQ ID NO: 420879 - DNA, 441 bp, Homo sapiens; identical to SEQ ID NO: 287614
  chr10:120514800-120515241
  hyper

SEQ ID NO: 420880 - DNA, 84 bp, Homo sapiens; identical to SEQ ID NO: 223965
  chr10:121271622-121271706
  hyper

SEQ ID NO: 420881 - DNA, 35 bp, Homo sapiens; identical to SEQ ID NO: 235163
  chr10:121303030-121303065
  hyper

SEQ ID NO: 420882 - DNA, 43 bp, Homo sapiens; identical to SEQ ID NO: 202334
  chr10:121356079-121356122
  hyper

SEQ ID NO: 420883 - DNA, 127 bp, Homo sapiens; identical to SEQ ID NO: 235164
  chr10:121356665-121356792
  hyper

SEQ ID NO: 420884 - DNA, 52 bp, Homo sapiens; identical to SEQ ID NO: 235165
  chr10:121485050-121485102
  hyper

SEQ ID NO: 420885 - DNA, 106 bp, Homo sapiens; identical to SEQ ID NO: 202335
  chr10:121632626-121632732
  hyper

SEQ ID NO: 420886 - DNA, 32 bp, Homo sapiens; identical to SEQ ID NO: 235168
  chr10:122610818-122610850
  hyper

SEQ ID NO: 420887 - DNA, 170 bp, Homo sapiens; identical to SEQ ID NO: 287626
  chr10:123356668-123356838
  hyper

SEQ ID NO: 420888 - DNA, 179 bp, Homo sapiens; identical to SEQ ID NO: 235172
  chr10:123686258-123686437
  hyper

SEQ ID NO: 420889 - DNA, 819 bp, Homo sapiens; identical to SEQ ID NO: 202342
  chr10:123872187-123873006
  hyper

SEQ ID NO: 420890 - DNA, 442 bp, Homo sapiens; identical to SEQ ID NO: 287633
  chr10:123873040-123873482
  hyper

SEQ ID NO: 420891 - DNA, 447 bp, Homo sapiens
  chr10:124134589-124135036
  hyper
gtcttcttcccgtgggtccccgattgttttcccgacgtcagccctcagcggcgcccggcgggggagggcgggaggcccgcggcggtcgcggggccgacgagctcctcggcgtctccgccccccgagaaatcccgctcggggcgcggtgcgcgcagctgcccggggattcccggtggcgccggtcggagcgcctccctccagggctgtgcccgcggggcgcgcgtccccgggcatcctttcctggtgtttaatgcattttggcttcaggacttgccgaggccgaagccggctccgccctgggccctgaagtcgggcggtgtccgcgatttacctccgcaccttcggggcaggtggccagaggcagcgttgaaagcgacttgcccaaggtcacgcaggtggcaccggggaggcgaccagacccaggtctttcgacgccgaggccagctg

SEQ ID NO: 420892 - DNA, 67 bp, Homo sapiens; identical to SEQ ID NO: 202346
  chr10:124220489-124220556
  hyper

SEQ ID NO: 420893 - DNA, 217 bp, Homo sapiens
  chr10:124220656-124220873
  hyper
agtccctgcccggcccagtccgagcttcccgggcgggcccccagtccggcgatttgcaggaactttccccggcgctcccacgcgaagccgccgcagggcccccttgcaaagttccattagtttgaaggacgcgaatctcagcgagagaacctgcggaaagcgaatatgtggggcgcgcagacggggaaactgagtcccgcgagagggccggcctgtg

SEQ ID NO: 420894 - DNA, 35 bp, Homo sapiens; identical to SEQ ID NO: 235179
  chr10:124768241-124768276
  hyper

SEQ ID NO: 420895 - DNA, 133 bp, Homo sapiens; identical to SEQ ID NO: 287645
  chr10:124904007-124904140
  hyper

SEQ ID NO: 420896 - DNA, 97 bp, Homo sapiens; identical to SEQ ID NO: 202355
  chr10:126077712-126077809
  hyper

SEQ ID NO: 420897 - DNA, 217 bp, Homo sapiens; identical to SEQ ID NO: 235199
  chr10:126490204-126490421
  hyper

SEQ ID NO: 420898 - DNA, 118 bp, Homo sapiens; identical to SEQ ID NO: 287654
  chr10:126847239-126847357
  hyper

SEQ ID NO: 420899 - DNA, 285 bp, Homo sapiens; identical to SEQ ID NO: 287655
  chr10:126847584-126847869
  hyper

SEQ ID NO: 420900 - DNA, 123 bp, Homo sapiens; identical to SEQ ID NO: 47906
  chr10:126847900-126848023
  hyper

SEQ ID NO: 420901 - DNA, 370 bp, Homo sapiens; identical to SEQ ID NO: 235201
  chr10:126848388-126848758
  hyper

SEQ ID NO: 420902 - DNA, 93 bp, Homo sapiens; identical to SEQ ID NO: 235202
  chr10:126849003-126849096
  hyper

SEQ ID NO: 420903 - DNA, 647 bp, Homo sapiens; identical to SEQ ID NO: 287659
  chr10:126849498-126850145
  hyper

SEQ ID NO: 420904 - DNA, 59 bp, Homo sapiens; identical to SEQ ID NO: 235204
  chr10:126850346-126850405
  hyper

SEQ ID NO: 420905 - DNA, 68 bp, Homo sapiens; identical to SEQ ID NO: 235205
  chr10:127511975-127512043
  hyper

SEQ ID NO: 420906 - DNA, 137 bp, Homo sapiens; identical to SEQ ID NO: 287662
  chr10:128075549-128075686
  hyper

SEQ ID NO: 420907 - DNA, 153 bp, Homo sapiens; identical to SEQ ID NO: 202363
  chr10:128593608-128593761
  hyper

SEQ ID NO: 420908 - DNA, 98 bp, Homo sapiens; identical to SEQ ID NO: 384355
  chr10:128593793-128593891
  hyper

SEQ ID NO: 420909 - DNA, 36 bp, Homo sapiens; identical to SEQ ID NO: 202365
  chr10:128993454-128993490
  hyper

SEQ ID NO: 420910 - DNA, 421 bp, Homo sapiens; identical to SEQ ID NO: 287671
  chr10:129705208-129705629
  hyper

SEQ ID NO: 420911 - DNA, 181 bp, Homo sapiens; identical to SEQ ID NO: 202368
  chr10:129706031-129706212
  hyper

SEQ ID NO: 420912 - DNA, 107 bp, Homo sapiens; identical to SEQ ID NO: 202369
  chr10:129923799-129923906
  hyper

SEQ ID NO: 420913 - DNA, 348 bp, Homo sapiens; identical to SEQ ID NO: 287674
  chr10:129948377-129948725
  hyper

SEQ ID NO: 420914 - DNA, 36 bp, Homo sapiens; identical to SEQ ID NO: 287675
  chr10:129948755-129948791
  hyper

SEQ ID NO: 420915 - DNA, 236 bp, Homo sapiens; identical to SEQ ID NO: 202371
  chr10:130339417-130339653
  hyper

SEQ ID NO: 420916 - DNA, 96 bp, Homo sapiens; identical to SEQ ID NO: 235224
  chr10:131909004-131909100
  hyper

SEQ ID NO: 420917 - DNA, 160 bp, Homo sapiens; identical to SEQ ID NO: 287681
  chr10:133999363-133999523
  hyper

SEQ ID NO: 420918 - DNA, 112 bp, Homo sapiens; identical to SEQ ID NO: 7815
  chr10:134045912-134046024
  hyper

SEQ ID NO: 420919 - DNA, 37 bp, Homo sapiens; identical to SEQ ID NO: 202373
  chr10:134120669-134120706
  hyper

SEQ ID NO: 420920 - DNA, 387 bp, Homo sapiens; identical to SEQ ID NO: 202374
  chr10:134121014-134121401
  hyper

SEQ ID NO: 420921 - DNA, 945 bp, Homo sapiens; identical to SEQ ID NO: 287688
  chr10:134210377-134211322
  hyper

SEQ ID NO: 420922 - DNA, 57 bp, Homo sapiens; identical to SEQ ID NO: 235237
  chr10:134350649-134350706
  hyper

SEQ ID NO: 420923 - DNA, 770 bp, Homo sapiens; identical to SEQ ID NO: 287690
  chr10:134351009-134351779
  hyper

SEQ ID NO: 420924 - DNA, 116 bp, Homo sapiens; identical to SEQ ID NO: 287691
  chr10:134597971-134598087
  hyper

SEQ ID NO: 420925 - DNA, 162 bp, Homo sapiens; identical to SEQ ID NO: 287692
  chr10:134598860-134599022
  hyper

SEQ ID NO: 420926 - DNA, 92 bp, Homo sapiens; identical to SEQ ID NO: 235242
  chr10:134650441-134650533
  hyper

SEQ ID NO: 420927 - DNA, 138 bp, Homo sapiens; identical to SEQ ID NO: 287698
  chr10:134756183-134756321
  hyper

SEQ ID NO: 420928 - DNA, 216 bp, Homo sapiens; identical to SEQ ID NO: 287701
  chr10:135050910-135051126
  hyper

SEQ ID NO: 420929 - DNA, 97 bp, Homo sapiens; identical to SEQ ID NO: 47990
  chr10:135071117-135071214
  hyper

SEQ ID NO: 420930 - DNA, 42 bp, Homo sapiens; identical to SEQ ID NO: 120067
  chr10:135121725-135121767
  hyper

SEQ ID NO: 420931 - DNA, 120 bp, Homo sapiens; identical to SEQ ID NO: 287707
  chr10:135149102-135149222
  hyper

SEQ ID NO: 420932 - DNA, 456 bp, Homo sapiens; identical to SEQ ID NO: 287708
  chr10:135149869-135150325
  hyper

SEQ ID NO: 420933 - DNA, 125 bp, Homo sapiens; identical to SEQ ID NO: 235259
  chr10:135333791-135333916
  hyper

SEQ ID NO: 420934 - DNA, 229 bp, Homo sapiens; identical to SEQ ID NO: 235260
  chr11:207667-207896
  hyper

SEQ ID NO: 420935 - DNA, 37 bp, Homo sapiens; identical to SEQ ID NO: 287712
  chr11:279532-279569
  hyper

SEQ ID NO: 420936 - DNA, 412 bp, Homo sapiens; identical to SEQ ID NO: 202387
  chr11:314083-314495
  hyper

SEQ ID NO: 420937 - DNA, 31 bp, Homo sapiens; identical to SEQ ID NO: 235266
  chr11:369237-369268
  hyper

SEQ ID NO: 420938 - DNA, 268 bp, Homo sapiens; identical to SEQ ID NO: 202390
  chr11:450011-450279
  hyper

SEQ ID NO: 420939 - DNA, 105 bp, Homo sapiens; identical to SEQ ID NO: 287722
  chr11:485908-486013
  hyper

SEQ ID NO: 420940 - DNA, 79 bp, Homo sapiens; identical to SEQ ID NO: 287723
  chr11:486095-486174
  hyper

SEQ ID NO: 420941 - DNA, 182 bp, Homo sapiens; identical to SEQ ID NO: 202391
  chr11:518712-518894
  hyper

SEQ ID NO: 420942 - DNA, 61 bp, Homo sapiens; identical to SEQ ID NO: 287725
  chr11:518933-518994
  hyper

SEQ ID NO: 420943 - DNA, 211 bp, Homo sapiens; identical to SEQ ID NO: 287727
  chr11:568188-568399
  hyper

SEQ ID NO: 420944 - DNA, 184 bp, Homo sapiens; identical to SEQ ID NO: 202393
  chr11:575194-575378
  hyper

SEQ ID NO: 420945 - DNA, 221 bp, Homo sapiens; identical to SEQ ID NO: 202394
  chr11:575604-575825
  hyper

SEQ ID NO: 420946 - DNA, 60 bp, Homo sapiens; identical to SEQ ID NO: 235272
  chr11:576422-576482
  hyper

SEQ ID NO: 420947 - DNA, 93 bp, Homo sapiens; identical to SEQ ID NO: 287731
  chr11:615557-615650
  hyper

SEQ ID NO: 420948 - DNA, 151 bp, Homo sapiens; identical to SEQ ID NO: 120121
  chr11:639682-639833
  hyper

SEQ ID NO: 420949 - DNA, 268 bp, Homo sapiens; identical to SEQ ID NO: 287733
  chr11:694728-694996
  hyper

SEQ ID NO: 420950 - DNA, 189 bp, Homo sapiens; identical to SEQ ID NO: 224019
  chr11:721128-721317
  hyper

SEQ ID NO: 420951 - DNA, 177 bp, Homo sapiens; identical to SEQ ID NO: 235276
  chr11:796407-796584
  hyper

SEQ ID NO: 420952 - DNA, 67 bp, Homo sapiens; identical to SEQ ID NO: 202395
  chr11:809683-809750
  hyper

SEQ ID NO: 420953 - DNA, 34 bp, Homo sapiens; identical to SEQ ID NO: 202396
  chr11:832781-832815
  hyper

SEQ ID NO: 420954 - DNA, 47 bp, Homo sapiens; identical to SEQ ID NO: 202397
  chr11:842931-842978
  hyper

SEQ ID NO: 420955 - DNA, 41 bp, Homo sapiens; identical to SEQ ID NO: 235280
  chr11:910924-910965
  hyper

SEQ ID NO: 420956 - DNA, 103 bp, Homo sapiens; identical to SEQ ID NO: 202398
  chr11:1357360-1357463
  hyper

SEQ ID NO: 420957 - DNA, 473 bp, Homo sapiens; identical to SEQ ID NO: 287743
  chr11:1357818-1358291
  hyper

SEQ ID NO: 420958 - DNA, 52 bp, Homo sapiens; identical to SEQ ID NO: 287744
  chr11:1358332-1358384
  hyper

SEQ ID NO: 420959 - DNA, 677 bp, Homo sapiens; identical to SEQ ID NO: 235284
  chr11:1568236-1568913
  hyper

SEQ ID NO: 420960 - DNA, 498 bp, Homo sapiens; identical to SEQ ID NO: 224022
  chr11:1592747-1593245
  hyper

SEQ ID NO: 420961 - DNA, 95 bp, Homo sapiens; identical to SEQ ID NO: 202401
  chr11:1593577-1593672
  hyper

SEQ ID NO: 420962 - DNA, 117 bp, Homo sapiens; identical to SEQ ID NO: 202402
  chr11:1594039-1594156
  hyper

SEQ ID NO: 420963 - DNA, 65 bp, Homo sapiens; identical to SEQ ID NO: 202403
  chr11:1674134-1674199
  hyper

SEQ ID NO: 420964 - DNA, 152 bp, Homo sapiens; identical to SEQ ID NO: 287751
  chr11:1769712-1769864
  hyper

SEQ ID NO: 420965 - DNA, 216 bp, Homo sapiens; identical to SEQ ID NO: 235288
  chr11:1968629-1968845
  hyper

SEQ ID NO: 420966 - DNA, 98 bp, Homo sapiens; identical to SEQ ID NO: 202405
  chr11:1970024-1970122
  hyper

SEQ ID NO: 420967 - DNA, 176 bp, Homo sapiens; identical to SEQ ID NO: 202407
  chr11:2421277-2421453
  hyper

SEQ ID NO: 420968 - DNA, 109 bp, Homo sapiens; identical to SEQ ID NO: 202408
  chr11:2554316-2554425
  hyper

SEQ ID NO: 420969 - DNA, 64 bp, Homo sapiens; identical to SEQ ID NO: 202409
  chr11:2554454-2554518
  hyper

SEQ ID NO: 420970 - DNA, 67 bp, Homo sapiens; identical to SEQ ID NO: 287763
  chr11:2884036-2884103
  hyper

SEQ ID NO: 420971 - DNA, 90 bp, Homo sapiens; identical to SEQ ID NO: 235298
  chr11:2890916-2891006
  hyper

SEQ ID NO: 420972 - DNA, 349 bp, Homo sapiens; identical to SEQ ID NO: 287765
  chr11:2905510-2905859
  hyper

SEQ ID NO: 420973 - DNA, 269 bp, Homo sapiens; identical to SEQ ID NO: 202412
  chr11:2906036-2906305
  hyper

SEQ ID NO: 420974 - DNA, 201 bp, Homo sapiens; identical to SEQ ID NO: 202413
  chr11:2906580-2906781
  hyper

SEQ ID NO: 420975 - DNA, 170 bp, Homo sapiens; identical to SEQ ID NO: 202414
  chr11:2906971-2907141
  hyper

SEQ ID NO: 420976 - DNA, 60 bp, Homo sapiens; identical to SEQ ID NO: 235300
  chr11:2923533-2923593
  hyper

SEQ ID NO: 420977 - DNA, 433 bp, Homo sapiens; identical to SEQ ID NO: 224029
  chr11:2951691-2952124
  hyper

SEQ ID NO: 420978 - DNA, 297 bp, Homo sapiens; identical to SEQ ID NO: 235302
  chr11:3013495-3013792
  hyper

SEQ ID NO: 420979 - DNA, 140 bp, Homo sapiens; identical to SEQ ID NO: 202415
  chr11:3014088-3014228
  hyper

SEQ ID NO: 420980 - DNA, 299 bp, Homo sapiens; identical to SEQ ID NO: 235304
  chr11:3078596-3078895
  hyper

SEQ ID NO: 420981 - DNA, 235 bp, Homo sapiens; identical to SEQ ID NO: 235308
  chr11:3224437-3224672
  hyper

SEQ ID NO: 420982 - DNA, 34 bp, Homo sapiens; identical to SEQ ID NO: 235309
  chr11:3400477-3400511
  hyper

SEQ ID NO: 420983 - DNA, 242 bp, Homo sapiens; identical to SEQ ID NO: 202418
  chr11:3444553-3444795
  hyper

SEQ ID NO: 420984 - DNA, 332 bp, Homo sapiens; identical to SEQ ID NO: 235311
  chr11:3818839-3819171
  hyper

SEQ ID NO: 420985 - DNA, 74 bp, Homo sapiens; identical to SEQ ID NO: 287785
  chr11:6281090-6281164
  hyper

SEQ ID NO: 420986 - DNA, 157 bp, Homo sapiens; identical to SEQ ID NO: 287786
  chr11:6341237-6341394
  hyper

SEQ ID NO: 420987 - DNA, 285 bp, Homo sapiens; identical to SEQ ID NO: 287787
  chr11:6341484-6341769
  hyper

SEQ ID NO: 420988 - DNA, 41 bp, Homo sapiens; identical to SEQ ID NO: 202420
  chr11:6440456-6440497
  hyper

SEQ ID NO: 420989 - DNA, 197 bp, Homo sapiens; identical to SEQ ID NO: 235316
  chr11:6495354-6495551
  hyper

SEQ ID NO: 420990 - DNA, 218 bp, Homo sapiens; identical to SEQ ID NO: 287790
  chr11:6502787-6503005
  hyper

SEQ ID NO: 420991 - DNA, 250 bp, Homo sapiens; identical to SEQ ID NO: 235318
  chr11:6625058-6625308
  hyper

SEQ ID NO: 420992 - DNA, 84 bp, Homo sapiens; identical to SEQ ID NO: 235319
  chr11:6640706-6640790
  hyper

SEQ ID NO: 420993 - DNA, 177 bp, Homo sapiens; identical to SEQ ID NO: 287793
  chr11:6677036-6677213
  hyper

SEQ ID NO: 420994 - DNA, 349 bp, Homo sapiens; identical to SEQ ID NO: 235321
  chr11:6704608-6704957
  hyper

SEQ ID NO: 420995 - DNA, 66 bp, Homo sapiens; identical to SEQ ID NO: 202422
  chr11:6947537-6947603
  hyper

SEQ ID NO: 420996 - DNA, 684 bp, Homo sapiens; identical to SEQ ID NO: 287796
  chr11:7041181-7041865
  hyper

SEQ ID NO: 420997 - DNA, 107 bp, Homo sapiens; identical to SEQ ID NO: 202424
  chr11:7272753-7272860
  hyper

SEQ ID NO: 420998 - DNA, 40 bp, Homo sapiens; identical to SEQ ID NO: 202425
  chr11:8103155-8103195
  hyper

SEQ ID NO: 420999 - DNA, 134 bp, Homo sapiens; identical to SEQ ID NO: 235332
  chr11:8285495-8285629
  hyper

SEQ ID NO: 421000 - DNA, 33 bp, Homo sapiens; identical to SEQ ID NO: 235334
  chr11:8703870-8703903
  hyper

SEQ ID NO: 421001 - DNA, 49 bp, Homo sapiens; identical to SEQ ID NO: 235335
  chr11:8704467-8704516
  hyper

SEQ ID NO: 421002 - DNA, 140 bp, Homo sapiens; identical to SEQ ID NO: 202430
  chr11:8710629-8710769
  hyper

SEQ ID NO: 421003 - DNA, 558 bp, Homo sapiens; identical to SEQ ID NO: 235337
  chr11:8892073-8892631
  hyper

SEQ ID NO: 421004 - DNA, 884 bp, Homo sapiens; identical to SEQ ID NO: 235341
  chr11:9286204-9287088
  hyper

SEQ ID NO: 421005 - DNA, 179 bp, Homo sapiens; identical to SEQ ID NO: 235342
  chr11:9336372-9336551
  hyper

SEQ ID NO: 421006 - DNA, 35 bp, Homo sapiens; identical to SEQ ID NO: 235343
  chr11:9406095-9406130
  hyper

SEQ ID NO: 421007 - DNA, 268 bp, Homo sapiens; identical to SEQ ID NO: 235344
  chr11:9482341-9482609
  hyper

SEQ ID NO: 421008 - DNA, 721 bp, Homo sapiens; identical to SEQ ID NO: 287816
  chr11:9596147-9596868
  hyper

SEQ ID NO: 421009 - DNA, 173 bp, Homo sapiens; identical to SEQ ID NO: 235346
  chr11:9635931-9636104
  hyper

SEQ ID NO: 421010 - DNA, 89 bp, Homo sapiens; identical to SEQ ID NO: 287818
  chr11:9685091-9685180
  hyper

SEQ ID NO: 421011 - DNA, 823 bp, Homo sapiens; identical to SEQ ID NO: 120296
  chr11:9685218-9686041
  hyper

SEQ ID NO: 421012 - DNA, 123 bp, Homo sapiens; identical to SEQ ID NO: 202436
  chr11:10316353-10316476
  hyper

SEQ ID NO: 421013 - DNA, 385 bp, Homo sapiens; identical to SEQ ID NO: 235349
  chr11:10324219-10324604
  hyper

SEQ ID NO: 421014 - DNA, 232 bp, Homo sapiens; identical to SEQ ID NO: 235351
  chr11:10329351-10329583
  hyper

SEQ ID NO: 421015 - DNA, 159 bp, Homo sapiens; identical to SEQ ID NO: 235352
  chr11:10562151-10562310
  hyper

SEQ ID NO: 421016 - DNA, 166 bp, Homo sapiens; identical to SEQ ID NO: 235353
  chr11:10772630-10772796
  hyper

SEQ ID NO: 421017 - DNA, 31 bp, Homo sapiens; identical to SEQ ID NO: 235354
  chr11:10830956-10830987
  hyper

SEQ ID NO: 421018 - DNA, 151 bp, Homo sapiens; identical to SEQ ID NO: 235355
  chr11:10880014-10880165
  hyper

SEQ ID NO: 421019 - DNA, 135 bp, Homo sapiens; identical to SEQ ID NO: 202437
  chr11:11642467-11642602
  hyper

SEQ ID NO: 421020 - DNA, 348 bp, Homo sapiens; identical to SEQ ID NO: 202438
  chr11:11642668-11643016
  hyper

SEQ ID NO: 421021 - DNA, 660 bp, Homo sapiens; identical to SEQ ID NO: 287831
  chr11:11643304-11643964
  hyper

SEQ ID NO: 421022 - DNA, 159 bp, Homo sapiens; identical to SEQ ID NO: 287840
  chr11:12715488-12715647
  hyper

SEQ ID NO: 421023 - DNA, 86 bp, Homo sapiens; identical to SEQ ID NO: 287841
  chr11:12715677-12715763
  hyper

SEQ ID NO: 421024 - DNA, 76 bp, Homo sapiens; identical to SEQ ID NO: 235365
  chr11:13229521-13229597
  hyper

SEQ ID NO: 421025 - DNA, 304 bp, Homo sapiens; identical to SEQ ID NO: 287846
  chr11:13298519-13298823
  hyper

SEQ ID NO: 421026 - DNA, 130 bp, Homo sapiens; identical to SEQ ID NO: 235367
  chr11:13484749-13484879
  hyper

SEQ ID NO: 421027 - DNA, 80 bp, Homo sapiens; identical to SEQ ID NO: 235368
  chr11:13485189-13485269
  hyper

SEQ ID NO: 421028 - DNA, 203 bp, Homo sapiens; identical to SEQ ID NO: 287852
  chr11:14521221-14521424
  hyper

SEQ ID NO: 421029 - DNA, 170 bp, Homo sapiens; identical to SEQ ID NO: 120342
  chr11:14521484-14521654
  hyper

SEQ ID NO: 421030 - DNA, 396 bp, Homo sapiens; identical to SEQ ID NO: 235372
  chr11:14541533-14541929
  hyper

SEQ ID NO: 421031 - DNA, 137 bp, Homo sapiens; identical to SEQ ID NO: 235373
  chr11:14542171-14542308
  hyper

SEQ ID NO: 421032 - DNA, 251 bp, Homo sapiens; identical to SEQ ID NO: 202457
  chr11:15671676-15671927
  hyper

SEQ ID NO: 421033 - DNA, 57 bp, Homo sapiens; identical to SEQ ID NO: 235378
  chr11:16627948-16628005
  hyper

SEQ ID NO: 421034 - DNA, 257 bp, Homo sapiens
  chr11:16629116-16629373
  hyper
gggtgggggcagcgcagagcggcagaagtttgccgccggggttccaggaggtgcgcgcggagcggggtgactaggggcttcaccctggaacaagtgaaggcgatggttagtgctgtcaatcttggcaatcagtgtgagcggccatgtcgtaagtattcaaagcatttcccgtcgtgcaacatcagaaagtgagtggccagggcattgatctgagcgagggagaggaggctgggctcccctcccagacaacacaggca

SEQ ID NO: 421035 - DNA, 180 bp, Homo sapiens; identical to SEQ ID NO: 287868
  chr11:16632670-16632850
  hyper

SEQ ID NO: 421036 - DNA, 103 bp, Homo sapiens; identical to SEQ ID NO: 235381
  chr11:16633300-16633403
  hyper

SEQ ID NO: 421037 - DNA, 112 bp, Homo sapiens; identical to SEQ ID NO: 202462
  chr11:16759951-16760063
  hyper

SEQ ID NO: 421038 - DNA, 404 bp, Homo sapiens; identical to SEQ ID NO: 235387
  chr11:17228726-17229130
  hyper

SEQ ID NO: 421039 - DNA, 228 bp, Homo sapiens; identical to SEQ ID NO: 235390
  chr11:17411057-17411285
  hyper

SEQ ID NO: 421040 - DNA, 481 bp, Homo sapiens; identical to SEQ ID NO: 287883
  chr11:17498265-17498746
  hyper

SEQ ID NO: 421041 - DNA, 89 bp, Homo sapiens; identical to SEQ ID NO: 202471
  chr11:17740292-17740381
  hyper

SEQ ID NO: 421042 - DNA, 81 bp, Homo sapiens; identical to SEQ ID NO: 287885
  chr11:17741187-17741268
  hyper

SEQ ID NO: 421043 - DNA, 81 bp, Homo sapiens; identical to SEQ ID NO: 287886
  chr11:17741598-17741679
  hyper

SEQ ID NO: 421044 - DNA, 37 bp, Homo sapiens
  chr11:17756849-17756886
  hyper
gggcccgccgccggggggagcaggcagccaagcaagg

SEQ ID NO: 421045 - DNA, 156 bp, Homo sapiens; identical to SEQ ID NO: 287892
  chr11:18034650-18034806
  hyper

SEQ ID NO: 421046 - DNA, 114 bp, Homo sapiens; identical to SEQ ID NO: 48214
  chr11:18034821-18034935
  hyper

SEQ ID NO: 421047 - DNA, 107 bp, Homo sapiens; identical to SEQ ID NO: 235402
  chr11:18343666-18343773
  hyper

SEQ ID NO: 421048 - DNA, 1228 bp, Homo sapiens; identical to SEQ ID NO: 235403
  chr11:18415860-18417088
  hyper

SEQ ID NO: 421049 - DNA, 35 bp, Homo sapiens; identical to SEQ ID NO: 235404
  chr11:18548288-18548323
  hyper

SEQ ID NO: 421050 - DNA, 240 bp, Homo sapiens; identical to SEQ ID NO: 235405
  chr11:18548581-18548821
  hyper

SEQ ID NO: 421051 - DNA, 55 bp, Homo sapiens; identical to SEQ ID NO: 202475
  chr11:18610408-18610463
  hyper

SEQ ID NO: 421052 - DNA, 173 bp, Homo sapiens; identical to SEQ ID NO: 202476
  chr11:18610571-18610744
  hyper

SEQ ID NO: 421053 - DNA, 32 bp, Homo sapiens; identical to SEQ ID NO: 235407
  chr11:18656064-18656096
  hyper

SEQ ID NO: 421054 - DNA, 36 bp, Homo sapiens; identical to SEQ ID NO: 202477
  chr11:18742610-18742646
  hyper

SEQ ID NO: 421055 - DNA, 313 bp, Homo sapiens; identical to SEQ ID NO: 202478
  chr11:18743161-18743474
  hyper

SEQ ID NO: 421056 - DNA, 115 bp, Homo sapiens; identical to SEQ ID NO: 202479
  chr11:18743577-18743692
  hyper

SEQ ID NO: 421057 - DNA, 201 bp, Homo sapiens; identical to SEQ ID NO: 287904
  chr11:18814051-18814252
  hyper

SEQ ID NO: 421058 - DNA, 136 bp, Homo sapiens; identical to SEQ ID NO: 202481
  chr11:19093003-19093139
  hyper

SEQ ID NO: 421059 - DNA, 225 bp, Homo sapiens; identical to SEQ ID NO: 287909
  chr11:19735484-19735709
  hyper

SEQ ID NO: 421060 - DNA, 208 bp, Homo sapiens; identical to SEQ ID NO: 287913
  chr11:20182623-20182831
  hyper

SEQ ID NO: 421061 - DNA, 58 bp, Homo sapiens; identical to SEQ ID NO: 287914
  chr11:20183111-20183169
  hyper

SEQ ID NO: 421062 - DNA, 143 bp, Homo sapiens; identical to SEQ ID NO: 287915
  chr11:20184147-20184290
  hyper

SEQ ID NO: 421063 - DNA, 68 bp, Homo sapiens; identical to SEQ ID NO: 235428
  chr11:20408919-20408987
  hyper

SEQ ID NO: 421064 - DNA, 166 bp, Homo sapiens; identical to SEQ ID NO: 235433
  chr11:20631747-20631913
  hyper

SEQ ID NO: 421065 - DNA, 89 bp, Homo sapiens; identical to SEQ ID NO: 235434
  chr11:20689751-20689840
  hyper

SEQ ID NO: 421066 - DNA, 110 bp, Homo sapiens; identical to SEQ ID NO: 287925
  chr11:22363209-22363319
  hyper

SEQ ID NO: 421067 - DNA, 137 bp, Homo sapiens; identical to SEQ ID NO: 287926
  chr11:22646583-22646720
  hyper

SEQ ID NO: 421068 - DNA, 32 bp, Homo sapiens; identical to SEQ ID NO: 202488
  chr11:22688605-22688637
  hyper

SEQ ID NO: 421069 - DNA, 133 bp, Homo sapiens; identical to SEQ ID NO: 202489
  chr11:22850852-22850985
  hyper

SEQ ID NO: 421070 - DNA, 170 bp, Homo sapiens; identical to SEQ ID NO: 287930
  chr11:24518213-24518383
  hyper

SEQ ID NO: 421071 - DNA, 93 bp, Homo sapiens; identical to SEQ ID NO: 287931
  chr11:24518550-24518643
  hyper

SEQ ID NO: 421072 - DNA, 220 bp, Homo sapiens; identical to SEQ ID NO: 287932
  chr11:24518700-24518920
  hyper

SEQ ID NO: 421073 - DNA, 117 bp, Homo sapiens; identical to SEQ ID NO: 235449
  chr11:27384895-27385012
  hyper

SEQ ID NO: 421074 - DNA, 284 bp, Homo sapiens; identical to SEQ ID NO: 235450
  chr11:27493263-27493547
  hyper

SEQ ID NO: 421075 - DNA, 762 bp, Homo sapiens; identical to SEQ ID NO: 202490
  chr11:27493756-27494518
  hyper

SEQ ID NO: 421076 - DNA, 221 bp, Homo sapiens; identical to SEQ ID NO: 235452
  chr11:27721074-27721295
  hyper

SEQ ID NO: 421077 - DNA, 32 bp, Homo sapiens; identical to SEQ ID NO: 235453
  chr11:27722046-27722078
  hyper

SEQ ID NO: 421078 - DNA, 216 bp, Homo sapiens; identical to SEQ ID NO: 287940
  chr11:27743203-27743419
  hyper

SEQ ID NO: 421079 - DNA, 147 bp, Homo sapiens; identical to SEQ ID NO: 235459
  chr11:28129838-28129985
  hyper

SEQ ID NO: 421080 - DNA, 118 bp, Homo sapiens; identical to SEQ ID NO: 235465
  chr11:30344496-30344614
  hyper

SEQ ID NO: 421081 - DNA, 242 bp, Homo sapiens; identical to SEQ ID NO: 287943
  chr11:30606409-30606651
  hyper

SEQ ID NO: 421082 - DNA, 336 bp, Homo sapiens; identical to SEQ ID NO: 202493
  chr11:30607762-30608098
  hyper

SEQ ID NO: 421083 - DNA, 135 bp, Homo sapiens; identical to SEQ ID NO: 287945
  chr11:30608219-30608354
  hyper

SEQ ID NO: 421084 - DNA, 233 bp, Homo sapiens; identical to SEQ ID NO: 235468
  chr11:31391279-31391512
  hyper

SEQ ID NO: 421085 - DNA, 231 bp, Homo sapiens; identical to SEQ ID NO: 235469
  chr11:31531543-31531774
  hyper

SEQ ID NO: 421086 - DNA, 42 bp, Homo sapiens; identical to SEQ ID NO: 202496
  chr11:31831437-31831479
  hyper

SEQ ID NO: 421087 - DNA, 142 bp, Homo sapiens; identical to SEQ ID NO: 202497
  chr11:31832139-31832281
  hyper

SEQ ID NO: 421088 - DNA, 94 bp, Homo sapiens
  chr11:31833423-31833517
  hyper
ggaggccgcggcgaagcctaggccgagaggaggttgccgggccgagaactaaacgaggccagaggcctccccagcccaagcctccagggcctgt

SEQ ID NO: 421089 - DNA, 180 bp, Homo sapiens; identical to SEQ ID NO: 202499
  chr11:31833906-31834086
  hyper

SEQ ID NO: 421090 - DNA, 231 bp, Homo sapiens; identical to SEQ ID NO: 202500
  chr11:31834242-31834473
  hyper

SEQ ID NO: 421091 - DNA, 226 bp, Homo sapiens; identical to SEQ ID NO: 202501
  chr11:31834848-31835074
  hyper

SEQ ID NO: 421092 - DNA, 90 bp, Homo sapiens; identical to SEQ ID NO: 235486
  chr11:31836598-31836688
  hyper

SEQ ID NO: 421093 - DNA, 97 bp, Homo sapiens; identical to SEQ ID NO: 202503
  chr11:32605170-32605267
  hyper

SEQ ID NO: 421094 - DNA, 94 bp, Homo sapiens; identical to SEQ ID NO: 235505
  chr11:32605714-32605808
  hyper

SEQ ID NO: 421095 - DNA, 97 bp, Homo sapiens; identical to SEQ ID NO: 287966
  chr11:33037370-33037467
  hyper

SEQ ID NO: 421096 - DNA, 291 bp, Homo sapiens; identical to SEQ ID NO: 287967
  chr11:33037640-33037931
  hyper

SEQ ID NO: 421097 - DNA, 101 bp, Homo sapiens; identical to SEQ ID NO: 235509
  chr11:33060993-33061094
  hyper

SEQ ID NO: 421098 - DNA, 41 bp, Homo sapiens; identical to SEQ ID NO: 235510
  chr11:33182773-33182814
  hyper

SEQ ID NO: 421099 - DNA, 264 bp, Homo sapiens; identical to SEQ ID NO: 235511
  chr11:33183094-33183358
  hyper

SEQ ID NO: 421100 - DNA, 162 bp, Homo sapiens; identical to SEQ ID NO: 287971
  chr11:33397373-33397535
  hyper

SEQ ID NO: 421101 - DNA, 46 bp, Homo sapiens
  chr11:33397642-33397688
  hyper
gtgctttctttgtcaatgaggcgccgctctgagctgcggtagcact

SEQ ID NO: 421102 - DNA, 279 bp, Homo sapiens; identical to SEQ ID NO: 398660
  chr11:33890957-33891236
  hyper

SEQ ID NO: 421103 - DNA, 118 bp, Homo sapiens; identical to SEQ ID NO: 235515
  chr11:34126917-34127035
  hyper

SEQ ID NO: 421104 - DNA, 287 bp, Homo sapiens
  chr11:35161073-35161360
  hyper
gctaaaccgttggagaatgtgtctgtggaagcaccatttggttgaaagaaaaagagaaagagaagaaagtttgttgggcaggctgccggcgcgcagttttgggcgaggtcgctagagctgcagcacatggcagaaagtaaccgttctcccggatgcgcacagtcgttgtctggactaacaggctcctgtgcccaagggctcgccaagccccaccgggctgtgtctaggcagggcagagctgggcggggcagagactggggctggaacagggcgagtggctgttatca

SEQ ID NO: 421105 - DNA, 88 bp, Homo sapiens; identical to SEQ ID NO: 287981
  chr11:35441758-35441846
  hyper

SEQ ID NO: 421106 - DNA, 80 bp, Homo sapiens; identical to SEQ ID NO: 235520
  chr11:35442069-35442149
  hyper

SEQ ID NO: 421107 - DNA, 70 bp, Homo sapiens; identical to SEQ ID NO: 388861
  chr11:35640429-35640499
  hyper

SEQ ID NO: 421108 - DNA, 66 bp, Homo sapiens; identical to SEQ ID NO: 202518
  chr11:35641617-35641683
  hyper

SEQ ID NO: 421109 - DNA, 58 bp, Homo sapiens; identical to SEQ ID NO: 287988
  chr11:35641718-35641776
  hyper

SEQ ID NO: 421110 - DNA, 156 bp, Homo sapiens; identical to SEQ ID NO: 202519
  chr11:35966093-35966249
  hyper

SEQ ID NO: 421111 - DNA, 79 bp, Homo sapiens; identical to SEQ ID NO: 202520
  chr11:36397978-36398057
  hyper

SEQ ID NO: 421112 - DNA, 223 bp, Homo sapiens; identical to SEQ ID NO: 202521
  chr11:36398477-36398700
  hyper

SEQ ID NO: 421113 - DNA, 199 bp, Homo sapiens; identical to SEQ ID NO: 235526
  chr11:36531740-36531939
  hyper

SEQ ID NO: 421114 - DNA, 411 bp, Homo sapiens; identical to SEQ ID NO: 235527
  chr11:36616034-36616445
  hyper

SEQ ID NO: 421115 - DNA, 131 bp, Homo sapiens; identical to SEQ ID NO: 388863
  chr11:40315285-40315416
  hyper

SEQ ID NO: 421116 - DNA, 214 bp, Homo sapiens; identical to SEQ ID NO: 235529
  chr11:43333313-43333527
  hyper

SEQ ID NO: 421117 - DNA, 254 bp, Homo sapiens; identical to SEQ ID NO: 287997
  chr11:43569315-43569569
  hyper

SEQ ID NO: 421118 - DNA, 336 bp, Homo sapiens; identical to SEQ ID NO: 235539
  chr11:43902242-43902578
  hyper

SEQ ID NO: 421119 - DNA, 103 bp, Homo sapiens; identical to SEQ ID NO: 398670
  chr11:43965360-43965463
  hyper

SEQ ID NO: 421120 - DNA, 128 bp, Homo sapiens; identical to SEQ ID NO: 202530
  chr11:44087990-44088118
  hyper

SEQ ID NO: 421121 - DNA, 85 bp, Homo sapiens; identical to SEQ ID NO: 235546
  chr11:44117173-44117258
  hyper

SEQ ID NO: 421122 - DNA, 174 bp, Homo sapiens; identical to SEQ ID NO: 288009
  chr11:44327413-44327587
  hyper

SEQ ID NO: 421123 - DNA, 33 bp, Homo sapiens; identical to SEQ ID NO: 235551
  chr11:44332119-44332152
  hyper

SEQ ID NO: 421124 - DNA, 365 bp, Homo sapiens; identical to SEQ ID NO: 235554
  chr11:44341437-44341802
  hyper

SEQ ID NO: 421125 - DNA, 384 bp, Homo sapiens; identical to SEQ ID NO: 235557
  chr11:44970973-44971357
  hyper

SEQ ID NO: 421126 - DNA, 374 bp, Homo sapiens; identical to SEQ ID NO: 288019
  chr11:45307446-45307820
  hyper

SEQ ID NO: 421127 - DNA, 155 bp, Homo sapiens; identical to SEQ ID NO: 202536
  chr11:45307857-45308012
  hyper

SEQ ID NO: 421128 - DNA, 96 bp, Homo sapiens; identical to SEQ ID NO: 202537
  chr11:45684299-45684395
  hyper

SEQ ID NO: 421129 - DNA, 77 bp, Homo sapiens; identical to SEQ ID NO: 288023
  chr11:45686160-45686237
  hyper

SEQ ID NO: 421130 - DNA, 152 bp, Homo sapiens; identical to SEQ ID NO: 288024
  chr11:45687045-45687197
  hyper

SEQ ID NO: 421131 - DNA, 77 bp, Homo sapiens; identical to SEQ ID NO: 235562
  chr11:45687429-45687506
  hyper

SEQ ID NO: 421132 - DNA, 186 bp, Homo sapiens; identical to SEQ ID NO: 202538
  chr11:45825485-45825671
  hyper

SEQ ID NO: 421133 - DNA, 183 bp, Homo sapiens; identical to SEQ ID NO: 235563
  chr11:45826513-45826696
  hyper

SEQ ID NO: 421134 - DNA, 217 bp, Homo sapiens; identical to SEQ ID NO: 202539
  chr11:45907277-45907494
  hyper

SEQ ID NO: 421135 - DNA, 45 bp, Homo sapiens; identical to SEQ ID NO: 235565
  chr11:46141117-46141162
  hyper

SEQ ID NO: 421136 - DNA, 615 bp, Homo sapiens; identical to SEQ ID NO: 288030
  chr11:46259484-46260099
  hyper

SEQ ID NO: 421137 - DNA, 167 bp, Homo sapiens; identical to SEQ ID NO: 235567
  chr11:46260604-46260771
  hyper

SEQ ID NO: 421138 - DNA, 62 bp, Homo sapiens; identical to SEQ ID NO: 202540
  chr11:46264958-46265020
  hyper

SEQ ID NO: 421139 - DNA, 42 bp, Homo sapiens; identical to SEQ ID NO: 235570
  chr11:46402521-46402563
  hyper

SEQ ID NO: 421140 - DNA, 206 bp, Homo sapiens; identical to SEQ ID NO: 288035
  chr11:46412034-46412240
  hyper

SEQ ID NO: 421141 - DNA, 308 bp, Homo sapiens; identical to SEQ ID NO: 120673
  chr11:46412276-46412584
  hyper

SEQ ID NO: 421142 - DNA, 77 bp, Homo sapiens; identical to SEQ ID NO: 288037
  chr11:46412965-46413042
  hyper

SEQ ID NO: 421143 - DNA, 470 bp, Homo sapiens; identical to SEQ ID NO: 288038
  chr11:46413304-46413774
  hyper

SEQ ID NO: 421144 - DNA, 333 bp, Homo sapiens; identical to SEQ ID NO: 224102
  chr11:46564032-46564365
  hyper

SEQ ID NO: 421145 - DNA, 72 bp, Homo sapiens; identical to SEQ ID NO: 235574
  chr11:46638624-46638696
  hyper

SEQ ID NO: 421146 - DNA, 182 bp, Homo sapiens; identical to SEQ ID NO: 224103
  chr11:46848281-46848463
  hyper

SEQ ID NO: 421147 - DNA, 34 bp, Homo sapiens; identical to SEQ ID NO: 224105
  chr11:46939597-46939631
  hyper

SEQ ID NO: 421148 - DNA, 46 bp, Homo sapiens; identical to SEQ ID NO: 235577
  chr11:47198542-47198588
  hyper

SEQ ID NO: 421149 - DNA, 51 bp, Homo sapiens; identical to SEQ ID NO: 202544
  chr11:47237126-47237177
  hyper

SEQ ID NO: 421150 - DNA, 246 bp, Homo sapiens; identical to SEQ ID NO: 235580
  chr11:47279142-47279388
  hyper

SEQ ID NO: 421151 - DNA, 81 bp, Homo sapiens; identical to SEQ ID NO: 235581
  chr11:47447397-47447478
  hyper

SEQ ID NO: 421152 - DNA, 62 bp, Homo sapiens; identical to SEQ ID NO: 202545
  chr11:47448209-47448271
  hyper

SEQ ID NO: 421153 - DNA, 150 bp, Homo sapiens; identical to SEQ ID NO: 235583
  chr11:47600837-47600987
  hyper

SEQ ID NO: 421154 - DNA, 154 bp, Homo sapiens; identical to SEQ ID NO: 235584
  chr11:47664236-47664390
  hyper

SEQ ID NO: 421155 - DNA, 32 bp, Homo sapiens; identical to SEQ ID NO: 235585
  chr11:47789176-47789208
  hyper

SEQ ID NO: 421156 - DNA, 50 bp, Homo sapiens; identical to SEQ ID NO: 224106
  chr11:48002696-48002746
  hyper

SEQ ID NO: 421157 - DNA, 123 bp, Homo sapiens; identical to SEQ ID NO: 288054
  chr11:49229870-49229993
  hyper

SEQ ID NO: 421158 - DNA, 175 bp, Homo sapiens; identical to SEQ ID NO: 235588
  chr11:57092401-57092576
  hyper

SEQ ID NO: 421159 - DNA, 231 bp, Homo sapiens; identical to SEQ ID NO: 235589
  chr11:57103415-57103646
  hyper

SEQ ID NO: 421160 - DNA, 78 bp, Homo sapiens; identical to SEQ ID NO: 235593
  chr11:57298238-57298316
  hyper

SEQ ID NO: 421161 - DNA, 53 bp, Homo sapiens; identical to SEQ ID NO: 202548
  chr11:57365687-57365740
  hyper

SEQ ID NO: 421162 - DNA, 136 bp, Homo sapiens; identical to SEQ ID NO: 288065
  chr11:57414486-57414622
  hyper

SEQ ID NO: 421163 - DNA, 39 bp, Homo sapiens; identical to SEQ ID NO: 202549
  chr11:57417004-57417043
  hyper

SEQ ID NO: 421164 - DNA, 109 bp, Homo sapiens; identical to SEQ ID NO: 202550
  chr11:57425067-57425176
  hyper

SEQ ID NO: 421165 - DNA, 51 bp, Homo sapiens; identical to SEQ ID NO: 202551
  chr11:57434928-57434979
  hyper

SEQ ID NO: 421166 - DNA, 103 bp, Homo sapiens; identical to SEQ ID NO: 235599
  chr11:57479590-57479693
  hyper

SEQ ID NO: 421167 - DNA, 116 bp, Homo sapiens; identical to SEQ ID NO: 235600
  chr11:57480293-57480409
  hyper

SEQ ID NO: 421168 - DNA, 39 bp, Homo sapiens; identical to SEQ ID NO: 202552
  chr11:58345681-58345720
  hyper

SEQ ID NO: 421169 - DNA, 429 bp, Homo sapiens; identical to SEQ ID NO: 235604
  chr11:58912103-58912532
  hyper

SEQ ID NO: 421170 - DNA, 142 bp, Homo sapiens; identical to SEQ ID NO: 235606
  chr11:59317876-59318018
  hyper

SEQ ID NO: 421171 - DNA, 198 bp, Homo sapiens; identical to SEQ ID NO: 235609
  chr11:59383395-59383593
  hyper

SEQ ID NO: 421172 - DNA, 210 bp, Homo sapiens; identical to SEQ ID NO: 202557
  chr11:59523106-59523316
  hyper

SEQ ID NO: 421173 - DNA, 55 bp, Homo sapiens; identical to SEQ ID NO: 235610
  chr11:59578500-59578555
  hyper

SEQ ID NO: 421174 - DNA, 267 bp, Homo sapiens; identical to SEQ ID NO: 235611
  chr11:60674118-60674385
  hyper

SEQ ID NO: 421175 - DNA, 49 bp, Homo sapiens; identical to SEQ ID NO: 202558
  chr11:60692121-60692170
  hyper

SEQ ID NO: 421176 - DNA, 45 bp, Homo sapiens; identical to SEQ ID NO: 235613
  chr11:60737965-60738010
  hyper

SEQ ID NO: 421177 - DNA, 155 bp, Homo sapiens; identical to SEQ ID NO: 48499
  chr11:60775226-60775381
  hyper

SEQ ID NO: 421178 - DNA, 306 bp, Homo sapiens; identical to SEQ ID NO: 235614
  chr11:60928909-60929215
  hyper

SEQ ID NO: 421179 - DNA, 118 bp, Homo sapiens; identical to SEQ ID NO: 235616
  chr11:61100429-61100547
  hyper

SEQ ID NO: 421180 - DNA, 128 bp, Homo sapiens; identical to SEQ ID NO: 202560
  chr11:61159724-61159852
  hyper

SEQ ID NO: 421181 - DNA, 224 bp, Homo sapiens; identical to SEQ ID NO: 235618
  chr11:61160436-61160660
  hyper

SEQ ID NO: 421182 - DNA, 152 bp, Homo sapiens; identical to SEQ ID NO: 235619
  chr11:61197745-61197897
  hyper

SEQ ID NO: 421183 - DNA, 406 bp, Homo sapiens; identical to SEQ ID NO: 235624
  chr11:61447552-61447958
  hyper

SEQ ID NO: 421184 - DNA, 519 bp, Homo sapiens; identical to SEQ ID NO: 288101
  chr11:61519848-61520367
  hyper

SEQ ID NO: 421185 - DNA, 166 bp, Homo sapiens; identical to SEQ ID NO: 235627
  chr11:61560143-61560309
  hyper

SEQ ID NO: 421186 - DNA, 372 bp, Homo sapiens; identical to SEQ ID NO: 288103
  chr11:61582809-61583181
  hyper

SEQ ID NO: 421187 - DNA, 265 bp, Homo sapiens; identical to SEQ ID NO: 288104
  chr11:61583629-61583894
  hyper

SEQ ID NO: 421188 - DNA, 679 bp, Homo sapiens; identical to SEQ ID NO: 288105
  chr11:61584126-61584805
  hyper

SEQ ID NO: 421189 - DNA, 35 bp, Homo sapiens; identical to SEQ ID NO: 235631
  chr11:61735124-61735159
  hyper

SEQ ID NO: 421190 - DNA, 164 bp, Homo sapiens; identical to SEQ ID NO: 224119
  chr11:62192262-62192426
  hyper

SEQ ID NO: 421191 - DNA, 468 bp, Homo sapiens; identical to SEQ ID NO: 202568
  chr11:62313646-62314114
  hyper

SEQ ID NO: 421192 - DNA, 301 bp, Homo sapiens; identical to SEQ ID NO: 235634
  chr11:62314747-62315048
  hyper

SEQ ID NO: 421193 - DNA, 32 bp, Homo sapiens; identical to SEQ ID NO: 202569
  chr11:62359274-62359306
  hyper

SEQ ID NO: 421194 - DNA, 49 bp, Homo sapiens; identical to SEQ ID NO: 202571
  chr11:62369884-62369933
  hyper

SEQ ID NO: 421195 - DNA, 232 bp, Homo sapiens; identical to SEQ ID NO: 235639
  chr11:62413282-62413514
  hyper

SEQ ID NO: 421196 - DNA, 68 bp, Homo sapiens; identical to SEQ ID NO: 235640
  chr11:62414222-62414290
  hyper

SEQ ID NO: 421197 - DNA, 395 bp, Homo sapiens; identical to SEQ ID NO: 235641
  chr11:62420564-62420959
  hyper

SEQ ID NO: 421198 - DNA, 304 bp, Homo sapiens; identical to SEQ ID NO: 288124
  chr11:62432819-62433123
  hyper

SEQ ID NO: 421199 - DNA, 231 bp, Homo sapiens; identical to SEQ ID NO: 48540
  chr11:62433206-62433437
  hyper

SEQ ID NO: 421200 - DNA, 81 bp, Homo sapiens; identical to SEQ ID NO: 235643
  chr11:62439248-62439329
  hyper

SEQ ID NO: 421201 - DNA, 239 bp, Homo sapiens; identical to SEQ ID NO: 224123
  chr11:62473884-62474123
  hyper

SEQ ID NO: 421202 - DNA, 118 bp, Homo sapiens; identical to SEQ ID NO: 288128
  chr11:62476910-62477028
  hyper

SEQ ID NO: 421203 - DNA, 208 bp, Homo sapiens; identical to SEQ ID NO: 120837
  chr11:62477103-62477311
  hyper

SEQ ID NO: 421204 - DNA, 249 bp, Homo sapiens; identical to SEQ ID NO: 235645
  chr11:62495747-62495996
  hyper

SEQ ID NO: 421205 - DNA, 257 bp, Homo sapiens; identical to SEQ ID NO: 235646
  chr11:62521741-62521998
  hyper

SEQ ID NO: 421206 - DNA, 316 bp, Homo sapiens; identical to SEQ ID NO: 288132
  chr11:62538724-62539040
  hyper

SEQ ID NO: 421207 - DNA, 110 bp, Homo sapiens; identical to SEQ ID NO: 120846
  chr11:62539068-62539178
  hyper

SEQ ID NO: 421208 - DNA, 126 bp, Homo sapiens; identical to SEQ ID NO: 235648
  chr11:62554789-62554915
  hyper

SEQ ID NO: 421209 - DNA, 410 bp, Homo sapiens; identical to SEQ ID NO: 235649
  chr11:62572860-62573270
  hyper

SEQ ID NO: 421210 - DNA, 105 bp, Homo sapiens; identical to SEQ ID NO: 288136
  chr11:62609872-62609977
  hyper

SEQ ID NO: 421211 - DNA, 610 bp, Homo sapiens; identical to SEQ ID NO: 235651
  chr11:62623424-62624034
  hyper

SEQ ID NO: 421212 - DNA, 206 bp, Homo sapiens; identical to SEQ ID NO: 202576
  chr11:63258404-63258610
  hyper

SEQ ID NO: 421213 - DNA, 54 bp, Homo sapiens; identical to SEQ ID NO: 202577
  chr11:63258770-63258824
  hyper

SEQ ID NO: 421214 - DNA, 276 bp, Homo sapiens; identical to SEQ ID NO: 235652
  chr11:63438923-63439199
  hyper

SEQ ID NO: 421215 - DNA, 239 bp, Homo sapiens; identical to SEQ ID NO: 235653
  chr11:63448768-63449007
  hyper

SEQ ID NO: 421216 - DNA, 209 bp, Homo sapiens; identical to SEQ ID NO: 235654
  chr11:63580539-63580748
  hyper

SEQ ID NO: 421217 - DNA, 144 bp, Homo sapiens; identical to SEQ ID NO: 235655
  chr11:63606383-63606527
  hyper

SEQ ID NO: 421218 - DNA, 106 bp, Homo sapiens; identical to SEQ ID NO: 202578
  chr11:63655734-63655840
  hyper

SEQ ID NO: 421219 - DNA, 87 bp, Homo sapiens; identical to SEQ ID NO: 202579
  chr11:63684092-63684179
  hyper

SEQ ID NO: 421220 - DNA, 144 bp, Homo sapiens; identical to SEQ ID NO: 288147
  chr11:63741835-63741979
  hyper

SEQ ID NO: 421221 - DNA, 121 bp, Homo sapiens; identical to SEQ ID NO: 120876
  chr11:63742038-63742159
  hyper

SEQ ID NO: 421222 - DNA, 93 bp, Homo sapiens; identical to SEQ ID NO: 202582
  chr11:63803767-63803860
  hyper

SEQ ID NO: 421223 - DNA, 47 bp, Homo sapiens; identical to SEQ ID NO: 235663
  chr11:63933982-63934029
  hyper

SEQ ID NO: 421224 - DNA, 69 bp, Homo sapiens; identical to SEQ ID NO: 235664
  chr11:63993861-63993930
  hyper

SEQ ID NO: 421225 - DNA, 71 bp, Homo sapiens; identical to SEQ ID NO: 235665
  chr11:64008118-64008189
  hyper

SEQ ID NO: 421226 - DNA, 309 bp, Homo sapiens; identical to SEQ ID NO: 235666
  chr11:64009405-64009714
  hyper

SEQ ID NO: 421227 - DNA, 45 bp, Homo sapiens; identical to SEQ ID NO: 202583
  chr11:64038085-64038130
  hyper

SEQ ID NO: 421228 - DNA, 166 bp, Homo sapiens; identical to SEQ ID NO: 235672
  chr11:64084952-64085118
  hyper

SEQ ID NO: 421229 - DNA, 202 bp, Homo sapiens; identical to SEQ ID NO: 288163
  chr11:64410436-64410638
  hyper

SEQ ID NO: 421230 - DNA, 240 bp, Homo sapiens; identical to SEQ ID NO: 288165
  chr11:64481256-64481496
  hyper

SEQ ID NO: 421231 - DNA, 96 bp, Homo sapiens; identical to SEQ ID NO: 202588
  chr11:64512084-64512180
  hyper

SEQ ID NO: 421232 - DNA, 153 bp, Homo sapiens; identical to SEQ ID NO: 398730
  chr11:64512196-64512349
  hyper

SEQ ID NO: 421233 - DNA, 173 bp, Homo sapiens; identical to SEQ ID NO: 235680
  chr11:64546210-64546383
  hyper

SEQ ID NO: 421234 - DNA, 246 bp, Homo sapiens; identical to SEQ ID NO: 235681
  chr11:64578117-64578363
  hyper

SEQ ID NO: 421235 - DNA, 198 bp, Homo sapiens; identical to SEQ ID NO: 224132
  chr11:64698945-64699143
  hyper

SEQ ID NO: 421236 - DNA, 263 bp, Homo sapiens; identical to SEQ ID NO: 235684
  chr11:64863597-64863860
  hyper

SEQ ID NO: 421237 - DNA, 215 bp, Homo sapiens; identical to SEQ ID NO: 235685
  chr11:64885145-64885360
  hyper

SEQ ID NO: 421238 - DNA, 76 bp, Homo sapiens; identical to SEQ ID NO: 235686
  chr11:64889776-64889852
  hyper

SEQ ID NO: 421239 - DNA, 91 bp, Homo sapiens; identical to SEQ ID NO: 235687
  chr11:64902078-64902169
  hyper

SEQ ID NO: 421240 - DNA, 164 bp, Homo sapiens; identical to SEQ ID NO: 235688
  chr11:64949024-64949188
  hyper

SEQ ID NO: 421241 - DNA, 71 bp, Homo sapiens; identical to SEQ ID NO: 235689
  chr11:65029047-65029118
  hyper

SEQ ID NO: 421242 - DNA, 68 bp, Homo sapiens; identical to SEQ ID NO: 235690
  chr11:65029371-65029439
  hyper

SEQ ID NO: 421243 - DNA, 195 bp, Homo sapiens; identical to SEQ ID NO: 288182
  chr11:65081963-65082158
  hyper

SEQ ID NO: 421244 - DNA, 73 bp, Homo sapiens; identical to SEQ ID NO: 235692
  chr11:65121847-65121920
  hyper

SEQ ID NO: 421245 - DNA, 91 bp, Homo sapiens; identical to SEQ ID NO: 224135
  chr11:65147933-65148024
  hyper

SEQ ID NO: 421246 - DNA, 145 bp, Homo sapiens; identical to SEQ ID NO: 235693
  chr11:65153828-65153973
  hyper

SEQ ID NO: 421247 - DNA, 98 bp, Homo sapiens; identical to SEQ ID NO: 202592
  chr11:65189906-65190004
  hyper

SEQ ID NO: 421248 - DNA, 221 bp, Homo sapiens; identical to SEQ ID NO: 235697
  chr11:65193823-65194044
  hyper

SEQ ID NO: 421249 - DNA, 82 bp, Homo sapiens; identical to SEQ ID NO: 288190
  chr11:65197599-65197681
  hyper

SEQ ID NO: 421250 - DNA, 80 bp, Homo sapiens; identical to SEQ ID NO: 235699
  chr11:65264702-65264782
  hyper

SEQ ID NO: 421251 - DNA, 316 bp, Homo sapiens; identical to SEQ ID NO: 235700
  chr11:65265757-65266073
  hyper

SEQ ID NO: 421252 - DNA, 210 bp, Homo sapiens; identical to SEQ ID NO: 235701
  chr11:65266388-65266598
  hyper

SEQ ID NO: 421253 - DNA, 241 bp, Homo sapiens; identical to SEQ ID NO: 235702
  chr11:65266934-65267175
  hyper

SEQ ID NO: 421254 - DNA, 324 bp, Homo sapiens; identical to SEQ ID NO: 235703
  chr11:65267949-65268273
  hyper

SEQ ID NO: 421255 - DNA, 410 bp, Homo sapiens; identical to SEQ ID NO: 288196
  chr11:65306805-65307215
  hyper

SEQ ID NO: 421256 - DNA, 105 bp, Homo sapiens; identical to SEQ ID NO: 202597
  chr11:65339689-65339794
  hyper

SEQ ID NO: 421257 - DNA, 173 bp, Homo sapiens; identical to SEQ ID NO: 202598
  chr11:65342125-65342298
  hyper

SEQ ID NO: 421258 - DNA, 476 bp, Homo sapiens; identical to SEQ ID NO: 235706
  chr11:65343104-65343580
  hyper

SEQ ID NO: 421259 - DNA, 76 bp, Homo sapiens; identical to SEQ ID NO: 288200
  chr11:65405361-65405437
  hyper

SEQ ID NO: 421260 - DNA, 143 bp, Homo sapiens; identical to SEQ ID NO: 288201
  chr11:65405516-65405659
  hyper

SEQ ID NO: 421261 - DNA, 434 bp, Homo sapiens; identical to SEQ ID NO: 288202
  chr11:65405774-65406208
  hyper

SEQ ID NO: 421262 - DNA, 144 bp, Homo sapiens; identical to SEQ ID NO: 202602
  chr11:65419839-65419983
  hyper

SEQ ID NO: 421263 - DNA, 62 bp, Homo sapiens; identical to SEQ ID NO: 235709
  chr11:65430497-65430559
  hyper

SEQ ID NO: 421264 - DNA, 112 bp, Homo sapiens; identical to SEQ ID NO: 288206
  chr11:65479267-65479379
  hyper

SEQ ID NO: 421265 - DNA, 111 bp, Homo sapiens; identical to SEQ ID NO: 120998
  chr11:65479399-65479510
  hyper

SEQ ID NO: 421266 - DNA, 206 bp, Homo sapiens; identical to SEQ ID NO: 224139
  chr11:65548872-65549078
  hyper

SEQ ID NO: 421267 - DNA, 95 bp, Homo sapiens
  chr11:65582985-65583080
  hyper
gcatctattttcctctgggcatgtgacacttccactctttctcttctttagtcctcttccagaagttctgttctgtgctggattaggtcaggagt

SEQ ID NO: 421268 - DNA, 89 bp, Homo sapiens; identical to SEQ ID NO: 235713
  chr11:65655412-65655501
  hyper

SEQ ID NO: 421269 - DNA, 118 bp, Homo sapiens; identical to SEQ ID NO: 202608
  chr11:65657719-65657837
  hyper

SEQ ID NO: 421270 - DNA, 628 bp, Homo sapiens; identical to SEQ ID NO: 235715
  chr11:65658812-65659440
  hyper

SEQ ID NO: 421271 - DNA, 241 bp, Homo sapiens; identical to SEQ ID NO: 202610
  chr11:65666908-65667149
  hyper

SEQ ID NO: 421272 - DNA, 57 bp, Homo sapiens; identical to SEQ ID NO: 235717
  chr11:65667910-65667967
  hyper

SEQ ID NO: 421273 - DNA, 110 bp, Homo sapiens; identical to SEQ ID NO: 235718
  chr11:65728917-65729027
  hyper

SEQ ID NO: 421274 - DNA, 120 bp, Homo sapiens; identical to SEQ ID NO: 288219
  chr11:65746278-65746398
  hyper

SEQ ID NO: 421275 - DNA, 108 bp, Homo sapiens; identical to SEQ ID NO: 235719
  chr11:65769430-65769538
  hyper

SEQ ID NO: 421276 - DNA, 777 bp, Homo sapiens; identical to SEQ ID NO: 235721
  chr11:66035253-66036030
  hyper

SEQ ID NO: 421277 - DNA, 106 bp, Homo sapiens; identical to SEQ ID NO: 202611
  chr11:66049841-66049947
  hyper

SEQ ID NO: 421278 - DNA, 202 bp, Homo sapiens; identical to SEQ ID NO: 235723
  chr11:66056757-66056959
  hyper

SEQ ID NO: 421279 - DNA, 235 bp, Homo sapiens; identical to SEQ ID NO: 235725
  chr11:66139091-66139326
  hyper

SEQ ID NO: 421280 - DNA, 43 bp, Homo sapiens; identical to SEQ ID NO: 202614
  chr11:66186290-66186333
  hyper

SEQ ID NO: 421281 - DNA, 199 bp, Homo sapiens; identical to SEQ ID NO: 235729
  chr11:66206305-66206504
  hyper

SEQ ID NO: 421282 - DNA, 131 bp, Homo sapiens; identical to SEQ ID NO: 235730
  chr11:66247855-66247986
  hyper

SEQ ID NO: 421283 - DNA, 62 bp, Homo sapiens; identical to SEQ ID NO: 235731
  chr11:66277990-66278052
  hyper

SEQ ID NO: 421284 - DNA, 35 bp, Homo sapiens; identical to SEQ ID NO: 235732
  chr11:66314197-66314232
  hyper

SEQ ID NO: 421285 - DNA, 270 bp, Homo sapiens; identical to SEQ ID NO: 235733
  chr11:66335704-66335974
  hyper

SEQ ID NO: 421286 - DNA, 263 bp, Homo sapiens; identical to SEQ ID NO: 235734
  chr11:66346491-66346754
  hyper

SEQ ID NO: 421287 - DNA, 351 bp, Homo sapiens; identical to SEQ ID NO: 235735
  chr11:66445298-66445649
  hyper

SEQ ID NO: 421288 - DNA, 55 bp, Homo sapiens; identical to SEQ ID NO: 288240
  chr11:66494764-66494819
  hyper

SEQ ID NO: 421289 - DNA, 140 bp, Homo sapiens; identical to SEQ ID NO: 235737
  chr11:66610583-66610723
  hyper

SEQ ID NO: 421290 - DNA, 97 bp, Homo sapiens; identical to SEQ ID NO: 48690
  chr11:66824137-66824234
  hyper

SEQ ID NO: 421291 - DNA, 120 bp, Homo sapiens; identical to SEQ ID NO: 202625
  chr11:66897392-66897512
  hyper

SEQ ID NO: 421292 - DNA, 89 bp, Homo sapiens; identical to SEQ ID NO: 235742
  chr11:67007554-67007643
  hyper

SEQ ID NO: 421293 - DNA, 254 bp, Homo sapiens; identical to SEQ ID NO: 235743
  chr11:67085195-67085449
  hyper

SEQ ID NO: 421294 - DNA, 175 bp, Homo sapiens; identical to SEQ ID NO: 235744
  chr11:67121085-67121260
  hyper

SEQ ID NO: 421295 - DNA, 714 bp, Homo sapiens; identical to SEQ ID NO: 288251
  chr11:67141093-67141807
  hyper

SEQ ID NO: 421296 - DNA, 169 bp, Homo sapiens; identical to SEQ ID NO: 202628
  chr11:67183098-67183267
  hyper

SEQ ID NO: 421297 - DNA, 67 bp, Homo sapiens; identical to SEQ ID NO: 235747
  chr11:67195792-67195859
  hyper

SEQ ID NO: 421298 - DNA, 234 bp, Homo sapiens; identical to SEQ ID NO: 202629
  chr11:67210770-67211004
  hyper

SEQ ID NO: 421299 - DNA, 102 bp, Homo sapiens; identical to SEQ ID NO: 235748
  chr11:67211231-67211333
  hyper

SEQ ID NO: 421300 - DNA, 115 bp, Homo sapiens; identical to SEQ ID NO: 235750
  chr11:67236852-67236967
  hyper

SEQ ID NO: 421301 - DNA, 375 bp, Homo sapiens; identical to SEQ ID NO: 202632
  chr11:67271842-67272217
  hyper

SEQ ID NO: 421302 - DNA, 44 bp, Homo sapiens; identical to SEQ ID NO: 202633
  chr11:67275125-67275169
  hyper

SEQ ID NO: 421303 - DNA, 97 bp, Homo sapiens; identical to SEQ ID NO: 235753
  chr11:67276281-67276378
  hyper

SEQ ID NO: 421304 - DNA, 214 bp, Homo sapiens; identical to SEQ ID NO: 288262
  chr11:67406911-67407125
  hyper

SEQ ID NO: 421305 - DNA, 95 bp, Homo sapiens; identical to SEQ ID NO: 202634
  chr11:67777602-67777697
  hyper

SEQ ID NO: 421306 - DNA, 360 bp, Homo sapiens; identical to SEQ ID NO: 235755
  chr11:67806323-67806683
  hyper

SEQ ID NO: 421307 - DNA, 386 bp, Homo sapiens; identical to SEQ ID NO: 224154
  chr11:67889354-67889740
  hyper

SEQ ID NO: 421308 - DNA, 45 bp, Homo sapiens; identical to SEQ ID NO: 235756
  chr11:68039639-68039684
  hyper

SEQ ID NO: 421309 - DNA, 110 bp, Homo sapiens; identical to SEQ ID NO: 224156
  chr11:68080104-68080214
  hyper

SEQ ID NO: 421310 - DNA, 210 bp, Homo sapiens; identical to SEQ ID NO: 235759
  chr11:68227847-68228057
  hyper

SEQ ID NO: 421311 - DNA, 190 bp, Homo sapiens; identical to SEQ ID NO: 235761
  chr11:68518786-68518976
  hyper

SEQ ID NO: 421312 - DNA, 240 bp, Homo sapiens; identical to SEQ ID NO: 235765
  chr11:68671472-68671712
  hyper

SEQ ID NO: 421313 - DNA, 289 bp, Homo sapiens; identical to SEQ ID NO: 235766
  chr11:68816177-68816466
  hyper

SEQ ID NO: 421314 - DNA, 36 bp, Homo sapiens; identical to SEQ ID NO: 202640
  chr11:69062306-69062342
  hyper

SEQ ID NO: 421315 - DNA, 253 bp, Homo sapiens; identical to SEQ ID NO: 224159
  chr11:69331403-69331656
  hyper

SEQ ID NO: 421316 - DNA, 507 bp, Homo sapiens; identical to SEQ ID NO: 235769
  chr11:69453701-69454208
  hyper

SEQ ID NO: 421317 - DNA, 1168 bp, Homo sapiens; identical to SEQ ID NO: 235770
  chr11:69454809-69455977
  hyper

SEQ ID NO: 421318 - DNA, 31 bp, Homo sapiens; identical to SEQ ID NO: 202643
  chr11:69477505-69477536
  hyper

SEQ ID NO: 421319 - DNA, 341 bp, Homo sapiens; identical to SEQ ID NO: 288286
  chr11:69518718-69519059
  hyper

SEQ ID NO: 421320 - DNA, 40 bp, Homo sapiens; identical to SEQ ID NO: 235773
  chr11:70049091-70049131
  hyper

SEQ ID NO: 421321 - DNA, 103 bp, Homo sapiens; identical to SEQ ID NO: 202648
  chr11:70117685-70117788
  hyper

SEQ ID NO: 421322 - DNA, 52 bp, Homo sapiens; identical to SEQ ID NO: 235776
  chr11:71159694-71159746
  hyper

SEQ ID NO: 421323 - DNA, 217 bp, Homo sapiens; identical to SEQ ID NO: 235777
  chr11:71163705-71163922
  hyper

SEQ ID NO: 421324 - DNA, 355 bp, Homo sapiens; identical to SEQ ID NO: 235779
  chr11:71639580-71639935
  hyper

SEQ ID NO: 421325 - DNA, 426 bp, Homo sapiens; identical to SEQ ID NO: 235780
  chr11:71751819-71752245
  hyper

SEQ ID NO: 421326 - DNA, 46 bp, Homo sapiens; identical to SEQ ID NO: 235781
  chr11:71752691-71752737
  hyper

SEQ ID NO: 421327 - DNA, 367 bp, Homo sapiens; identical to SEQ ID NO: 235782
  chr11:71791551-71791918
  hyper

SEQ ID NO: 421328 - DNA, 197 bp, Homo sapiens; identical to SEQ ID NO: 202650
  chr11:71814206-71814403
  hyper

SEQ ID NO: 421329 - DNA, 179 bp, Homo sapiens; identical to SEQ ID NO: 235784
  chr11:71934496-71934675
  hyper

SEQ ID NO: 421330 - DNA, 241 bp, Homo sapiens; identical to SEQ ID NO: 288300
  chr11:72301342-72301583
  hyper

SEQ ID NO: 421331 - DNA, 859 bp, Homo sapiens; identical to SEQ ID NO: 235789
  chr11:72353615-72354474
  hyper

SEQ ID NO: 421332 - DNA, 87 bp, Homo sapiens; identical to SEQ ID NO: 288302
  chr11:72388210-72388297
  hyper

SEQ ID NO: 421333 - DNA, 60 bp, Homo sapiens; identical to SEQ ID NO: 235793
  chr11:72463659-72463719
  hyper

SEQ ID NO: 421334 - DNA, 106 bp, Homo sapiens; identical to SEQ ID NO: 202652
  chr11:72492447-72492553
  hyper

SEQ ID NO: 421335 - DNA, 144 bp, Homo sapiens; identical to SEQ ID NO: 235795
  chr11:72525202-72525346
  hyper

SEQ ID NO: 421336 - DNA, 318 bp, Homo sapiens; identical to SEQ ID NO: 235796
  chr11:72853956-72854274
  hyper

SEQ ID NO: 421337 - DNA, 114 bp, Homo sapiens; identical to SEQ ID NO: 202653
  chr11:72929153-72929267
  hyper

SEQ ID NO: 421338 - DNA, 1001 bp, Homo sapiens; identical to SEQ ID NO: 202654
  chr11:73018832-73019833
  hyper

SEQ ID NO: 421339 - DNA, 154 bp, Homo sapiens; identical to SEQ ID NO: 202655
  chr11:73020099-73020253
  hyper

SEQ ID NO: 421340 - DNA, 217 bp, Homo sapiens; identical to SEQ ID NO: 202656
  chr11:73087925-73088142
  hyper

SEQ ID NO: 421341 - DNA, 42 bp, Homo sapiens; identical to SEQ ID NO: 235800
  chr11:73309242-73309284
  hyper

SEQ ID NO: 421342 - DNA, 280 bp, Homo sapiens; identical to SEQ ID NO: 235802
  chr11:73372054-73372334
  hyper

SEQ ID NO: 421343 - DNA, 209 bp, Homo sapiens; identical to SEQ ID NO: 235803
  chr11:73472197-73472406
  hyper

SEQ ID NO: 421344 - DNA, 101 bp, Homo sapiens; identical to SEQ ID NO: 202657
  chr11:73490690-73490791
  hyper

SEQ ID NO: 421345 - DNA, 348 bp, Homo sapiens; identical to SEQ ID NO: 235806
  chr11:73882113-73882461
  hyper

SEQ ID NO: 421346 - DNA, 31 bp, Homo sapiens; identical to SEQ ID NO: 202661
  chr11:74204886-74204917
  hyper

SEQ ID NO: 421347 - DNA, 133 bp, Homo sapiens; identical to SEQ ID NO: 235810
  chr11:74303668-74303801
  hyper

SEQ ID NO: 421348 - DNA, 116 bp, Homo sapiens; identical to SEQ ID NO: 288324
  chr11:74394637-74394753
  hyper

SEQ ID NO: 421349 - DNA, 214 bp, Homo sapiens; identical to SEQ ID NO: 235813
  chr11:74459626-74459840
  hyper

SEQ ID NO: 421350 - DNA, 424 bp, Homo sapiens; identical to SEQ ID NO: 235814
  chr11:74659856-74660280
  hyper

SEQ ID NO: 421351 - DNA, 58 bp, Homo sapiens; identical to SEQ ID NO: 235815
  chr11:74851768-74851826
  hyper

SEQ ID NO: 421352 - DNA, 714 bp, Homo sapiens; identical to SEQ ID NO: 202664
  chr11:75062273-75062987
  hyper

SEQ ID NO: 421353 - DNA, 206 bp, Homo sapiens; identical to SEQ ID NO: 288332
  chr11:75294169-75294375
  hyper

SEQ ID NO: 421354 - DNA, 134 bp, Homo sapiens; identical to SEQ ID NO: 224170
  chr11:75480048-75480182
  hyper

SEQ ID NO: 421355 - DNA, 81 bp, Homo sapiens; identical to SEQ ID NO: 235821
  chr11:75526101-75526182
  hyper

SEQ ID NO: 421356 - DNA, 253 bp, Homo sapiens; identical to SEQ ID NO: 224171
  chr11:75921931-75922184
  hyper

SEQ ID NO: 421357 - DNA, 374 bp, Homo sapiens; identical to SEQ ID NO: 202669
  chr11:76494603-76494977
  hyper

SEQ ID NO: 421358 - DNA, 151 bp, Homo sapiens; identical to SEQ ID NO: 202670
  chr11:76510330-76510481
  hyper

SEQ ID NO: 421359 - DNA, 296 bp, Homo sapiens
  chr11:77185534-77185830
  hyper
gatttctgggagggctactgtagtagtcaggatggagaaagacggctaacttccggcgctgagggtccttttcaggttaacaaagcaccaccgcatctatgagctcgttgtcaagggctgaatttgaaaactatccgatgtcgtgtgatctcacagccagacatgtattatgttttctttctgtgggagagggggcaggggtgggaggaagacaaagaaattataacggagatgtttgaactaatgtgaactgacatacgaaaagaatgggcttcctttcacgttttttcccctac

SEQ ID NO: 421360 - DNA, 82 bp, Homo sapiens; identical to SEQ ID NO: 235830
  chr11:77300373-77300455
  hyper

SEQ ID NO: 421361 - DNA, 240 bp, Homo sapiens; identical to SEQ ID NO: 235831
  chr11:77348586-77348826
  hyper

SEQ ID NO: 421362 - DNA, 303 bp, Homo sapiens; identical to SEQ ID NO: 235832
  chr11:77790782-77791085
  hyper

SEQ ID NO: 421363 - DNA, 78 bp, Homo sapiens; identical to SEQ ID NO: 235833
  chr11:77850824-77850902
  hyper

SEQ ID NO: 421364 - DNA, 374 bp, Homo sapiens; identical to SEQ ID NO: 235834
  chr11:77899551-77899925
  hyper

SEQ ID NO: 421365 - DNA, 165 bp, Homo sapiens; identical to SEQ ID NO: 235835
  chr11:78127714-78127879
  hyper

SEQ ID NO: 421366 - DNA, 50 bp, Homo sapiens; identical to SEQ ID NO: 235836
  chr11:78128410-78128460
  hyper

SEQ ID NO: 421367 - DNA, 233 bp, Homo sapiens; identical to SEQ ID NO: 288350
  chr11:78673318-78673551
  hyper

SEQ ID NO: 421368 - DNA, 100 bp, Homo sapiens; identical to SEQ ID NO: 288351
  chr11:79148548-79148648
  hyper

SEQ ID NO: 421369 - DNA, 150 bp, Homo sapiens; identical to SEQ ID NO: 288352
  chr11:79148661-79148811
  hyper

SEQ ID NO: 421370 - DNA, 101 bp, Homo sapiens; identical to SEQ ID NO: 288353
  chr11:79149015-79149116
  hyper

SEQ ID NO: 421371 - DNA, 254 bp, Homo sapiens; identical to SEQ ID NO: 235845
  chr11:82782800-82783054
  hyper

SEQ ID NO: 421372 - DNA, 111 bp, Homo sapiens; identical to SEQ ID NO: 235846
  chr11:82867865-82867976
  hyper

SEQ ID NO: 421373 - DNA, 127 bp, Homo sapiens; identical to SEQ ID NO: 235847
  chr11:82905087-82905214
  hyper

SEQ ID NO: 421374 - DNA, 148 bp, Homo sapiens; identical to SEQ ID NO: 235848
  chr11:82905695-82905843
  hyper

SEQ ID NO: 421375 - DNA, 42 bp, Homo sapiens; identical to SEQ ID NO: 235852
  chr11:85339594-85339636
  hyper

SEQ ID NO: 421376 - DNA, 230 bp, Homo sapiens; identical to SEQ ID NO: 235853
  chr11:85359003-85359233
  hyper

SEQ ID NO: 421377 - DNA, 182 bp, Homo sapiens; identical to SEQ ID NO: 235854
  chr11:85521825-85522007
  hyper

SEQ ID NO: 421378 - DNA, 79 bp, Homo sapiens; identical to SEQ ID NO: 235855
  chr11:85522511-85522590
  hyper

SEQ ID NO: 421379 - DNA, 160 bp, Homo sapiens; identical to SEQ ID NO: 202676
  chr11:85780826-85780986
  hyper

SEQ ID NO: 421380 - DNA, 221 bp, Homo sapiens; identical to SEQ ID NO: 202677
  chr11:85955560-85955781
  hyper

SEQ ID NO: 421381 - DNA, 1141 bp, Homo sapiens; identical to SEQ ID NO: 288371
  chr11:86510900-86512041
  hyper

SEQ ID NO: 421382 - DNA, 283 bp, Homo sapiens; identical to SEQ ID NO: 224181
  chr11:86513414-86513697
  hyper

SEQ ID NO: 421383 - DNA, 649 bp, Homo sapiens; identical to SEQ ID NO: 288373
  chr11:86665886-86666535
  hyper

SEQ ID NO: 421384 - DNA, 44 bp, Homo sapiens; identical to SEQ ID NO: 202683
  chr11:87908223-87908267
  hyper

SEQ ID NO: 421385 - DNA, 220 bp, Homo sapiens; identical to SEQ ID NO: 202684
  chr11:87908484-87908704
  hyper

SEQ ID NO: 421386 - DNA, 148 bp, Homo sapiens; identical to SEQ ID NO: 235863
  chr11:88070647-88070795
  hyper

SEQ ID NO: 421387 - DNA, 31 bp, Homo sapiens; identical to SEQ ID NO: 202685
  chr11:88071023-88071054
  hyper

SEQ ID NO: 421388 - DNA, 190 bp, Homo sapiens; identical to SEQ ID NO: 235865
  chr11:88071606-88071796
  hyper

SEQ ID NO: 421389 - DNA, 65 bp, Homo sapiens; identical to SEQ ID NO: 202690
  chr11:92675309-92675374
  hyper

SEQ ID NO: 421390 - DNA, 70 bp, Homo sapiens; identical to SEQ ID NO: 288386
  chr11:93275705-93275775
  hyper

SEQ ID NO: 421391 - DNA, 117 bp, Homo sapiens; identical to SEQ ID NO: 288387
  chr11:93474503-93474620
  hyper

SEQ ID NO: 421392 - DNA, 218 bp, Homo sapiens; identical to SEQ ID NO: 121346
  chr11:93474649-93474867
  hyper

SEQ ID NO: 421393 - DNA, 101 bp, Homo sapiens; identical to SEQ ID NO: 202691
  chr11:93861765-93861866
  hyper

SEQ ID NO: 421394 - DNA, 201 bp, Homo sapiens; identical to SEQ ID NO: 235876
  chr11:94227397-94227598
  hyper

SEQ ID NO: 421395 - DNA, 525 bp, Homo sapiens; identical to SEQ ID NO: 235877
  chr11:94245526-94246051
  hyper

SEQ ID NO: 421396 - DNA, 571 bp, Homo sapiens; identical to SEQ ID NO: 288392
  chr11:94277135-94277706
  hyper

SEQ ID NO: 421397 - DNA, 166 bp, Homo sapiens; identical to SEQ ID NO: 202699
  chr11:94883964-94884130
  hyper

SEQ ID NO: 421398 - DNA, 498 bp, Homo sapiens; identical to SEQ ID NO: 288399
  chr11:94884402-94884900
  hyper

SEQ ID NO: 421399 - DNA, 289 bp, Homo sapiens
  chr11:94963464-94963753
  hyper
aaggcagaagcaaccgaataaacaaaaacaacactcgcaagagttagccacagcaaagaggggccaggttcctcgggatccgacccagctgctctgatttcacaccgacctccatcaacagctaaactgcacagggaggaggatcgaacggatccctcccgccctccgcccaaggagccgacccggggtagcaaggtagggaaatgagccgtaaaggagagcaaaggcaccaaataaaaggaacaagggaagaaaaaatatcccaacccctccagacttgggtctgtcc

SEQ ID NO: 421400 - DNA, 429 bp, Homo sapiens; identical to SEQ ID NO: 388916
  chr11:96123256-96123685
  hyper

SEQ ID NO: 421401 - DNA, 132 bp, Homo sapiens; identical to SEQ ID NO: 288402
  chr11:98891916-98892048
  hyper

SEQ ID NO: 421402 - DNA, 33 bp, Homo sapiens; identical to SEQ ID NO: 235885
  chr11:100557940-100557973
  hyper

SEQ ID NO: 421403 - DNA, 429 bp, Homo sapiens; identical to SEQ ID NO: 288406
  chr11:100999719-101000148
  hyper

SEQ ID NO: 421404 - DNA, 448 bp, Homo sapiens; identical to SEQ ID NO: 288407
  chr11:101000222-101000670
  hyper

SEQ ID NO: 421405 - DNA, 206 bp, Homo sapiens; identical to SEQ ID NO: 384396
  chr11:101453848-101454054
  hyper

SEQ ID NO: 421406 - DNA, 39 bp, Homo sapiens; identical to SEQ ID NO: 288410
  chr11:101454747-101454786
  hyper

SEQ ID NO: 421407 - DNA, 38 bp, Homo sapiens; identical to SEQ ID NO: 235889
  chr11:101785493-101785531
  hyper

SEQ ID NO: 421408 - DNA, 195 bp, Homo sapiens; identical to SEQ ID NO: 398820
  chr11:101982576-101982771
  hyper

SEQ ID NO: 421409 - DNA, 31 bp, Homo sapiens; identical to SEQ ID NO: 202708
  chr11:102323923-102323954
  hyper

SEQ ID NO: 421410 - DNA, 35 bp, Homo sapiens; identical to SEQ ID NO: 202710
  chr11:102980488-102980523
  hyper

SEQ ID NO: 421411 - DNA, 126 bp, Homo sapiens; identical to SEQ ID NO: 202711
  chr11:105481877-105482003
  hyper

SEQ ID NO: 421412 - DNA, 116 bp, Homo sapiens; identical to SEQ ID NO: 235897
  chr11:105893007-105893123
  hyper

SEQ ID NO: 421413 - DNA, 523 bp, Homo sapiens; identical to SEQ ID NO: 235898
  chr11:105948198-105948721
  hyper

SEQ ID NO: 421414 - DNA, 127 bp, Homo sapiens; identical to SEQ ID NO: 235901
  chr11:107328545-107328672
  hyper

SEQ ID NO: 421415 - DNA, 127 bp, Homo sapiens; identical to SEQ ID NO: 235904
  chr11:107992141-107992268
  hyper

SEQ ID NO: 421416 - DNA, 127 bp, Homo sapiens; identical to SEQ ID NO: 235905
  chr11:108092858-108092985
  hyper

SEQ ID NO: 421417 - DNA, 133 bp, Homo sapiens; identical to SEQ ID NO: 202714
  chr11:108093204-108093337
  hyper

SEQ ID NO: 421418 - DNA, 49 bp, Homo sapiens; identical to SEQ ID NO: 121412
  chr11:108093385-108093434
  hyper

SEQ ID NO: 421419 - DNA, 644 bp, Homo sapiens; identical to SEQ ID NO: 288429
  chr11:108368605-108369249
  hyper

SEQ ID NO: 421420 - DNA, 1042 bp, Homo sapiens; identical to SEQ ID NO: 235908
  chr11:108463471-108464513
  hyper

SEQ ID NO: 421421 - DNA, 90 bp, Homo sapiens; identical to SEQ ID NO: 235909
  chr11:108535765-108535855
  hyper

SEQ ID NO: 421422 - DNA, 214 bp, Homo sapiens; identical to SEQ ID NO: 202716
  chr11:109293899-109294113
  hyper

SEQ ID NO: 421423 - DNA, 282 bp, Homo sapiens; identical to SEQ ID NO: 288433
  chr11:109294189-109294471
  hyper

SEQ ID NO: 421424 - DNA, 232 bp, Homo sapiens; identical to SEQ ID NO: 235913
  chr11:110300415-110300647
  hyper

SEQ ID NO: 421425 - DNA, 214 bp, Homo sapiens; identical to SEQ ID NO: 288437
  chr11:111170351-111170565
  hyper

SEQ ID NO: 421426 - DNA, 140 bp, Homo sapiens; identical to SEQ ID NO: 235922
  chr11:111472616-111472756
  hyper

SEQ ID NO: 421427 - DNA, 422 bp, Homo sapiens; identical to SEQ ID NO: 235923
  chr11:112096873-112097295
  hyper

SEQ ID NO: 421428 - DNA, 144 bp, Homo sapiens; identical to SEQ ID NO: 288442
  chr11:113258498-113258642
  hyper

SEQ ID NO: 421429 - DNA, 251 bp, Homo sapiens; identical to SEQ ID NO: 235926
  chr11:113644420-113644671
  hyper

SEQ ID NO: 421430 - DNA, 130 bp, Homo sapiens; identical to SEQ ID NO: 202727
  chr11:113932120-113932250
  hyper

SEQ ID NO: 421431 - DNA, 246 bp, Homo sapiens; identical to SEQ ID NO: 235930
  chr11:114271097-114271343
  hyper

SEQ ID NO: 421432 - DNA, 154 bp, Homo sapiens; identical to SEQ ID NO: 235931
  chr11:114309918-114310072
  hyper

SEQ ID NO: 421433 - DNA, 279 bp, Homo sapiens; identical to SEQ ID NO: 288452
  chr11:115372960-115373239
  hyper

SEQ ID NO: 421434 - DNA, 64 bp, Homo sapiens; identical to SEQ ID NO: 202731
  chr11:115529918-115529982
  hyper

SEQ ID NO: 421435 - DNA, 160 bp, Homo sapiens; identical to SEQ ID NO: 235937
  chr11:115846301-115846461
  hyper

SEQ ID NO: 421436 - DNA, 288 bp, Homo sapiens; identical to SEQ ID NO: 288458
  chr11:116450735-116451023
  hyper

SEQ ID NO: 421437 - DNA, 123 bp, Homo sapiens; identical to SEQ ID NO: 288459
  chr11:116451190-116451313
  hyper

SEQ ID NO: 421438 - DNA, 186 bp, Homo sapiens; identical to SEQ ID NO: 235938
  chr11:116643252-116643438
  hyper

SEQ ID NO: 421439 - DNA, 253 bp, Homo sapiens; identical to SEQ ID NO: 235939
  chr11:116643719-116643972
  hyper

SEQ ID NO: 421440 - DNA, 88 bp, Homo sapiens; identical to SEQ ID NO: 288462
  chr11:116706882-116706970
  hyper

SEQ ID NO: 421441 - DNA, 505 bp, Homo sapiens; identical to SEQ ID NO: 235942
  chr11:117014686-117015191
  hyper

SEQ ID NO: 421442 - DNA, 369 bp, Homo sapiens; identical to SEQ ID NO: 235943
  chr11:117049879-117050248
  hyper

SEQ ID NO: 421443 - DNA, 83 bp, Homo sapiens; identical to SEQ ID NO: 235944
  chr11:117103812-117103895
  hyper

SEQ ID NO: 421444 - DNA, 679 bp, Homo sapiens; identical to SEQ ID NO: 288466
  chr11:117186458-117187137
  hyper

SEQ ID NO: 421445 - DNA, 65 bp, Homo sapiens; identical to SEQ ID NO: 235947
  chr11:117198410-117198475
  hyper

SEQ ID NO: 421446 - DNA, 250 bp, Homo sapiens; identical to SEQ ID NO: 224203
  chr11:117352704-117352954
  hyper

SEQ ID NO: 421447 - DNA, 264 bp, Homo sapiens; identical to SEQ ID NO: 288469
  chr11:117666746-117667010
  hyper

SEQ ID NO: 421448 - DNA, 122 bp, Homo sapiens; identical to SEQ ID NO: 288471
  chr11:117747016-117747138
  hyper

SEQ ID NO: 421449 - DNA, 276 bp, Homo sapiens; identical to SEQ ID NO: 224206
  chr11:117856650-117856926
  hyper

SEQ ID NO: 421450 - DNA, 33 bp, Homo sapiens; identical to SEQ ID NO: 235952
  chr11:117857279-117857312
  hyper

SEQ ID NO: 421451 - DNA, 88 bp, Homo sapiens; identical to SEQ ID NO: 202733
  chr11:118023499-118023587
  hyper

SEQ ID NO: 421452 - DNA, 46 bp, Homo sapiens; identical to SEQ ID NO: 235954
  chr11:118230310-118230356
  hyper

SEQ ID NO: 421453 - DNA, 70 bp, Homo sapiens; identical to SEQ ID NO: 235955
  chr11:118230635-118230705
  hyper

SEQ ID NO: 421454 - DNA, 34 bp, Homo sapiens; identical to SEQ ID NO: 235956
  chr11:118662152-118662186
  hyper

SEQ ID NO: 421455 - DNA, 235 bp, Homo sapiens; identical to SEQ ID NO: 288479
  chr11:118663553-118663788
  hyper

SEQ ID NO: 421456 - DNA, 50 bp, Homo sapiens; identical to SEQ ID NO: 288480
  chr11:118663820-118663870
  hyper

SEQ ID NO: 421457 - DNA, 62 bp, Homo sapiens; identical to SEQ ID NO: 235958
  chr11:118799388-118799450
  hyper

SEQ ID NO: 421458 - DNA, 130 bp, Homo sapiens; identical to SEQ ID NO: 235959
  chr11:118800838-118800968
  hyper

SEQ ID NO: 421459 - DNA, 124 bp, Homo sapiens; identical to SEQ ID NO: 235960
  chr11:118811078-118811202
  hyper

SEQ ID NO: 421460 - DNA, 188 bp, Homo sapiens; identical to SEQ ID NO: 235961
  chr11:118972865-118973053
  hyper

SEQ ID NO: 421461 - DNA, 140 bp, Homo sapiens; identical to SEQ ID NO: 235962
  chr11:118977772-118977912
  hyper

SEQ ID NO: 421462 - DNA, 398 bp, Homo sapiens; identical to SEQ ID NO: 202734
  chr11:118992030-118992428
  hyper

SEQ ID NO: 421463 - DNA, 64 bp, Homo sapiens; identical to SEQ ID NO: 202735
  chr11:119039732-119039796
  hyper

SEQ ID NO: 421464 - DNA, 156 bp, Homo sapiens; identical to SEQ ID NO: 288488
  chr11:119039957-119040113
  hyper

SEQ ID NO: 421465 - DNA, 236 bp, Homo sapiens; identical to SEQ ID NO: 202736
  chr11:119103176-119103412
  hyper

SEQ ID NO: 421466 - DNA, 83 bp, Homo sapiens; identical to SEQ ID NO: 202737
  chr11:119142431-119142514
  hyper

SEQ ID NO: 421467 - DNA, 106 bp, Homo sapiens; identical to SEQ ID NO: 202738
  chr11:119144575-119144681
  hyper

SEQ ID NO: 421468 - DNA, 64 bp, Homo sapiens
  chr11:119145547-119145611
  hyper
tcctctttgctcaggaattggaacagccttgctgtaactcatcctggctacatggcttttttga

SEQ ID NO: 421469 - DNA, 142 bp, Homo sapiens; identical to SEQ ID NO: 202740
  chr11:119146702-119146844
  hyper

SEQ ID NO: 421470 - DNA, 102 bp, Homo sapiens; identical to SEQ ID NO: 202741
  chr11:119148462-119148564
  hyper

SEQ ID NO: 421471 - DNA, 291 bp, Homo sapiens; identical to SEQ ID NO: 202742
  chr11:119148945-119149236
  hyper

SEQ ID NO: 421472 - DNA, 158 bp, Homo sapiens; identical to SEQ ID NO: 202743
  chr11:119149265-119149423
  hyper

SEQ ID NO: 421473 - DNA, 492 bp, Homo sapiens; identical to SEQ ID NO: 202744
  chr11:119155748-119156240
  hyper

SEQ ID NO: 421474 - DNA, 126 bp, Homo sapiens; identical to SEQ ID NO: 202745
  chr11:119167631-119167757
  hyper

SEQ ID NO: 421475 - DNA, 86 bp, Homo sapiens; identical to SEQ ID NO: 202746
  chr11:119168098-119168184
  hyper

SEQ ID NO: 421476 - DNA, 175 bp, Homo sapiens; identical to SEQ ID NO: 202747
  chr11:119169061-119169236
  hyper

SEQ ID NO: 421477 - DNA, 100 bp, Homo sapiens; identical to SEQ ID NO: 202748
  chr11:119170361-119170461
  hyper

SEQ ID NO: 421478 - DNA, 362 bp, Homo sapiens; identical to SEQ ID NO: 235965
  chr11:119204862-119205224
  hyper

SEQ ID NO: 421479 - DNA, 402 bp, Homo sapiens; identical to SEQ ID NO: 235967
  chr11:119252460-119252862
  hyper

SEQ ID NO: 421480 - DNA, 269 bp, Homo sapiens; identical to SEQ ID NO: 202753
  chr11:119598243-119598512
  hyper

SEQ ID NO: 421481 - DNA, 57 bp, Homo sapiens; identical to SEQ ID NO: 202755
  chr11:119600032-119600089
  hyper

SEQ ID NO: 421482 - DNA, 190 bp, Homo sapiens; identical to SEQ ID NO: 288512
  chr11:119600421-119600611
  hyper

SEQ ID NO: 421483 - DNA, 191 bp, Homo sapiens; identical to SEQ ID NO: 288513
  chr11:119600648-119600839
  hyper

SEQ ID NO: 421484 - DNA, 79 bp, Homo sapiens; identical to SEQ ID NO: 288515
  chr11:120039673-120039752
  hyper

SEQ ID NO: 421485 - DNA, 215 bp, Homo sapiens; identical to SEQ ID NO: 288516
  chr11:120039974-120040189
  hyper

SEQ ID NO: 421486 - DNA, 629 bp, Homo sapiens; identical to SEQ ID NO: 288519
  chr11:120195891-120196520
  hyper

SEQ ID NO: 421487 - DNA, 142 bp, Homo sapiens; identical to SEQ ID NO: 202758
  chr11:120206447-120206589
  hyper

SEQ ID NO: 421488 - DNA, 274 bp, Homo sapiens; identical to SEQ ID NO: 202759
  chr11:120207766-120208040
  hyper

SEQ ID NO: 421489 - DNA, 271 bp, Homo sapiens; identical to SEQ ID NO: 288522
  chr11:120382097-120382368
  hyper

SEQ ID NO: 421490 - DNA, 206 bp, Homo sapiens; identical to SEQ ID NO: 288523
  chr11:120382448-120382654
  hyper

SEQ ID NO: 421491 - DNA, 188 bp, Homo sapiens; identical to SEQ ID NO: 235980
  chr11:121163081-121163269
  hyper

SEQ ID NO: 421492 - DNA, 189 bp, Homo sapiens; identical to SEQ ID NO: 235981
  chr11:121163483-121163672
  hyper

SEQ ID NO: 421493 - DNA, 105 bp, Homo sapiens; identical to SEQ ID NO: 224232
  chr11:121323530-121323635
  hyper

SEQ ID NO: 421494 - DNA, 826 bp, Homo sapiens; identical to SEQ ID NO: 235982
  chr11:121526134-121526960
  hyper

SEQ ID NO: 421495 - DNA, 67 bp, Homo sapiens; identical to SEQ ID NO: 235984
  chr11:121800445-121800512
  hyper

SEQ ID NO: 421496 - DNA, 206 bp, Homo sapiens; identical to SEQ ID NO: 235985
  chr11:122526547-122526753
  hyper

SEQ ID NO: 421497 - DNA, 95 bp, Homo sapiens; identical to SEQ ID NO: 235987
  chr11:122849414-122849509
  hyper

SEQ ID NO: 421498 - DNA, 133 bp, Homo sapiens; identical to SEQ ID NO: 288536
  chr11:122854782-122854915
  hyper

SEQ ID NO: 421499 - DNA, 238 bp, Homo sapiens; identical to SEQ ID NO: 202766
  chr11:122855057-122855295
  hyper

SEQ ID NO: 421500 - DNA, 234 bp, Homo sapiens; identical to SEQ ID NO: 288538
  chr11:122855432-122855666
  hyper

SEQ ID NO: 421501 - DNA, 187 bp, Homo sapiens; identical to SEQ ID NO: 235992
  chr11:122932840-122933027
  hyper

SEQ ID NO: 421502 - DNA, 203 bp, Homo sapiens; identical to SEQ ID NO: 288540
  chr11:123066197-123066400
  hyper

SEQ ID NO: 421503 - DNA, 244 bp, Homo sapiens; identical to SEQ ID NO: 288541
  chr11:123066463-123066707
  hyper

SEQ ID NO: 421504 - DNA, 160 bp, Homo sapiens; identical to SEQ ID NO: 235997
  chr11:124492594-124492754
  hyper

SEQ ID NO: 421505 - DNA, 405 bp, Homo sapiens; identical to SEQ ID NO: 235998
  chr11:124587805-124588210
  hyper

SEQ ID NO: 421506 - DNA, 47 bp, Homo sapiens; identical to SEQ ID NO: 288552
  chr11:124709070-124709117
  hyper

SEQ ID NO: 421507 - DNA, 249 bp, Homo sapiens; identical to SEQ ID NO: 202775
  chr11:124709233-124709482
  hyper

SEQ ID NO: 421508 - DNA, 210 bp, Homo sapiens; identical to SEQ ID NO: 202776
  chr11:124709856-124710066
  hyper

SEQ ID NO: 421509 - DNA, 48 bp, Homo sapiens; identical to SEQ ID NO: 288555
  chr11:124736457-124736505
  hyper

SEQ ID NO: 421510 - DNA, 42 bp, Homo sapiens; identical to SEQ ID NO: 236006
  chr11:124746304-124746346
  hyper

SEQ ID NO: 421511 - DNA, 41 bp, Homo sapiens; identical to SEQ ID NO: 236009
  chr11:125034413-125034454
  hyper

SEQ ID NO: 421512 - DNA, 380 bp, Homo sapiens; identical to SEQ ID NO: 288559
  chr11:125034978-125035358
  hyper

SEQ ID NO: 421513 - DNA, 145 bp, Homo sapiens; identical to SEQ ID NO: 288561
  chr11:125773517-125773662
  hyper

SEQ ID NO: 421514 - DNA, 179 bp, Homo sapiens; identical to SEQ ID NO: 236016
  chr11:125812008-125812187
  hyper

SEQ ID NO: 421515 - DNA, 56 bp, Homo sapiens; identical to SEQ ID NO: 202779
  chr11:125932494-125932550
  hyper

SEQ ID NO: 421516 - DNA, 436 bp, Homo sapiens; identical to SEQ ID NO: 8456
  chr11:125932556-125932992
  hyper

SEQ ID NO: 421517 - DNA, 127 bp, Homo sapiens; identical to SEQ ID NO: 202781
  chr11:125933201-125933328
  hyper

SEQ ID NO: 421518 - DNA, 207 bp, Homo sapiens; identical to SEQ ID NO: 236017
  chr11:126081471-126081678
  hyper

SEQ ID NO: 421519 - DNA, 70 bp, Homo sapiens; identical to SEQ ID NO: 288567
  chr11:126138755-126138825
  hyper

SEQ ID NO: 421520 - DNA, 156 bp, Homo sapiens; identical to SEQ ID NO: 121658
  chr11:126138866-126139022
  hyper

SEQ ID NO: 421521 - DNA, 53 bp, Homo sapiens; identical to SEQ ID NO: 236019
  chr11:126152945-126152998
  hyper

SEQ ID NO: 421522 - DNA, 691 bp, Homo sapiens; identical to SEQ ID NO: 288570
  chr11:126225361-126226052
  hyper

SEQ ID NO: 421523 - DNA, 43 bp, Homo sapiens; identical to SEQ ID NO: 288571
  chr11:126870751-126870794
  hyper

SEQ ID NO: 421524 - DNA, 126 bp, Homo sapiens; identical to SEQ ID NO: 236023
  chr11:128418568-128418694
  hyper

SEQ ID NO: 421525 - DNA, 161 bp, Homo sapiens; identical to SEQ ID NO: 202788
  chr11:129234231-129234392
  hyper

SEQ ID NO: 421526 - DNA, 570 bp, Homo sapiens; identical to SEQ ID NO: 288580
  chr11:129245103-129245673
  hyper

SEQ ID NO: 421527 - DNA, 111 bp, Homo sapiens; identical to SEQ ID NO: 288581
  chr11:129245959-129246070
  hyper

SEQ ID NO: 421528 - DNA, 334 bp, Homo sapiens; identical to SEQ ID NO: 288582
  chr11:129246129-129246463
  hyper

SEQ ID NO: 421529 - DNA, 226 bp, Homo sapiens; identical to SEQ ID NO: 288583
  chr11:129685680-129685906
  hyper

SEQ ID NO: 421530 - DNA, 286 bp, Homo sapiens; identical to SEQ ID NO: 288584
  chr11:129685938-129686224
  hyper

SEQ ID NO: 421531 - DNA, 216 bp, Homo sapiens; identical to SEQ ID NO: 202789
  chr11:129765560-129765776
  hyper

SEQ ID NO: 421532 - DNA, 266 bp, Homo sapiens; identical to SEQ ID NO: 236037
  chr11:129793271-129793537
  hyper

SEQ ID NO: 421533 - DNA, 41 bp, Homo sapiens; identical to SEQ ID NO: 236038
  chr11:129872812-129872853
  hyper

SEQ ID NO: 421534 - DNA, 238 bp, Homo sapiens; identical to SEQ ID NO: 224248
  chr11:129939594-129939832
  hyper

SEQ ID NO: 421535 - DNA, 171 bp, Homo sapiens; identical to SEQ ID NO: 202790
  chr11:130029947-130030118
  hyper

SEQ ID NO: 421536 - DNA, 288 bp, Homo sapiens; identical to SEQ ID NO: 288592
  chr11:130298420-130298708
  hyper

SEQ ID NO: 421537 - DNA, 359 bp, Homo sapiens; identical to SEQ ID NO: 288593
  chr11:130319158-130319517
  hyper

SEQ ID NO: 421538 - DNA, 124 bp, Homo sapiens; identical to SEQ ID NO: 202793
  chr11:130319633-130319757
  hyper

SEQ ID NO: 421539 - DNA, 563 bp, Homo sapiens; identical to SEQ ID NO: 236044
  chr11:130786091-130786654
  hyper

SEQ ID NO: 421540 - DNA, 200 bp, Homo sapiens; identical to SEQ ID NO: 202795
  chr11:131056756-131056956
  hyper

SEQ ID NO: 421541 - DNA, 172 bp, Homo sapiens; identical to SEQ ID NO: 288600
  chr11:132813317-132813489
  hyper

SEQ ID NO: 421542 - DNA, 157 bp, Homo sapiens; identical to SEQ ID NO: 288602
  chr11:132864209-132864366
  hyper

SEQ ID NO: 421543 - DNA, 66 bp, Homo sapiens; identical to SEQ ID NO: 288603
  chr11:132934608-132934674
  hyper

SEQ ID NO: 421544 - DNA, 157 bp, Homo sapiens; identical to SEQ ID NO: 236052
  chr11:133797628-133797785
  hyper

SEQ ID NO: 421545 - DNA, 47 bp, Homo sapiens
  chr11:133920426-133920473
  hyper
aaaaatactgggatgctatacacaaaattgccttgaaaacttgagca

SEQ ID NO: 421546 - DNA, 212 bp, Homo sapiens; identical to SEQ ID NO: 236057
  chr11:134093743-134093955
  hyper

SEQ ID NO: 421547 - DNA, 36 bp, Homo sapiens; identical to SEQ ID NO: 236058
  chr11:134094348-134094384
  hyper

SEQ ID NO: 421548 - DNA, 60 bp, Homo sapiens; identical to SEQ ID NO: 202803
  chr11:134094606-134094666
  hyper

SEQ ID NO: 421549 - DNA, 232 bp, Homo sapiens; identical to SEQ ID NO: 236060
  chr11:134123196-134123428
  hyper

SEQ ID NO: 421550 - DNA, 205 bp, Homo sapiens; identical to SEQ ID NO: 288618
  chr11:134282101-134282306
  hyper

SEQ ID NO: 421551 - DNA, 514 bp, Homo sapiens; identical to SEQ ID NO: 288619
  chr11:134282336-134282850
  hyper

SEQ ID NO: 421552 - DNA, 72 bp, Homo sapiens; identical to SEQ ID NO: 202806
  chr12:568903-568975
  hyper

SEQ ID NO: 421553 - DNA, 305 bp, Homo sapiens; identical to SEQ ID NO: 288621
  chr12:569665-569970
  hyper

SEQ ID NO: 421554 - DNA, 209 bp, Homo sapiens; identical to SEQ ID NO: 202807
  chr12:694940-695149
  hyper

SEQ ID NO: 421555 - DNA, 127 bp, Homo sapiens; identical to SEQ ID NO: 202808
  chr12:1059361-1059488
  hyper

SEQ ID NO: 421556 - DNA, 215 bp, Homo sapiens; identical to SEQ ID NO: 236071
  chr12:1099809-1100024
  hyper

SEQ ID NO: 421557 - DNA, 290 bp, Homo sapiens; identical to SEQ ID NO: 236077
  chr12:1799861-1800151
  hyper

SEQ ID NO: 421558 - DNA, 285 bp, Homo sapiens; identical to SEQ ID NO: 288638
  chr12:2113105-2113390
  hyper

SEQ ID NO: 421559 - DNA, 457 bp, Homo sapiens; identical to SEQ ID NO: 121775
  chr12:2113432-2113889
  hyper

SEQ ID NO: 421560 - DNA, 73 bp, Homo sapiens; identical to SEQ ID NO: 202820
  chr12:2163510-2163583
  hyper

SEQ ID NO: 421561 - DNA, 278 bp, Homo sapiens; identical to SEQ ID NO: 202822
  chr12:2800167-2800445
  hyper

SEQ ID NO: 421562 - DNA, 32 bp, Homo sapiens; identical to SEQ ID NO: 236084
  chr12:2904079-2904111
  hyper

SEQ ID NO: 421563 - DNA, 260 bp, Homo sapiens; identical to SEQ ID NO: 236085
  chr12:2999768-3000028
  hyper

SEQ ID NO: 421564 - DNA, 257 bp, Homo sapiens; identical to SEQ ID NO: 202825
  chr12:3067872-3068129
  hyper

SEQ ID NO: 421565 - DNA, 52 bp, Homo sapiens; identical to SEQ ID NO: 236088
  chr12:3068385-3068437
  hyper

SEQ ID NO: 421566 - DNA, 678 bp, Homo sapiens; identical to SEQ ID NO: 202826
  chr12:3068770-3069448
  hyper

SEQ ID NO: 421567 - DNA, 224 bp, Homo sapiens; identical to SEQ ID NO: 288654
  chr12:3129381-3129605
  hyper

SEQ ID NO: 421568 - DNA, 38 bp, Homo sapiens
  chr12:3600988-3601026
  hyper
ggcctcctcctgtgtgtgtgtgtgtgtgtgtgtgtgtg

SEQ ID NO: 421569 - DNA, 86 bp, Homo sapiens; identical to SEQ ID NO: 202830
  chr12:3601256-3601342
  hyper

SEQ ID NO: 421570 - DNA, 101 bp, Homo sapiens; identical to SEQ ID NO: 202831
  chr12:3601377-3601478
  hyper

SEQ ID NO: 421571 - DNA, 70 bp, Homo sapiens; identical to SEQ ID NO: 288662
  chr12:3862298-3862368
  hyper

SEQ ID NO: 421572 - DNA, 112 bp, Homo sapiens; identical to SEQ ID NO: 202846
  chr12:4647831-4647943
  hyper

SEQ ID NO: 421573 - DNA, 275 bp, Homo sapiens; identical to SEQ ID NO: 236105
  chr12:4758236-4758511
  hyper

SEQ ID NO: 421574 - DNA, 125 bp, Homo sapiens; identical to SEQ ID NO: 202847
  chr12:4918558-4918683
  hyper

SEQ ID NO: 421575 - DNA, 176 bp, Homo sapiens; identical to SEQ ID NO: 202848
  chr12:4918713-4918889
  hyper

SEQ ID NO: 421576 - DNA, 171 bp, Homo sapiens; identical to SEQ ID NO: 236106
  chr12:4967026-4967197
  hyper

SEQ ID NO: 421577 - DNA, 54 bp, Homo sapiens; identical to SEQ ID NO: 202850
  chr12:5131854-5131908
  hyper

SEQ ID NO: 421578 - DNA, 97 bp, Homo sapiens; identical to SEQ ID NO: 288683
  chr12:5152818-5152915
  hyper

SEQ ID NO: 421579 - DNA, 285 bp, Homo sapiens; identical to SEQ ID NO: 236111
  chr12:5540359-5540644
  hyper

SEQ ID NO: 421580 - DNA, 823 bp, Homo sapiens; identical to SEQ ID NO: 202854
  chr12:6309398-6310221
  hyper

SEQ ID NO: 421581 - DNA, 184 bp, Homo sapiens; identical to SEQ ID NO: 202855
  chr12:6387950-6388134
  hyper

SEQ ID NO: 421582 - DNA, 354 bp, Homo sapiens; identical to SEQ ID NO: 202857
  chr12:6449620-6449974
  hyper

SEQ ID NO: 421583 - DNA, 315 bp, Homo sapiens; identical to SEQ ID NO: 236120
  chr12:6450830-6451145
  hyper

SEQ ID NO: 421584 - DNA, 216 bp, Homo sapiens; identical to SEQ ID NO: 202863
  chr12:6560780-6560996
  hyper

SEQ ID NO: 421585 - DNA, 224 bp, Homo sapiens; identical to SEQ ID NO: 236123
  chr12:6561338-6561562
  hyper

SEQ ID NO: 421586 - DNA, 233 bp, Homo sapiens; identical to SEQ ID NO: 236124
  chr12:6579634-6579867
  hyper

SEQ ID NO: 421587 - DNA, 259 bp, Homo sapiens; identical to SEQ ID NO: 236126
  chr12:6772303-6772562
  hyper

SEQ ID NO: 421588 - DNA, 339 bp, Homo sapiens; identical to SEQ ID NO: 236127
  chr12:6798812-6799151
  hyper

SEQ ID NO: 421589 - DNA, 106 bp, Homo sapiens; identical to SEQ ID NO: 288703
  chr12:6809093-6809199
  hyper

SEQ ID NO: 421590 - DNA, 124 bp, Homo sapiens; identical to SEQ ID NO: 288704
  chr12:6809692-6809816
  hyper

SEQ ID NO: 421591 - DNA, 341 bp, Homo sapiens; identical to SEQ ID NO: 236128
  chr12:6832842-6833183
  hyper

SEQ ID NO: 421592 - DNA, 54 bp, Homo sapiens; identical to SEQ ID NO: 236129
  chr12:6862687-6862741
  hyper

SEQ ID NO: 421593 - DNA, 45 bp, Homo sapiens; identical to SEQ ID NO: 236132
  chr12:7342757-7342802
  hyper

SEQ ID NO: 421594 - DNA, 247 bp, Homo sapiens; identical to SEQ ID NO: 236135
  chr12:8185699-8185946
  hyper

SEQ ID NO: 421595 - DNA, 309 bp, Homo sapiens; identical to SEQ ID NO: 288717
  chr12:10306047-10306356
  hyper

SEQ ID NO: 421596 - DNA, 99 bp, Homo sapiens; identical to SEQ ID NO: 236138
  chr12:10516946-10517045
  hyper

SEQ ID NO: 421597 - DNA, 159 bp, Homo sapiens; identical to SEQ ID NO: 236139
  chr12:10517105-10517264
  hyper

SEQ ID NO: 421598 - DNA, 155 bp, Homo sapiens; identical to SEQ ID NO: 236140
  chr12:10517555-10517710
  hyper

SEQ ID NO: 421599 - DNA, 234 bp, Homo sapiens; identical to SEQ ID NO: 236141
  chr12:10766266-10766500
  hyper

SEQ ID NO: 421600 - DNA, 290 bp, Homo sapiens; identical to SEQ ID NO: 236142
  chr12:10826739-10827029
  hyper

SEQ ID NO: 421601 - DNA, 903 bp, Homo sapiens; identical to SEQ ID NO: 236143
  chr12:10875354-10876257
  hyper

SEQ ID NO: 421602 - DNA, 44 bp, Homo sapiens; identical to SEQ ID NO: 202870
  chr12:11801643-11801687
  hyper

SEQ ID NO: 421603 - DNA, 427 bp, Homo sapiens; identical to SEQ ID NO: 202871
  chr12:11802787-11803214
  hyper

SEQ ID NO: 421604 - DNA, 198 bp, Homo sapiens; identical to SEQ ID NO: 202872
  chr12:11905383-11905581
  hyper

SEQ ID NO: 421605 - DNA, 165 bp, Homo sapiens; identical to SEQ ID NO: 202873
  chr12:11992073-11992238
  hyper

SEQ ID NO: 421606 - DNA, 382 bp, Homo sapiens; identical to SEQ ID NO: 202874
  chr12:12006113-12006495
  hyper

SEQ ID NO: 421607 - DNA, 546 bp, Homo sapiens; identical to SEQ ID NO: 202875
  chr12:12022357-12022903
  hyper

SEQ ID NO: 421608 - DNA, 147 bp, Homo sapiens; identical to SEQ ID NO: 202876
  chr12:12037378-12037525
  hyper

SEQ ID NO: 421609 - DNA, 101 bp, Homo sapiens; identical to SEQ ID NO: 202877
  chr12:12038859-12038960
  hyper

SEQ ID NO: 421610 - DNA, 2801 bp, Homo sapiens; identical to SEQ ID NO: 202878
  chr12:12043874-12046675
  hyper

SEQ ID NO: 421611 - DNA, 1481 bp, Homo sapiens; identical to SEQ ID NO: 202879
  chr12:12046855-12048336
  hyper

SEQ ID NO: 421612 - DNA, 444 bp, Homo sapiens; identical to SEQ ID NO: 288734
  chr12:12419476-12419920
  hyper

SEQ ID NO: 421613 - DNA, 625 bp, Homo sapiens; identical to SEQ ID NO: 121923
  chr12:12419964-12420589
  hyper

SEQ ID NO: 421614 - DNA, 206 bp, Homo sapiens; identical to SEQ ID NO: 236147
  chr12:12510050-12510256
  hyper

SEQ ID NO: 421615 - DNA, 219 bp, Homo sapiens; identical to SEQ ID NO: 236148
  chr12:12715424-12715643
  hyper

SEQ ID NO: 421616 - DNA, 292 bp, Homo sapiens; identical to SEQ ID NO: 236149
  chr12:12764617-12764909
  hyper

SEQ ID NO: 421617 - DNA, 59 bp, Homo sapiens; identical to SEQ ID NO: 288740
  chr12:12869129-12869188
  hyper

SEQ ID NO: 421618 - DNA, 189 bp, Homo sapiens; identical to SEQ ID NO: 288741
  chr12:12869412-12869601
  hyper

SEQ ID NO: 421619 - DNA, 421 bp, Homo sapiens; identical to SEQ ID NO: 236150
  chr12:12871738-12872159
  hyper

SEQ ID NO: 421620 - DNA, 103 bp, Homo sapiens; identical to SEQ ID NO: 236151
  chr12:12876593-12876696
  hyper

SEQ ID NO: 421621 - DNA, 286 bp, Homo sapiens; identical to SEQ ID NO: 288744
  chr12:12877458-12877744
  hyper

SEQ ID NO: 421622 - DNA, 410 bp, Homo sapiens; identical to SEQ ID NO: 236153
  chr12:12939505-12939915
  hyper

SEQ ID NO: 421623 - DNA, 443 bp, Homo sapiens; identical to SEQ ID NO: 236154
  chr12:13044060-13044503
  hyper

SEQ ID NO: 421624 - DNA, 71 bp, Homo sapiens; identical to SEQ ID NO: 288747
  chr12:13069193-13069264
  hyper

SEQ ID NO: 421625 - DNA, 108 bp, Homo sapiens; identical to SEQ ID NO: 121940
  chr12:13069316-13069424
  hyper

SEQ ID NO: 421626 - DNA, 447 bp, Homo sapiens; identical to SEQ ID NO: 202885
  chr12:13152998-13153445
  hyper

SEQ ID NO: 421627 - DNA, 93 bp, Homo sapiens; identical to SEQ ID NO: 224308
  chr12:13154241-13154334
  hyper

SEQ ID NO: 421628 - DNA, 31 bp, Homo sapiens; identical to SEQ ID NO: 202886
  chr12:13197534-13197565
  hyper

SEQ ID NO: 421629 - DNA, 244 bp, Homo sapiens; identical to SEQ ID NO: 236157
  chr12:13254493-13254737
  hyper

SEQ ID NO: 421630 - DNA, 43 bp, Homo sapiens; identical to SEQ ID NO: 236161
  chr12:14518512-14518555
  hyper

SEQ ID NO: 421631 - DNA, 257 bp, Homo sapiens; identical to SEQ ID NO: 236162
  chr12:14520248-14520505
  hyper

SEQ ID NO: 421632 - DNA, 71 bp, Homo sapiens; identical to SEQ ID NO: 288755
  chr12:14720395-14720466
  hyper

SEQ ID NO: 421633 - DNA, 313 bp, Homo sapiens; identical to SEQ ID NO: 288756
  chr12:14720507-14720820
  hyper

SEQ ID NO: 421634 - DNA, 55 bp, Homo sapiens; identical to SEQ ID NO: 202888
  chr12:14923205-14923260
  hyper

SEQ ID NO: 421635 - DNA, 150 bp, Homo sapiens; identical to SEQ ID NO: 236165
  chr12:14924062-14924212
  hyper

SEQ ID NO: 421636 - DNA, 41 bp, Homo sapiens; identical to SEQ ID NO: 202891
  chr12:15475222-15475263
  hyper

SEQ ID NO: 421637 - DNA, 354 bp, Homo sapiens; identical to SEQ ID NO: 202892
  chr12:15475336-15475690
  hyper

SEQ ID NO: 421638 - DNA, 60 bp, Homo sapiens; identical to SEQ ID NO: 202893
  chr12:15475691-15475751
  hyper

SEQ ID NO: 421639 - DNA, 140 bp, Homo sapiens; identical to SEQ ID NO: 236170
  chr12:16064015-16064155
  hyper

SEQ ID NO: 421640 - DNA, 292 bp, Homo sapiens; identical to SEQ ID NO: 236171
  chr12:16064519-16064811
  hyper

SEQ ID NO: 421641 - DNA, 307 bp, Homo sapiens; identical to SEQ ID NO: 202897
  chr12:16758091-16758398
  hyper

SEQ ID NO: 421642 - DNA, 51 bp, Homo sapiens; identical to SEQ ID NO: 288770
  chr12:16758428-16758479
  hyper

SEQ ID NO: 421643 - DNA, 260 bp, Homo sapiens; identical to SEQ ID NO: 236178
  chr12:19593439-19593699
  hyper

SEQ ID NO: 421644 - DNA, 72 bp, Homo sapiens; identical to SEQ ID NO: 202903
  chr12:20521072-20521144
  hyper

SEQ ID NO: 421645 - DNA, 267 bp, Homo sapiens; identical to SEQ ID NO: 202904
  chr12:20521841-20522108
  hyper

SEQ ID NO: 421646 - DNA, 182 bp, Homo sapiens; identical to SEQ ID NO: 202905
  chr12:20522891-20523073
  hyper

SEQ ID NO: 421647 - DNA, 162 bp, Homo sapiens; identical to SEQ ID NO: 202906
  chr12:20523117-20523279
  hyper

SEQ ID NO: 421648 - DNA, 637 bp, Homo sapiens; identical to SEQ ID NO: 236180
  chr12:21590454-21591091
  hyper

SEQ ID NO: 421649 - DNA, 78 bp, Homo sapiens; identical to SEQ ID NO: 202910
  chr12:22095196-22095274
  hyper

SEQ ID NO: 421650 - DNA, 86 bp, Homo sapiens; identical to SEQ ID NO: 236185
  chr12:22199508-22199594
  hyper

SEQ ID NO: 421651 - DNA, 137 bp, Homo sapiens; identical to SEQ ID NO: 226549
  chr12:22529506-22529643
  hyper

SEQ ID NO: 421652 - DNA, 199 bp, Homo sapiens; identical to SEQ ID NO: 236189
  chr12:24103311-24103510
  hyper

SEQ ID NO: 421653 - DNA, 256 bp, Homo sapiens; identical to SEQ ID NO: 202913
  chr12:24716473-24716729
  hyper

SEQ ID NO: 421654 - DNA, 33 bp, Homo sapiens; identical to SEQ ID NO: 202915
  chr12:25347677-25347710
  hyper

SEQ ID NO: 421655 - DNA, 308 bp, Homo sapiens; identical to SEQ ID NO: 202916
  chr12:25347959-25348267
  hyper

SEQ ID NO: 421656 - DNA, 223 bp, Homo sapiens; identical to SEQ ID NO: 236199
  chr12:25348633-25348856
  hyper

SEQ ID NO: 421657 - DNA, 259 bp, Homo sapiens; identical to SEQ ID NO: 202917
  chr12:25404339-25404598
  hyper

SEQ ID NO: 421658 - DNA, 142 bp, Homo sapiens; identical to SEQ ID NO: 224326
  chr12:25538253-25538395
  hyper

SEQ ID NO: 421659 - DNA, 363 bp, Homo sapiens; identical to SEQ ID NO: 288798
  chr12:26111918-26112281
  hyper

SEQ ID NO: 421660 - DNA, 495 bp, Homo sapiens; identical to SEQ ID NO: 122008
  chr12:26112305-26112800
  hyper

SEQ ID NO: 421661 - DNA, 232 bp, Homo sapiens; identical to SEQ ID NO: 236201
  chr12:26277911-26278143
  hyper

SEQ ID NO: 421662 - DNA, 448 bp, Homo sapiens; identical to SEQ ID NO: 202919
  chr12:26379638-26380086
  hyper

SEQ ID NO: 421663 - DNA, 88 bp, Homo sapiens; identical to SEQ ID NO: 202920
  chr12:26986791-26986879
  hyper

SEQ ID NO: 421664 - DNA, 46 bp, Homo sapiens; identical to SEQ ID NO: 202921
  chr12:27038033-27038079
  hyper

SEQ ID NO: 421665 - DNA, 136 bp, Homo sapiens; identical to SEQ ID NO: 236205
  chr12:27091342-27091478
  hyper

SEQ ID NO: 421666 - DNA, 163 bp, Homo sapiens; identical to SEQ ID NO: 236206
  chr12:27166929-27167092
  hyper

SEQ ID NO: 421667 - DNA, 278 bp, Homo sapiens; identical to SEQ ID NO: 236207
  chr12:27175266-27175544
  hyper

SEQ ID NO: 421668 - DNA, 93 bp, Homo sapiens; identical to SEQ ID NO: 236208
  chr12:27397408-27397501
  hyper

SEQ ID NO: 421669 - DNA, 106 bp, Homo sapiens; identical to SEQ ID NO: 288808
  chr12:27486689-27486795
  hyper

SEQ ID NO: 421670 - DNA, 210 bp, Homo sapiens; identical to SEQ ID NO: 288812
  chr12:28123786-28123996
  hyper

SEQ ID NO: 421671 - DNA, 91 bp, Homo sapiens; identical to SEQ ID NO: 202922
  chr12:28129084-28129175
  hyper

SEQ ID NO: 421672 - DNA, 203 bp, Homo sapiens; identical to SEQ ID NO: 288814
  chr12:29301531-29301734
  hyper

SEQ ID NO: 421673 - DNA, 121 bp, Homo sapiens; identical to SEQ ID NO: 202924
  chr12:29534144-29534265
  hyper

SEQ ID NO: 421674 - DNA, 49 bp, Homo sapiens; identical to SEQ ID NO: 288819
  chr12:30353956-30354005
  hyper

SEQ ID NO: 421675 - DNA, 342 bp, Homo sapiens; identical to SEQ ID NO: 288820
  chr12:30354117-30354459
  hyper

SEQ ID NO: 421676 - DNA, 472 bp, Homo sapiens
  chr12:30949478-30949950
  hyper
ggctctggtggggaccatgcctaggagagtaatctgagctggggactgggctctcctcccgcccctcccggcccgtgcgccccaggcatgcgctcctcccgctgctcccttggcccccagcgcacagctccaaacccgcggggcgagccgtcaccttactctctagccttagccggcccccaaatttaatttctgccctggccgtcaagccataaaagtcgattataatcgccgcccccccccgaccaccccaaccccctgcctttgctctcgcccccgtttcagacttctcttctcttcttgaagtcaagccctcaagtcgggactctaggaagtccgttttcttcgtcctaacccctttgtatcctctcccatccccacccctttcactctgccctctggctctgatttctcggcctttccgttttttctctccaggtagagacagctccgggccgggggtggaggatgg

SEQ ID NO: 421677 - DNA, 35 bp, Homo sapiens; identical to SEQ ID NO: 202928
  chr12:31079223-31079258
  hyper

SEQ ID NO: 421678 - DNA, 251 bp, Homo sapiens; identical to SEQ ID NO: 236221
  chr12:31479082-31479333
  hyper

SEQ ID NO: 421679 - DNA, 138 bp, Homo sapiens; identical to SEQ ID NO: 236222
  chr12:32112315-32112453
  hyper

SEQ ID NO: 421680 - DNA, 105 bp, Homo sapiens; identical to SEQ ID NO: 236223
  chr12:32831955-32832060
  hyper

SEQ ID NO: 421681 - DNA, 80 bp, Homo sapiens; identical to SEQ ID NO: 202930
  chr12:32908757-32908837
  hyper

SEQ ID NO: 421682 - DNA, 33 bp, Homo sapiens; identical to SEQ ID NO: 202931
  chr12:33048899-33048932
  hyper

SEQ ID NO: 421683 - DNA, 173 bp, Homo sapiens; identical to SEQ ID NO: 288834
  chr12:33591575-33591748
  hyper

SEQ ID NO: 421684 - DNA, 136 bp, Homo sapiens; identical to SEQ ID NO: 202937
  chr12:33592092-33592228
  hyper

SEQ ID NO: 421685 - DNA, 58 bp, Homo sapiens; identical to SEQ ID NO: 398975
  chr12:33592320-33592378
  hyper

SEQ ID NO: 421686 - DNA, 43 bp, Homo sapiens; identical to SEQ ID NO: 236232
  chr12:34261353-34261396
  hyper

SEQ ID NO: 421687 - DNA, 166 bp, Homo sapiens; identical to SEQ ID NO: 236235
  chr12:39836134-39836300
  hyper

SEQ ID NO: 421688 - DNA, 327 bp, Homo sapiens; identical to SEQ ID NO: 202944
  chr12:39837348-39837675
  hyper

SEQ ID NO: 421689 - DNA, 86 bp, Homo sapiens; identical to SEQ ID NO: 202949
  chr12:41087106-41087192
  hyper

SEQ ID NO: 421690 - DNA, 53 bp, Homo sapiens; identical to SEQ ID NO: 236240
  chr12:42719560-42719613
  hyper

SEQ ID NO: 421691 - DNA, 121 bp, Homo sapiens; identical to SEQ ID NO: 288854
  chr12:42982745-42982866
  hyper

SEQ ID NO: 421692 - DNA, 61 bp, Homo sapiens; identical to SEQ ID NO: 288855
  chr12:42982950-42983011
  hyper

SEQ ID NO: 421693 - DNA, 384 bp, Homo sapiens; identical to SEQ ID NO: 288856
  chr12:42983874-42984258
  hyper

SEQ ID NO: 421694 - DNA, 120 bp, Homo sapiens; identical to SEQ ID NO: 236243
  chr12:44200419-44200539
  hyper

SEQ ID NO: 421695 - DNA, 165 bp, Homo sapiens; identical to SEQ ID NO: 236248
  chr12:45609639-45609804
  hyper

SEQ ID NO: 421696 - DNA, 150 bp, Homo sapiens; identical to SEQ ID NO: 236249
  chr12:46120764-46120914
  hyper

SEQ ID NO: 421697 - DNA, 130 bp, Homo sapiens; identical to SEQ ID NO: 236250
  chr12:46123555-46123685
  hyper

SEQ ID NO: 421698 - DNA, 211 bp, Homo sapiens; identical to SEQ ID NO: 236254
  chr12:47473961-47474172
  hyper

SEQ ID NO: 421699 - DNA, 225 bp, Homo sapiens; identical to SEQ ID NO: 288866
  chr12:48099380-48099605
  hyper

SEQ ID NO: 421700 - DNA, 117 bp, Homo sapiens; identical to SEQ ID NO: 288867
  chr12:48099674-48099791
  hyper

SEQ ID NO: 421701 - DNA, 75 bp, Homo sapiens; identical to SEQ ID NO: 49480
  chr12:48099829-48099904
  hyper

SEQ ID NO: 421702 - DNA, 48 bp, Homo sapiens; identical to SEQ ID NO: 236257
  chr12:48395457-48395505
  hyper

SEQ ID NO: 421703 - DNA, 162 bp, Homo sapiens; identical to SEQ ID NO: 288873
  chr12:48396586-48396748
  hyper

SEQ ID NO: 421704 - DNA, 60 bp, Homo sapiens; identical to SEQ ID NO: 202955
  chr12:48397086-48397146
  hyper

SEQ ID NO: 421705 - DNA, 214 bp, Homo sapiens; identical to SEQ ID NO: 288879
  chr12:48690460-48690674
  hyper

SEQ ID NO: 421706 - DNA, 335 bp, Homo sapiens; identical to SEQ ID NO: 202960
  chr12:49182447-49182782
  hyper

SEQ ID NO: 421707 - DNA, 326 bp, Homo sapiens; identical to SEQ ID NO: 288881
  chr12:49183004-49183330
  hyper

SEQ ID NO: 421708 - DNA, 101 bp, Homo sapiens; identical to SEQ ID NO: 202962
  chr12:49259401-49259502
  hyper

SEQ ID NO: 421709 - DNA, 119 bp, Homo sapiens; identical to SEQ ID NO: 236268
  chr12:49284755-49284874
  hyper

SEQ ID NO: 421710 - DNA, 481 bp, Homo sapiens; identical to SEQ ID NO: 202963
  chr12:49351242-49351723
  hyper

SEQ ID NO: 421711 - DNA, 527 bp, Homo sapiens; identical to SEQ ID NO: 288887
  chr12:49371614-49372141
  hyper

SEQ ID NO: 421712 - DNA, 76 bp, Homo sapiens; identical to SEQ ID NO: 288888
  chr12:49372236-49372312
  hyper

SEQ ID NO: 421713 - DNA, 41 bp, Homo sapiens; identical to SEQ ID NO: 202966
  chr12:49375529-49375570
  hyper

SEQ ID NO: 421714 - DNA, 271 bp, Homo sapiens; identical to SEQ ID NO: 236274
  chr12:49393152-49393423
  hyper

SEQ ID NO: 421715 - DNA, 48 bp, Homo sapiens; identical to SEQ ID NO: 288893
  chr12:49484227-49484275
  hyper

SEQ ID NO: 421716 - DNA, 48 bp, Homo sapiens; identical to SEQ ID NO: 202970
  chr12:49524764-49524812
  hyper

SEQ ID NO: 421717 - DNA, 97 bp, Homo sapiens; identical to SEQ ID NO: 236278
  chr12:49525460-49525557
  hyper

SEQ ID NO: 421718 - DNA, 66 bp, Homo sapiens; identical to SEQ ID NO: 288902
  chr12:49689031-49689097
  hyper

SEQ ID NO: 421719 - DNA, 151 bp, Homo sapiens; identical to SEQ ID NO: 122218
  chr12:49689134-49689285
  hyper

SEQ ID NO: 421720 - DNA, 171 bp, Homo sapiens; identical to SEQ ID NO: 288904
  chr12:49690392-49690563
  hyper

SEQ ID NO: 421721 - DNA, 61 bp, Homo sapiens; identical to SEQ ID NO: 388989
  chr12:49690601-49690662
  hyper

SEQ ID NO: 421722 - DNA, 66 bp, Homo sapiens; identical to SEQ ID NO: 236284
  chr12:49731138-49731204
  hyper

SEQ ID NO: 421723 - DNA, 197 bp, Homo sapiens; identical to SEQ ID NO: 236287
  chr12:49740982-49741179
  hyper

SEQ ID NO: 421724 - DNA, 125 bp, Homo sapiens; identical to SEQ ID NO: 236288
  chr12:49741513-49741638
  hyper

SEQ ID NO: 421725 - DNA, 301 bp, Homo sapiens; identical to SEQ ID NO: 202975
  chr12:49761541-49761842
  hyper

SEQ ID NO: 421726 - DNA, 92 bp, Homo sapiens; identical to SEQ ID NO: 224355
  chr12:49932286-49932378
  hyper

SEQ ID NO: 421727 - DNA, 233 bp, Homo sapiens; identical to SEQ ID NO: 288917
  chr12:49933026-49933259
  hyper

SEQ ID NO: 421728 - DNA, 141 bp, Homo sapiens; identical to SEQ ID NO: 288918
  chr12:49933289-49933430
  hyper

SEQ ID NO: 421729 - DNA, 544 bp, Homo sapiens; identical to SEQ ID NO: 236291
  chr12:49961430-49961974
  hyper

SEQ ID NO: 421730 - DNA, 182 bp, Homo sapiens; identical to SEQ ID NO: 236292
  chr12:50016479-50016661
  hyper

SEQ ID NO: 421731 - DNA, 68 bp, Homo sapiens; identical to SEQ ID NO: 236296
  chr12:50349342-50349410
  hyper

SEQ ID NO: 421732 - DNA, 201 bp, Homo sapiens; identical to SEQ ID NO: 236298
  chr12:50361387-50361588
  hyper

SEQ ID NO: 421733 - DNA, 78 bp, Homo sapiens; identical to SEQ ID NO: 202978
  chr12:50419370-50419448
  hyper

SEQ ID NO: 421734 - DNA, 106 bp, Homo sapiens; identical to SEQ ID NO: 288925
  chr12:50426642-50426748
  hyper

SEQ ID NO: 421735 - DNA, 122 bp, Homo sapiens; identical to SEQ ID NO: 236301
  chr12:50505850-50505972
  hyper

SEQ ID NO: 421736 - DNA, 505 bp, Homo sapiens; identical to SEQ ID NO: 288927
  chr12:50677034-50677539
  hyper

SEQ ID NO: 421737 - DNA, 201 bp, Homo sapiens; identical to SEQ ID NO: 236303
  chr12:50899499-50899700
  hyper

SEQ ID NO: 421738 - DNA, 95 bp, Homo sapiens; identical to SEQ ID NO: 236304
  chr12:50926642-50926737
  hyper

SEQ ID NO: 421739 - DNA, 267 bp, Homo sapiens; identical to SEQ ID NO: 202979
  chr12:51157702-51157969
  hyper

SEQ ID NO: 421740 - DNA, 239 bp, Homo sapiens; identical to SEQ ID NO: 202980
  chr12:51318416-51318655
  hyper

SEQ ID NO: 421741 - DNA, 108 bp, Homo sapiens; identical to SEQ ID NO: 236307
  chr12:51419807-51419915
  hyper

SEQ ID NO: 421742 - DNA, 41 bp, Homo sapiens; identical to SEQ ID NO: 236308
  chr12:51477513-51477554
  hyper

SEQ ID NO: 421743 - DNA, 32 bp, Homo sapiens; identical to SEQ ID NO: 224358
  chr12:51610959-51610991
  hyper

SEQ ID NO: 421744 - DNA, 98 bp, Homo sapiens; identical to SEQ ID NO: 236309
  chr12:51632361-51632459
  hyper

SEQ ID NO: 421745 - DNA, 689 bp, Homo sapiens; identical to SEQ ID NO: 288937
  chr12:51818412-51819101
  hyper

SEQ ID NO: 421746 - DNA, 264 bp, Homo sapiens; identical to SEQ ID NO: 288938
  chr12:52208404-52208668
  hyper

SEQ ID NO: 421747 - DNA, 62 bp, Homo sapiens; identical to SEQ ID NO: 288939
  chr12:52208753-52208815
  hyper

SEQ ID NO: 421748 - DNA, 147 bp, Homo sapiens; identical to SEQ ID NO: 288941
  chr12:52345764-52345911
  hyper

SEQ ID NO: 421749 - DNA, 149 bp, Homo sapiens; identical to SEQ ID NO: 288943
  chr12:52416804-52416953
  hyper

SEQ ID NO: 421750 - DNA, 179 bp, Homo sapiens; identical to SEQ ID NO: 288944
  chr12:52416985-52417164
  hyper

SEQ ID NO: 421751 - DNA, 191 bp, Homo sapiens; identical to SEQ ID NO: 288945
  chr12:52427134-52427325
  hyper

SEQ ID NO: 421752 - DNA, 58 bp, Homo sapiens; identical to SEQ ID NO: 202985
  chr12:52463634-52463692
  hyper

SEQ ID NO: 421753 - DNA, 192 bp, Homo sapiens; identical to SEQ ID NO: 236318
  chr12:52464067-52464259
  hyper

SEQ ID NO: 421754 - DNA, 50 bp, Homo sapiens; identical to SEQ ID NO: 236319
  chr12:52615994-52616044
  hyper

SEQ ID NO: 421755 - DNA, 51 bp, Homo sapiens; identical to SEQ ID NO: 236321
  chr12:52627539-52627590
  hyper

SEQ ID NO: 421756 - DNA, 319 bp, Homo sapiens; identical to SEQ ID NO: 288952
  chr12:52702043-52702362
  hyper

SEQ ID NO: 421757 - DNA, 74 bp, Homo sapiens; identical to SEQ ID NO: 288953
  chr12:53004326-53004400
  hyper

SEQ ID NO: 421758 - DNA, 70 bp, Homo sapiens; identical to SEQ ID NO: 288955
  chr12:53107929-53107999
  hyper

SEQ ID NO: 421759 - DNA, 313 bp, Homo sapiens; identical to SEQ ID NO: 202988
  chr12:53135226-53135539
  hyper

SEQ ID NO: 421760 - DNA, 168 bp, Homo sapiens; identical to SEQ ID NO: 236330
  chr12:53273344-53273512
  hyper

SEQ ID NO: 421761 - DNA, 192 bp, Homo sapiens; identical to SEQ ID NO: 236331
  chr12:53297370-53297562
  hyper

SEQ ID NO: 421762 - DNA, 373 bp, Homo sapiens; identical to SEQ ID NO: 236334
  chr12:53472778-53473151
  hyper

SEQ ID NO: 421763 - DNA, 236 bp, Homo sapiens; identical to SEQ ID NO: 236335
  chr12:53574316-53574552
  hyper

SEQ ID NO: 421764 - DNA, 66 bp, Homo sapiens; identical to SEQ ID NO: 236336
  chr12:53607267-53607333
  hyper

SEQ ID NO: 421765 - DNA, 355 bp, Homo sapiens; identical to SEQ ID NO: 236338
  chr12:53662065-53662420
  hyper

SEQ ID NO: 421766 - DNA, 176 bp, Homo sapiens; identical to SEQ ID NO: 202993
  chr12:53714987-53715163
  hyper

SEQ ID NO: 421767 - DNA, 216 bp, Homo sapiens; identical to SEQ ID NO: 236340
  chr12:53718312-53718528
  hyper

SEQ ID NO: 421768 - DNA, 138 bp, Homo sapiens; identical to SEQ ID NO: 202995
  chr12:53765064-53765202
  hyper

SEQ ID NO: 421769 - DNA, 141 bp, Homo sapiens; identical to SEQ ID NO: 236342
  chr12:53765510-53765651
  hyper

SEQ ID NO: 421770 - DNA, 145 bp, Homo sapiens; identical to SEQ ID NO: 236343
  chr12:53835282-53835427
  hyper

SEQ ID NO: 421771 - DNA, 133 bp, Homo sapiens; identical to SEQ ID NO: 236344
  chr12:53892936-53893069
  hyper

SEQ ID NO: 421772 - DNA, 97 bp, Homo sapiens; identical to SEQ ID NO: 202996
  chr12:53894678-53894775
  hyper

SEQ ID NO: 421773 - DNA, 136 bp, Homo sapiens; identical to SEQ ID NO: 236346
  chr12:53895055-53895191
  hyper

SEQ ID NO: 421774 - DNA, 384 bp, Homo sapiens; identical to SEQ ID NO: 202997
  chr12:54090210-54090594
  hyper

SEQ ID NO: 421775 - DNA, 182 bp, Homo sapiens; identical to SEQ ID NO: 236350
  chr12:54091028-54091210
  hyper

SEQ ID NO: 421776 - DNA, 56 bp, Homo sapiens; identical to SEQ ID NO: 202998
  chr12:54120862-54120918
  hyper

SEQ ID NO: 421777 - DNA, 69 bp, Homo sapiens; identical to SEQ ID NO: 203000
  chr12:54329187-54329256
  hyper

SEQ ID NO: 421778 - DNA, 67 bp, Homo sapiens; identical to SEQ ID NO: 203001
  chr12:54329947-54330014
  hyper

SEQ ID NO: 421779 - DNA, 183 bp, Homo sapiens; identical to SEQ ID NO: 288988
  chr12:54332040-54332223
  hyper

SEQ ID NO: 421780 - DNA, 36 bp, Homo sapiens; identical to SEQ ID NO: 288992
  chr12:54345236-54345272
  hyper

SEQ ID NO: 421781 - DNA, 47 bp, Homo sapiens; identical to SEQ ID NO: 288993
  chr12:54345520-54345567
  hyper

SEQ ID NO: 421782 - DNA, 224 bp, Homo sapiens; identical to SEQ ID NO: 288994
  chr12:54346032-54346256
  hyper

SEQ ID NO: 421783 - DNA, 336 bp, Homo sapiens; identical to SEQ ID NO: 203004
  chr12:54346835-54347171
  hyper

SEQ ID NO: 421784 - DNA, 45 bp, Homo sapiens; identical to SEQ ID NO: 236369
  chr12:54347924-54347969
  hyper

SEQ ID NO: 421785 - DNA, 107 bp, Homo sapiens; identical to SEQ ID NO: 236371
  chr12:54350138-54350245
  hyper

SEQ ID NO: 421786 - DNA, 53 bp, Homo sapiens; identical to SEQ ID NO: 122404
  chr12:54351375-54351428
  hyper

SEQ ID NO: 421787 - DNA, 200 bp, Homo sapiens; identical to SEQ ID NO: 289001
  chr12:54357368-54357568
  hyper

SEQ ID NO: 421788 - DNA, 295 bp, Homo sapiens; identical to SEQ ID NO: 122410
  chr12:54357603-54357898
  hyper

SEQ ID NO: 421789 - DNA, 438 bp, Homo sapiens; identical to SEQ ID NO: 289003
  chr12:54360131-54360569
  hyper

SEQ ID NO: 421790 - DNA, 49 bp, Homo sapiens; identical to SEQ ID NO: 289004
  chr12:54360649-54360698
  hyper

SEQ ID NO: 421791 - DNA, 288 bp, Homo sapiens; identical to SEQ ID NO: 399027
  chr12:54377239-54377527
  hyper

SEQ ID NO: 421792 - DNA, 256 bp, Homo sapiens; identical to SEQ ID NO: 203011
  chr12:54388855-54389111
  hyper

SEQ ID NO: 421793 - DNA, 134 bp, Homo sapiens; identical to SEQ ID NO: 203013
  chr12:54392869-54393003
  hyper

SEQ ID NO: 421794 - DNA, 63 bp, Homo sapiens; identical to SEQ ID NO: 203016
  chr12:54408253-54408316
  hyper

SEQ ID NO: 421795 - DNA, 49 bp, Homo sapiens; identical to SEQ ID NO: 289026
  chr12:54410237-54410286
  hyper

SEQ ID NO: 421796 - DNA, 283 bp, Homo sapiens; identical to SEQ ID NO: 203017
  chr12:54410364-54410647
  hyper

SEQ ID NO: 421797 - DNA, 79 bp, Homo sapiens; identical to SEQ ID NO: 289028
  chr12:54420508-54420587
  hyper

SEQ ID NO: 421798 - DNA, 122 bp, Homo sapiens; identical to SEQ ID NO: 289032
  chr12:54424624-54424746
  hyper

SEQ ID NO: 421799 - DNA, 189 bp, Homo sapiens; identical to SEQ ID NO: 236403
  chr12:54475616-54475805
  hyper

SEQ ID NO: 421800 - DNA, 101 bp, Homo sapiens; identical to SEQ ID NO: 236405
  chr12:54582781-54582882
  hyper

SEQ ID NO: 421801 - DNA, 55 bp, Homo sapiens; identical to SEQ ID NO: 203029
  chr12:54608668-54608723
  hyper

SEQ ID NO: 421802 - DNA, 88 bp, Homo sapiens; identical to SEQ ID NO: 236407
  chr12:54674339-54674427
  hyper

SEQ ID NO: 421803 - DNA, 41 bp, Homo sapiens; identical to SEQ ID NO: 203030
  chr12:54686414-54686455
  hyper

SEQ ID NO: 421804 - DNA, 277 bp, Homo sapiens; identical to SEQ ID NO: 289049
  chr12:54812879-54813156
  hyper

SEQ ID NO: 421805 - DNA, 235 bp, Homo sapiens; identical to SEQ ID NO: 289050
  chr12:54943116-54943351
  hyper

SEQ ID NO: 421806 - DNA, 204 bp, Homo sapiens; identical to SEQ ID NO: 289051
  chr12:54943423-54943627
  hyper

SEQ ID NO: 421807 - DNA, 527 bp, Homo sapiens; identical to SEQ ID NO: 289052
  chr12:54982005-54982532
  hyper

SEQ ID NO: 421808 - DNA, 78 bp, Homo sapiens; identical to SEQ ID NO: 236411
  chr12:55413596-55413674
  hyper

SEQ ID NO: 421809 - DNA, 244 bp, Homo sapiens; identical to SEQ ID NO: 236412
  chr12:56101314-56101558
  hyper

SEQ ID NO: 421810 - DNA, 93 bp, Homo sapiens; identical to SEQ ID NO: 236413
  chr12:56123024-56123117
  hyper

SEQ ID NO: 421811 - DNA, 404 bp, Homo sapiens; identical to SEQ ID NO: 236414
  chr12:56137579-56137983
  hyper

SEQ ID NO: 421812 - DNA, 222 bp, Homo sapiens; identical to SEQ ID NO: 236415
  chr12:56210929-56211151
  hyper

SEQ ID NO: 421813 - DNA, 96 bp, Homo sapiens; identical to SEQ ID NO: 236416
  chr12:56211700-56211796
  hyper

SEQ ID NO: 421814 - DNA, 148 bp, Homo sapiens; identical to SEQ ID NO: 236417
  chr12:56320837-56320985
  hyper

SEQ ID NO: 421815 - DNA, 42 bp, Homo sapiens; identical to SEQ ID NO: 224382
  chr12:56326151-56326193
  hyper

SEQ ID NO: 421816 - DNA, 193 bp, Homo sapiens; identical to SEQ ID NO: 236418
  chr12:56360051-56360244
  hyper

SEQ ID NO: 421817 - DNA, 138 bp, Homo sapiens; identical to SEQ ID NO: 236419
  chr12:56367675-56367813
  hyper

SEQ ID NO: 421818 - DNA, 151 bp, Homo sapiens; identical to SEQ ID NO: 203036
  chr12:56390556-56390707
  hyper

SEQ ID NO: 421819 - DNA, 226 bp, Homo sapiens; identical to SEQ ID NO: 236420
  chr12:56401112-56401338
  hyper

SEQ ID NO: 421820 - DNA, 79 bp, Homo sapiens; identical to SEQ ID NO: 289066
  chr12:56473739-56473818
  hyper

SEQ ID NO: 421821 - DNA, 131 bp, Homo sapiens; identical to SEQ ID NO: 289067
  chr12:56473838-56473969
  hyper

SEQ ID NO: 421822 - DNA, 348 bp, Homo sapiens; identical to SEQ ID NO: 122505
  chr12:56473998-56474346
  hyper

SEQ ID NO: 421823 - DNA, 201 bp, Homo sapiens; identical to SEQ ID NO: 203038
  chr12:56497906-56498107
  hyper

SEQ ID NO: 421824 - DNA, 335 bp, Homo sapiens; identical to SEQ ID NO: 236424
  chr12:56511633-56511968
  hyper

SEQ ID NO: 421825 - DNA, 64 bp, Homo sapiens; identical to SEQ ID NO: 236426
  chr12:56522028-56522092
  hyper

SEQ ID NO: 421826 - DNA, 120 bp, Homo sapiens; identical to SEQ ID NO: 203040
  chr12:56552005-56552125
  hyper

SEQ ID NO: 421827 - DNA, 83 bp, Homo sapiens; identical to SEQ ID NO: 236428
  chr12:56614495-56614578
  hyper

SEQ ID NO: 421828 - DNA, 354 bp, Homo sapiens; identical to SEQ ID NO: 236429
  chr12:56615721-56616075
  hyper

SEQ ID NO: 421829 - DNA, 213 bp, Homo sapiens; identical to SEQ ID NO: 236430
  chr12:56618043-56618256
  hyper

SEQ ID NO: 421830 - DNA, 236 bp, Homo sapiens; identical to SEQ ID NO: 236431
  chr12:56652044-56652280
  hyper

SEQ ID NO: 421831 - DNA, 63 bp, Homo sapiens; identical to SEQ ID NO: 289078
  chr12:56660466-56660529
  hyper

SEQ ID NO: 421832 - DNA, 52 bp, Homo sapiens; identical to SEQ ID NO: 122523
  chr12:56660589-56660641
  hyper

SEQ ID NO: 421833 - DNA, 52 bp, Homo sapiens; identical to SEQ ID NO: 236433
  chr12:56660884-56660936
  hyper

SEQ ID NO: 421834 - DNA, 84 bp, Homo sapiens; identical to SEQ ID NO: 236434
  chr12:56694265-56694349
  hyper

SEQ ID NO: 421835 - DNA, 244 bp, Homo sapiens; identical to SEQ ID NO: 236435
  chr12:56754009-56754253
  hyper

SEQ ID NO: 421836 - DNA, 388 bp, Homo sapiens; identical to SEQ ID NO: 236436
  chr12:56862356-56862744
  hyper

SEQ ID NO: 421837 - DNA, 73 bp, Homo sapiens; identical to SEQ ID NO: 289084
  chr12:56881839-56881912
  hyper

SEQ ID NO: 421838 - DNA, 168 bp, Homo sapiens; identical to SEQ ID NO: 203043
  chr12:57081172-57081340
  hyper

SEQ ID NO: 421839 - DNA, 332 bp, Homo sapiens; identical to SEQ ID NO: 236440
  chr12:57472541-57472873
  hyper

SEQ ID NO: 421840 - DNA, 353 bp, Homo sapiens; identical to SEQ ID NO: 289088
  chr12:57504126-57504479
  hyper

SEQ ID NO: 421841 - DNA, 239 bp, Homo sapiens; identical to SEQ ID NO: 289089
  chr12:57504764-57505003
  hyper

SEQ ID NO: 421842 - DNA, 35 bp, Homo sapiens; identical to SEQ ID NO: 236443
  chr12:57521847-57521882
  hyper

SEQ ID NO: 421843 - DNA, 255 bp, Homo sapiens; identical to SEQ ID NO: 289092
  chr12:57631781-57632036
  hyper

SEQ ID NO: 421844 - DNA, 355 bp, Homo sapiens; identical to SEQ ID NO: 289093
  chr12:57632124-57632479
  hyper

SEQ ID NO: 421845 - DNA, 245 bp, Homo sapiens; identical to SEQ ID NO: 203049
  chr12:57634396-57634641
  hyper

SEQ ID NO: 421846 - DNA, 137 bp, Homo sapiens; identical to SEQ ID NO: 236449
  chr12:57824120-57824257
  hyper

SEQ ID NO: 421847 - DNA, 167 bp, Homo sapiens; identical to SEQ ID NO: 236451
  chr12:57855186-57855353
  hyper

SEQ ID NO: 421848 - DNA, 132 bp, Homo sapiens; identical to SEQ ID NO: 236452
  chr12:57881679-57881811
  hyper

SEQ ID NO: 421849 - DNA, 188 bp, Homo sapiens; identical to SEQ ID NO: 203051
  chr12:57941136-57941324
  hyper

SEQ ID NO: 421850 - DNA, 131 bp, Homo sapiens; identical to SEQ ID NO: 203052
  chr12:57984705-57984836
  hyper

SEQ ID NO: 421851 - DNA, 229 bp, Homo sapiens; identical to SEQ ID NO: 236456
  chr12:57998567-57998796
  hyper

SEQ ID NO: 421852 - DNA, 60 bp, Homo sapiens; identical to SEQ ID NO: 289103
  chr12:58004947-58005007
  hyper

SEQ ID NO: 421853 - DNA, 280 bp, Homo sapiens; identical to SEQ ID NO: 236461
  chr12:58146166-58146446
  hyper

SEQ ID NO: 421854 - DNA, 36 bp, Homo sapiens; identical to SEQ ID NO: 289108
  chr12:58158676-58158712
  hyper

SEQ ID NO: 421855 - DNA, 173 bp, Homo sapiens; identical to SEQ ID NO: 203053
  chr12:58158778-58158951
  hyper

SEQ ID NO: 421856 - DNA, 251 bp, Homo sapiens; identical to SEQ ID NO: 203054
  chr12:58159038-58159289
  hyper

SEQ ID NO: 421857 - DNA, 147 bp, Homo sapiens; identical to SEQ ID NO: 203055
  chr12:58159346-58159493
  hyper

SEQ ID NO: 421858 - DNA, 31 bp, Homo sapiens; identical to SEQ ID NO: 289112
  chr12:58159870-58159901
  hyper

SEQ ID NO: 421859 - DNA, 430 bp, Homo sapiens; identical to SEQ ID NO: 203056
  chr12:58166379-58166809
  hyper

SEQ ID NO: 421860 - DNA, 214 bp, Homo sapiens; identical to SEQ ID NO: 236466
  chr12:58176244-58176458
  hyper

SEQ ID NO: 421861 - DNA, 217 bp, Homo sapiens; identical to SEQ ID NO: 236467
  chr12:58239310-58239527
  hyper

SEQ ID NO: 421862 - DNA, 374 bp, Homo sapiens; identical to SEQ ID NO: 224387
  chr12:58259123-58259497
  hyper

SEQ ID NO: 421863 - DNA, 280 bp, Homo sapiens; identical to SEQ ID NO: 224388
  chr12:58290227-58290507
  hyper

SEQ ID NO: 421864 - DNA, 188 bp, Homo sapiens; identical to SEQ ID NO: 203059
  chr12:59313474-59313662
  hyper

SEQ ID NO: 421865 - DNA, 35 bp, Homo sapiens; identical to SEQ ID NO: 289121
  chr12:59989521-59989556
  hyper

SEQ ID NO: 421866 - DNA, 397 bp, Homo sapiens
  chr12:59989602-59989999
  hyper
gacagatctacctgccttttggctttcttccttggtcaaaactaaaatccgaagtggagtgccccgagcgatagagaaagtgcctatagctttgacagccgcttggagcatgctcagtcggtctccaggcaccgggaggcggctcccccccaccaccccccgggccggcctccaccgcagcctgtccggcccccacccctggcgcgcgctcctccgcacccacaagggcgttcagcagccgcgcctccccttcccgccaccgcctccttctccgctggctgtggcgggcgaggacacgtcaggggccataaataaataaataattccattcacccgttgacagcgaggcgaatcggctgcggtttgctgggaacggagggctgcagcgcccaccctg

SEQ ID NO: 421867 - DNA, 44 bp, Homo sapiens
  chr12:59990949-59990993
  hyper
ggtagggctgaggagggacttctgtagttccaattccagggaaa

SEQ ID NO: 421868 - DNA, 31 bp, Homo sapiens; identical to SEQ ID NO: 236474
  chr12:59991053-59991084
  hyper

SEQ ID NO: 421869 - DNA, 175 bp, Homo sapiens; identical to SEQ ID NO: 203064
  chr12:62586338-62586513
  hyper

SEQ ID NO: 421870 - DNA, 391 bp, Homo sapiens; identical to SEQ ID NO: 289126
  chr12:62829334-62829725
  hyper

SEQ ID NO: 421871 - DNA, 308 bp, Homo sapiens; identical to SEQ ID NO: 236477
  chr12:62860158-62860466
  hyper

SEQ ID NO: 421872 - DNA, 318 bp, Homo sapiens; identical to SEQ ID NO: 384445
  chr12:63328404-63328722
  hyper

SEQ ID NO: 421873 - DNA, 214 bp, Homo sapiens; identical to SEQ ID NO: 236480
  chr12:63328941-63329155
  hyper

SEQ ID NO: 421874 - DNA, 32 bp, Homo sapiens
  chr12:63545118-63545150
  hyper
gcttttcccttccaaaaacttggacaactgga

SEQ ID NO: 421875 - DNA, 329 bp, Homo sapiens; identical to SEQ ID NO: 203072
  chr12:64237615-64237944
  hyper

SEQ ID NO: 421876 - DNA, 110 bp, Homo sapiens; identical to SEQ ID NO: 203073
  chr12:64238195-64238305
  hyper

SEQ ID NO: 421877 - DNA, 98 bp, Homo sapiens; identical to SEQ ID NO: 203074
  chr12:64238524-64238622
  hyper

SEQ ID NO: 421878 - DNA, 114 bp, Homo sapiens; identical to SEQ ID NO: 236484
  chr12:64616270-64616384
  hyper

SEQ ID NO: 421879 - DNA, 111 bp, Homo sapiens; identical to SEQ ID NO: 203075
  chr12:64799099-64799210
  hyper

SEQ ID NO: 421880 - DNA, 396 bp, Homo sapiens; identical to SEQ ID NO: 203076
  chr12:64845175-64845571
  hyper

SEQ ID NO: 421881 - DNA, 58 bp, Homo sapiens; identical to SEQ ID NO: 203077
  chr12:65002989-65003047
  hyper

SEQ ID NO: 421882 - DNA, 102 bp, Homo sapiens; identical to SEQ ID NO: 236488
  chr12:65153389-65153491
  hyper

SEQ ID NO: 421883 - DNA, 314 bp, Homo sapiens; identical to SEQ ID NO: 236489
  chr12:65174361-65174675
  hyper

SEQ ID NO: 421884 - DNA, 53 bp, Homo sapiens; identical to SEQ ID NO: 289144
  chr12:65514782-65514835
  hyper

SEQ ID NO: 421885 - DNA, 272 bp, Homo sapiens; identical to SEQ ID NO: 289145
  chr12:65564381-65564653
  hyper

SEQ ID NO: 421886 - DNA, 50 bp, Homo sapiens; identical to SEQ ID NO: 49821
  chr12:65564722-65564772
  hyper

SEQ ID NO: 421887 - DNA, 302 bp, Homo sapiens; identical to SEQ ID NO: 289149
  chr12:66216562-66216864
  hyper

SEQ ID NO: 421888 - DNA, 85 bp, Homo sapiens; identical to SEQ ID NO: 203082
  chr12:66216924-66217009
  hyper

SEQ ID NO: 421889 - DNA, 362 bp, Homo sapiens; identical to SEQ ID NO: 389030
  chr12:66218128-66218490
  hyper

SEQ ID NO: 421890 - DNA, 238 bp, Homo sapiens; identical to SEQ ID NO: 236499
  chr12:66563705-66563943
  hyper

SEQ ID NO: 421891 - DNA, 291 bp, Homo sapiens; identical to SEQ ID NO: 236502
  chr12:66696078-66696369
  hyper

SEQ ID NO: 421892 - DNA, 34 bp, Homo sapiens; identical to SEQ ID NO: 203089
  chr12:68617124-68617158
  hyper

SEQ ID NO: 421893 - DNA, 64 bp, Homo sapiens; identical to SEQ ID NO: 224404
  chr12:69080591-69080655
  hyper

SEQ ID NO: 421894 - DNA, 47 bp, Homo sapiens; identical to SEQ ID NO: 224405
  chr12:69080866-69080913
  hyper

SEQ ID NO: 421895 - DNA, 39 bp, Homo sapiens; identical to SEQ ID NO: 203092
  chr12:69241507-69241546
  hyper

SEQ ID NO: 421896 - DNA, 152 bp, Homo sapiens; identical to SEQ ID NO: 236507
  chr12:69548454-69548606
  hyper

SEQ ID NO: 421897 - DNA, 165 bp, Homo sapiens; identical to SEQ ID NO: 236508
  chr12:69550940-69551105
  hyper

SEQ ID NO: 421898 - DNA, 358 bp, Homo sapiens; identical to SEQ ID NO: 236509
  chr12:69724879-69725237
  hyper

SEQ ID NO: 421899 - DNA, 207 bp, Homo sapiens; identical to SEQ ID NO: 236510
  chr12:70133407-70133614
  hyper

SEQ ID NO: 421900 - DNA, 199 bp, Homo sapiens; identical to SEQ ID NO: 203094
  chr12:70637717-70637916
  hyper

SEQ ID NO: 421901 - DNA, 97 bp, Homo sapiens; identical to SEQ ID NO: 203097
  chr12:71004045-71004142
  hyper

SEQ ID NO: 421902 - DNA, 175 bp, Homo sapiens; identical to SEQ ID NO: 289176
  chr12:71314193-71314368
  hyper

SEQ ID NO: 421903 - DNA, 310 bp, Homo sapiens; identical to SEQ ID NO: 289177
  chr12:71833003-71833313
  hyper

SEQ ID NO: 421904 - DNA, 128 bp, Homo sapiens; identical to SEQ ID NO: 236517
  chr12:72148402-72148530
  hyper

SEQ ID NO: 421905 - DNA, 166 bp, Homo sapiens; identical to SEQ ID NO: 236518
  chr12:72234299-72234465
  hyper

SEQ ID NO: 421906 - DNA, 116 bp, Homo sapiens; identical to SEQ ID NO: 203102
  chr12:72332525-72332641
  hyper

SEQ ID NO: 421907 - DNA, 77 bp, Homo sapiens; identical to SEQ ID NO: 203103
  chr12:72332696-72332773
  hyper

SEQ ID NO: 421908 - DNA, 60 bp, Homo sapiens; identical to SEQ ID NO: 203104
  chr12:72666465-72666525
  hyper

SEQ ID NO: 421909 - DNA, 276 bp, Homo sapiens; identical to SEQ ID NO: 289185
  chr12:72667682-72667958
  hyper

SEQ ID NO: 421910 - DNA, 500 bp, Homo sapiens; identical to SEQ ID NO: 236521
  chr12:74931275-74931775
  hyper

SEQ ID NO: 421911 - DNA, 229 bp, Homo sapiens; identical to SEQ ID NO: 236524
  chr12:75723898-75724127
  hyper

SEQ ID NO: 421912 - DNA, 146 bp, Homo sapiens; identical to SEQ ID NO: 236526
  chr12:75905415-75905561
  hyper

SEQ ID NO: 421913 - DNA, 182 bp, Homo sapiens; identical to SEQ ID NO: 236527
  chr12:76425500-76425682
  hyper

SEQ ID NO: 421914 - DNA, 157 bp, Homo sapiens; identical to SEQ ID NO: 236528
  chr12:76426120-76426277
  hyper

SEQ ID NO: 421915 - DNA, 217 bp, Homo sapiens; identical to SEQ ID NO: 236529
  chr12:76742083-76742300
  hyper

SEQ ID NO: 421916 - DNA, 218 bp, Homo sapiens; identical to SEQ ID NO: 236530
  chr12:76952933-76953151
  hyper

SEQ ID NO: 421917 - DNA, 304 bp, Homo sapiens; identical to SEQ ID NO: 236531
  chr12:76953529-76953833
  hyper

SEQ ID NO: 421918 - DNA, 84 bp, Homo sapiens; identical to SEQ ID NO: 203106
  chr12:76954040-76954124
  hyper

SEQ ID NO: 421919 - DNA, 114 bp, Homo sapiens; identical to SEQ ID NO: 203107
  chr12:77272744-77272858
  hyper

SEQ ID NO: 421920 - DNA, 341 bp, Homo sapiens; identical to SEQ ID NO: 203108
  chr12:77718709-77719050
  hyper

SEQ ID NO: 421921 - DNA, 855 bp, Homo sapiens; identical to SEQ ID NO: 224407
  chr12:80084234-80085089
  hyper

SEQ ID NO: 421922 - DNA, 158 bp, Homo sapiens; identical to SEQ ID NO: 203114
  chr12:81471297-81471455
  hyper

SEQ ID NO: 421923 - DNA, 59 bp, Homo sapiens; identical to SEQ ID NO: 203115
  chr12:81472132-81472191
  hyper

SEQ ID NO: 421924 - DNA, 290 bp, Homo sapiens; identical to SEQ ID NO: 203116
  chr12:82152215-82152505
  hyper

SEQ ID NO: 421925 - DNA, 125 bp, Homo sapiens; identical to SEQ ID NO: 203118
  chr12:83080816-83080941
  hyper

SEQ ID NO: 421926 - DNA, 414 bp, Homo sapiens; identical to SEQ ID NO: 122764
  chr12:83080990-83081404
  hyper

SEQ ID NO: 421927 - DNA, 356 bp, Homo sapiens
  chr12:85305245-85305601
  hyper
tttcccagctagggaggaggatggaaagggaaagcgggacgctggagagcgcgagcctgggggctttgcttcctaaaacgcacatcaaaggctgcttctcagctcaggaaaaataattcccgttcccgcagcctgtgccactgggtgggtcatgcctgttcccgaacgcctcgggcgtcttgattcattcttatgtatccagttggtgcgctacgttagagtgcaaggatttccctgtactcaataccgtcttcttcccagtcacacacagaccagcctagtgaaagaaaggtagaaacgatctgggtttctaactgcttcccatcttcttacagtcccagcagcaccaccctcac

SEQ ID NO: 421928 - DNA, 169 bp, Homo sapiens; identical to SEQ ID NO: 236547
  chr12:85668062-85668231
  hyper

SEQ ID NO: 421929 - DNA, 57 bp, Homo sapiens; identical to SEQ ID NO: 236549
  chr12:88429153-88429210
  hyper

SEQ ID NO: 421930 - DNA, 160 bp, Homo sapiens; identical to SEQ ID NO: 203123
  chr12:88973384-88973544
  hyper

SEQ ID NO: 421931 - DNA, 284 bp, Homo sapiens
  chr12:88973582-88973866
  hyper
ccggcgcccacctcggggctacacaaataaatctgagtgagagagctagtgagggtggcgcgtggggtgctgtttcataatctcctggaatccacgggaaaaccgtctcctatgcaaagacatgccttcccgtgataacttaacattccatggcccaaaagccaatctttccaccagacgggaattacggtttccgactgacagctcaaaacttaactgctgaggctccaaacttgacactggctccctctcagcactcccactccttttctccctggctcacc

SEQ ID NO: 421932 - DNA, 350 bp, Homo sapiens; identical to SEQ ID NO: 236551
  chr12:89744647-89744997
  hyper

SEQ ID NO: 421933 - DNA, 276 bp, Homo sapiens; identical to SEQ ID NO: 236552
  chr12:89746244-89746520
  hyper

SEQ ID NO: 421934 - DNA, 237 bp, Homo sapiens; identical to SEQ ID NO: 236554
  chr12:89919819-89920056
  hyper

SEQ ID NO: 421935 - DNA, 91 bp, Homo sapiens; identical to SEQ ID NO: 49909
  chr12:91775751-91775842
  hyper

SEQ ID NO: 421936 - DNA, 35 bp, Homo sapiens; identical to SEQ ID NO: 236558
  chr12:93323253-93323288
  hyper

SEQ ID NO: 421937 - DNA, 255 bp, Homo sapiens; identical to SEQ ID NO: 236559
  chr12:93835925-93836180
  hyper

SEQ ID NO: 421938 - DNA, 201 bp, Homo sapiens; identical to SEQ ID NO: 236560
  chr12:93964217-93964418
  hyper

SEQ ID NO: 421939 - DNA, 64 bp, Homo sapiens; identical to SEQ ID NO: 203132
  chr12:93985620-93985684
  hyper

SEQ ID NO: 421940 - DNA, 34 bp, Homo sapiens; identical to SEQ ID NO: 203135
  chr12:94544417-94544451
  hyper

SEQ ID NO: 421941 - DNA, 137 bp, Homo sapiens; identical to SEQ ID NO: 236564
  chr12:94853872-94854009
  hyper

SEQ ID NO: 421942 - DNA, 153 bp, Homo sapiens; identical to SEQ ID NO: 203136
  chr12:95397472-95397625
  hyper

SEQ ID NO: 421943 - DNA, 31 bp, Homo sapiens; identical to SEQ ID NO: 236567
  chr12:95467508-95467539
  hyper

SEQ ID NO: 421944 - DNA, 51 bp, Homo sapiens; identical to SEQ ID NO: 236568
  chr12:95867761-95867812
  hyper

SEQ ID NO: 421945 - DNA, 88 bp, Homo sapiens; identical to SEQ ID NO: 203137
  chr12:96183452-96183540
  hyper

SEQ ID NO: 421946 - DNA, 122 bp, Homo sapiens; identical to SEQ ID NO: 203141
  chr12:96252231-96252353
  hyper

SEQ ID NO: 421947 - DNA, 191 bp, Homo sapiens; identical to SEQ ID NO: 236574
  chr12:96252588-96252779
  hyper

SEQ ID NO: 421948 - DNA, 114 bp, Homo sapiens; identical to SEQ ID NO: 203142
  chr12:96336966-96337080
  hyper

SEQ ID NO: 421949 - DNA, 206 bp, Homo sapiens; identical to SEQ ID NO: 224419
  chr12:96587648-96587854
  hyper

SEQ ID NO: 421950 - DNA, 33 bp, Homo sapiens; identical to SEQ ID NO: 224420
  chr12:96618052-96618085
  hyper

SEQ ID NO: 421951 - DNA, 97 bp, Homo sapiens; identical to SEQ ID NO: 236576
  chr12:96794233-96794330
  hyper

SEQ ID NO: 421952 - DNA, 79 bp, Homo sapiens; identical to SEQ ID NO: 236578
  chr12:97300789-97300868
  hyper

SEQ ID NO: 421953 - DNA, 390 bp, Homo sapiens; identical to SEQ ID NO: 236579
  chr12:97379542-97379932
  hyper

SEQ ID NO: 421954 - DNA, 113 bp, Homo sapiens; identical to SEQ ID NO: 236580
  chr12:98897819-98897932
  hyper

SEQ ID NO: 421955 - DNA, 103 bp, Homo sapiens; identical to SEQ ID NO: 236581
  chr12:98987129-98987232
  hyper

SEQ ID NO: 421956 - DNA, 39 bp, Homo sapiens; identical to SEQ ID NO: 236582
  chr12:99037822-99037861
  hyper

SEQ ID NO: 421957 - DNA, 84 bp, Homo sapiens; identical to SEQ ID NO: 236583
  chr12:99038221-99038305
  hyper

SEQ ID NO: 421958 - DNA, 33 bp, Homo sapiens; identical to SEQ ID NO: 236584
  chr12:99038997-99039030
  hyper

SEQ ID NO: 421959 - DNA, 356 bp, Homo sapiens; identical to SEQ ID NO: 122851
  chr12:99139525-99139881
  hyper

SEQ ID NO: 421960 - DNA, 189 bp, Homo sapiens; identical to SEQ ID NO: 236588
  chr12:100594720-100594909
  hyper

SEQ ID NO: 421961 - DNA, 63 bp, Homo sapiens; identical to SEQ ID NO: 236589
  chr12:100660779-100660842
  hyper

SEQ ID NO: 421962 - DNA, 651 bp, Homo sapiens; identical to SEQ ID NO: 203145
  chr12:100967341-100967992
  hyper

SEQ ID NO: 421963 - DNA, 117 bp, Homo sapiens; identical to SEQ ID NO: 236592
  chr12:101673658-101673775
  hyper

SEQ ID NO: 421964 - DNA, 603 bp, Homo sapiens; identical to SEQ ID NO: 203146
  chr12:102455400-102456003
  hyper

SEQ ID NO: 421965 - DNA, 230 bp, Homo sapiens; identical to SEQ ID NO: 289273
  chr12:103344363-103344593
  hyper

SEQ ID NO: 421966 - DNA, 115 bp, Homo sapiens; identical to SEQ ID NO: 289274
  chr12:103350083-103350198
  hyper

SEQ ID NO: 421967 - DNA, 294 bp, Homo sapiens; identical to SEQ ID NO: 289275
  chr12:103350622-103350916
  hyper

SEQ ID NO: 421968 - DNA, 212 bp, Homo sapiens; identical to SEQ ID NO: 203151
  chr12:103355123-103355335
  hyper

SEQ ID NO: 421969 - DNA, 148 bp, Homo sapiens; identical to SEQ ID NO: 236603
  chr12:103355911-103356059
  hyper

SEQ ID NO: 421970 - DNA, 202 bp, Homo sapiens; identical to SEQ ID NO: 122896
  chr12:103696193-103696395
  hyper

SEQ ID NO: 421971 - DNA, 309 bp, Homo sapiens; identical to SEQ ID NO: 236609
  chr12:104324276-104324585
  hyper

SEQ ID NO: 421972 - DNA, 98 bp, Homo sapiens; identical to SEQ ID NO: 203156
  chr12:104459023-104459121
  hyper

SEQ ID NO: 421973 - DNA, 67 bp, Homo sapiens; identical to SEQ ID NO: 236612
  chr12:104532325-104532392
  hyper

SEQ ID NO: 421974 - DNA, 115 bp, Homo sapiens; identical to SEQ ID NO: 236614
  chr12:104680592-104680707
  hyper

SEQ ID NO: 421975 - DNA, 100 bp, Homo sapiens; identical to SEQ ID NO: 203160
  chr12:105477920-105478020
  hyper

SEQ ID NO: 421976 - DNA, 104 bp, Homo sapiens; identical to SEQ ID NO: 289294
  chr12:105478419-105478523
  hyper

SEQ ID NO: 421977 - DNA, 229 bp, Homo sapiens; identical to SEQ ID NO: 236620
  chr12:105629078-105629307
  hyper

SEQ ID NO: 421978 - DNA, 125 bp, Homo sapiens; identical to SEQ ID NO: 289296
  chr12:106532092-106532217
  hyper

SEQ ID NO: 421979 - DNA, 588 bp, Homo sapiens; identical to SEQ ID NO: 289297
  chr12:106532406-106532994
  hyper

SEQ ID NO: 421980 - DNA, 103 bp, Homo sapiens; identical to SEQ ID NO: 289298
  chr12:106533276-106533379
  hyper

SEQ ID NO: 421981 - DNA, 264 bp, Homo sapiens; identical to SEQ ID NO: 203162
  chr12:106640992-106641256
  hyper

SEQ ID NO: 421982 - DNA, 54 bp, Homo sapiens; identical to SEQ ID NO: 203163
  chr12:106641515-106641569
  hyper

SEQ ID NO: 421983 - DNA, 95 bp, Homo sapiens; identical to SEQ ID NO: 236625
  chr12:106695918-106696013
  hyper

SEQ ID NO: 421984 - DNA, 37 bp, Homo sapiens; identical to SEQ ID NO: 236626
  chr12:106751649-106751686
  hyper

SEQ ID NO: 421985 - DNA, 985 bp, Homo sapiens; identical to SEQ ID NO: 289305
  chr12:107167936-107168921
  hyper

SEQ ID NO: 421986 - DNA, 140 bp, Homo sapiens; identical to SEQ ID NO: 236635
  chr12:107349516-107349656
  hyper

SEQ ID NO: 421987 - DNA, 34 bp, Homo sapiens; identical to SEQ ID NO: 203168
  chr12:107487855-107487889
  hyper

SEQ ID NO: 421988 - DNA, 93 bp, Homo sapiens; identical to SEQ ID NO: 236637
  chr12:107488134-107488227
  hyper

SEQ ID NO: 421989 - DNA, 145 bp, Homo sapiens
  chr12:107713060-107713205
  hyper
gggcaggcccggcggtccccggcggcctgcccaaggacgcgctggccaagctgtcgacgctggtgagccgggcgctggtgcgcatagccaaagaggcgcagcgcctgagcctgcgcttcgccaagtgcaccaagtacgagatcca

SEQ ID NO: 421990 - DNA, 648 bp, Homo sapiens; identical to SEQ ID NO: 203170
  chr12:107713427-107714075
  hyper

SEQ ID NO: 421991 - DNA, 305 bp, Homo sapiens; identical to SEQ ID NO: 203171
  chr12:107714115-107714420
  hyper

SEQ ID NO: 421992 - DNA, 34 bp, Homo sapiens; identical to SEQ ID NO: 289315
  chr12:107715317-107715351
  hyper

SEQ ID NO: 421993 - DNA, 38 bp, Homo sapiens; identical to SEQ ID NO: 289316
  chr12:108079429-108079467
  hyper

SEQ ID NO: 421994 - DNA, 115 bp, Homo sapiens; identical to SEQ ID NO: 122946
  chr12:108079515-108079630
  hyper

SEQ ID NO: 421995 - DNA, 308 bp, Homo sapiens; identical to SEQ ID NO: 289318
  chr12:108237794-108238102
  hyper

SEQ ID NO: 421996 - DNA, 45 bp, Homo sapiens; identical to SEQ ID NO: 50027
  chr12:108238683-108238728
  hyper

SEQ ID NO: 421997 - DNA, 41 bp, Homo sapiens; identical to SEQ ID NO: 226552
  chr12:108298348-108298389
  hyper

SEQ ID NO: 421998 - DNA, 186 bp, Homo sapiens; identical to SEQ ID NO: 289321
  chr12:108523022-108523208
  hyper

SEQ ID NO: 421999 - DNA, 173 bp, Homo sapiens; identical to SEQ ID NO: 289322
  chr12:108523439-108523612
  hyper

SEQ ID NO: 422000 - DNA, 92 bp, Homo sapiens; identical to SEQ ID NO: 236644
  chr12:108908840-108908932
  hyper

SEQ ID NO: 422001 - DNA, 121 bp, Homo sapiens; identical to SEQ ID NO: 203172
  chr12:108956083-108956204
  hyper

SEQ ID NO: 422002 - DNA, 116 bp, Homo sapiens; identical to SEQ ID NO: 203175
  chr12:109250887-109251003
  hyper

SEQ ID NO: 422003 - DNA, 414 bp, Homo sapiens; identical to SEQ ID NO: 236649
  chr12:109531040-109531454
  hyper

SEQ ID NO: 422004 - DNA, 98 bp, Homo sapiens; identical to SEQ ID NO: 203176
  chr12:109535377-109535475
  hyper

SEQ ID NO: 422005 - DNA, 169 bp, Homo sapiens; identical to SEQ ID NO: 203177
  chr12:109592371-109592540
  hyper

SEQ ID NO: 422006 - DNA, 589 bp, Homo sapiens; identical to SEQ ID NO: 289331
  chr12:109746919-109747508
  hyper

SEQ ID NO: 422007 - DNA, 136 bp, Homo sapiens; identical to SEQ ID NO: 236653
  chr12:109747913-109748049
  hyper

SEQ ID NO: 422008 - DNA, 175 bp, Homo sapiens; identical to SEQ ID NO: 236654
  chr12:109915370-109915545
  hyper

SEQ ID NO: 422009 - DNA, 268 bp, Homo sapiens; identical to SEQ ID NO: 236655
  chr12:110011228-110011496
  hyper

SEQ ID NO: 422010 - DNA, 680 bp, Homo sapiens; identical to SEQ ID NO: 236656
  chr12:110337997-110338677
  hyper

SEQ ID NO: 422011 - DNA, 165 bp, Homo sapiens; identical to SEQ ID NO: 236657
  chr12:110561795-110561960
  hyper

SEQ ID NO: 422012 - DNA, 322 bp, Homo sapiens; identical to SEQ ID NO: 236658
  chr12:110841360-110841682
  hyper

SEQ ID NO: 422013 - DNA, 200 bp, Homo sapiens; identical to SEQ ID NO: 236659
  chr12:110906303-110906503
  hyper

SEQ ID NO: 422014 - DNA, 48 bp, Homo sapiens; identical to SEQ ID NO: 289339
  chr12:110939787-110939835
  hyper

SEQ ID NO: 422015 - DNA, 102 bp, Homo sapiens; identical to SEQ ID NO: 122993
  chr12:110939888-110939990
  hyper

SEQ ID NO: 422016 - DNA, 147 bp, Homo sapiens; identical to SEQ ID NO: 203180
  chr12:111021164-111021311
  hyper

SEQ ID NO: 422017 - DNA, 44 bp, Homo sapiens; identical to SEQ ID NO: 236662
  chr12:111051731-111051775
  hyper

SEQ ID NO: 422018 - DNA, 65 bp, Homo sapiens; identical to SEQ ID NO: 203181
  chr12:111052028-111052093
  hyper

SEQ ID NO: 422019 - DNA, 217 bp, Homo sapiens; identical to SEQ ID NO: 236664
  chr12:111126683-111126900
  hyper

SEQ ID NO: 422020 - DNA, 33 bp, Homo sapiens
  chr12:111285042-111285075
  hyper
gcaatcatgcataaataaattgtagtgtgtaaa

SEQ ID NO: 422021 - DNA, 100 bp, Homo sapiens; identical to SEQ ID NO: 236668
  chr12:111843201-111843301
  hyper

SEQ ID NO: 422022 - DNA, 57 bp, Homo sapiens; identical to SEQ ID NO: 236670
  chr12:112036146-112036203
  hyper

SEQ ID NO: 422023 - DNA, 181 bp, Homo sapiens; identical to SEQ ID NO: 236671
  chr12:112123544-112123725
  hyper

SEQ ID NO: 422024 - DNA, 37 bp, Homo sapiens; identical to SEQ ID NO: 236672
  chr12:112123942-112123979
  hyper

SEQ ID NO: 422025 - DNA, 42 bp, Homo sapiens; identical to SEQ ID NO: 224443
  chr12:112689847-112689889
  hyper

SEQ ID NO: 422026 - DNA, 48 bp, Homo sapiens; identical to SEQ ID NO: 236674
  chr12:112847008-112847056
  hyper

SEQ ID NO: 422027 - DNA, 55 bp, Homo sapiens; identical to SEQ ID NO: 236675
  chr12:112856480-112856535
  hyper

SEQ ID NO: 422028 - DNA, 35 bp, Homo sapiens; identical to SEQ ID NO: 203186
  chr12:112884177-112884212
  hyper

SEQ ID NO: 422029 - DNA, 58 bp, Homo sapiens; identical to SEQ ID NO: 203187
  chr12:112915451-112915509
  hyper

SEQ ID NO: 422030 - DNA, 116 bp, Homo sapiens; identical to SEQ ID NO: 203188
  chr12:112924321-112924437
  hyper

SEQ ID NO: 422031 - DNA, 49 bp, Homo sapiens; identical to SEQ ID NO: 203189
  chr12:112926827-112926876
  hyper

SEQ ID NO: 422032 - DNA, 65 bp, Homo sapiens; identical to SEQ ID NO: 203190
  chr12:112926914-112926979
  hyper

SEQ ID NO: 422033 - DNA, 190 bp, Homo sapiens; identical to SEQ ID NO: 203191
  chr12:113229230-113229420
  hyper

SEQ ID NO: 422034 - DNA, 137 bp, Homo sapiens; identical to SEQ ID NO: 289366
  chr12:113229494-113229631
  hyper

SEQ ID NO: 422035 - DNA, 226 bp, Homo sapiens; identical to SEQ ID NO: 203194
  chr12:113592463-113592689
  hyper

SEQ ID NO: 422036 - DNA, 141 bp, Homo sapiens; identical to SEQ ID NO: 236680
  chr12:113658922-113659063
  hyper

SEQ ID NO: 422037 - DNA, 146 bp, Homo sapiens; identical to SEQ ID NO: 203196
  chr12:113902353-113902499
  hyper

SEQ ID NO: 422038 - DNA, 157 bp, Homo sapiens; identical to SEQ ID NO: 289372
  chr12:113903571-113903728
  hyper

SEQ ID NO: 422039 - DNA, 286 bp, Homo sapiens; identical to SEQ ID NO: 289373
  chr12:113904446-113904732
  hyper

SEQ ID NO: 422040 - DNA, 244 bp, Homo sapiens; identical to SEQ ID NO: 203198
  chr12:113905078-113905322
  hyper

SEQ ID NO: 422041 - DNA, 106 bp, Homo sapiens; identical to SEQ ID NO: 289376
  chr12:113906998-113907104
  hyper

SEQ ID NO: 422042 - DNA, 121 bp, Homo sapiens; identical to SEQ ID NO: 289377
  chr12:113907162-113907283
  hyper

SEQ ID NO: 422043 - DNA, 139 bp, Homo sapiens; identical to SEQ ID NO: 236690
  chr12:113910973-113911112
  hyper

SEQ ID NO: 422044 - DNA, 161 bp, Homo sapiens; identical to SEQ ID NO: 289380
  chr12:113917065-113917226
  hyper

SEQ ID NO: 422045 - DNA, 165 bp, Homo sapiens; identical to SEQ ID NO: 236698
  chr12:114404167-114404332
  hyper

SEQ ID NO: 422046 - DNA, 31 bp, Homo sapiens; identical to SEQ ID NO: 236700
  chr12:114837908-114837939
  hyper

SEQ ID NO: 422047 - DNA, 90 bp, Homo sapiens; identical to SEQ ID NO: 289383
  chr12:114838222-114838312
  hyper

SEQ ID NO: 422048 - DNA, 169 bp, Homo sapiens; identical to SEQ ID NO: 203199
  chr12:114838902-114839071
  hyper

SEQ ID NO: 422049 - DNA, 34 bp, Homo sapiens; identical to SEQ ID NO: 203200
  chr12:114841183-114841217
  hyper

SEQ ID NO: 422050 - DNA, 147 bp, Homo sapiens; identical to SEQ ID NO: 203201
  chr12:114841493-114841640
  hyper

SEQ ID NO: 422051 - DNA, 142 bp, Homo sapiens; identical to SEQ ID NO: 289387
  chr12:114843805-114843947
  hyper

SEQ ID NO: 422052 - DNA, 141 bp, Homo sapiens; identical to SEQ ID NO: 203202
  chr12:114851899-114852040
  hyper

SEQ ID NO: 422053 - DNA, 104 bp, Homo sapiens; identical to SEQ ID NO: 203203
  chr12:114852189-114852293
  hyper

SEQ ID NO: 422054 - DNA, 32 bp, Homo sapiens; identical to SEQ ID NO: 289390
  chr12:114877388-114877420
  hyper

SEQ ID NO: 422055 - DNA, 537 bp, Homo sapiens; identical to SEQ ID NO: 203204
  chr12:114877707-114878244
  hyper

SEQ ID NO: 422056 - DNA, 94 bp, Homo sapiens; identical to SEQ ID NO: 203205
  chr12:114879012-114879106
  hyper

SEQ ID NO: 422057 - DNA, 142 bp, Homo sapiens; identical to SEQ ID NO: 289394
  chr12:114882413-114882555
  hyper

SEQ ID NO: 422058 - DNA, 370 bp, Homo sapiens; identical to SEQ ID NO: 289395
  chr12:114882646-114883016
  hyper

SEQ ID NO: 422059 - DNA, 109 bp, Homo sapiens; identical to SEQ ID NO: 203209
  chr12:114883302-114883411
  hyper

SEQ ID NO: 422060 - DNA, 318 bp, Homo sapiens; identical to SEQ ID NO: 289397
  chr12:114886562-114886880
  hyper

SEQ ID NO: 422061 - DNA, 83 bp, Homo sapiens; identical to SEQ ID NO: 289398
  chr12:114917591-114917674
  hyper

SEQ ID NO: 422062 - DNA, 76 bp, Homo sapiens; identical to SEQ ID NO: 236716
  chr12:114918239-114918315
  hyper

SEQ ID NO: 422063 - DNA, 74 bp, Homo sapiens; identical to SEQ ID NO: 203211
  chr12:114939043-114939117
  hyper

SEQ ID NO: 422064 - DNA, 129 bp, Homo sapiens; identical to SEQ ID NO: 289408
  chr12:115130546-115130675
  hyper

SEQ ID NO: 422065 - DNA, 163 bp, Homo sapiens; identical to SEQ ID NO: 236722
  chr12:115138445-115138608
  hyper

SEQ ID NO: 422066 - DNA, 248 bp, Homo sapiens; identical to SEQ ID NO: 236724
  chr12:116354935-116355183
  hyper

SEQ ID NO: 422067 - DNA, 203 bp, Homo sapiens; identical to SEQ ID NO: 236725
  chr12:116713913-116714116
  hyper

SEQ ID NO: 422068 - DNA, 143 bp, Homo sapiens; identical to SEQ ID NO: 236726
  chr12:116714176-116714319
  hyper

SEQ ID NO: 422069 - DNA, 182 bp, Homo sapiens; identical to SEQ ID NO: 203219
  chr12:116971004-116971186
  hyper

SEQ ID NO: 422070 - DNA, 305 bp, Homo sapiens; identical to SEQ ID NO: 123136
  chr12:116971210-116971515
  hyper

SEQ ID NO: 422071 - DNA, 199 bp, Homo sapiens; identical to SEQ ID NO: 289418
  chr12:116972230-116972429
  hyper

SEQ ID NO: 422072 - DNA, 258 bp, Homo sapiens; identical to SEQ ID NO: 236729
  chr12:117175870-117176128
  hyper

SEQ ID NO: 422073 - DNA, 228 bp, Homo sapiens; identical to SEQ ID NO: 236733
  chr12:117348613-117348841
  hyper

SEQ ID NO: 422074 - DNA, 97 bp, Homo sapiens; identical to SEQ ID NO: 203223
  chr12:117349182-117349279
  hyper

SEQ ID NO: 422075 - DNA, 151 bp, Homo sapiens; identical to SEQ ID NO: 203225
  chr12:117628333-117628484
  hyper

SEQ ID NO: 422076 - DNA, 41 bp, Homo sapiens; identical to SEQ ID NO: 236737
  chr12:117797360-117797401
  hyper

SEQ ID NO: 422077 - DNA, 37 bp, Homo sapiens; identical to SEQ ID NO: 203226
  chr12:118313953-118313990
  hyper

SEQ ID NO: 422078 - DNA, 367 bp, Homo sapiens; identical to SEQ ID NO: 236741
  chr12:118541717-118542084
  hyper

SEQ ID NO: 422079 - DNA, 613 bp, Homo sapiens; identical to SEQ ID NO: 236742
  chr12:118573924-118574537
  hyper

SEQ ID NO: 422080 - DNA, 170 bp, Homo sapiens; identical to SEQ ID NO: 289434
  chr12:119418346-119418516
  hyper

SEQ ID NO: 422081 - DNA, 59 bp, Homo sapiens; identical to SEQ ID NO: 203227
  chr12:119419899-119419958
  hyper

SEQ ID NO: 422082 - DNA, 31 bp, Homo sapiens; identical to SEQ ID NO: 203228
  chr12:119616602-119616633
  hyper

SEQ ID NO: 422083 - DNA, 177 bp, Homo sapiens; identical to SEQ ID NO: 203229
  chr12:119772414-119772591
  hyper

SEQ ID NO: 422084 - DNA, 182 bp, Homo sapiens; identical to SEQ ID NO: 236750
  chr12:120105358-120105540
  hyper

SEQ ID NO: 422085 - DNA, 253 bp, Homo sapiens; identical to SEQ ID NO: 236751
  chr12:120315130-120315383
  hyper

SEQ ID NO: 422086 - DNA, 477 bp, Homo sapiens; identical to SEQ ID NO: 236753
  chr12:120638748-120639225
  hyper

SEQ ID NO: 422087 - DNA, 117 bp, Homo sapiens; identical to SEQ ID NO: 236754
  chr12:120703715-120703832
  hyper

SEQ ID NO: 422088 - DNA, 52 bp, Homo sapiens; identical to SEQ ID NO: 236755
  chr12:120729780-120729832
  hyper

SEQ ID NO: 422089 - DNA, 76 bp, Homo sapiens; identical to SEQ ID NO: 236756
  chr12:120739996-120740072
  hyper

SEQ ID NO: 422090 - DNA, 133 bp, Homo sapiens; identical to SEQ ID NO: 236757
  chr12:120763473-120763606
  hyper

SEQ ID NO: 422091 - DNA, 55 bp, Homo sapiens; identical to SEQ ID NO: 203232
  chr12:120875858-120875913
  hyper

SEQ ID NO: 422092 - DNA, 42 bp, Homo sapiens; identical to SEQ ID NO: 236759
  chr12:120884034-120884076
  hyper

SEQ ID NO: 422093 - DNA, 48 bp, Homo sapiens; identical to SEQ ID NO: 236760
  chr12:120933807-120933855
  hyper

SEQ ID NO: 422094 - DNA, 253 bp, Homo sapiens; identical to SEQ ID NO: 224466
  chr12:121077958-121078211
  hyper

SEQ ID NO: 422095 - DNA, 90 bp, Homo sapiens; identical to SEQ ID NO: 236761
  chr12:121079468-121079558
  hyper

SEQ ID NO: 422096 - DNA, 311 bp, Homo sapiens; identical to SEQ ID NO: 203233
  chr12:121124597-121124908
  hyper

SEQ ID NO: 422097 - DNA, 168 bp, Homo sapiens; identical to SEQ ID NO: 203234
  chr12:121454119-121454287
  hyper

SEQ ID NO: 422098 - DNA, 200 bp, Homo sapiens; identical to SEQ ID NO: 203235
  chr12:121476535-121476735
  hyper

SEQ ID NO: 422099 - DNA, 171 bp, Homo sapiens; identical to SEQ ID NO: 236765
  chr12:122124826-122124997
  hyper

SEQ ID NO: 422100 - DNA, 203 bp, Homo sapiens; identical to SEQ ID NO: 236766
  chr12:122150705-122150908
  hyper

SEQ ID NO: 422101 - DNA, 73 bp, Homo sapiens; identical to SEQ ID NO: 289458
  chr12:122231274-122231347
  hyper

SEQ ID NO: 422102 - DNA, 140 bp, Homo sapiens; identical to SEQ ID NO: 236770
  chr12:122242481-122242621
  hyper

SEQ ID NO: 422103 - DNA, 95 bp, Homo sapiens; identical to SEQ ID NO: 236771
  chr12:122326469-122326564
  hyper

SEQ ID NO: 422104 - DNA, 110 bp, Homo sapiens; identical to SEQ ID NO: 236772
  chr12:122459495-122459605
  hyper

SEQ ID NO: 422105 - DNA, 238 bp, Homo sapiens; identical to SEQ ID NO: 224470
  chr12:122459882-122460120
  hyper

SEQ ID NO: 422106 - DNA, 90 bp, Homo sapiens; identical to SEQ ID NO: 236775
  chr12:122710555-122710645
  hyper

SEQ ID NO: 422107 - DNA, 202 bp, Homo sapiens; identical to SEQ ID NO: 203241
  chr12:122907627-122907829
  hyper

SEQ ID NO: 422108 - DNA, 139 bp, Homo sapiens; identical to SEQ ID NO: 289470
  chr12:122907838-122907977
  hyper

SEQ ID NO: 422109 - DNA, 204 bp, Homo sapiens; identical to SEQ ID NO: 236777
  chr12:123011575-123011779
  hyper

SEQ ID NO: 422110 - DNA, 152 bp, Homo sapiens; identical to SEQ ID NO: 236778
  chr12:123319202-123319354
  hyper

SEQ ID NO: 422111 - DNA, 178 bp, Homo sapiens; identical to SEQ ID NO: 203244
  chr12:123451028-123451206
  hyper

SEQ ID NO: 422112 - DNA, 409 bp, Homo sapiens; identical to SEQ ID NO: 236783
  chr12:123459138-123459547
  hyper

SEQ ID NO: 422113 - DNA, 46 bp, Homo sapiens; identical to SEQ ID NO: 236784
  chr12:123459789-123459835
  hyper

SEQ ID NO: 422114 - DNA, 41 bp, Homo sapiens; identical to SEQ ID NO: 236785
  chr12:123717762-123717803
  hyper

SEQ ID NO: 422115 - DNA, 328 bp, Homo sapiens; identical to SEQ ID NO: 289480
  chr12:123754875-123755203
  hyper

SEQ ID NO: 422116 - DNA, 255 bp, Homo sapiens; identical to SEQ ID NO: 236787
  chr12:123849887-123850142
  hyper

SEQ ID NO: 422117 - DNA, 330 bp, Homo sapiens; identical to SEQ ID NO: 236788
  chr12:123868413-123868743
  hyper

SEQ ID NO: 422118 - DNA, 411 bp, Homo sapiens; identical to SEQ ID NO: 289484
  chr12:123920727-123921138
  hyper

SEQ ID NO: 422119 - DNA, 319 bp, Homo sapiens; identical to SEQ ID NO: 289485
  chr12:124017664-124017983
  hyper

SEQ ID NO: 422120 - DNA, 66 bp, Homo sapiens; identical to SEQ ID NO: 236793
  chr12:124068852-124068918
  hyper

SEQ ID NO: 422121 - DNA, 197 bp, Homo sapiens; identical to SEQ ID NO: 236794
  chr12:124155698-124155895
  hyper

SEQ ID NO: 422122 - DNA, 99 bp, Homo sapiens; identical to SEQ ID NO: 203251
  chr12:125198344-125198443
  hyper

SEQ ID NO: 422123 - DNA, 137 bp, Homo sapiens; identical to SEQ ID NO: 236800
  chr12:125256630-125256767
  hyper

SEQ ID NO: 422124 - DNA, 119 bp, Homo sapiens; identical to SEQ ID NO: 236801
  chr12:125473583-125473702
  hyper

SEQ ID NO: 422125 - DNA, 50 bp, Homo sapiens; identical to SEQ ID NO: 289497
  chr12:125534422-125534472
  hyper

SEQ ID NO: 422126 - DNA, 83 bp, Homo sapiens; identical to SEQ ID NO: 203252
  chr12:125670445-125670528
  hyper

SEQ ID NO: 422127 - DNA, 192 bp, Homo sapiens; identical to SEQ ID NO: 289502
  chr12:127211385-127211577
  hyper

SEQ ID NO: 422128 - DNA, 101 bp, Homo sapiens; identical to SEQ ID NO: 289504
  chr12:127940587-127940688
  hyper

SEQ ID NO: 422129 - DNA, 116 bp, Homo sapiens; identical to SEQ ID NO: 236817
  chr12:128753739-128753855
  hyper

SEQ ID NO: 422130 - DNA, 86 bp, Homo sapiens; identical to SEQ ID NO: 203256
  chr12:130387117-130387203
  hyper

SEQ ID NO: 422131 - DNA, 36 bp, Homo sapiens; identical to SEQ ID NO: 384475
  chr12:130498862-130498898
  hyper

SEQ ID NO: 422132 - DNA, 86 bp, Homo sapiens; identical to SEQ ID NO: 236823
  chr12:130498947-130499033
  hyper

SEQ ID NO: 422133 - DNA, 211 bp, Homo sapiens; identical to SEQ ID NO: 203258
  chr12:130646344-130646555
  hyper

SEQ ID NO: 422134 - DNA, 35 bp, Homo sapiens; identical to SEQ ID NO: 289514
  chr12:131199253-131199288
  hyper

SEQ ID NO: 422135 - DNA, 276 bp, Homo sapiens; identical to SEQ ID NO: 289515
  chr12:131199583-131199859
  hyper

SEQ ID NO: 422136 - DNA, 324 bp, Homo sapiens; identical to SEQ ID NO: 289516
  chr12:131200007-131200331
  hyper

SEQ ID NO: 422137 - DNA, 176 bp, Homo sapiens; identical to SEQ ID NO: 289517
  chr12:131200645-131200821
  hyper

SEQ ID NO: 422138 - DNA, 214 bp, Homo sapiens; identical to SEQ ID NO: 289518
  chr12:131201142-131201356
  hyper

SEQ ID NO: 422139 - DNA, 46 bp, Homo sapiens; identical to SEQ ID NO: 203259
  chr12:131438509-131438555
  hyper

SEQ ID NO: 422140 - DNA, 333 bp, Homo sapiens; identical to SEQ ID NO: 236834
  chr12:132195265-132195598
  hyper

SEQ ID NO: 422141 - DNA, 95 bp, Homo sapiens; identical to SEQ ID NO: 236836
  chr12:132379246-132379341
  hyper

SEQ ID NO: 422142 - DNA, 37 bp, Homo sapiens; identical to SEQ ID NO: 203261
  chr12:132380562-132380599
  hyper

SEQ ID NO: 422143 - DNA, 37 bp, Homo sapiens; identical to SEQ ID NO: 203262
  chr12:132380828-132380865
  hyper

SEQ ID NO: 422144 - DNA, 50 bp, Homo sapiens; identical to SEQ ID NO: 224491
  chr12:132480346-132480396
  hyper

SEQ ID NO: 422145 - DNA, 42 bp, Homo sapiens; identical to SEQ ID NO: 236838
  chr12:132628953-132628995
  hyper

SEQ ID NO: 422146 - DNA, 150 bp, Homo sapiens; identical to SEQ ID NO: 236839
  chr12:133136379-133136529
  hyper

SEQ ID NO: 422147 - DNA, 442 bp, Homo sapiens; identical to SEQ ID NO: 226553
  chr12:133443618-133444060
  hyper

SEQ ID NO: 422148 - DNA, 241 bp, Homo sapiens; identical to SEQ ID NO: 203267
  chr12:133706775-133707016
  hyper

SEQ ID NO: 422149 - DNA, 81 bp, Homo sapiens; identical to SEQ ID NO: 236849
  chr13:20207704-20207785
  hyper

SEQ ID NO: 422150 - DNA, 192 bp, Homo sapiens; identical to SEQ ID NO: 236850
  chr13:20357046-20357238
  hyper

SEQ ID NO: 422151 - DNA, 41 bp, Homo sapiens; identical to SEQ ID NO: 289539
  chr13:20532066-20532107
  hyper

SEQ ID NO: 422152 - DNA, 89 bp, Homo sapiens; identical to SEQ ID NO: 289540
  chr13:20701841-20701930
  hyper

SEQ ID NO: 422153 - DNA, 153 bp, Homo sapiens
  chr13:20702081-20702234
  hyper
gcctactttcccactctcgagtttgcccctctttgctgcccggcagctgggtgtcccatgtcccctgcccgccagtgtgcgaccgcggcctcccgcggggcggtgacggcccctctccttcagcctgaccgccgccagctccctcggcgtgtc

SEQ ID NO: 422154 - DNA, 153 bp, Homo sapiens; identical to SEQ ID NO: 236853
  chr13:20711077-20711230
  hyper

SEQ ID NO: 422155 - DNA, 746 bp, Homo sapiens
  chr13:20766341-20767087
  hyper
aaaaagggaagccactgaaatcttggccccggggtaggccgggatcggctggctccgcgttagttctaggcaaactccgcccaaatctctgcccggggatttttctgcagaagccgctccaagaggtaaaggtcagttcctgcagcgaaggcttcctgcttcaccggcgaaacggagctttgcttcgaagctaagctttcggtgaatttaaaacgtttggtggcagtgggtcaagtagccaggcggctgcgctagagtaccccgaagggacatcggcgacaccacaaacctcgcgctggcggctcgcccgcgcctttttcccctcccgcgcgcgcccggccccactcgcaccccgggcggtgccatcgcgtccacttccccggccgccccattccagctccggagctcggccgcagaaacgcccgctccagaaggcggcccccgccccccggcccaaggacgtgtgttggtccagccccccggttccccgagacccacgcggccgggcaaccgctctgggtctcgcggtccctccccgcgccaggttcctggccgggcagtccggggccggcgggctcacctgcgtcgggaggaagcgcggcggggccggggcgggggtctcggcgttggggtctctgcgctggggctcctgcgctcctaggcgggtcctgggccgggcgccgccgaggggctccgagtcggggagaggagcgcgcgggcgctgcggggccgcaacacctgtctcc

SEQ ID NO: 422156 - DNA, 89 bp, Homo sapiens; identical to SEQ ID NO: 203274
  chr13:20805881-20805970
  hyper

SEQ ID NO: 422157 - DNA, 721 bp, Homo sapiens; identical to SEQ ID NO: 289549
  chr13:21099487-21100208
  hyper

SEQ ID NO: 422158 - DNA, 38 bp, Homo sapiens; identical to SEQ ID NO: 236861
  chr13:21141043-21141081
  hyper

SEQ ID NO: 422159 - DNA, 111 bp, Homo sapiens; identical to SEQ ID NO: 289551
  chr13:21141668-21141779
  hyper

SEQ ID NO: 422160 - DNA, 309 bp, Homo sapiens; identical to SEQ ID NO: 236862
  chr13:21347826-21348135
  hyper

SEQ ID NO: 422161 - DNA, 222 bp, Homo sapiens
  chr13:21635534-21635756
  hyper
gggcctctcgcgccgggagaccgggcactggtggctggagctgctgctggccccgcagggacgggggagccccgggcggcggcggtggcgtggacggcgactgctccatcttcccggggcgctcacgccgcggttccaaagcgcagacccaagtgggacattcgctacattgttggcattccacgggcgtcacgtgaccccgcctcccgcgtcactctcggc

SEQ ID NO: 422162 - DNA, 228 bp, Homo sapiens; identical to SEQ ID NO: 9203
  chr13:21635777-21636005
  hyper

SEQ ID NO: 422163 - DNA, 247 bp, Homo sapiens; identical to SEQ ID NO: 236866
  chr13:21714415-21714662
  hyper

SEQ ID NO: 422164 - DNA, 147 bp, Homo sapiens; identical to SEQ ID NO: 236867
  chr13:21750215-21750362
  hyper

SEQ ID NO: 422165 - DNA, 68 bp, Homo sapiens; identical to SEQ ID NO: 203279
  chr13:21872166-21872234
  hyper

SEQ ID NO: 422166 - DNA, 178 bp, Homo sapiens; identical to SEQ ID NO: 236869
  chr13:21872501-21872679
  hyper

SEQ ID NO: 422167 - DNA, 400 bp, Homo sapiens; identical to SEQ ID NO: 289563
  chr13:22244999-22245399
  hyper

SEQ ID NO: 422168 - DNA, 96 bp, Homo sapiens; identical to SEQ ID NO: 203283
  chr13:22247845-22247941
  hyper

SEQ ID NO: 422169 - DNA, 132 bp, Homo sapiens; identical to SEQ ID NO: 236875
  chr13:22248800-22248932
  hyper

SEQ ID NO: 422170 - DNA, 223 bp, Homo sapiens; identical to SEQ ID NO: 203284
  chr13:23949731-23949954
  hyper

SEQ ID NO: 422171 - DNA, 227 bp, Homo sapiens; identical to SEQ ID NO: 289568
  chr13:24152955-24153182
  hyper

SEQ ID NO: 422172 - DNA, 202 bp, Homo sapiens; identical to SEQ ID NO: 289569
  chr13:24153336-24153538
  hyper

SEQ ID NO: 422173 - DNA, 302 bp, Homo sapiens; identical to SEQ ID NO: 289570
  chr13:24153751-24154053
  hyper

SEQ ID NO: 422174 - DNA, 152 bp, Homo sapiens; identical to SEQ ID NO: 289571
  chr13:24154123-24154275
  hyper

SEQ ID NO: 422175 - DNA, 132 bp, Homo sapiens; identical to SEQ ID NO: 203285
  chr13:24553697-24553829
  hyper

SEQ ID NO: 422176 - DNA, 304 bp, Homo sapiens
  chr13:24734667-24734971
  hyper
ccactgcgcctggccggggaactgtttttgatgggtggggtccccggctgtggttggtagtgtgggggcgtggccgagggtgtggcctgagggagtgagctaaccgggggcgtggcctgatatggggcggggggaagagccgggctgggggcgtggcctggtggggagcggggctggggcgtggcttggctgagtgtgctgccgcggcgcgggaggagagtgtgcgttgcgctttctcccgcgatcgccctgccggtcgctagctccgagggcgcgcactggatcccaggctcctccgagagtg

SEQ ID NO: 422177 - DNA, 94 bp, Homo sapiens; identical to SEQ ID NO: 236887
  chr13:25254433-25254527
  hyper

SEQ ID NO: 422178 - DNA, 308 bp, Homo sapiens; identical to SEQ ID NO: 236890
  chr13:25497030-25497338
  hyper

SEQ ID NO: 422179 - DNA, 190 bp, Homo sapiens; identical to SEQ ID NO: 203287
  chr13:25497658-25497848
  hyper

SEQ ID NO: 422180 - DNA, 48 bp, Homo sapiens; identical to SEQ ID NO: 203289
  chr13:25861519-25861567
  hyper

SEQ ID NO: 422181 - DNA, 93 bp, Homo sapiens; identical to SEQ ID NO: 203290
  chr13:25946858-25946951
  hyper

SEQ ID NO: 422182 - DNA, 174 bp, Homo sapiens; identical to SEQ ID NO: 236899
  chr13:26623880-26624054
  hyper

SEQ ID NO: 422183 - DNA, 94 bp, Homo sapiens; identical to SEQ ID NO: 289582
  chr13:26624294-26624388
  hyper

SEQ ID NO: 422184 - DNA, 271 bp, Homo sapiens; identical to SEQ ID NO: 236905
  chr13:26760408-26760679
  hyper

SEQ ID NO: 422185 - DNA, 50 bp, Homo sapiens; identical to SEQ ID NO: 236906
  chr13:26828724-26828774
  hyper

SEQ ID NO: 422186 - DNA, 239 bp, Homo sapiens; identical to SEQ ID NO: 203293
  chr13:27334980-27335219
  hyper

SEQ ID NO: 422187 - DNA, 275 bp, Homo sapiens; identical to SEQ ID NO: 203294
  chr13:27744759-27745034
  hyper

SEQ ID NO: 422188 - DNA, 114 bp, Homo sapiens; identical to SEQ ID NO: 203295
  chr13:27825512-27825626
  hyper

SEQ ID NO: 422189 - DNA, 291 bp, Homo sapiens; identical to SEQ ID NO: 236910
  chr13:28024612-28024903
  hyper

SEQ ID NO: 422190 - DNA, 203 bp, Homo sapiens; identical to SEQ ID NO: 236911
  chr13:28194643-28194846
  hyper

SEQ ID NO: 422191 - DNA, 102 bp, Homo sapiens; identical to SEQ ID NO: 236912
  chr13:28195534-28195636
  hyper

SEQ ID NO: 422192 - DNA, 58 bp, Homo sapiens; identical to SEQ ID NO: 289593
  chr13:28364282-28364340
  hyper

SEQ ID NO: 422193 - DNA, 236 bp, Homo sapiens; identical to SEQ ID NO: 203297
  chr13:28371461-28371697
  hyper

SEQ ID NO: 422194 - DNA, 239 bp, Homo sapiens; identical to SEQ ID NO: 289595
  chr13:28394423-28394662
  hyper

SEQ ID NO: 422195 - DNA, 40 bp, Homo sapiens; identical to SEQ ID NO: 289596
  chr13:28395743-28395783
  hyper

SEQ ID NO: 422196 - DNA, 281 bp, Homo sapiens; identical to SEQ ID NO: 289597
  chr13:28396896-28397177
  hyper

SEQ ID NO: 422197 - DNA, 226 bp, Homo sapiens; identical to SEQ ID NO: 203301
  chr13:28493981-28494207
  hyper

SEQ ID NO: 422198 - DNA, 508 bp, Homo sapiens; identical to SEQ ID NO: 289601
  chr13:28494265-28494773
  hyper

SEQ ID NO: 422199 - DNA, 263 bp, Homo sapiens; identical to SEQ ID NO: 289602
  chr13:28495754-28496017
  hyper

SEQ ID NO: 422200 - DNA, 238 bp, Homo sapiens
  chr13:28534554-28534792
  hyper
tctcttcccagagcgcgcgcgccctctggcgcctgaaccggcgactggacgcggtggaggcgtgggattcggaggccgggaccccaagctctgcgctggaggcgtcaggagccgcgaggtcatccggtctcaacctcaggcgcccctgtgcaggcctccctacactcctcaagctgcgctccctactcgtgccacatcccttgttccgtaggtattgcttcgggggtgacacagttgg

SEQ ID NO: 422201 - DNA, 99 bp, Homo sapiens; identical to SEQ ID NO: 203310
  chr13:28543436-28543535
  hyper

SEQ ID NO: 422202 - DNA, 57 bp, Homo sapiens; identical to SEQ ID NO: 236932
  chr13:28544071-28544128
  hyper

SEQ ID NO: 422203 - DNA, 34 bp, Homo sapiens; identical to SEQ ID NO: 203311
  chr13:28592658-28592692
  hyper

SEQ ID NO: 422204 - DNA, 210 bp, Homo sapiens; identical to SEQ ID NO: 203312
  chr13:28608023-28608233
  hyper

SEQ ID NO: 422205 - DNA, 167 bp, Homo sapiens; identical to SEQ ID NO: 203313
  chr13:28608355-28608522
  hyper

SEQ ID NO: 422206 - DNA, 106 bp, Homo sapiens; identical to SEQ ID NO: 203314
  chr13:28636040-28636146
  hyper

SEQ ID NO: 422207 - DNA, 224 bp, Homo sapiens; identical to SEQ ID NO: 236938
  chr13:28712328-28712552
  hyper

SEQ ID NO: 422208 - DNA, 34 bp, Homo sapiens; identical to SEQ ID NO: 203316
  chr13:29233057-29233091
  hyper

SEQ ID NO: 422209 - DNA, 215 bp, Homo sapiens; identical to SEQ ID NO: 236947
  chr13:30002457-30002672
  hyper

SEQ ID NO: 422210 - DNA, 140 bp, Homo sapiens; identical to SEQ ID NO: 236948
  chr13:30424807-30424947
  hyper

SEQ ID NO: 422211 - DNA, 225 bp, Homo sapiens; identical to SEQ ID NO: 236949
  chr13:30880886-30881111
  hyper

SEQ ID NO: 422212 - DNA, 390 bp, Homo sapiens; identical to SEQ ID NO: 203319
  chr13:30982478-30982868
  hyper

SEQ ID NO: 422213 - DNA, 236 bp, Homo sapiens; identical to SEQ ID NO: 236952
  chr13:31039902-31040138
  hyper

SEQ ID NO: 422214 - DNA, 173 bp, Homo sapiens; identical to SEQ ID NO: 236953
  chr13:31191666-31191839
  hyper

SEQ ID NO: 422215 - DNA, 303 bp, Homo sapiens; identical to SEQ ID NO: 289629
  chr13:32889501-32889804
  hyper

SEQ ID NO: 422216 - DNA, 106 bp, Homo sapiens; identical to SEQ ID NO: 224534
  chr13:32890558-32890664
  hyper

SEQ ID NO: 422217 - DNA, 249 bp, Homo sapiens; identical to SEQ ID NO: 224535
  chr13:32893213-32893462
  hyper

SEQ ID NO: 422218 - DNA, 109 bp, Homo sapiens; identical to SEQ ID NO: 224536
  chr13:32899212-32899321
  hyper

SEQ ID NO: 422219 - DNA, 182 bp, Homo sapiens; identical to SEQ ID NO: 224537
  chr13:32900237-32900419
  hyper

SEQ ID NO: 422220 - DNA, 115 bp, Homo sapiens; identical to SEQ ID NO: 224538
  chr13:32900635-32900750
  hyper

SEQ ID NO: 422221 - DNA, 50 bp, Homo sapiens; identical to SEQ ID NO: 224539
  chr13:32903579-32903629
  hyper

SEQ ID NO: 422222 - DNA, 159 bp, Homo sapiens; identical to SEQ ID NO: 289636
  chr13:32905055-32905214
  hyper

SEQ ID NO: 422223 - DNA, 1116 bp, Homo sapiens; identical to SEQ ID NO: 224541
  chr13:32906408-32907524
  hyper

SEQ ID NO: 422224 - DNA, 4932 bp, Homo sapiens; identical to SEQ ID NO: 224542
  chr13:32910401-32915333
  hyper

SEQ ID NO: 422225 - DNA, 96 bp, Homo sapiens; identical to SEQ ID NO: 224543
  chr13:32918694-32918790
  hyper

SEQ ID NO: 422226 - DNA, 70 bp, Homo sapiens; identical to SEQ ID NO: 224544
  chr13:32920963-32921033
  hyper

SEQ ID NO: 422227 - DNA, 428 bp, Homo sapiens; identical to SEQ ID NO: 224545
  chr13:32928997-32929425
  hyper

SEQ ID NO: 422228 - DNA, 182 bp, Homo sapiens; identical to SEQ ID NO: 224546
  chr13:32930564-32930746
  hyper

SEQ ID NO: 422229 - DNA, 188 bp, Homo sapiens; identical to SEQ ID NO: 224547
  chr13:32931878-32932066
  hyper

SEQ ID NO: 422230 - DNA, 171 bp, Homo sapiens; identical to SEQ ID NO: 224548
  chr13:32936659-32936830
  hyper

SEQ ID NO: 422231 - DNA, 355 bp, Homo sapiens; identical to SEQ ID NO: 224549
  chr13:32937315-32937670
  hyper

SEQ ID NO: 422232 - DNA, 156 bp, Homo sapiens; identical to SEQ ID NO: 224550
  chr13:32944538-32944694
  hyper

SEQ ID NO: 422233 - DNA, 145 bp, Homo sapiens; identical to SEQ ID NO: 224551
  chr13:32945092-32945237
  hyper

SEQ ID NO: 422234 - DNA, 122 bp, Homo sapiens; identical to SEQ ID NO: 224552
  chr13:32950806-32950928
  hyper

SEQ ID NO: 422235 - DNA, 199 bp, Homo sapiens; identical to SEQ ID NO: 224553
  chr13:32953453-32953652
  hyper

SEQ ID NO: 422236 - DNA, 396 bp, Homo sapiens; identical to SEQ ID NO: 224554
  chr13:32953886-32954282
  hyper

SEQ ID NO: 422237 - DNA, 245 bp, Homo sapiens; identical to SEQ ID NO: 224555
  chr13:32968825-32969070
  hyper

SEQ ID NO: 422238 - DNA, 147 bp, Homo sapiens; identical to SEQ ID NO: 224556
  chr13:32971034-32971181
  hyper

SEQ ID NO: 422239 - DNA, 876 bp, Homo sapiens; identical to SEQ ID NO: 224557
  chr13:32972298-32973174
  hyper

SEQ ID NO: 422240 - DNA, 515 bp, Homo sapiens; identical to SEQ ID NO: 224558
  chr13:32973294-32973809
  hyper

SEQ ID NO: 422241 - DNA, 431 bp, Homo sapiens; identical to SEQ ID NO: 236955
  chr13:33001996-33002427
  hyper

SEQ ID NO: 422242 - DNA, 135 bp, Homo sapiens; identical to SEQ ID NO: 289658
  chr13:33589987-33590122
  hyper

SEQ ID NO: 422243 - DNA, 259 bp, Homo sapiens; identical to SEQ ID NO: 289659
  chr13:33590208-33590467
  hyper

SEQ ID NO: 422244 - DNA, 65 bp, Homo sapiens; identical to SEQ ID NO: 203321
  chr13:33591441-33591506
  hyper

SEQ ID NO: 422245 - DNA, 218 bp, Homo sapiens; identical to SEQ ID NO: 203322
  chr13:33924391-33924609
  hyper

SEQ ID NO: 422246 - DNA, 130 bp, Homo sapiens; identical to SEQ ID NO: 203323
  chr13:33924790-33924920
  hyper

SEQ ID NO: 422247 - DNA, 248 bp, Homo sapiens; identical to SEQ ID NO: 203327
  chr13:36704552-36704800
  hyper

SEQ ID NO: 422248 - DNA, 91 bp, Homo sapiens; identical to SEQ ID NO: 203328
  chr13:36705636-36705727
  hyper

SEQ ID NO: 422249 - DNA, 157 bp, Homo sapiens; identical to SEQ ID NO: 289669
  chr13:37004574-37004731
  hyper

SEQ ID NO: 422250 - DNA, 38 bp, Homo sapiens; identical to SEQ ID NO: 289671
  chr13:37247935-37247973
  hyper

SEQ ID NO: 422251 - DNA, 193 bp, Homo sapiens; identical to SEQ ID NO: 203331
  chr13:37248319-37248512
  hyper

SEQ ID NO: 422252 - DNA, 304 bp, Homo sapiens; identical to SEQ ID NO: 203332
  chr13:37393232-37393536
  hyper

SEQ ID NO: 422253 - DNA, 32 bp, Homo sapiens; identical to SEQ ID NO: 289674
  chr13:37493431-37493463
  hyper

SEQ ID NO: 422254 - DNA, 165 bp, Homo sapiens; identical to SEQ ID NO: 289675
  chr13:37493530-37493695
  hyper

SEQ ID NO: 422255 - DNA, 101 bp, Homo sapiens; identical to SEQ ID NO: 289676
  chr13:37493903-37494004
  hyper

SEQ ID NO: 422256 - DNA, 61 bp, Homo sapiens; identical to SEQ ID NO: 236970
  chr13:37572855-37572916
  hyper

SEQ ID NO: 422257 - DNA, 119 bp, Homo sapiens; identical to SEQ ID NO: 236971
  chr13:37574643-37574762
  hyper

SEQ ID NO: 422258 - DNA, 35 bp, Homo sapiens; identical to SEQ ID NO: 236973
  chr13:38923590-38923625
  hyper

SEQ ID NO: 422259 - DNA, 138 bp, Homo sapiens; identical to SEQ ID NO: 236974
  chr13:38924354-38924492
  hyper

SEQ ID NO: 422260 - DNA, 360 bp, Homo sapiens; identical to SEQ ID NO: 289682
  chr13:39260647-39261007
  hyper

SEQ ID NO: 422261 - DNA, 33 bp, Homo sapiens; identical to SEQ ID NO: 203337
  chr13:39612009-39612042
  hyper

SEQ ID NO: 422262 - DNA, 120 bp, Homo sapiens; identical to SEQ ID NO: 236978
  chr13:39612313-39612433
  hyper

SEQ ID NO: 422263 - DNA, 1233 bp, Homo sapiens; identical to SEQ ID NO: 236979
  chr13:40176535-40177768
  hyper

SEQ ID NO: 422264 - DNA, 253 bp, Homo sapiens; identical to SEQ ID NO: 236980
  chr13:40976492-40976745
  hyper

SEQ ID NO: 422265 - DNA, 99 bp, Homo sapiens; identical to SEQ ID NO: 289690
  chr13:41238386-41238485
  hyper

SEQ ID NO: 422266 - DNA, 136 bp, Homo sapiens; identical to SEQ ID NO: 289691
  chr13:41238533-41238669
  hyper

SEQ ID NO: 422267 - DNA, 163 bp, Homo sapiens; identical to SEQ ID NO: 289692
  chr13:41345169-41345332
  hyper

SEQ ID NO: 422268 - DNA, 223 bp, Homo sapiens; identical to SEQ ID NO: 289693
  chr13:41345361-41345584
  hyper

SEQ ID NO: 422269 - DNA, 225 bp, Homo sapiens; identical to SEQ ID NO: 236984
  chr13:41635650-41635875
  hyper

SEQ ID NO: 422270 - DNA, 277 bp, Homo sapiens; identical to SEQ ID NO: 236985
  chr13:41706714-41706991
  hyper

SEQ ID NO: 422271 - DNA, 326 bp, Homo sapiens; identical to SEQ ID NO: 289697
  chr13:41767766-41768092
  hyper

SEQ ID NO: 422272 - DNA, 164 bp, Homo sapiens; identical to SEQ ID NO: 236986
  chr13:41837649-41837813
  hyper

SEQ ID NO: 422273 - DNA, 172 bp, Homo sapiens; identical to SEQ ID NO: 236987
  chr13:41885138-41885310
  hyper

SEQ ID NO: 422274 - DNA, 162 bp, Homo sapiens; identical to SEQ ID NO: 224571
  chr13:42615145-42615307
  hyper

SEQ ID NO: 422275 - DNA, 202 bp, Homo sapiens; identical to SEQ ID NO: 289703
  chr13:42615560-42615762
  hyper

SEQ ID NO: 422276 - DNA, 182 bp, Homo sapiens; identical to SEQ ID NO: 289704
  chr13:42615836-42616018
  hyper

SEQ ID NO: 422277 - DNA, 738 bp, Homo sapiens; identical to SEQ ID NO: 236990
  chr13:42621978-42622716
  hyper

SEQ ID NO: 422278 - DNA, 174 bp, Homo sapiens; identical to SEQ ID NO: 203345
  chr13:43148495-43148669
  hyper

SEQ ID NO: 422279 - DNA, 473 bp, Homo sapiens; identical to SEQ ID NO: 203346
  chr13:43148698-43149171
  hyper

SEQ ID NO: 422280 - DNA, 43 bp, Homo sapiens; identical to SEQ ID NO: 203347
  chr13:43149172-43149215
  hyper

SEQ ID NO: 422281 - DNA, 34 bp, Homo sapiens; identical to SEQ ID NO: 289709
  chr13:43149333-43149367
  hyper

SEQ ID NO: 422282 - DNA, 205 bp, Homo sapiens; identical to SEQ ID NO: 203350
  chr13:44453169-44453374
  hyper

SEQ ID NO: 422283 - DNA, 33 bp, Homo sapiens; identical to SEQ ID NO: 236995
  chr13:44453844-44453877
  hyper

SEQ ID NO: 422284 - DNA, 205 bp, Homo sapiens; identical to SEQ ID NO: 224576
  chr13:44991619-44991824
  hyper

SEQ ID NO: 422285 - DNA, 296 bp, Homo sapiens; identical to SEQ ID NO: 236997
  chr13:45009499-45009795
  hyper

SEQ ID NO: 422286 - DNA, 59 bp, Homo sapiens; identical to SEQ ID NO: 236998
  chr13:45011210-45011269
  hyper

SEQ ID NO: 422287 - DNA, 104 bp, Homo sapiens; identical to SEQ ID NO: 9329
  chr13:45150766-45150870
  hyper

SEQ ID NO: 422288 - DNA, 164 bp, Homo sapiens; identical to SEQ ID NO: 237001
  chr13:45563658-45563822
  hyper

SEQ ID NO: 422289 - DNA, 31 bp, Homo sapiens; identical to SEQ ID NO: 237002
  chr13:45694566-45694597
  hyper

SEQ ID NO: 422290 - DNA, 145 bp, Homo sapiens; identical to SEQ ID NO: 203354
  chr13:45991445-45991590
  hyper

SEQ ID NO: 422291 - DNA, 122 bp, Homo sapiens; identical to SEQ ID NO: 237004
  chr13:45992566-45992688
  hyper

SEQ ID NO: 422292 - DNA, 135 bp, Homo sapiens; identical to SEQ ID NO: 237005
  chr13:46038853-46038988
  hyper

SEQ ID NO: 422293 - DNA, 205 bp, Homo sapiens; identical to SEQ ID NO: 123752
  chr13:46626295-46626500
  hyper

SEQ ID NO: 422294 - DNA, 486 bp, Homo sapiens; identical to SEQ ID NO: 237009
  chr13:46626732-46627218
  hyper

SEQ ID NO: 422295 - DNA, 37 bp, Homo sapiens; identical to SEQ ID NO: 237010
  chr13:46756059-46756096
  hyper

SEQ ID NO: 422296 - DNA, 36 bp, Homo sapiens; identical to SEQ ID NO: 203356
  chr13:46785661-46785697
  hyper

SEQ ID NO: 422297 - DNA, 224 bp, Homo sapiens; identical to SEQ ID NO: 203357
  chr13:46786103-46786327
  hyper

SEQ ID NO: 422298 - DNA, 318 bp, Homo sapiens; identical to SEQ ID NO: 237013
  chr13:48807036-48807354
  hyper

SEQ ID NO: 422299 - DNA, 218 bp, Homo sapiens; identical to SEQ ID NO: 237014
  chr13:48877516-48877734
  hyper

SEQ ID NO: 422300 - DNA, 499 bp, Homo sapiens; identical to SEQ ID NO: 237016
  chr13:50018030-50018529
  hyper

SEQ ID NO: 422301 - DNA, 88 bp, Homo sapiens; identical to SEQ ID NO: 237018
  chr13:50264906-50264994
  hyper

SEQ ID NO: 422302 - DNA, 312 bp, Homo sapiens; identical to SEQ ID NO: 237020
  chr13:50367043-50367355
  hyper

SEQ ID NO: 422303 - DNA, 182 bp, Homo sapiens; identical to SEQ ID NO: 237021
  chr13:50510537-50510719
  hyper

SEQ ID NO: 422304 - DNA, 209 bp, Homo sapiens; identical to SEQ ID NO: 203364
  chr13:50570752-50570961
  hyper

SEQ ID NO: 422305 - DNA, 553 bp, Homo sapiens; identical to SEQ ID NO: 203365
  chr13:50571189-50571742
  hyper

SEQ ID NO: 422306 - DNA, 51 bp, Homo sapiens; identical to SEQ ID NO: 237024
  chr13:50654635-50654686
  hyper

SEQ ID NO: 422307 - DNA, 47 bp, Homo sapiens; identical to SEQ ID NO: 203366
  chr13:51086772-51086819
  hyper

SEQ ID NO: 422308 - DNA, 127 bp, Homo sapiens; identical to SEQ ID NO: 203367
  chr13:51483755-51483882
  hyper

SEQ ID NO: 422309 - DNA, 78 bp, Homo sapiens; identical to SEQ ID NO: 50667
  chr13:52027258-52027336
  hyper

SEQ ID NO: 422310 - DNA, 121 bp, Homo sapiens; identical to SEQ ID NO: 237031
  chr13:52028195-52028316
  hyper

SEQ ID NO: 422311 - DNA, 257 bp, Homo sapiens; identical to SEQ ID NO: 237032
  chr13:52159090-52159347
  hyper

SEQ ID NO: 422312 - DNA, 124 bp, Homo sapiens; identical to SEQ ID NO: 237033
  chr13:52377716-52377840
  hyper

SEQ ID NO: 422313 - DNA, 291 bp, Homo sapiens; identical to SEQ ID NO: 224578
  chr13:52585269-52585560
  hyper

SEQ ID NO: 422314 - DNA, 223 bp, Homo sapiens; identical to SEQ ID NO: 237034
  chr13:52586275-52586498
  hyper

SEQ ID NO: 422315 - DNA, 85 bp, Homo sapiens; identical to SEQ ID NO: 224579
  chr13:52702430-52702515
  hyper

SEQ ID NO: 422316 - DNA, 545 bp, Homo sapiens; identical to SEQ ID NO: 289760
  chr13:52702767-52703312
  hyper

SEQ ID NO: 422317 - DNA, 71 bp, Homo sapiens; identical to SEQ ID NO: 123817
  chr13:52703361-52703432
  hyper

SEQ ID NO: 422318 - DNA, 649 bp, Homo sapiens; identical to SEQ ID NO: 237036
  chr13:52733271-52733920
  hyper

SEQ ID NO: 422319 - DNA, 58 bp, Homo sapiens; identical to SEQ ID NO: 237038
  chr13:53024891-53024949
  hyper

SEQ ID NO: 422320 - DNA, 256 bp, Homo sapiens; identical to SEQ ID NO: 237039
  chr13:53029197-53029453
  hyper

SEQ ID NO: 422321 - DNA, 122 bp, Homo sapiens; identical to SEQ ID NO: 203372
  chr13:53226636-53226758
  hyper

SEQ ID NO: 422322 - DNA, 85 bp, Homo sapiens; identical to SEQ ID NO: 237044
  chr13:53422121-53422206
  hyper

SEQ ID NO: 422323 - DNA, 122 bp, Homo sapiens
  chr13:53422432-53422554
  hyper
cgatgaccgtgccgggggcatcctcctcgaaggtgctgtatcggactgttttgctctgggccactgagagcacccagcagaggctgaagagctgcaaggggaaaaggcaggggctgccccaa

SEQ ID NO: 422324 - DNA, 45 bp, Homo sapiens; identical to SEQ ID NO: 289773
  chr13:53426008-53426053
  hyper

SEQ ID NO: 422325 - DNA, 110 bp, Homo sapiens; identical to SEQ ID NO: 289774
  chr13:53775438-53775548
  hyper

SEQ ID NO: 422326 - DNA, 53 bp, Homo sapiens; identical to SEQ ID NO: 203377
  chr13:58204884-58204937
  hyper

SEQ ID NO: 422327 - DNA, 191 bp, Homo sapiens; identical to SEQ ID NO: 50692
  chr13:58205044-58205235
  hyper

SEQ ID NO: 422328 - DNA, 352 bp, Homo sapiens; identical to SEQ ID NO: 203379
  chr13:58205443-58205795
  hyper

SEQ ID NO: 422329 - DNA, 186 bp, Homo sapiens; identical to SEQ ID NO: 203380
  chr13:60970305-60970491
  hyper

SEQ ID NO: 422330 - DNA, 213 bp, Homo sapiens; identical to SEQ ID NO: 224583
  chr13:60972272-60972485
  hyper

SEQ ID NO: 422331 - DNA, 404 bp, Homo sapiens; identical to SEQ ID NO: 289782
  chr13:61988789-61989193
  hyper

SEQ ID NO: 422332 - DNA, 225 bp, Homo sapiens; identical to SEQ ID NO: 203382
  chr13:61989329-61989554
  hyper

SEQ ID NO: 422333 - DNA, 243 bp, Homo sapiens; identical to SEQ ID NO: 224584
  chr13:67799457-67799700
  hyper

SEQ ID NO: 422334 - DNA, 32 bp, Homo sapiens; identical to SEQ ID NO: 224585
  chr13:67801107-67801139
  hyper

SEQ ID NO: 422335 - DNA, 254 bp, Homo sapiens; identical to SEQ ID NO: 224586
  chr13:67801447-67801701
  hyper

SEQ ID NO: 422336 - DNA, 288 bp, Homo sapiens; identical to SEQ ID NO: 289791
  chr13:72439250-72439538
  hyper

SEQ ID NO: 422337 - DNA, 391 bp, Homo sapiens; identical to SEQ ID NO: 289792
  chr13:72439568-72439959
  hyper

SEQ ID NO: 422338 - DNA, 359 bp, Homo sapiens; identical to SEQ ID NO: 289793
  chr13:72440072-72440431
  hyper

SEQ ID NO: 422339 - DNA, 213 bp, Homo sapiens; identical to SEQ ID NO: 289794
  chr13:72440491-72440704
  hyper

SEQ ID NO: 422340 - DNA, 445 bp, Homo sapiens; identical to SEQ ID NO: 289795
  chr13:72440741-72441186
  hyper

SEQ ID NO: 422341 - DNA, 89 bp, Homo sapiens; identical to SEQ ID NO: 289796
  chr13:72441410-72441499
  hyper

SEQ ID NO: 422342 - DNA, 76 bp, Homo sapiens; identical to SEQ ID NO: 289797
  chr13:72441690-72441766
  hyper

SEQ ID NO: 422343 - DNA, 117 bp, Homo sapiens; identical to SEQ ID NO: 289798
  chr13:73632748-73632865
  hyper

SEQ ID NO: 422344 - DNA, 69 bp, Homo sapiens; identical to SEQ ID NO: 123880
  chr13:73632890-73632959
  hyper

SEQ ID NO: 422345 - DNA, 200 bp, Homo sapiens; identical to SEQ ID NO: 203388
  chr13:74709334-74709534
  hyper

SEQ ID NO: 422346 - DNA, 85 bp, Homo sapiens; identical to SEQ ID NO: 289804
  chr13:75149819-75149904
  hyper

SEQ ID NO: 422347 - DNA, 75 bp, Homo sapiens; identical to SEQ ID NO: 289805
  chr13:75150115-75150190
  hyper

SEQ ID NO: 422348 - DNA, 35 bp, Homo sapiens; identical to SEQ ID NO: 203389
  chr13:75794021-75794056
  hyper

SEQ ID NO: 422349 - DNA, 1065 bp, Homo sapiens; identical to SEQ ID NO: 203391
  chr13:76055056-76056121
  hyper

SEQ ID NO: 422350 - DNA, 31 bp, Homo sapiens; identical to SEQ ID NO: 237071
  chr13:76056405-76056436
  hyper

SEQ ID NO: 422351 - DNA, 101 bp, Homo sapiens; identical to SEQ ID NO: 237072
  chr13:76123767-76123868
  hyper

SEQ ID NO: 422352 - DNA, 134 bp, Homo sapiens; identical to SEQ ID NO: 203392
  chr13:76450655-76450789
  hyper

SEQ ID NO: 422353 - DNA, 87 bp, Homo sapiens; identical to SEQ ID NO: 289814
  chr13:77601288-77601375
  hyper

SEQ ID NO: 422354 - DNA, 59 bp, Homo sapiens; identical to SEQ ID NO: 123905
  chr13:77601407-77601466
  hyper

SEQ ID NO: 422355 - DNA, 171 bp, Homo sapiens; identical to SEQ ID NO: 203393
  chr13:77901202-77901373
  hyper

SEQ ID NO: 422356 - DNA, 154 bp, Homo sapiens; identical to SEQ ID NO: 289821
  chr13:79161684-79161838
  hyper

SEQ ID NO: 422357 - DNA, 204 bp, Homo sapiens; identical to SEQ ID NO: 289822
  chr13:79171244-79171448
  hyper

SEQ ID NO: 422358 - DNA, 294 bp, Homo sapiens; identical to SEQ ID NO: 237085
  chr13:79181160-79181454
  hyper

SEQ ID NO: 422359 - DNA, 106 bp, Homo sapiens; identical to SEQ ID NO: 123928
  chr13:79183745-79183851
  hyper

SEQ ID NO: 422360 - DNA, 44 bp, Homo sapiens; identical to SEQ ID NO: 203396
  chr13:79980677-79980721
  hyper

SEQ ID NO: 422361 - DNA, 42 bp, Homo sapiens; identical to SEQ ID NO: 237088
  chr13:80055214-80055256
  hyper

SEQ ID NO: 422362 - DNA, 50 bp, Homo sapiens; identical to SEQ ID NO: 237089
  chr13:80055634-80055684
  hyper

SEQ ID NO: 422363 - DNA, 724 bp, Homo sapiens; identical to SEQ ID NO: 237090
  chr13:80913011-80913735
  hyper

SEQ ID NO: 422364 - DNA, 79 bp, Homo sapiens; identical to SEQ ID NO: 203397
  chr13:80914000-80914079
  hyper

SEQ ID NO: 422365 - DNA, 437 bp, Homo sapiens; identical to SEQ ID NO: 289830
  chr13:80914144-80914581
  hyper

SEQ ID NO: 422366 - DNA, 928 bp, Homo sapiens; identical to SEQ ID NO: 289831
  chr13:80914613-80915541
  hyper

SEQ ID NO: 422367 - DNA, 93 bp, Homo sapiens; identical to SEQ ID NO: 203401
  chr13:80915582-80915675
  hyper

SEQ ID NO: 422368 - DNA, 201 bp, Homo sapiens; identical to SEQ ID NO: 237092
  chr13:80915906-80916107
  hyper

SEQ ID NO: 422369 - DNA, 499 bp, Homo sapiens; identical to SEQ ID NO: 203402
  chr13:80916947-80917446
  hyper

SEQ ID NO: 422370 - DNA, 226 bp, Homo sapiens; identical to SEQ ID NO: 289836
  chr13:84456480-84456706
  hyper

SEQ ID NO: 422371 - DNA, 251 bp, Homo sapiens; identical to SEQ ID NO: 289837
  chr13:88326061-88326312
  hyper

SEQ ID NO: 422372 - DNA, 353 bp, Homo sapiens; identical to SEQ ID NO: 237100
  chr13:92001426-92001779
  hyper

SEQ ID NO: 422373 - DNA, 253 bp, Homo sapiens; identical to SEQ ID NO: 203407
  chr13:93878955-93879208
  hyper

SEQ ID NO: 422374 - DNA, 460 bp, Homo sapiens; identical to SEQ ID NO: 289846
  chr13:95354380-95354840
  hyper

SEQ ID NO: 422375 - DNA, 175 bp, Homo sapiens; identical to SEQ ID NO: 50787
  chr13:95355116-95355291
  hyper

SEQ ID NO: 422376 - DNA, 469 bp, Homo sapiens; identical to SEQ ID NO: 289848
  chr13:95355494-95355963
  hyper

SEQ ID NO: 422377 - DNA, 271 bp, Homo sapiens; identical to SEQ ID NO: 289849
  chr13:95356019-95356290
  hyper

SEQ ID NO: 422378 - DNA, 313 bp, Homo sapiens; identical to SEQ ID NO: 237112
  chr13:95359104-95359417
  hyper

SEQ ID NO: 422379 - DNA, 289 bp, Homo sapiens; identical to SEQ ID NO: 289852
  chr13:95365776-95366065
  hyper

SEQ ID NO: 422380 - DNA, 245 bp, Homo sapiens; identical to SEQ ID NO: 203417
  chr13:98085205-98085450
  hyper

SEQ ID NO: 422381 - DNA, 702 bp, Homo sapiens; identical to SEQ ID NO: 289857
  chr13:98795069-98795771
  hyper

SEQ ID NO: 422382 - DNA, 194 bp, Homo sapiens; identical to SEQ ID NO: 289858
  chr13:99128923-99129117
  hyper

SEQ ID NO: 422383 - DNA, 329 bp, Homo sapiens; identical to SEQ ID NO: 203419
  chr13:99229764-99230093
  hyper

SEQ ID NO: 422384 - DNA, 354 bp, Homo sapiens; identical to SEQ ID NO: 203421
  chr13:99739098-99739452
  hyper

SEQ ID NO: 422385 - DNA, 100 bp, Homo sapiens; identical to SEQ ID NO: 237132
  chr13:99852544-99852644
  hyper

SEQ ID NO: 422386 - DNA, 82 bp, Homo sapiens; identical to SEQ ID NO: 237133
  chr13:99853142-99853224
  hyper

SEQ ID NO: 422387 - DNA, 201 bp, Homo sapiens; identical to SEQ ID NO: 237134
  chr13:100153680-100153881
  hyper

SEQ ID NO: 422388 - DNA, 112 bp, Homo sapiens; identical to SEQ ID NO: 237135
  chr13:100259205-100259317
  hyper

SEQ ID NO: 422389 - DNA, 207 bp, Homo sapiens; identical to SEQ ID NO: 289867
  chr13:100609269-100609476
  hyper

SEQ ID NO: 422390 - DNA, 45 bp, Homo sapiens; identical to SEQ ID NO: 399339
  chr13:100622177-100622222
  hyper

SEQ ID NO: 422391 - DNA, 422 bp, Homo sapiens; identical to SEQ ID NO: 203432
  chr13:100633420-100633842
  hyper

SEQ ID NO: 422392 - DNA, 272 bp, Homo sapiens; identical to SEQ ID NO: 203435
  chr13:100642614-100642886
  hyper

SEQ ID NO: 422393 - DNA, 160 bp, Homo sapiens; identical to SEQ ID NO: 237156
  chr13:100740896-100741056
  hyper

SEQ ID NO: 422394 - DNA, 129 bp, Homo sapiens; identical to SEQ ID NO: 289887
  chr13:102568281-102568410
  hyper

SEQ ID NO: 422395 - DNA, 268 bp, Homo sapiens; identical to SEQ ID NO: 289889
  chr13:103054731-103054999
  hyper

SEQ ID NO: 422396 - DNA, 123 bp, Homo sapiens; identical to SEQ ID NO: 237164
  chr13:103248986-103249109
  hyper

SEQ ID NO: 422397 - DNA, 146 bp, Homo sapiens; identical to SEQ ID NO: 203438
  chr13:103450867-103451013
  hyper

SEQ ID NO: 422398 - DNA, 1602 bp, Homo sapiens; identical to SEQ ID NO: 289892
  chr13:103451043-103452645
  hyper

SEQ ID NO: 422399 - DNA, 406 bp, Homo sapiens; identical to SEQ ID NO: 124058
  chr13:103452670-103453076
  hyper

SEQ ID NO: 422400 - DNA, 124 bp, Homo sapiens; identical to SEQ ID NO: 203441
  chr13:107001524-107001648
  hyper

SEQ ID NO: 422401 - DNA, 127 bp, Homo sapiens; identical to SEQ ID NO: 203442
  chr13:107001687-107001814
  hyper

SEQ ID NO: 422402 - DNA, 193 bp, Homo sapiens; identical to SEQ ID NO: 237167
  chr13:107185497-107185690
  hyper

SEQ ID NO: 422403 - DNA, 216 bp, Homo sapiens; identical to SEQ ID NO: 203443
  chr13:107186448-107186664
  hyper

SEQ ID NO: 422404 - DNA, 84 bp, Homo sapiens; identical to SEQ ID NO: 237176
  chr13:108868007-108868091
  hyper

SEQ ID NO: 422405 - DNA, 668 bp, Homo sapiens; identical to SEQ ID NO: 289909
  chr13:110437578-110438246
  hyper

SEQ ID NO: 422406 - DNA, 634 bp, Homo sapiens; identical to SEQ ID NO: 289910
  chr13:110438287-110438921
  hyper

SEQ ID NO: 422407 - DNA, 863 bp, Homo sapiens; identical to SEQ ID NO: 289911
  chr13:110438956-110439819
  hyper

SEQ ID NO: 422408 - DNA, 329 bp, Homo sapiens; identical to SEQ ID NO: 289912
  chr13:110439864-110440193
  hyper

SEQ ID NO: 422409 - DNA, 186 bp, Homo sapiens; identical to SEQ ID NO: 237180
  chr13:110790766-110790952
  hyper

SEQ ID NO: 422410 - DNA, 215 bp, Homo sapiens; identical to SEQ ID NO: 399349
  chr13:110960694-110960909
  hyper

SEQ ID NO: 422411 - DNA, 54 bp, Homo sapiens; identical to SEQ ID NO: 289915
  chr13:110961130-110961184
  hyper

SEQ ID NO: 422412 - DNA, 828 bp, Homo sapiens; identical to SEQ ID NO: 203455
  chr13:111213552-111214380
  hyper

SEQ ID NO: 422413 - DNA, 343 bp, Homo sapiens; identical to SEQ ID NO: 289917
  chr13:111267965-111268308
  hyper

SEQ ID NO: 422414 - DNA, 58 bp, Homo sapiens; identical to SEQ ID NO: 237187
  chr13:111268659-111268717
  hyper

SEQ ID NO: 422415 - DNA, 150 bp, Homo sapiens; identical to SEQ ID NO: 203457
  chr13:111358789-111358939
  hyper

SEQ ID NO: 422416 - DNA, 210 bp, Homo sapiens; identical to SEQ ID NO: 289920
  chr13:111365469-111365679
  hyper

SEQ ID NO: 422417 - DNA, 107 bp, Homo sapiens; identical to SEQ ID NO: 237190
  chr13:111527014-111527121
  hyper

SEQ ID NO: 422418 - DNA, 84 bp, Homo sapiens; identical to SEQ ID NO: 237192
  chr13:111806516-111806600
  hyper

SEQ ID NO: 422419 - DNA, 247 bp, Homo sapiens; identical to SEQ ID NO: 289927
  chr13:112722597-112722844
  hyper

SEQ ID NO: 422420 - DNA, 100 bp, Homo sapiens; identical to SEQ ID NO: 289928
  chr13:112728350-112728450
  hyper

SEQ ID NO: 422421 - DNA, 122 bp, Homo sapiens; identical to SEQ ID NO: 237209
  chr13:112728785-112728907
  hyper

SEQ ID NO: 422422 - DNA, 35 bp, Homo sapiens; identical to SEQ ID NO: 224653
  chr13:113261127-113261162
  hyper

SEQ ID NO: 422423 - DNA, 100 bp, Homo sapiens; identical to SEQ ID NO: 237212
  chr13:113295149-113295249
  hyper

SEQ ID NO: 422424 - DNA, 710 bp, Homo sapiens; identical to SEQ ID NO: 224654
  chr13:113597560-113598270
  hyper

SEQ ID NO: 422425 - DNA, 87 bp, Homo sapiens; identical to SEQ ID NO: 237215
  chr13:113683950-113684037
  hyper

SEQ ID NO: 422426 - DNA, 47 bp, Homo sapiens; identical to SEQ ID NO: 289938
  chr13:113807345-113807392
  hyper

SEQ ID NO: 422427 - DNA, 465 bp, Homo sapiens; identical to SEQ ID NO: 124157
  chr13:113807542-113808007
  hyper

SEQ ID NO: 422428 - DNA, 313 bp, Homo sapiens; identical to SEQ ID NO: 237217
  chr13:113862929-113863242
  hyper

SEQ ID NO: 422429 - DNA, 87 bp, Homo sapiens; identical to SEQ ID NO: 203465
  chr13:113951225-113951312
  hyper

SEQ ID NO: 422430 - DNA, 179 bp, Homo sapiens; identical to SEQ ID NO: 289945
  chr13:114145958-114146137
  hyper

SEQ ID NO: 422431 - DNA, 725 bp, Homo sapiens; identical to SEQ ID NO: 203469
  chr13:114285627-114286352
  hyper

SEQ ID NO: 422432 - DNA, 138 bp, Homo sapiens; identical to SEQ ID NO: 237222
  chr13:114566904-114567042
  hyper

SEQ ID NO: 422433 - DNA, 313 bp, Homo sapiens; identical to SEQ ID NO: 237224
  chr14:20773921-20774234
  hyper

SEQ ID NO: 422434 - DNA, 418 bp, Homo sapiens; identical to SEQ ID NO: 237225
  chr14:20811405-20811823
  hyper

SEQ ID NO: 422435 - DNA, 87 bp, Homo sapiens; identical to SEQ ID NO: 237226
  chr14:20922851-20922938
  hyper

SEQ ID NO: 422436 - DNA, 239 bp, Homo sapiens; identical to SEQ ID NO: 237227
  chr14:20929632-20929871
  hyper

SEQ ID NO: 422437 - DNA, 407 bp, Homo sapiens; identical to SEQ ID NO: 237228
  chr14:20937480-20937887
  hyper

SEQ ID NO: 422438 - DNA, 86 bp, Homo sapiens; identical to SEQ ID NO: 203476
  chr14:21093067-21093153
  hyper

SEQ ID NO: 422439 - DNA, 88 bp, Homo sapiens; identical to SEQ ID NO: 203481
  chr14:21101235-21101323
  hyper

SEQ ID NO: 422440 - DNA, 41 bp, Homo sapiens; identical to SEQ ID NO: 237235
  chr14:21101619-21101660
  hyper

SEQ ID NO: 422441 - DNA, 138 bp, Homo sapiens; identical to SEQ ID NO: 289964
  chr14:21121262-21121400
  hyper

SEQ ID NO: 422442 - DNA, 119 bp, Homo sapiens; identical to SEQ ID NO: 289965
  chr14:21121460-21121579
  hyper

SEQ ID NO: 422443 - DNA, 107 bp, Homo sapiens; identical to SEQ ID NO: 237237
  chr14:21131529-21131636
  hyper

SEQ ID NO: 422444 - DNA, 420 bp, Homo sapiens; identical to SEQ ID NO: 289967
  chr14:21150255-21150675
  hyper

SEQ ID NO: 422445 - DNA, 1320 bp, Homo sapiens; identical to SEQ ID NO: 237240
  chr14:21150855-21152175
  hyper

SEQ ID NO: 422446 - DNA, 816 bp, Homo sapiens; identical to SEQ ID NO: 289969
  chr14:21152235-21153051
  hyper

SEQ ID NO: 422447 - DNA, 131 bp, Homo sapiens; identical to SEQ ID NO: 289970
  chr14:21341857-21341988
  hyper

SEQ ID NO: 422448 - DNA, 159 bp, Homo sapiens; identical to SEQ ID NO: 237244
  chr14:21458483-21458642
  hyper

SEQ ID NO: 422449 - DNA, 153 bp, Homo sapiens; identical to SEQ ID NO: 203486
  chr14:21493030-21493183
  hyper

SEQ ID NO: 422450 - DNA, 249 bp, Homo sapiens; identical to SEQ ID NO: 289975
  chr14:21493821-21494070
  hyper

SEQ ID NO: 422451 - DNA, 105 bp, Homo sapiens; identical to SEQ ID NO: 124214
  chr14:21494160-21494265
  hyper

SEQ ID NO: 422452 - DNA, 64 bp, Homo sapiens; identical to SEQ ID NO: 203487
  chr14:21539066-21539130
  hyper

SEQ ID NO: 422453 - DNA, 112 bp, Homo sapiens; identical to SEQ ID NO: 203488
  chr14:21852940-21853052
  hyper

SEQ ID NO: 422454 - DNA, 301 bp, Homo sapiens; identical to SEQ ID NO: 237250
  chr14:21905266-21905567
  hyper

SEQ ID NO: 422455 - DNA, 168 bp, Homo sapiens; identical to SEQ ID NO: 237251
  chr14:21924475-21924643
  hyper

SEQ ID NO: 422456 - DNA, 64 bp, Homo sapiens; identical to SEQ ID NO: 237252
  chr14:21945161-21945225
  hyper

SEQ ID NO: 422457 - DNA, 240 bp, Homo sapiens; identical to SEQ ID NO: 237253
  chr14:21979450-21979690
  hyper

SEQ ID NO: 422458 - DNA, 381 bp, Homo sapiens; identical to SEQ ID NO: 289985
  chr14:21994388-21994769
  hyper

SEQ ID NO: 422459 - DNA, 162 bp, Homo sapiens; identical to SEQ ID NO: 237256
  chr14:23057965-23058127
  hyper

SEQ ID NO: 422460 - DNA, 362 bp, Homo sapiens; identical to SEQ ID NO: 237257
  chr14:23066988-23067350
  hyper

SEQ ID NO: 422461 - DNA, 177 bp, Homo sapiens; identical to SEQ ID NO: 237258
  chr14:23067565-23067742
  hyper

SEQ ID NO: 422462 - DNA, 48 bp, Homo sapiens; identical to SEQ ID NO: 237260
  chr14:23299071-23299119
  hyper

SEQ ID NO: 422463 - DNA, 223 bp, Homo sapiens; identical to SEQ ID NO: 289994
  chr14:23355821-23356044
  hyper

SEQ ID NO: 422464 - DNA, 173 bp, Homo sapiens; identical to SEQ ID NO: 237262
  chr14:23388421-23388594
  hyper

SEQ ID NO: 422465 - DNA, 38 bp, Homo sapiens; identical to SEQ ID NO: 237263
  chr14:23388823-23388861
  hyper

SEQ ID NO: 422466 - DNA, 285 bp, Homo sapiens; identical to SEQ ID NO: 237264
  chr14:23398577-23398862
  hyper

SEQ ID NO: 422467 - DNA, 204 bp, Homo sapiens; identical to SEQ ID NO: 289998
  chr14:23450224-23450428
  hyper

SEQ ID NO: 422468 - DNA, 107 bp, Homo sapiens; identical to SEQ ID NO: 203495
  chr14:23450746-23450853
  hyper

SEQ ID NO: 422469 - DNA, 737 bp, Homo sapiens; identical to SEQ ID NO: 237266
  chr14:23450883-23451620
  hyper

SEQ ID NO: 422470 - DNA, 479 bp, Homo sapiens; identical to SEQ ID NO: 203497
  chr14:23451829-23452308
  hyper

SEQ ID NO: 422471 - DNA, 186 bp, Homo sapiens; identical to SEQ ID NO: 237268
  chr14:23503914-23504100
  hyper

SEQ ID NO: 422472 - DNA, 130 bp, Homo sapiens; identical to SEQ ID NO: 237269
  chr14:23527202-23527332
  hyper

SEQ ID NO: 422473 - DNA, 35 bp, Homo sapiens; identical to SEQ ID NO: 237270
  chr14:23540715-23540750
  hyper

SEQ ID NO: 422474 - DNA, 244 bp, Homo sapiens; identical to SEQ ID NO: 237271
  chr14:23755249-23755493
  hyper

SEQ ID NO: 422475 - DNA, 202 bp, Homo sapiens; identical to SEQ ID NO: 290006
  chr14:23770438-23770640
  hyper

SEQ ID NO: 422476 - DNA, 144 bp, Homo sapiens; identical to SEQ ID NO: 237273
  chr14:23772082-23772226
  hyper

SEQ ID NO: 422477 - DNA, 101 bp, Homo sapiens; identical to SEQ ID NO: 203498
  chr14:23775763-23775864
  hyper

SEQ ID NO: 422478 - DNA, 188 bp, Homo sapiens; identical to SEQ ID NO: 203499
  chr14:23776071-23776259
  hyper

SEQ ID NO: 422479 - DNA, 125 bp, Homo sapiens; identical to SEQ ID NO: 237275
  chr14:23790484-23790609
  hyper

SEQ ID NO: 422480 - DNA, 67 bp, Homo sapiens; identical to SEQ ID NO: 203500
  chr14:23821317-23821384
  hyper

SEQ ID NO: 422481 - DNA, 87 bp, Homo sapiens; identical to SEQ ID NO: 290012
  chr14:23822193-23822280
  hyper

SEQ ID NO: 422482 - DNA, 51 bp, Homo sapiens; identical to SEQ ID NO: 237278
  chr14:23938810-23938861
  hyper

SEQ ID NO: 422483 - DNA, 196 bp, Homo sapiens; identical to SEQ ID NO: 237279
  chr14:24020943-24021139
  hyper

SEQ ID NO: 422484 - DNA, 285 bp, Homo sapiens; identical to SEQ ID NO: 290016
  chr14:24024866-24025151
  hyper

SEQ ID NO: 422485 - DNA, 105 bp, Homo sapiens; identical to SEQ ID NO: 124289
  chr14:24025214-24025319
  hyper

SEQ ID NO: 422486 - DNA, 36 bp, Homo sapiens; identical to SEQ ID NO: 237281
  chr14:24025555-24025591
  hyper

SEQ ID NO: 422487 - DNA, 574 bp, Homo sapiens; identical to SEQ ID NO: 237282
  chr14:24036495-24037069
  hyper

SEQ ID NO: 422488 - DNA, 47 bp, Homo sapiens; identical to SEQ ID NO: 237284
  chr14:24505639-24505686
  hyper

SEQ ID NO: 422489 - DNA, 257 bp, Homo sapiens; identical to SEQ ID NO: 237285
  chr14:24583740-24583997
  hyper

SEQ ID NO: 422490 - DNA, 223 bp, Homo sapiens; identical to SEQ ID NO: 237286
  chr14:24605551-24605774
  hyper

SEQ ID NO: 422491 - DNA, 103 bp, Homo sapiens; identical to SEQ ID NO: 237287
  chr14:24610778-24610881
  hyper

SEQ ID NO: 422492 - DNA, 100 bp, Homo sapiens; identical to SEQ ID NO: 237288
  chr14:24611143-24611243
  hyper

SEQ ID NO: 422493 - DNA, 72 bp, Homo sapiens; identical to SEQ ID NO: 237289
  chr14:24658235-24658307
  hyper

SEQ ID NO: 422494 - DNA, 120 bp, Homo sapiens; identical to SEQ ID NO: 203503
  chr14:24685267-24685387
  hyper

SEQ ID NO: 422495 - DNA, 248 bp, Homo sapiens; identical to SEQ ID NO: 237291
  chr14:24701155-24701403
  hyper

SEQ ID NO: 422496 - DNA, 114 bp, Homo sapiens; identical to SEQ ID NO: 237292
  chr14:24701640-24701754
  hyper

SEQ ID NO: 422497 - DNA, 225 bp, Homo sapiens; identical to SEQ ID NO: 237293
  chr14:24702080-24702305
  hyper

SEQ ID NO: 422498 - DNA, 143 bp, Homo sapiens; identical to SEQ ID NO: 237294
  chr14:24711905-24712048
  hyper

SEQ ID NO: 422499 - DNA, 33 bp, Homo sapiens; identical to SEQ ID NO: 237295
  chr14:24740923-24740956
  hyper

SEQ ID NO: 422500 - DNA, 42 bp, Homo sapiens; identical to SEQ ID NO: 237296
  chr14:24768607-24768649
  hyper

SEQ ID NO: 422501 - DNA, 91 bp, Homo sapiens; identical to SEQ ID NO: 237297
  chr14:24769098-24769189
  hyper

SEQ ID NO: 422502 - DNA, 194 bp, Homo sapiens; identical to SEQ ID NO: 290037
  chr14:24837550-24837744
  hyper

SEQ ID NO: 422503 - DNA, 82 bp, Homo sapiens; identical to SEQ ID NO: 290038
  chr14:24837824-24837906
  hyper

SEQ ID NO: 422504 - DNA, 313 bp, Homo sapiens; identical to SEQ ID NO: 290040
  chr14:25518669-25518982
  hyper

SEQ ID NO: 422505 - DNA, 71 bp, Homo sapiens; identical to SEQ ID NO: 290042
  chr14:26674237-26674308
  hyper

SEQ ID NO: 422506 - DNA, 280 bp, Homo sapiens; identical to SEQ ID NO: 290043
  chr14:27065772-27066052
  hyper

SEQ ID NO: 422507 - DNA, 78 bp, Homo sapiens; identical to SEQ ID NO: 290044
  chr14:27066140-27066218
  hyper

SEQ ID NO: 422508 - DNA, 62 bp, Homo sapiens; identical to SEQ ID NO: 290045
  chr14:27066342-27066404
  hyper

SEQ ID NO: 422509 - DNA, 157 bp, Homo sapiens; identical to SEQ ID NO: 203505
  chr14:27066405-27066562
  hyper

SEQ ID NO: 422510 - DNA, 60 bp, Homo sapiens; identical to SEQ ID NO: 203506
  chr14:27066704-27066764
  hyper

SEQ ID NO: 422511 - DNA, 71 bp, Homo sapiens; identical to SEQ ID NO: 290054
  chr14:29242908-29242979
  hyper

SEQ ID NO: 422512 - DNA, 247 bp, Homo sapiens; identical to SEQ ID NO: 203512
  chr14:30396133-30396380
  hyper

SEQ ID NO: 422513 - DNA, 412 bp, Homo sapiens; identical to SEQ ID NO: 290057
  chr14:30396508-30396920
  hyper

SEQ ID NO: 422514 - DNA, 42 bp, Homo sapiens; identical to SEQ ID NO: 290058
  chr14:30397398-30397440
  hyper

SEQ ID NO: 422515 - DNA, 183 bp, Homo sapiens; identical to SEQ ID NO: 203514
  chr14:31027986-31028169
  hyper

SEQ ID NO: 422516 - DNA, 362 bp, Homo sapiens; identical to SEQ ID NO: 237323
  chr14:31091325-31091687
  hyper

SEQ ID NO: 422517 - DNA, 118 bp, Homo sapiens; identical to SEQ ID NO: 237325
  chr14:31494513-31494631
  hyper

SEQ ID NO: 422518 - DNA, 255 bp, Homo sapiens; identical to SEQ ID NO: 237326
  chr14:31677205-31677460
  hyper

SEQ ID NO: 422519 - DNA, 196 bp, Homo sapiens; identical to SEQ ID NO: 237327
  chr14:31888988-31889184
  hyper

SEQ ID NO: 422520 - DNA, 169 bp, Homo sapiens; identical to SEQ ID NO: 237328
  chr14:31889898-31890067
  hyper

SEQ ID NO: 422521 - DNA, 136 bp, Homo sapiens; identical to SEQ ID NO: 237329
  chr14:32030565-32030701
  hyper

SEQ ID NO: 422522 - DNA, 125 bp, Homo sapiens; identical to SEQ ID NO: 237330
  chr14:32030902-32031027
  hyper

SEQ ID NO: 422523 - DNA, 324 bp, Homo sapiens; identical to SEQ ID NO: 237331
  chr14:32670301-32670625
  hyper

SEQ ID NO: 422524 - DNA, 106 bp, Homo sapiens; identical to SEQ ID NO: 290070
  chr14:32670851-32670957
  hyper

SEQ ID NO: 422525 - DNA, 298 bp, Homo sapiens; identical to SEQ ID NO: 124376
  chr14:32670996-32671294
  hyper

SEQ ID NO: 422526 - DNA, 128 bp, Homo sapiens; identical to SEQ ID NO: 203517
  chr14:33402917-33403045
  hyper

SEQ ID NO: 422527 - DNA, 345 bp, Homo sapiens; identical to SEQ ID NO: 290074
  chr14:33404418-33404763
  hyper

SEQ ID NO: 422528 - DNA, 524 bp, Homo sapiens; identical to SEQ ID NO: 290075
  chr14:33407779-33408303
  hyper

SEQ ID NO: 422529 - DNA, 222 bp, Homo sapiens; identical to SEQ ID NO: 290076
  chr14:33408401-33408623
  hyper

SEQ ID NO: 422530 - DNA, 60 bp, Homo sapiens; identical to SEQ ID NO: 290077
  chr14:33408827-33408887
  hyper

SEQ ID NO: 422531 - DNA, 204 bp, Homo sapiens; identical to SEQ ID NO: 290078
  chr14:33408971-33409175
  hyper

SEQ ID NO: 422532 - DNA, 259 bp, Homo sapiens; identical to SEQ ID NO: 203518
  chr14:34419302-34419561
  hyper

SEQ ID NO: 422533 - DNA, 184 bp, Homo sapiens; identical to SEQ ID NO: 203519
  chr14:34419820-34420004
  hyper

SEQ ID NO: 422534 - DNA, 149 bp, Homo sapiens; identical to SEQ ID NO: 203520
  chr14:34420371-34420520
  hyper

SEQ ID NO: 422535 - DNA, 459 bp, Homo sapiens; identical to SEQ ID NO: 290082
  chr14:34529232-34529691
  hyper

SEQ ID NO: 422536 - DNA, 198 bp, Homo sapiens; identical to SEQ ID NO: 237339
  chr14:34931784-34931982
  hyper

SEQ ID NO: 422537 - DNA, 156 bp, Homo sapiens; identical to SEQ ID NO: 203521
  chr14:35008736-35008892
  hyper

SEQ ID NO: 422538 - DNA, 346 bp, Homo sapiens; identical to SEQ ID NO: 237341
  chr14:35451779-35452125
  hyper

SEQ ID NO: 422539 - DNA, 116 bp, Homo sapiens; identical to SEQ ID NO: 290086
  chr14:35591558-35591674
  hyper

SEQ ID NO: 422540 - DNA, 151 bp, Homo sapiens; identical to SEQ ID NO: 124397
  chr14:35591704-35591855
  hyper

SEQ ID NO: 422541 - DNA, 103 bp, Homo sapiens; identical to SEQ ID NO: 237343
  chr14:35761313-35761416
  hyper

SEQ ID NO: 422542 - DNA, 44 bp, Homo sapiens; identical to SEQ ID NO: 237344
  chr14:35872861-35872905
  hyper

SEQ ID NO: 422543 - DNA, 52 bp, Homo sapiens; identical to SEQ ID NO: 237345
  chr14:35874140-35874192
  hyper

SEQ ID NO: 422544 - DNA, 122 bp, Homo sapiens; identical to SEQ ID NO: 203524
  chr14:36005014-36005136
  hyper

SEQ ID NO: 422545 - DNA, 152 bp, Homo sapiens; identical to SEQ ID NO: 237349
  chr14:36278470-36278622
  hyper

SEQ ID NO: 422546 - DNA, 191 bp, Homo sapiens; identical to SEQ ID NO: 237350
  chr14:36295494-36295685
  hyper

SEQ ID NO: 422547 - DNA, 51 bp, Homo sapiens; identical to SEQ ID NO: 290100
  chr14:36981788-36981839
  hyper

SEQ ID NO: 422548 - DNA, 93 bp, Homo sapiens; identical to SEQ ID NO: 290101
  chr14:36985939-36986032
  hyper

SEQ ID NO: 422549 - DNA, 275 bp, Homo sapiens; identical to SEQ ID NO: 290102
  chr14:36988153-36988428
  hyper

SEQ ID NO: 422550 - DNA, 91 bp, Homo sapiens; identical to SEQ ID NO: 290103
  chr14:36988460-36988551
  hyper

SEQ ID NO: 422551 - DNA, 225 bp, Homo sapiens; identical to SEQ ID NO: 290104
  chr14:36988644-36988869
  hyper

SEQ ID NO: 422552 - DNA, 99 bp, Homo sapiens; identical to SEQ ID NO: 290114
  chr14:37133569-37133668
  hyper

SEQ ID NO: 422553 - DNA, 590 bp, Homo sapiens; identical to SEQ ID NO: 290117
  chr14:37641120-37641710
  hyper

SEQ ID NO: 422554 - DNA, 200 bp, Homo sapiens; identical to SEQ ID NO: 203537
  chr14:37641762-37641962
  hyper

SEQ ID NO: 422555 - DNA, 118 bp, Homo sapiens; identical to SEQ ID NO: 203538
  chr14:37666992-37667110
  hyper

SEQ ID NO: 422556 - DNA, 100 bp, Homo sapiens; identical to SEQ ID NO: 203544
  chr14:38058220-38058320
  hyper

SEQ ID NO: 422557 - DNA, 230 bp, Homo sapiens; identical to SEQ ID NO: 203545
  chr14:38058546-38058776
  hyper

SEQ ID NO: 422558 - DNA, 316 bp, Homo sapiens; identical to SEQ ID NO: 399435
  chr14:38063549-38063865
  hyper

SEQ ID NO: 422559 - DNA, 137 bp, Homo sapiens; identical to SEQ ID NO: 399436
  chr14:38064858-38064995
  hyper

SEQ ID NO: 422560 - DNA, 643 bp, Homo sapiens; identical to SEQ ID NO: 203552
  chr14:38065025-38065668
  hyper

SEQ ID NO: 422561 - DNA, 32 bp, Homo sapiens
  chr14:38678486-38678518
  hyper
ggctgtgggctgcaggcaagcggtcgggtggg

SEQ ID NO: 422562 - DNA, 83 bp, Homo sapiens; identical to SEQ ID NO: 203559
  chr14:39583445-39583528
  hyper

SEQ ID NO: 422563 - DNA, 243 bp, Homo sapiens; identical to SEQ ID NO: 203560
  chr14:39735535-39735778
  hyper

SEQ ID NO: 422564 - DNA, 53 bp, Homo sapiens; identical to SEQ ID NO: 237393
  chr14:45366374-45366427
  hyper

SEQ ID NO: 422565 - DNA, 85 bp, Homo sapiens; identical to SEQ ID NO: 237395
  chr14:45553394-45553479
  hyper

SEQ ID NO: 422566 - DNA, 89 bp, Homo sapiens; identical to SEQ ID NO: 203564
  chr14:45603790-45603879
  hyper

SEQ ID NO: 422567 - DNA, 34 bp, Homo sapiens; identical to SEQ ID NO: 237397
  chr14:45722603-45722637
  hyper

SEQ ID NO: 422568 - DNA, 144 bp, Homo sapiens; identical to SEQ ID NO: 237399
  chr14:50053096-50053240
  hyper

SEQ ID NO: 422569 - DNA, 242 bp, Homo sapiens; identical to SEQ ID NO: 237400
  chr14:50234378-50234620
  hyper

SEQ ID NO: 422570 - DNA, 315 bp, Homo sapiens; identical to SEQ ID NO: 237401
  chr14:50319666-50319981
  hyper

SEQ ID NO: 422571 - DNA, 115 bp, Homo sapiens; identical to SEQ ID NO: 237402
  chr14:50329599-50329714
  hyper

SEQ ID NO: 422572 - DNA, 256 bp, Homo sapiens; identical to SEQ ID NO: 237403
  chr14:50359202-50359458
  hyper

SEQ ID NO: 422573 - DNA, 239 bp, Homo sapiens; identical to SEQ ID NO: 237406
  chr14:50698773-50699012
  hyper

SEQ ID NO: 422574 - DNA, 205 bp, Homo sapiens; identical to SEQ ID NO: 237407
  chr14:50778818-50779023
  hyper

SEQ ID NO: 422575 - DNA, 276 bp, Homo sapiens; identical to SEQ ID NO: 290160
  chr14:50999522-50999798
  hyper

SEQ ID NO: 422576 - DNA, 274 bp, Homo sapiens; identical to SEQ ID NO: 290166
  chr14:51411159-51411433
  hyper

SEQ ID NO: 422577 - DNA, 1663 bp, Homo sapiens; identical to SEQ ID NO: 290168
  chr14:52117843-52119506
  hyper

SEQ ID NO: 422578 - DNA, 39 bp, Homo sapiens; identical to SEQ ID NO: 290169
  chr14:52119545-52119584
  hyper

SEQ ID NO: 422579 - DNA, 402 bp, Homo sapiens; identical to SEQ ID NO: 203574
  chr14:52313655-52314057
  hyper

SEQ ID NO: 422580 - DNA, 44 bp, Homo sapiens; identical to SEQ ID NO: 203576
  chr14:52455679-52455723
  hyper

SEQ ID NO: 422581 - DNA, 75 bp, Homo sapiens; identical to SEQ ID NO: 203577
  chr14:52455753-52455828
  hyper

SEQ ID NO: 422582 - DNA, 146 bp, Homo sapiens; identical to SEQ ID NO: 290174
  chr14:52536504-52536650
  hyper

SEQ ID NO: 422583 - DNA, 210 bp, Homo sapiens; identical to SEQ ID NO: 203579
  chr14:52734271-52734481
  hyper

SEQ ID NO: 422584 - DNA, 136 bp, Homo sapiens; identical to SEQ ID NO: 290176
  chr14:52735582-52735718
  hyper

SEQ ID NO: 422585 - DNA, 88 bp, Homo sapiens; identical to SEQ ID NO: 290177
  chr14:52780743-52780831
  hyper

SEQ ID NO: 422586 - DNA, 40 bp, Homo sapiens; identical to SEQ ID NO: 203584
  chr14:53161604-53161644
  hyper

SEQ ID NO: 422587 - DNA, 82 bp, Homo sapiens; identical to SEQ ID NO: 237425
  chr14:53162609-53162691
  hyper

SEQ ID NO: 422588 - DNA, 202 bp, Homo sapiens; identical to SEQ ID NO: 203585
  chr14:53173877-53174079
  hyper

SEQ ID NO: 422589 - DNA, 169 bp, Homo sapiens; identical to SEQ ID NO: 203586
  chr14:53196918-53197087
  hyper

SEQ ID NO: 422590 - DNA, 544 bp, Homo sapiens; identical to SEQ ID NO: 237428
  chr14:53257754-53258298
  hyper

SEQ ID NO: 422591 - DNA, 40 bp, Homo sapiens; identical to SEQ ID NO: 237430
  chr14:53619297-53619337
  hyper

SEQ ID NO: 422592 - DNA, 71 bp, Homo sapiens; identical to SEQ ID NO: 237431
  chr14:53619544-53619615
  hyper

SEQ ID NO: 422593 - DNA, 470 bp, Homo sapiens
  chr14:54420072-54420542
  hyper
gaagctgcagcagtgcgttgctcgggatggcactacggaatggctcctaaaaggaatatttgaatataatgagactccaccgcagacaggctctgtttttcttccagcccctcggagtcacgtgagcgccgaggcccctcccgcggcaggcggcgaaagggcttgcgcgccctcccctcctccacagccccccgcccctcgcgggcccgcccctccaggcgaggccaacctccgcgcccgccgcccgagcctcagcggtccgggaggagctcccggcggcgctcggcagagccctcggccggtgccccgcggccgccgcgctcccagggctactggcgcagcgcacggagaacccggttctcggcgcggtgcgtcgtgctgggcccccgcgccgggccacctgaagccagaggatttggggcgcactgaagggactgcgtctcccagctcgaacccggcttaagtggggc

SEQ ID NO: 422594 - DNA, 42 bp, Homo sapiens
  chr14:54421530-54421572
  hyper
gacctccctttcctgaggctgttcccagttgctgctttgggt

SEQ ID NO: 422595 - DNA, 39 bp, Homo sapiens; identical to SEQ ID NO: 203590
  chr14:54422971-54423010
  hyper

SEQ ID NO: 422596 - DNA, 76 bp, Homo sapiens; identical to SEQ ID NO: 203591
  chr14:54430607-54430683
  hyper

SEQ ID NO: 422597 - DNA, 101 bp, Homo sapiens; identical to SEQ ID NO: 290196
  chr14:54686919-54687020
  hyper

SEQ ID NO: 422598 - DNA, 204 bp, Homo sapiens; identical to SEQ ID NO: 290197
  chr14:54687050-54687254
  hyper

SEQ ID NO: 422599 - DNA, 33 bp, Homo sapiens; identical to SEQ ID NO: 203593
  chr14:54687296-54687329
  hyper

SEQ ID NO: 422600 - DNA, 290 bp, Homo sapiens; identical to SEQ ID NO: 237436
  chr14:54908014-54908304
  hyper

SEQ ID NO: 422601 - DNA, 432 bp, Homo sapiens; identical to SEQ ID NO: 237437
  chr14:54976301-54976733
  hyper

SEQ ID NO: 422602 - DNA, 44 bp, Homo sapiens; identical to SEQ ID NO: 290201
  chr14:55032358-55032402
  hyper

SEQ ID NO: 422603 - DNA, 576 bp, Homo sapiens; identical to SEQ ID NO: 237438
  chr14:55367881-55368457
  hyper

SEQ ID NO: 422604 - DNA, 196 bp, Homo sapiens; identical to SEQ ID NO: 237439
  chr14:55493977-55494173
  hyper

SEQ ID NO: 422605 - DNA, 87 bp, Homo sapiens; identical to SEQ ID NO: 124608
  chr14:55518071-55518158
  hyper

SEQ ID NO: 422606 - DNA, 179 bp, Homo sapiens; identical to SEQ ID NO: 290208
  chr14:56047800-56047979
  hyper

SEQ ID NO: 422607 - DNA, 567 bp, Homo sapiens; identical to SEQ ID NO: 224694
  chr14:56585472-56586039
  hyper

SEQ ID NO: 422608 - DNA, 195 bp, Homo sapiens; identical to SEQ ID NO: 237442
  chr14:57046229-57046424
  hyper

SEQ ID NO: 422609 - DNA, 110 bp, Homo sapiens; identical to SEQ ID NO: 203600
  chr14:57272911-57273021
  hyper

SEQ ID NO: 422610 - DNA, 206 bp, Homo sapiens; identical to SEQ ID NO: 290214
  chr14:57277241-57277447
  hyper

SEQ ID NO: 422611 - DNA, 39 bp, Homo sapiens; identical to SEQ ID NO: 237453
  chr14:57281266-57281305
  hyper

SEQ ID NO: 422612 - DNA, 513 bp, Homo sapiens; identical to SEQ ID NO: 237455
  chr14:57735567-57736080
  hyper

SEQ ID NO: 422613 - DNA, 88 bp, Homo sapiens; identical to SEQ ID NO: 237456
  chr14:57858261-57858349
  hyper

SEQ ID NO: 422614 - DNA, 145 bp, Homo sapiens; identical to SEQ ID NO: 290219
  chr14:58331877-58332022
  hyper

SEQ ID NO: 422615 - DNA, 108 bp, Homo sapiens; identical to SEQ ID NO: 203603
  chr14:58332055-58332163
  hyper

SEQ ID NO: 422616 - DNA, 35 bp, Homo sapiens; identical to SEQ ID NO: 237458
  chr14:58619016-58619051
  hyper

SEQ ID NO: 422617 - DNA, 244 bp, Homo sapiens; identical to SEQ ID NO: 237459
  chr14:58711341-58711585
  hyper

SEQ ID NO: 422618 - DNA, 121 bp, Homo sapiens; identical to SEQ ID NO: 237460
  chr14:58766356-58766477
  hyper

SEQ ID NO: 422619 - DNA, 172 bp, Homo sapiens; identical to SEQ ID NO: 237461
  chr14:59655229-59655401
  hyper

SEQ ID NO: 422620 - DNA, 197 bp, Homo sapiens; identical to SEQ ID NO: 203607
  chr14:60558407-60558604
  hyper

SEQ ID NO: 422621 - DNA, 40 bp, Homo sapiens; identical to SEQ ID NO: 237471
  chr14:60972828-60972868
  hyper

SEQ ID NO: 422622 - DNA, 281 bp, Homo sapiens; identical to SEQ ID NO: 203612
  chr14:61108286-61108567
  hyper

SEQ ID NO: 422623 - DNA, 400 bp, Homo sapiens; identical to SEQ ID NO: 203616
  chr14:61119136-61119536
  hyper

SEQ ID NO: 422624 - DNA, 616 bp, Homo sapiens; identical to SEQ ID NO: 203617
  chr14:61119639-61120255
  hyper

SEQ ID NO: 422625 - DNA, 192 bp, Homo sapiens; identical to SEQ ID NO: 237485
  chr14:61120573-61120765
  hyper

SEQ ID NO: 422626 - DNA, 98 bp, Homo sapiens; identical to SEQ ID NO: 237486
  chr14:61122759-61122857
  hyper

SEQ ID NO: 422627 - DNA, 616 bp, Homo sapiens; identical to SEQ ID NO: 237490
  chr14:61201376-61201992
  hyper

SEQ ID NO: 422628 - DNA, 90 bp, Homo sapiens; identical to SEQ ID NO: 237491
  chr14:61447492-61447582
  hyper

SEQ ID NO: 422629 - DNA, 124 bp, Homo sapiens; identical to SEQ ID NO: 203622
  chr14:61788057-61788181
  hyper

SEQ ID NO: 422630 - DNA, 304 bp, Homo sapiens; identical to SEQ ID NO: 203623
  chr14:61788418-61788722
  hyper

SEQ ID NO: 422631 - DNA, 252 bp, Homo sapiens; identical to SEQ ID NO: 203624
  chr14:61789205-61789457
  hyper

SEQ ID NO: 422632 - DNA, 55 bp, Homo sapiens
  chr14:62106065-62106120
  hyper
ggttctcctgtgtctttcatcctgtttagtgcaatactgtaaaccttgaataaca

SEQ ID NO: 422633 - DNA, 188 bp, Homo sapiens; identical to SEQ ID NO: 237499
  chr14:62229157-62229345
  hyper

SEQ ID NO: 422634 - DNA, 31 bp, Homo sapiens; identical to SEQ ID NO: 203629
  chr14:63511825-63511856
  hyper

SEQ ID NO: 422635 - DNA, 533 bp, Homo sapiens; identical to SEQ ID NO: 237504
  chr14:64108074-64108607
  hyper

SEQ ID NO: 422636 - DNA, 267 bp, Homo sapiens; identical to SEQ ID NO: 237505
  chr14:64109073-64109340
  hyper

SEQ ID NO: 422637 - DNA, 35 bp, Homo sapiens; identical to SEQ ID NO: 224711
  chr14:64182960-64182995
  hyper

SEQ ID NO: 422638 - DNA, 221 bp, Homo sapiens; identical to SEQ ID NO: 290271
  chr14:64760852-64761073
  hyper

SEQ ID NO: 422639 - DNA, 504 bp, Homo sapiens; identical to SEQ ID NO: 290272
  chr14:64761254-64761758
  hyper

SEQ ID NO: 422640 - DNA, 213 bp, Homo sapiens; identical to SEQ ID NO: 203632
  chr14:64931838-64932051
  hyper

SEQ ID NO: 422641 - DNA, 43 bp, Homo sapiens; identical to SEQ ID NO: 203633
  chr14:65005557-65005600
  hyper

SEQ ID NO: 422642 - DNA, 97 bp, Homo sapiens; identical to SEQ ID NO: 290276
  chr14:65006319-65006416
  hyper

SEQ ID NO: 422643 - DNA, 138 bp, Homo sapiens; identical to SEQ ID NO: 237510
  chr14:65008388-65008526
  hyper

SEQ ID NO: 422644 - DNA, 117 bp, Homo sapiens; identical to SEQ ID NO: 399474
  chr14:65171561-65171678
  hyper

SEQ ID NO: 422645 - DNA, 183 bp, Homo sapiens; identical to SEQ ID NO: 203641
  chr14:65171770-65171953
  hyper

SEQ ID NO: 422646 - DNA, 271 bp, Homo sapiens; identical to SEQ ID NO: 237514
  chr14:65346619-65346890
  hyper

SEQ ID NO: 422647 - DNA, 347 bp, Homo sapiens; identical to SEQ ID NO: 237515
  chr14:65381011-65381358
  hyper

SEQ ID NO: 422648 - DNA, 65 bp, Homo sapiens; identical to SEQ ID NO: 203643
  chr14:65438693-65438758
  hyper

SEQ ID NO: 422649 - DNA, 113 bp, Homo sapiens; identical to SEQ ID NO: 237517
  chr14:65565399-65565512
  hyper

SEQ ID NO: 422650 - DNA, 34 bp, Homo sapiens; identical to SEQ ID NO: 237518
  chr14:65569329-65569363
  hyper

SEQ ID NO: 422651 - DNA, 181 bp, Homo sapiens; identical to SEQ ID NO: 237519
  chr14:65569737-65569918
  hyper

SEQ ID NO: 422652 - DNA, 288 bp, Homo sapiens; identical to SEQ ID NO: 237521
  chr14:66974387-66974675
  hyper

SEQ ID NO: 422653 - DNA, 74 bp, Homo sapiens; identical to SEQ ID NO: 237522
  chr14:66974895-66974969
  hyper

SEQ ID NO: 422654 - DNA, 429 bp, Homo sapiens; identical to SEQ ID NO: 237523
  chr14:66975358-66975787
  hyper

SEQ ID NO: 422655 - DNA, 193 bp, Homo sapiens; identical to SEQ ID NO: 237524
  chr14:67708297-67708490
  hyper

SEQ ID NO: 422656 - DNA, 251 bp, Homo sapiens; identical to SEQ ID NO: 203646
  chr14:67825995-67826246
  hyper

SEQ ID NO: 422657 - DNA, 236 bp, Homo sapiens; identical to SEQ ID NO: 237526
  chr14:67826866-67827102
  hyper

SEQ ID NO: 422658 - DNA, 32 bp, Homo sapiens; identical to SEQ ID NO: 237528
  chr14:67982132-67982164
  hyper

SEQ ID NO: 422659 - DNA, 37 bp, Homo sapiens; identical to SEQ ID NO: 237529
  chr14:68067076-68067113
  hyper

SEQ ID NO: 422660 - DNA, 435 bp, Homo sapiens; identical to SEQ ID NO: 237530
  chr14:68086297-68086732
  hyper

SEQ ID NO: 422661 - DNA, 126 bp, Homo sapiens; identical to SEQ ID NO: 203647
  chr14:68141650-68141776
  hyper

SEQ ID NO: 422662 - DNA, 302 bp, Homo sapiens; identical to SEQ ID NO: 237532
  chr14:68162290-68162592
  hyper

SEQ ID NO: 422663 - DNA, 293 bp, Homo sapiens; identical to SEQ ID NO: 237533
  chr14:68283048-68283341
  hyper

SEQ ID NO: 422664 - DNA, 56 bp, Homo sapiens; identical to SEQ ID NO: 237535
  chr14:69260259-69260315
  hyper

SEQ ID NO: 422665 - DNA, 458 bp, Homo sapiens; identical to SEQ ID NO: 237537
  chr14:69262251-69262709
  hyper

SEQ ID NO: 422666 - DNA, 565 bp, Homo sapiens; identical to SEQ ID NO: 203650
  chr14:69444743-69445308
  hyper

SEQ ID NO: 422667 - DNA, 299 bp, Homo sapiens; identical to SEQ ID NO: 203651
  chr14:69445727-69446026
  hyper

SEQ ID NO: 422668 - DNA, 561 bp, Homo sapiens; identical to SEQ ID NO: 203652
  chr14:69446238-69446799
  hyper

SEQ ID NO: 422669 - DNA, 104 bp, Homo sapiens; identical to SEQ ID NO: 203653
  chr14:69618203-69618307
  hyper

SEQ ID NO: 422670 - DNA, 312 bp, Homo sapiens; identical to SEQ ID NO: 237540
  chr14:69620502-69620814
  hyper

SEQ ID NO: 422671 - DNA, 245 bp, Homo sapiens; identical to SEQ ID NO: 237541
  chr14:69658126-69658371
  hyper

SEQ ID NO: 422672 - DNA, 95 bp, Homo sapiens; identical to SEQ ID NO: 203654
  chr14:69658738-69658833
  hyper

SEQ ID NO: 422673 - DNA, 48 bp, Homo sapiens; identical to SEQ ID NO: 237543
  chr14:69728075-69728123
  hyper

SEQ ID NO: 422674 - DNA, 362 bp, Homo sapiens; identical to SEQ ID NO: 203655
  chr14:69864916-69865278
  hyper

SEQ ID NO: 422675 - DNA, 143 bp, Homo sapiens; identical to SEQ ID NO: 290320
  chr14:69950636-69950779
  hyper

SEQ ID NO: 422676 - DNA, 74 bp, Homo sapiens; identical to SEQ ID NO: 290321
  chr14:69951034-69951108
  hyper

SEQ ID NO: 422677 - DNA, 518 bp, Homo sapiens; identical to SEQ ID NO: 290322
  chr14:69951336-69951854
  hyper

SEQ ID NO: 422678 - DNA, 65 bp, Homo sapiens; identical to SEQ ID NO: 124847
  chr14:70039199-70039264
  hyper

SEQ ID NO: 422679 - DNA, 353 bp, Homo sapiens; identical to SEQ ID NO: 224719
  chr14:70041211-70041564
  hyper

SEQ ID NO: 422680 - DNA, 365 bp, Homo sapiens; identical to SEQ ID NO: 203656
  chr14:70193443-70193808
  hyper

SEQ ID NO: 422681 - DNA, 81 bp, Homo sapiens; identical to SEQ ID NO: 237550
  chr14:70233585-70233666
  hyper

SEQ ID NO: 422682 - DNA, 116 bp, Homo sapiens; identical to SEQ ID NO: 290327
  chr14:70346883-70346999
  hyper

SEQ ID NO: 422683 - DNA, 526 bp, Homo sapiens; identical to SEQ ID NO: 290328
  chr14:70826032-70826558
  hyper

SEQ ID NO: 422684 - DNA, 136 bp, Homo sapiens; identical to SEQ ID NO: 237556
  chr14:71067681-71067817
  hyper

SEQ ID NO: 422685 - DNA, 60 bp, Homo sapiens; identical to SEQ ID NO: 224724
  chr14:71108798-71108858
  hyper

SEQ ID NO: 422686 - DNA, 129 bp, Homo sapiens; identical to SEQ ID NO: 237557
  chr14:71786797-71786926
  hyper

SEQ ID NO: 422687 - DNA, 47 bp, Homo sapiens; identical to SEQ ID NO: 237558
  chr14:71787538-71787585
  hyper

SEQ ID NO: 422688 - DNA, 61 bp, Homo sapiens
  chr14:73359629-73359690
  hyper
ggcttaacagttccactgactggaaggaaggaaggaaggaaggaaggaaggaaggaaggaa

SEQ ID NO: 422689 - DNA, 107 bp, Homo sapiens; identical to SEQ ID NO: 237563
  chr14:73361733-73361840
  hyper

SEQ ID NO: 422690 - DNA, 474 bp, Homo sapiens; identical to SEQ ID NO: 290341
  chr14:73393144-73393618
  hyper

SEQ ID NO: 422691 - DNA, 213 bp, Homo sapiens; identical to SEQ ID NO: 237565
  chr14:73706332-73706545
  hyper

SEQ ID NO: 422692 - DNA, 42 bp, Homo sapiens; identical to SEQ ID NO: 237566
  chr14:73925198-73925240
  hyper

SEQ ID NO: 422693 - DNA, 56 bp, Homo sapiens
  chr14:73957467-73957523
  hyper
atttttaaattgctctctgagtgtagattccttgtttgtttggcaagggttcttgc

SEQ ID NO: 422694 - DNA, 154 bp, Homo sapiens; identical to SEQ ID NO: 203662
  chr14:74111425-74111579
  hyper

SEQ ID NO: 422695 - DNA, 521 bp, Homo sapiens; identical to SEQ ID NO: 290348
  chr14:74180377-74180898
  hyper

SEQ ID NO: 422696 - DNA, 44 bp, Homo sapiens; identical to SEQ ID NO: 203664
  chr14:74225613-74225657
  hyper

SEQ ID NO: 422697 - DNA, 156 bp, Homo sapiens; identical to SEQ ID NO: 237572
  chr14:74226413-74226569
  hyper

SEQ ID NO: 422698 - DNA, 116 bp, Homo sapiens; identical to SEQ ID NO: 203666
  chr14:74252875-74252991
  hyper

SEQ ID NO: 422699 - DNA, 136 bp, Homo sapiens; identical to SEQ ID NO: 9841
  chr14:74253328-74253464
  hyper

SEQ ID NO: 422700 - DNA, 390 bp, Homo sapiens; identical to SEQ ID NO: 237577
  chr14:74318399-74318789
  hyper

SEQ ID NO: 422701 - DNA, 224 bp, Homo sapiens; identical to SEQ ID NO: 237578
  chr14:74486146-74486370
  hyper

SEQ ID NO: 422702 - DNA, 69 bp, Homo sapiens; identical to SEQ ID NO: 237579
  chr14:74551628-74551697
  hyper

SEQ ID NO: 422703 - DNA, 58 bp, Homo sapiens; identical to SEQ ID NO: 203670
  chr14:74709107-74709165
  hyper

SEQ ID NO: 422704 - DNA, 222 bp, Homo sapiens; identical to SEQ ID NO: 237584
  chr14:74724285-74724507
  hyper

SEQ ID NO: 422705 - DNA, 44 bp, Homo sapiens; identical to SEQ ID NO: 237586
  chr14:74959041-74959085
  hyper

SEQ ID NO: 422706 - DNA, 259 bp, Homo sapiens; identical to SEQ ID NO: 290364
  chr14:74960116-74960375
  hyper

SEQ ID NO: 422707 - DNA, 144 bp, Homo sapiens; identical to SEQ ID NO: 203671
  chr14:75179349-75179493
  hyper

SEQ ID NO: 422708 - DNA, 100 bp, Homo sapiens; identical to SEQ ID NO: 203672
  chr14:75179845-75179945
  hyper

SEQ ID NO: 422709 - DNA, 106 bp, Homo sapiens; identical to SEQ ID NO: 237591
  chr14:75229919-75230025
  hyper

SEQ ID NO: 422710 - DNA, 145 bp, Homo sapiens; identical to SEQ ID NO: 203673
  chr14:75230400-75230545
  hyper

SEQ ID NO: 422711 - DNA, 163 bp, Homo sapiens; identical to SEQ ID NO: 237593
  chr14:75348311-75348474
  hyper

SEQ ID NO: 422712 - DNA, 124 bp, Homo sapiens; identical to SEQ ID NO: 237594
  chr14:75349046-75349170
  hyper

SEQ ID NO: 422713 - DNA, 734 bp, Homo sapiens; identical to SEQ ID NO: 237595
  chr14:75469162-75469896
  hyper

SEQ ID NO: 422714 - DNA, 198 bp, Homo sapiens; identical to SEQ ID NO: 237597
  chr14:75530723-75530921
  hyper

SEQ ID NO: 422715 - DNA, 369 bp, Homo sapiens; identical to SEQ ID NO: 237598
  chr14:75535863-75536232
  hyper

SEQ ID NO: 422716 - DNA, 242 bp, Homo sapiens; identical to SEQ ID NO: 237599
  chr14:75593511-75593753
  hyper

SEQ ID NO: 422717 - DNA, 276 bp, Homo sapiens; identical to SEQ ID NO: 237600
  chr14:75725634-75725910
  hyper

SEQ ID NO: 422718 - DNA, 196 bp, Homo sapiens; identical to SEQ ID NO: 203675
  chr14:75743668-75743864
  hyper

SEQ ID NO: 422719 - DNA, 165 bp, Homo sapiens; identical to SEQ ID NO: 203676
  chr14:75743897-75744062
  hyper

SEQ ID NO: 422720 - DNA, 355 bp, Homo sapiens; identical to SEQ ID NO: 237601
  chr14:75745344-75745699
  hyper

SEQ ID NO: 422721 - DNA, 51 bp, Homo sapiens; identical to SEQ ID NO: 237602
  chr14:75761835-75761886
  hyper

SEQ ID NO: 422722 - DNA, 208 bp, Homo sapiens; identical to SEQ ID NO: 237604
  chr14:76044577-76044785
  hyper

SEQ ID NO: 422723 - DNA, 72 bp, Homo sapiens; identical to SEQ ID NO: 203678
  chr14:76605465-76605537
  hyper

SEQ ID NO: 422724 - DNA, 68 bp, Homo sapiens; identical to SEQ ID NO: 203679
  chr14:77227531-77227599
  hyper

SEQ ID NO: 422725 - DNA, 482 bp, Homo sapiens; identical to SEQ ID NO: 290390
  chr14:77422360-77422842
  hyper

SEQ ID NO: 422726 - DNA, 295 bp, Homo sapiens; identical to SEQ ID NO: 203682
  chr14:77493464-77493759
  hyper

SEQ ID NO: 422727 - DNA, 282 bp, Homo sapiens; identical to SEQ ID NO: 237617
  chr14:77499644-77499926
  hyper

SEQ ID NO: 422728 - DNA, 201 bp, Homo sapiens; identical to SEQ ID NO: 203684
  chr14:77564278-77564479
  hyper

SEQ ID NO: 422729 - DNA, 568 bp, Homo sapiens; identical to SEQ ID NO: 290397
  chr14:77605688-77606256
  hyper

SEQ ID NO: 422730 - DNA, 177 bp, Homo sapiens; identical to SEQ ID NO: 203687
  chr14:77606580-77606757
  hyper

SEQ ID NO: 422731 - DNA, 565 bp, Homo sapiens; identical to SEQ ID NO: 237622
  chr14:77647941-77648506
  hyper

SEQ ID NO: 422732 - DNA, 138 bp, Homo sapiens; identical to SEQ ID NO: 290400
  chr14:77736729-77736867
  hyper

SEQ ID NO: 422733 - DNA, 97 bp, Homo sapiens; identical to SEQ ID NO: 290401
  chr14:77736883-77736980
  hyper

SEQ ID NO: 422734 - DNA, 52 bp, Homo sapiens; identical to SEQ ID NO: 237624
  chr14:77787314-77787366
  hyper

SEQ ID NO: 422735 - DNA, 33 bp, Homo sapiens; identical to SEQ ID NO: 237625
  chr14:77787594-77787627
  hyper

SEQ ID NO: 422736 - DNA, 184 bp, Homo sapiens; identical to SEQ ID NO: 237626
  chr14:77843606-77843790
  hyper

SEQ ID NO: 422737 - DNA, 55 bp, Homo sapiens; identical to SEQ ID NO: 203688
  chr14:78266694-78266749
  hyper

SEQ ID NO: 422738 - DNA, 254 bp, Homo sapiens; identical to SEQ ID NO: 203689
  chr14:78432197-78432451
  hyper

SEQ ID NO: 422739 - DNA, 233 bp, Homo sapiens; identical to SEQ ID NO: 290409
  chr14:79745242-79745475
  hyper

SEQ ID NO: 422740 - DNA, 223 bp, Homo sapiens; identical to SEQ ID NO: 290410
  chr14:79745557-79745780
  hyper

SEQ ID NO: 422741 - DNA, 332 bp, Homo sapiens; identical to SEQ ID NO: 237630
  chr14:81421283-81421615
  hyper

SEQ ID NO: 422742 - DNA, 41 bp, Homo sapiens; identical to SEQ ID NO: 237631
  chr14:81687740-81687781
  hyper

SEQ ID NO: 422743 - DNA, 139 bp, Homo sapiens; identical to SEQ ID NO: 203692
  chr14:81901893-81902032
  hyper

SEQ ID NO: 422744 - DNA, 52 bp, Homo sapiens; identical to SEQ ID NO: 399535
  chr14:81902236-81902288
  hyper

SEQ ID NO: 422745 - DNA, 53 bp, Homo sapiens; identical to SEQ ID NO: 203695
  chr14:82000012-82000065
  hyper

SEQ ID NO: 422746 - DNA, 148 bp, Homo sapiens; identical to SEQ ID NO: 237634
  chr14:82000298-82000446
  hyper

SEQ ID NO: 422747 - DNA, 102 bp, Homo sapiens; identical to SEQ ID NO: 203697
  chr14:85998186-85998288
  hyper

SEQ ID NO: 422748 - DNA, 91 bp, Homo sapiens; identical to SEQ ID NO: 290420
  chr14:85999426-85999517
  hyper

SEQ ID NO: 422749 - DNA, 65 bp, Homo sapiens; identical to SEQ ID NO: 290425
  chr14:88792792-88792857
  hyper

SEQ ID NO: 422750 - DNA, 154 bp, Homo sapiens; identical to SEQ ID NO: 237640
  chr14:88851824-88851978
  hyper

SEQ ID NO: 422751 - DNA, 782 bp, Homo sapiens; identical to SEQ ID NO: 203701
  chr14:89020631-89021413
  hyper

SEQ ID NO: 422752 - DNA, 352 bp, Homo sapiens; identical to SEQ ID NO: 237642
  chr14:89029588-89029940
  hyper

SEQ ID NO: 422753 - DNA, 376 bp, Homo sapiens; identical to SEQ ID NO: 237643
  chr14:89258194-89258570
  hyper

SEQ ID NO: 422754 - DNA, 725 bp, Homo sapiens; identical to SEQ ID NO: 290430
  chr14:89290490-89291215
  hyper

SEQ ID NO: 422755 - DNA, 144 bp, Homo sapiens; identical to SEQ ID NO: 290432
  chr14:89494054-89494198
  hyper

SEQ ID NO: 422756 - DNA, 238 bp, Homo sapiens; identical to SEQ ID NO: 203703
  chr14:89506861-89507099
  hyper

SEQ ID NO: 422757 - DNA, 182 bp, Homo sapiens; identical to SEQ ID NO: 224749
  chr14:90167708-90167890
  hyper

SEQ ID NO: 422758 - DNA, 360 bp, Homo sapiens; identical to SEQ ID NO: 290438
  chr14:90420659-90421019
  hyper

SEQ ID NO: 422759 - DNA, 200 bp, Homo sapiens; identical to SEQ ID NO: 9902
  chr14:90421129-90421329
  hyper

SEQ ID NO: 422760 - DNA, 727 bp, Homo sapiens; identical to SEQ ID NO: 203709
  chr14:90422068-90422795
  hyper

SEQ ID NO: 422761 - DNA, 188 bp, Homo sapiens
  chr14:90527324-90527512
  hyper
ggtttgctggagagccttgctactgttctgcatgaggtgggggatgccttctgcgcggaccccgcgtccaggcaaaactctggaacgcactaggcagccaagcccggggggaagagatggaacgctccaaggtcaaggtctcctggccgcggagcccttccagcccccagtgtttggcctcctctccg

SEQ ID NO: 422762 - DNA, 96 bp, Homo sapiens; identical to SEQ ID NO: 237657
  chr14:90529393-90529489
  hyper

SEQ ID NO: 422763 - DNA, 146 bp, Homo sapiens; identical to SEQ ID NO: 237658
  chr14:90722847-90722993
  hyper

SEQ ID NO: 422764 - DNA, 255 bp, Homo sapiens; identical to SEQ ID NO: 237659
  chr14:90723211-90723466
  hyper

SEQ ID NO: 422765 - DNA, 241 bp, Homo sapiens; identical to SEQ ID NO: 237660
  chr14:90798342-90798583
  hyper

SEQ ID NO: 422766 - DNA, 90 bp, Homo sapiens; identical to SEQ ID NO: 237663
  chr14:91224517-91224607
  hyper

SEQ ID NO: 422767 - DNA, 223 bp, Homo sapiens; identical to SEQ ID NO: 237664
  chr14:91224896-91225119
  hyper

SEQ ID NO: 422768 - DNA, 76 bp, Homo sapiens; identical to SEQ ID NO: 237665
  chr14:91526953-91527029
  hyper

SEQ ID NO: 422769 - DNA, 49 bp, Homo sapiens; identical to SEQ ID NO: 125086
  chr14:91975897-91975946
  hyper

SEQ ID NO: 422770 - DNA, 479 bp, Homo sapiens; identical to SEQ ID NO: 290461
  chr14:91976436-91976915
  hyper

SEQ ID NO: 422771 - DNA, 225 bp, Homo sapiens; identical to SEQ ID NO: 290463
  chr14:92413707-92413932
  hyper

SEQ ID NO: 422772 - DNA, 101 bp, Homo sapiens; identical to SEQ ID NO: 237675
  chr14:92573061-92573162
  hyper

SEQ ID NO: 422773 - DNA, 41 bp, Homo sapiens; identical to SEQ ID NO: 290465
  chr14:92588220-92588261
  hyper

SEQ ID NO: 422774 - DNA, 147 bp, Homo sapiens; identical to SEQ ID NO: 203725
  chr14:93582647-93582794
  hyper

SEQ ID NO: 422775 - DNA, 32 bp, Homo sapiens; identical to SEQ ID NO: 237683
  chr14:93799560-93799592
  hyper

SEQ ID NO: 422776 - DNA, 192 bp, Homo sapiens; identical to SEQ ID NO: 290470
  chr14:93896833-93897025
  hyper

SEQ ID NO: 422777 - DNA, 47 bp, Homo sapiens; identical to SEQ ID NO: 203727
  chr14:93897078-93897125
  hyper

SEQ ID NO: 422778 - DNA, 97 bp, Homo sapiens; identical to SEQ ID NO: 290472
  chr14:94226411-94226508
  hyper

SEQ ID NO: 422779 - DNA, 144 bp, Homo sapiens; identical to SEQ ID NO: 290473
  chr14:94254150-94254294
  hyper

SEQ ID NO: 422780 - DNA, 260 bp, Homo sapiens; identical to SEQ ID NO: 237688
  chr14:94492880-94493140
  hyper

SEQ ID NO: 422781 - DNA, 260 bp, Homo sapiens; identical to SEQ ID NO: 203729
  chr14:94547568-94547828
  hyper

SEQ ID NO: 422782 - DNA, 100 bp, Homo sapiens; identical to SEQ ID NO: 237690
  chr14:94595900-94596000
  hyper

SEQ ID NO: 422783 - DNA, 71 bp, Homo sapiens; identical to SEQ ID NO: 203730
  chr14:94640376-94640447
  hyper

SEQ ID NO: 422784 - DNA, 144 bp, Homo sapiens; identical to SEQ ID NO: 290480
  chr14:95233561-95233705
  hyper

SEQ ID NO: 422785 - DNA, 260 bp, Homo sapiens; identical to SEQ ID NO: 290481
  chr14:95233765-95234025
  hyper

SEQ ID NO: 422786 - DNA, 69 bp, Homo sapiens; identical to SEQ ID NO: 290482
  chr14:95234055-95234124
  hyper

SEQ ID NO: 422787 - DNA, 46 bp, Homo sapiens; identical to SEQ ID NO: 290486
  chr14:95237576-95237622
  hyper

SEQ ID NO: 422788 - DNA, 85 bp, Homo sapiens; identical to SEQ ID NO: 290487
  chr14:95237782-95237867
  hyper

SEQ ID NO: 422789 - DNA, 302 bp, Homo sapiens; identical to SEQ ID NO: 290488
  chr14:95237922-95238224
  hyper

SEQ ID NO: 422790 - DNA, 38 bp, Homo sapiens; identical to SEQ ID NO: 290490
  chr14:95240354-95240392
  hyper

SEQ ID NO: 422791 - DNA, 62 bp, Homo sapiens; identical to SEQ ID NO: 290491
  chr14:95240422-95240484
  hyper

SEQ ID NO: 422792 - DNA, 253 bp, Homo sapiens; identical to SEQ ID NO: 237698
  chr14:95241783-95242036
  hyper

SEQ ID NO: 422793 - DNA, 299 bp, Homo sapiens; identical to SEQ ID NO: 237699
  chr14:95623685-95623984
  hyper

SEQ ID NO: 422794 - DNA, 36 bp, Homo sapiens; identical to SEQ ID NO: 203734
  chr14:95864478-95864514
  hyper

SEQ ID NO: 422795 - DNA, 274 bp, Homo sapiens; identical to SEQ ID NO: 290496
  chr14:95932315-95932589
  hyper

SEQ ID NO: 422796 - DNA, 116 bp, Homo sapiens; identical to SEQ ID NO: 237700
  chr14:96001254-96001370
  hyper

SEQ ID NO: 422797 - DNA, 295 bp, Homo sapiens; identical to SEQ ID NO: 203736
  chr14:96152751-96153046
  hyper

SEQ ID NO: 422798 - DNA, 40 bp, Homo sapiens; identical to SEQ ID NO: 203737
  chr14:96342210-96342250
  hyper

SEQ ID NO: 422799 - DNA, 130 bp, Homo sapiens; identical to SEQ ID NO: 237704
  chr14:96670922-96671052
  hyper

SEQ ID NO: 422800 - DNA, 56 bp, Homo sapiens; identical to SEQ ID NO: 203740
  chr14:96678043-96678099
  hyper

SEQ ID NO: 422801 - DNA, 152 bp, Homo sapiens; identical to SEQ ID NO: 237706
  chr14:96968600-96968752
  hyper

SEQ ID NO: 422802 - DNA, 114 bp, Homo sapiens; identical to SEQ ID NO: 237707
  chr14:97050713-97050827
  hyper

SEQ ID NO: 422803 - DNA, 63 bp, Homo sapiens; identical to SEQ ID NO: 290507
  chr14:97059129-97059192
  hyper

SEQ ID NO: 422804 - DNA, 158 bp, Homo sapiens; identical to SEQ ID NO: 290508
  chr14:97059193-97059351
  hyper

SEQ ID NO: 422805 - DNA, 79 bp, Homo sapiens; identical to SEQ ID NO: 237709
  chr14:97207757-97207836
  hyper

SEQ ID NO: 422806 - DNA, 182 bp, Homo sapiens; identical to SEQ ID NO: 237710
  chr14:97263999-97264181
  hyper

SEQ ID NO: 422807 - DNA, 57 bp, Homo sapiens; identical to SEQ ID NO: 203741
  chr14:97685959-97686016
  hyper

SEQ ID NO: 422808 - DNA, 138 bp, Homo sapiens; identical to SEQ ID NO: 290515
  chr14:99736842-99736980
  hyper

SEQ ID NO: 422809 - DNA, 116 bp, Homo sapiens
  chr14:99737062-99737178
  hyper
gccaacttttccccacttcccggctccccctccccctccgctcccccagccccctccccctcctctccaaaccccgccaccagcgccgccgccgccacacacgccgctcggagggg

SEQ ID NO: 422810 - DNA, 323 bp, Homo sapiens; identical to SEQ ID NO: 290518
  chr14:99738533-99738856
  hyper

SEQ ID NO: 422811 - DNA, 180 bp, Homo sapiens; identical to SEQ ID NO: 290519
  chr14:99739438-99739618
  hyper

SEQ ID NO: 422812 - DNA, 334 bp, Homo sapiens
  chr14:99740879-99741213
  hyper
gaggagcacttcctcattggccccgcgctgccccgacggcgggaagagggacgcgcgggcgggcggacgcagggccggacacgccgccgcccgccggcgcgctccacctcgcggcagccggggagaggctgctctgcccctgcccagccttgagccggccccttcgccctcctcctcccccttttcctccgcatcttcctccccctcctcctccttctccccctccttcccctcctcctcctcctcctcttctcccgagaggcggccgggcgcaggcagggagcgatcccagctgccactccagtctcctctttttccctctgcccgtctggca

SEQ ID NO: 422813 - DNA, 80 bp, Homo sapiens; identical to SEQ ID NO: 51669
  chr14:99741277-99741357
  hyper

SEQ ID NO: 422814 - DNA, 128 bp, Homo sapiens; identical to SEQ ID NO: 237717
  chr14:99947369-99947497
  hyper

SEQ ID NO: 422815 - DNA, 1691 bp, Homo sapiens; identical to SEQ ID NO: 51671
  chr14:100069898-100071589
  hyper

SEQ ID NO: 422816 - DNA, 1115 bp, Homo sapiens; identical to SEQ ID NO: 290525
  chr14:100149732-100150847
  hyper

SEQ ID NO: 422817 - DNA, 162 bp, Homo sapiens; identical to SEQ ID NO: 290528
  chr14:100437167-100437329
  hyper

SEQ ID NO: 422818 - DNA, 169 bp, Homo sapiens; identical to SEQ ID NO: 290531
  chr14:100625299-100625468
  hyper

SEQ ID NO: 422819 - DNA, 248 bp, Homo sapiens; identical to SEQ ID NO: 290532
  chr14:100625926-100626174
  hyper

SEQ ID NO: 422820 - DNA, 64 bp, Homo sapiens; identical to SEQ ID NO: 125211
  chr14:100626295-100626359
  hyper

SEQ ID NO: 422821 - DNA, 224 bp, Homo sapiens; identical to SEQ ID NO: 237727
  chr14:100688018-100688242
  hyper

SEQ ID NO: 422822 - DNA, 402 bp, Homo sapiens; identical to SEQ ID NO: 290536
  chr14:100771908-100772310
  hyper

SEQ ID NO: 422823 - DNA, 370 bp, Homo sapiens; identical to SEQ ID NO: 203757
  chr14:100773262-100773632
  hyper

SEQ ID NO: 422824 - DNA, 176 bp, Homo sapiens; identical to SEQ ID NO: 399567
  chr14:101034236-101034412
  hyper

SEQ ID NO: 422825 - DNA, 76 bp, Homo sapiens; identical to SEQ ID NO: 290539
  chr14:101034471-101034547
  hyper

SEQ ID NO: 422826 - DNA, 130 bp, Homo sapiens; identical to SEQ ID NO: 237730
  chr14:101053020-101053150
  hyper

SEQ ID NO: 422827 - DNA, 78 bp, Homo sapiens; identical to SEQ ID NO: 203758
  chr14:101192402-101192480
  hyper

SEQ ID NO: 422828 - DNA, 178 bp, Homo sapiens; identical to SEQ ID NO: 290542
  chr14:101192969-101193147
  hyper

SEQ ID NO: 422829 - DNA, 52 bp, Homo sapiens; identical to SEQ ID NO: 290544
  chr14:101923286-101923338
  hyper

SEQ ID NO: 422830 - DNA, 213 bp, Homo sapiens; identical to SEQ ID NO: 203760
  chr14:101924579-101924792
  hyper

SEQ ID NO: 422831 - DNA, 101 bp, Homo sapiens; identical to SEQ ID NO: 290546
  chr14:102026077-102026178
  hyper

SEQ ID NO: 422832 - DNA, 131 bp, Homo sapiens; identical to SEQ ID NO: 203761
  chr14:102027041-102027172
  hyper

SEQ ID NO: 422833 - DNA, 75 bp, Homo sapiens; identical to SEQ ID NO: 51702
  chr14:102027654-102027729
  hyper

SEQ ID NO: 422834 - DNA, 228 bp, Homo sapiens; identical to SEQ ID NO: 290549
  chr14:102029161-102029389
  hyper

SEQ ID NO: 422835 - DNA, 230 bp, Homo sapiens; identical to SEQ ID NO: 290550
  chr14:102030325-102030555
  hyper

SEQ ID NO: 422836 - DNA, 107 bp, Homo sapiens; identical to SEQ ID NO: 203762
  chr14:102030909-102031016
  hyper

SEQ ID NO: 422837 - DNA, 179 bp, Homo sapiens; identical to SEQ ID NO: 290552
  chr14:102031271-102031450
  hyper

SEQ ID NO: 422838 - DNA, 83 bp, Homo sapiens; identical to SEQ ID NO: 237742
  chr14:102276019-102276102
  hyper

SEQ ID NO: 422839 - DNA, 141 bp, Homo sapiens; identical to SEQ ID NO: 237743
  chr14:102605815-102605956
  hyper

SEQ ID NO: 422840 - DNA, 32 bp, Homo sapiens; identical to SEQ ID NO: 203763
  chr14:102606251-102606283
  hyper

SEQ ID NO: 422841 - DNA, 241 bp, Homo sapiens; identical to SEQ ID NO: 237745
  chr14:102771431-102771672
  hyper

SEQ ID NO: 422842 - DNA, 60 bp, Homo sapiens; identical to SEQ ID NO: 237746
  chr14:102829077-102829137
  hyper

SEQ ID NO: 422843 - DNA, 159 bp, Homo sapiens; identical to SEQ ID NO: 237747
  chr14:102829774-102829933
  hyper

SEQ ID NO: 422844 - DNA, 231 bp, Homo sapiens; identical to SEQ ID NO: 237751
  chr14:103057881-103058112
  hyper

SEQ ID NO: 422845 - DNA, 173 bp, Homo sapiens; identical to SEQ ID NO: 203767
  chr14:103242390-103242563
  hyper

SEQ ID NO: 422846 - DNA, 55 bp, Homo sapiens; identical to SEQ ID NO: 384547
  chr14:103430379-103430434
  hyper

SEQ ID NO: 422847 - DNA, 124 bp, Homo sapiens; identical to SEQ ID NO: 290568
  chr14:103430509-103430633
  hyper

SEQ ID NO: 422848 - DNA, 1541 bp, Homo sapiens; identical to SEQ ID NO: 203770
  chr14:103523058-103524599
  hyper

SEQ ID NO: 422849 - DNA, 77 bp, Homo sapiens; identical to SEQ ID NO: 203771
  chr14:103541957-103542034
  hyper

SEQ ID NO: 422850 - DNA, 272 bp, Homo sapiens; identical to SEQ ID NO: 237756
  chr14:103557877-103558149
  hyper

SEQ ID NO: 422851 - DNA, 38 bp, Homo sapiens; identical to SEQ ID NO: 237757
  chr14:103571012-103571050
  hyper

SEQ ID NO: 422852 - DNA, 439 bp, Homo sapiens; identical to SEQ ID NO: 237758
  chr14:103571080-103571519
  hyper

SEQ ID NO: 422853 - DNA, 109 bp, Homo sapiens; identical to SEQ ID NO: 237759
  chr14:103590101-103590210
  hyper

SEQ ID NO: 422854 - DNA, 219 bp, Homo sapiens; identical to SEQ ID NO: 290575
  chr14:103593755-103593974
  hyper

SEQ ID NO: 422855 - DNA, 289 bp, Homo sapiens; identical to SEQ ID NO: 290576
  chr14:103594004-103594293
  hyper

SEQ ID NO: 422856 - DNA, 43 bp, Homo sapiens
  chr14:103745189-103745232
  hyper
tgtttttctttctcactggagctggttccagattagatctggt

SEQ ID NO: 422857 - DNA, 52 bp, Homo sapiens; identical to SEQ ID NO: 237766
  chr14:103800152-103800204
  hyper

SEQ ID NO: 422858 - DNA, 111 bp, Homo sapiens; identical to SEQ ID NO: 237767
  chr14:103851531-103851642
  hyper

SEQ ID NO: 422859 - DNA, 361 bp, Homo sapiens; identical to SEQ ID NO: 237769
  chr14:104029513-104029874
  hyper

SEQ ID NO: 422860 - DNA, 119 bp, Homo sapiens; identical to SEQ ID NO: 290588
  chr14:104094604-104094723
  hyper

SEQ ID NO: 422861 - DNA, 174 bp, Homo sapiens; identical to SEQ ID NO: 237771
  chr14:104181915-104182089
  hyper

SEQ ID NO: 422862 - DNA, 125 bp, Homo sapiens; identical to SEQ ID NO: 290592
  chr14:104601612-104601737
  hyper

SEQ ID NO: 422863 - DNA, 200 bp, Homo sapiens; identical to SEQ ID NO: 203783
  chr14:105156381-105156581
  hyper

SEQ ID NO: 422864 - DNA, 37 bp, Homo sapiens; identical to SEQ ID NO: 203785
  chr14:105190455-105190492
  hyper

SEQ ID NO: 422865 - DNA, 337 bp, Homo sapiens; identical to SEQ ID NO: 290602
  chr14:105195466-105195803
  hyper

SEQ ID NO: 422866 - DNA, 317 bp, Homo sapiens; identical to SEQ ID NO: 290604
  chr14:105269022-105269339
  hyper

SEQ ID NO: 422867 - DNA, 199 bp, Homo sapiens; identical to SEQ ID NO: 237782
  chr14:105332329-105332528
  hyper

SEQ ID NO: 422868 - DNA, 230 bp, Homo sapiens; identical to SEQ ID NO: 237785
  chr14:105487900-105488130
  hyper

SEQ ID NO: 422869 - DNA, 97 bp, Homo sapiens; identical to SEQ ID NO: 290613
  chr14:105511596-105511693
  hyper

SEQ ID NO: 422870 - DNA, 44 bp, Homo sapiens; identical to SEQ ID NO: 203790
  chr14:105511922-105511966
  hyper

SEQ ID NO: 422871 - DNA, 220 bp, Homo sapiens; identical to SEQ ID NO: 237788
  chr14:105559994-105560214
  hyper

SEQ ID NO: 422872 - DNA, 155 bp, Homo sapiens; identical to SEQ ID NO: 290617
  chr14:105647609-105647764
  hyper

SEQ ID NO: 422873 - DNA, 164 bp, Homo sapiens; identical to SEQ ID NO: 290618
  chr14:105662773-105662937
  hyper

SEQ ID NO: 422874 - DNA, 180 bp, Homo sapiens; identical to SEQ ID NO: 203794
  chr14:105781805-105781985
  hyper

SEQ ID NO: 422875 - DNA, 202 bp, Homo sapiens; identical to SEQ ID NO: 224811
  chr15:20478123-20478325
  hyper

SEQ ID NO: 422876 - DNA, 760 bp, Homo sapiens; identical to SEQ ID NO: 290622
  chr15:22892004-22892764
  hyper

SEQ ID NO: 422877 - DNA, 677 bp, Homo sapiens; identical to SEQ ID NO: 203796
  chr15:22893131-22893808
  hyper

SEQ ID NO: 422878 - DNA, 325 bp, Homo sapiens; identical to SEQ ID NO: 237794
  chr15:25683895-25684220
  hyper

SEQ ID NO: 422879 - DNA, 127 bp, Homo sapiens; identical to SEQ ID NO: 290627
  chr15:27016782-27016909
  hyper

SEQ ID NO: 422880 - DNA, 39 bp, Homo sapiens; identical to SEQ ID NO: 290628
  chr15:27016944-27016983
  hyper

SEQ ID NO: 422881 - DNA, 192 bp, Homo sapiens; identical to SEQ ID NO: 203797
  chr15:27017019-27017211
  hyper

SEQ ID NO: 422882 - DNA, 77 bp, Homo sapiens; identical to SEQ ID NO: 290630
  chr15:27017828-27017905
  hyper

SEQ ID NO: 422883 - DNA, 135 bp, Homo sapiens; identical to SEQ ID NO: 290631
  chr15:27018876-27019011
  hyper

SEQ ID NO: 422884 - DNA, 67 bp, Homo sapiens; identical to SEQ ID NO: 290632
  chr15:27216000-27216067
  hyper

SEQ ID NO: 422885 - DNA, 303 bp, Homo sapiens; identical to SEQ ID NO: 290635
  chr15:28340905-28341208
  hyper

SEQ ID NO: 422886 - DNA, 49 bp, Homo sapiens; identical to SEQ ID NO: 237807
  chr15:28344695-28344744
  hyper

SEQ ID NO: 422887 - DNA, 119 bp, Homo sapiens; identical to SEQ ID NO: 125411
  chr15:29033933-29034052
  hyper

SEQ ID NO: 422888 - DNA, 45 bp, Homo sapiens; identical to SEQ ID NO: 203802
  chr15:29107356-29107401
  hyper

SEQ ID NO: 422889 - DNA, 39 bp, Homo sapiens; identical to SEQ ID NO: 290642
  chr15:29395819-29395858
  hyper

SEQ ID NO: 422890 - DNA, 65 bp, Homo sapiens; identical to SEQ ID NO: 290643
  chr15:29396084-29396149
  hyper

SEQ ID NO: 422891 - DNA, 230 bp, Homo sapiens
  chr15:29863289-29863519
  hyper
gccgtgcgctgggccccagctggggcgggagcgggagccgggacccgggagccgggagaggggcggggaaggcgcaggtgcggtcctggcgtcccagcctccgcgctcacgcctcgcgccctggcggctgcaggtctgcggaaggagagcgggggcggcagcgcatcaagggcaacggcatcagcctccgcggcggagccctgggtcggctgcgcggaggggcccgatag

SEQ ID NO: 422892 - DNA, 58 bp, Homo sapiens; identical to SEQ ID NO: 203807
  chr15:29864126-29864184
  hyper

SEQ ID NO: 422893 - DNA, 45 bp, Homo sapiens; identical to SEQ ID NO: 203808
  chr15:29966982-29967027
  hyper

SEQ ID NO: 422894 - DNA, 31 bp, Homo sapiens; identical to SEQ ID NO: 290656
  chr15:30260516-30260547
  hyper

SEQ ID NO: 422895 - DNA, 131 bp, Homo sapiens; identical to SEQ ID NO: 203813
  chr15:31507691-31507822
  hyper

SEQ ID NO: 422896 - DNA, 161 bp, Homo sapiens; identical to SEQ ID NO: 224818
  chr15:31508793-31508954
  hyper

SEQ ID NO: 422897 - DNA, 44 bp, Homo sapiens; identical to SEQ ID NO: 203816
  chr15:31621685-31621729
  hyper

SEQ ID NO: 422898 - DNA, 210 bp, Homo sapiens; identical to SEQ ID NO: 51852
  chr15:33603879-33604089
  hyper

SEQ ID NO: 422899 - DNA, 257 bp, Homo sapiens; identical to SEQ ID NO: 237830
  chr15:34394021-34394278
  hyper

SEQ ID NO: 422900 - DNA, 203 bp, Homo sapiens; identical to SEQ ID NO: 237831
  chr15:34635316-34635519
  hyper

SEQ ID NO: 422901 - DNA, 100 bp, Homo sapiens; identical to SEQ ID NO: 290673
  chr15:34807388-34807488
  hyper

SEQ ID NO: 422902 - DNA, 103 bp, Homo sapiens; identical to SEQ ID NO: 203826
  chr15:35087492-35087595
  hyper

SEQ ID NO: 422903 - DNA, 137 bp, Homo sapiens; identical to SEQ ID NO: 237838
  chr15:35279816-35279953
  hyper

SEQ ID NO: 422904 - DNA, 65 bp, Homo sapiens; identical to SEQ ID NO: 203827
  chr15:35280590-35280655
  hyper

SEQ ID NO: 422905 - DNA, 42 bp, Homo sapiens; identical to SEQ ID NO: 237840
  chr15:35280893-35280935
  hyper

SEQ ID NO: 422906 - DNA, 398 bp, Homo sapiens; identical to SEQ ID NO: 237842
  chr15:37175818-37176216
  hyper

SEQ ID NO: 422907 - DNA, 272 bp, Homo sapiens; identical to SEQ ID NO: 237843
  chr15:37179523-37179795
  hyper

SEQ ID NO: 422908 - DNA, 508 bp, Homo sapiens; identical to SEQ ID NO: 237845
  chr15:37391107-37391615
  hyper

SEQ ID NO: 422909 - DNA, 679 bp, Homo sapiens; identical to SEQ ID NO: 224830
  chr15:37393563-37394242
  hyper

SEQ ID NO: 422910 - DNA, 120 bp, Homo sapiens; identical to SEQ ID NO: 203831
  chr15:37394737-37394857
  hyper

SEQ ID NO: 422911 - DNA, 135 bp, Homo sapiens; identical to SEQ ID NO: 203833
  chr15:38365202-38365337
  hyper

SEQ ID NO: 422912 - DNA, 561 bp, Homo sapiens; identical to SEQ ID NO: 290693
  chr15:38543129-38543690
  hyper

SEQ ID NO: 422913 - DNA, 63 bp, Homo sapiens; identical to SEQ ID NO: 237851
  chr15:38746261-38746324
  hyper

SEQ ID NO: 422914 - DNA, 45 bp, Homo sapiens; identical to SEQ ID NO: 224834
  chr15:39958298-39958343
  hyper

SEQ ID NO: 422915 - DNA, 149 bp, Homo sapiens; identical to SEQ ID NO: 237853
  chr15:40074512-40074661
  hyper

SEQ ID NO: 422916 - DNA, 344 bp, Homo sapiens; identical to SEQ ID NO: 203835
  chr15:40074971-40075315
  hyper

SEQ ID NO: 422917 - DNA, 66 bp, Homo sapiens; identical to SEQ ID NO: 224836
  chr15:40094250-40094316
  hyper

SEQ ID NO: 422918 - DNA, 357 bp, Homo sapiens; identical to SEQ ID NO: 290701
  chr15:40212244-40212601
  hyper

SEQ ID NO: 422919 - DNA, 470 bp, Homo sapiens; identical to SEQ ID NO: 290702
  chr15:40212954-40213424
  hyper

SEQ ID NO: 422920 - DNA, 148 bp, Homo sapiens; identical to SEQ ID NO: 237856
  chr15:40225953-40226101
  hyper

SEQ ID NO: 422921 - DNA, 171 bp, Homo sapiens; identical to SEQ ID NO: 237857
  chr15:40401049-40401220
  hyper

SEQ ID NO: 422922 - DNA, 36 bp, Homo sapiens; identical to SEQ ID NO: 203836
  chr15:40559555-40559591
  hyper

SEQ ID NO: 422923 - DNA, 50 bp, Homo sapiens; identical to SEQ ID NO: 125537
  chr15:40651001-40651051
  hyper

SEQ ID NO: 422924 - DNA, 54 bp, Homo sapiens; identical to SEQ ID NO: 237860
  chr15:40698353-40698407
  hyper

SEQ ID NO: 422925 - DNA, 162 bp, Homo sapiens; identical to SEQ ID NO: 237862
  chr15:40861435-40861597
  hyper

SEQ ID NO: 422926 - DNA, 41 bp, Homo sapiens; identical to SEQ ID NO: 237863
  chr15:40886162-40886203
  hyper

SEQ ID NO: 422927 - DNA, 56 bp, Homo sapiens; identical to SEQ ID NO: 203838
  chr15:41046993-41047049
  hyper

SEQ ID NO: 422928 - DNA, 312 bp, Homo sapiens; identical to SEQ ID NO: 237864
  chr15:41055853-41056165
  hyper

SEQ ID NO: 422929 - DNA, 156 bp, Homo sapiens; identical to SEQ ID NO: 224840
  chr15:41136285-41136441
  hyper

SEQ ID NO: 422930 - DNA, 329 bp, Homo sapiens; identical to SEQ ID NO: 237865
  chr15:41245392-41245721
  hyper

SEQ ID NO: 422931 - DNA, 472 bp, Homo sapiens; identical to SEQ ID NO: 237866
  chr15:41522911-41523383
  hyper

SEQ ID NO: 422932 - DNA, 181 bp, Homo sapiens; identical to SEQ ID NO: 203842
  chr15:41576046-41576227
  hyper

SEQ ID NO: 422933 - DNA, 85 bp, Homo sapiens; identical to SEQ ID NO: 237868
  chr15:41576677-41576762
  hyper

SEQ ID NO: 422934 - DNA, 467 bp, Homo sapiens; identical to SEQ ID NO: 237869
  chr15:41624809-41625276
  hyper

SEQ ID NO: 422935 - DNA, 34 bp, Homo sapiens; identical to SEQ ID NO: 237872
  chr15:41851950-41851984
  hyper

SEQ ID NO: 422936 - DNA, 200 bp, Homo sapiens; identical to SEQ ID NO: 224842
  chr15:42112223-42112423
  hyper

SEQ ID NO: 422937 - DNA, 160 bp, Homo sapiens; identical to SEQ ID NO: 203847
  chr15:42119937-42120097
  hyper

SEQ ID NO: 422938 - DNA, 71 bp, Homo sapiens; identical to SEQ ID NO: 237877
  chr15:42349322-42349393
  hyper

SEQ ID NO: 422939 - DNA, 200 bp, Homo sapiens; identical to SEQ ID NO: 237878
  chr15:42565687-42565887
  hyper

SEQ ID NO: 422940 - DNA, 97 bp, Homo sapiens; identical to SEQ ID NO: 203849
  chr15:42841085-42841182
  hyper

SEQ ID NO: 422941 - DNA, 125 bp, Homo sapiens; identical to SEQ ID NO: 237882
  chr15:43213001-43213126
  hyper

SEQ ID NO: 422942 - DNA, 88 bp, Homo sapiens; identical to SEQ ID NO: 203850
  chr15:43394990-43395078
  hyper

SEQ ID NO: 422943 - DNA, 101 bp, Homo sapiens; identical to SEQ ID NO: 203851
  chr15:43397760-43397861
  hyper

SEQ ID NO: 422944 - DNA, 95 bp, Homo sapiens; identical to SEQ ID NO: 237886
  chr15:43425869-43425964
  hyper

SEQ ID NO: 422945 - DNA, 58 bp, Homo sapiens; identical to SEQ ID NO: 290745
  chr15:43622047-43622105
  hyper

SEQ ID NO: 422946 - DNA, 297 bp, Homo sapiens; identical to SEQ ID NO: 290746
  chr15:43622140-43622437
  hyper

SEQ ID NO: 422947 - DNA, 68 bp, Homo sapiens; identical to SEQ ID NO: 237889
  chr15:43785355-43785423
  hyper

SEQ ID NO: 422948 - DNA, 152 bp, Homo sapiens; identical to SEQ ID NO: 203852
  chr15:43802598-43802750
  hyper

SEQ ID NO: 422949 - DNA, 157 bp, Homo sapiens; identical to SEQ ID NO: 224843
  chr15:44038552-44038709
  hyper

SEQ ID NO: 422950 - DNA, 49 bp, Homo sapiens; identical to SEQ ID NO: 203854
  chr15:44068769-44068818
  hyper

SEQ ID NO: 422951 - DNA, 380 bp, Homo sapiens; identical to SEQ ID NO: 237894
  chr15:44119067-44119447
  hyper

SEQ ID NO: 422952 - DNA, 794 bp, Homo sapiens; identical to SEQ ID NO: 203855
  chr15:44486896-44487690
  hyper

SEQ ID NO: 422953 - DNA, 57 bp, Homo sapiens; identical to SEQ ID NO: 237896
  chr15:44580503-44580560
  hyper

SEQ ID NO: 422954 - DNA, 76 bp, Homo sapiens; identical to SEQ ID NO: 237897
  chr15:44828876-44828952
  hyper

SEQ ID NO: 422955 - DNA, 79 bp, Homo sapiens; identical to SEQ ID NO: 237898
  chr15:45003638-45003717
  hyper

SEQ ID NO: 422956 - DNA, 488 bp, Homo sapiens; identical to SEQ ID NO: 290765
  chr15:45408666-45409154
  hyper

SEQ ID NO: 422957 - DNA, 161 bp, Homo sapiens; identical to SEQ ID NO: 290766
  chr15:45409211-45409372
  hyper

SEQ ID NO: 422958 - DNA, 92 bp, Homo sapiens; identical to SEQ ID NO: 203856
  chr15:45459390-45459482
  hyper

SEQ ID NO: 422959 - DNA, 47 bp, Homo sapiens; identical to SEQ ID NO: 237908
  chr15:45480415-45480462
  hyper

SEQ ID NO: 422960 - DNA, 165 bp, Homo sapiens; identical to SEQ ID NO: 237912
  chr15:45815255-45815420
  hyper

SEQ ID NO: 422961 - DNA, 31 bp, Homo sapiens; identical to SEQ ID NO: 237913
  chr15:45879207-45879238
  hyper

SEQ ID NO: 422962 - DNA, 247 bp, Homo sapiens; identical to SEQ ID NO: 290780
  chr15:47476468-47476715
  hyper

SEQ ID NO: 422963 - DNA, 190 bp, Homo sapiens; identical to SEQ ID NO: 237918
  chr15:48483066-48483256
  hyper

SEQ ID NO: 422964 - DNA, 50 bp, Homo sapiens; identical to SEQ ID NO: 290790
  chr15:48483906-48483956
  hyper

SEQ ID NO: 422965 - DNA, 156 bp, Homo sapiens; identical to SEQ ID NO: 237920
  chr15:48623408-48623564
  hyper

SEQ ID NO: 422966 - DNA, 54 bp, Homo sapiens; identical to SEQ ID NO: 237921
  chr15:49102693-49102747
  hyper

SEQ ID NO: 422967 - DNA, 207 bp, Homo sapiens; identical to SEQ ID NO: 237922
  chr15:49170052-49170259
  hyper

SEQ ID NO: 422968 - DNA, 137 bp, Homo sapiens; identical to SEQ ID NO: 237923
  chr15:49255441-49255578
  hyper

SEQ ID NO: 422969 - DNA, 135 bp, Homo sapiens; identical to SEQ ID NO: 237924
  chr15:49255861-49255996
  hyper

SEQ ID NO: 422970 - DNA, 227 bp, Homo sapiens; identical to SEQ ID NO: 237925
  chr15:49447914-49448141
  hyper

SEQ ID NO: 422971 - DNA, 34 bp, Homo sapiens; identical to SEQ ID NO: 203873
  chr15:49448552-49448586
  hyper

SEQ ID NO: 422972 - DNA, 99 bp, Homo sapiens; identical to SEQ ID NO: 237927
  chr15:50716741-50716840
  hyper

SEQ ID NO: 422973 - DNA, 45 bp, Homo sapiens; identical to SEQ ID NO: 237928
  chr15:50978873-50978918
  hyper

SEQ ID NO: 422974 - DNA, 79 bp, Homo sapiens; identical to SEQ ID NO: 203874
  chr15:51058036-51058115
  hyper

SEQ ID NO: 422975 - DNA, 62 bp, Homo sapiens; identical to SEQ ID NO: 237930
  chr15:51200800-51200862
  hyper

SEQ ID NO: 422976 - DNA, 56 bp, Homo sapiens; identical to SEQ ID NO: 290805
  chr15:51559324-51559380
  hyper

SEQ ID NO: 422977 - DNA, 290 bp, Homo sapiens; identical to SEQ ID NO: 290806
  chr15:51559797-51560087
  hyper

SEQ ID NO: 422978 - DNA, 115 bp, Homo sapiens; identical to SEQ ID NO: 290807
  chr15:51633851-51633966
  hyper

SEQ ID NO: 422979 - DNA, 153 bp, Homo sapiens; identical to SEQ ID NO: 290808
  chr15:51634175-51634328
  hyper

SEQ ID NO: 422980 - DNA, 237 bp, Homo sapiens; identical to SEQ ID NO: 237934
  chr15:51915459-51915696
  hyper

SEQ ID NO: 422981 - DNA, 126 bp, Homo sapiens; identical to SEQ ID NO: 203875
  chr15:51973520-51973646
  hyper

SEQ ID NO: 422982 - DNA, 47 bp, Homo sapiens; identical to SEQ ID NO: 290811
  chr15:51974094-51974141
  hyper

SEQ ID NO: 422983 - DNA, 264 bp, Homo sapiens; identical to SEQ ID NO: 203876
  chr15:52028982-52029246
  hyper

SEQ ID NO: 422984 - DNA, 42 bp, Homo sapiens; identical to SEQ ID NO: 237937
  chr15:52029519-52029561
  hyper

SEQ ID NO: 422985 - DNA, 193 bp, Homo sapiens; identical to SEQ ID NO: 237938
  chr15:52121766-52121959
  hyper

SEQ ID NO: 422986 - DNA, 88 bp, Homo sapiens; identical to SEQ ID NO: 237939
  chr15:52122375-52122463
  hyper

SEQ ID NO: 422987 - DNA, 605 bp, Homo sapiens; identical to SEQ ID NO: 290818
  chr15:52820415-52821020
  hyper

SEQ ID NO: 422988 - DNA, 279 bp, Homo sapiens; identical to SEQ ID NO: 203879
  chr15:52821287-52821566
  hyper

SEQ ID NO: 422989 - DNA, 206 bp, Homo sapiens; identical to SEQ ID NO: 290824
  chr15:53090066-53090272
  hyper

SEQ ID NO: 422990 - DNA, 109 bp, Homo sapiens; identical to SEQ ID NO: 52046
  chr15:53090305-53090414
  hyper

SEQ ID NO: 422991 - DNA, 126 bp, Homo sapiens; identical to SEQ ID NO: 203883
  chr15:53091078-53091204
  hyper

SEQ ID NO: 422992 - DNA, 486 bp, Homo sapiens; identical to SEQ ID NO: 237955
  chr15:55489070-55489556
  hyper

SEQ ID NO: 422993 - DNA, 89 bp, Homo sapiens; identical to SEQ ID NO: 203885
  chr15:55699900-55699989
  hyper

SEQ ID NO: 422994 - DNA, 54 bp, Homo sapiens; identical to SEQ ID NO: 237956
  chr15:55700704-55700758
  hyper

SEQ ID NO: 422995 - DNA, 79 bp, Homo sapiens; identical to SEQ ID NO: 290832
  chr15:56035510-56035589
  hyper

SEQ ID NO: 422996 - DNA, 82 bp, Homo sapiens; identical to SEQ ID NO: 125767
  chr15:56035677-56035759
  hyper

SEQ ID NO: 422997 - DNA, 504 bp, Homo sapiens; identical to SEQ ID NO: 203886
  chr15:56285864-56286368
  hyper

SEQ ID NO: 422998 - DNA, 404 bp, Homo sapiens; identical to SEQ ID NO: 237959
  chr15:56657423-56657827
  hyper

SEQ ID NO: 422999 - DNA, 161 bp, Homo sapiens; identical to SEQ ID NO: 237960
  chr15:56757166-56757327
  hyper

SEQ ID NO: 423000 - DNA, 340 bp, Homo sapiens; identical to SEQ ID NO: 224859
  chr15:57210212-57210552
  hyper

SEQ ID NO: 423001 - DNA, 151 bp, Homo sapiens; identical to SEQ ID NO: 203890
  chr15:57883948-57884099
  hyper

SEQ ID NO: 423002 - DNA, 32 bp, Homo sapiens; identical to SEQ ID NO: 237964
  chr15:57998720-57998752
  hyper

SEQ ID NO: 423003 - DNA, 165 bp, Homo sapiens; identical to SEQ ID NO: 237967
  chr15:59062963-59063128
  hyper

SEQ ID NO: 423004 - DNA, 255 bp, Homo sapiens; identical to SEQ ID NO: 237968
  chr15:59225884-59226139
  hyper

SEQ ID NO: 423005 - DNA, 39 bp, Homo sapiens; identical to SEQ ID NO: 203892
  chr15:59396925-59396964
  hyper

SEQ ID NO: 423006 - DNA, 453 bp, Homo sapiens; identical to SEQ ID NO: 203893
  chr15:59397170-59397623
  hyper

SEQ ID NO: 423007 - DNA, 132 bp, Homo sapiens; identical to SEQ ID NO: 203894
  chr15:59663973-59664105
  hyper

SEQ ID NO: 423008 - DNA, 512 bp, Homo sapiens; identical to SEQ ID NO: 290847
  chr15:59664435-59664947
  hyper

SEQ ID NO: 423009 - DNA, 83 bp, Homo sapiens; identical to SEQ ID NO: 237972
  chr15:59665217-59665300
  hyper

SEQ ID NO: 423010 - DNA, 78 bp, Homo sapiens; identical to SEQ ID NO: 290851
  chr15:60286352-60286430
  hyper

SEQ ID NO: 423011 - DNA, 44 bp, Homo sapiens; identical to SEQ ID NO: 290852
  chr15:60286510-60286554
  hyper

SEQ ID NO: 423012 - DNA, 78 bp, Homo sapiens; identical to SEQ ID NO: 290853
  chr15:60288334-60288412
  hyper

SEQ ID NO: 423013 - DNA, 342 bp, Homo sapiens; identical to SEQ ID NO: 290857
  chr15:60291859-60292201
  hyper

SEQ ID NO: 423014 - DNA, 231 bp, Homo sapiens; identical to SEQ ID NO: 290858
  chr15:60292249-60292480
  hyper

SEQ ID NO: 423015 - DNA, 78 bp, Homo sapiens; identical to SEQ ID NO: 203901
  chr15:60690265-60690343
  hyper

SEQ ID NO: 423016 - DNA, 219 bp, Homo sapiens; identical to SEQ ID NO: 237980
  chr15:60771301-60771520
  hyper

SEQ ID NO: 423017 - DNA, 97 bp, Homo sapiens; identical to SEQ ID NO: 203912
  chr15:62456139-62456236
  hyper

SEQ ID NO: 423018 - DNA, 204 bp, Homo sapiens; identical to SEQ ID NO: 389283
  chr15:62456395-62456599
  hyper

SEQ ID NO: 423019 - DNA, 208 bp, Homo sapiens; identical to SEQ ID NO: 237988
  chr15:62683364-62683572
  hyper

SEQ ID NO: 423020 - DNA, 211 bp, Homo sapiens; identical to SEQ ID NO: 203916
  chr15:63130456-63130667
  hyper

SEQ ID NO: 423021 - DNA, 129 bp, Homo sapiens; identical to SEQ ID NO: 290879
  chr15:63334348-63334477
  hyper

SEQ ID NO: 423022 - DNA, 201 bp, Homo sapiens; identical to SEQ ID NO: 290880
  chr15:63334720-63334921
  hyper

SEQ ID NO: 423023 - DNA, 202 bp, Homo sapiens; identical to SEQ ID NO: 203918
  chr15:63448918-63449120
  hyper

SEQ ID NO: 423024 - DNA, 37 bp, Homo sapiens; identical to SEQ ID NO: 237992
  chr15:63449921-63449958
  hyper

SEQ ID NO: 423025 - DNA, 98 bp, Homo sapiens; identical to SEQ ID NO: 237997
  chr15:64126646-64126744
  hyper

SEQ ID NO: 423026 - DNA, 336 bp, Homo sapiens; identical to SEQ ID NO: 238000
  chr15:64455663-64455999
  hyper

SEQ ID NO: 423027 - DNA, 414 bp, Homo sapiens; identical to SEQ ID NO: 238001
  chr15:64648210-64648624
  hyper

SEQ ID NO: 423028 - DNA, 83 bp, Homo sapiens; identical to SEQ ID NO: 238002
  chr15:64752567-64752650
  hyper

SEQ ID NO: 423029 - DNA, 56 bp, Homo sapiens; identical to SEQ ID NO: 203922
  chr15:65067772-65067828
  hyper

SEQ ID NO: 423030 - DNA, 256 bp, Homo sapiens; identical to SEQ ID NO: 238004
  chr15:65117948-65118204
  hyper

SEQ ID NO: 423031 - DNA, 419 bp, Homo sapiens; identical to SEQ ID NO: 290896
  chr15:65203768-65204187
  hyper

SEQ ID NO: 423032 - DNA, 40 bp, Homo sapiens; identical to SEQ ID NO: 290897
  chr15:65204235-65204275
  hyper

SEQ ID NO: 423033 - DNA, 79 bp, Homo sapiens; identical to SEQ ID NO: 203923
  chr15:65281790-65281869
  hyper

SEQ ID NO: 423034 - DNA, 43 bp, Homo sapiens; identical to SEQ ID NO: 238008
  chr15:65282476-65282519
  hyper

SEQ ID NO: 423035 - DNA, 110 bp, Homo sapiens; identical to SEQ ID NO: 203924
  chr15:65321808-65321918
  hyper

SEQ ID NO: 423036 - DNA, 38 bp, Homo sapiens; identical to SEQ ID NO: 238010
  chr15:65426171-65426209
  hyper

SEQ ID NO: 423037 - DNA, 39 bp, Homo sapiens; identical to SEQ ID NO: 290902
  chr15:65477569-65477608
  hyper

SEQ ID NO: 423038 - DNA, 188 bp, Homo sapiens; identical to SEQ ID NO: 238012
  chr15:65578946-65579134
  hyper

SEQ ID NO: 423039 - DNA, 89 bp, Homo sapiens; identical to SEQ ID NO: 290904
  chr15:65647775-65647864
  hyper

SEQ ID NO: 423040 - DNA, 241 bp, Homo sapiens; identical to SEQ ID NO: 290905
  chr15:65648151-65648392
  hyper

SEQ ID NO: 423041 - DNA, 44 bp, Homo sapiens; identical to SEQ ID NO: 238014
  chr15:65669009-65669053
  hyper

SEQ ID NO: 423042 - DNA, 390 bp, Homo sapiens; identical to SEQ ID NO: 203925
  chr15:65670244-65670634
  hyper

SEQ ID NO: 423043 - DNA, 267 bp, Homo sapiens; identical to SEQ ID NO: 290909
  chr15:65714831-65715098
  hyper

SEQ ID NO: 423044 - DNA, 182 bp, Homo sapiens; identical to SEQ ID NO: 238021
  chr15:65809983-65810165
  hyper

SEQ ID NO: 423045 - DNA, 236 bp, Homo sapiens; identical to SEQ ID NO: 238022
  chr15:66083363-66083599
  hyper

SEQ ID NO: 423046 - DNA, 198 bp, Homo sapiens; identical to SEQ ID NO: 203927
  chr15:66084910-66085108
  hyper

SEQ ID NO: 423047 - DNA, 141 bp, Homo sapiens; identical to SEQ ID NO: 238024
  chr15:66585520-66585661
  hyper

SEQ ID NO: 423048 - DNA, 65 bp, Homo sapiens; identical to SEQ ID NO: 203928
  chr15:66586477-66586542
  hyper

SEQ ID NO: 423049 - DNA, 165 bp, Homo sapiens; identical to SEQ ID NO: 203929
  chr15:66678950-66679115
  hyper

SEQ ID NO: 423050 - DNA, 108 bp, Homo sapiens; identical to SEQ ID NO: 238027
  chr15:66797136-66797244
  hyper

SEQ ID NO: 423051 - DNA, 507 bp, Homo sapiens; identical to SEQ ID NO: 203930
  chr15:66992920-66993427
  hyper

SEQ ID NO: 423052 - DNA, 261 bp, Homo sapiens; identical to SEQ ID NO: 290918
  chr15:66994356-66994617
  hyper

SEQ ID NO: 423053 - DNA, 322 bp, Homo sapiens; identical to SEQ ID NO: 290919
  chr15:66994912-66995234
  hyper

SEQ ID NO: 423054 - DNA, 910 bp, Homo sapiens; identical to SEQ ID NO: 290920
  chr15:66995267-66996177
  hyper

SEQ ID NO: 423055 - DNA, 102 bp, Homo sapiens; identical to SEQ ID NO: 238032
  chr15:67058139-67058241
  hyper

SEQ ID NO: 423056 - DNA, 61 bp, Homo sapiens; identical to SEQ ID NO: 238034
  chr15:67359191-67359252
  hyper

SEQ ID NO: 423057 - DNA, 125 bp, Homo sapiens; identical to SEQ ID NO: 203933
  chr15:67547184-67547309
  hyper

SEQ ID NO: 423058 - DNA, 229 bp, Homo sapiens; identical to SEQ ID NO: 238036
  chr15:67813118-67813347
  hyper

SEQ ID NO: 423059 - DNA, 165 bp, Homo sapiens; identical to SEQ ID NO: 203934
  chr15:68112674-68112839
  hyper

SEQ ID NO: 423060 - DNA, 167 bp, Homo sapiens
  chr15:68118709-68118876
  hyper
gatgtggtgcacgagtgcgcgtggggctcgcgtggtagcttcatccctgcgcgttacaacagctctcgtgccaagtgcatcaagtgcggctactgcagcatgtacttctcgcccaacaagttcatcttccactcgcaccgaacacccgacgccaagtacacgcagcc

SEQ ID NO: 423061 - DNA, 71 bp, Homo sapiens; identical to SEQ ID NO: 224883
  chr15:68177208-68177279
  hyper

SEQ ID NO: 423062 - DNA, 40 bp, Homo sapiens; identical to SEQ ID NO: 203941
  chr15:68521278-68521318
  hyper

SEQ ID NO: 423063 - DNA, 201 bp, Homo sapiens; identical to SEQ ID NO: 290938
  chr15:68569511-68569712
  hyper

SEQ ID NO: 423064 - DNA, 49 bp, Homo sapiens; identical to SEQ ID NO: 290939
  chr15:68569792-68569841
  hyper

SEQ ID NO: 423065 - DNA, 46 bp, Homo sapiens; identical to SEQ ID NO: 238052
  chr15:68598773-68598819
  hyper

SEQ ID NO: 423066 - DNA, 73 bp, Homo sapiens; identical to SEQ ID NO: 290945
  chr15:68870281-68870354
  hyper

SEQ ID NO: 423067 - DNA, 413 bp, Homo sapiens; identical to SEQ ID NO: 290946
  chr15:68870407-68870820
  hyper

SEQ ID NO: 423068 - DNA, 301 bp, Homo sapiens; identical to SEQ ID NO: 290947
  chr15:68871085-68871386
  hyper

SEQ ID NO: 423069 - DNA, 173 bp, Homo sapiens; identical to SEQ ID NO: 238057
  chr15:69111353-69111526
  hyper

SEQ ID NO: 423070 - DNA, 127 bp, Homo sapiens; identical to SEQ ID NO: 238058
  chr15:69113815-69113942
  hyper

SEQ ID NO: 423071 - DNA, 102 bp, Homo sapiens; identical to SEQ ID NO: 238062
  chr15:69452709-69452811
  hyper

SEQ ID NO: 423072 - DNA, 453 bp, Homo sapiens; identical to SEQ ID NO: 238063
  chr15:69453523-69453976
  hyper

SEQ ID NO: 423073 - DNA, 68 bp, Homo sapiens; identical to SEQ ID NO: 203947
  chr15:69591245-69591313
  hyper

SEQ ID NO: 423074 - DNA, 45 bp, Homo sapiens; identical to SEQ ID NO: 238065
  chr15:69591723-69591768
  hyper

SEQ ID NO: 423075 - DNA, 82 bp, Homo sapiens; identical to SEQ ID NO: 238066
  chr15:69706605-69706687
  hyper

SEQ ID NO: 423076 - DNA, 79 bp, Homo sapiens; identical to SEQ ID NO: 238067
  chr15:69744999-69745078
  hyper

SEQ ID NO: 423077 - DNA, 70 bp, Homo sapiens; identical to SEQ ID NO: 224884
  chr15:70388126-70388196
  hyper

SEQ ID NO: 423078 - DNA, 285 bp, Homo sapiens; identical to SEQ ID NO: 290962
  chr15:70388412-70388697
  hyper

SEQ ID NO: 423079 - DNA, 76 bp, Homo sapiens; identical to SEQ ID NO: 203948
  chr15:70391279-70391355
  hyper

SEQ ID NO: 423080 - DNA, 80 bp, Homo sapiens; identical to SEQ ID NO: 203949
  chr15:71054803-71054883
  hyper

SEQ ID NO: 423081 - DNA, 298 bp, Homo sapiens; identical to SEQ ID NO: 203950
  chr15:71054929-71055227
  hyper

SEQ ID NO: 423082 - DNA, 119 bp, Homo sapiens; identical to SEQ ID NO: 203954
  chr15:71056447-71056566
  hyper

SEQ ID NO: 423083 - DNA, 231 bp, Homo sapiens; identical to SEQ ID NO: 238073
  chr15:72072597-72072828
  hyper

SEQ ID NO: 423084 - DNA, 141 bp, Homo sapiens; identical to SEQ ID NO: 203960
  chr15:72409488-72409629
  hyper

SEQ ID NO: 423085 - DNA, 309 bp, Homo sapiens; identical to SEQ ID NO: 203961
  chr15:72522193-72522502
  hyper

SEQ ID NO: 423086 - DNA, 303 bp, Homo sapiens
  chr15:72522952-72523255
  hyper
aggggaaccagaacgcagtttcaatgagttacacagaaagcattagaatcaggggacacgcacagcttgaagaggagggggtggaaggaccagacttaaggaggaagaggggaaaacgagcacggaacaggcggcgcggagaaaggggaagcaagggtggaatcaatcacgagggaccgagagaaggcaggcgaggatggaggcgcattgaggattggggcaggaggaagaggatgggaccagaatgagggggtagggctggggcgggaaaggagccggcggacccgcctgatctggaaggaa

SEQ ID NO: 423087 - DNA, 101 bp, Homo sapiens; identical to SEQ ID NO: 203965
  chr15:72978671-72978772
  hyper

SEQ ID NO: 423088 - DNA, 297 bp, Homo sapiens; identical to SEQ ID NO: 290985
  chr15:73344008-73344305
  hyper

SEQ ID NO: 423089 - DNA, 283 bp, Homo sapiens; identical to SEQ ID NO: 290986
  chr15:73611203-73611486
  hyper

SEQ ID NO: 423090 - DNA, 412 bp, Homo sapiens; identical to SEQ ID NO: 290989
  chr15:74045243-74045655
  hyper

SEQ ID NO: 423091 - DNA, 376 bp, Homo sapiens; identical to SEQ ID NO: 238089
  chr15:74219934-74220310
  hyper

SEQ ID NO: 423092 - DNA, 190 bp, Homo sapiens; identical to SEQ ID NO: 203971
  chr15:74268224-74268414
  hyper

SEQ ID NO: 423093 - DNA, 148 bp, Homo sapiens; identical to SEQ ID NO: 290994
  chr15:74420293-74420441
  hyper

SEQ ID NO: 423094 - DNA, 41 bp, Homo sapiens; identical to SEQ ID NO: 290995
  chr15:74420734-74420775
  hyper

SEQ ID NO: 423095 - DNA, 229 bp, Homo sapiens; identical to SEQ ID NO: 290996
  chr15:74421725-74421954
  hyper

SEQ ID NO: 423096 - DNA, 448 bp, Homo sapiens; identical to SEQ ID NO: 290997
  chr15:74428235-74428683
  hyper

SEQ ID NO: 423097 - DNA, 167 bp, Homo sapiens; identical to SEQ ID NO: 290998
  chr15:74429123-74429290
  hyper

SEQ ID NO: 423098 - DNA, 126 bp, Homo sapiens; identical to SEQ ID NO: 238094
  chr15:74537933-74538059
  hyper

SEQ ID NO: 423099 - DNA, 76 bp, Homo sapiens; identical to SEQ ID NO: 203974
  chr15:74685108-74685184
  hyper

SEQ ID NO: 423100 - DNA, 229 bp, Homo sapiens; identical to SEQ ID NO: 238098
  chr15:74753655-74753884
  hyper

SEQ ID NO: 423101 - DNA, 176 bp, Homo sapiens; identical to SEQ ID NO: 291004
  chr15:74912313-74912489
  hyper

SEQ ID NO: 423102 - DNA, 137 bp, Homo sapiens; identical to SEQ ID NO: 238100
  chr15:75017910-75018047
  hyper

SEQ ID NO: 423103 - DNA, 45 bp, Homo sapiens; identical to SEQ ID NO: 238102
  chr15:75018660-75018705
  hyper

SEQ ID NO: 423104 - DNA, 229 bp, Homo sapiens; identical to SEQ ID NO: 291009
  chr15:75118920-75119149
  hyper

SEQ ID NO: 423105 - DNA, 129 bp, Homo sapiens; identical to SEQ ID NO: 238105
  chr15:75119190-75119319
  hyper

SEQ ID NO: 423106 - DNA, 226 bp, Homo sapiens; identical to SEQ ID NO: 238107
  chr15:75165610-75165836
  hyper

SEQ ID NO: 423107 - DNA, 320 bp, Homo sapiens; identical to SEQ ID NO: 238108
  chr15:75230421-75230741
  hyper

SEQ ID NO: 423108 - DNA, 127 bp, Homo sapiens; identical to SEQ ID NO: 238109
  chr15:75249802-75249929
  hyper

SEQ ID NO: 423109 - DNA, 158 bp, Homo sapiens; identical to SEQ ID NO: 238111
  chr15:75316097-75316255
  hyper

SEQ ID NO: 423110 - DNA, 91 bp, Homo sapiens; identical to SEQ ID NO: 203980
  chr15:75495098-75495189
  hyper

SEQ ID NO: 423111 - DNA, 373 bp, Homo sapiens; identical to SEQ ID NO: 238114
  chr15:75639263-75639636
  hyper

SEQ ID NO: 423112 - DNA, 455 bp, Homo sapiens; identical to SEQ ID NO: 126081
  chr15:75640520-75640975
  hyper

SEQ ID NO: 423113 - DNA, 210 bp, Homo sapiens; identical to SEQ ID NO: 238116
  chr15:75661045-75661255
  hyper

SEQ ID NO: 423114 - DNA, 202 bp, Homo sapiens; identical to SEQ ID NO: 238117
  chr15:75744075-75744277
  hyper

SEQ ID NO: 423115 - DNA, 108 bp, Homo sapiens; identical to SEQ ID NO: 238118
  chr15:75748049-75748157
  hyper

SEQ ID NO: 423116 - DNA, 182 bp, Homo sapiens; identical to SEQ ID NO: 238119
  chr15:75932855-75933037
  hyper

SEQ ID NO: 423117 - DNA, 356 bp, Homo sapiens; identical to SEQ ID NO: 291026
  chr15:75939285-75939641
  hyper

SEQ ID NO: 423118 - DNA, 73 bp, Homo sapiens; identical to SEQ ID NO: 52299
  chr15:75939671-75939744
  hyper

SEQ ID NO: 423119 - DNA, 58 bp, Homo sapiens; identical to SEQ ID NO: 238121
  chr15:76136832-76136890
  hyper

SEQ ID NO: 423120 - DNA, 299 bp, Homo sapiens; identical to SEQ ID NO: 291030
  chr15:76351370-76351669
  hyper

SEQ ID NO: 423121 - DNA, 126 bp, Homo sapiens; identical to SEQ ID NO: 291031
  chr15:76351769-76351895
  hyper

SEQ ID NO: 423122 - DNA, 159 bp, Homo sapiens; identical to SEQ ID NO: 238123
  chr15:76352475-76352634
  hyper

SEQ ID NO: 423123 - DNA, 382 bp, Homo sapiens
  chr15:76633364-76633746
  hyper
gcaaagcaatgcagaccctaaatcactcaaggcctggagctccagtctcaaaggtggcagaaaaggccagacctaactcgagcacctactgccttctgcttgccccgcagagccttcagggactgactgggacgcccctggtggcgggcagtcccatccgccatgagaacgccgtgcagggcagcgcagtggaggtgcagacgtaccagccgccgtggaaggcgctcagcgagtttgccctccagagcgacctggaccaacccgccttccaacagctggtgaggccctgccctacccgccccgacctcgggactctgcgggttggggatttagccacttagcctggcagagaggggagggggtggccttgggctgaggggct

SEQ ID NO: 423124 - DNA, 209 bp, Homo sapiens; identical to SEQ ID NO: 291038
  chr15:76633776-76633985
  hyper

SEQ ID NO: 423125 - DNA, 200 bp, Homo sapiens; identical to SEQ ID NO: 126118
  chr15:76634013-76634213
  hyper

SEQ ID NO: 423126 - DNA, 295 bp, Homo sapiens; identical to SEQ ID NO: 291040
  chr15:76634517-76634812
  hyper

SEQ ID NO: 423127 - DNA, 109 bp, Homo sapiens; identical to SEQ ID NO: 291041
  chr15:76634842-76634951
  hyper

SEQ ID NO: 423128 - DNA, 209 bp, Homo sapiens; identical to SEQ ID NO: 238132
  chr15:77711492-77711701
  hyper

SEQ ID NO: 423129 - DNA, 115 bp, Homo sapiens; identical to SEQ ID NO: 238133
  chr15:77924998-77925113
  hyper

SEQ ID NO: 423130 - DNA, 53 bp, Homo sapiens; identical to SEQ ID NO: 291046
  chr15:77925412-77925465
  hyper

SEQ ID NO: 423131 - DNA, 67 bp, Homo sapiens; identical to SEQ ID NO: 291047
  chr15:77925725-77925792
  hyper

SEQ ID NO: 423132 - DNA, 130 bp, Homo sapiens; identical to SEQ ID NO: 291048
  chr15:77927041-77927171
  hyper

SEQ ID NO: 423133 - DNA, 143 bp, Homo sapiens; identical to SEQ ID NO: 291049
  chr15:78110977-78111120
  hyper

SEQ ID NO: 423134 - DNA, 80 bp, Homo sapiens; identical to SEQ ID NO: 291050
  chr15:78111210-78111290
  hyper

SEQ ID NO: 423135 - DNA, 186 bp, Homo sapiens; identical to SEQ ID NO: 291051
  chr15:78112377-78112563
  hyper

SEQ ID NO: 423136 - DNA, 107 bp, Homo sapiens; identical to SEQ ID NO: 291053
  chr15:78633394-78633501
  hyper

SEQ ID NO: 423137 - DNA, 161 bp, Homo sapiens; identical to SEQ ID NO: 291054
  chr15:79103104-79103265
  hyper

SEQ ID NO: 423138 - DNA, 101 bp, Homo sapiens; identical to SEQ ID NO: 203989
  chr15:79237308-79237409
  hyper

SEQ ID NO: 423139 - DNA, 110 bp, Homo sapiens; identical to SEQ ID NO: 203991
  chr15:79603182-79603292
  hyper

SEQ ID NO: 423140 - DNA, 75 bp, Homo sapiens; identical to SEQ ID NO: 203992
  chr15:79723976-79724051
  hyper

SEQ ID NO: 423141 - DNA, 55 bp, Homo sapiens; identical to SEQ ID NO: 203995
  chr15:80285825-80285880
  hyper

SEQ ID NO: 423142 - DNA, 35 bp, Homo sapiens; identical to SEQ ID NO: 203996
  chr15:80351965-80352000
  hyper

SEQ ID NO: 423143 - DNA, 157 bp, Homo sapiens; identical to SEQ ID NO: 238153
  chr15:80445215-80445372
  hyper

SEQ ID NO: 423144 - DNA, 206 bp, Homo sapiens; identical to SEQ ID NO: 291066
  chr15:80543997-80544203
  hyper

SEQ ID NO: 423145 - DNA, 265 bp, Homo sapiens; identical to SEQ ID NO: 203998
  chr15:80988126-80988391
  hyper

SEQ ID NO: 423146 - DNA, 440 bp, Homo sapiens; identical to SEQ ID NO: 291068
  chr15:81071387-81071827
  hyper

SEQ ID NO: 423147 - DNA, 459 bp, Homo sapiens
  chr15:81071867-81072326
  hyper
cggcgcctggcggtcagcgaccagacgtccggggccgctgcgctcctggcccgcgaggcgtgacactgtctcggctacagacccagaggtaagagggcctggctgggggcgtcagggatgagctgacggcccatgccacggaagagaggtaagaagtgggggcccgcgcctccacccggcacagggtaaacgttacccgcctcagtttctgtttgtctgtccaccctgtgctgtgcagtctacctctatctgtctgtttgtccatgcgtctgttgatgggcacacgctcttggcactgtcctctgtgggatttctctgagatcttgtgatgctttacaagctgcaggtgccggggggcgctggagtccccagagggcatccagagggggcagactcctgctttccgtagattttcccccttctgaatggcaccgggggcttgcgcccgggagagtgtct

SEQ ID NO: 423148 - DNA, 105 bp, Homo sapiens; identical to SEQ ID NO: 238157
  chr15:81282496-81282601
  hyper

SEQ ID NO: 423149 - DNA, 370 bp, Homo sapiens; identical to SEQ ID NO: 238158
  chr15:81292679-81293049
  hyper

SEQ ID NO: 423150 - DNA, 162 bp, Homo sapiens; identical to SEQ ID NO: 238160
  chr15:81616530-81616692
  hyper

SEQ ID NO: 423151 - DNA, 445 bp, Homo sapiens; identical to SEQ ID NO: 204003
  chr15:82337283-82337728
  hyper

SEQ ID NO: 423152 - DNA, 51 bp, Homo sapiens; identical to SEQ ID NO: 204004
  chr15:82338056-82338107
  hyper

SEQ ID NO: 423153 - DNA, 104 bp, Homo sapiens; identical to SEQ ID NO: 238163
  chr15:82338504-82338608
  hyper

SEQ ID NO: 423154 - DNA, 46 bp, Homo sapiens; identical to SEQ ID NO: 204008
  chr15:83379042-83379088
  hyper

SEQ ID NO: 423155 - DNA, 375 bp, Homo sapiens; identical to SEQ ID NO: 291085
  chr15:83654593-83654968
  hyper

SEQ ID NO: 423156 - DNA, 134 bp, Homo sapiens; identical to SEQ ID NO: 224915
  chr15:83680651-83680785
  hyper

SEQ ID NO: 423157 - DNA, 139 bp, Homo sapiens; identical to SEQ ID NO: 291090
  chr15:84034239-84034378
  hyper

SEQ ID NO: 423158 - DNA, 86 bp, Homo sapiens; identical to SEQ ID NO: 291091
  chr15:84034412-84034498
  hyper

SEQ ID NO: 423159 - DNA, 96 bp, Homo sapiens; identical to SEQ ID NO: 204013
  chr15:84115617-84115713
  hyper

SEQ ID NO: 423160 - DNA, 139 bp, Homo sapiens; identical to SEQ ID NO: 204014
  chr15:84116949-84117088
  hyper

SEQ ID NO: 423161 - DNA, 60 bp, Homo sapiens; identical to SEQ ID NO: 291094
  chr15:84322262-84322322
  hyper

SEQ ID NO: 423162 - DNA, 577 bp, Homo sapiens; identical to SEQ ID NO: 291096
  chr15:85143661-85144238
  hyper

SEQ ID NO: 423163 - DNA, 90 bp, Homo sapiens; identical to SEQ ID NO: 238181
  chr15:85197334-85197424
  hyper

SEQ ID NO: 423164 - DNA, 148 bp, Homo sapiens; identical to SEQ ID NO: 204015
  chr15:85200368-85200516
  hyper

SEQ ID NO: 423165 - DNA, 123 bp, Homo sapiens; identical to SEQ ID NO: 291099
  chr15:85258869-85258992
  hyper

SEQ ID NO: 423166 - DNA, 31 bp, Homo sapiens; identical to SEQ ID NO: 238182
  chr15:85524762-85524793
  hyper

SEQ ID NO: 423167 - DNA, 437 bp, Homo sapiens; identical to SEQ ID NO: 291101
  chr15:85525136-85525573
  hyper

SEQ ID NO: 423168 - DNA, 56 bp, Homo sapiens; identical to SEQ ID NO: 126306
  chr15:85923617-85923673
  hyper

SEQ ID NO: 423169 - DNA, 98 bp, Homo sapiens; identical to SEQ ID NO: 238185
  chr15:86126184-86126282
  hyper

SEQ ID NO: 423170 - DNA, 130 bp, Homo sapiens; identical to SEQ ID NO: 291104
  chr15:88798434-88798564
  hyper

SEQ ID NO: 423171 - DNA, 68 bp, Homo sapiens; identical to SEQ ID NO: 238189
  chr15:89010447-89010515
  hyper

SEQ ID NO: 423172 - DNA, 265 bp, Homo sapiens; identical to SEQ ID NO: 238190
  chr15:89010954-89011219
  hyper

SEQ ID NO: 423173 - DNA, 62 bp, Homo sapiens; identical to SEQ ID NO: 291108
  chr15:89149448-89149510
  hyper

SEQ ID NO: 423174 - DNA, 162 bp, Homo sapiens; identical to SEQ ID NO: 238192
  chr15:89164363-89164525
  hyper

SEQ ID NO: 423175 - DNA, 99 bp, Homo sapiens; identical to SEQ ID NO: 291110
  chr15:89312884-89312983
  hyper

SEQ ID NO: 423176 - DNA, 397 bp, Homo sapiens; identical to SEQ ID NO: 238197
  chr15:89787063-89787460
  hyper

SEQ ID NO: 423177 - DNA, 257 bp, Homo sapiens; identical to SEQ ID NO: 238198
  chr15:89877892-89878149
  hyper

SEQ ID NO: 423178 - DNA, 251 bp, Homo sapiens; identical to SEQ ID NO: 238199
  chr15:89878847-89879098
  hyper

SEQ ID NO: 423179 - DNA, 124 bp, Homo sapiens; identical to SEQ ID NO: 204023
  chr15:89902214-89902338
  hyper

SEQ ID NO: 423180 - DNA, 327 bp, Homo sapiens; identical to SEQ ID NO: 238201
  chr15:89902764-89903091
  hyper

SEQ ID NO: 423181 - DNA, 345 bp, Homo sapiens; identical to SEQ ID NO: 291120
  chr15:89905400-89905745
  hyper

SEQ ID NO: 423182 - DNA, 234 bp, Homo sapiens; identical to SEQ ID NO: 291121
  chr15:89905890-89906124
  hyper

SEQ ID NO: 423183 - DNA, 66 bp, Homo sapiens; identical to SEQ ID NO: 204029
  chr15:89959772-89959838
  hyper

SEQ ID NO: 423184 - DNA, 46 bp, Homo sapiens; identical to SEQ ID NO: 204030
  chr15:89962759-89962805
  hyper

SEQ ID NO: 423185 - DNA, 91 bp, Homo sapiens; identical to SEQ ID NO: 291131
  chr15:90198066-90198157
  hyper

SEQ ID NO: 423186 - DNA, 49 bp, Homo sapiens; identical to SEQ ID NO: 291132
  chr15:90198414-90198463
  hyper

SEQ ID NO: 423187 - DNA, 37 bp, Homo sapiens; identical to SEQ ID NO: 238220
  chr15:90234210-90234247
  hyper

SEQ ID NO: 423188 - DNA, 322 bp, Homo sapiens; identical to SEQ ID NO: 291134
  chr15:90293566-90293888
  hyper

SEQ ID NO: 423189 - DNA, 140 bp, Homo sapiens; identical to SEQ ID NO: 291136
  chr15:90455670-90455810
  hyper

SEQ ID NO: 423190 - DNA, 242 bp, Homo sapiens; identical to SEQ ID NO: 204031
  chr15:90455967-90456209
  hyper

SEQ ID NO: 423191 - DNA, 68 bp, Homo sapiens; identical to SEQ ID NO: 204032
  chr15:90628227-90628295
  hyper

SEQ ID NO: 423192 - DNA, 243 bp, Homo sapiens; identical to SEQ ID NO: 204033
  chr15:90631580-90631823
  hyper

SEQ ID NO: 423193 - DNA, 81 bp, Homo sapiens; identical to SEQ ID NO: 204034
  chr15:90634777-90634858
  hyper

SEQ ID NO: 423194 - DNA, 217 bp, Homo sapiens; identical to SEQ ID NO: 204035
  chr15:90792593-90792810
  hyper

SEQ ID NO: 423195 - DNA, 194 bp, Homo sapiens; identical to SEQ ID NO: 238225
  chr15:90808537-90808731
  hyper

SEQ ID NO: 423196 - DNA, 60 bp, Homo sapiens; identical to SEQ ID NO: 291143
  chr15:90891947-90892007
  hyper

SEQ ID NO: 423197 - DNA, 137 bp, Homo sapiens; identical to SEQ ID NO: 238226
  chr15:90895267-90895404
  hyper

SEQ ID NO: 423198 - DNA, 33 bp, Homo sapiens; identical to SEQ ID NO: 238227
  chr15:91072783-91072816
  hyper

SEQ ID NO: 423199 - DNA, 179 bp, Homo sapiens; identical to SEQ ID NO: 238228
  chr15:91260439-91260618
  hyper

SEQ ID NO: 423200 - DNA, 72 bp, Homo sapiens; identical to SEQ ID NO: 204036
  chr15:91414358-91414430
  hyper

SEQ ID NO: 423201 - DNA, 164 bp, Homo sapiens; identical to SEQ ID NO: 204037
  chr15:91475572-91475736
  hyper

SEQ ID NO: 423202 - DNA, 143 bp, Homo sapiens; identical to SEQ ID NO: 238236
  chr15:93353296-93353439
  hyper

SEQ ID NO: 423203 - DNA, 229 bp, Homo sapiens; identical to SEQ ID NO: 238237
  chr15:93363550-93363779
  hyper

SEQ ID NO: 423204 - DNA, 974 bp, Homo sapiens; identical to SEQ ID NO: 238238
  chr15:93443566-93444540
  hyper

SEQ ID NO: 423205 - DNA, 210 bp, Homo sapiens; identical to SEQ ID NO: 291159
  chr15:93615691-93615901
  hyper

SEQ ID NO: 423206 - DNA, 300 bp, Homo sapiens; identical to SEQ ID NO: 384586
  chr15:94774274-94774574
  hyper

SEQ ID NO: 423207 - DNA, 102 bp, Homo sapiens; identical to SEQ ID NO: 291162
  chr15:95388253-95388355
  hyper

SEQ ID NO: 423208 - DNA, 349 bp, Homo sapiens; identical to SEQ ID NO: 291164
  chr15:96864605-96864954
  hyper

SEQ ID NO: 423209 - DNA, 468 bp, Homo sapiens; identical to SEQ ID NO: 291165
  chr15:96865222-96865690
  hyper

SEQ ID NO: 423210 - DNA, 377 bp, Homo sapiens; identical to SEQ ID NO: 389321
  chr15:96873421-96873798
  hyper

SEQ ID NO: 423211 - DNA, 634 bp, Homo sapiens; identical to SEQ ID NO: 238246
  chr15:96875062-96875696
  hyper

SEQ ID NO: 423212 - DNA, 89 bp, Homo sapiens; identical to SEQ ID NO: 291169
  chr15:96876448-96876537
  hyper

SEQ ID NO: 423213 - DNA, 199 bp, Homo sapiens; identical to SEQ ID NO: 204047
  chr15:96876621-96876820
  hyper

SEQ ID NO: 423214 - DNA, 248 bp, Homo sapiens; identical to SEQ ID NO: 204050
  chr15:96897605-96897853
  hyper

SEQ ID NO: 423215 - DNA, 754 bp, Homo sapiens; identical to SEQ ID NO: 238250
  chr15:96899904-96900658
  hyper

SEQ ID NO: 423216 - DNA, 133 bp, Homo sapiens; identical to SEQ ID NO: 204051
  chr15:96903477-96903610
  hyper

SEQ ID NO: 423217 - DNA, 154 bp, Homo sapiens; identical to SEQ ID NO: 291176
  chr15:96911212-96911366
  hyper

SEQ ID NO: 423218 - DNA, 517 bp, Homo sapiens; identical to SEQ ID NO: 291177
  chr15:96952092-96952609
  hyper

SEQ ID NO: 423219 - DNA, 119 bp, Homo sapiens; identical to SEQ ID NO: 204053
  chr15:97491101-97491220
  hyper

SEQ ID NO: 423220 - DNA, 204 bp, Homo sapiens; identical to SEQ ID NO: 126457
  chr15:97491238-97491442
  hyper

SEQ ID NO: 423221 - DNA, 200 bp, Homo sapiens; identical to SEQ ID NO: 291184
  chr15:98503355-98503555
  hyper

SEQ ID NO: 423222 - DNA, 268 bp, Homo sapiens; identical to SEQ ID NO: 291185
  chr15:98503609-98503877
  hyper

SEQ ID NO: 423223 - DNA, 168 bp, Homo sapiens; identical to SEQ ID NO: 291186
  chr15:98503946-98504114
  hyper

SEQ ID NO: 423224 - DNA, 560 bp, Homo sapiens; identical to SEQ ID NO: 291187
  chr15:98504228-98504788
  hyper

SEQ ID NO: 423225 - DNA, 34 bp, Homo sapiens; identical to SEQ ID NO: 291188
  chr15:98836393-98836427
  hyper

SEQ ID NO: 423226 - DNA, 276 bp, Homo sapiens; identical to SEQ ID NO: 291189
  chr15:98971414-98971690
  hyper

SEQ ID NO: 423227 - DNA, 405 bp, Homo sapiens
  chr15:99091683-99092088
  hyper
ggcgagctcacaccgtgcggcggggagcagcgcgaacgctcgacccggacacctcccttccaggtcccgttccgtaggcggggccgctcccgaggcacaaggaggcctgcgcggcgcccgaggtgtccggatcccaaaacaggaccccaggagtttctcacactcaggactggcccctagttgtcaatccagaaaaggcatcctccgtcctagatccagcctgtatttcacggaaagcgtttcctcccccatccccaaagccggcaggggtggggcggagaggggaggcccggggagactgactctattatataaacttgtaattggctccggttcctgcggctcgggcggcactgcaggacgtttccaaccagatgggttgtgaggccccgcggcttcctcctc

SEQ ID NO: 423228 - DNA, 510 bp, Homo sapiens; identical to SEQ ID NO: 291193
  chr15:99191216-99191726
  hyper

SEQ ID NO: 423229 - DNA, 210 bp, Homo sapiens; identical to SEQ ID NO: 126471
  chr15:99191748-99191958
  hyper

SEQ ID NO: 423230 - DNA, 582 bp, Homo sapiens; identical to SEQ ID NO: 291195
  chr15:99192162-99192744
  hyper

SEQ ID NO: 423231 - DNA, 32 bp, Homo sapiens
  chr15:99192792-99192824
  hyper
tcatcccaaataaaaggaatgaagtctggctc

SEQ ID NO: 423232 - DNA, 51 bp, Homo sapiens; identical to SEQ ID NO: 399789
  chr15:99193687-99193738
  hyper

SEQ ID NO: 423233 - DNA, 52 bp, Homo sapiens; identical to SEQ ID NO: 238266
  chr15:99791471-99791523
  hyper

SEQ ID NO: 423234 - DNA, 60 bp, Homo sapiens; identical to SEQ ID NO: 291201
  chr15:100273844-100273904
  hyper

SEQ ID NO: 423235 - DNA, 51 bp, Homo sapiens; identical to SEQ ID NO: 204069
  chr15:100273946-100273997
  hyper

SEQ ID NO: 423236 - DNA, 246 bp, Homo sapiens; identical to SEQ ID NO: 238271
  chr15:101142345-101142591
  hyper

SEQ ID NO: 423237 - DNA, 270 bp, Homo sapiens; identical to SEQ ID NO: 238273
  chr15:101419539-101419809
  hyper

SEQ ID NO: 423238 - DNA, 309 bp, Homo sapiens; identical to SEQ ID NO: 291208
  chr15:101420039-101420348
  hyper

SEQ ID NO: 423239 - DNA, 67 bp, Homo sapiens; identical to SEQ ID NO: 291209
  chr15:101421003-101421070
  hyper

SEQ ID NO: 423240 - DNA, 154 bp, Homo sapiens; identical to SEQ ID NO: 224959
  chr15:101791012-101791166
  hyper

SEQ ID NO: 423241 - DNA, 338 bp, Homo sapiens; identical to SEQ ID NO: 291215
  chr15:101835610-101835948
  hyper

SEQ ID NO: 423242 - DNA, 66 bp, Homo sapiens; identical to SEQ ID NO: 204073
  chr16:103517-103583
  hyper

SEQ ID NO: 423243 - DNA, 46 bp, Homo sapiens; identical to SEQ ID NO: 238282
  chr16:122248-122294
  hyper

SEQ ID NO: 423244 - DNA, 365 bp, Homo sapiens; identical to SEQ ID NO: 291221
  chr16:204521-204886
  hyper

SEQ ID NO: 423245 - DNA, 356 bp, Homo sapiens; identical to SEQ ID NO: 291222
  chr16:231052-231408
  hyper

SEQ ID NO: 423246 - DNA, 212 bp, Homo sapiens; identical to SEQ ID NO: 224967
  chr16:325890-326102
  hyper

SEQ ID NO: 423247 - DNA, 84 bp, Homo sapiens; identical to SEQ ID NO: 291226
  chr16:347192-347276
  hyper

SEQ ID NO: 423248 - DNA, 261 bp, Homo sapiens; identical to SEQ ID NO: 52626
  chr16:374858-375119
  hyper

SEQ ID NO: 423249 - DNA, 83 bp, Homo sapiens; identical to SEQ ID NO: 204074
  chr16:475426-475509
  hyper

SEQ ID NO: 423250 - DNA, 103 bp, Homo sapiens; identical to SEQ ID NO: 291229
  chr16:565623-565726
  hyper

SEQ ID NO: 423251 - DNA, 251 bp, Homo sapiens; identical to SEQ ID NO: 291230
  chr16:577428-577679
  hyper

SEQ ID NO: 423252 - DNA, 37 bp, Homo sapiens; identical to SEQ ID NO: 204076
  chr16:619792-619829
  hyper

SEQ ID NO: 423253 - DNA, 294 bp, Homo sapiens; identical to SEQ ID NO: 238293
  chr16:698981-699275
  hyper

SEQ ID NO: 423254 - DNA, 50 bp, Homo sapiens; identical to SEQ ID NO: 204077
  chr16:717960-718010
  hyper

SEQ ID NO: 423255 - DNA, 104 bp, Homo sapiens; identical to SEQ ID NO: 204078
  chr16:755704-755808
  hyper

SEQ ID NO: 423256 - DNA, 111 bp, Homo sapiens; identical to SEQ ID NO: 204079
  chr16:765207-765318
  hyper

SEQ ID NO: 423257 - DNA, 62 bp, Homo sapiens; identical to SEQ ID NO: 224976
  chr16:765586-765648
  hyper

SEQ ID NO: 423258 - DNA, 255 bp, Homo sapiens; identical to SEQ ID NO: 291239
  chr16:778111-778366
  hyper

SEQ ID NO: 423259 - DNA, 121 bp, Homo sapiens; identical to SEQ ID NO: 224978
  chr16:778761-778882
  hyper

SEQ ID NO: 423260 - DNA, 226 bp, Homo sapiens; identical to SEQ ID NO: 238302
  chr16:1359098-1359324
  hyper

SEQ ID NO: 423261 - DNA, 144 bp, Homo sapiens; identical to SEQ ID NO: 291244
  chr16:1384098-1384242
  hyper

SEQ ID NO: 423262 - DNA, 42 bp, Homo sapiens; identical to SEQ ID NO: 238305
  chr16:1402306-1402348
  hyper

SEQ ID NO: 423263 - DNA, 243 bp, Homo sapiens; identical to SEQ ID NO: 204080
  chr16:1429037-1429280
  hyper

SEQ ID NO: 423264 - DNA, 434 bp, Homo sapiens; identical to SEQ ID NO: 224987
  chr16:1660449-1660883
  hyper

SEQ ID NO: 423265 - DNA, 426 bp, Homo sapiens; identical to SEQ ID NO: 238306
  chr16:1661890-1662316
  hyper

SEQ ID NO: 423266 - DNA, 121 bp, Homo sapiens; identical to SEQ ID NO: 204082
  chr16:1663980-1664101
  hyper

SEQ ID NO: 423267 - DNA, 700 bp, Homo sapiens; identical to SEQ ID NO: 224988
  chr16:1664481-1665181
  hyper

SEQ ID NO: 423268 - DNA, 188 bp, Homo sapiens; identical to SEQ ID NO: 238308
  chr16:1832740-1832928
  hyper

SEQ ID NO: 423269 - DNA, 65 bp, Homo sapiens; identical to SEQ ID NO: 204083
  chr16:1875917-1875982
  hyper

SEQ ID NO: 423270 - DNA, 153 bp, Homo sapiens; identical to SEQ ID NO: 291253
  chr16:1877136-1877289
  hyper

SEQ ID NO: 423271 - DNA, 112 bp, Homo sapiens; identical to SEQ ID NO: 238311
  chr16:1877591-1877703
  hyper

SEQ ID NO: 423272 - DNA, 276 bp, Homo sapiens; identical to SEQ ID NO: 238313
  chr16:2014896-2015172
  hyper

SEQ ID NO: 423273 - DNA, 74 bp, Homo sapiens; identical to SEQ ID NO: 238314
  chr16:2033652-2033726
  hyper

SEQ ID NO: 423274 - DNA, 171 bp, Homo sapiens; identical to SEQ ID NO: 238316
  chr16:2054057-2054228
  hyper

SEQ ID NO: 423275 - DNA, 158 bp, Homo sapiens; identical to SEQ ID NO: 204087
  chr16:2058558-2058716
  hyper

SEQ ID NO: 423276 - DNA, 170 bp, Homo sapiens; identical to SEQ ID NO: 238318
  chr16:2097196-2097366
  hyper

SEQ ID NO: 423277 - DNA, 176 bp, Homo sapiens; identical to SEQ ID NO: 238319
  chr16:2198065-2198241
  hyper

SEQ ID NO: 423278 - DNA, 316 bp, Homo sapiens; identical to SEQ ID NO: 238320
  chr16:2198819-2199135
  hyper

SEQ ID NO: 423279 - DNA, 34 bp, Homo sapiens; identical to SEQ ID NO: 238322
  chr16:2245973-2246007
  hyper

SEQ ID NO: 423280 - DNA, 68 bp, Homo sapiens; identical to SEQ ID NO: 238323
  chr16:2265374-2265442
  hyper

SEQ ID NO: 423281 - DNA, 31 bp, Homo sapiens; identical to SEQ ID NO: 238324
  chr16:2273284-2273315
  hyper

SEQ ID NO: 423282 - DNA, 146 bp, Homo sapiens; identical to SEQ ID NO: 224992
  chr16:2295263-2295409
  hyper

SEQ ID NO: 423283 - DNA, 58 bp, Homo sapiens; identical to SEQ ID NO: 238326
  chr16:2318222-2318280
  hyper

SEQ ID NO: 423284 - DNA, 196 bp, Homo sapiens; identical to SEQ ID NO: 238328
  chr16:2510306-2510502
  hyper

SEQ ID NO: 423285 - DNA, 268 bp, Homo sapiens; identical to SEQ ID NO: 291276
  chr16:2521459-2521727
  hyper

SEQ ID NO: 423286 - DNA, 119 bp, Homo sapiens; identical to SEQ ID NO: 291277
  chr16:2521857-2521976
  hyper

SEQ ID NO: 423287 - DNA, 550 bp, Homo sapiens; identical to SEQ ID NO: 238330
  chr16:2732189-2732739
  hyper

SEQ ID NO: 423288 - DNA, 222 bp, Homo sapiens; identical to SEQ ID NO: 238331
  chr16:2888902-2889124
  hyper

SEQ ID NO: 423289 - DNA, 71 bp, Homo sapiens; identical to SEQ ID NO: 291280
  chr16:3068100-3068171
  hyper

SEQ ID NO: 423290 - DNA, 33 bp, Homo sapiens; identical to SEQ ID NO: 238334
  chr16:3070231-3070264
  hyper

SEQ ID NO: 423291 - DNA, 239 bp, Homo sapiens; identical to SEQ ID NO: 238336
  chr16:3086764-3087003
  hyper

SEQ ID NO: 423292 - DNA, 271 bp, Homo sapiens; identical to SEQ ID NO: 238337
  chr16:3095340-3095611
  hyper

SEQ ID NO: 423293 - DNA, 40 bp, Homo sapiens; identical to SEQ ID NO: 238338
  chr16:3096463-3096503
  hyper

SEQ ID NO: 423294 - DNA, 37 bp, Homo sapiens; identical to SEQ ID NO: 291287
  chr16:3097009-3097046
  hyper

SEQ ID NO: 423295 - DNA, 146 bp, Homo sapiens; identical to SEQ ID NO: 204093
  chr16:3184680-3184826
  hyper

SEQ ID NO: 423296 - DNA, 235 bp, Homo sapiens; identical to SEQ ID NO: 126708
  chr16:3184880-3185115
  hyper

SEQ ID NO: 423297 - DNA, 322 bp, Homo sapiens; identical to SEQ ID NO: 204094
  chr16:3200663-3200985
  hyper

SEQ ID NO: 423298 - DNA, 549 bp, Homo sapiens; identical to SEQ ID NO: 204098
  chr16:3550753-3551302
  hyper

SEQ ID NO: 423299 - DNA, 63 bp, Homo sapiens; identical to SEQ ID NO: 238351
  chr16:3766893-3766956
  hyper

SEQ ID NO: 423300 - DNA, 171 bp, Homo sapiens; identical to SEQ ID NO: 238352
  chr16:3767713-3767884
  hyper

SEQ ID NO: 423301 - DNA, 1164 bp, Homo sapiens; identical to SEQ ID NO: 204099
  chr16:3781398-3782562
  hyper

SEQ ID NO: 423302 - DNA, 309 bp, Homo sapiens; identical to SEQ ID NO: 204100
  chr16:3931082-3931391
  hyper

SEQ ID NO: 423303 - DNA, 111 bp, Homo sapiens; identical to SEQ ID NO: 225001
  chr16:3989147-3989258
  hyper

SEQ ID NO: 423304 - DNA, 208 bp, Homo sapiens; identical to SEQ ID NO: 238355
  chr16:4321188-4321396
  hyper

SEQ ID NO: 423305 - DNA, 377 bp, Homo sapiens; identical to SEQ ID NO: 225006
  chr16:4357423-4357800
  hyper

SEQ ID NO: 423306 - DNA, 97 bp, Homo sapiens; identical to SEQ ID NO: 204107
  chr16:4465717-4465814
  hyper

SEQ ID NO: 423307 - DNA, 219 bp, Homo sapiens; identical to SEQ ID NO: 238360
  chr16:4475918-4476137
  hyper

SEQ ID NO: 423308 - DNA, 156 bp, Homo sapiens; identical to SEQ ID NO: 238361
  chr16:4526213-4526369
  hyper

SEQ ID NO: 423309 - DNA, 119 bp, Homo sapiens; identical to SEQ ID NO: 291316
  chr16:4588823-4588942
  hyper

SEQ ID NO: 423310 - DNA, 46 bp, Homo sapiens; identical to SEQ ID NO: 238363
  chr16:4665023-4665069
  hyper

SEQ ID NO: 423311 - DNA, 134 bp, Homo sapiens; identical to SEQ ID NO: 238364
  chr16:4666535-4666669
  hyper

SEQ ID NO: 423312 - DNA, 140 bp, Homo sapiens; identical to SEQ ID NO: 238365
  chr16:4743270-4743410
  hyper

SEQ ID NO: 423313 - DNA, 393 bp, Homo sapiens; identical to SEQ ID NO: 291320
  chr16:4852797-4853190
  hyper

SEQ ID NO: 423314 - DNA, 141 bp, Homo sapiens; identical to SEQ ID NO: 291323
  chr16:5121865-5122006
  hyper

SEQ ID NO: 423315 - DNA, 43 bp, Homo sapiens; identical to SEQ ID NO: 238373
  chr16:5122223-5122266
  hyper

SEQ ID NO: 423316 - DNA, 48 bp, Homo sapiens; identical to SEQ ID NO: 204111
  chr16:6070019-6070067
  hyper

SEQ ID NO: 423317 - DNA, 185 bp, Homo sapiens; identical to SEQ ID NO: 204112
  chr16:6070269-6070454
  hyper

SEQ ID NO: 423318 - DNA, 213 bp, Homo sapiens; identical to SEQ ID NO: 291332
  chr16:6533082-6533295
  hyper

SEQ ID NO: 423319 - DNA, 75 bp, Homo sapiens; identical to SEQ ID NO: 291333
  chr16:6533714-6533789
  hyper

SEQ ID NO: 423320 - DNA, 78 bp, Homo sapiens; identical to SEQ ID NO: 291334
  chr16:6533790-6533868
  hyper

SEQ ID NO: 423321 - DNA, 54 bp, Homo sapiens; identical to SEQ ID NO: 204113
  chr16:7354124-7354178
  hyper

SEQ ID NO: 423322 - DNA, 150 bp, Homo sapiens; identical to SEQ ID NO: 204114
  chr16:7354238-7354388
  hyper

SEQ ID NO: 423323 - DNA, 45 bp, Homo sapiens; identical to SEQ ID NO: 52800
  chr16:7354699-7354744
  hyper

SEQ ID NO: 423324 - DNA, 91 bp, Homo sapiens; identical to SEQ ID NO: 291342
  chr16:9229669-9229760
  hyper

SEQ ID NO: 423325 - DNA, 772 bp, Homo sapiens; identical to SEQ ID NO: 204120
  chr16:10673913-10674685
  hyper

SEQ ID NO: 423326 - DNA, 101 bp, Homo sapiens; identical to SEQ ID NO: 238389
  chr16:10837591-10837692
  hyper

SEQ ID NO: 423327 - DNA, 114 bp, Homo sapiens; identical to SEQ ID NO: 204121
  chr16:11035552-11035666
  hyper

SEQ ID NO: 423328 - DNA, 416 bp, Homo sapiens; identical to SEQ ID NO: 225015
  chr16:11348663-11349079
  hyper

SEQ ID NO: 423329 - DNA, 125 bp, Homo sapiens; identical to SEQ ID NO: 238390
  chr16:11350261-11350386
  hyper

SEQ ID NO: 423330 - DNA, 36 bp, Homo sapiens; identical to SEQ ID NO: 238391
  chr16:11351144-11351180
  hyper

SEQ ID NO: 423331 - DNA, 78 bp, Homo sapiens; identical to SEQ ID NO: 291351
  chr16:11439013-11439091
  hyper

SEQ ID NO: 423332 - DNA, 147 bp, Homo sapiens; identical to SEQ ID NO: 126824
  chr16:11439156-11439303
  hyper

SEQ ID NO: 423333 - DNA, 193 bp, Homo sapiens; identical to SEQ ID NO: 204122
  chr16:11762783-11762976
  hyper

SEQ ID NO: 423334 - DNA, 305 bp, Homo sapiens; identical to SEQ ID NO: 126829
  chr16:11836647-11836952
  hyper

SEQ ID NO: 423335 - DNA, 110 bp, Homo sapiens; identical to SEQ ID NO: 238395
  chr16:11944971-11945081
  hyper

SEQ ID NO: 423336 - DNA, 31 bp, Homo sapiens; identical to SEQ ID NO: 238396
  chr16:12913374-12913405
  hyper

SEQ ID NO: 423337 - DNA, 177 bp, Homo sapiens; identical to SEQ ID NO: 225021
  chr16:13877530-13877707
  hyper

SEQ ID NO: 423338 - DNA, 140 bp, Homo sapiens; identical to SEQ ID NO: 238402
  chr16:14379226-14379366
  hyper

SEQ ID NO: 423339 - DNA, 91 bp, Homo sapiens; identical to SEQ ID NO: 238404
  chr16:14727905-14727996
  hyper

SEQ ID NO: 423340 - DNA, 71 bp, Homo sapiens; identical to SEQ ID NO: 238405
  chr16:15188339-15188410
  hyper

SEQ ID NO: 423341 - DNA, 115 bp, Homo sapiens; identical to SEQ ID NO: 238407
  chr16:15737214-15737329
  hyper

SEQ ID NO: 423342 - DNA, 32 bp, Homo sapiens; identical to SEQ ID NO: 291366
  chr16:15951337-15951369
  hyper

SEQ ID NO: 423343 - DNA, 33 bp, Homo sapiens; identical to SEQ ID NO: 238409
  chr16:15982613-15982646
  hyper

SEQ ID NO: 423344 - DNA, 130 bp, Homo sapiens; identical to SEQ ID NO: 204126
  chr16:16043203-16043333
  hyper

SEQ ID NO: 423345 - DNA, 103 bp, Homo sapiens; identical to SEQ ID NO: 204127
  chr16:16155950-16156053
  hyper

SEQ ID NO: 423346 - DNA, 71 bp, Homo sapiens; identical to SEQ ID NO: 238412
  chr16:17510577-17510648
  hyper

SEQ ID NO: 423347 - DNA, 234 bp, Homo sapiens; identical to SEQ ID NO: 238413
  chr16:18812906-18813140
  hyper

SEQ ID NO: 423348 - DNA, 392 bp, Homo sapiens; identical to SEQ ID NO: 291372
  chr16:18995158-18995550
  hyper

SEQ ID NO: 423349 - DNA, 36 bp, Homo sapiens; identical to SEQ ID NO: 238415
  chr16:19179237-19179273
  hyper

SEQ ID NO: 423350 - DNA, 32 bp, Homo sapiens; identical to SEQ ID NO: 204130
  chr16:19179914-19179946
  hyper

SEQ ID NO: 423351 - DNA, 142 bp, Homo sapiens; identical to SEQ ID NO: 204131
  chr16:19421882-19422024
  hyper

SEQ ID NO: 423352 - DNA, 217 bp, Homo sapiens; identical to SEQ ID NO: 204132
  chr16:19422166-19422383
  hyper

SEQ ID NO: 423353 - DNA, 187 bp, Homo sapiens
  chr16:20085465-20085652
  hyper
gtggtgtgggtaggatctgcctctcccgcagcggctcctcactcctccagcgtgtcctcagtttgcctttctccactctcctcgcagccacctctcttgcccctctccaatgcttccagtccatctccggatagaggattctatacctagggcaaagaacgggggaaggggtggggctgttggagca

SEQ ID NO: 423354 - DNA, 203 bp, Homo sapiens; identical to SEQ ID NO: 291379
  chr16:20359935-20360138
  hyper

SEQ ID NO: 423355 - DNA, 36 bp, Homo sapiens; identical to SEQ ID NO: 238423
  chr16:20753258-20753294
  hyper

SEQ ID NO: 423356 - DNA, 182 bp, Homo sapiens; identical to SEQ ID NO: 204133
  chr16:20817451-20817633
  hyper

SEQ ID NO: 423357 - DNA, 199 bp, Homo sapiens; identical to SEQ ID NO: 238424
  chr16:20911813-20912012
  hyper

SEQ ID NO: 423358 - DNA, 194 bp, Homo sapiens; identical to SEQ ID NO: 291383
  chr16:21295374-21295568
  hyper

SEQ ID NO: 423359 - DNA, 230 bp, Homo sapiens; identical to SEQ ID NO: 291386
  chr16:22217232-22217462
  hyper

SEQ ID NO: 423360 - DNA, 57 bp, Homo sapiens; identical to SEQ ID NO: 238431
  chr16:22308550-22308607
  hyper

SEQ ID NO: 423361 - DNA, 59 bp, Homo sapiens; identical to SEQ ID NO: 204136
  chr16:23159923-23159982
  hyper

SEQ ID NO: 423362 - DNA, 198 bp, Homo sapiens; identical to SEQ ID NO: 291390
  chr16:23194201-23194399
  hyper

SEQ ID NO: 423363 - DNA, 201 bp, Homo sapiens; identical to SEQ ID NO: 291391
  chr16:23194436-23194637
  hyper

SEQ ID NO: 423364 - DNA, 136 bp, Homo sapiens; identical to SEQ ID NO: 291392
  chr16:23313253-23313389
  hyper

SEQ ID NO: 423365 - DNA, 66 bp, Homo sapiens; identical to SEQ ID NO: 291393
  chr16:23314010-23314076
  hyper

SEQ ID NO: 423366 - DNA, 228 bp, Homo sapiens; identical to SEQ ID NO: 238437
  chr16:23464125-23464353
  hyper

SEQ ID NO: 423367 - DNA, 92 bp, Homo sapiens; identical to SEQ ID NO: 238438
  chr16:23464614-23464706
  hyper

SEQ ID NO: 423368 - DNA, 143 bp, Homo sapiens; identical to SEQ ID NO: 238439
  chr16:23568685-23568828
  hyper

SEQ ID NO: 423369 - DNA, 92 bp, Homo sapiens; identical to SEQ ID NO: 238440
  chr16:23607741-23607833
  hyper

SEQ ID NO: 423370 - DNA, 248 bp, Homo sapiens; identical to SEQ ID NO: 238441
  chr16:23652254-23652502
  hyper

SEQ ID NO: 423371 - DNA, 97 bp, Homo sapiens; identical to SEQ ID NO: 204138
  chr16:23766000-23766097
  hyper

SEQ ID NO: 423372 - DNA, 103 bp, Homo sapiens; identical to SEQ ID NO: 204139
  chr16:23766130-23766233
  hyper

SEQ ID NO: 423373 - DNA, 44 bp, Homo sapiens; identical to SEQ ID NO: 204140
  chr16:24354628-24354672
  hyper

SEQ ID NO: 423374 - DNA, 191 bp, Homo sapiens; identical to SEQ ID NO: 238446
  chr16:24550403-24550594
  hyper

SEQ ID NO: 423375 - DNA, 137 bp, Homo sapiens; identical to SEQ ID NO: 238447
  chr16:24551563-24551700
  hyper

SEQ ID NO: 423376 - DNA, 386 bp, Homo sapiens; identical to SEQ ID NO: 238448
  chr16:24740563-24740949
  hyper

SEQ ID NO: 423377 - DNA, 231 bp, Homo sapiens; identical to SEQ ID NO: 238449
  chr16:25025361-25025592
  hyper

SEQ ID NO: 423378 - DNA, 83 bp, Homo sapiens; identical to SEQ ID NO: 238451
  chr16:25123186-25123269
  hyper

SEQ ID NO: 423379 - DNA, 169 bp, Homo sapiens; identical to SEQ ID NO: 238452
  chr16:25268733-25268902
  hyper

SEQ ID NO: 423380 - DNA, 143 bp, Homo sapiens; identical to SEQ ID NO: 204142
  chr16:27121251-27121394
  hyper

SEQ ID NO: 423381 - DNA, 54 bp, Homo sapiens; identical to SEQ ID NO: 204143
  chr16:27215267-27215321
  hyper

SEQ ID NO: 423382 - DNA, 258 bp, Homo sapiens; identical to SEQ ID NO: 204144
  chr16:27280121-27280379
  hyper

SEQ ID NO: 423383 - DNA, 290 bp, Homo sapiens; identical to SEQ ID NO: 204145
  chr16:27413511-27413801
  hyper

SEQ ID NO: 423384 - DNA, 190 bp, Homo sapiens; identical to SEQ ID NO: 238458
  chr16:27561384-27561574
  hyper

SEQ ID NO: 423385 - DNA, 127 bp, Homo sapiens; identical to SEQ ID NO: 238459
  chr16:28223525-28223652
  hyper

SEQ ID NO: 423386 - DNA, 157 bp, Homo sapiens; identical to SEQ ID NO: 204146
  chr16:28304161-28304318
  hyper

SEQ ID NO: 423387 - DNA, 403 bp, Homo sapiens; identical to SEQ ID NO: 238461
  chr16:28502991-28503394
  hyper

SEQ ID NO: 423388 - DNA, 307 bp, Homo sapiens; identical to SEQ ID NO: 238462
  chr16:28874813-28875120
  hyper

SEQ ID NO: 423389 - DNA, 93 bp, Homo sapiens; identical to SEQ ID NO: 204149
  chr16:28936699-28936792
  hyper

SEQ ID NO: 423390 - DNA, 79 bp, Homo sapiens; identical to SEQ ID NO: 204150
  chr16:29606232-29606311
  hyper

SEQ ID NO: 423391 - DNA, 156 bp, Homo sapiens; identical to SEQ ID NO: 238466
  chr16:29691162-29691318
  hyper

SEQ ID NO: 423392 - DNA, 35 bp, Homo sapiens; identical to SEQ ID NO: 225043
  chr16:29691806-29691841
  hyper

SEQ ID NO: 423393 - DNA, 124 bp, Homo sapiens; identical to SEQ ID NO: 238467
  chr16:29721781-29721905
  hyper

SEQ ID NO: 423394 - DNA, 285 bp, Homo sapiens; identical to SEQ ID NO: 204153
  chr16:29822515-29822800
  hyper

SEQ ID NO: 423395 - DNA, 231 bp, Homo sapiens; identical to SEQ ID NO: 238471
  chr16:29827281-29827512
  hyper

SEQ ID NO: 423396 - DNA, 136 bp, Homo sapiens; identical to SEQ ID NO: 204154
  chr16:29836031-29836167
  hyper

SEQ ID NO: 423397 - DNA, 504 bp, Homo sapiens; identical to SEQ ID NO: 238472
  chr16:29874494-29874998
  hyper

SEQ ID NO: 423398 - DNA, 112 bp, Homo sapiens; identical to SEQ ID NO: 204155
  chr16:29888512-29888624
  hyper

SEQ ID NO: 423399 - DNA, 74 bp, Homo sapiens; identical to SEQ ID NO: 204156
  chr16:29888772-29888846
  hyper

SEQ ID NO: 423400 - DNA, 168 bp, Homo sapiens; identical to SEQ ID NO: 204157
  chr16:29910605-29910773
  hyper

SEQ ID NO: 423401 - DNA, 62 bp, Homo sapiens; identical to SEQ ID NO: 204158
  chr16:29910888-29910950
  hyper

SEQ ID NO: 423402 - DNA, 240 bp, Homo sapiens; identical to SEQ ID NO: 238476
  chr16:29973075-29973315
  hyper

SEQ ID NO: 423403 - DNA, 129 bp, Homo sapiens; identical to SEQ ID NO: 238477
  chr16:29984757-29984886
  hyper

SEQ ID NO: 423404 - DNA, 193 bp, Homo sapiens; identical to SEQ ID NO: 238478
  chr16:29985280-29985473
  hyper

SEQ ID NO: 423405 - DNA, 342 bp, Homo sapiens; identical to SEQ ID NO: 238479
  chr16:30006505-30006847
  hyper

SEQ ID NO: 423406 - DNA, 206 bp, Homo sapiens; identical to SEQ ID NO: 238480
  chr16:30007370-30007576
  hyper

SEQ ID NO: 423407 - DNA, 40 bp, Homo sapiens; identical to SEQ ID NO: 238481
  chr16:30032528-30032568
  hyper

SEQ ID NO: 423408 - DNA, 285 bp, Homo sapiens; identical to SEQ ID NO: 238482
  chr16:30075774-30076059
  hyper

SEQ ID NO: 423409 - DNA, 325 bp, Homo sapiens; identical to SEQ ID NO: 204159
  chr16:30077527-30077852
  hyper

SEQ ID NO: 423410 - DNA, 125 bp, Homo sapiens; identical to SEQ ID NO: 238484
  chr16:30103514-30103639
  hyper

SEQ ID NO: 423411 - DNA, 296 bp, Homo sapiens; identical to SEQ ID NO: 238485
  chr16:30379992-30380288
  hyper

SEQ ID NO: 423412 - DNA, 81 bp, Homo sapiens; identical to SEQ ID NO: 238486
  chr16:30382503-30382584
  hyper

SEQ ID NO: 423413 - DNA, 809 bp, Homo sapiens; identical to SEQ ID NO: 238487
  chr16:30411405-30412214
  hyper

SEQ ID NO: 423414 - DNA, 195 bp, Homo sapiens; identical to SEQ ID NO: 291449
  chr16:30428811-30429006
  hyper

SEQ ID NO: 423415 - DNA, 98 bp, Homo sapiens; identical to SEQ ID NO: 52973
  chr16:30429060-30429158
  hyper

SEQ ID NO: 423416 - DNA, 220 bp, Homo sapiens; identical to SEQ ID NO: 238489
  chr16:30545486-30545706
  hyper

SEQ ID NO: 423417 - DNA, 45 bp, Homo sapiens; identical to SEQ ID NO: 291452
  chr16:30545948-30545993
  hyper

SEQ ID NO: 423418 - DNA, 167 bp, Homo sapiens; identical to SEQ ID NO: 127066
  chr16:30546036-30546203
  hyper

SEQ ID NO: 423419 - DNA, 177 bp, Homo sapiens; identical to SEQ ID NO: 204161
  chr16:30583154-30583331
  hyper

SEQ ID NO: 423420 - DNA, 52 bp, Homo sapiens; identical to SEQ ID NO: 238492
  chr16:30583722-30583774
  hyper

SEQ ID NO: 423421 - DNA, 689 bp, Homo sapiens; identical to SEQ ID NO: 291456
  chr16:30596384-30597073
  hyper

SEQ ID NO: 423422 - DNA, 78 bp, Homo sapiens; identical to SEQ ID NO: 238495
  chr16:30669805-30669883
  hyper

SEQ ID NO: 423423 - DNA, 379 bp, Homo sapiens; identical to SEQ ID NO: 238496
  chr16:30670364-30670743
  hyper

SEQ ID NO: 423424 - DNA, 76 bp, Homo sapiens; identical to SEQ ID NO: 204164
  chr16:30786651-30786727
  hyper

SEQ ID NO: 423425 - DNA, 231 bp, Homo sapiens; identical to SEQ ID NO: 204165
  chr16:30787247-30787478
  hyper

SEQ ID NO: 423426 - DNA, 307 bp, Homo sapiens; identical to SEQ ID NO: 238499
  chr16:30797729-30798036
  hyper

SEQ ID NO: 423427 - DNA, 472 bp, Homo sapiens; identical to SEQ ID NO: 238500
  chr16:30798319-30798791
  hyper

SEQ ID NO: 423428 - DNA, 162 bp, Homo sapiens; identical to SEQ ID NO: 204168
  chr16:30816842-30817004
  hyper

SEQ ID NO: 423429 - DNA, 200 bp, Homo sapiens; identical to SEQ ID NO: 204169
  chr16:30817038-30817238
  hyper

SEQ ID NO: 423430 - DNA, 153 bp, Homo sapiens; identical to SEQ ID NO: 225049
  chr16:30905625-30905778
  hyper

SEQ ID NO: 423431 - DNA, 134 bp, Homo sapiens; identical to SEQ ID NO: 238502
  chr16:30934320-30934454
  hyper

SEQ ID NO: 423432 - DNA, 60 bp, Homo sapiens; identical to SEQ ID NO: 238503
  chr16:30934682-30934742
  hyper

SEQ ID NO: 423433 - DNA, 100 bp, Homo sapiens; identical to SEQ ID NO: 204170
  chr16:30935543-30935643
  hyper

SEQ ID NO: 423434 - DNA, 267 bp, Homo sapiens; identical to SEQ ID NO: 291472
  chr16:30964613-30964880
  hyper

SEQ ID NO: 423435 - DNA, 216 bp, Homo sapiens; identical to SEQ ID NO: 238506
  chr16:31044530-31044746
  hyper

SEQ ID NO: 423436 - DNA, 334 bp, Homo sapiens; identical to SEQ ID NO: 225052
  chr16:31075206-31075540
  hyper

SEQ ID NO: 423437 - DNA, 212 bp, Homo sapiens; identical to SEQ ID NO: 238507
  chr16:31085565-31085777
  hyper

SEQ ID NO: 423438 - DNA, 319 bp, Homo sapiens; identical to SEQ ID NO: 204175
  chr16:31117073-31117392
  hyper

SEQ ID NO: 423439 - DNA, 31 bp, Homo sapiens; identical to SEQ ID NO: 238509
  chr16:31128844-31128875
  hyper

SEQ ID NO: 423440 - DNA, 271 bp, Homo sapiens; identical to SEQ ID NO: 204176
  chr16:31153837-31154108
  hyper

SEQ ID NO: 423441 - DNA, 188 bp, Homo sapiens; identical to SEQ ID NO: 238510
  chr16:31191155-31191343
  hyper

SEQ ID NO: 423442 - DNA, 40 bp, Homo sapiens; identical to SEQ ID NO: 291482
  chr16:31227398-31227438
  hyper

SEQ ID NO: 423443 - DNA, 403 bp, Homo sapiens; identical to SEQ ID NO: 291484
  chr16:31453960-31454363
  hyper

SEQ ID NO: 423444 - DNA, 293 bp, Homo sapiens; identical to SEQ ID NO: 238514
  chr16:31469969-31470262
  hyper

SEQ ID NO: 423445 - DNA, 184 bp, Homo sapiens; identical to SEQ ID NO: 225056
  chr16:31487758-31487942
  hyper

SEQ ID NO: 423446 - DNA, 175 bp, Homo sapiens; identical to SEQ ID NO: 384603
  chr16:31498818-31498993
  hyper

SEQ ID NO: 423447 - DNA, 82 bp, Homo sapiens; identical to SEQ ID NO: 238517
  chr16:31519859-31519941
  hyper

SEQ ID NO: 423448 - DNA, 603 bp, Homo sapiens; identical to SEQ ID NO: 238520
  chr16:31885057-31885660
  hyper

SEQ ID NO: 423449 - DNA, 302 bp, Homo sapiens; identical to SEQ ID NO: 238521
  chr16:46723139-46723441
  hyper

SEQ ID NO: 423450 - DNA, 34 bp, Homo sapiens; identical to SEQ ID NO: 238522
  chr16:46917869-46917903
  hyper

SEQ ID NO: 423451 - DNA, 110 bp, Homo sapiens; identical to SEQ ID NO: 204181
  chr16:47175828-47175938
  hyper

SEQ ID NO: 423452 - DNA, 256 bp, Homo sapiens; identical to SEQ ID NO: 238526
  chr16:47495527-47495783
  hyper

SEQ ID NO: 423453 - DNA, 94 bp, Homo sapiens; identical to SEQ ID NO: 238527
  chr16:48399755-48399849
  hyper

SEQ ID NO: 423454 - DNA, 90 bp, Homo sapiens; identical to SEQ ID NO: 291501
  chr16:49308920-49309010
  hyper

SEQ ID NO: 423455 - DNA, 53 bp, Homo sapiens
  chr16:49317000-49317053
  hyper
gctccaggctttccagcccgggtgcggtagacgtagccctgaaggatgaaccc

SEQ ID NO: 423456 - DNA, 118 bp, Homo sapiens; identical to SEQ ID NO: 291504
  chr16:49317235-49317353
  hyper

SEQ ID NO: 423457 - DNA, 188 bp, Homo sapiens; identical to SEQ ID NO: 127168
  chr16:49889658-49889846
  hyper

SEQ ID NO: 423458 - DNA, 880 bp, Homo sapiens; identical to SEQ ID NO: 291506
  chr16:49890526-49891406
  hyper

SEQ ID NO: 423459 - DNA, 192 bp, Homo sapiens; identical to SEQ ID NO: 127170
  chr16:49891452-49891644
  hyper

SEQ ID NO: 423460 - DNA, 109 bp, Homo sapiens; identical to SEQ ID NO: 238536
  chr16:50188126-50188235
  hyper

SEQ ID NO: 423461 - DNA, 210 bp, Homo sapiens; identical to SEQ ID NO: 291509
  chr16:50581390-50581600
  hyper

SEQ ID NO: 423462 - DNA, 587 bp, Homo sapiens; identical to SEQ ID NO: 291510
  chr16:50581666-50582253
  hyper

SEQ ID NO: 423463 - DNA, 66 bp, Homo sapiens; identical to SEQ ID NO: 204188
  chr16:50773734-50773800
  hyper

SEQ ID NO: 423464 - DNA, 236 bp, Homo sapiens; identical to SEQ ID NO: 238538
  chr16:50775657-50775893
  hyper

SEQ ID NO: 423465 - DNA, 44 bp, Homo sapiens; identical to SEQ ID NO: 238539
  chr16:50840618-50840662
  hyper

SEQ ID NO: 423466 - DNA, 119 bp, Homo sapiens; identical to SEQ ID NO: 291514
  chr16:51167810-51167929
  hyper

SEQ ID NO: 423467 - DNA, 99 bp, Homo sapiens; identical to SEQ ID NO: 291516
  chr16:51189084-51189183
  hyper

SEQ ID NO: 423468 - DNA, 58 bp, Homo sapiens; identical to SEQ ID NO: 204191
  chr16:51189374-51189432
  hyper

SEQ ID NO: 423469 - DNA, 198 bp, Homo sapiens; identical to SEQ ID NO: 204192
  chr16:51189680-51189878
  hyper

SEQ ID NO: 423470 - DNA, 240 bp, Homo sapiens; identical to SEQ ID NO: 291519
  chr16:51190251-51190491
  hyper

SEQ ID NO: 423471 - DNA, 195 bp, Homo sapiens; identical to SEQ ID NO: 238545
  chr16:52579148-52579343
  hyper

SEQ ID NO: 423472 - DNA, 319 bp, Homo sapiens; identical to SEQ ID NO: 399906
  chr16:52580392-52580711
  hyper

SEQ ID NO: 423473 - DNA, 152 bp, Homo sapiens; identical to SEQ ID NO: 291522
  chr16:52581020-52581172
  hyper

SEQ ID NO: 423474 - DNA, 238 bp, Homo sapiens; identical to SEQ ID NO: 238548
  chr16:53088451-53088689
  hyper

SEQ ID NO: 423475 - DNA, 33 bp, Homo sapiens; identical to SEQ ID NO: 204196
  chr16:53468698-53468731
  hyper

SEQ ID NO: 423476 - DNA, 307 bp, Homo sapiens; identical to SEQ ID NO: 238550
  chr16:53537311-53537618
  hyper

SEQ ID NO: 423477 - DNA, 401 bp, Homo sapiens; identical to SEQ ID NO: 238551
  chr16:53737492-53737893
  hyper

SEQ ID NO: 423478 - DNA, 90 bp, Homo sapiens; identical to SEQ ID NO: 238552
  chr16:53738159-53738249
  hyper

SEQ ID NO: 423479 - DNA, 61 bp, Homo sapiens; identical to SEQ ID NO: 238556
  chr16:54404674-54404735
  hyper

SEQ ID NO: 423480 - DNA, 127 bp, Homo sapiens
  chr16:54963303-54963430
  hyper
ggaggggaggagccaacgcgcgtgcacgagagcgcagcaccgagcgggtgccggtgcggcgctgggttagtgtgagatcgcgaaataaagtacatctcgcccgtcaaagtcaatgcgagaaactttg

SEQ ID NO: 423481 - DNA, 265 bp, Homo sapiens; identical to SEQ ID NO: 291538
  chr16:54963876-54964141
  hyper

SEQ ID NO: 423482 - DNA, 285 bp, Homo sapiens; identical to SEQ ID NO: 291539
  chr16:54964663-54964948
  hyper

SEQ ID NO: 423483 - DNA, 431 bp, Homo sapiens; identical to SEQ ID NO: 291540
  chr16:54965135-54965566
  hyper

SEQ ID NO: 423484 - DNA, 69 bp, Homo sapiens; identical to SEQ ID NO: 204206
  chr16:55090597-55090666
  hyper

SEQ ID NO: 423485 - DNA, 32 bp, Homo sapiens; identical to SEQ ID NO: 204207
  chr16:55091068-55091100
  hyper

SEQ ID NO: 423486 - DNA, 195 bp, Homo sapiens; identical to SEQ ID NO: 291546
  chr16:55362578-55362773
  hyper

SEQ ID NO: 423487 - DNA, 99 bp, Homo sapiens; identical to SEQ ID NO: 291547
  chr16:55363256-55363355
  hyper

SEQ ID NO: 423488 - DNA, 59 bp, Homo sapiens; identical to SEQ ID NO: 238567
  chr16:55365833-55365892
  hyper

SEQ ID NO: 423489 - DNA, 138 bp, Homo sapiens; identical to SEQ ID NO: 204211
  chr16:55499096-55499234
  hyper

SEQ ID NO: 423490 - DNA, 142 bp, Homo sapiens; identical to SEQ ID NO: 204212
  chr16:55513539-55513681
  hyper

SEQ ID NO: 423491 - DNA, 55 bp, Homo sapiens; identical to SEQ ID NO: 225070
  chr16:56227984-56228039
  hyper

SEQ ID NO: 423492 - DNA, 217 bp, Homo sapiens; identical to SEQ ID NO: 291563
  chr16:56642231-56642448
  hyper

SEQ ID NO: 423493 - DNA, 113 bp, Homo sapiens; identical to SEQ ID NO: 291569
  chr16:56701843-56701956
  hyper

SEQ ID NO: 423494 - DNA, 71 bp, Homo sapiens; identical to SEQ ID NO: 291570
  chr16:56702221-56702292
  hyper

SEQ ID NO: 423495 - DNA, 97 bp, Homo sapiens; identical to SEQ ID NO: 238582
  chr16:56763915-56764012
  hyper

SEQ ID NO: 423496 - DNA, 67 bp, Homo sapiens; identical to SEQ ID NO: 204222
  chr16:57023303-57023370
  hyper

SEQ ID NO: 423497 - DNA, 360 bp, Homo sapiens; identical to SEQ ID NO: 291576
  chr16:57126699-57127059
  hyper

SEQ ID NO: 423498 - DNA, 95 bp, Homo sapiens; identical to SEQ ID NO: 238585
  chr16:57220055-57220150
  hyper

SEQ ID NO: 423499 - DNA, 273 bp, Homo sapiens; identical to SEQ ID NO: 238587
  chr16:57481495-57481768
  hyper

SEQ ID NO: 423500 - DNA, 336 bp, Homo sapiens; identical to SEQ ID NO: 238588
  chr16:57496650-57496986
  hyper

SEQ ID NO: 423501 - DNA, 145 bp, Homo sapiens; identical to SEQ ID NO: 238590
  chr16:57570647-57570792
  hyper

SEQ ID NO: 423502 - DNA, 616 bp, Homo sapiens; identical to SEQ ID NO: 238591
  chr16:57769284-57769900
  hyper

SEQ ID NO: 423503 - DNA, 241 bp, Homo sapiens; identical to SEQ ID NO: 238592
  chr16:58035172-58035413
  hyper

SEQ ID NO: 423504 - DNA, 206 bp, Homo sapiens; identical to SEQ ID NO: 238594
  chr16:58059307-58059513
  hyper

SEQ ID NO: 423505 - DNA, 749 bp, Homo sapiens; identical to SEQ ID NO: 291587
  chr16:58059829-58060578
  hyper

SEQ ID NO: 423506 - DNA, 366 bp, Homo sapiens; identical to SEQ ID NO: 204228
  chr16:58060638-58061004
  hyper

SEQ ID NO: 423507 - DNA, 193 bp, Homo sapiens; identical to SEQ ID NO: 204229
  chr16:58061107-58061300
  hyper

SEQ ID NO: 423508 - DNA, 144 bp, Homo sapiens; identical to SEQ ID NO: 238596
  chr16:58283895-58284039
  hyper

SEQ ID NO: 423509 - DNA, 124 bp, Homo sapiens; identical to SEQ ID NO: 204230
  chr16:58426260-58426384
  hyper

SEQ ID NO: 423510 - DNA, 212 bp, Homo sapiens; identical to SEQ ID NO: 291593
  chr16:58548939-58549151
  hyper

SEQ ID NO: 423511 - DNA, 876 bp, Homo sapiens; identical to SEQ ID NO: 291594
  chr16:58549238-58550114
  hyper

SEQ ID NO: 423512 - DNA, 76 bp, Homo sapiens; identical to SEQ ID NO: 204233
  chr16:62068387-62068463
  hyper

SEQ ID NO: 423513 - DNA, 284 bp, Homo sapiens; identical to SEQ ID NO: 399926
  chr16:62068548-62068832
  hyper

SEQ ID NO: 423514 - DNA, 457 bp, Homo sapiens; identical to SEQ ID NO: 399927
  chr16:62070246-62070703
  hyper

SEQ ID NO: 423515 - DNA, 401 bp, Homo sapiens; identical to SEQ ID NO: 204238
  chr16:65155276-65155677
  hyper

SEQ ID NO: 423516 - DNA, 185 bp, Homo sapiens; identical to SEQ ID NO: 238603
  chr16:66440409-66440594
  hyper

SEQ ID NO: 423517 - DNA, 764 bp, Homo sapiens; identical to SEQ ID NO: 291602
  chr16:66460620-66461384
  hyper

SEQ ID NO: 423518 - DNA, 127 bp, Homo sapiens; identical to SEQ ID NO: 291603
  chr16:66461989-66462116
  hyper

SEQ ID NO: 423519 - DNA, 316 bp, Homo sapiens; identical to SEQ ID NO: 291606
  chr16:66730083-66730399
  hyper

SEQ ID NO: 423520 - DNA, 129 bp, Homo sapiens; identical to SEQ ID NO: 238608
  chr16:66914360-66914489
  hyper

SEQ ID NO: 423521 - DNA, 50 bp, Homo sapiens; identical to SEQ ID NO: 238609
  chr16:66914767-66914817
  hyper

SEQ ID NO: 423522 - DNA, 246 bp, Homo sapiens; identical to SEQ ID NO: 291609
  chr16:66959003-66959249
  hyper

SEQ ID NO: 423523 - DNA, 180 bp, Homo sapiens; identical to SEQ ID NO: 238611
  chr16:66968462-66968642
  hyper

SEQ ID NO: 423524 - DNA, 203 bp, Homo sapiens; identical to SEQ ID NO: 291611
  chr16:67183854-67184057
  hyper

SEQ ID NO: 423525 - DNA, 232 bp, Homo sapiens; identical to SEQ ID NO: 238613
  chr16:67193001-67193233
  hyper

SEQ ID NO: 423526 - DNA, 420 bp, Homo sapiens; identical to SEQ ID NO: 238614
  chr16:67194621-67195041
  hyper

SEQ ID NO: 423527 - DNA, 152 bp, Homo sapiens; identical to SEQ ID NO: 238618
  chr16:67218041-67218193
  hyper

SEQ ID NO: 423528 - DNA, 101 bp, Homo sapiens; identical to SEQ ID NO: 238619
  chr16:67225901-67226002
  hyper

SEQ ID NO: 423529 - DNA, 105 bp, Homo sapiens; identical to SEQ ID NO: 204248
  chr16:67261057-67261162
  hyper

SEQ ID NO: 423530 - DNA, 215 bp, Homo sapiens; identical to SEQ ID NO: 204249
  chr16:67280008-67280223
  hyper

SEQ ID NO: 423531 - DNA, 74 bp, Homo sapiens; identical to SEQ ID NO: 204250
  chr16:67280819-67280893
  hyper

SEQ ID NO: 423532 - DNA, 457 bp, Homo sapiens; identical to SEQ ID NO: 204251
  chr16:67281140-67281597
  hyper

SEQ ID NO: 423533 - DNA, 131 bp, Homo sapiens; identical to SEQ ID NO: 204253
  chr16:67464693-67464824
  hyper

SEQ ID NO: 423534 - DNA, 345 bp, Homo sapiens; identical to SEQ ID NO: 238627
  chr16:67465267-67465612
  hyper

SEQ ID NO: 423535 - DNA, 201 bp, Homo sapiens; identical to SEQ ID NO: 225094
  chr16:67563142-67563343
  hyper

SEQ ID NO: 423536 - DNA, 65 bp, Homo sapiens; identical to SEQ ID NO: 225095
  chr16:67563576-67563641
  hyper

SEQ ID NO: 423537 - DNA, 145 bp, Homo sapiens; identical to SEQ ID NO: 225096
  chr16:67564103-67564248
  hyper

SEQ ID NO: 423538 - DNA, 219 bp, Homo sapiens; identical to SEQ ID NO: 204255
  chr16:67571279-67571498
  hyper

SEQ ID NO: 423539 - DNA, 467 bp, Homo sapiens; identical to SEQ ID NO: 291636
  chr16:67571536-67572003
  hyper

SEQ ID NO: 423540 - DNA, 119 bp, Homo sapiens; identical to SEQ ID NO: 291638
  chr16:67700713-67700832
  hyper

SEQ ID NO: 423541 - DNA, 271 bp, Homo sapiens; identical to SEQ ID NO: 291639
  chr16:67701091-67701362
  hyper

SEQ ID NO: 423542 - DNA, 164 bp, Homo sapiens; identical to SEQ ID NO: 238630
  chr16:67753296-67753460
  hyper

SEQ ID NO: 423543 - DNA, 84 bp, Homo sapiens; identical to SEQ ID NO: 238631
  chr16:67867774-67867858
  hyper

SEQ ID NO: 423544 - DNA, 39 bp, Homo sapiens; identical to SEQ ID NO: 204258
  chr16:67876117-67876156
  hyper

SEQ ID NO: 423545 - DNA, 378 bp, Homo sapiens; identical to SEQ ID NO: 238633
  chr16:67881198-67881576
  hyper

SEQ ID NO: 423546 - DNA, 92 bp, Homo sapiens; identical to SEQ ID NO: 238634
  chr16:67907296-67907388
  hyper

SEQ ID NO: 423547 - DNA, 66 bp, Homo sapiens; identical to SEQ ID NO: 204259
  chr16:67969396-67969462
  hyper

SEQ ID NO: 423548 - DNA, 109 bp, Homo sapiens; identical to SEQ ID NO: 204260
  chr16:67969492-67969601
  hyper

SEQ ID NO: 423549 - DNA, 35 bp, Homo sapiens; identical to SEQ ID NO: 238637
  chr16:67970754-67970789
  hyper

SEQ ID NO: 423550 - DNA, 76 bp, Homo sapiens; identical to SEQ ID NO: 238638
  chr16:68057151-68057227
  hyper

SEQ ID NO: 423551 - DNA, 57 bp, Homo sapiens; identical to SEQ ID NO: 204267
  chr16:68298829-68298886
  hyper

SEQ ID NO: 423552 - DNA, 566 bp, Homo sapiens; identical to SEQ ID NO: 238641
  chr16:68344575-68345141
  hyper

SEQ ID NO: 423553 - DNA, 810 bp, Homo sapiens; identical to SEQ ID NO: 53222
  chr16:68481955-68482765
  hyper

SEQ ID NO: 423554 - DNA, 91 bp, Homo sapiens; identical to SEQ ID NO: 225106
  chr16:68564224-68564315
  hyper

SEQ ID NO: 423555 - DNA, 218 bp, Homo sapiens; identical to SEQ ID NO: 238644
  chr16:68573158-68573376
  hyper

SEQ ID NO: 423556 - DNA, 315 bp, Homo sapiens; identical to SEQ ID NO: 291661
  chr16:68678667-68678982
  hyper

SEQ ID NO: 423557 - DNA, 198 bp, Homo sapiens; identical to SEQ ID NO: 291664
  chr16:68680067-68680265
  hyper

SEQ ID NO: 423558 - DNA, 85 bp, Homo sapiens; identical to SEQ ID NO: 291666
  chr16:69139467-69139552
  hyper

SEQ ID NO: 423559 - DNA, 963 bp, Homo sapiens; identical to SEQ ID NO: 291667
  chr16:69139582-69140545
  hyper

SEQ ID NO: 423560 - DNA, 86 bp, Homo sapiens; identical to SEQ ID NO: 238650
  chr16:69166893-69166979
  hyper

SEQ ID NO: 423561 - DNA, 89 bp, Homo sapiens; identical to SEQ ID NO: 204274
  chr16:69373055-69373144
  hyper

SEQ ID NO: 423562 - DNA, 205 bp, Homo sapiens; identical to SEQ ID NO: 238651
  chr16:69373484-69373689
  hyper

SEQ ID NO: 423563 - DNA, 255 bp, Homo sapiens; identical to SEQ ID NO: 238653
  chr16:69458315-69458570
  hyper

SEQ ID NO: 423564 - DNA, 94 bp, Homo sapiens; identical to SEQ ID NO: 238655
  chr16:70333388-70333482
  hyper

SEQ ID NO: 423565 - DNA, 64 bp, Homo sapiens; identical to SEQ ID NO: 238656
  chr16:70380544-70380608
  hyper

SEQ ID NO: 423566 - DNA, 457 bp, Homo sapiens; identical to SEQ ID NO: 238657
  chr16:70415351-70415808
  hyper

SEQ ID NO: 423567 - DNA, 376 bp, Homo sapiens; identical to SEQ ID NO: 204275
  chr16:70472227-70472603
  hyper

SEQ ID NO: 423568 - DNA, 361 bp, Homo sapiens; identical to SEQ ID NO: 238659
  chr16:70473302-70473663
  hyper

SEQ ID NO: 423569 - DNA, 337 bp, Homo sapiens; identical to SEQ ID NO: 204276
  chr16:70719172-70719509
  hyper

SEQ ID NO: 423570 - DNA, 788 bp, Homo sapiens; identical to SEQ ID NO: 204277
  chr16:70719541-70720329
  hyper

SEQ ID NO: 423571 - DNA, 119 bp, Homo sapiens; identical to SEQ ID NO: 238661
  chr16:70834931-70835050
  hyper

SEQ ID NO: 423572 - DNA, 33 bp, Homo sapiens; identical to SEQ ID NO: 238662
  chr16:70835271-70835304
  hyper

SEQ ID NO: 423573 - DNA, 52 bp, Homo sapiens; identical to SEQ ID NO: 291682
  chr16:71264524-71264576
  hyper

SEQ ID NO: 423574 - DNA, 130 bp, Homo sapiens; identical to SEQ ID NO: 204278
  chr16:71323303-71323433
  hyper

SEQ ID NO: 423575 - DNA, 31 bp, Homo sapiens; identical to SEQ ID NO: 238666
  chr16:71496369-71496400
  hyper

SEQ ID NO: 423576 - DNA, 141 bp, Homo sapiens; identical to SEQ ID NO: 238668
  chr16:71841910-71842051
  hyper

SEQ ID NO: 423577 - DNA, 141 bp, Homo sapiens; identical to SEQ ID NO: 238669
  chr16:71842652-71842793
  hyper

SEQ ID NO: 423578 - DNA, 187 bp, Homo sapiens; identical to SEQ ID NO: 238670
  chr16:71880267-71880454
  hyper

SEQ ID NO: 423579 - DNA, 249 bp, Homo sapiens; identical to SEQ ID NO: 238671
  chr16:72127405-72127654
  hyper

SEQ ID NO: 423580 - DNA, 208 bp, Homo sapiens; identical to SEQ ID NO: 238672
  chr16:72127870-72128078
  hyper

SEQ ID NO: 423581 - DNA, 208 bp, Homo sapiens; identical to SEQ ID NO: 204280
  chr16:72699010-72699218
  hyper

SEQ ID NO: 423582 - DNA, 334 bp, Homo sapiens; identical to SEQ ID NO: 291692
  chr16:73091551-73091885
  hyper

SEQ ID NO: 423583 - DNA, 217 bp, Homo sapiens; identical to SEQ ID NO: 53263
  chr16:73091900-73092117
  hyper

SEQ ID NO: 423584 - DNA, 166 bp, Homo sapiens; identical to SEQ ID NO: 291694
  chr16:73092380-73092546
  hyper

SEQ ID NO: 423585 - DNA, 37 bp, Homo sapiens; identical to SEQ ID NO: 204284
  chr16:74352126-74352163
  hyper

SEQ ID NO: 423586 - DNA, 161 bp, Homo sapiens; identical to SEQ ID NO: 238676
  chr16:74640802-74640963
  hyper

SEQ ID NO: 423587 - DNA, 166 bp, Homo sapiens; identical to SEQ ID NO: 204286
  chr16:74700794-74700960
  hyper

SEQ ID NO: 423588 - DNA, 79 bp, Homo sapiens; identical to SEQ ID NO: 225115
  chr16:74808949-74809028
  hyper

SEQ ID NO: 423589 - DNA, 231 bp, Homo sapiens; identical to SEQ ID NO: 238678
  chr16:74847108-74847339
  hyper

SEQ ID NO: 423590 - DNA, 40 bp, Homo sapiens; identical to SEQ ID NO: 204287
  chr16:75018963-75019003
  hyper

SEQ ID NO: 423591 - DNA, 45 bp, Homo sapiens; identical to SEQ ID NO: 204288
  chr16:75032744-75032789
  hyper

SEQ ID NO: 423592 - DNA, 90 bp, Homo sapiens; identical to SEQ ID NO: 238680
  chr16:75267942-75268032
  hyper

SEQ ID NO: 423593 - DNA, 51 bp, Homo sapiens; identical to SEQ ID NO: 291706
  chr16:75284495-75284546
  hyper

SEQ ID NO: 423594 - DNA, 66 bp, Homo sapiens; identical to SEQ ID NO: 53281
  chr16:75284629-75284695
  hyper

SEQ ID NO: 423595 - DNA, 41 bp, Homo sapiens; identical to SEQ ID NO: 204290
  chr16:75285013-75285054
  hyper

SEQ ID NO: 423596 - DNA, 110 bp, Homo sapiens; identical to SEQ ID NO: 291709
  chr16:75285279-75285389
  hyper

SEQ ID NO: 423597 - DNA, 306 bp, Homo sapiens; identical to SEQ ID NO: 53284
  chr16:75285434-75285740
  hyper

SEQ ID NO: 423598 - DNA, 244 bp, Homo sapiens; identical to SEQ ID NO: 238684
  chr16:75299145-75299389
  hyper

SEQ ID NO: 423599 - DNA, 307 bp, Homo sapiens; identical to SEQ ID NO: 291712
  chr16:75299751-75300058
  hyper

SEQ ID NO: 423600 - DNA, 176 bp, Homo sapiens; identical to SEQ ID NO: 291713
  chr16:75529727-75529903
  hyper

SEQ ID NO: 423601 - DNA, 68 bp, Homo sapiens; identical to SEQ ID NO: 204295
  chr16:75681563-75681631
  hyper

SEQ ID NO: 423602 - DNA, 125 bp, Homo sapiens; identical to SEQ ID NO: 291716
  chr16:76311036-76311161
  hyper

SEQ ID NO: 423603 - DNA, 79 bp, Homo sapiens; identical to SEQ ID NO: 291717
  chr16:76311202-76311281
  hyper

SEQ ID NO: 423604 - DNA, 122 bp, Homo sapiens; identical to SEQ ID NO: 238690
  chr16:77224184-77224306
  hyper

SEQ ID NO: 423605 - DNA, 255 bp, Homo sapiens; identical to SEQ ID NO: 291722
  chr16:77747179-77747434
  hyper

SEQ ID NO: 423606 - DNA, 44 bp, Homo sapiens; identical to SEQ ID NO: 291725
  chr16:78139958-78140002
  hyper

SEQ ID NO: 423607 - DNA, 32 bp, Homo sapiens; identical to SEQ ID NO: 225129
  chr16:78425003-78425035
  hyper

SEQ ID NO: 423608 - DNA, 108 bp, Homo sapiens; identical to SEQ ID NO: 238695
  chr16:78804565-78804673
  hyper

SEQ ID NO: 423609 - DNA, 125 bp, Homo sapiens; identical to SEQ ID NO: 291729
  chr16:79623477-79623602
  hyper

SEQ ID NO: 423610 - DNA, 93 bp, Homo sapiens; identical to SEQ ID NO: 291733
  chr16:79635694-79635787
  hyper

SEQ ID NO: 423611 - DNA, 103 bp, Homo sapiens; identical to SEQ ID NO: 204305
  chr16:79636191-79636294
  hyper

SEQ ID NO: 423612 - DNA, 115 bp, Homo sapiens; identical to SEQ ID NO: 399976
  chr16:79804693-79804808
  hyper

SEQ ID NO: 423613 - DNA, 396 bp, Homo sapiens; identical to SEQ ID NO: 291742
  chr16:80966003-80966399
  hyper

SEQ ID NO: 423614 - DNA, 74 bp, Homo sapiens; identical to SEQ ID NO: 291743
  chr16:80966431-80966505
  hyper

SEQ ID NO: 423615 - DNA, 301 bp, Homo sapiens; identical to SEQ ID NO: 238705
  chr16:81039731-81040032
  hyper

SEQ ID NO: 423616 - DNA, 132 bp, Homo sapiens; identical to SEQ ID NO: 204313
  chr16:81040580-81040712
  hyper

SEQ ID NO: 423617 - DNA, 445 bp, Homo sapiens; identical to SEQ ID NO: 238707
  chr16:81110796-81111241
  hyper

SEQ ID NO: 423618 - DNA, 126 bp, Homo sapiens; identical to SEQ ID NO: 238708
  chr16:81130106-81130232
  hyper

SEQ ID NO: 423619 - DNA, 35 bp, Homo sapiens; identical to SEQ ID NO: 238709
  chr16:81348358-81348393
  hyper

SEQ ID NO: 423620 - DNA, 214 bp, Homo sapiens; identical to SEQ ID NO: 238710
  chr16:81348862-81349076
  hyper

SEQ ID NO: 423621 - DNA, 161 bp, Homo sapiens; identical to SEQ ID NO: 204316
  chr16:81812592-81812753
  hyper

SEQ ID NO: 423622 - DNA, 155 bp, Homo sapiens; identical to SEQ ID NO: 238713
  chr16:82204032-82204187
  hyper

SEQ ID NO: 423623 - DNA, 122 bp, Homo sapiens; identical to SEQ ID NO: 238715
  chr16:83986688-83986810
  hyper

SEQ ID NO: 423624 - DNA, 50 bp, Homo sapiens; identical to SEQ ID NO: 238716
  chr16:84151074-84151124
  hyper

SEQ ID NO: 423625 - DNA, 177 bp, Homo sapiens; identical to SEQ ID NO: 238717
  chr16:84179011-84179188
  hyper

SEQ ID NO: 423626 - DNA, 282 bp, Homo sapiens; identical to SEQ ID NO: 204320
  chr16:84401741-84402023
  hyper

SEQ ID NO: 423627 - DNA, 61 bp, Homo sapiens; identical to SEQ ID NO: 238720
  chr16:84733968-84734029
  hyper

SEQ ID NO: 423628 - DNA, 91 bp, Homo sapiens; identical to SEQ ID NO: 238722
  chr16:85045410-85045501
  hyper

SEQ ID NO: 423629 - DNA, 97 bp, Homo sapiens; identical to SEQ ID NO: 225138
  chr16:85143894-85143991
  hyper

SEQ ID NO: 423630 - DNA, 151 bp, Homo sapiens; identical to SEQ ID NO: 238725
  chr16:85205738-85205889
  hyper

SEQ ID NO: 423631 - DNA, 110 bp, Homo sapiens; identical to SEQ ID NO: 204323
  chr16:85482269-85482379
  hyper

SEQ ID NO: 423632 - DNA, 279 bp, Homo sapiens
  chr16:85589833-85590112
  hyper
gcgccgtggcttgaacggtgctttttgttcattcctgggttttaatattattttccttcttcatccctctctggccactatggaattctaatttgaaccatgtttggattgaagccgcctctgtattacttaccaggtaagcgagccgtgcgcctccctgggtcccgcgcggcgccggcgcgcccgggaccctccctcacccgacccccctccgccagacccccgagccagggtcggggcattgggtccgccggtgccccccgcagacgcgcgcggcct

SEQ ID NO: 423633 - DNA, 111 bp, Homo sapiens; identical to SEQ ID NO: 238729
  chr16:85645214-85645325
  hyper

SEQ ID NO: 423634 - DNA, 444 bp, Homo sapiens; identical to SEQ ID NO: 238730
  chr16:85722385-85722829
  hyper

SEQ ID NO: 423635 - DNA, 208 bp, Homo sapiens; identical to SEQ ID NO: 238731
  chr16:86273134-86273342
  hyper

SEQ ID NO: 423636 - DNA, 95 bp, Homo sapiens; identical to SEQ ID NO: 291775
  chr16:86320170-86320265
  hyper

SEQ ID NO: 423637 - DNA, 49 bp, Homo sapiens; identical to SEQ ID NO: 204327
  chr16:86321068-86321117
  hyper

SEQ ID NO: 423638 - DNA, 439 bp, Homo sapiens; identical to SEQ ID NO: 291777
  chr16:86334431-86334870
  hyper

SEQ ID NO: 423639 - DNA, 53 bp, Homo sapiens; identical to SEQ ID NO: 291783
  chr16:86549503-86549556
  hyper

SEQ ID NO: 423640 - DNA, 88 bp, Homo sapiens; identical to SEQ ID NO: 53433
  chr16:86549624-86549712
  hyper

SEQ ID NO: 423641 - DNA, 112 bp, Homo sapiens; identical to SEQ ID NO: 238742
  chr16:86597561-86597673
  hyper

SEQ ID NO: 423642 - DNA, 77 bp, Homo sapiens; identical to SEQ ID NO: 291786
  chr16:86602514-86602591
  hyper

SEQ ID NO: 423643 - DNA, 237 bp, Homo sapiens; identical to SEQ ID NO: 238749
  chr16:87350811-87351048
  hyper

SEQ ID NO: 423644 - DNA, 183 bp, Homo sapiens; identical to SEQ ID NO: 238751
  chr16:87577567-87577750
  hyper

SEQ ID NO: 423645 - DNA, 279 bp, Homo sapiens; identical to SEQ ID NO: 291794
  chr16:87635461-87635740
  hyper

SEQ ID NO: 423646 - DNA, 85 bp, Homo sapiens
  chr16:87635827-87635912
  hyper
tttaaatcccactcccggagggggcgggggcgccccggctggaccccggtttccagtccggcgggggccccggggaagcccaggg

SEQ ID NO: 423647 - DNA, 138 bp, Homo sapiens
  chr16:87637403-87637541
  hyper
ggacacagcaggccggagacctgcgggaagggccaggctgggcccgcggccctggggaacccagcaagggcagagggggctgggagaagggcccctccccttgttggctttgccccccaccctggaggccgcccttcg

SEQ ID NO: 423648 - DNA, 83 bp, Homo sapiens; identical to SEQ ID NO: 238756
  chr16:87695288-87695371
  hyper

SEQ ID NO: 423649 - DNA, 133 bp, Homo sapiens; identical to SEQ ID NO: 238757
  chr16:87984528-87984661
  hyper

SEQ ID NO: 423650 - DNA, 130 bp, Homo sapiens; identical to SEQ ID NO: 225161
  chr16:88031994-88032124
  hyper

SEQ ID NO: 423651 - DNA, 280 bp, Homo sapiens; identical to SEQ ID NO: 291802
  chr16:88060796-88061076
  hyper

SEQ ID NO: 423652 - DNA, 49 bp, Homo sapiens; identical to SEQ ID NO: 291804
  chr16:88450453-88450502
  hyper

SEQ ID NO: 423653 - DNA, 174 bp, Homo sapiens; identical to SEQ ID NO: 238760
  chr16:88522425-88522599
  hyper

SEQ ID NO: 423654 - DNA, 107 bp, Homo sapiens; identical to SEQ ID NO: 204337
  chr16:88636352-88636459
  hyper

SEQ ID NO: 423655 - DNA, 91 bp, Homo sapiens; identical to SEQ ID NO: 225166
  chr16:88721558-88721649
  hyper

SEQ ID NO: 423656 - DNA, 526 bp, Homo sapiens; identical to SEQ ID NO: 238762
  chr16:88729457-88729983
  hyper

SEQ ID NO: 423657 - DNA, 182 bp, Homo sapiens; identical to SEQ ID NO: 291810
  chr16:88752793-88752975
  hyper

SEQ ID NO: 423658 - DNA, 133 bp, Homo sapiens; identical to SEQ ID NO: 225167
  chr16:88764923-88765056
  hyper

SEQ ID NO: 423659 - DNA, 105 bp, Homo sapiens; identical to SEQ ID NO: 225168
  chr16:88817839-88817944
  hyper

SEQ ID NO: 423660 - DNA, 114 bp, Homo sapiens; identical to SEQ ID NO: 204339
  chr16:88851818-88851932
  hyper

SEQ ID NO: 423661 - DNA, 507 bp, Homo sapiens; identical to SEQ ID NO: 204340
  chr16:88878527-88879034
  hyper

SEQ ID NO: 423662 - DNA, 381 bp, Homo sapiens; identical to SEQ ID NO: 204341
  chr16:88950011-88950392
  hyper

SEQ ID NO: 423663 - DNA, 40 bp, Homo sapiens; identical to SEQ ID NO: 204346
  chr16:89266729-89266769
  hyper

SEQ ID NO: 423664 - DNA, 157 bp, Homo sapiens; identical to SEQ ID NO: 127778
  chr16:89267957-89268114
  hyper

SEQ ID NO: 423665 - DNA, 263 bp, Homo sapiens; identical to SEQ ID NO: 204348
  chr16:89614907-89615170
  hyper

SEQ ID NO: 423666 - DNA, 75 bp, Homo sapiens; identical to SEQ ID NO: 238769
  chr16:89626701-89626776
  hyper

SEQ ID NO: 423667 - DNA, 153 bp, Homo sapiens; identical to SEQ ID NO: 204349
  chr16:89627717-89627870
  hyper

SEQ ID NO: 423668 - DNA, 490 bp, Homo sapiens; identical to SEQ ID NO: 291828
  chr16:89778233-89778723
  hyper

SEQ ID NO: 423669 - DNA, 32 bp, Homo sapiens; identical to SEQ ID NO: 238772
  chr16:89787466-89787498
  hyper

SEQ ID NO: 423670 - DNA, 200 bp, Homo sapiens; identical to SEQ ID NO: 238773
  chr16:89788695-89788895
  hyper

SEQ ID NO: 423671 - DNA, 94 bp, Homo sapiens; identical to SEQ ID NO: 238774
  chr16:89882314-89882408
  hyper

SEQ ID NO: 423672 - DNA, 237 bp, Homo sapiens; identical to SEQ ID NO: 291832
  chr16:89894335-89894572
  hyper

SEQ ID NO: 423673 - DNA, 50 bp, Homo sapiens; identical to SEQ ID NO: 238777
  chr16:89984233-89984283
  hyper

SEQ ID NO: 423674 - DNA, 84 bp, Homo sapiens; identical to SEQ ID NO: 238778
  chr16:89984503-89984587
  hyper

SEQ ID NO: 423675 - DNA, 202 bp, Homo sapiens; identical to SEQ ID NO: 204352
  chr16:89989101-89989303
  hyper

SEQ ID NO: 423676 - DNA, 253 bp, Homo sapiens; identical to SEQ ID NO: 238780
  chr16:89990062-89990315
  hyper

SEQ ID NO: 423677 - DNA, 123 bp, Homo sapiens; identical to SEQ ID NO: 204354
  chr16:90085456-90085579
  hyper

SEQ ID NO: 423678 - DNA, 72 bp, Homo sapiens; identical to SEQ ID NO: 53511
  chr16:90086126-90086198
  hyper

SEQ ID NO: 423679 - DNA, 45 bp, Homo sapiens; identical to SEQ ID NO: 225179
  chr16:90087050-90087095
  hyper

SEQ ID NO: 423680 - DNA, 528 bp, Homo sapiens; identical to SEQ ID NO: 204355
  chr16:90088770-90089298
  hyper

SEQ ID NO: 423681 - DNA, 71 bp, Homo sapiens
  chr17:523856-523927
  hyper
gtgggtcaccaagtggatgttcaaagcatgacagctatgggtgtttcagattctacattctattttttttt

SEQ ID NO: 423682 - DNA, 78 bp, Homo sapiens; identical to SEQ ID NO: 225182
  chr17:635476-635554
  hyper

SEQ ID NO: 423683 - DNA, 138 bp, Homo sapiens; identical to SEQ ID NO: 204358
  chr17:635798-635936
  hyper

SEQ ID NO: 423684 - DNA, 299 bp, Homo sapiens; identical to SEQ ID NO: 53517
  chr17:635959-636258
  hyper

SEQ ID NO: 423685 - DNA, 91 bp, Homo sapiens; identical to SEQ ID NO: 291848
  chr17:655679-655770
  hyper

SEQ ID NO: 423686 - DNA, 90 bp, Homo sapiens; identical to SEQ ID NO: 127827
  chr17:655880-655970
  hyper

SEQ ID NO: 423687 - DNA, 58 bp, Homo sapiens; identical to SEQ ID NO: 238786
  chr17:685406-685464
  hyper

SEQ ID NO: 423688 - DNA, 84 bp, Homo sapiens; identical to SEQ ID NO: 225185
  chr17:883202-883286
  hyper

SEQ ID NO: 423689 - DNA, 236 bp, Homo sapiens; identical to SEQ ID NO: 238787
  chr17:900017-900253
  hyper

SEQ ID NO: 423690 - DNA, 73 bp, Homo sapiens; identical to SEQ ID NO: 225186
  chr17:1132222-1132295
  hyper

SEQ ID NO: 423691 - DNA, 91 bp, Homo sapiens; identical to SEQ ID NO: 204362
  chr17:1390869-1390960
  hyper

SEQ ID NO: 423692 - DNA, 182 bp, Homo sapiens; identical to SEQ ID NO: 204363
  chr17:1420195-1420377
  hyper

SEQ ID NO: 423693 - DNA, 183 bp, Homo sapiens; identical to SEQ ID NO: 204364
  chr17:1588082-1588265
  hyper

SEQ ID NO: 423694 - DNA, 802 bp, Homo sapiens; identical to SEQ ID NO: 291859
  chr17:1613225-1614027
  hyper

SEQ ID NO: 423695 - DNA, 403 bp, Homo sapiens; identical to SEQ ID NO: 238796
  chr17:1619656-1620059
  hyper

SEQ ID NO: 423696 - DNA, 231 bp, Homo sapiens; identical to SEQ ID NO: 238797
  chr17:1667771-1668002
  hyper

SEQ ID NO: 423697 - DNA, 234 bp, Homo sapiens; identical to SEQ ID NO: 291865
  chr17:1927172-1927406
  hyper

SEQ ID NO: 423698 - DNA, 284 bp, Homo sapiens; identical to SEQ ID NO: 291866
  chr17:1927706-1927990
  hyper

SEQ ID NO: 423699 - DNA, 144 bp, Homo sapiens; identical to SEQ ID NO: 291867
  chr17:1928280-1928424
  hyper

SEQ ID NO: 423700 - DNA, 295 bp, Homo sapiens; identical to SEQ ID NO: 238801
  chr17:1929078-1929373
  hyper

SEQ ID NO: 423701 - DNA, 82 bp, Homo sapiens; identical to SEQ ID NO: 238802
  chr17:1933404-1933486
  hyper

SEQ ID NO: 423702 - DNA, 665 bp, Homo sapiens; identical to SEQ ID NO: 291873
  chr17:1961434-1962099
  hyper

SEQ ID NO: 423703 - DNA, 162 bp, Homo sapiens; identical to SEQ ID NO: 291874
  chr17:2156702-2156864
  hyper

SEQ ID NO: 423704 - DNA, 91 bp, Homo sapiens; identical to SEQ ID NO: 204368
  chr17:2206903-2206994
  hyper

SEQ ID NO: 423705 - DNA, 50 bp, Homo sapiens; identical to SEQ ID NO: 204369
  chr17:2302239-2302289
  hyper

SEQ ID NO: 423706 - DNA, 248 bp, Homo sapiens; identical to SEQ ID NO: 238806
  chr17:2303774-2304022
  hyper

SEQ ID NO: 423707 - DNA, 77 bp, Homo sapiens; identical to SEQ ID NO: 204370
  chr17:2627362-2627439
  hyper

SEQ ID NO: 423708 - DNA, 87 bp, Homo sapiens; identical to SEQ ID NO: 238809
  chr17:2679493-2679580
  hyper

SEQ ID NO: 423709 - DNA, 543 bp, Homo sapiens
  chr17:2757041-2757584
  hyper
ggaaatgcccgcgccgggggagcggacggcggctgccccgcgggccccgaggagacgctgaaggtcgccgggagggaggggagagcgcgcggtcacctgacccccggggcgcacctaggcggggcggggcccatgcgaggcggaggccgggggccggggcgcgggctcaggggccgggtgcggagcgcgcggagccggggctgcggggacgcgggcgggcgaggtcgggcaccgcgggcggcctcgccatgtcccagcccgcggggaggaggcattgccgaaaggcggggatccgcgccgccgtggtgctcatcggactcctgcacaaatcccggaggcagaataaagagaaaaggtaaacccctgcagcgccggccgcttccctccgctctcctgctgcatgccagttttctttggggtggacttttccgatgggtgtttggttccgtgttggttagaaaaaagcctcctctccaggtaccgtcgtgcgaaccgagttcggagcttcgccccggaccctggctggtgcgaggagcctgggca

SEQ ID NO: 423710 - DNA, 121 bp, Homo sapiens; identical to SEQ ID NO: 291883
  chr17:2757704-2757825
  hyper

SEQ ID NO: 423711 - DNA, 140 bp, Homo sapiens; identical to SEQ ID NO: 204372
  chr17:2951983-2952123
  hyper

SEQ ID NO: 423712 - DNA, 279 bp, Homo sapiens; identical to SEQ ID NO: 291885
  chr17:2952280-2952559
  hyper

SEQ ID NO: 423713 - DNA, 258 bp, Homo sapiens; identical to SEQ ID NO: 238813
  chr17:3539485-3539743
  hyper

SEQ ID NO: 423714 - DNA, 70 bp, Homo sapiens; identical to SEQ ID NO: 291887
  chr17:3571907-3571977
  hyper

SEQ ID NO: 423715 - DNA, 48 bp, Homo sapiens; identical to SEQ ID NO: 127913
  chr17:3572001-3572049
  hyper

SEQ ID NO: 423716 - DNA, 54 bp, Homo sapiens; identical to SEQ ID NO: 238815
  chr17:3572297-3572351
  hyper

SEQ ID NO: 423717 - DNA, 155 bp, Homo sapiens; identical to SEQ ID NO: 225197
  chr17:3778891-3779046
  hyper

SEQ ID NO: 423718 - DNA, 114 bp, Homo sapiens; identical to SEQ ID NO: 238818
  chr17:3868443-3868557
  hyper

SEQ ID NO: 423719 - DNA, 290 bp, Homo sapiens; identical to SEQ ID NO: 238820
  chr17:4046209-4046499
  hyper

SEQ ID NO: 423720 - DNA, 148 bp, Homo sapiens; identical to SEQ ID NO: 204378
  chr17:4402640-4402788
  hyper

SEQ ID NO: 423721 - DNA, 98 bp, Homo sapiens; identical to SEQ ID NO: 238823
  chr17:4607657-4607755
  hyper

SEQ ID NO: 423722 - DNA, 139 bp, Homo sapiens; identical to SEQ ID NO: 238824
  chr17:4614298-4614437
  hyper

SEQ ID NO: 423723 - DNA, 118 bp, Homo sapiens; identical to SEQ ID NO: 238825
  chr17:4634531-4634649
  hyper

SEQ ID NO: 423724 - DNA, 42 bp, Homo sapiens; identical to SEQ ID NO: 225200
  chr17:4647512-4647554
  hyper

SEQ ID NO: 423725 - DNA, 172 bp, Homo sapiens; identical to SEQ ID NO: 238826
  chr17:4843519-4843691
  hyper

SEQ ID NO: 423726 - DNA, 105 bp, Homo sapiens; identical to SEQ ID NO: 238828
  chr17:4871286-4871391
  hyper

SEQ ID NO: 423727 - DNA, 118 bp, Homo sapiens; identical to SEQ ID NO: 204382
  chr17:4901561-4901679
  hyper

SEQ ID NO: 423728 - DNA, 281 bp, Homo sapiens; identical to SEQ ID NO: 291909
  chr17:4938733-4939014
  hyper

SEQ ID NO: 423729 - DNA, 256 bp, Homo sapiens; identical to SEQ ID NO: 238833
  chr17:5094998-5095254
  hyper

SEQ ID NO: 423730 - DNA, 394 bp, Homo sapiens; identical to SEQ ID NO: 238834
  chr17:5322761-5323155
  hyper

SEQ ID NO: 423731 - DNA, 106 bp, Homo sapiens; identical to SEQ ID NO: 204384
  chr17:5389578-5389684
  hyper

SEQ ID NO: 423732 - DNA, 34 bp, Homo sapiens; identical to SEQ ID NO: 204385
  chr17:5390233-5390267
  hyper

SEQ ID NO: 423733 - DNA, 196 bp, Homo sapiens; identical to SEQ ID NO: 238837
  chr17:5972267-5972463
  hyper

SEQ ID NO: 423734 - DNA, 204 bp, Homo sapiens; identical to SEQ ID NO: 204386
  chr17:5974393-5974597
  hyper

SEQ ID NO: 423735 - DNA, 134 bp, Homo sapiens; identical to SEQ ID NO: 204387
  chr17:6347035-6347169
  hyper

SEQ ID NO: 423736 - DNA, 337 bp, Homo sapiens; identical to SEQ ID NO: 204388
  chr17:6347453-6347790
  hyper

SEQ ID NO: 423737 - DNA, 214 bp, Homo sapiens; identical to SEQ ID NO: 291919
  chr17:6347820-6348034
  hyper

SEQ ID NO: 423738 - DNA, 70 bp, Homo sapiens; identical to SEQ ID NO: 238842
  chr17:6399733-6399803
  hyper

SEQ ID NO: 423739 - DNA, 603 bp, Homo sapiens; identical to SEQ ID NO: 291921
  chr17:6459172-6459775
  hyper

SEQ ID NO: 423740 - DNA, 31 bp, Homo sapiens; identical to SEQ ID NO: 53621
  chr17:6459791-6459822
  hyper

SEQ ID NO: 423741 - DNA, 192 bp, Homo sapiens; identical to SEQ ID NO: 238845
  chr17:6460089-6460281
  hyper

SEQ ID NO: 423742 - DNA, 241 bp, Homo sapiens; identical to SEQ ID NO: 238846
  chr17:6544040-6544281
  hyper

SEQ ID NO: 423743 - DNA, 389 bp, Homo sapiens; identical to SEQ ID NO: 238847
  chr17:6554828-6555217
  hyper

SEQ ID NO: 423744 - DNA, 204 bp, Homo sapiens; identical to SEQ ID NO: 291926
  chr17:6734926-6735130
  hyper

SEQ ID NO: 423745 - DNA, 273 bp, Homo sapiens; identical to SEQ ID NO: 238852
  chr17:6915580-6915853
  hyper

SEQ ID NO: 423746 - DNA, 237 bp, Homo sapiens; identical to SEQ ID NO: 291929
  chr17:6945870-6946107
  hyper

SEQ ID NO: 423747 - DNA, 37 bp, Homo sapiens; identical to SEQ ID NO: 291930
  chr17:6946175-6946212
  hyper

SEQ ID NO: 423748 - DNA, 51 bp, Homo sapiens; identical to SEQ ID NO: 291931
  chr17:6946491-6946542
  hyper

SEQ ID NO: 423749 - DNA, 166 bp, Homo sapiens; identical to SEQ ID NO: 291932
  chr17:7137843-7138009
  hyper

SEQ ID NO: 423750 - DNA, 105 bp, Homo sapiens; identical to SEQ ID NO: 238858
  chr17:7145849-7145954
  hyper

SEQ ID NO: 423751 - DNA, 190 bp, Homo sapiens; identical to SEQ ID NO: 291934
  chr17:7146325-7146515
  hyper

SEQ ID NO: 423752 - DNA, 76 bp, Homo sapiens; identical to SEQ ID NO: 291935
  chr17:7146588-7146664
  hyper

SEQ ID NO: 423753 - DNA, 258 bp, Homo sapiens; identical to SEQ ID NO: 238860
  chr17:7155207-7155465
  hyper

SEQ ID NO: 423754 - DNA, 105 bp, Homo sapiens; identical to SEQ ID NO: 238861
  chr17:7155683-7155788
  hyper

SEQ ID NO: 423755 - DNA, 133 bp, Homo sapiens; identical to SEQ ID NO: 204394
  chr17:7184885-7185018
  hyper

SEQ ID NO: 423756 - DNA, 293 bp, Homo sapiens; identical to SEQ ID NO: 291942
  chr17:7199730-7200023
  hyper

SEQ ID NO: 423757 - DNA, 99 bp, Homo sapiens; identical to SEQ ID NO: 238866
  chr17:7218861-7218960
  hyper

SEQ ID NO: 423758 - DNA, 130 bp, Homo sapiens; identical to SEQ ID NO: 238867
  chr17:7232755-7232885
  hyper

SEQ ID NO: 423759 - DNA, 491 bp, Homo sapiens; identical to SEQ ID NO: 238868
  chr17:7284208-7284699
  hyper

SEQ ID NO: 423760 - DNA, 102 bp, Homo sapiens; identical to SEQ ID NO: 238869
  chr17:7307383-7307485
  hyper

SEQ ID NO: 423761 - DNA, 629 bp, Homo sapiens; identical to SEQ ID NO: 291948
  chr17:7340252-7340881
  hyper

SEQ ID NO: 423762 - DNA, 370 bp, Homo sapiens; identical to SEQ ID NO: 291952
  chr17:7387161-7387531
  hyper

SEQ ID NO: 423763 - DNA, 201 bp, Homo sapiens; identical to SEQ ID NO: 238873
  chr17:7475777-7475978
  hyper

SEQ ID NO: 423764 - DNA, 385 bp, Homo sapiens; identical to SEQ ID NO: 291954
  chr17:7486279-7486664
  hyper

SEQ ID NO: 423765 - DNA, 317 bp, Homo sapiens; identical to SEQ ID NO: 291955
  chr17:7486947-7487264
  hyper

SEQ ID NO: 423766 - DNA, 165 bp, Homo sapiens; identical to SEQ ID NO: 204402
  chr17:7571719-7571884
  hyper

SEQ ID NO: 423767 - DNA, 773 bp, Homo sapiens; identical to SEQ ID NO: 204403
  chr17:7572184-7572957
  hyper

SEQ ID NO: 423768 - DNA, 46 bp, Homo sapiens; identical to SEQ ID NO: 204404
  chr17:7573922-7573968
  hyper

SEQ ID NO: 423769 - DNA, 301 bp, Homo sapiens; identical to SEQ ID NO: 204405
  chr17:7576546-7576847
  hyper

SEQ ID NO: 423770 - DNA, 163 bp, Homo sapiens; identical to SEQ ID NO: 204406
  chr17:7578570-7578733
  hyper

SEQ ID NO: 423771 - DNA, 36 bp, Homo sapiens; identical to SEQ ID NO: 204407
  chr17:7579249-7579285
  hyper

SEQ ID NO: 423772 - DNA, 60 bp, Homo sapiens; identical to SEQ ID NO: 204408
  chr17:7579880-7579940
  hyper

SEQ ID NO: 423773 - DNA, 329 bp, Homo sapiens; identical to SEQ ID NO: 204409
  chr17:7590625-7590954
  hyper

SEQ ID NO: 423774 - DNA, 35 bp, Homo sapiens; identical to SEQ ID NO: 238876
  chr17:7591550-7591585
  hyper

SEQ ID NO: 423775 - DNA, 138 bp, Homo sapiens; identical to SEQ ID NO: 238877
  chr17:7591824-7591962
  hyper

SEQ ID NO: 423776 - DNA, 53 bp, Homo sapiens; identical to SEQ ID NO: 238878
  chr17:7621507-7621560
  hyper

SEQ ID NO: 423777 - DNA, 48 bp, Homo sapiens; identical to SEQ ID NO: 204410
  chr17:7739847-7739895
  hyper

SEQ ID NO: 423778 - DNA, 49 bp, Homo sapiens; identical to SEQ ID NO: 204411
  chr17:7744964-7745013
  hyper

SEQ ID NO: 423779 - DNA, 41 bp, Homo sapiens; identical to SEQ ID NO: 238883
  chr17:7791235-7791276
  hyper

SEQ ID NO: 423780 - DNA, 55 bp, Homo sapiens; identical to SEQ ID NO: 238884
  chr17:7835479-7835534
  hyper

SEQ ID NO: 423781 - DNA, 199 bp, Homo sapiens; identical to SEQ ID NO: 238885
  chr17:7905914-7906113
  hyper

SEQ ID NO: 423782 - DNA, 433 bp, Homo sapiens; identical to SEQ ID NO: 291977
  chr17:7975836-7976269
  hyper

SEQ ID NO: 423783 - DNA, 320 bp, Homo sapiens; identical to SEQ ID NO: 291978
  chr17:7976318-7976638
  hyper

SEQ ID NO: 423784 - DNA, 56 bp, Homo sapiens; identical to SEQ ID NO: 238888
  chr17:8021862-8021918
  hyper

SEQ ID NO: 423785 - DNA, 100 bp, Homo sapiens; identical to SEQ ID NO: 204413
  chr17:8022390-8022490
  hyper

SEQ ID NO: 423786 - DNA, 40 bp, Homo sapiens; identical to SEQ ID NO: 238890
  chr17:8022550-8022590
  hyper

SEQ ID NO: 423787 - DNA, 211 bp, Homo sapiens; identical to SEQ ID NO: 238891
  chr17:8026217-8026428
  hyper

SEQ ID NO: 423788 - DNA, 63 bp, Homo sapiens; identical to SEQ ID NO: 291983
  chr17:8027809-8027872
  hyper

SEQ ID NO: 423789 - DNA, 127 bp, Homo sapiens; identical to SEQ ID NO: 291984
  chr17:8027922-8028049
  hyper

SEQ ID NO: 423790 - DNA, 91 bp, Homo sapiens; identical to SEQ ID NO: 204416
  chr17:8093691-8093782
  hyper

SEQ ID NO: 423791 - DNA, 35 bp, Homo sapiens; identical to SEQ ID NO: 204417
  chr17:8191800-8191835
  hyper

SEQ ID NO: 423792 - DNA, 43 bp, Homo sapiens; identical to SEQ ID NO: 204418
  chr17:8280080-8280123
  hyper

SEQ ID NO: 423793 - DNA, 34 bp, Homo sapiens; identical to SEQ ID NO: 238898
  chr17:8286558-8286592
  hyper

SEQ ID NO: 423794 - DNA, 149 bp, Homo sapiens; identical to SEQ ID NO: 238899
  chr17:8287112-8287261
  hyper

SEQ ID NO: 423795 - DNA, 213 bp, Homo sapiens; identical to SEQ ID NO: 291992
  chr17:8532948-8533161
  hyper

SEQ ID NO: 423796 - DNA, 192 bp, Homo sapiens; identical to SEQ ID NO: 204420
  chr17:8533199-8533391
  hyper

SEQ ID NO: 423797 - DNA, 168 bp, Homo sapiens; identical to SEQ ID NO: 291994
  chr17:8533392-8533560
  hyper

SEQ ID NO: 423798 - DNA, 90 bp, Homo sapiens; identical to SEQ ID NO: 204421
  chr17:8649035-8649125
  hyper

SEQ ID NO: 423799 - DNA, 33 bp, Homo sapiens; identical to SEQ ID NO: 225226
  chr17:8759640-8759673
  hyper

SEQ ID NO: 423800 - DNA, 37 bp, Homo sapiens; identical to SEQ ID NO: 204422
  chr17:8869471-8869508
  hyper

SEQ ID NO: 423801 - DNA, 218 bp, Homo sapiens; identical to SEQ ID NO: 204423
  chr17:8907838-8908056
  hyper

SEQ ID NO: 423802 - DNA, 530 bp, Homo sapiens; identical to SEQ ID NO: 292002
  chr17:8925060-8925590
  hyper

SEQ ID NO: 423803 - DNA, 227 bp, Homo sapiens; identical to SEQ ID NO: 292003
  chr17:8925833-8926060
  hyper

SEQ ID NO: 423804 - DNA, 242 bp, Homo sapiens
  chr17:9548035-9548277
  hyper
tgagagcctgaaaacttcctggttagcaaatactgaggctggaaagggcctgaacttggcagtccatagatccaggtcgagttccggtttccctgcttacggatcgggcggcctccctacgttgcgataacctctctgagcccccttccttgccgattaaagcaagggtgatcaagtcttgcaagtttttggaaaatgattctaacccaatctgtggtgtaaaaaagcaaaccacaaccact

SEQ ID NO: 423805 - DNA, 149 bp, Homo sapiens; identical to SEQ ID NO: 238913
  chr17:9862885-9863034
  hyper

SEQ ID NO: 423806 - DNA, 41 bp, Homo sapiens; identical to SEQ ID NO: 204428
  chr17:10600737-10600778
  hyper

SEQ ID NO: 423807 - DNA, 50 bp, Homo sapiens; identical to SEQ ID NO: 400072
  chr17:10633595-10633645
  hyper

SEQ ID NO: 423808 - DNA, 281 bp, Homo sapiens; identical to SEQ ID NO: 292014
  chr17:11501656-11501937
  hyper

SEQ ID NO: 423809 - DNA, 146 bp, Homo sapiens; identical to SEQ ID NO: 292015
  chr17:11502034-11502180
  hyper

SEQ ID NO: 423810 - DNA, 135 bp, Homo sapiens; identical to SEQ ID NO: 204432
  chr17:12877185-12877320
  hyper

SEQ ID NO: 423811 - DNA, 48 bp, Homo sapiens; identical to SEQ ID NO: 204433
  chr17:12877650-12877698
  hyper

SEQ ID NO: 423812 - DNA, 35 bp, Homo sapiens; identical to SEQ ID NO: 292023
  chr17:12877746-12877781
  hyper

SEQ ID NO: 423813 - DNA, 268 bp, Homo sapiens; identical to SEQ ID NO: 238920
  chr17:12921256-12921524
  hyper

SEQ ID NO: 423814 - DNA, 109 bp, Homo sapiens; identical to SEQ ID NO: 204434
  chr17:13505656-13505765
  hyper

SEQ ID NO: 423815 - DNA, 206 bp, Homo sapiens; identical to SEQ ID NO: 238924
  chr17:15164106-15164312
  hyper

SEQ ID NO: 423816 - DNA, 122 bp, Homo sapiens; identical to SEQ ID NO: 204438
  chr17:15164530-15164652
  hyper

SEQ ID NO: 423817 - DNA, 164 bp, Homo sapiens; identical to SEQ ID NO: 292033
  chr17:15164715-15164879
  hyper

SEQ ID NO: 423818 - DNA, 160 bp, Homo sapiens; identical to SEQ ID NO: 204440
  chr17:15165789-15165949
  hyper

SEQ ID NO: 423819 - DNA, 67 bp, Homo sapiens; identical to SEQ ID NO: 292036
  chr17:15821030-15821097
  hyper

SEQ ID NO: 423820 - DNA, 81 bp, Homo sapiens; identical to SEQ ID NO: 238930
  chr17:15903673-15903754
  hyper

SEQ ID NO: 423821 - DNA, 116 bp, Homo sapiens; identical to SEQ ID NO: 238931
  chr17:16120414-16120530
  hyper

SEQ ID NO: 423822 - DNA, 60 bp, Homo sapiens
  chr17:16290017-16290077
  hyper
acagagccagaacttgtctcaaaaaaacaaaaaacaaaaaactggccagtgtgtgagggg

SEQ ID NO: 423823 - DNA, 338 bp, Homo sapiens; identical to SEQ ID NO: 238934
  chr17:16342655-16342993
  hyper

SEQ ID NO: 423824 - DNA, 57 bp, Homo sapiens; identical to SEQ ID NO: 225243
  chr17:16395229-16395286
  hyper

SEQ ID NO: 423825 - DNA, 101 bp, Homo sapiens; identical to SEQ ID NO: 238935
  chr17:16439048-16439149
  hyper

SEQ ID NO: 423826 - DNA, 86 bp, Homo sapiens; identical to SEQ ID NO: 238936
  chr17:16439419-16439505
  hyper

SEQ ID NO: 423827 - DNA, 271 bp, Homo sapiens; identical to SEQ ID NO: 292051
  chr17:16440043-16440314
  hyper

SEQ ID NO: 423828 - DNA, 45 bp, Homo sapiens; identical to SEQ ID NO: 292053
  chr17:16570628-16570673
  hyper

SEQ ID NO: 423829 - DNA, 133 bp, Homo sapiens; identical to SEQ ID NO: 204449
  chr17:17140479-17140612
  hyper

SEQ ID NO: 423830 - DNA, 113 bp, Homo sapiens; identical to SEQ ID NO: 238941
  chr17:17184594-17184707
  hyper

SEQ ID NO: 423831 - DNA, 75 bp, Homo sapiens; identical to SEQ ID NO: 292056
  chr17:17204069-17204144
  hyper

SEQ ID NO: 423832 - DNA, 38 bp, Homo sapiens; identical to SEQ ID NO: 292057
  chr17:17204211-17204249
  hyper

SEQ ID NO: 423833 - DNA, 81 bp, Homo sapiens; identical to SEQ ID NO: 204450
  chr17:17398323-17398404
  hyper

SEQ ID NO: 423834 - DNA, 166 bp, Homo sapiens; identical to SEQ ID NO: 204451
  chr17:17398440-17398606
  hyper

SEQ ID NO: 423835 - DNA, 227 bp, Homo sapiens; identical to SEQ ID NO: 238946
  chr17:17596965-17597192
  hyper

SEQ ID NO: 423836 - DNA, 525 bp, Homo sapiens; identical to SEQ ID NO: 238947
  chr17:17655444-17655969
  hyper

SEQ ID NO: 423837 - DNA, 68 bp, Homo sapiens; identical to SEQ ID NO: 238949
  chr17:17876012-17876080
  hyper

SEQ ID NO: 423838 - DNA, 81 bp, Homo sapiens; identical to SEQ ID NO: 204455
  chr17:17991153-17991234
  hyper

SEQ ID NO: 423839 - DNA, 144 bp, Homo sapiens; identical to SEQ ID NO: 238951
  chr17:18086430-18086574
  hyper

SEQ ID NO: 423840 - DNA, 42 bp, Homo sapiens; identical to SEQ ID NO: 238952
  chr17:18163702-18163744
  hyper

SEQ ID NO: 423841 - DNA, 218 bp, Homo sapiens; identical to SEQ ID NO: 238953
  chr17:18164239-18164457
  hyper

SEQ ID NO: 423842 - DNA, 258 bp, Homo sapiens; identical to SEQ ID NO: 238955
  chr17:18266750-18267008
  hyper

SEQ ID NO: 423843 - DNA, 230 bp, Homo sapiens; identical to SEQ ID NO: 238956
  chr17:18761717-18761947
  hyper

SEQ ID NO: 423844 - DNA, 66 bp, Homo sapiens; identical to SEQ ID NO: 384641
  chr17:18908242-18908308
  hyper

SEQ ID NO: 423845 - DNA, 111 bp, Homo sapiens; identical to SEQ ID NO: 238959
  chr17:19141268-19141379
  hyper

SEQ ID NO: 423846 - DNA, 45 bp, Homo sapiens; identical to SEQ ID NO: 238960
  chr17:19141603-19141648
  hyper

SEQ ID NO: 423847 - DNA, 144 bp, Homo sapiens; identical to SEQ ID NO: 204460
  chr17:19265481-19265625
  hyper

SEQ ID NO: 423848 - DNA, 138 bp, Homo sapiens; identical to SEQ ID NO: 204461
  chr17:19281498-19281636
  hyper

SEQ ID NO: 423849 - DNA, 240 bp, Homo sapiens; identical to SEQ ID NO: 238965
  chr17:19552168-19552408
  hyper

SEQ ID NO: 423850 - DNA, 224 bp, Homo sapiens; identical to SEQ ID NO: 292082
  chr17:19648279-19648503
  hyper

SEQ ID NO: 423851 - DNA, 265 bp, Homo sapiens; identical to SEQ ID NO: 292083
  chr17:19770124-19770389
  hyper

SEQ ID NO: 423852 - DNA, 462 bp, Homo sapiens; identical to SEQ ID NO: 238968
  chr17:19881063-19881525
  hyper

SEQ ID NO: 423853 - DNA, 246 bp, Homo sapiens; identical to SEQ ID NO: 204463
  chr17:20059180-20059426
  hyper

SEQ ID NO: 423854 - DNA, 110 bp, Homo sapiens; identical to SEQ ID NO: 238971
  chr17:20744391-20744501
  hyper

SEQ ID NO: 423855 - DNA, 69 bp, Homo sapiens; identical to SEQ ID NO: 238973
  chr17:20945959-20946028
  hyper

SEQ ID NO: 423856 - DNA, 132 bp, Homo sapiens; identical to SEQ ID NO: 204464
  chr17:21030040-21030172
  hyper

SEQ ID NO: 423857 - DNA, 86 bp, Homo sapiens; identical to SEQ ID NO: 238975
  chr17:21069251-21069337
  hyper

SEQ ID NO: 423858 - DNA, 83 bp, Homo sapiens; identical to SEQ ID NO: 238976
  chr17:21117925-21118008
  hyper

SEQ ID NO: 423859 - DNA, 111 bp, Homo sapiens; identical to SEQ ID NO: 238977
  chr17:21187754-21187865
  hyper

SEQ ID NO: 423860 - DNA, 212 bp, Homo sapiens; identical to SEQ ID NO: 204465
  chr17:21189752-21189964
  hyper

SEQ ID NO: 423861 - DNA, 202 bp, Homo sapiens; identical to SEQ ID NO: 204466
  chr17:25659906-25660108
  hyper

SEQ ID NO: 423862 - DNA, 48 bp, Homo sapiens; identical to SEQ ID NO: 292097
  chr17:26120916-26120964
  hyper

SEQ ID NO: 423863 - DNA, 38 bp, Homo sapiens; identical to SEQ ID NO: 238980
  chr17:26220451-26220489
  hyper

SEQ ID NO: 423864 - DNA, 60 bp, Homo sapiens; identical to SEQ ID NO: 238983
  chr17:26879852-26879912
  hyper

SEQ ID NO: 423865 - DNA, 332 bp, Homo sapiens; identical to SEQ ID NO: 204469
  chr17:26925694-26926026
  hyper

SEQ ID NO: 423866 - DNA, 342 bp, Homo sapiens; identical to SEQ ID NO: 11045
  chr17:26926083-26926425
  hyper

SEQ ID NO: 423867 - DNA, 56 bp, Homo sapiens; identical to SEQ ID NO: 204471
  chr17:26926827-26926883
  hyper

SEQ ID NO: 423868 - DNA, 326 bp, Homo sapiens; identical to SEQ ID NO: 238987
  chr17:26988802-26989128
  hyper

SEQ ID NO: 423869 - DNA, 72 bp, Homo sapiens; identical to SEQ ID NO: 238989
  chr17:27039397-27039469
  hyper

SEQ ID NO: 423870 - DNA, 52 bp, Homo sapiens; identical to SEQ ID NO: 238991
  chr17:27046942-27046994
  hyper

SEQ ID NO: 423871 - DNA, 399 bp, Homo sapiens; identical to SEQ ID NO: 238992
  chr17:27070824-27071223
  hyper

SEQ ID NO: 423872 - DNA, 448 bp, Homo sapiens; identical to SEQ ID NO: 238993
  chr17:27181909-27182357
  hyper

SEQ ID NO: 423873 - DNA, 304 bp, Homo sapiens; identical to SEQ ID NO: 238994
  chr17:27230104-27230408
  hyper

SEQ ID NO: 423874 - DNA, 87 bp, Homo sapiens; identical to SEQ ID NO: 292117
  chr17:27333201-27333288
  hyper

SEQ ID NO: 423875 - DNA, 293 bp, Homo sapiens; identical to SEQ ID NO: 238995
  chr17:27621158-27621451
  hyper

SEQ ID NO: 423876 - DNA, 74 bp, Homo sapiens; identical to SEQ ID NO: 400107
  chr17:27940964-27941038
  hyper

SEQ ID NO: 423877 - DNA, 41 bp, Homo sapiens; identical to SEQ ID NO: 238998
  chr17:27941068-27941109
  hyper

SEQ ID NO: 423878 - DNA, 903 bp, Homo sapiens; identical to SEQ ID NO: 292123
  chr17:27942512-27943415
  hyper

SEQ ID NO: 423879 - DNA, 325 bp, Homo sapiens; identical to SEQ ID NO: 239003
  chr17:28256763-28257088
  hyper

SEQ ID NO: 423880 - DNA, 329 bp, Homo sapiens; identical to SEQ ID NO: 239004
  chr17:28443742-28444071
  hyper

SEQ ID NO: 423881 - DNA, 37 bp, Homo sapiens; identical to SEQ ID NO: 204480
  chr17:28562514-28562551
  hyper

SEQ ID NO: 423882 - DNA, 242 bp, Homo sapiens; identical to SEQ ID NO: 204481
  chr17:28563016-28563258
  hyper

SEQ ID NO: 423883 - DNA, 98 bp, Homo sapiens; identical to SEQ ID NO: 292129
  chr17:28563901-28563999
  hyper

SEQ ID NO: 423884 - DNA, 107 bp, Homo sapiens; identical to SEQ ID NO: 292130
  chr17:28705456-28705563
  hyper

SEQ ID NO: 423885 - DNA, 212 bp, Homo sapiens; identical to SEQ ID NO: 292131
  chr17:29033064-29033276
  hyper

SEQ ID NO: 423886 - DNA, 488 bp, Homo sapiens; identical to SEQ ID NO: 128356
  chr17:29421899-29422387
  hyper

SEQ ID NO: 423887 - DNA, 59 bp, Homo sapiens; identical to SEQ ID NO: 204485
  chr17:29422762-29422821
  hyper

SEQ ID NO: 423888 - DNA, 144 bp, Homo sapiens; identical to SEQ ID NO: 204486
  chr17:29483000-29483144
  hyper

SEQ ID NO: 423889 - DNA, 91 bp, Homo sapiens; identical to SEQ ID NO: 204487
  chr17:29486027-29486118
  hyper

SEQ ID NO: 423890 - DNA, 191 bp, Homo sapiens; identical to SEQ ID NO: 204488
  chr17:29490203-29490394
  hyper

SEQ ID NO: 423891 - DNA, 109 bp, Homo sapiens; identical to SEQ ID NO: 204489
  chr17:29496908-29497017
  hyper

SEQ ID NO: 423892 - DNA, 68 bp, Homo sapiens; identical to SEQ ID NO: 204490
  chr17:29508439-29508507
  hyper

SEQ ID NO: 423893 - DNA, 46 bp, Homo sapiens; identical to SEQ ID NO: 204491
  chr17:29508715-29508761
  hyper

SEQ ID NO: 423894 - DNA, 163 bp, Homo sapiens; identical to SEQ ID NO: 204492
  chr17:29509520-29509683
  hyper

SEQ ID NO: 423895 - DNA, 174 bp, Homo sapiens; identical to SEQ ID NO: 204493
  chr17:29527439-29527613
  hyper

SEQ ID NO: 423896 - DNA, 123 bp, Homo sapiens; identical to SEQ ID NO: 204494
  chr17:29528054-29528177
  hyper

SEQ ID NO: 423897 - DNA, 75 bp, Homo sapiens; identical to SEQ ID NO: 204495
  chr17:29528428-29528503
  hyper

SEQ ID NO: 423898 - DNA, 140 bp, Homo sapiens; identical to SEQ ID NO: 204496
  chr17:29533249-29533389
  hyper

SEQ ID NO: 423899 - DNA, 59 bp, Homo sapiens; identical to SEQ ID NO: 204497
  chr17:29541468-29541527
  hyper

SEQ ID NO: 423900 - DNA, 47 bp, Homo sapiens; identical to SEQ ID NO: 204498
  chr17:29541556-29541603
  hyper

SEQ ID NO: 423901 - DNA, 136 bp, Homo sapiens; identical to SEQ ID NO: 204499
  chr17:29546009-29546145
  hyper

SEQ ID NO: 423902 - DNA, 80 bp, Homo sapiens; identical to SEQ ID NO: 204500
  chr17:29548867-29548947
  hyper

SEQ ID NO: 423903 - DNA, 124 bp, Homo sapiens; identical to SEQ ID NO: 204501
  chr17:29550461-29550585
  hyper

SEQ ID NO: 423904 - DNA, 156 bp, Homo sapiens; identical to SEQ ID NO: 204502
  chr17:29552112-29552268
  hyper

SEQ ID NO: 423905 - DNA, 250 bp, Homo sapiens; identical to SEQ ID NO: 204503
  chr17:29553452-29553702
  hyper

SEQ ID NO: 423906 - DNA, 74 bp, Homo sapiens; identical to SEQ ID NO: 204504
  chr17:29554235-29554309
  hyper

SEQ ID NO: 423907 - DNA, 84 bp, Homo sapiens; identical to SEQ ID NO: 204505
  chr17:29554540-29554624
  hyper

SEQ ID NO: 423908 - DNA, 441 bp, Homo sapiens; identical to SEQ ID NO: 204506
  chr17:29556042-29556483
  hyper

SEQ ID NO: 423909 - DNA, 140 bp, Homo sapiens; identical to SEQ ID NO: 204507
  chr17:29556852-29556992
  hyper

SEQ ID NO: 423910 - DNA, 123 bp, Homo sapiens; identical to SEQ ID NO: 204508
  chr17:29557277-29557400
  hyper

SEQ ID NO: 423911 - DNA, 84 bp, Homo sapiens; identical to SEQ ID NO: 204509
  chr17:29557859-29557943
  hyper

SEQ ID NO: 423912 - DNA, 117 bp, Homo sapiens; identical to SEQ ID NO: 204510
  chr17:29559090-29559207
  hyper

SEQ ID NO: 423913 - DNA, 514 bp, Homo sapiens; identical to SEQ ID NO: 204511
  chr17:29559717-29560231
  hyper

SEQ ID NO: 423914 - DNA, 104 bp, Homo sapiens; identical to SEQ ID NO: 204512
  chr17:29562628-29562732
  hyper

SEQ ID NO: 423915 - DNA, 278 bp, Homo sapiens; identical to SEQ ID NO: 204513
  chr17:29562761-29563039
  hyper

SEQ ID NO: 423916 - DNA, 136 bp, Homo sapiens; identical to SEQ ID NO: 204514
  chr17:29576001-29576137
  hyper

SEQ ID NO: 423917 - DNA, 63 bp, Homo sapiens; identical to SEQ ID NO: 204515
  chr17:29579955-29580018
  hyper

SEQ ID NO: 423918 - DNA, 159 bp, Homo sapiens; identical to SEQ ID NO: 204516
  chr17:29585361-29585520
  hyper

SEQ ID NO: 423919 - DNA, 98 bp, Homo sapiens; identical to SEQ ID NO: 204517
  chr17:29586049-29586147
  hyper

SEQ ID NO: 423920 - DNA, 147 bp, Homo sapiens; identical to SEQ ID NO: 204518
  chr17:29587386-29587533
  hyper

SEQ ID NO: 423921 - DNA, 147 bp, Homo sapiens; identical to SEQ ID NO: 204519
  chr17:29588728-29588875
  hyper

SEQ ID NO: 423922 - DNA, 111 bp, Homo sapiens; identical to SEQ ID NO: 204520
  chr17:29592246-29592357
  hyper

SEQ ID NO: 423923 - DNA, 433 bp, Homo sapiens; identical to SEQ ID NO: 204521
  chr17:29652837-29653270
  hyper

SEQ ID NO: 423924 - DNA, 341 bp, Homo sapiens; identical to SEQ ID NO: 204522
  chr17:29654516-29654857
  hyper

SEQ ID NO: 423925 - DNA, 203 bp, Homo sapiens; identical to SEQ ID NO: 204523
  chr17:29657313-29657516
  hyper

SEQ ID NO: 423926 - DNA, 194 bp, Homo sapiens; identical to SEQ ID NO: 204524
  chr17:29661855-29662049
  hyper

SEQ ID NO: 423927 - DNA, 582 bp, Homo sapiens; identical to SEQ ID NO: 204525
  chr17:29663350-29663932
  hyper

SEQ ID NO: 423928 - DNA, 215 bp, Homo sapiens; identical to SEQ ID NO: 204526
  chr17:29664385-29664600
  hyper

SEQ ID NO: 423929 - DNA, 321 bp, Homo sapiens; identical to SEQ ID NO: 204527
  chr17:29664836-29665157
  hyper

SEQ ID NO: 423930 - DNA, 102 bp, Homo sapiens; identical to SEQ ID NO: 204528
  chr17:29665721-29665823
  hyper

SEQ ID NO: 423931 - DNA, 141 bp, Homo sapiens; identical to SEQ ID NO: 204529
  chr17:29667522-29667663
  hyper

SEQ ID NO: 423932 - DNA, 127 bp, Homo sapiens; identical to SEQ ID NO: 204530
  chr17:29670026-29670153
  hyper

SEQ ID NO: 423933 - DNA, 141 bp, Homo sapiens; identical to SEQ ID NO: 204531
  chr17:29676130-29676271
  hyper

SEQ ID NO: 423934 - DNA, 142 bp, Homo sapiens; identical to SEQ ID NO: 204532
  chr17:29677200-29677342
  hyper

SEQ ID NO: 423935 - DNA, 158 bp, Homo sapiens; identical to SEQ ID NO: 204533
  chr17:29679274-29679432
  hyper

SEQ ID NO: 423936 - DNA, 123 bp, Homo sapiens; identical to SEQ ID NO: 204534
  chr17:29683477-29683600
  hyper

SEQ ID NO: 423937 - DNA, 410 bp, Homo sapiens; identical to SEQ ID NO: 204535
  chr17:29683977-29684387
  hyper

SEQ ID NO: 423938 - DNA, 143 bp, Homo sapiens; identical to SEQ ID NO: 204536
  chr17:29685497-29685640
  hyper

SEQ ID NO: 423939 - DNA, 47 bp, Homo sapiens; identical to SEQ ID NO: 204537
  chr17:29685986-29686033
  hyper

SEQ ID NO: 423940 - DNA, 217 bp, Homo sapiens; identical to SEQ ID NO: 204538
  chr17:29687504-29687721
  hyper

SEQ ID NO: 423941 - DNA, 3665 bp, Homo sapiens; identical to SEQ ID NO: 204539
  chr17:29701030-29704695
  hyper

SEQ ID NO: 423942 - DNA, 143 bp, Homo sapiens; identical to SEQ ID NO: 204540
  chr17:30454644-30454787
  hyper

SEQ ID NO: 423943 - DNA, 266 bp, Homo sapiens; identical to SEQ ID NO: 239016
  chr17:30469088-30469354
  hyper

SEQ ID NO: 423944 - DNA, 1559 bp, Homo sapiens; identical to SEQ ID NO: 292193
  chr17:30592474-30594033
  hyper

SEQ ID NO: 423945 - DNA, 89 bp, Homo sapiens; identical to SEQ ID NO: 204542
  chr17:30813422-30813511
  hyper

SEQ ID NO: 423946 - DNA, 108 bp, Homo sapiens; identical to SEQ ID NO: 204545
  chr17:31203740-31203848
  hyper

SEQ ID NO: 423947 - DNA, 57 bp, Homo sapiens; identical to SEQ ID NO: 204546
  chr17:31254914-31254971
  hyper

SEQ ID NO: 423948 - DNA, 377 bp, Homo sapiens; identical to SEQ ID NO: 204547
  chr17:31255335-31255712
  hyper

SEQ ID NO: 423949 - DNA, 226 bp, Homo sapiens; identical to SEQ ID NO: 204549
  chr17:32906078-32906304
  hyper

SEQ ID NO: 423950 - DNA, 130 bp, Homo sapiens; identical to SEQ ID NO: 292205
  chr17:32965109-32965239
  hyper

SEQ ID NO: 423951 - DNA, 325 bp, Homo sapiens; identical to SEQ ID NO: 292206
  chr17:32965303-32965628
  hyper

SEQ ID NO: 423952 - DNA, 539 bp, Homo sapiens; identical to SEQ ID NO: 292208
  chr17:33288351-33288890
  hyper

SEQ ID NO: 423953 - DNA, 166 bp, Homo sapiens; identical to SEQ ID NO: 292209
  chr17:33288988-33289154
  hyper

SEQ ID NO: 423954 - DNA, 111 bp, Homo sapiens; identical to SEQ ID NO: 204551
  chr17:33446952-33447063
  hyper

SEQ ID NO: 423955 - DNA, 188 bp, Homo sapiens; identical to SEQ ID NO: 239035
  chr17:33469240-33469428
  hyper

SEQ ID NO: 423956 - DNA, 387 bp, Homo sapiens; identical to SEQ ID NO: 239039
  chr17:33787454-33787841
  hyper

SEQ ID NO: 423957 - DNA, 252 bp, Homo sapiens; identical to SEQ ID NO: 239041
  chr17:33905430-33905682
  hyper

SEQ ID NO: 423958 - DNA, 189 bp, Homo sapiens; identical to SEQ ID NO: 204556
  chr17:33914229-33914418
  hyper

SEQ ID NO: 423959 - DNA, 55 bp, Homo sapiens; identical to SEQ ID NO: 292221
  chr17:35014642-35014697
  hyper

SEQ ID NO: 423960 - DNA, 222 bp, Homo sapiens; identical to SEQ ID NO: 292223
  chr17:35241874-35242096
  hyper

SEQ ID NO: 423961 - DNA, 342 bp, Homo sapiens
  chr17:35293023-35293365
  hyper
gggggcggcggtcccgagttcctagccagagcgggattagggagttacgggttccctgaggagtgaactatggagggtgtggtttgctgttgtctggggaagccggtgccaacccgaagcctggacaggggaggactggaatcccggcacacgctgcccatgcactgcacgcccatctactgcagcctcttcgtggcgtcccggcaccccccctcctccttccctcttcccaacgccacgaccaccacccccagccgccgctggagcccccggtttcccgcctagtcgtttgtttttgtacgtaaaaggtgtctccggatcacagttttctcacaactttct

SEQ ID NO: 423962 - DNA, 456 bp, Homo sapiens; identical to SEQ ID NO: 292228
  chr17:35716404-35716860
  hyper

SEQ ID NO: 423963 - DNA, 64 bp, Homo sapiens; identical to SEQ ID NO: 239062
  chr17:35849757-35849821
  hyper

SEQ ID NO: 423964 - DNA, 424 bp, Homo sapiens; identical to SEQ ID NO: 239063
  chr17:35969347-35969771
  hyper

SEQ ID NO: 423965 - DNA, 387 bp, Homo sapiens; identical to SEQ ID NO: 239064
  chr17:36003202-36003589
  hyper

SEQ ID NO: 423966 - DNA, 171 bp, Homo sapiens; identical to SEQ ID NO: 239072
  chr17:36735071-36735242
  hyper

SEQ ID NO: 423967 - DNA, 46 bp, Homo sapiens; identical to SEQ ID NO: 11164
  chr17:36762362-36762408
  hyper

SEQ ID NO: 423968 - DNA, 284 bp, Homo sapiens; identical to SEQ ID NO: 239074
  chr17:36859556-36859840
  hyper

SEQ ID NO: 423969 - DNA, 37 bp, Homo sapiens; identical to SEQ ID NO: 204569
  chr17:36904350-36904387
  hyper

SEQ ID NO: 423970 - DNA, 450 bp, Homo sapiens; identical to SEQ ID NO: 204570
  chr17:36905017-36905467
  hyper

SEQ ID NO: 423971 - DNA, 834 bp, Homo sapiens; identical to SEQ ID NO: 204571
  chr17:36905507-36906341
  hyper

SEQ ID NO: 423972 - DNA, 249 bp, Homo sapiens; identical to SEQ ID NO: 239078
  chr17:36981592-36981841
  hyper

SEQ ID NO: 423973 - DNA, 241 bp, Homo sapiens; identical to SEQ ID NO: 239079
  chr17:37009959-37010200
  hyper

SEQ ID NO: 423974 - DNA, 198 bp, Homo sapiens; identical to SEQ ID NO: 239080
  chr17:37025964-37026162
  hyper

SEQ ID NO: 423975 - DNA, 239 bp, Homo sapiens; identical to SEQ ID NO: 292253
  chr17:37307753-37307992
  hyper

SEQ ID NO: 423976 - DNA, 147 bp, Homo sapiens; identical to SEQ ID NO: 204574
  chr17:37310273-37310420
  hyper

SEQ ID NO: 423977 - DNA, 384 bp, Homo sapiens; identical to SEQ ID NO: 239085
  chr17:37353469-37353853
  hyper

SEQ ID NO: 423978 - DNA, 60 bp, Homo sapiens; identical to SEQ ID NO: 239089
  chr17:37617659-37617719
  hyper

SEQ ID NO: 423979 - DNA, 454 bp, Homo sapiens; identical to SEQ ID NO: 292260
  chr17:37755736-37756190
  hyper

SEQ ID NO: 423980 - DNA, 252 bp, Homo sapiens; identical to SEQ ID NO: 292261
  chr17:37756404-37756656
  hyper

SEQ ID NO: 423981 - DNA, 146 bp, Homo sapiens; identical to SEQ ID NO: 292264
  chr17:37762839-37762985
  hyper

SEQ ID NO: 423982 - DNA, 211 bp, Homo sapiens; identical to SEQ ID NO: 292265
  chr17:37764307-37764518
  hyper

SEQ ID NO: 423983 - DNA, 339 bp, Homo sapiens; identical to SEQ ID NO: 204583
  chr17:37774745-37775084
  hyper

SEQ ID NO: 423984 - DNA, 118 bp, Homo sapiens; identical to SEQ ID NO: 292268
  chr17:37783775-37783893
  hyper

SEQ ID NO: 423985 - DNA, 32 bp, Homo sapiens; identical to SEQ ID NO: 239099
  chr17:37793198-37793230
  hyper

SEQ ID NO: 423986 - DNA, 52 bp, Homo sapiens; identical to SEQ ID NO: 204587
  chr17:37823746-37823798
  hyper

SEQ ID NO: 423987 - DNA, 525 bp, Homo sapiens; identical to SEQ ID NO: 292272
  chr17:37823945-37824470
  hyper

SEQ ID NO: 423988 - DNA, 93 bp, Homo sapiens; identical to SEQ ID NO: 292273
  chr17:37844398-37844491
  hyper

SEQ ID NO: 423989 - DNA, 63 bp, Homo sapiens; identical to SEQ ID NO: 204589
  chr17:37856349-37856412
  hyper

SEQ ID NO: 423990 - DNA, 322 bp, Homo sapiens; identical to SEQ ID NO: 204590
  chr17:37856726-37857048
  hyper

SEQ ID NO: 423991 - DNA, 88 bp, Homo sapiens; identical to SEQ ID NO: 239103
  chr17:37886988-37887076
  hyper

SEQ ID NO: 423992 - DNA, 444 bp, Homo sapiens; identical to SEQ ID NO: 292277
  chr17:37895514-37895958
  hyper

SEQ ID NO: 423993 - DNA, 79 bp, Homo sapiens; identical to SEQ ID NO: 128574
  chr17:37896009-37896088
  hyper

SEQ ID NO: 423994 - DNA, 47 bp, Homo sapiens; identical to SEQ ID NO: 225345
  chr17:38024015-38024062
  hyper

SEQ ID NO: 423995 - DNA, 172 bp, Homo sapiens; identical to SEQ ID NO: 239106
  chr17:38210766-38210938
  hyper

SEQ ID NO: 423996 - DNA, 78 bp, Homo sapiens; identical to SEQ ID NO: 239107
  chr17:38219347-38219425
  hyper

SEQ ID NO: 423997 - DNA, 39 bp, Homo sapiens; identical to SEQ ID NO: 204593
  chr17:38228513-38228552
  hyper

SEQ ID NO: 423998 - DNA, 37 bp, Homo sapiens; identical to SEQ ID NO: 204594
  chr17:38228861-38228898
  hyper

SEQ ID NO: 423999 - DNA, 83 bp, Homo sapiens; identical to SEQ ID NO: 292285
  chr17:38255680-38255763
  hyper

SEQ ID NO: 424000 - DNA, 56 bp, Homo sapiens; identical to SEQ ID NO: 128592
  chr17:38255830-38255886
  hyper

SEQ ID NO: 424001 - DNA, 127 bp, Homo sapiens; identical to SEQ ID NO: 239110
  chr17:38256107-38256234
  hyper

SEQ ID NO: 424002 - DNA, 119 bp, Homo sapiens; identical to SEQ ID NO: 239111
  chr17:38256918-38257037
  hyper

SEQ ID NO: 424003 - DNA, 89 bp, Homo sapiens; identical to SEQ ID NO: 239113
  chr17:38296368-38296457
  hyper

SEQ ID NO: 424004 - DNA, 163 bp, Homo sapiens; identical to SEQ ID NO: 204595
  chr17:38348018-38348181
  hyper

SEQ ID NO: 424005 - DNA, 109 bp, Homo sapiens; identical to SEQ ID NO: 239115
  chr17:38375105-38375214
  hyper

SEQ ID NO: 424006 - DNA, 165 bp, Homo sapiens; identical to SEQ ID NO: 239116
  chr17:38443942-38444107
  hyper

SEQ ID NO: 424007 - DNA, 252 bp, Homo sapiens; identical to SEQ ID NO: 204596
  chr17:38474111-38474363
  hyper

SEQ ID NO: 424008 - DNA, 151 bp, Homo sapiens; identical to SEQ ID NO: 239119
  chr17:38501383-38501534
  hyper

SEQ ID NO: 424009 - DNA, 91 bp, Homo sapiens; identical to SEQ ID NO: 239120
  chr17:38573797-38573888
  hyper

SEQ ID NO: 424010 - DNA, 89 bp, Homo sapiens; identical to SEQ ID NO: 239121
  chr17:38574211-38574300
  hyper

SEQ ID NO: 424011 - DNA, 203 bp, Homo sapiens; identical to SEQ ID NO: 239122
  chr17:38599494-38599697
  hyper

SEQ ID NO: 424012 - DNA, 159 bp, Homo sapiens; identical to SEQ ID NO: 204600
  chr17:38604453-38604612
  hyper

SEQ ID NO: 424013 - DNA, 137 bp, Homo sapiens; identical to SEQ ID NO: 239124
  chr17:38739098-38739235
  hyper

SEQ ID NO: 424014 - DNA, 264 bp, Homo sapiens; identical to SEQ ID NO: 239125
  chr17:38804062-38804326
  hyper

SEQ ID NO: 424015 - DNA, 565 bp, Homo sapiens; identical to SEQ ID NO: 239127
  chr17:40306686-40307251
  hyper

SEQ ID NO: 424016 - DNA, 53 bp, Homo sapiens; identical to SEQ ID NO: 225351
  chr17:40333432-40333485
  hyper

SEQ ID NO: 424017 - DNA, 69 bp, Homo sapiens; identical to SEQ ID NO: 292309
  chr17:40400757-40400826
  hyper

SEQ ID NO: 424018 - DNA, 50 bp, Homo sapiens
  chr17:40427515-40427565
  hyper
gaccatcttgccagattcctttagcctcagaccagcttttgtgatacaac

SEQ ID NO: 424019 - DNA, 517 bp, Homo sapiens; identical to SEQ ID NO: 292311
  chr17:40428745-40429262
  hyper

SEQ ID NO: 424020 - DNA, 56 bp, Homo sapiens; identical to SEQ ID NO: 292312
  chr17:40441311-40441367
  hyper

SEQ ID NO: 424021 - DNA, 58 bp, Homo sapiens; identical to SEQ ID NO: 239132
  chr17:40540529-40540587
  hyper

SEQ ID NO: 424022 - DNA, 183 bp, Homo sapiens; identical to SEQ ID NO: 292317
  chr17:40574658-40574841
  hyper

SEQ ID NO: 424023 - DNA, 557 bp, Homo sapiens; identical to SEQ ID NO: 128645
  chr17:40574882-40575439
  hyper

SEQ ID NO: 424024 - DNA, 115 bp, Homo sapiens; identical to SEQ ID NO: 239136
  chr17:40610751-40610866
  hyper

SEQ ID NO: 424025 - DNA, 63 bp, Homo sapiens; identical to SEQ ID NO: 239137
  chr17:40713961-40714024
  hyper

SEQ ID NO: 424026 - DNA, 199 bp, Homo sapiens; identical to SEQ ID NO: 239138
  chr17:40719398-40719597
  hyper

SEQ ID NO: 424027 - DNA, 967 bp, Homo sapiens; identical to SEQ ID NO: 239139
  chr17:40760808-40761775
  hyper

SEQ ID NO: 424028 - DNA, 93 bp, Homo sapiens; identical to SEQ ID NO: 239140
  chr17:40829163-40829256
  hyper

SEQ ID NO: 424029 - DNA, 311 bp, Homo sapiens; identical to SEQ ID NO: 204609
  chr17:40831605-40831916
  hyper

SEQ ID NO: 424030 - DNA, 62 bp, Homo sapiens; identical to SEQ ID NO: 204610
  chr17:40897135-40897197
  hyper

SEQ ID NO: 424031 - DNA, 121 bp, Homo sapiens; identical to SEQ ID NO: 239143
  chr17:40925326-40925447
  hyper

SEQ ID NO: 424032 - DNA, 59 bp, Homo sapiens; identical to SEQ ID NO: 239145
  chr17:40932939-40932998
  hyper

SEQ ID NO: 424033 - DNA, 211 bp, Homo sapiens; identical to SEQ ID NO: 292328
  chr17:40950645-40950856
  hyper

SEQ ID NO: 424034 - DNA, 56 bp, Homo sapiens; identical to SEQ ID NO: 239146
  chr17:40985217-40985273
  hyper

SEQ ID NO: 424035 - DNA, 191 bp, Homo sapiens; identical to SEQ ID NO: 239147
  chr17:41116341-41116532
  hyper

SEQ ID NO: 424036 - DNA, 38 bp, Homo sapiens; identical to SEQ ID NO: 239148
  chr17:41132449-41132487
  hyper

SEQ ID NO: 424037 - DNA, 362 bp, Homo sapiens; identical to SEQ ID NO: 204611
  chr17:41150140-41150502
  hyper

SEQ ID NO: 424038 - DNA, 514 bp, Homo sapiens; identical to SEQ ID NO: 225356
  chr17:41196311-41196825
  hyper

SEQ ID NO: 424039 - DNA, 589 bp, Homo sapiens; identical to SEQ ID NO: 292334
  chr17:41197125-41197714
  hyper

SEQ ID NO: 424040 - DNA, 76 bp, Homo sapiens; identical to SEQ ID NO: 292335
  chr17:41197743-41197819
  hyper

SEQ ID NO: 424041 - DNA, 61 bp, Homo sapiens; identical to SEQ ID NO: 225358
  chr17:41199659-41199720
  hyper

SEQ ID NO: 424042 - DNA, 32 bp, Homo sapiens; identical to SEQ ID NO: 292337
  chr17:41203102-41203134
  hyper

SEQ ID NO: 424043 - DNA, 38 bp, Homo sapiens; identical to SEQ ID NO: 292338
  chr17:41209114-41209152
  hyper

SEQ ID NO: 424044 - DNA, 41 bp, Homo sapiens; identical to SEQ ID NO: 225362
  chr17:41215349-41215390
  hyper

SEQ ID NO: 424045 - DNA, 88 bp, Homo sapiens; identical to SEQ ID NO: 225364
  chr17:41219624-41219712
  hyper

SEQ ID NO: 424046 - DNA, 311 bp, Homo sapiens; identical to SEQ ID NO: 225365
  chr17:41222944-41223255
  hyper

SEQ ID NO: 424047 - DNA, 191 bp, Homo sapiens; identical to SEQ ID NO: 225366
  chr17:41226347-41226538
  hyper

SEQ ID NO: 424048 - DNA, 127 bp, Homo sapiens; identical to SEQ ID NO: 225367
  chr17:41228504-41228631
  hyper

SEQ ID NO: 424049 - DNA, 172 bp, Homo sapiens; identical to SEQ ID NO: 225368
  chr17:41234420-41234592
  hyper

SEQ ID NO: 424050 - DNA, 89 bp, Homo sapiens; identical to SEQ ID NO: 225369
  chr17:41242960-41243049
  hyper

SEQ ID NO: 424051 - DNA, 2013 bp, Homo sapiens
  chr17:41243451-41245464
  hyper
ctaagtttgaatccatgctttgctcttcttgattattttcttccaagcccgttcctctttcttcatcatctgaaaccaattccttgtcactcagaccaactccctggctttcagactgatgcctcatttgtttggaagaaccaatcaagaaaggatcctgggtgtttgtatttgcagtcaagtcttccaattcactgcactgtgaagaaaacaagctagcagaacattttgtttcctcactaaggtgatgttcctgagatgcctttgccaatattacctggttactgcagtcatttaagctattcttcaatgataataaattctcctctgtgttcttagacagacactcggtagcaacggtgctatgcctagtagactgagaaggtatattgtttactttaccaaataacaagtgttggaagcagggaagctcttcatcctcactagataagttctcttctgaggactctaatttcttggcccctcttcggtaaccctgagccaaatgtgtatgggtgaaagggctaggactcctgctaagctctcctttctggacgcttttgctaaaaacagcagaactttccttaatgtcattttcagcaaaactagtatcttcctttatttcaccatcatctaacaggtcatcaggtgtctcagaacaaacctgagatgcatgactacttcccataggctgttctaagttatctgaaatcagatatggagagaaatctgtattaacagtctgaactacttcttcatattcttgcttttttatttcaggatgcttacaattacttccaggaagactttgtttatagacctcaggttgcaaaacccctaatctaagcatagcattcaattttggccctctgtttctacctagttctgcttgaatgttttcatcactggaacctatttcattaatactggagcccacttcattagtactggaacctacttcattaatattgcttgagctggcttctttaaaaacattttctctaatgttattacggctaattgtgctcactgtacttggaatgttctcatttcccatttctctttcaggtgacattgaatgttcctcaaagttttcctctagcagatttttcttacatttagttttaacaaatgacttgatgggaaaaagtggtggtatacgatatgggttttgtaaaagtccatgtttatttggagtaatgagtccagtttcgttgcctctgaactgagatgatagacaaaacctagagcctcctttgatactacatttggcattatcaactggcttatctttctgaccaaccacaggaaagcctgcagtgatattaactgtctgtacaggcttgatattagactcattctttccttgattttcttccttttgttcacattcaaaagtgacttttggactttgtttctttaaggacccagagtgggcagagaatgttgcacattcctcttctgcatttcctggatttgaaaacggagcaaatgactggcgctttgaaaccttgaatgtattctgcaaatactgagcatcaagttcactttcttccatttctatgcttgtttcccgactgtggttaacttcatgtcccaatggatacttaaagccttctgtgtcatttctattatctttggaacaaccatgaattagtcccttggggttttcaaatgctgcacactgactcacacatttatttggttctgtttttgccttccctagagtgctaacttccagtaacgagatactttcctgagtgccataatcagtaccaggtaccaatgaaatactgctactctctacagatctttcagtttgcaaaaccctttctccacttaacatgagatctttggggtcttcagcattattagacactttaactgtttctagtttctcttctttttcttctcttggaaggctaggattgacaaattctttaagttcactggtatttgaacacttagtaaaagaaccaggtgcatttgttaacttcagctctgggaaagtat

SEQ ID NO: 424052 - DNA, 572 bp, Homo sapiens
  chr17:41246305-41246877
  hyper
gtccaatacatcagctactttggcatttgattcagactccccatcatgtgagtcatcagaacctaacagttcatcacttctggaaaaccactcattaactttctgaatgctgctatttagtgttatccaaggaacatcttcagtatctctaggattctctgagcatggcagtttctgcttattccattcttttctctcacacaggggatcagcattcagatctacctttttttctgtgctgggagtccgcctatcattacatgtttccttacttccagcccatctgttatgttggctccttgctaagccaggctgtttgcttttattacagaattcagccttttctacattcattctgtctttagtgagtaataaactgctgttctcatgctgtaatgagctggcatgagtatttgtgccacatggctccacatgcaagtttgaaacagaactaccctgatacttttctggatgcctctcagctgcacgcttctcagtggtgttcaaatcattattactgggttgatgatgttcagtatttgttacatccgtctcagaaaattcacaagcag

SEQ ID NO: 424053 - DNA, 77 bp, Homo sapiens; identical to SEQ ID NO: 225371
  chr17:41247862-41247939
  hyper

SEQ ID NO: 424054 - DNA, 46 bp, Homo sapiens; identical to SEQ ID NO: 225372
  chr17:41249260-41249306
  hyper

SEQ ID NO: 424055 - DNA, 106 bp, Homo sapiens; identical to SEQ ID NO: 225373
  chr17:41251791-41251897
  hyper

SEQ ID NO: 424056 - DNA, 140 bp, Homo sapiens; identical to SEQ ID NO: 225374
  chr17:41256138-41256278
  hyper

SEQ ID NO: 424057 - DNA, 89 bp, Homo sapiens; identical to SEQ ID NO: 225375
  chr17:41256884-41256973
  hyper

SEQ ID NO: 424058 - DNA, 78 bp, Homo sapiens; identical to SEQ ID NO: 225376
  chr17:41258472-41258550
  hyper

SEQ ID NO: 424059 - DNA, 57 bp, Homo sapiens; identical to SEQ ID NO: 292353
  chr17:41276075-41276132
  hyper

SEQ ID NO: 424060 - DNA, 92 bp, Homo sapiens; identical to SEQ ID NO: 239150
  chr17:41323035-41323127
  hyper

SEQ ID NO: 424061 - DNA, 120 bp, Homo sapiens; identical to SEQ ID NO: 239151
  chr17:41393018-41393138
  hyper

SEQ ID NO: 424062 - DNA, 330 bp, Homo sapiens; identical to SEQ ID NO: 239152
  chr17:41446506-41446836
  hyper

SEQ ID NO: 424063 - DNA, 95 bp, Homo sapiens; identical to SEQ ID NO: 239153
  chr17:41471596-41471691
  hyper

SEQ ID NO: 424064 - DNA, 166 bp, Homo sapiens; identical to SEQ ID NO: 239154
  chr17:41476228-41476394
  hyper

SEQ ID NO: 424065 - DNA, 85 bp, Homo sapiens; identical to SEQ ID NO: 204612
  chr17:41624075-41624160
  hyper

SEQ ID NO: 424066 - DNA, 101 bp, Homo sapiens; identical to SEQ ID NO: 292360
  chr17:41723353-41723454
  hyper

SEQ ID NO: 424067 - DNA, 244 bp, Homo sapiens; identical to SEQ ID NO: 292361
  chr17:41723534-41723778
  hyper

SEQ ID NO: 424068 - DNA, 143 bp, Homo sapiens; identical to SEQ ID NO: 292365
  chr17:41832729-41832872
  hyper

SEQ ID NO: 424069 - DNA, 657 bp, Homo sapiens; identical to SEQ ID NO: 292366
  chr17:41910022-41910679
  hyper

SEQ ID NO: 424070 - DNA, 283 bp, Homo sapiens; identical to SEQ ID NO: 54132
  chr17:41910700-41910983
  hyper

SEQ ID NO: 424071 - DNA, 296 bp, Homo sapiens; identical to SEQ ID NO: 239159
  chr17:41977937-41978233
  hyper

SEQ ID NO: 424072 - DNA, 122 bp, Homo sapiens; identical to SEQ ID NO: 292372
  chr17:42015411-42015533
  hyper

SEQ ID NO: 424073 - DNA, 291 bp, Homo sapiens; identical to SEQ ID NO: 292373
  chr17:42015571-42015862
  hyper

SEQ ID NO: 424074 - DNA, 125 bp, Homo sapiens; identical to SEQ ID NO: 239166
  chr17:42072190-42072315
  hyper

SEQ ID NO: 424075 - DNA, 208 bp, Homo sapiens; identical to SEQ ID NO: 292383
  chr17:42200974-42201182
  hyper

SEQ ID NO: 424076 - DNA, 128 bp, Homo sapiens; identical to SEQ ID NO: 239170
  chr17:42219140-42219268
  hyper

SEQ ID NO: 424077 - DNA, 169 bp, Homo sapiens; identical to SEQ ID NO: 239171
  chr17:42263792-42263961
  hyper

SEQ ID NO: 424078 - DNA, 111 bp, Homo sapiens; identical to SEQ ID NO: 204627
  chr17:42264411-42264522
  hyper

SEQ ID NO: 424079 - DNA, 433 bp, Homo sapiens; identical to SEQ ID NO: 292387
  chr17:42287874-42288307
  hyper

SEQ ID NO: 424080 - DNA, 149 bp, Homo sapiens; identical to SEQ ID NO: 239174
  chr17:42295577-42295726
  hyper

SEQ ID NO: 424081 - DNA, 201 bp, Homo sapiens; identical to SEQ ID NO: 239175
  chr17:42297965-42298166
  hyper

SEQ ID NO: 424082 - DNA, 614 bp, Homo sapiens; identical to SEQ ID NO: 292390
  chr17:42298856-42299470
  hyper

SEQ ID NO: 424083 - DNA, 124 bp, Homo sapiens; identical to SEQ ID NO: 239177
  chr17:42385180-42385304
  hyper

SEQ ID NO: 424084 - DNA, 232 bp, Homo sapiens; identical to SEQ ID NO: 204628
  chr17:42386109-42386341
  hyper

SEQ ID NO: 424085 - DNA, 62 bp, Homo sapiens; identical to SEQ ID NO: 239182
  chr17:42422395-42422457
  hyper

SEQ ID NO: 424086 - DNA, 152 bp, Homo sapiens; identical to SEQ ID NO: 204631
  chr17:42441042-42441194
  hyper

SEQ ID NO: 424087 - DNA, 44 bp, Homo sapiens; identical to SEQ ID NO: 239183
  chr17:42441403-42441447
  hyper

SEQ ID NO: 424088 - DNA, 149 bp, Homo sapiens; identical to SEQ ID NO: 204632
  chr17:42462944-42463093
  hyper

SEQ ID NO: 424089 - DNA, 445 bp, Homo sapiens; identical to SEQ ID NO: 239185
  chr17:42633725-42634170
  hyper

SEQ ID NO: 424090 - DNA, 75 bp, Homo sapiens; identical to SEQ ID NO: 204634
  chr17:42635073-42635148
  hyper

SEQ ID NO: 424091 - DNA, 100 bp, Homo sapiens; identical to SEQ ID NO: 204635
  chr17:42635760-42635860
  hyper

SEQ ID NO: 424092 - DNA, 57 bp, Homo sapiens; identical to SEQ ID NO: 239188
  chr17:42635890-42635947
  hyper

SEQ ID NO: 424093 - DNA, 201 bp, Homo sapiens; identical to SEQ ID NO: 239190
  chr17:42766993-42767194
  hyper

SEQ ID NO: 424094 - DNA, 44 bp, Homo sapiens; identical to SEQ ID NO: 239192
  chr17:42977088-42977132
  hyper

SEQ ID NO: 424095 - DNA, 349 bp, Homo sapiens; identical to SEQ ID NO: 239194
  chr17:43025009-43025358
  hyper

SEQ ID NO: 424096 - DNA, 119 bp, Homo sapiens; identical to SEQ ID NO: 292409
  chr17:43044389-43044508
  hyper

SEQ ID NO: 424097 - DNA, 169 bp, Homo sapiens; identical to SEQ ID NO: 239198
  chr17:43212859-43213028
  hyper

SEQ ID NO: 424098 - DNA, 178 bp, Homo sapiens; identical to SEQ ID NO: 204640
  chr17:43239156-43239334
  hyper

SEQ ID NO: 424099 - DNA, 75 bp, Homo sapiens; identical to SEQ ID NO: 204642
  chr17:43339333-43339408
  hyper

SEQ ID NO: 424100 - DNA, 134 bp, Homo sapiens; identical to SEQ ID NO: 204643
  chr17:43339475-43339609
  hyper

SEQ ID NO: 424101 - DNA, 60 bp, Homo sapiens; identical to SEQ ID NO: 239207
  chr17:45000263-45000323
  hyper

SEQ ID NO: 424102 - DNA, 154 bp, Homo sapiens; identical to SEQ ID NO: 204647
  chr17:45056851-45057005
  hyper

SEQ ID NO: 424103 - DNA, 142 bp, Homo sapiens; identical to SEQ ID NO: 239209
  chr17:45266823-45266965
  hyper

SEQ ID NO: 424104 - DNA, 37 bp, Homo sapiens; identical to SEQ ID NO: 239211
  chr17:45401134-45401171
  hyper

SEQ ID NO: 424105 - DNA, 39 bp, Homo sapiens; identical to SEQ ID NO: 204651
  chr17:45609732-45609771
  hyper

SEQ ID NO: 424106 - DNA, 166 bp, Homo sapiens; identical to SEQ ID NO: 239214
  chr17:45772372-45772538
  hyper

SEQ ID NO: 424107 - DNA, 117 bp, Homo sapiens; identical to SEQ ID NO: 204652
  chr17:45867584-45867701
  hyper

SEQ ID NO: 424108 - DNA, 69 bp, Homo sapiens; identical to SEQ ID NO: 239216
  chr17:45918751-45918820
  hyper

SEQ ID NO: 424109 - DNA, 239 bp, Homo sapiens; identical to SEQ ID NO: 239217
  chr17:45973403-45973642
  hyper

SEQ ID NO: 424110 - DNA, 162 bp, Homo sapiens; identical to SEQ ID NO: 239218
  chr17:46048350-46048512
  hyper

SEQ ID NO: 424111 - DNA, 82 bp, Homo sapiens; identical to SEQ ID NO: 239221
  chr17:46125608-46125690
  hyper

SEQ ID NO: 424112 - DNA, 199 bp, Homo sapiens; identical to SEQ ID NO: 239222
  chr17:46178731-46178930
  hyper

SEQ ID NO: 424113 - DNA, 140 bp, Homo sapiens; identical to SEQ ID NO: 292447
  chr17:46570076-46570216
  hyper

SEQ ID NO: 424114 - DNA, 411 bp, Homo sapiens; identical to SEQ ID NO: 239227
  chr17:46662740-46663151
  hyper

SEQ ID NO: 424115 - DNA, 297 bp, Homo sapiens; identical to SEQ ID NO: 225401
  chr17:46683517-46683814
  hyper

SEQ ID NO: 424116 - DNA, 151 bp, Homo sapiens; identical to SEQ ID NO: 204668
  chr17:46689520-46689671
  hyper

SEQ ID NO: 424117 - DNA, 162 bp, Homo sapiens; identical to SEQ ID NO: 204670
  chr17:46696376-46696538
  hyper

SEQ ID NO: 424118 - DNA, 266 bp, Homo sapiens; identical to SEQ ID NO: 292462
  chr17:46696643-46696909
  hyper

SEQ ID NO: 424119 - DNA, 269 bp, Homo sapiens; identical to SEQ ID NO: 292463
  chr17:46702260-46702529
  hyper

SEQ ID NO: 424120 - DNA, 1174 bp, Homo sapiens; identical to SEQ ID NO: 204672
  chr17:46702755-46703929
  hyper

SEQ ID NO: 424121 - DNA, 109 bp, Homo sapiens; identical to SEQ ID NO: 204673
  chr17:46703959-46704068
  hyper

SEQ ID NO: 424122 - DNA, 92 bp, Homo sapiens; identical to SEQ ID NO: 292468
  chr17:46724660-46724752
  hyper

SEQ ID NO: 424123 - DNA, 32 bp, Homo sapiens; identical to SEQ ID NO: 292469
  chr17:46724904-46724936
  hyper

SEQ ID NO: 424124 - DNA, 113 bp, Homo sapiens; identical to SEQ ID NO: 292472
  chr17:46805459-46805572
  hyper

SEQ ID NO: 424125 - DNA, 57 bp, Homo sapiens; identical to SEQ ID NO: 204678
  chr17:46806111-46806168
  hyper

SEQ ID NO: 424126 - DNA, 97 bp, Homo sapiens; identical to SEQ ID NO: 292475
  chr17:46812471-46812568
  hyper

SEQ ID NO: 424127 - DNA, 204 bp, Homo sapiens; identical to SEQ ID NO: 204680
  chr17:46816036-46816240
  hyper

SEQ ID NO: 424128 - DNA, 43 bp, Homo sapiens; identical to SEQ ID NO: 239263
  chr17:46891977-46892020
  hyper

SEQ ID NO: 424129 - DNA, 225 bp, Homo sapiens; identical to SEQ ID NO: 239264
  chr17:46894280-46894505
  hyper

SEQ ID NO: 424130 - DNA, 321 bp, Homo sapiens; identical to SEQ ID NO: 204685
  chr17:46970399-46970720
  hyper

SEQ ID NO: 424131 - DNA, 199 bp, Homo sapiens; identical to SEQ ID NO: 204686
  chr17:46985398-46985597
  hyper

SEQ ID NO: 424132 - DNA, 160 bp, Homo sapiens; identical to SEQ ID NO: 292488
  chr17:47209860-47210020
  hyper

SEQ ID NO: 424133 - DNA, 113 bp, Homo sapiens; identical to SEQ ID NO: 292489
  chr17:47210500-47210613
  hyper

SEQ ID NO: 424134 - DNA, 125 bp, Homo sapiens; identical to SEQ ID NO: 292490
  chr17:47301641-47301766
  hyper

SEQ ID NO: 424135 - DNA, 434 bp, Homo sapiens; identical to SEQ ID NO: 128936
  chr17:47301801-47302235
  hyper

SEQ ID NO: 424136 - DNA, 643 bp, Homo sapiens; identical to SEQ ID NO: 292492
  chr17:47307801-47308444
  hyper

SEQ ID NO: 424137 - DNA, 202 bp, Homo sapiens; identical to SEQ ID NO: 239274
  chr17:47492339-47492541
  hyper

SEQ ID NO: 424138 - DNA, 53 bp, Homo sapiens; identical to SEQ ID NO: 292495
  chr17:47547746-47547799
  hyper

SEQ ID NO: 424139 - DNA, 150 bp, Homo sapiens; identical to SEQ ID NO: 204691
  chr17:47563693-47563843
  hyper

SEQ ID NO: 424140 - DNA, 375 bp, Homo sapiens; identical to SEQ ID NO: 292497
  chr17:47572596-47572971
  hyper

SEQ ID NO: 424141 - DNA, 43 bp, Homo sapiens; identical to SEQ ID NO: 239279
  chr17:47785463-47785506
  hyper

SEQ ID NO: 424142 - DNA, 109 bp, Homo sapiens; identical to SEQ ID NO: 128956
  chr17:47841693-47841802
  hyper

SEQ ID NO: 424143 - DNA, 154 bp, Homo sapiens; identical to SEQ ID NO: 204695
  chr17:47865600-47865754
  hyper

SEQ ID NO: 424144 - DNA, 281 bp, Homo sapiens; identical to SEQ ID NO: 292505
  chr17:47928527-47928808
  hyper

SEQ ID NO: 424145 - DNA, 173 bp, Homo sapiens; identical to SEQ ID NO: 225421
  chr17:47929093-47929266
  hyper

SEQ ID NO: 424146 - DNA, 152 bp, Homo sapiens; identical to SEQ ID NO: 239284
  chr17:47968110-47968262
  hyper

SEQ ID NO: 424147 - DNA, 248 bp, Homo sapiens; identical to SEQ ID NO: 204696
  chr17:47979497-47979745
  hyper

SEQ ID NO: 424148 - DNA, 135 bp, Homo sapiens; identical to SEQ ID NO: 292509
  chr17:48041904-48042039
  hyper

SEQ ID NO: 424149 - DNA, 94 bp, Homo sapiens; identical to SEQ ID NO: 204698
  chr17:48042984-48043078
  hyper

SEQ ID NO: 424150 - DNA, 73 bp, Homo sapiens; identical to SEQ ID NO: 292511
  chr17:48046649-48046722
  hyper

SEQ ID NO: 424151 - DNA, 319 bp, Homo sapiens; identical to SEQ ID NO: 128973
  chr17:48047056-48047375
  hyper

SEQ ID NO: 424152 - DNA, 545 bp, Homo sapiens; identical to SEQ ID NO: 292513
  chr17:48072070-48072615
  hyper

SEQ ID NO: 424153 - DNA, 85 bp, Homo sapiens; identical to SEQ ID NO: 239297
  chr17:48133040-48133125
  hyper

SEQ ID NO: 424154 - DNA, 243 bp, Homo sapiens; identical to SEQ ID NO: 239298
  chr17:48133662-48133905
  hyper

SEQ ID NO: 424155 - DNA, 243 bp, Homo sapiens; identical to SEQ ID NO: 239299
  chr17:48172654-48172897
  hyper

SEQ ID NO: 424156 - DNA, 202 bp, Homo sapiens; identical to SEQ ID NO: 292517
  chr17:48206096-48206298
  hyper

SEQ ID NO: 424157 - DNA, 88 bp, Homo sapiens; identical to SEQ ID NO: 292518
  chr17:48207630-48207718
  hyper

SEQ ID NO: 424158 - DNA, 100 bp, Homo sapiens; identical to SEQ ID NO: 292519
  chr17:48207748-48207848
  hyper

SEQ ID NO: 424159 - DNA, 131 bp, Homo sapiens; identical to SEQ ID NO: 239302
  chr17:48226428-48226559
  hyper

SEQ ID NO: 424160 - DNA, 177 bp, Homo sapiens; identical to SEQ ID NO: 204703
  chr17:48278764-48278941
  hyper

SEQ ID NO: 424161 - DNA, 59 bp, Homo sapiens; identical to SEQ ID NO: 239304
  chr17:48350454-48350513
  hyper

SEQ ID NO: 424162 - DNA, 39 bp, Homo sapiens; identical to SEQ ID NO: 204705
  chr17:48585621-48585660
  hyper

SEQ ID NO: 424163 - DNA, 242 bp, Homo sapiens; identical to SEQ ID NO: 239309
  chr17:48624467-48624709
  hyper

SEQ ID NO: 424164 - DNA, 437 bp, Homo sapiens; identical to SEQ ID NO: 292527
  chr17:48637269-48637706
  hyper

SEQ ID NO: 424165 - DNA, 96 bp, Homo sapiens; identical to SEQ ID NO: 292528
  chr17:48637777-48637873
  hyper

SEQ ID NO: 424166 - DNA, 138 bp, Homo sapiens; identical to SEQ ID NO: 239311
  chr17:48638580-48638718
  hyper

SEQ ID NO: 424167 - DNA, 104 bp, Homo sapiens; identical to SEQ ID NO: 239314
  chr17:48785241-48785345
  hyper

SEQ ID NO: 424168 - DNA, 45 bp, Homo sapiens; identical to SEQ ID NO: 239315
  chr17:48796758-48796803
  hyper

SEQ ID NO: 424169 - DNA, 37 bp, Homo sapiens; identical to SEQ ID NO: 204709
  chr17:48997201-48997238
  hyper

SEQ ID NO: 424170 - DNA, 87 bp, Homo sapiens; identical to SEQ ID NO: 400270
  chr17:49022343-49022430
  hyper

SEQ ID NO: 424171 - DNA, 115 bp, Homo sapiens; identical to SEQ ID NO: 204711
  chr17:49028000-49028115
  hyper

SEQ ID NO: 424172 - DNA, 187 bp, Homo sapiens; identical to SEQ ID NO: 239318
  chr17:49197806-49197993
  hyper

SEQ ID NO: 424173 - DNA, 130 bp, Homo sapiens; identical to SEQ ID NO: 239319
  chr17:49199266-49199396
  hyper

SEQ ID NO: 424174 - DNA, 188 bp, Homo sapiens; identical to SEQ ID NO: 292542
  chr17:49337243-49337431
  hyper

SEQ ID NO: 424175 - DNA, 88 bp, Homo sapiens; identical to SEQ ID NO: 204713
  chr17:52978340-52978428
  hyper

SEQ ID NO: 424176 - DNA, 144 bp, Homo sapiens; identical to SEQ ID NO: 11387
  chr17:52978453-52978597
  hyper

SEQ ID NO: 424177 - DNA, 140 bp, Homo sapiens; identical to SEQ ID NO: 239325
  chr17:53316183-53316323
  hyper

SEQ ID NO: 424178 - DNA, 39 bp, Homo sapiens; identical to SEQ ID NO: 239328
  chr17:54670214-54670253
  hyper

SEQ ID NO: 424179 - DNA, 32 bp, Homo sapiens; identical to SEQ ID NO: 292551
  chr17:54672364-54672396
  hyper

SEQ ID NO: 424180 - DNA, 169 bp, Homo sapiens; identical to SEQ ID NO: 239333
  chr17:54857395-54857564
  hyper

SEQ ID NO: 424181 - DNA, 84 bp, Homo sapiens; identical to SEQ ID NO: 239334
  chr17:54857791-54857875
  hyper

SEQ ID NO: 424182 - DNA, 353 bp, Homo sapiens; identical to SEQ ID NO: 204717
  chr17:54910847-54911200
  hyper

SEQ ID NO: 424183 - DNA, 359 bp, Homo sapiens; identical to SEQ ID NO: 239336
  chr17:55038098-55038457
  hyper

SEQ ID NO: 424184 - DNA, 130 bp, Homo sapiens; identical to SEQ ID NO: 239337
  chr17:55055244-55055374
  hyper

SEQ ID NO: 424185 - DNA, 50 bp, Homo sapiens; identical to SEQ ID NO: 239338
  chr17:55162841-55162891
  hyper

SEQ ID NO: 424186 - DNA, 50 bp, Homo sapiens; identical to SEQ ID NO: 239339
  chr17:55335001-55335051
  hyper

SEQ ID NO: 424187 - DNA, 119 bp, Homo sapiens; identical to SEQ ID NO: 239340
  chr17:55927364-55927483
  hyper

SEQ ID NO: 424188 - DNA, 420 bp, Homo sapiens; identical to SEQ ID NO: 204720
  chr17:55938684-55939104
  hyper

SEQ ID NO: 424189 - DNA, 462 bp, Homo sapiens; identical to SEQ ID NO: 225439
  chr17:56032083-56032545
  hyper

SEQ ID NO: 424190 - DNA, 167 bp, Homo sapiens; identical to SEQ ID NO: 239342
  chr17:56084355-56084522
  hyper

SEQ ID NO: 424191 - DNA, 75 bp, Homo sapiens; identical to SEQ ID NO: 239343
  chr17:56084800-56084875
  hyper

SEQ ID NO: 424192 - DNA, 38 bp, Homo sapiens; identical to SEQ ID NO: 292569
  chr17:56234840-56234878
  hyper

SEQ ID NO: 424193 - DNA, 476 bp, Homo sapiens; identical to SEQ ID NO: 292570
  chr17:56296380-56296856
  hyper

SEQ ID NO: 424194 - DNA, 610 bp, Homo sapiens; identical to SEQ ID NO: 204722
  chr17:56401719-56402329
  hyper

SEQ ID NO: 424195 - DNA, 360 bp, Homo sapiens
  chr17:56429846-56430206
  hyper
gggctgtttgatctgggctggtggccctgggcgtcggtcctgttccccgatggtaacccgaagtttgtttttttttgttttgtctccccgttttagaagcattgggggcagtgaatccactgtctccctctggattgtctctgcagagaccgagaagaaatccagggacagccccacccctccttcctaactgcgagagcgctatagggtttccacttgcttcccacaggaatgctggcctgggagctacggcggaaaaaaatgcgtatttatcttttaaaactccgtctgtttgctcgttccggctgataatttatactttgcgcagttcttagcgcttagacacggttcctttactaa

SEQ ID NO: 424196 - DNA, 230 bp, Homo sapiens; identical to SEQ ID NO: 239352
  chr17:56595391-56595621
  hyper

SEQ ID NO: 424197 - DNA, 627 bp, Homo sapiens; identical to SEQ ID NO: 239353
  chr17:56736331-56736958
  hyper

SEQ ID NO: 424198 - DNA, 67 bp, Homo sapiens; identical to SEQ ID NO: 239356
  chr17:57184398-57184465
  hyper

SEQ ID NO: 424199 - DNA, 469 bp, Homo sapiens; identical to SEQ ID NO: 239357
  chr17:57784633-57785102
  hyper

SEQ ID NO: 424200 - DNA, 420 bp, Homo sapiens; identical to SEQ ID NO: 239358
  chr17:57970251-57970671
  hyper

SEQ ID NO: 424201 - DNA, 142 bp, Homo sapiens; identical to SEQ ID NO: 239359
  chr17:58156217-58156359
  hyper

SEQ ID NO: 424202 - DNA, 50 bp, Homo sapiens; identical to SEQ ID NO: 204728
  chr17:58676701-58676751
  hyper

SEQ ID NO: 424203 - DNA, 801 bp, Homo sapiens; identical to SEQ ID NO: 204729
  chr17:58677543-58678344
  hyper

SEQ ID NO: 424204 - DNA, 242 bp, Homo sapiens; identical to SEQ ID NO: 204730
  chr17:58700868-58701110
  hyper

SEQ ID NO: 424205 - DNA, 125 bp, Homo sapiens; identical to SEQ ID NO: 204731
  chr17:58711213-58711338
  hyper

SEQ ID NO: 424206 - DNA, 191 bp, Homo sapiens; identical to SEQ ID NO: 204732
  chr17:58725252-58725443
  hyper

SEQ ID NO: 424207 - DNA, 250 bp, Homo sapiens; identical to SEQ ID NO: 204733
  chr17:58733952-58734202
  hyper

SEQ ID NO: 424208 - DNA, 1530 bp, Homo sapiens; identical to SEQ ID NO: 204734
  chr17:58740342-58741872
  hyper

SEQ ID NO: 424209 - DNA, 749 bp, Homo sapiens; identical to SEQ ID NO: 204735
  chr17:58742892-58743641
  hyper

SEQ ID NO: 424210 - DNA, 144 bp, Homo sapiens; identical to SEQ ID NO: 239368
  chr17:58754612-58754756
  hyper

SEQ ID NO: 424211 - DNA, 33 bp, Homo sapiens; identical to SEQ ID NO: 384678
  chr17:59475183-59475216
  hyper

SEQ ID NO: 424212 - DNA, 382 bp, Homo sapiens
  chr17:59489491-59489873
  hyper
gggatcccgcaggaggccgagcgctccctgctcgcaggacagggcggcagcggagggagcccccgccctcttgggaggaagcccgagctccgggtctcctgggcaccctcccgggagcgccttcggggtggaggctggttgccgggcgctgaacgtgtccgagcacgcccggggcggttttgcacttggacttccttttgggctctccggaggcgcatatctgttcctcctattggatggggccggggaccccaaacccactccggaagcaccgatttccagcgctgacggccgcgcctggtttcccagcgagtcctcttggcagctcccgcagctccccgccgggagcacgagtgggagcgaacccagagcccgcccaggc

SEQ ID NO: 424213 - DNA, 259 bp, Homo sapiens; identical to SEQ ID NO: 292598
  chr17:59535267-59535526
  hyper

SEQ ID NO: 424214 - DNA, 32 bp, Homo sapiens; identical to SEQ ID NO: 239381
  chr17:59941038-59941070
  hyper

SEQ ID NO: 424215 - DNA, 130 bp, Homo sapiens; identical to SEQ ID NO: 204740
  chr17:60142477-60142607
  hyper

SEQ ID NO: 424216 - DNA, 89 bp, Homo sapiens; identical to SEQ ID NO: 239383
  chr17:60143463-60143552
  hyper

SEQ ID NO: 424217 - DNA, 51 bp, Homo sapiens; identical to SEQ ID NO: 225460
  chr17:60771357-60771408
  hyper

SEQ ID NO: 424218 - DNA, 192 bp, Homo sapiens; identical to SEQ ID NO: 292604
  chr17:60781450-60781642
  hyper

SEQ ID NO: 424219 - DNA, 54 bp, Homo sapiens; identical to SEQ ID NO: 239385
  chr17:61043210-61043264
  hyper

SEQ ID NO: 424220 - DNA, 125 bp, Homo sapiens; identical to SEQ ID NO: 204743
  chr17:61043854-61043979
  hyper

SEQ ID NO: 424221 - DNA, 96 bp, Homo sapiens; identical to SEQ ID NO: 204744
  chr17:61044393-61044489
  hyper

SEQ ID NO: 424222 - DNA, 75 bp, Homo sapiens; identical to SEQ ID NO: 239388
  chr17:61522994-61523069
  hyper

SEQ ID NO: 424223 - DNA, 381 bp, Homo sapiens; identical to SEQ ID NO: 239390
  chr17:61615574-61615955
  hyper

SEQ ID NO: 424224 - DNA, 237 bp, Homo sapiens; identical to SEQ ID NO: 239391
  chr17:61678078-61678315
  hyper

SEQ ID NO: 424225 - DNA, 330 bp, Homo sapiens; identical to SEQ ID NO: 239392
  chr17:61776666-61776996
  hyper

SEQ ID NO: 424226 - DNA, 232 bp, Homo sapiens; identical to SEQ ID NO: 239394
  chr17:61818856-61819088
  hyper

SEQ ID NO: 424227 - DNA, 289 bp, Homo sapiens; identical to SEQ ID NO: 239395
  chr17:61851078-61851367
  hyper

SEQ ID NO: 424228 - DNA, 224 bp, Homo sapiens; identical to SEQ ID NO: 239396
  chr17:61920536-61920760
  hyper

SEQ ID NO: 424229 - DNA, 283 bp, Homo sapiens; identical to SEQ ID NO: 292622
  chr17:61921000-61921283
  hyper

SEQ ID NO: 424230 - DNA, 164 bp, Homo sapiens; identical to SEQ ID NO: 239399
  chr17:62075060-62075224
  hyper

SEQ ID NO: 424231 - DNA, 181 bp, Homo sapiens; identical to SEQ ID NO: 239400
  chr17:62103203-62103384
  hyper

SEQ ID NO: 424232 - DNA, 408 bp, Homo sapiens; identical to SEQ ID NO: 239401
  chr17:62223211-62223619
  hyper

SEQ ID NO: 424233 - DNA, 288 bp, Homo sapiens; identical to SEQ ID NO: 239402
  chr17:62223930-62224218
  hyper

SEQ ID NO: 424234 - DNA, 62 bp, Homo sapiens; identical to SEQ ID NO: 204753
  chr17:62915906-62915968
  hyper

SEQ ID NO: 424235 - DNA, 75 bp, Homo sapiens; identical to SEQ ID NO: 239404
  chr17:62971851-62971926
  hyper

SEQ ID NO: 424236 - DNA, 865 bp, Homo sapiens
  chr17:63556529-63557394
  hyper
ggaggagaggcggggggcgggggagggcaagcggggggcgccgctaccctttcatcccacctcccaaaggcactcccgcgcgcactcacacgccgactcacatccataaccgcgacagcgacgcgacccccggggggtatctgccccctctccgcccccgccactgccgccactcggataagtctcctctctgggccccccgccaacccggtcaccgcgctggggagggggctccggcgcagggcgcgcaaggctgcccggccaagccccccggaacgctgggcgccgggtccgccgctcccctccgcgccggcccctagcgcgccccgaaatagccggcctgccaacttcaaagggccgccccgcacatcaaagcgcgcggtccgcccggccgcctcggcctcggcactcaccattgatccccgcgcgcgctcggcggcgagacctcgcaggcgcccctggcaggggcccggccccggcccccggctcggctcgcggcggcagccccgggcccccccgggccggccgcggcgtcggggaacatggggagtcgtgcggcgggggagggggtgcgggaaacaacaatcccgggttcagagcgaaagccaccggccggggagggggaacggcgcgccccgccgccccttttatgcaaaagatccgagcgggcctccgcccccgcccggcccggctttcaacgcaggtcctgtttccagcagtcactcggcgcaccaaatgtcctccgggcgcttccaacaaaaactgcgctgtggatttaactgtgcacttcaaaggcgcgagccgagcgcacggtcctgaaagggaggtacgcgccggccgcgccccgggccgccccccgcagccc

SEQ ID NO: 424237 - DNA, 121 bp, Homo sapiens; identical to SEQ ID NO: 204755
  chr17:64257870-64257991
  hyper

SEQ ID NO: 424238 - DNA, 173 bp, Homo sapiens; identical to SEQ ID NO: 225472
  chr17:64298539-64298712
  hyper

SEQ ID NO: 424239 - DNA, 56 bp, Homo sapiens; identical to SEQ ID NO: 225474
  chr17:65242142-65242198
  hyper

SEQ ID NO: 424240 - DNA, 41 bp, Homo sapiens; identical to SEQ ID NO: 204758
  chr17:65352419-65352460
  hyper

SEQ ID NO: 424241 - DNA, 257 bp, Homo sapiens; identical to SEQ ID NO: 239410
  chr17:65362659-65362916
  hyper

SEQ ID NO: 424242 - DNA, 165 bp, Homo sapiens; identical to SEQ ID NO: 239411
  chr17:65713844-65714009
  hyper

SEQ ID NO: 424243 - DNA, 146 bp, Homo sapiens; identical to SEQ ID NO: 204761
  chr17:66596140-66596286
  hyper

SEQ ID NO: 424244 - DNA, 104 bp, Homo sapiens; identical to SEQ ID NO: 292646
  chr17:67410686-67410790
  hyper

SEQ ID NO: 424245 - DNA, 158 bp, Homo sapiens; identical to SEQ ID NO: 204764
  chr17:70026735-70026893
  hyper

SEQ ID NO: 424246 - DNA, 404 bp, Homo sapiens; identical to SEQ ID NO: 239418
  chr17:70115369-70115773
  hyper

SEQ ID NO: 424247 - DNA, 151 bp, Homo sapiens; identical to SEQ ID NO: 239419
  chr17:70116068-70116219
  hyper

SEQ ID NO: 424248 - DNA, 79 bp, Homo sapiens; identical to SEQ ID NO: 239420
  chr17:70116991-70117070
  hyper

SEQ ID NO: 424249 - DNA, 51 bp, Homo sapiens; identical to SEQ ID NO: 204765
  chr17:70270193-70270244
  hyper

SEQ ID NO: 424250 - DNA, 39 bp, Homo sapiens; identical to SEQ ID NO: 204766
  chr17:70553092-70553131
  hyper

SEQ ID NO: 424251 - DNA, 271 bp, Homo sapiens; identical to SEQ ID NO: 292656
  chr17:70587739-70588010
  hyper

SEQ ID NO: 424252 - DNA, 41 bp, Homo sapiens; identical to SEQ ID NO: 384684
  chr17:70588131-70588172
  hyper

SEQ ID NO: 424253 - DNA, 81 bp, Homo sapiens; identical to SEQ ID NO: 239424
  chr17:71088837-71088918
  hyper

SEQ ID NO: 424254 - DNA, 43 bp, Homo sapiens; identical to SEQ ID NO: 239425
  chr17:71128278-71128321
  hyper

SEQ ID NO: 424255 - DNA, 100 bp, Homo sapiens; identical to SEQ ID NO: 54533
  chr17:71227555-71227655
  hyper

SEQ ID NO: 424256 - DNA, 253 bp, Homo sapiens; identical to SEQ ID NO: 239430
  chr17:71228588-71228841
  hyper

SEQ ID NO: 424257 - DNA, 241 bp, Homo sapiens; identical to SEQ ID NO: 204769
  chr17:71306521-71306762
  hyper

SEQ ID NO: 424258 - DNA, 1600 bp, Homo sapiens; identical to SEQ ID NO: 292664
  chr17:71306967-71308567
  hyper

SEQ ID NO: 424259 - DNA, 203 bp, Homo sapiens; identical to SEQ ID NO: 292665
  chr17:71640267-71640470
  hyper

SEQ ID NO: 424260 - DNA, 239 bp, Homo sapiens; identical to SEQ ID NO: 292666
  chr17:71640593-71640832
  hyper

SEQ ID NO: 424261 - DNA, 48 bp, Homo sapiens; identical to SEQ ID NO: 292667
  chr17:71641133-71641181
  hyper

SEQ ID NO: 424262 - DNA, 114 bp, Homo sapiens; identical to SEQ ID NO: 239438
  chr17:72199626-72199740
  hyper

SEQ ID NO: 424263 - DNA, 472 bp, Homo sapiens; identical to SEQ ID NO: 292670
  chr17:72208668-72209140
  hyper

SEQ ID NO: 424264 - DNA, 51 bp, Homo sapiens; identical to SEQ ID NO: 239440
  chr17:72209566-72209617
  hyper

SEQ ID NO: 424265 - DNA, 532 bp, Homo sapiens; identical to SEQ ID NO: 239449
  chr17:72733408-72733940
  hyper

SEQ ID NO: 424266 - DNA, 227 bp, Homo sapiens; identical to SEQ ID NO: 400317
  chr17:72856714-72856941
  hyper

SEQ ID NO: 424267 - DNA, 102 bp, Homo sapiens; identical to SEQ ID NO: 239452
  chr17:72919304-72919406
  hyper

SEQ ID NO: 424268 - DNA, 258 bp, Homo sapiens; identical to SEQ ID NO: 204780
  chr17:72920292-72920550
  hyper

SEQ ID NO: 424269 - DNA, 216 bp, Homo sapiens; identical to SEQ ID NO: 292685
  chr17:72920580-72920796
  hyper

SEQ ID NO: 424270 - DNA, 183 bp, Homo sapiens; identical to SEQ ID NO: 239456
  chr17:72968521-72968704
  hyper

SEQ ID NO: 424271 - DNA, 127 bp, Homo sapiens; identical to SEQ ID NO: 204782
  chr17:72968954-72969081
  hyper

SEQ ID NO: 424272 - DNA, 904 bp, Homo sapiens; identical to SEQ ID NO: 292689
  chr17:72983606-72984510
  hyper

SEQ ID NO: 424273 - DNA, 116 bp, Homo sapiens; identical to SEQ ID NO: 54574
  chr17:73008759-73008875
  hyper

SEQ ID NO: 424274 - DNA, 99 bp, Homo sapiens; identical to SEQ ID NO: 239460
  chr17:73009128-73009227
  hyper

SEQ ID NO: 424275 - DNA, 81 bp, Homo sapiens; identical to SEQ ID NO: 204786
  chr17:73043061-73043142
  hyper

SEQ ID NO: 424276 - DNA, 363 bp, Homo sapiens; identical to SEQ ID NO: 225497
  chr17:73084122-73084485
  hyper

SEQ ID NO: 424277 - DNA, 82 bp, Homo sapiens; identical to SEQ ID NO: 239464
  chr17:73105914-73105996
  hyper

SEQ ID NO: 424278 - DNA, 232 bp, Homo sapiens; identical to SEQ ID NO: 239465
  chr17:73127281-73127513
  hyper

SEQ ID NO: 424279 - DNA, 252 bp, Homo sapiens; identical to SEQ ID NO: 239466
  chr17:73127892-73128144
  hyper

SEQ ID NO: 424280 - DNA, 248 bp, Homo sapiens; identical to SEQ ID NO: 239467
  chr17:73150719-73150967
  hyper

SEQ ID NO: 424281 - DNA, 92 bp, Homo sapiens; identical to SEQ ID NO: 239468
  chr17:73201313-73201405
  hyper

SEQ ID NO: 424282 - DNA, 296 bp, Homo sapiens; identical to SEQ ID NO: 239469
  chr17:73257643-73257939
  hyper

SEQ ID NO: 424283 - DNA, 80 bp, Homo sapiens; identical to SEQ ID NO: 239470
  chr17:73401911-73401991
  hyper

SEQ ID NO: 424284 - DNA, 83 bp, Homo sapiens; identical to SEQ ID NO: 204789
  chr17:73422368-73422451
  hyper

SEQ ID NO: 424285 - DNA, 236 bp, Homo sapiens; identical to SEQ ID NO: 239471
  chr17:73452534-73452770
  hyper

SEQ ID NO: 424286 - DNA, 483 bp, Homo sapiens; identical to SEQ ID NO: 225499
  chr17:73511002-73511485
  hyper

SEQ ID NO: 424287 - DNA, 33 bp, Homo sapiens; identical to SEQ ID NO: 204792
  chr17:73521010-73521043
  hyper

SEQ ID NO: 424288 - DNA, 98 bp, Homo sapiens; identical to SEQ ID NO: 239473
  chr17:73522040-73522138
  hyper

SEQ ID NO: 424289 - DNA, 71 bp, Homo sapiens; identical to SEQ ID NO: 54595
  chr17:73522482-73522553
  hyper

SEQ ID NO: 424290 - DNA, 214 bp, Homo sapiens; identical to SEQ ID NO: 225501
  chr17:73585691-73585905
  hyper

SEQ ID NO: 424291 - DNA, 245 bp, Homo sapiens; identical to SEQ ID NO: 239475
  chr17:73663127-73663372
  hyper

SEQ ID NO: 424292 - DNA, 121 bp, Homo sapiens; identical to SEQ ID NO: 204796
  chr17:73781201-73781322
  hyper

SEQ ID NO: 424293 - DNA, 35 bp, Homo sapiens; identical to SEQ ID NO: 239478
  chr17:73851964-73851999
  hyper

SEQ ID NO: 424294 - DNA, 45 bp, Homo sapiens; identical to SEQ ID NO: 225503
  chr17:73874667-73874712
  hyper

SEQ ID NO: 424295 - DNA, 38 bp, Homo sapiens; identical to SEQ ID NO: 239479
  chr17:73937163-73937201
  hyper

SEQ ID NO: 424296 - DNA, 56 bp, Homo sapiens; identical to SEQ ID NO: 204797
  chr17:73993576-73993632
  hyper

SEQ ID NO: 424297 - DNA, 162 bp, Homo sapiens; identical to SEQ ID NO: 239481
  chr17:74068653-74068815
  hyper

SEQ ID NO: 424298 - DNA, 31 bp, Homo sapiens; identical to SEQ ID NO: 292719
  chr17:74071729-74071760
  hyper

SEQ ID NO: 424299 - DNA, 50 bp, Homo sapiens; identical to SEQ ID NO: 204798
  chr17:74072427-74072477
  hyper

SEQ ID NO: 424300 - DNA, 131 bp, Homo sapiens; identical to SEQ ID NO: 204799
  chr17:74072580-74072711
  hyper

SEQ ID NO: 424301 - DNA, 118 bp, Homo sapiens; identical to SEQ ID NO: 292723
  chr17:74073471-74073589
  hyper

SEQ ID NO: 424302 - DNA, 247 bp, Homo sapiens; identical to SEQ ID NO: 292724
  chr17:74136746-74136993
  hyper

SEQ ID NO: 424303 - DNA, 150 bp, Homo sapiens; identical to SEQ ID NO: 239486
  chr17:74137385-74137535
  hyper

SEQ ID NO: 424304 - DNA, 59 bp, Homo sapiens; identical to SEQ ID NO: 292726
  chr17:74235822-74235881
  hyper

SEQ ID NO: 424305 - DNA, 163 bp, Homo sapiens
  chr17:74235976-74236139
  hyper
cgctcccgtcctcccgtggaggggctcggtgccctcggtgaccctgctagacccggcaggacgccccttgggctaattcgcccggggcgggggagacctcggccttctcgaagacctcccgcgctcgaagaccgtttcggagcgtccgcaaccactgagtccc

SEQ ID NO: 424306 - DNA, 150 bp, Homo sapiens; identical to SEQ ID NO: 239488
  chr17:74261114-74261264
  hyper

SEQ ID NO: 424307 - DNA, 141 bp, Homo sapiens; identical to SEQ ID NO: 239489
  chr17:74350254-74350395
  hyper

SEQ ID NO: 424308 - DNA, 172 bp, Homo sapiens; identical to SEQ ID NO: 239490
  chr17:74379765-74379937
  hyper

SEQ ID NO: 424309 - DNA, 176 bp, Homo sapiens; identical to SEQ ID NO: 129394
  chr17:74381119-74381295
  hyper

SEQ ID NO: 424310 - DNA, 261 bp, Homo sapiens; identical to SEQ ID NO: 239492
  chr17:74381538-74381799
  hyper

SEQ ID NO: 424311 - DNA, 46 bp, Homo sapiens; identical to SEQ ID NO: 204803
  chr17:74581701-74581747
  hyper

SEQ ID NO: 424312 - DNA, 47 bp, Homo sapiens; identical to SEQ ID NO: 239495
  chr17:74707239-74707286
  hyper

SEQ ID NO: 424313 - DNA, 77 bp, Homo sapiens; identical to SEQ ID NO: 239496
  chr17:74722035-74722112
  hyper

SEQ ID NO: 424314 - DNA, 224 bp, Homo sapiens; identical to SEQ ID NO: 204804
  chr17:74732259-74732483
  hyper

SEQ ID NO: 424315 - DNA, 232 bp, Homo sapiens; identical to SEQ ID NO: 204805
  chr17:74732973-74733205
  hyper

SEQ ID NO: 424316 - DNA, 51 bp, Homo sapiens; identical to SEQ ID NO: 239497
  chr17:74733646-74733697
  hyper

SEQ ID NO: 424317 - DNA, 189 bp, Homo sapiens; identical to SEQ ID NO: 239498
  chr17:74734106-74734295
  hyper

SEQ ID NO: 424318 - DNA, 88 bp, Homo sapiens; identical to SEQ ID NO: 204806
  chr17:74864229-74864317
  hyper

SEQ ID NO: 424319 - DNA, 33 bp, Homo sapiens
  chr17:74865458-74865491
  hyper
gtggtcctgggcccagaaagttgccccagcctg

SEQ ID NO: 424320 - DNA, 135 bp, Homo sapiens; identical to SEQ ID NO: 292748
  chr17:75953609-75953744
  hyper

SEQ ID NO: 424321 - DNA, 471 bp, Homo sapiens; identical to SEQ ID NO: 204812
  chr17:75953982-75954453
  hyper

SEQ ID NO: 424322 - DNA, 188 bp, Homo sapiens; identical to SEQ ID NO: 239508
  chr17:75954655-75954843
  hyper

SEQ ID NO: 424323 - DNA, 384 bp, Homo sapiens; identical to SEQ ID NO: 225519
  chr17:76338191-76338575
  hyper

SEQ ID NO: 424324 - DNA, 166 bp, Homo sapiens; identical to SEQ ID NO: 204813
  chr17:76349231-76349397
  hyper

SEQ ID NO: 424325 - DNA, 125 bp, Homo sapiens; identical to SEQ ID NO: 239513
  chr17:76356800-76356925
  hyper

SEQ ID NO: 424326 - DNA, 57 bp, Homo sapiens; identical to SEQ ID NO: 239514
  chr17:76374528-76374585
  hyper

SEQ ID NO: 424327 - DNA, 274 bp, Homo sapiens; identical to SEQ ID NO: 204816
  chr17:76921081-76921355
  hyper

SEQ ID NO: 424328 - DNA, 130 bp, Homo sapiens; identical to SEQ ID NO: 54663
  chr17:76921422-76921552
  hyper

SEQ ID NO: 424329 - DNA, 104 bp, Homo sapiens; identical to SEQ ID NO: 54664
  chr17:76921859-76921963
  hyper

SEQ ID NO: 424330 - DNA, 120 bp, Homo sapiens; identical to SEQ ID NO: 239518
  chr17:76967524-76967644
  hyper

SEQ ID NO: 424331 - DNA, 80 bp, Homo sapiens; identical to SEQ ID NO: 225522
  chr17:77070949-77071029
  hyper

SEQ ID NO: 424332 - DNA, 99 bp, Homo sapiens; identical to SEQ ID NO: 239522
  chr17:77189188-77189287
  hyper

SEQ ID NO: 424333 - DNA, 190 bp, Homo sapiens; identical to SEQ ID NO: 204821
  chr17:77766025-77766215
  hyper

SEQ ID NO: 424334 - DNA, 188 bp, Homo sapiens; identical to SEQ ID NO: 239526
  chr17:77770287-77770475
  hyper

SEQ ID NO: 424335 - DNA, 174 bp, Homo sapiens; identical to SEQ ID NO: 204822
  chr17:77771456-77771630
  hyper

SEQ ID NO: 424336 - DNA, 367 bp, Homo sapiens; identical to SEQ ID NO: 292776
  chr17:77772891-77773258
  hyper

SEQ ID NO: 424337 - DNA, 386 bp, Homo sapiens; identical to SEQ ID NO: 225527
  chr17:77774854-77775240
  hyper

SEQ ID NO: 424338 - DNA, 382 bp, Homo sapiens; identical to SEQ ID NO: 292784
  chr17:77813600-77813982
  hyper

SEQ ID NO: 424339 - DNA, 417 bp, Homo sapiens; identical to SEQ ID NO: 239536
  chr17:77816435-77816852
  hyper

SEQ ID NO: 424340 - DNA, 100 bp, Homo sapiens; identical to SEQ ID NO: 204832
  chr17:78009418-78009518
  hyper

SEQ ID NO: 424341 - DNA, 579 bp, Homo sapiens; identical to SEQ ID NO: 204833
  chr17:78009924-78010503
  hyper

SEQ ID NO: 424342 - DNA, 53 bp, Homo sapiens; identical to SEQ ID NO: 204834
  chr17:78010812-78010865
  hyper

SEQ ID NO: 424343 - DNA, 52 bp, Homo sapiens; identical to SEQ ID NO: 292794
  chr17:78011046-78011098
  hyper

SEQ ID NO: 424344 - DNA, 89 bp, Homo sapiens; identical to SEQ ID NO: 239540
  chr17:78194131-78194220
  hyper

SEQ ID NO: 424345 - DNA, 178 bp, Homo sapiens; identical to SEQ ID NO: 204835
  chr17:78388504-78388682
  hyper

SEQ ID NO: 424346 - DNA, 90 bp, Homo sapiens; identical to SEQ ID NO: 225538
  chr17:78389461-78389551
  hyper

SEQ ID NO: 424347 - DNA, 496 bp, Homo sapiens; identical to SEQ ID NO: 292798
  chr17:78428377-78428873
  hyper

SEQ ID NO: 424348 - DNA, 343 bp, Homo sapiens; identical to SEQ ID NO: 292799
  chr17:78450959-78451302
  hyper

SEQ ID NO: 424349 - DNA, 188 bp, Homo sapiens; identical to SEQ ID NO: 225542
  chr17:78720009-78720197
  hyper

SEQ ID NO: 424350 - DNA, 47 bp, Homo sapiens; identical to SEQ ID NO: 239547
  chr17:78954936-78954983
  hyper

SEQ ID NO: 424351 - DNA, 300 bp, Homo sapiens; identical to SEQ ID NO: 292802
  chr17:78977824-78978124
  hyper

SEQ ID NO: 424352 - DNA, 33 bp, Homo sapiens; identical to SEQ ID NO: 292806
  chr17:79205174-79205207
  hyper

SEQ ID NO: 424353 - DNA, 45 bp, Homo sapiens; identical to SEQ ID NO: 204839
  chr17:79317325-79317370
  hyper

SEQ ID NO: 424354 - DNA, 75 bp, Homo sapiens; identical to SEQ ID NO: 204840
  chr17:79317464-79317539
  hyper

SEQ ID NO: 424355 - DNA, 180 bp, Homo sapiens; identical to SEQ ID NO: 204843
  chr17:79319124-79319304
  hyper

SEQ ID NO: 424356 - DNA, 71 bp, Homo sapiens; identical to SEQ ID NO: 129557
  chr17:79650872-79650943
  hyper

SEQ ID NO: 424357 - DNA, 82 bp, Homo sapiens; identical to SEQ ID NO: 292813
  chr17:79762672-79762754
  hyper

SEQ ID NO: 424358 - DNA, 111 bp, Homo sapiens; identical to SEQ ID NO: 239558
  chr17:79791491-79791602
  hyper

SEQ ID NO: 424359 - DNA, 42 bp, Homo sapiens; identical to SEQ ID NO: 239559
  chr17:79849415-79849457
  hyper

SEQ ID NO: 424360 - DNA, 47 bp, Homo sapiens; identical to SEQ ID NO: 239560
  chr17:79884793-79884840
  hyper

SEQ ID NO: 424361 - DNA, 80 bp, Homo sapiens; identical to SEQ ID NO: 239561
  chr17:79885579-79885659
  hyper

SEQ ID NO: 424362 - DNA, 187 bp, Homo sapiens; identical to SEQ ID NO: 204844
  chr17:79885890-79886077
  hyper

SEQ ID NO: 424363 - DNA, 80 bp, Homo sapiens; identical to SEQ ID NO: 292819
  chr17:79917289-79917369
  hyper

SEQ ID NO: 424364 - DNA, 45 bp, Homo sapiens; identical to SEQ ID NO: 292820
  chr17:79917435-79917480
  hyper

SEQ ID NO: 424365 - DNA, 293 bp, Homo sapiens; identical to SEQ ID NO: 292821
  chr17:79918208-79918501
  hyper

SEQ ID NO: 424366 - DNA, 362 bp, Homo sapiens; identical to SEQ ID NO: 292822
  chr17:79918641-79919003
  hyper

SEQ ID NO: 424367 - DNA, 36 bp, Homo sapiens; identical to SEQ ID NO: 239564
  chr17:79981250-79981286
  hyper

SEQ ID NO: 424368 - DNA, 40 bp, Homo sapiens; identical to SEQ ID NO: 204847
  chr17:79989900-79989940
  hyper

SEQ ID NO: 424369 - DNA, 180 bp, Homo sapiens; identical to SEQ ID NO: 225553
  chr17:80009037-80009217
  hyper

SEQ ID NO: 424370 - DNA, 759 bp, Homo sapiens; identical to SEQ ID NO: 292830
  chr17:80189391-80190150
  hyper

SEQ ID NO: 424371 - DNA, 174 bp, Homo sapiens; identical to SEQ ID NO: 239567
  chr17:80291220-80291394
  hyper

SEQ ID NO: 424372 - DNA, 62 bp, Homo sapiens; identical to SEQ ID NO: 292833
  chr17:80291597-80291659
  hyper

SEQ ID NO: 424373 - DNA, 246 bp, Homo sapiens; identical to SEQ ID NO: 292834
  chr17:80291702-80291948
  hyper

SEQ ID NO: 424374 - DNA, 216 bp, Homo sapiens; identical to SEQ ID NO: 204848
  chr17:80503130-80503346
  hyper

SEQ ID NO: 424375 - DNA, 202 bp, Homo sapiens; identical to SEQ ID NO: 400376
  chr17:80656845-80657047
  hyper

SEQ ID NO: 424376 - DNA, 100 bp, Homo sapiens; identical to SEQ ID NO: 204851
  chr17:80657094-80657194
  hyper

SEQ ID NO: 424377 - DNA, 114 bp, Homo sapiens; identical to SEQ ID NO: 239575
  chr17:80876633-80876747
  hyper

SEQ ID NO: 424378 - DNA, 36 bp, Homo sapiens; identical to SEQ ID NO: 225566
  chr17:81009162-81009198
  hyper

SEQ ID NO: 424379 - DNA, 142 bp, Homo sapiens; identical to SEQ ID NO: 239576
  chr17:81009744-81009886
  hyper

SEQ ID NO: 424380 - DNA, 325 bp, Homo sapiens
  chr17:81038242-81038567
  hyper
cagagcgggaagggacggccgcgggagggagcggcggtttcggggatcgggcgcggaccgcagcgggggccacttccgtctcggggagccgcgggcgggcacctgtgagccgggccgagtgtggctccggccgggccccccgcccctgccccgtgaaggtcaggccgcccttggccgcggcgcgcgctgcgctgggcgaccccccccccccccacccgcggtggcggccgaggactttttttttttttttttttttttgactcaagcgtggccgccgagagcggcgccgaccgcgactgcccctcgggagccgccgccgctccca

SEQ ID NO: 424381 - DNA, 82 bp, Homo sapiens; identical to SEQ ID NO: 239579
  chr18:268117-268199
  hyper

SEQ ID NO: 424382 - DNA, 53 bp, Homo sapiens; identical to SEQ ID NO: 292849
  chr18:499314-499367
  hyper

SEQ ID NO: 424383 - DNA, 46 bp, Homo sapiens; identical to SEQ ID NO: 292850
  chr18:499482-499528
  hyper

SEQ ID NO: 424384 - DNA, 246 bp, Homo sapiens; identical to SEQ ID NO: 400381
  chr18:499558-499804
  hyper

SEQ ID NO: 424385 - DNA, 141 bp, Homo sapiens; identical to SEQ ID NO: 239581
  chr18:657235-657376
  hyper

SEQ ID NO: 424386 - DNA, 31 bp, Homo sapiens; identical to SEQ ID NO: 239582
  chr18:658431-658462
  hyper

SEQ ID NO: 424387 - DNA, 422 bp, Homo sapiens; identical to SEQ ID NO: 292854
  chr18:712016-712438
  hyper

SEQ ID NO: 424388 - DNA, 265 bp, Homo sapiens; identical to SEQ ID NO: 400383
  chr18:906932-907197
  hyper

SEQ ID NO: 424389 - DNA, 285 bp, Homo sapiens; identical to SEQ ID NO: 292858
  chr18:2571378-2571663
  hyper

SEQ ID NO: 424390 - DNA, 136 bp, Homo sapiens; identical to SEQ ID NO: 204861
  chr18:2907034-2907170
  hyper

SEQ ID NO: 424391 - DNA, 419 bp, Homo sapiens; identical to SEQ ID NO: 239592
  chr18:3246159-3246578
  hyper

SEQ ID NO: 424392 - DNA, 44 bp, Homo sapiens; identical to SEQ ID NO: 239594
  chr18:3248119-3248163
  hyper

SEQ ID NO: 424393 - DNA, 32 bp, Homo sapiens; identical to SEQ ID NO: 239595
  chr18:3261695-3261727
  hyper

SEQ ID NO: 424394 - DNA, 59 bp, Homo sapiens; identical to SEQ ID NO: 204864
  chr18:3262505-3262564
  hyper

SEQ ID NO: 424395 - DNA, 631 bp, Homo sapiens; identical to SEQ ID NO: 204865
  chr18:3447898-3448529
  hyper

SEQ ID NO: 424396 - DNA, 35 bp, Homo sapiens; identical to SEQ ID NO: 225577
  chr18:3448760-3448795
  hyper

SEQ ID NO: 424397 - DNA, 808 bp, Homo sapiens
  chr18:3451456-3452264
  hyper
gctgtgggctggaggtggcgtttctgtcgtgatttatgtggagtggttcaaaacagaagttaatcactcgggaagcggacgggaggggcggcgctactgcgcatgcccgggagccgcctggagtttggaactccacattctttcagacccggcccgctgcggggcgttcctggggggtagcctcaaggccagcggggttccttcggctgcgtttctgtgggaggccctgaaacgcgcggagcttccctctgcctccaggctttcccagcgagagtgaaattaaacttgaaactcggatcaactggcagtcgttgttggtagaacgccctaaggacccctccccgcgggacggagggaggactcgggacagggaattggccctgggagaaaacgcgcggggggcgtccgagacgccccgtgaaagccgtgccgacccttgggaggactgacaggtctagagacacgcgctgtctgttgtggtgggcctcccgggaataagtgaggggctctgtgtttcgaggatggttctagcgcagagccgggtgtctgccggggtgggctccccgcattgttcgggctccggcgggggcggctctgattcctttccatggcccgcctcccaccccgggaatccccagtgctccttttccacggcttttctggcgtccccccgactctcccgcggcactttggcctaccttcccccagcgccgtggtcctccctggcgaccccctctgcgctcctggggtcctcctgcgccccccctcctccaccggcgcgctgcccacagccgcgtgccctctcccc

SEQ ID NO: 424398 - DNA, 90 bp, Homo sapiens; identical to SEQ ID NO: 292875
  chr18:4455561-4455651
  hyper

SEQ ID NO: 424399 - DNA, 47 bp, Homo sapiens; identical to SEQ ID NO: 292876
  chr18:4455681-4455728
  hyper

SEQ ID NO: 424400 - DNA, 43 bp, Homo sapiens; identical to SEQ ID NO: 204872
  chr18:5295777-5295820
  hyper

SEQ ID NO: 424401 - DNA, 48 bp, Homo sapiens; identical to SEQ ID NO: 292882
  chr18:6414079-6414127
  hyper

SEQ ID NO: 424402 - DNA, 242 bp, Homo sapiens; identical to SEQ ID NO: 292883
  chr18:6414203-6414445
  hyper

SEQ ID NO: 424403 - DNA, 570 bp, Homo sapiens; identical to SEQ ID NO: 292884
  chr18:6414697-6415267
  hyper

SEQ ID NO: 424404 - DNA, 41 bp, Homo sapiens; identical to SEQ ID NO: 292888
  chr18:7116449-7116490
  hyper

SEQ ID NO: 424405 - DNA, 134 bp, Homo sapiens; identical to SEQ ID NO: 204879
  chr18:7116637-7116771
  hyper

SEQ ID NO: 424406 - DNA, 50 bp, Homo sapiens; identical to SEQ ID NO: 225593
  chr18:8016761-8016811
  hyper

SEQ ID NO: 424407 - DNA, 200 bp, Homo sapiens; identical to SEQ ID NO: 292896
  chr18:8367259-8367459
  hyper

SEQ ID NO: 424408 - DNA, 81 bp, Homo sapiens; identical to SEQ ID NO: 129727
  chr18:8367503-8367584
  hyper

SEQ ID NO: 424409 - DNA, 199 bp, Homo sapiens; identical to SEQ ID NO: 204884
  chr18:8705987-8706186
  hyper

SEQ ID NO: 424410 - DNA, 43 bp, Homo sapiens; identical to SEQ ID NO: 204885
  chr18:8748272-8748315
  hyper

SEQ ID NO: 424411 - DNA, 67 bp, Homo sapiens; identical to SEQ ID NO: 239624
  chr18:9102407-9102474
  hyper

SEQ ID NO: 424412 - DNA, 38 bp, Homo sapiens; identical to SEQ ID NO: 239625
  chr18:9136542-9136580
  hyper

SEQ ID NO: 424413 - DNA, 70 bp, Homo sapiens; identical to SEQ ID NO: 204886
  chr18:9474876-9474946
  hyper

SEQ ID NO: 424414 - DNA, 168 bp, Homo sapiens; identical to SEQ ID NO: 204887
  chr18:9475347-9475515
  hyper

SEQ ID NO: 424415 - DNA, 100 bp, Homo sapiens; identical to SEQ ID NO: 204889
  chr18:9913711-9913811
  hyper

SEQ ID NO: 424416 - DNA, 95 bp, Homo sapiens; identical to SEQ ID NO: 292908
  chr18:10032590-10032685
  hyper

SEQ ID NO: 424417 - DNA, 36 bp, Homo sapiens; identical to SEQ ID NO: 129750
  chr18:10032841-10032877
  hyper

SEQ ID NO: 424418 - DNA, 68 bp, Homo sapiens; identical to SEQ ID NO: 239634
  chr18:10525828-10525896
  hyper

SEQ ID NO: 424419 - DNA, 123 bp, Homo sapiens; identical to SEQ ID NO: 292914
  chr18:11689067-11689190
  hyper

SEQ ID NO: 424420 - DNA, 575 bp, Homo sapiens; identical to SEQ ID NO: 292915
  chr18:11689220-11689795
  hyper

SEQ ID NO: 424421 - DNA, 269 bp, Homo sapiens; identical to SEQ ID NO: 292916
  chr18:11689834-11690103
  hyper

SEQ ID NO: 424422 - DNA, 56 bp, Homo sapiens; identical to SEQ ID NO: 292920
  chr18:12287382-12287438
  hyper

SEQ ID NO: 424423 - DNA, 340 bp, Homo sapiens; identical to SEQ ID NO: 292921
  chr18:12287452-12287792
  hyper

SEQ ID NO: 424424 - DNA, 165 bp, Homo sapiens; identical to SEQ ID NO: 292922
  chr18:12287963-12288128
  hyper

SEQ ID NO: 424425 - DNA, 688 bp, Homo sapiens; identical to SEQ ID NO: 204895
  chr18:12308209-12308897
  hyper

SEQ ID NO: 424426 - DNA, 129 bp, Homo sapiens; identical to SEQ ID NO: 204896
  chr18:12308927-12309056
  hyper

SEQ ID NO: 424427 - DNA, 261 bp, Homo sapiens; identical to SEQ ID NO: 239643
  chr18:12656810-12657071
  hyper

SEQ ID NO: 424428 - DNA, 54 bp, Homo sapiens; identical to SEQ ID NO: 204901
  chr18:12657375-12657429
  hyper

SEQ ID NO: 424429 - DNA, 112 bp, Homo sapiens; identical to SEQ ID NO: 239646
  chr18:12702645-12702757
  hyper

SEQ ID NO: 424430 - DNA, 95 bp, Homo sapiens
  chr18:13218078-13218173
  hyper
gggggggcggcccaggtgagtgcggacccgaggtggccgcagtggtcggggcttctggcccaagttcaccgctgcgctccggagggaggggtggc

SEQ ID NO: 424431 - DNA, 105 bp, Homo sapiens; identical to SEQ ID NO: 239652
  chr18:14431303-14431408
  hyper

SEQ ID NO: 424432 - DNA, 86 bp, Homo sapiens; identical to SEQ ID NO: 204905
  chr18:18821314-18821400
  hyper

SEQ ID NO: 424433 - DNA, 173 bp, Homo sapiens
  chr18:18821485-18821658
  hyper
gggaggctaccgacgagccggggcccggggccggagggcgtgctcctccgggaggtgcaaaagtcggcttgggcccggagctcccgggtttgtttggttttgtccgcgccctgcccccaccctacccccttcatgcaaaaggccaagggtttccgagccaccactgcccaggc

SEQ ID NO: 424434 - DNA, 32 bp, Homo sapiens; identical to SEQ ID NO: 239657
  chr18:19321116-19321148
  hyper

SEQ ID NO: 424435 - DNA, 112 bp, Homo sapiens; identical to SEQ ID NO: 292942
  chr18:19745613-19745725
  hyper

SEQ ID NO: 424436 - DNA, 236 bp, Homo sapiens
  chr18:19751030-19751266
  hyper
gatctcctaccatacccgtctcccccaccccacctcaggagctagacgtcagcttggagcggcgccggaccgtggatggccttgactgacggcggctggtgcttgccgaagcgcttcggggccgcgggtgcggacgccagcgactccagagcctttccagcgcgggagccctccacgccgccttcccccatctcttcctcgtcctcctcctgctcccggggcggagagcggggccc

SEQ ID NO: 424437 - DNA, 62 bp, Homo sapiens; identical to SEQ ID NO: 292951
  chr18:19751774-19751836
  hyper

SEQ ID NO: 424438 - DNA, 168 bp, Homo sapiens; identical to SEQ ID NO: 129825
  chr18:19751869-19752037
  hyper

SEQ ID NO: 424439 - DNA, 229 bp, Homo sapiens; identical to SEQ ID NO: 239663
  chr18:20139428-20139657
  hyper

SEQ ID NO: 424440 - DNA, 242 bp, Homo sapiens; identical to SEQ ID NO: 292957
  chr18:20715395-20715637
  hyper

SEQ ID NO: 424441 - DNA, 383 bp, Homo sapiens; identical to SEQ ID NO: 239668
  chr18:21033058-21033441
  hyper

SEQ ID NO: 424442 - DNA, 175 bp, Homo sapiens; identical to SEQ ID NO: 239669
  chr18:21083481-21083656
  hyper

SEQ ID NO: 424443 - DNA, 575 bp, Homo sapiens; identical to SEQ ID NO: 204919
  chr18:21242241-21242816
  hyper

SEQ ID NO: 424444 - DNA, 138 bp, Homo sapiens; identical to SEQ ID NO: 204920
  chr18:21242871-21243009
  hyper

SEQ ID NO: 424445 - DNA, 211 bp, Homo sapiens; identical to SEQ ID NO: 239673
  chr18:21594007-21594218
  hyper

SEQ ID NO: 424446 - DNA, 247 bp, Homo sapiens; identical to SEQ ID NO: 225613
  chr18:21594467-21594714
  hyper

SEQ ID NO: 424447 - DNA, 325 bp, Homo sapiens; identical to SEQ ID NO: 292972
  chr18:21977677-21978002
  hyper

SEQ ID NO: 424448 - DNA, 90 bp, Homo sapiens; identical to SEQ ID NO: 292973
  chr18:21978034-21978124
  hyper

SEQ ID NO: 424449 - DNA, 247 bp, Homo sapiens; identical to SEQ ID NO: 204927
  chr18:22006301-22006548
  hyper

SEQ ID NO: 424450 - DNA, 102 bp, Homo sapiens; identical to SEQ ID NO: 292975
  chr18:22006775-22006877
  hyper

SEQ ID NO: 424451 - DNA, 147 bp, Homo sapiens; identical to SEQ ID NO: 204928
  chr18:22653839-22653986
  hyper

SEQ ID NO: 424452 - DNA, 39 bp, Homo sapiens; identical to SEQ ID NO: 239680
  chr18:22932062-22932101
  hyper

SEQ ID NO: 424453 - DNA, 252 bp, Homo sapiens; identical to SEQ ID NO: 239681
  chr18:22932436-22932688
  hyper

SEQ ID NO: 424454 - DNA, 31 bp, Homo sapiens; identical to SEQ ID NO: 239684
  chr18:24128609-24128640
  hyper

SEQ ID NO: 424455 - DNA, 268 bp, Homo sapiens; identical to SEQ ID NO: 239685
  chr18:24129548-24129816
  hyper

SEQ ID NO: 424456 - DNA, 59 bp, Homo sapiens; identical to SEQ ID NO: 239689
  chr18:24236254-24236313
  hyper

SEQ ID NO: 424457 - DNA, 124 bp, Homo sapiens
  chr18:24765253-24765377
  hyper
ggagtcgggcgctcaccctggccctgaccctcccgcgtccggcccggctggggctgcggcgccgcctccgcgcccgctcccgcccgcgcccccgcccccgcccgcccgggcagctccgcctccc

SEQ ID NO: 424458 - DNA, 100 bp, Homo sapiens; identical to SEQ ID NO: 292987
  chr18:24765420-24765520
  hyper

SEQ ID NO: 424459 - DNA, 124 bp, Homo sapiens; identical to SEQ ID NO: 292991
  chr18:28622874-28622998
  hyper

SEQ ID NO: 424460 - DNA, 177 bp, Homo sapiens; identical to SEQ ID NO: 292992
  chr18:28680887-28681064
  hyper

SEQ ID NO: 424461 - DNA, 781 bp, Homo sapiens; identical to SEQ ID NO: 204934
  chr18:28681213-28681994
  hyper

SEQ ID NO: 424462 - DNA, 217 bp, Homo sapiens; identical to SEQ ID NO: 204935
  chr18:28682029-28682246
  hyper

SEQ ID NO: 424463 - DNA, 73 bp, Homo sapiens; identical to SEQ ID NO: 54990
  chr18:28682286-28682359
  hyper

SEQ ID NO: 424464 - DNA, 36 bp, Homo sapiens; identical to SEQ ID NO: 204939
  chr18:29265160-29265196
  hyper

SEQ ID NO: 424465 - DNA, 51 bp, Homo sapiens; identical to SEQ ID NO: 225622
  chr18:29598683-29598734
  hyper

SEQ ID NO: 424466 - DNA, 211 bp, Homo sapiens; identical to SEQ ID NO: 239697
  chr18:29599218-29599429
  hyper

SEQ ID NO: 424467 - DNA, 1425 bp, Homo sapiens; identical to SEQ ID NO: 293003
  chr18:30050221-30051646
  hyper

SEQ ID NO: 424468 - DNA, 263 bp, Homo sapiens; identical to SEQ ID NO: 293007
  chr18:30352257-30352520
  hyper

SEQ ID NO: 424469 - DNA, 258 bp, Homo sapiens; identical to SEQ ID NO: 239703
  chr18:30781559-30781817
  hyper

SEQ ID NO: 424470 - DNA, 130 bp, Homo sapiens; identical to SEQ ID NO: 293009
  chr18:31020194-31020324
  hyper

SEQ ID NO: 424471 - DNA, 178 bp, Homo sapiens; identical to SEQ ID NO: 55008
  chr18:31803673-31803851
  hyper

SEQ ID NO: 424472 - DNA, 137 bp, Homo sapiens; identical to SEQ ID NO: 293018
  chr18:32073098-32073235
  hyper

SEQ ID NO: 424473 - DNA, 225 bp, Homo sapiens; identical to SEQ ID NO: 239713
  chr18:33077287-33077512
  hyper

SEQ ID NO: 424474 - DNA, 78 bp, Homo sapiens; identical to SEQ ID NO: 225628
  chr18:33077970-33078048
  hyper

SEQ ID NO: 424475 - DNA, 440 bp, Homo sapiens; identical to SEQ ID NO: 293026
  chr18:33530135-33530575
  hyper

SEQ ID NO: 424476 - DNA, 40 bp, Homo sapiens; identical to SEQ ID NO: 239715
  chr18:33709430-33709470
  hyper

SEQ ID NO: 424477 - DNA, 656 bp, Homo sapiens; identical to SEQ ID NO: 293028
  chr18:33766769-33767425
  hyper

SEQ ID NO: 424478 - DNA, 148 bp, Homo sapiens; identical to SEQ ID NO: 293029
  chr18:33767912-33768060
  hyper

SEQ ID NO: 424479 - DNA, 359 bp, Homo sapiens; identical to SEQ ID NO: 293030
  chr18:33876589-33876948
  hyper

SEQ ID NO: 424480 - DNA, 32 bp, Homo sapiens; identical to SEQ ID NO: 293031
  chr18:33877119-33877151
  hyper

SEQ ID NO: 424481 - DNA, 477 bp, Homo sapiens; identical to SEQ ID NO: 293032
  chr18:33877206-33877683
  hyper

SEQ ID NO: 424482 - DNA, 123 bp, Homo sapiens; identical to SEQ ID NO: 293033
  chr18:33877754-33877877
  hyper

SEQ ID NO: 424483 - DNA, 367 bp, Homo sapiens; identical to SEQ ID NO: 293034
  chr18:33877929-33878296
  hyper

SEQ ID NO: 424484 - DNA, 62 bp, Homo sapiens; identical to SEQ ID NO: 239719
  chr18:34408854-34408916
  hyper

SEQ ID NO: 424485 - DNA, 148 bp, Homo sapiens; identical to SEQ ID NO: 239723
  chr18:34855019-34855167
  hyper

SEQ ID NO: 424486 - DNA, 52 bp, Homo sapiens; identical to SEQ ID NO: 293038
  chr18:35104466-35104518
  hyper

SEQ ID NO: 424487 - DNA, 51 bp, Homo sapiens; identical to SEQ ID NO: 293039
  chr18:35145809-35145860
  hyper

SEQ ID NO: 424488 - DNA, 56 bp, Homo sapiens
  chr18:35145926-35145982
  hyper
ttttttttttttttttttttttttttacattgaacagacaggatctctgtcctttc

SEQ ID NO: 424489 - DNA, 68 bp, Homo sapiens; identical to SEQ ID NO: 204963
  chr18:39172188-39172256
  hyper

SEQ ID NO: 424490 - DNA, 150 bp, Homo sapiens; identical to SEQ ID NO: 293044
  chr18:40857242-40857392
  hyper

SEQ ID NO: 424491 - DNA, 57 bp, Homo sapiens; identical to SEQ ID NO: 204965
  chr18:40857422-40857479
  hyper

SEQ ID NO: 424492 - DNA, 67 bp, Homo sapiens; identical to SEQ ID NO: 204969
  chr18:42531892-42531959
  hyper

SEQ ID NO: 424493 - DNA, 142 bp, Homo sapiens; identical to SEQ ID NO: 239735
  chr18:43547678-43547820
  hyper

SEQ ID NO: 424494 - DNA, 198 bp, Homo sapiens; identical to SEQ ID NO: 239736
  chr18:43678499-43678697
  hyper

SEQ ID NO: 424495 - DNA, 36 bp, Homo sapiens; identical to SEQ ID NO: 239737
  chr18:43753517-43753553
  hyper

SEQ ID NO: 424496 - DNA, 186 bp, Homo sapiens; identical to SEQ ID NO: 239738
  chr18:43753875-43754061
  hyper

SEQ ID NO: 424497 - DNA, 33 bp, Homo sapiens; identical to SEQ ID NO: 225641
  chr18:43924114-43924147
  hyper

SEQ ID NO: 424498 - DNA, 53 bp, Homo sapiens; identical to SEQ ID NO: 293057
  chr18:44676978-44677031
  hyper

SEQ ID NO: 424499 - DNA, 196 bp, Homo sapiens; identical to SEQ ID NO: 129980
  chr18:44677055-44677251
  hyper

SEQ ID NO: 424500 - DNA, 241 bp, Homo sapiens; identical to SEQ ID NO: 239747
  chr18:44702531-44702772
  hyper

SEQ ID NO: 424501 - DNA, 79 bp, Homo sapiens; identical to SEQ ID NO: 293061
  chr18:44787333-44787412
  hyper

SEQ ID NO: 424502 - DNA, 289 bp, Homo sapiens; identical to SEQ ID NO: 129995
  chr18:44788908-44789197
  hyper

SEQ ID NO: 424503 - DNA, 76 bp, Homo sapiens; identical to SEQ ID NO: 293066
  chr18:44790495-44790571
  hyper

SEQ ID NO: 424504 - DNA, 64 bp, Homo sapiens; identical to SEQ ID NO: 239764
  chr18:45938869-45938933
  hyper

SEQ ID NO: 424505 - DNA, 273 bp, Homo sapiens; identical to SEQ ID NO: 204981
  chr18:46065116-46065389
  hyper

SEQ ID NO: 424506 - DNA, 2253 bp, Homo sapiens; identical to SEQ ID NO: 293081
  chr18:46065664-46067917
  hyper

SEQ ID NO: 424507 - DNA, 144 bp, Homo sapiens; identical to SEQ ID NO: 204985
  chr18:46476808-46476952
  hyper

SEQ ID NO: 424508 - DNA, 104 bp, Homo sapiens; identical to SEQ ID NO: 204986
  chr18:46501913-46502017
  hyper

SEQ ID NO: 424509 - DNA, 228 bp, Homo sapiens; identical to SEQ ID NO: 204993
  chr18:48494204-48494432
  hyper

SEQ ID NO: 424510 - DNA, 296 bp, Homo sapiens; identical to SEQ ID NO: 239777
  chr18:48723995-48724291
  hyper

SEQ ID NO: 424511 - DNA, 70 bp, Homo sapiens; identical to SEQ ID NO: 204995
  chr18:49866290-49866360
  hyper

SEQ ID NO: 424512 - DNA, 426 bp, Homo sapiens; identical to SEQ ID NO: 293098
  chr18:49866421-49866847
  hyper

SEQ ID NO: 424513 - DNA, 79 bp, Homo sapiens; identical to SEQ ID NO: 239781
  chr18:51795698-51795777
  hyper

SEQ ID NO: 424514 - DNA, 40 bp, Homo sapiens; identical to SEQ ID NO: 205004
  chr18:53257761-53257801
  hyper

SEQ ID NO: 424515 - DNA, 354 bp, Homo sapiens; identical to SEQ ID NO: 239788
  chr18:54318601-54318955
  hyper

SEQ ID NO: 424516 - DNA, 48 bp, Homo sapiens
  chr18:54789321-54789369
  hyper
gttttcataaatcccaaagtaggagtggaagcaacctcccttcttcct

SEQ ID NO: 424517 - DNA, 119 bp, Homo sapiens
  chr18:55020166-55020285
  hyper
cgtgtccctgaaaaaggagaacatcttcaccactcccaagtacgccagcccgggggcgccccgaatgtacatgttccacgcgggattccggtgagtgcgggcctctgtgttagtgccct

SEQ ID NO: 424518 - DNA, 178 bp, Homo sapiens; identical to SEQ ID NO: 239792
  chr18:55101491-55101669
  hyper

SEQ ID NO: 424519 - DNA, 361 bp, Homo sapiens
  chr18:55102066-55102427
  hyper
accatgcattagaatacattagcgcctgcattttaaaaggctaaactattggctcccagctagggactctcggtaagtggcttgttagtgacgagtgtttgtctatactggcacatagcggagtcttttgctcccggcttactcgcctccaggaaagctttggggtgaggcgaaggcgattgaagcaatgccccttcccccagatcgcagctgctcaggggggacacagcacggcatctttcaccgaatctctctcgctcgctcgcactccagcctccctctccccagcgacccccccaccttctcctccctccctctccttgacgtttgattccagtagcaaaggaggtaaaaaaggcac

SEQ ID NO: 424520 - DNA, 65 bp, Homo sapiens; identical to SEQ ID NO: 239796
  chr18:55254078-55254143
  hyper

SEQ ID NO: 424521 - DNA, 65 bp, Homo sapiens; identical to SEQ ID NO: 239797
  chr18:55289330-55289395
  hyper

SEQ ID NO: 424522 - DNA, 670 bp, Homo sapiens; identical to SEQ ID NO: 293126
  chr18:55469664-55470334
  hyper

SEQ ID NO: 424523 - DNA, 245 bp, Homo sapiens; identical to SEQ ID NO: 239800
  chr18:55710765-55711010
  hyper

SEQ ID NO: 424524 - DNA, 235 bp, Homo sapiens; identical to SEQ ID NO: 239801
  chr18:56807204-56807439
  hyper

SEQ ID NO: 424525 - DNA, 45 bp, Homo sapiens; identical to SEQ ID NO: 205016
  chr18:56887424-56887469
  hyper

SEQ ID NO: 424526 - DNA, 202 bp, Homo sapiens; identical to SEQ ID NO: 205017
  chr18:56887502-56887704
  hyper

SEQ ID NO: 424527 - DNA, 43 bp, Homo sapiens; identical to SEQ ID NO: 293133
  chr18:56888694-56888737
  hyper

SEQ ID NO: 424528 - DNA, 80 bp, Homo sapiens; identical to SEQ ID NO: 293134
  chr18:56934820-56934900
  hyper

SEQ ID NO: 424529 - DNA, 100 bp, Homo sapiens; identical to SEQ ID NO: 205019
  chr18:56976025-56976125
  hyper

SEQ ID NO: 424530 - DNA, 100 bp, Homo sapiens; identical to SEQ ID NO: 293140
  chr18:57566993-57567093
  hyper

SEQ ID NO: 424531 - DNA, 255 bp, Homo sapiens; identical to SEQ ID NO: 130108
  chr18:57567153-57567408
  hyper

SEQ ID NO: 424532 - DNA, 163 bp, Homo sapiens; identical to SEQ ID NO: 239813
  chr18:57567942-57568105
  hyper

SEQ ID NO: 424533 - DNA, 60 bp, Homo sapiens; identical to SEQ ID NO: 293143
  chr18:59000631-59000691
  hyper

SEQ ID NO: 424534 - DNA, 164 bp, Homo sapiens; identical to SEQ ID NO: 205025
  chr18:59992238-59992402
  hyper

SEQ ID NO: 424535 - DNA, 39 bp, Homo sapiens; identical to SEQ ID NO: 205026
  chr18:59992691-59992730
  hyper

SEQ ID NO: 424536 - DNA, 113 bp, Homo sapiens; identical to SEQ ID NO: 239819
  chr18:59992968-59993081
  hyper

SEQ ID NO: 424537 - DNA, 501 bp, Homo sapiens; identical to SEQ ID NO: 293150
  chr18:60189547-60190048
  hyper

SEQ ID NO: 424538 - DNA, 1612 bp, Homo sapiens; identical to SEQ ID NO: 55170
  chr18:60190084-60191696
  hyper

SEQ ID NO: 424539 - DNA, 95 bp, Homo sapiens; identical to SEQ ID NO: 225665
  chr18:60191979-60192074
  hyper

SEQ ID NO: 424540 - DNA, 97 bp, Homo sapiens; identical to SEQ ID NO: 205029
  chr18:60194122-60194219
  hyper

SEQ ID NO: 424541 - DNA, 53 bp, Homo sapiens; identical to SEQ ID NO: 239822
  chr18:60382505-60382558
  hyper

SEQ ID NO: 424542 - DNA, 1435 bp, Homo sapiens; identical to SEQ ID NO: 205030
  chr18:60382939-60384374
  hyper

SEQ ID NO: 424543 - DNA, 150 bp, Homo sapiens; identical to SEQ ID NO: 239823
  chr18:60805530-60805680
  hyper

SEQ ID NO: 424544 - DNA, 286 bp, Homo sapiens; identical to SEQ ID NO: 239825
  chr18:60986640-60986926
  hyper

SEQ ID NO: 424545 - DNA, 323 bp, Homo sapiens
  chr18:63417370-63417693
  hyper
agggtcctctgtcccgcactgcgagtaaatcatacactttggaagtttagcattagagagcccagcaggggagaaaattgtctgcaagttaaaaaaaaaaaaaaaaaaaaagtagaactagggcagtccgaggagattgaaagggcaaaactatcaagcaagaaaactgtaagttctgattagttttatgactttgccttcatgcctcaggagctcaactgatcacggctttcacgacaggctaaggtgggtgttggaggggcagcttgaaaataccctcaaaactctcctccagctccgtgctttcagatgcaaatgcctca

SEQ ID NO: 424546 - DNA, 284 bp, Homo sapiens
  chr18:63418672-63418956
  hyper
ggcactctccaggtgcagcggcaaacatgggcaggctggagcactctcctcaaagaggaccacaagcaggctcctccctcaacctcggactgatgggggcacaactccgcgccggctgtgccgccgggttctgcagaggtctgaggctggaagggggtatgcgccgctttgggcaggagtcctttgaaccattcgctctggacaccttttacctttcgtgaaggtggagctcacttcagggtgctttgcttttttcccctgtaattagtattctgctgatctgg

SEQ ID NO: 424547 - DNA, 408 bp, Homo sapiens; identical to SEQ ID NO: 239834
  chr18:67872732-67873140
  hyper

SEQ ID NO: 424548 - DNA, 149 bp, Homo sapiens; identical to SEQ ID NO: 293168
  chr18:67955797-67955946
  hyper

SEQ ID NO: 424549 - DNA, 353 bp, Homo sapiens; identical to SEQ ID NO: 205037
  chr18:67956670-67957023
  hyper

SEQ ID NO: 424550 - DNA, 84 bp, Homo sapiens; identical to SEQ ID NO: 293170
  chr18:70208929-70209013
  hyper

SEQ ID NO: 424551 - DNA, 211 bp, Homo sapiens; identical to SEQ ID NO: 239840
  chr18:71815059-71815270
  hyper

SEQ ID NO: 424552 - DNA, 100 bp, Homo sapiens; identical to SEQ ID NO: 239841
  chr18:71815684-71815784
  hyper

SEQ ID NO: 424553 - DNA, 222 bp, Homo sapiens; identical to SEQ ID NO: 293176
  chr18:71958562-71958784
  hyper

SEQ ID NO: 424554 - DNA, 442 bp, Homo sapiens; identical to SEQ ID NO: 293177
  chr18:72124285-72124727
  hyper

SEQ ID NO: 424555 - DNA, 78 bp, Homo sapiens; identical to SEQ ID NO: 239844
  chr18:72163135-72163213
  hyper

SEQ ID NO: 424556 - DNA, 85 bp, Homo sapiens; identical to SEQ ID NO: 239845
  chr18:72167086-72167171
  hyper

SEQ ID NO: 424557 - DNA, 33 bp, Homo sapiens; identical to SEQ ID NO: 239846
  chr18:72265004-72265037
  hyper

SEQ ID NO: 424558 - DNA, 237 bp, Homo sapiens; identical to SEQ ID NO: 293181
  chr18:72921091-72921328
  hyper

SEQ ID NO: 424559 - DNA, 42 bp, Homo sapiens; identical to SEQ ID NO: 239849
  chr18:74162764-74162806
  hyper

SEQ ID NO: 424560 - DNA, 240 bp, Homo sapiens; identical to SEQ ID NO: 239851
  chr18:74202735-74202975
  hyper

SEQ ID NO: 424561 - DNA, 776 bp, Homo sapiens; identical to SEQ ID NO: 239852
  chr18:74203667-74204443
  hyper

SEQ ID NO: 424562 - DNA, 219 bp, Homo sapiens; identical to SEQ ID NO: 239853
  chr18:74206708-74206927
  hyper

SEQ ID NO: 424563 - DNA, 147 bp, Homo sapiens; identical to SEQ ID NO: 205044
  chr18:74207202-74207349
  hyper

SEQ ID NO: 424564 - DNA, 129 bp, Homo sapiens; identical to SEQ ID NO: 205045
  chr18:74843247-74843376
  hyper

SEQ ID NO: 424565 - DNA, 356 bp, Homo sapiens; identical to SEQ ID NO: 293196
  chr18:77193428-77193784
  hyper

SEQ ID NO: 424566 - DNA, 158 bp, Homo sapiens; identical to SEQ ID NO: 205049
  chr18:77710773-77710931
  hyper

SEQ ID NO: 424567 - DNA, 35 bp, Homo sapiens; identical to SEQ ID NO: 225692
  chr18:77712073-77712108
  hyper

SEQ ID NO: 424568 - DNA, 305 bp, Homo sapiens; identical to SEQ ID NO: 239866
  chr18:77748471-77748776
  hyper

SEQ ID NO: 424569 - DNA, 135 bp, Homo sapiens; identical to SEQ ID NO: 225693
  chr18:77794468-77794603
  hyper

SEQ ID NO: 424570 - DNA, 31 bp, Homo sapiens; identical to SEQ ID NO: 205051
  chr18:77867028-77867059
  hyper

SEQ ID NO: 424571 - DNA, 78 bp, Homo sapiens; identical to SEQ ID NO: 293210
  chr19:294976-295054
  hyper

SEQ ID NO: 424572 - DNA, 102 bp, Homo sapiens; identical to SEQ ID NO: 130225
  chr19:384078-384180
  hyper

SEQ ID NO: 424573 - DNA, 41 bp, Homo sapiens; identical to SEQ ID NO: 205062
  chr19:507106-507147
  hyper

SEQ ID NO: 424574 - DNA, 58 bp, Homo sapiens; identical to SEQ ID NO: 205063
  chr19:591588-591646
  hyper

SEQ ID NO: 424575 - DNA, 159 bp, Homo sapiens; identical to SEQ ID NO: 239877
  chr19:633641-633800
  hyper

SEQ ID NO: 424576 - DNA, 237 bp, Homo sapiens; identical to SEQ ID NO: 293222
  chr19:639660-639897
  hyper

SEQ ID NO: 424577 - DNA, 31 bp, Homo sapiens; identical to SEQ ID NO: 293223
  chr19:640138-640169
  hyper

SEQ ID NO: 424578 - DNA, 88 bp, Homo sapiens; identical to SEQ ID NO: 239880
  chr19:676322-676410
  hyper

SEQ ID NO: 424579 - DNA, 132 bp, Homo sapiens; identical to SEQ ID NO: 293228
  chr19:680400-680532
  hyper

SEQ ID NO: 424580 - DNA, 66 bp, Homo sapiens; identical to SEQ ID NO: 239882
  chr19:913485-913551
  hyper

SEQ ID NO: 424581 - DNA, 228 bp, Homo sapiens; identical to SEQ ID NO: 293236
  chr19:942807-943035
  hyper

SEQ ID NO: 424582 - DNA, 83 bp, Homo sapiens; identical to SEQ ID NO: 239884
  chr19:982965-983048
  hyper

SEQ ID NO: 424583 - DNA, 31 bp, Homo sapiens; identical to SEQ ID NO: 239885
  chr19:984152-984183
  hyper

SEQ ID NO: 424584 - DNA, 160 bp, Homo sapiens; identical to SEQ ID NO: 293239
  chr19:1000337-1000497
  hyper

SEQ ID NO: 424585 - DNA, 370 bp, Homo sapiens; identical to SEQ ID NO: 293240
  chr19:1000630-1001000
  hyper

SEQ ID NO: 424586 - DNA, 90 bp, Homo sapiens; identical to SEQ ID NO: 239886
  chr19:1021293-1021383
  hyper

SEQ ID NO: 424587 - DNA, 275 bp, Homo sapiens; identical to SEQ ID NO: 239887
  chr19:1039817-1040092
  hyper

SEQ ID NO: 424588 - DNA, 36 bp, Homo sapiens; identical to SEQ ID NO: 239888
  chr19:1041004-1041040
  hyper

SEQ ID NO: 424589 - DNA, 162 bp, Homo sapiens; identical to SEQ ID NO: 225704
  chr19:1071620-1071782
  hyper

SEQ ID NO: 424590 - DNA, 365 bp, Homo sapiens; identical to SEQ ID NO: 225705
  chr19:1173036-1173401
  hyper

SEQ ID NO: 424591 - DNA, 33 bp, Homo sapiens; identical to SEQ ID NO: 225706
  chr19:1173617-1173650
  hyper

SEQ ID NO: 424592 - DNA, 968 bp, Homo sapiens; identical to SEQ ID NO: 293247
  chr19:1206691-1207659
  hyper

SEQ ID NO: 424593 - DNA, 195 bp, Homo sapiens; identical to SEQ ID NO: 239890
  chr19:1237439-1237634
  hyper

SEQ ID NO: 424594 - DNA, 53 bp, Homo sapiens; identical to SEQ ID NO: 130290
  chr19:1241589-1241642
  hyper

SEQ ID NO: 424595 - DNA, 67 bp, Homo sapiens; identical to SEQ ID NO: 205073
  chr19:1260499-1260566
  hyper

SEQ ID NO: 424596 - DNA, 204 bp, Homo sapiens; identical to SEQ ID NO: 239893
  chr19:1269059-1269263
  hyper

SEQ ID NO: 424597 - DNA, 87 bp, Homo sapiens; identical to SEQ ID NO: 239894
  chr19:1270262-1270349
  hyper

SEQ ID NO: 424598 - DNA, 174 bp, Homo sapiens; identical to SEQ ID NO: 239895
  chr19:1354508-1354682
  hyper

SEQ ID NO: 424599 - DNA, 47 bp, Homo sapiens; identical to SEQ ID NO: 293254
  chr19:1401653-1401700
  hyper

SEQ ID NO: 424600 - DNA, 242 bp, Homo sapiens; identical to SEQ ID NO: 205074
  chr19:1438211-1438453
  hyper

SEQ ID NO: 424601 - DNA, 97 bp, Homo sapiens; identical to SEQ ID NO: 293257
  chr19:1446334-1446431
  hyper

SEQ ID NO: 424602 - DNA, 40 bp, Homo sapiens; identical to SEQ ID NO: 293258
  chr19:1447079-1447119
  hyper

SEQ ID NO: 424603 - DNA, 126 bp, Homo sapiens; identical to SEQ ID NO: 205077
  chr19:1469945-1470071
  hyper

SEQ ID NO: 424604 - DNA, 92 bp, Homo sapiens; identical to SEQ ID NO: 55315
  chr19:1470383-1470475
  hyper

SEQ ID NO: 424605 - DNA, 278 bp, Homo sapiens; identical to SEQ ID NO: 293263
  chr19:1470675-1470953
  hyper

SEQ ID NO: 424606 - DNA, 70 bp, Homo sapiens; identical to SEQ ID NO: 293264
  chr19:1471094-1471164
  hyper

SEQ ID NO: 424607 - DNA, 133 bp, Homo sapiens; identical to SEQ ID NO: 130328
  chr19:1490513-1490646
  hyper

SEQ ID NO: 424608 - DNA, 202 bp, Homo sapiens; identical to SEQ ID NO: 239904
  chr19:1507917-1508119
  hyper

SEQ ID NO: 424609 - DNA, 183 bp, Homo sapiens; identical to SEQ ID NO: 205082
  chr19:1546217-1546400
  hyper

SEQ ID NO: 424610 - DNA, 375 bp, Homo sapiens; identical to SEQ ID NO: 205083
  chr19:1567149-1567524
  hyper

SEQ ID NO: 424611 - DNA, 99 bp, Homo sapiens; identical to SEQ ID NO: 205084
  chr19:1567554-1567653
  hyper

SEQ ID NO: 424612 - DNA, 104 bp, Homo sapiens; identical to SEQ ID NO: 225714
  chr19:1568463-1568567
  hyper

SEQ ID NO: 424613 - DNA, 89 bp, Homo sapiens; identical to SEQ ID NO: 239906
  chr19:1605604-1605693
  hyper

SEQ ID NO: 424614 - DNA, 37 bp, Homo sapiens; identical to SEQ ID NO: 239907
  chr19:1672517-1672554
  hyper

SEQ ID NO: 424615 - DNA, 149 bp, Homo sapiens; identical to SEQ ID NO: 239913
  chr19:1752192-1752341
  hyper

SEQ ID NO: 424616 - DNA, 335 bp, Homo sapiens; identical to SEQ ID NO: 293293
  chr19:1763934-1764269
  hyper

SEQ ID NO: 424617 - DNA, 295 bp, Homo sapiens; identical to SEQ ID NO: 239923
  chr19:1812452-1812747
  hyper

SEQ ID NO: 424618 - DNA, 34 bp, Homo sapiens; identical to SEQ ID NO: 239924
  chr19:1848728-1848762
  hyper

SEQ ID NO: 424619 - DNA, 76 bp, Homo sapiens; identical to SEQ ID NO: 239928
  chr19:1864237-1864313
  hyper

SEQ ID NO: 424620 - DNA, 170 bp, Homo sapiens; identical to SEQ ID NO: 293307
  chr19:1876315-1876485
  hyper

SEQ ID NO: 424621 - DNA, 156 bp, Homo sapiens; identical to SEQ ID NO: 130373
  chr19:1876538-1876694
  hyper

SEQ ID NO: 424622 - DNA, 456 bp, Homo sapiens; identical to SEQ ID NO: 239930
  chr19:1941691-1942147
  hyper

SEQ ID NO: 424623 - DNA, 101 bp, Homo sapiens; identical to SEQ ID NO: 239931
  chr19:2163579-2163680
  hyper

SEQ ID NO: 424624 - DNA, 143 bp, Homo sapiens; identical to SEQ ID NO: 239934
  chr19:2168520-2168663
  hyper

SEQ ID NO: 424625 - DNA, 443 bp, Homo sapiens; identical to SEQ ID NO: 205099
  chr19:2168903-2169346
  hyper

SEQ ID NO: 424626 - DNA, 49 bp, Homo sapiens; identical to SEQ ID NO: 239938
  chr19:2269132-2269181
  hyper

SEQ ID NO: 424627 - DNA, 315 bp, Homo sapiens; identical to SEQ ID NO: 239939
  chr19:2270793-2271108
  hyper

SEQ ID NO: 424628 - DNA, 276 bp, Homo sapiens; identical to SEQ ID NO: 293321
  chr19:2328966-2329242
  hyper

SEQ ID NO: 424629 - DNA, 52 bp, Homo sapiens; identical to SEQ ID NO: 205102
  chr19:2462945-2462997
  hyper

SEQ ID NO: 424630 - DNA, 84 bp, Homo sapiens; identical to SEQ ID NO: 239945
  chr19:2476063-2476147
  hyper

SEQ ID NO: 424631 - DNA, 178 bp, Homo sapiens; identical to SEQ ID NO: 293328
  chr19:2598981-2599159
  hyper

SEQ ID NO: 424632 - DNA, 314 bp, Homo sapiens; identical to SEQ ID NO: 239950
  chr19:2740072-2740386
  hyper

SEQ ID NO: 424633 - DNA, 292 bp, Homo sapiens; identical to SEQ ID NO: 239952
  chr19:2783367-2783659
  hyper

SEQ ID NO: 424634 - DNA, 196 bp, Homo sapiens; identical to SEQ ID NO: 239953
  chr19:2819627-2819823
  hyper

SEQ ID NO: 424635 - DNA, 131 bp, Homo sapiens; identical to SEQ ID NO: 239954
  chr19:2900632-2900763
  hyper

SEQ ID NO: 424636 - DNA, 835 bp, Homo sapiens; identical to SEQ ID NO: 205108
  chr19:2944614-2945449
  hyper

SEQ ID NO: 424637 - DNA, 632 bp, Homo sapiens; identical to SEQ ID NO: 205109
  chr19:2950418-2951050
  hyper

SEQ ID NO: 424638 - DNA, 141 bp, Homo sapiens; identical to SEQ ID NO: 205110
  chr19:2977372-2977513
  hyper

SEQ ID NO: 424639 - DNA, 211 bp, Homo sapiens; identical to SEQ ID NO: 239958
  chr19:3036207-3036418
  hyper

SEQ ID NO: 424640 - DNA, 121 bp, Homo sapiens; identical to SEQ ID NO: 205111
  chr19:3061487-3061608
  hyper

SEQ ID NO: 424641 - DNA, 87 bp, Homo sapiens; identical to SEQ ID NO: 205112
  chr19:3094304-3094391
  hyper

SEQ ID NO: 424642 - DNA, 174 bp, Homo sapiens; identical to SEQ ID NO: 205113
  chr19:3094777-3094951
  hyper

SEQ ID NO: 424643 - DNA, 217 bp, Homo sapiens; identical to SEQ ID NO: 239961
  chr19:3098866-3099083
  hyper

SEQ ID NO: 424644 - DNA, 185 bp, Homo sapiens; identical to SEQ ID NO: 239962
  chr19:3275828-3276013
  hyper

SEQ ID NO: 424645 - DNA, 50 bp, Homo sapiens; identical to SEQ ID NO: 293344
  chr19:3285993-3286043
  hyper

SEQ ID NO: 424646 - DNA, 98 bp, Homo sapiens; identical to SEQ ID NO: 293345
  chr19:3286084-3286182
  hyper

SEQ ID NO: 424647 - DNA, 481 bp, Homo sapiens; identical to SEQ ID NO: 225733
  chr19:3367271-3367752
  hyper

SEQ ID NO: 424648 - DNA, 38 bp, Homo sapiens; identical to SEQ ID NO: 239966
  chr19:3500930-3500968
  hyper

SEQ ID NO: 424649 - DNA, 148 bp, Homo sapiens; identical to SEQ ID NO: 205115
  chr19:3506425-3506573
  hyper

SEQ ID NO: 424650 - DNA, 33 bp, Homo sapiens; identical to SEQ ID NO: 239968
  chr19:3572855-3572888
  hyper

SEQ ID NO: 424651 - DNA, 57 bp, Homo sapiens; identical to SEQ ID NO: 225734
  chr19:3573237-3573294
  hyper

SEQ ID NO: 424652 - DNA, 326 bp, Homo sapiens; identical to SEQ ID NO: 239969
  chr19:3573529-3573855
  hyper

SEQ ID NO: 424653 - DNA, 269 bp, Homo sapiens; identical to SEQ ID NO: 293353
  chr19:3585428-3585697
  hyper

SEQ ID NO: 424654 - DNA, 118 bp, Homo sapiens; identical to SEQ ID NO: 293354
  chr19:3606360-3606478
  hyper

SEQ ID NO: 424655 - DNA, 489 bp, Homo sapiens; identical to SEQ ID NO: 225737
  chr19:3606743-3607232
  hyper

SEQ ID NO: 424656 - DNA, 139 bp, Homo sapiens; identical to SEQ ID NO: 293356
  chr19:3670990-3671129
  hyper

SEQ ID NO: 424657 - DNA, 72 bp, Homo sapiens; identical to SEQ ID NO: 293357
  chr19:3671894-3671966
  hyper

SEQ ID NO: 424658 - DNA, 56 bp, Homo sapiens; identical to SEQ ID NO: 130472
  chr19:3672066-3672122
  hyper

SEQ ID NO: 424659 - DNA, 72 bp, Homo sapiens; identical to SEQ ID NO: 239970
  chr19:3700599-3700671
  hyper

SEQ ID NO: 424660 - DNA, 228 bp, Homo sapiens; identical to SEQ ID NO: 239972
  chr19:3761495-3761723
  hyper

SEQ ID NO: 424661 - DNA, 188 bp, Homo sapiens; identical to SEQ ID NO: 239973
  chr19:3762567-3762755
  hyper

SEQ ID NO: 424662 - DNA, 52 bp, Homo sapiens; identical to SEQ ID NO: 293364
  chr19:3801382-3801434
  hyper

SEQ ID NO: 424663 - DNA, 181 bp, Homo sapiens; identical to SEQ ID NO: 293365
  chr19:3801708-3801889
  hyper

SEQ ID NO: 424664 - DNA, 107 bp, Homo sapiens; identical to SEQ ID NO: 293366
  chr19:3868744-3868851
  hyper

SEQ ID NO: 424665 - DNA, 178 bp, Homo sapiens; identical to SEQ ID NO: 205118
  chr19:3970722-3970900
  hyper

SEQ ID NO: 424666 - DNA, 35 bp, Homo sapiens; identical to SEQ ID NO: 293368
  chr19:3971170-3971205
  hyper

SEQ ID NO: 424667 - DNA, 191 bp, Homo sapiens; identical to SEQ ID NO: 130492
  chr19:3971241-3971432
  hyper

SEQ ID NO: 424668 - DNA, 87 bp, Homo sapiens; identical to SEQ ID NO: 239981
  chr19:4066804-4066891
  hyper

SEQ ID NO: 424669 - DNA, 212 bp, Homo sapiens; identical to SEQ ID NO: 130504
  chr19:4182605-4182817
  hyper

SEQ ID NO: 424670 - DNA, 38 bp, Homo sapiens; identical to SEQ ID NO: 293379
  chr19:4246831-4246869
  hyper

SEQ ID NO: 424671 - DNA, 212 bp, Homo sapiens; identical to SEQ ID NO: 130509
  chr19:4246926-4247138
  hyper

SEQ ID NO: 424672 - DNA, 176 bp, Homo sapiens; identical to SEQ ID NO: 293381
  chr19:4278909-4279085
  hyper

SEQ ID NO: 424673 - DNA, 352 bp, Homo sapiens; identical to SEQ ID NO: 293382
  chr19:4279785-4280137
  hyper

SEQ ID NO: 424674 - DNA, 149 bp, Homo sapiens; identical to SEQ ID NO: 239986
  chr19:4402295-4402444
  hyper

SEQ ID NO: 424675 - DNA, 185 bp, Homo sapiens; identical to SEQ ID NO: 205128
  chr19:4471582-4471767
  hyper

SEQ ID NO: 424676 - DNA, 150 bp, Homo sapiens; identical to SEQ ID NO: 205129
  chr19:4472045-4472195
  hyper

SEQ ID NO: 424677 - DNA, 95 bp, Homo sapiens; identical to SEQ ID NO: 239989
  chr19:4558485-4558580
  hyper

SEQ ID NO: 424678 - DNA, 452 bp, Homo sapiens; identical to SEQ ID NO: 293390
  chr19:4580776-4581228
  hyper

SEQ ID NO: 424679 - DNA, 166 bp, Homo sapiens; identical to SEQ ID NO: 239991
  chr19:4636194-4636360
  hyper

SEQ ID NO: 424680 - DNA, 177 bp, Homo sapiens; identical to SEQ ID NO: 205130
  chr19:4639830-4640007
  hyper

SEQ ID NO: 424681 - DNA, 179 bp, Homo sapiens; identical to SEQ ID NO: 239993
  chr19:4669764-4669943
  hyper

SEQ ID NO: 424682 - DNA, 77 bp, Homo sapiens; identical to SEQ ID NO: 205131
  chr19:4769517-4769594
  hyper

SEQ ID NO: 424683 - DNA, 176 bp, Homo sapiens; identical to SEQ ID NO: 239995
  chr19:4791538-4791714
  hyper

SEQ ID NO: 424684 - DNA, 131 bp, Homo sapiens; identical to SEQ ID NO: 293396
  chr19:4815776-4815907
  hyper

SEQ ID NO: 424685 - DNA, 83 bp, Homo sapiens; identical to SEQ ID NO: 239997
  chr19:4831871-4831954
  hyper

SEQ ID NO: 424686 - DNA, 623 bp, Homo sapiens; identical to SEQ ID NO: 239998
  chr19:4867023-4867646
  hyper

SEQ ID NO: 424687 - DNA, 132 bp, Homo sapiens; identical to SEQ ID NO: 239999
  chr19:4867954-4868086
  hyper

SEQ ID NO: 424688 - DNA, 38 bp, Homo sapiens; identical to SEQ ID NO: 240001
  chr19:5313531-5313569
  hyper

SEQ ID NO: 424689 - DNA, 72 bp, Homo sapiens; identical to SEQ ID NO: 293402
  chr19:5338674-5338746
  hyper

SEQ ID NO: 424690 - DNA, 124 bp, Homo sapiens; identical to SEQ ID NO: 240005
  chr19:5436796-5436920
  hyper

SEQ ID NO: 424691 - DNA, 444 bp, Homo sapiens; identical to SEQ ID NO: 240008
  chr19:5680742-5681186
  hyper

SEQ ID NO: 424692 - DNA, 103 bp, Homo sapiens; identical to SEQ ID NO: 205136
  chr19:5691108-5691211
  hyper

SEQ ID NO: 424693 - DNA, 141 bp, Homo sapiens; identical to SEQ ID NO: 205137
  chr19:5804852-5804993
  hyper

SEQ ID NO: 424694 - DNA, 110 bp, Homo sapiens; identical to SEQ ID NO: 205138
  chr19:5828315-5828425
  hyper

SEQ ID NO: 424695 - DNA, 154 bp, Homo sapiens; identical to SEQ ID NO: 240012
  chr19:5892118-5892272
  hyper

SEQ ID NO: 424696 - DNA, 399 bp, Homo sapiens; identical to SEQ ID NO: 240014
  chr19:6108898-6109297
  hyper

SEQ ID NO: 424697 - DNA, 776 bp, Homo sapiens; identical to SEQ ID NO: 205141
  chr19:6110226-6111002
  hyper

SEQ ID NO: 424698 - DNA, 131 bp, Homo sapiens; identical to SEQ ID NO: 240015
  chr19:6279430-6279561
  hyper

SEQ ID NO: 424699 - DNA, 223 bp, Homo sapiens; identical to SEQ ID NO: 240016
  chr19:6459946-6460169
  hyper

SEQ ID NO: 424700 - DNA, 199 bp, Homo sapiens; identical to SEQ ID NO: 205142
  chr19:6464135-6464334
  hyper

SEQ ID NO: 424701 - DNA, 75 bp, Homo sapiens; identical to SEQ ID NO: 205143
  chr19:6464628-6464703
  hyper

SEQ ID NO: 424702 - DNA, 237 bp, Homo sapiens; identical to SEQ ID NO: 240022
  chr19:6737655-6737892
  hyper

SEQ ID NO: 424703 - DNA, 213 bp, Homo sapiens; identical to SEQ ID NO: 240023
  chr19:6739799-6740012
  hyper

SEQ ID NO: 424704 - DNA, 164 bp, Homo sapiens; identical to SEQ ID NO: 293429
  chr19:6862817-6862981
  hyper

SEQ ID NO: 424705 - DNA, 253 bp, Homo sapiens; identical to SEQ ID NO: 240026
  chr19:7069469-7069722
  hyper

SEQ ID NO: 424706 - DNA, 159 bp, Homo sapiens; identical to SEQ ID NO: 205147
  chr19:7098896-7099055
  hyper

SEQ ID NO: 424707 - DNA, 74 bp, Homo sapiens; identical to SEQ ID NO: 293432
  chr19:7197429-7197503
  hyper

SEQ ID NO: 424708 - DNA, 1375 bp, Homo sapiens; identical to SEQ ID NO: 293433
  chr19:7293746-7295121
  hyper

SEQ ID NO: 424709 - DNA, 242 bp, Homo sapiens; identical to SEQ ID NO: 293435
  chr19:7553842-7554084
  hyper

SEQ ID NO: 424710 - DNA, 172 bp, Homo sapiens; identical to SEQ ID NO: 293436
  chr19:7565792-7565964
  hyper

SEQ ID NO: 424711 - DNA, 90 bp, Homo sapiens; identical to SEQ ID NO: 293437
  chr19:7566243-7566333
  hyper

SEQ ID NO: 424712 - DNA, 60 bp, Homo sapiens; identical to SEQ ID NO: 240033
  chr19:7580809-7580869
  hyper

SEQ ID NO: 424713 - DNA, 186 bp, Homo sapiens; identical to SEQ ID NO: 240034
  chr19:7598773-7598959
  hyper

SEQ ID NO: 424714 - DNA, 65 bp, Homo sapiens; identical to SEQ ID NO: 240035
  chr19:7600088-7600153
  hyper

SEQ ID NO: 424715 - DNA, 83 bp, Homo sapiens; identical to SEQ ID NO: 205151
  chr19:7660603-7660686
  hyper

SEQ ID NO: 424716 - DNA, 278 bp, Homo sapiens; identical to SEQ ID NO: 55532
  chr19:7660714-7660992
  hyper

SEQ ID NO: 424717 - DNA, 172 bp, Homo sapiens; identical to SEQ ID NO: 240036
  chr19:7661305-7661477
  hyper

SEQ ID NO: 424718 - DNA, 1166 bp, Homo sapiens; identical to SEQ ID NO: 205153
  chr19:7676864-7678030
  hyper

SEQ ID NO: 424719 - DNA, 314 bp, Homo sapiens; identical to SEQ ID NO: 240038
  chr19:7702164-7702478
  hyper

SEQ ID NO: 424720 - DNA, 242 bp, Homo sapiens; identical to SEQ ID NO: 240039
  chr19:7745712-7745954
  hyper

SEQ ID NO: 424721 - DNA, 169 bp, Homo sapiens; identical to SEQ ID NO: 240040
  chr19:7746642-7746811
  hyper

SEQ ID NO: 424722 - DNA, 430 bp, Homo sapiens; identical to SEQ ID NO: 293449
  chr19:7933745-7934175
  hyper

SEQ ID NO: 424723 - DNA, 289 bp, Homo sapiens; identical to SEQ ID NO: 293450
  chr19:7934257-7934546
  hyper

SEQ ID NO: 424724 - DNA, 152 bp, Homo sapiens; identical to SEQ ID NO: 240045
  chr19:7937038-7937190
  hyper

SEQ ID NO: 424725 - DNA, 206 bp, Homo sapiens; identical to SEQ ID NO: 293452
  chr19:7938935-7939141
  hyper

SEQ ID NO: 424726 - DNA, 201 bp, Homo sapiens; identical to SEQ ID NO: 293453
  chr19:7939220-7939421
  hyper

SEQ ID NO: 424727 - DNA, 197 bp, Homo sapiens; identical to SEQ ID NO: 293454
  chr19:7939456-7939653
  hyper

SEQ ID NO: 424728 - DNA, 194 bp, Homo sapiens; identical to SEQ ID NO: 240048
  chr19:7968415-7968609
  hyper

SEQ ID NO: 424729 - DNA, 153 bp, Homo sapiens; identical to SEQ ID NO: 240049
  chr19:7982945-7983098
  hyper

SEQ ID NO: 424730 - DNA, 170 bp, Homo sapiens; identical to SEQ ID NO: 205157
  chr19:7990126-7990296
  hyper

SEQ ID NO: 424731 - DNA, 300 bp, Homo sapiens; identical to SEQ ID NO: 205158
  chr19:7990894-7991194
  hyper

SEQ ID NO: 424732 - DNA, 48 bp, Homo sapiens; identical to SEQ ID NO: 205160
  chr19:8273923-8273971
  hyper

SEQ ID NO: 424733 - DNA, 182 bp, Homo sapiens; identical to SEQ ID NO: 240053
  chr19:8432388-8432570
  hyper

SEQ ID NO: 424734 - DNA, 40 bp, Homo sapiens; identical to SEQ ID NO: 240054
  chr19:8478144-8478184
  hyper

SEQ ID NO: 424735 - DNA, 227 bp, Homo sapiens; identical to SEQ ID NO: 225772
  chr19:8579005-8579232
  hyper

SEQ ID NO: 424736 - DNA, 207 bp, Homo sapiens; identical to SEQ ID NO: 293469
  chr19:9419935-9420142
  hyper

SEQ ID NO: 424737 - DNA, 431 bp, Homo sapiens; identical to SEQ ID NO: 293470
  chr19:9420240-9420671
  hyper

SEQ ID NO: 424738 - DNA, 160 bp, Homo sapiens; identical to SEQ ID NO: 293471
  chr19:9434651-9434811
  hyper

SEQ ID NO: 424739 - DNA, 237 bp, Homo sapiens; identical to SEQ ID NO: 293472
  chr19:9434969-9435206
  hyper

SEQ ID NO: 424740 - DNA, 62 bp, Homo sapiens; identical to SEQ ID NO: 293473
  chr19:9517501-9517563
  hyper

SEQ ID NO: 424741 - DNA, 217 bp, Homo sapiens; identical to SEQ ID NO: 205164
  chr19:9648914-9649131
  hyper

SEQ ID NO: 424742 - DNA, 101 bp, Homo sapiens; identical to SEQ ID NO: 293476
  chr19:9649390-9649491
  hyper

SEQ ID NO: 424743 - DNA, 36 bp, Homo sapiens; identical to SEQ ID NO: 240063
  chr19:9732221-9732257
  hyper

SEQ ID NO: 424744 - DNA, 123 bp, Homo sapiens; identical to SEQ ID NO: 205166
  chr19:9879601-9879724
  hyper

SEQ ID NO: 424745 - DNA, 256 bp, Homo sapiens; identical to SEQ ID NO: 240065
  chr19:9929306-9929562
  hyper

SEQ ID NO: 424746 - DNA, 260 bp, Homo sapiens; identical to SEQ ID NO: 240066
  chr19:9938402-9938662
  hyper

SEQ ID NO: 424747 - DNA, 76 bp, Homo sapiens; identical to SEQ ID NO: 205167
  chr19:10024728-10024804
  hyper

SEQ ID NO: 424748 - DNA, 50 bp, Homo sapiens; identical to SEQ ID NO: 240071
  chr19:10216840-10216890
  hyper

SEQ ID NO: 424749 - DNA, 262 bp, Homo sapiens; identical to SEQ ID NO: 225775
  chr19:10252656-10252918
  hyper

SEQ ID NO: 424750 - DNA, 210 bp, Homo sapiens; identical to SEQ ID NO: 293487
  chr19:10253329-10253539
  hyper

SEQ ID NO: 424751 - DNA, 166 bp, Homo sapiens; identical to SEQ ID NO: 240072
  chr19:10305760-10305926
  hyper

SEQ ID NO: 424752 - DNA, 50 bp, Homo sapiens; identical to SEQ ID NO: 205170
  chr19:10340887-10340937
  hyper

SEQ ID NO: 424753 - DNA, 146 bp, Homo sapiens; identical to SEQ ID NO: 240074
  chr19:10342109-10342255
  hyper

SEQ ID NO: 424754 - DNA, 138 bp, Homo sapiens; identical to SEQ ID NO: 293491
  chr19:10346995-10347133
  hyper

SEQ ID NO: 424755 - DNA, 113 bp, Homo sapiens; identical to SEQ ID NO: 240076
  chr19:10362531-10362644
  hyper

SEQ ID NO: 424756 - DNA, 184 bp, Homo sapiens; identical to SEQ ID NO: 225777
  chr19:10363159-10363343
  hyper

SEQ ID NO: 424757 - DNA, 87 bp, Homo sapiens; identical to SEQ ID NO: 240077
  chr19:10380738-10380825
  hyper

SEQ ID NO: 424758 - DNA, 284 bp, Homo sapiens; identical to SEQ ID NO: 293497
  chr19:10399791-10400075
  hyper

SEQ ID NO: 424759 - DNA, 316 bp, Homo sapiens; identical to SEQ ID NO: 240086
  chr19:10491159-10491475
  hyper

SEQ ID NO: 424760 - DNA, 433 bp, Homo sapiens; identical to SEQ ID NO: 240091
  chr19:10535126-10535559
  hyper

SEQ ID NO: 424761 - DNA, 145 bp, Homo sapiens; identical to SEQ ID NO: 225785
  chr19:10589794-10589939
  hyper

SEQ ID NO: 424762 - DNA, 251 bp, Homo sapiens; identical to SEQ ID NO: 240094
  chr19:10654404-10654655
  hyper

SEQ ID NO: 424763 - DNA, 66 bp, Homo sapiens; identical to SEQ ID NO: 240095
  chr19:10676719-10676785
  hyper

SEQ ID NO: 424764 - DNA, 369 bp, Homo sapiens; identical to SEQ ID NO: 240096
  chr19:10679763-10680132
  hyper

SEQ ID NO: 424765 - DNA, 125 bp, Homo sapiens; identical to SEQ ID NO: 240098
  chr19:10812215-10812340
  hyper

SEQ ID NO: 424766 - DNA, 170 bp, Homo sapiens; identical to SEQ ID NO: 240099
  chr19:10812677-10812847
  hyper

SEQ ID NO: 424767 - DNA, 537 bp, Homo sapiens; identical to SEQ ID NO: 240100
  chr19:10828651-10829188
  hyper

SEQ ID NO: 424768 - DNA, 77 bp, Homo sapiens; identical to SEQ ID NO: 240101
  chr19:10946959-10947036
  hyper

SEQ ID NO: 424769 - DNA, 139 bp, Homo sapiens; identical to SEQ ID NO: 240102
  chr19:11039290-11039429
  hyper

SEQ ID NO: 424770 - DNA, 84 bp, Homo sapiens
  chr19:11200027-11200111
  hyper
gaaactcctcctcttgcagtgaggtgaagacatttgaaaatcaccccactgcaaactcctccccctgctagaaacctcacattg

SEQ ID NO: 424771 - DNA, 460 bp, Homo sapiens; identical to SEQ ID NO: 205181
  chr19:11200842-11201302
  hyper

SEQ ID NO: 424772 - DNA, 69 bp, Homo sapiens; identical to SEQ ID NO: 205182
  chr19:11253288-11253357
  hyper

SEQ ID NO: 424773 - DNA, 73 bp, Homo sapiens; identical to SEQ ID NO: 240105
  chr19:11266486-11266559
  hyper

SEQ ID NO: 424774 - DNA, 330 bp, Homo sapiens; identical to SEQ ID NO: 205183
  chr19:11308102-11308432
  hyper

SEQ ID NO: 424775 - DNA, 42 bp, Homo sapiens; identical to SEQ ID NO: 225794
  chr19:11373072-11373114
  hyper

SEQ ID NO: 424776 - DNA, 314 bp, Homo sapiens; identical to SEQ ID NO: 240107
  chr19:11456951-11457265
  hyper

SEQ ID NO: 424777 - DNA, 512 bp, Homo sapiens; identical to SEQ ID NO: 240109
  chr19:11486038-11486550
  hyper

SEQ ID NO: 424778 - DNA, 40 bp, Homo sapiens; identical to SEQ ID NO: 293534
  chr19:11532654-11532694
  hyper

SEQ ID NO: 424779 - DNA, 179 bp, Homo sapiens; identical to SEQ ID NO: 240115
  chr19:11545952-11546131
  hyper

SEQ ID NO: 424780 - DNA, 358 bp, Homo sapiens; identical to SEQ ID NO: 240117
  chr19:11639727-11640085
  hyper

SEQ ID NO: 424781 - DNA, 223 bp, Homo sapiens; identical to SEQ ID NO: 240119
  chr19:11750896-11751119
  hyper

SEQ ID NO: 424782 - DNA, 132 bp, Homo sapiens; identical to SEQ ID NO: 240121
  chr19:11849763-11849895
  hyper

SEQ ID NO: 424783 - DNA, 714 bp, Homo sapiens; identical to SEQ ID NO: 293551
  chr19:11924845-11925559
  hyper

SEQ ID NO: 424784 - DNA, 91 bp, Homo sapiens; identical to SEQ ID NO: 400581
  chr19:11999391-11999482
  hyper

SEQ ID NO: 424785 - DNA, 33 bp, Homo sapiens; identical to SEQ ID NO: 205204
  chr19:12204551-12204584
  hyper

SEQ ID NO: 424786 - DNA, 79 bp, Homo sapiens; identical to SEQ ID NO: 293563
  chr19:12305760-12305839
  hyper

SEQ ID NO: 424787 - DNA, 162 bp, Homo sapiens; identical to SEQ ID NO: 293565
  chr19:12475620-12475782
  hyper

SEQ ID NO: 424788 - DNA, 124 bp, Homo sapiens; identical to SEQ ID NO: 293566
  chr19:12476368-12476492
  hyper

SEQ ID NO: 424789 - DNA, 46 bp, Homo sapiens; identical to SEQ ID NO: 293567
  chr19:12476556-12476602
  hyper

SEQ ID NO: 424790 - DNA, 163 bp, Homo sapiens; identical to SEQ ID NO: 293568
  chr19:12476697-12476860
  hyper

SEQ ID NO: 424791 - DNA, 204 bp, Homo sapiens; identical to SEQ ID NO: 293574
  chr19:12605963-12606167
  hyper

SEQ ID NO: 424792 - DNA, 135 bp, Homo sapiens; identical to SEQ ID NO: 293575
  chr19:12606511-12606646
  hyper

SEQ ID NO: 424793 - DNA, 248 bp, Homo sapiens; identical to SEQ ID NO: 240140
  chr19:12662263-12662511
  hyper

SEQ ID NO: 424794 - DNA, 132 bp, Homo sapiens; identical to SEQ ID NO: 225804
  chr19:12707774-12707906
  hyper

SEQ ID NO: 424795 - DNA, 73 bp, Homo sapiens; identical to SEQ ID NO: 205209
  chr19:12721074-12721147
  hyper

SEQ ID NO: 424796 - DNA, 267 bp, Homo sapiens; identical to SEQ ID NO: 240144
  chr19:12777553-12777820
  hyper

SEQ ID NO: 424797 - DNA, 261 bp, Homo sapiens; identical to SEQ ID NO: 240146
  chr19:12848078-12848339
  hyper

SEQ ID NO: 424798 - DNA, 86 bp, Homo sapiens; identical to SEQ ID NO: 205211
  chr19:12885894-12885980
  hyper

SEQ ID NO: 424799 - DNA, 237 bp, Homo sapiens; identical to SEQ ID NO: 205212
  chr19:12899529-12899766
  hyper

SEQ ID NO: 424800 - DNA, 251 bp, Homo sapiens; identical to SEQ ID NO: 240150
  chr19:12902439-12902690
  hyper

SEQ ID NO: 424801 - DNA, 36 bp, Homo sapiens; identical to SEQ ID NO: 240152
  chr19:12917228-12917264
  hyper

SEQ ID NO: 424802 - DNA, 125 bp, Homo sapiens; identical to SEQ ID NO: 240153
  chr19:12943483-12943608
  hyper

SEQ ID NO: 424803 - DNA, 55 bp, Homo sapiens; identical to SEQ ID NO: 293590
  chr19:12946214-12946269
  hyper

SEQ ID NO: 424804 - DNA, 121 bp, Homo sapiens; identical to SEQ ID NO: 293591
  chr19:12946314-12946435
  hyper

SEQ ID NO: 424805 - DNA, 144 bp, Homo sapiens; identical to SEQ ID NO: 293595
  chr19:12978576-12978720
  hyper

SEQ ID NO: 424806 - DNA, 460 bp, Homo sapiens; identical to SEQ ID NO: 240158
  chr19:12991904-12992364
  hyper

SEQ ID NO: 424807 - DNA, 40 bp, Homo sapiens; identical to SEQ ID NO: 240160
  chr19:13002468-13002508
  hyper

SEQ ID NO: 424808 - DNA, 36 bp, Homo sapiens; identical to SEQ ID NO: 226559
  chr19:13029431-13029467
  hyper

SEQ ID NO: 424809 - DNA, 106 bp, Homo sapiens; identical to SEQ ID NO: 293600
  chr19:13029767-13029873
  hyper

SEQ ID NO: 424810 - DNA, 77 bp, Homo sapiens; identical to SEQ ID NO: 205218
  chr19:13030316-13030393
  hyper

SEQ ID NO: 424811 - DNA, 49 bp, Homo sapiens; identical to SEQ ID NO: 240161
  chr19:13044624-13044673
  hyper

SEQ ID NO: 424812 - DNA, 513 bp, Homo sapiens; identical to SEQ ID NO: 205219
  chr19:13049935-13050448
  hyper

SEQ ID NO: 424813 - DNA, 828 bp, Homo sapiens; identical to SEQ ID NO: 205220
  chr19:13050858-13051686
  hyper

SEQ ID NO: 424814 - DNA, 931 bp, Homo sapiens; identical to SEQ ID NO: 205221
  chr19:13054373-13055304
  hyper

SEQ ID NO: 424815 - DNA, 61 bp, Homo sapiens; identical to SEQ ID NO: 240162
  chr19:13067540-13067601
  hyper

SEQ ID NO: 424816 - DNA, 54 bp, Homo sapiens; identical to SEQ ID NO: 240163
  chr19:13068137-13068191
  hyper

SEQ ID NO: 424817 - DNA, 131 bp, Homo sapiens; identical to SEQ ID NO: 205222
  chr19:13094456-13094587
  hyper

SEQ ID NO: 424818 - DNA, 983 bp, Homo sapiens; identical to SEQ ID NO: 293609
  chr19:13106028-13107011
  hyper

SEQ ID NO: 424819 - DNA, 354 bp, Homo sapiens; identical to SEQ ID NO: 293610
  chr19:13107035-13107389
  hyper

SEQ ID NO: 424820 - DNA, 194 bp, Homo sapiens; identical to SEQ ID NO: 240168
  chr19:13260761-13260955
  hyper

SEQ ID NO: 424821 - DNA, 167 bp, Homo sapiens; identical to SEQ ID NO: 240169
  chr19:13262833-13263000
  hyper

SEQ ID NO: 424822 - DNA, 119 bp, Homo sapiens; identical to SEQ ID NO: 225817
  chr19:13263755-13263874
  hyper

SEQ ID NO: 424823 - DNA, 817 bp, Homo sapiens; identical to SEQ ID NO: 293620
  chr19:13264169-13264986
  hyper

SEQ ID NO: 424824 - DNA, 62 bp, Homo sapiens; identical to SEQ ID NO: 205232
  chr19:13274019-13274081
  hyper

SEQ ID NO: 424825 - DNA, 169 bp, Homo sapiens; identical to SEQ ID NO: 240174
  chr19:13388248-13388417
  hyper

SEQ ID NO: 424826 - DNA, 195 bp, Homo sapiens; identical to SEQ ID NO: 205233
  chr19:13954425-13954620
  hyper

SEQ ID NO: 424827 - DNA, 418 bp, Homo sapiens; identical to SEQ ID NO: 205234
  chr19:13961290-13961708
  hyper

SEQ ID NO: 424828 - DNA, 221 bp, Homo sapiens; identical to SEQ ID NO: 225824
  chr19:13975797-13976018
  hyper

SEQ ID NO: 424829 - DNA, 234 bp, Homo sapiens; identical to SEQ ID NO: 293630
  chr19:14089418-14089652
  hyper

SEQ ID NO: 424830 - DNA, 57 bp, Homo sapiens; identical to SEQ ID NO: 293631
  chr19:14089812-14089869
  hyper

SEQ ID NO: 424831 - DNA, 174 bp, Homo sapiens; identical to SEQ ID NO: 205236
  chr19:14202317-14202491
  hyper

SEQ ID NO: 424832 - DNA, 48 bp, Homo sapiens; identical to SEQ ID NO: 225827
  chr19:14316561-14316609
  hyper

SEQ ID NO: 424833 - DNA, 169 bp, Homo sapiens; identical to SEQ ID NO: 240182
  chr19:14358695-14358864
  hyper

SEQ ID NO: 424834 - DNA, 443 bp, Homo sapiens; identical to SEQ ID NO: 225828
  chr19:14516821-14517264
  hyper

SEQ ID NO: 424835 - DNA, 214 bp, Homo sapiens; identical to SEQ ID NO: 240183
  chr19:14542785-14542999
  hyper

SEQ ID NO: 424836 - DNA, 81 bp, Homo sapiens; identical to SEQ ID NO: 205237
  chr19:14583720-14583801
  hyper

SEQ ID NO: 424837 - DNA, 205 bp, Homo sapiens; identical to SEQ ID NO: 293639
  chr19:14586138-14586343
  hyper

SEQ ID NO: 424838 - DNA, 143 bp, Homo sapiens; identical to SEQ ID NO: 205239
  chr19:14607038-14607181
  hyper

SEQ ID NO: 424839 - DNA, 117 bp, Homo sapiens; identical to SEQ ID NO: 240187
  chr19:14629110-14629227
  hyper

SEQ ID NO: 424840 - DNA, 268 bp, Homo sapiens; identical to SEQ ID NO: 240188
  chr19:14640086-14640354
  hyper

SEQ ID NO: 424841 - DNA, 140 bp, Homo sapiens; identical to SEQ ID NO: 240189
  chr19:14682852-14682992
  hyper

SEQ ID NO: 424842 - DNA, 46 bp, Homo sapiens; identical to SEQ ID NO: 205241
  chr19:14887561-14887607
  hyper

SEQ ID NO: 424843 - DNA, 69 bp, Homo sapiens; identical to SEQ ID NO: 293645
  chr19:15089971-15090040
  hyper

SEQ ID NO: 424844 - DNA, 36 bp, Homo sapiens; identical to SEQ ID NO: 293646
  chr19:15091053-15091089
  hyper

SEQ ID NO: 424845 - DNA, 37 bp, Homo sapiens; identical to SEQ ID NO: 205242
  chr19:15121588-15121625
  hyper

SEQ ID NO: 424846 - DNA, 367 bp, Homo sapiens; identical to SEQ ID NO: 240195
  chr19:15306318-15306685
  hyper

SEQ ID NO: 424847 - DNA, 379 bp, Homo sapiens; identical to SEQ ID NO: 205244
  chr19:15310946-15311325
  hyper

SEQ ID NO: 424848 - DNA, 238 bp, Homo sapiens; identical to SEQ ID NO: 293651
  chr19:15311355-15311593
  hyper

SEQ ID NO: 424849 - DNA, 87 bp, Homo sapiens; identical to SEQ ID NO: 293653
  chr19:15479821-15479908
  hyper

SEQ ID NO: 424850 - DNA, 117 bp, Homo sapiens; identical to SEQ ID NO: 240201
  chr19:15490556-15490673
  hyper

SEQ ID NO: 424851 - DNA, 307 bp, Homo sapiens; identical to SEQ ID NO: 240202
  chr19:15529685-15529992
  hyper

SEQ ID NO: 424852 - DNA, 36 bp, Homo sapiens; identical to SEQ ID NO: 226560
  chr19:15694860-15694896
  hyper

SEQ ID NO: 424853 - DNA, 256 bp, Homo sapiens; identical to SEQ ID NO: 293662
  chr19:16222189-16222445
  hyper

SEQ ID NO: 424854 - DNA, 214 bp, Homo sapiens; identical to SEQ ID NO: 131000
  chr19:16222493-16222707
  hyper

SEQ ID NO: 424855 - DNA, 235 bp, Homo sapiens; identical to SEQ ID NO: 240207
  chr19:16296081-16296316
  hyper

SEQ ID NO: 424856 - DNA, 178 bp, Homo sapiens; identical to SEQ ID NO: 240208
  chr19:16308331-16308509
  hyper

SEQ ID NO: 424857 - DNA, 88 bp, Homo sapiens; identical to SEQ ID NO: 240209
  chr19:16583044-16583132
  hyper

SEQ ID NO: 424858 - DNA, 409 bp, Homo sapiens; identical to SEQ ID NO: 240210
  chr19:16606941-16607350
  hyper

SEQ ID NO: 424859 - DNA, 120 bp, Homo sapiens; identical to SEQ ID NO: 205254
  chr19:16638141-16638261
  hyper

SEQ ID NO: 424860 - DNA, 61 bp, Homo sapiens; identical to SEQ ID NO: 205255
  chr19:16771042-16771103
  hyper

SEQ ID NO: 424861 - DNA, 76 bp, Homo sapiens; identical to SEQ ID NO: 225842
  chr19:17137592-17137668
  hyper

SEQ ID NO: 424862 - DNA, 80 bp, Homo sapiens; identical to SEQ ID NO: 240215
  chr19:17326050-17326130
  hyper

SEQ ID NO: 424863 - DNA, 611 bp, Homo sapiens; identical to SEQ ID NO: 293676
  chr19:17355714-17356325
  hyper

SEQ ID NO: 424864 - DNA, 265 bp, Homo sapiens; identical to SEQ ID NO: 225844
  chr19:17357470-17357735
  hyper

SEQ ID NO: 424865 - DNA, 146 bp, Homo sapiens; identical to SEQ ID NO: 240217
  chr19:17378082-17378228
  hyper

SEQ ID NO: 424866 - DNA, 139 bp, Homo sapiens; identical to SEQ ID NO: 205262
  chr19:17420265-17420404
  hyper

SEQ ID NO: 424867 - DNA, 512 bp, Homo sapiens; identical to SEQ ID NO: 240221
  chr19:17448123-17448635
  hyper

SEQ ID NO: 424868 - DNA, 200 bp, Homo sapiens; identical to SEQ ID NO: 293682
  chr19:17531154-17531354
  hyper

SEQ ID NO: 424869 - DNA, 160 bp, Homo sapiens; identical to SEQ ID NO: 240224
  chr19:17581046-17581206
  hyper

SEQ ID NO: 424870 - DNA, 186 bp, Homo sapiens; identical to SEQ ID NO: 240225
  chr19:17607095-17607281
  hyper

SEQ ID NO: 424871 - DNA, 185 bp, Homo sapiens; identical to SEQ ID NO: 205265
  chr19:17622145-17622330
  hyper

SEQ ID NO: 424872 - DNA, 392 bp, Homo sapiens; identical to SEQ ID NO: 225848
  chr19:17649952-17650344
  hyper

SEQ ID NO: 424873 - DNA, 101 bp, Homo sapiens; identical to SEQ ID NO: 240227
  chr19:17666360-17666461
  hyper

SEQ ID NO: 424874 - DNA, 52 bp, Homo sapiens; identical to SEQ ID NO: 205268
  chr19:17792549-17792601
  hyper

SEQ ID NO: 424875 - DNA, 229 bp, Homo sapiens; identical to SEQ ID NO: 240232
  chr19:17797519-17797748
  hyper

SEQ ID NO: 424876 - DNA, 330 bp, Homo sapiens; identical to SEQ ID NO: 293692
  chr19:17799069-17799399
  hyper

SEQ ID NO: 424877 - DNA, 232 bp, Homo sapiens; identical to SEQ ID NO: 240233
  chr19:17830034-17830266
  hyper

SEQ ID NO: 424878 - DNA, 171 bp, Homo sapiens; identical to SEQ ID NO: 240235
  chr19:17970699-17970870
  hyper

SEQ ID NO: 424879 - DNA, 93 bp, Homo sapiens; identical to SEQ ID NO: 293696
  chr19:17982693-17982786
  hyper

SEQ ID NO: 424880 - DNA, 34 bp, Homo sapiens; identical to SEQ ID NO: 12152
  chr19:17983839-17983873
  hyper

SEQ ID NO: 424881 - DNA, 303 bp, Homo sapiens; identical to SEQ ID NO: 240238
  chr19:18043467-18043770
  hyper

SEQ ID NO: 424882 - DNA, 89 bp, Homo sapiens; identical to SEQ ID NO: 205272
  chr19:18062904-18062993
  hyper

SEQ ID NO: 424883 - DNA, 124 bp, Homo sapiens; identical to SEQ ID NO: 293705
  chr19:18271975-18272099
  hyper

SEQ ID NO: 424884 - DNA, 198 bp, Homo sapiens; identical to SEQ ID NO: 240248
  chr19:18313919-18314117
  hyper

SEQ ID NO: 424885 - DNA, 104 bp, Homo sapiens; identical to SEQ ID NO: 240249
  chr19:18314978-18315082
  hyper

SEQ ID NO: 424886 - DNA, 209 bp, Homo sapiens; identical to SEQ ID NO: 240251
  chr19:18335915-18336124
  hyper

SEQ ID NO: 424887 - DNA, 217 bp, Homo sapiens; identical to SEQ ID NO: 400636
  chr19:18336505-18336722
  hyper

SEQ ID NO: 424888 - DNA, 136 bp, Homo sapiens; identical to SEQ ID NO: 205278
  chr19:18343303-18343439
  hyper

SEQ ID NO: 424889 - DNA, 199 bp, Homo sapiens; identical to SEQ ID NO: 293713
  chr19:18344017-18344216
  hyper

SEQ ID NO: 424890 - DNA, 330 bp, Homo sapiens; identical to SEQ ID NO: 205279
  chr19:18420497-18420827
  hyper

SEQ ID NO: 424891 - DNA, 226 bp, Homo sapiens; identical to SEQ ID NO: 240255
  chr19:18434128-18434354
  hyper

SEQ ID NO: 424892 - DNA, 125 bp, Homo sapiens; identical to SEQ ID NO: 240256
  chr19:18451214-18451339
  hyper

SEQ ID NO: 424893 - DNA, 137 bp, Homo sapiens; identical to SEQ ID NO: 293717
  chr19:18528685-18528822
  hyper

SEQ ID NO: 424894 - DNA, 255 bp, Homo sapiens; identical to SEQ ID NO: 293718
  chr19:18528975-18529230
  hyper

SEQ ID NO: 424895 - DNA, 40 bp, Homo sapiens; identical to SEQ ID NO: 205280
  chr19:18547990-18548030
  hyper

SEQ ID NO: 424896 - DNA, 238 bp, Homo sapiens; identical to SEQ ID NO: 240259
  chr19:18632770-18633008
  hyper

SEQ ID NO: 424897 - DNA, 63 bp, Homo sapiens; identical to SEQ ID NO: 240260
  chr19:18682793-18682856
  hyper

SEQ ID NO: 424898 - DNA, 150 bp, Homo sapiens; identical to SEQ ID NO: 240261
  chr19:18705872-18706022
  hyper

SEQ ID NO: 424899 - DNA, 374 bp, Homo sapiens; identical to SEQ ID NO: 240265
  chr19:18717411-18717785
  hyper

SEQ ID NO: 424900 - DNA, 484 bp, Homo sapiens
  chr19:18721516-18722000
  hyper
gcttgtccgctgcccgccttgacctcggctgctgtggcttcccggacgcctggcctgccgctgattcacgcccaggccggcctcagcgccccccgcctgccgcccccagccaggccgccccggggggtaggaagtgggggggggggcgagggcggcgccgagtcaactttccctcttaagccccgaaggaatgtcggcggatttcctgaaacccgaccctggccgcccgccggccctcccgcccctcacctggaccggctcccccgggaacagcaggaggggcgcgggggctcaccttgggggccggggtcaagtcctctttccgctcacccccccagcggcctagtgcagcggaaagggggctgggtgtgcggcaatcagcctctttcccttctcccctcaggcgacctgggtgatcgacccactcctccagcctcagtttctccttctgcaaaagggcgcggggtgtccctcctccctgatg

SEQ ID NO: 424901 - DNA, 31 bp, Homo sapiens; identical to SEQ ID NO: 293734
  chr19:18723960-18723991
  hyper

SEQ ID NO: 424902 - DNA, 178 bp, Homo sapiens; identical to SEQ ID NO: 293737
  chr19:19005838-19006016
  hyper

SEQ ID NO: 424903 - DNA, 326 bp, Homo sapiens; identical to SEQ ID NO: 240275
  chr19:19030080-19030406
  hyper

SEQ ID NO: 424904 - DNA, 182 bp, Homo sapiens; identical to SEQ ID NO: 240276
  chr19:19144430-19144612
  hyper

SEQ ID NO: 424905 - DNA, 111 bp, Homo sapiens; identical to SEQ ID NO: 240277
  chr19:19174943-19175054
  hyper

SEQ ID NO: 424906 - DNA, 222 bp, Homo sapiens; identical to SEQ ID NO: 240278
  chr19:19314201-19314423
  hyper

SEQ ID NO: 424907 - DNA, 119 bp, Homo sapiens; identical to SEQ ID NO: 205287
  chr19:19336136-19336255
  hyper

SEQ ID NO: 424908 - DNA, 352 bp, Homo sapiens; identical to SEQ ID NO: 240281
  chr19:19431245-19431597
  hyper

SEQ ID NO: 424909 - DNA, 31 bp, Homo sapiens; identical to SEQ ID NO: 240282
  chr19:19626942-19626973
  hyper

SEQ ID NO: 424910 - DNA, 68 bp, Homo sapiens; identical to SEQ ID NO: 293745
  chr19:19648966-19649034
  hyper

SEQ ID NO: 424911 - DNA, 84 bp, Homo sapiens; identical to SEQ ID NO: 205289
  chr19:19651027-19651111
  hyper

SEQ ID NO: 424912 - DNA, 44 bp, Homo sapiens; identical to SEQ ID NO: 205300
  chr19:19932461-19932505
  hyper

SEQ ID NO: 424913 - DNA, 52 bp, Homo sapiens; identical to SEQ ID NO: 205301
  chr19:19932709-19932761
  hyper

SEQ ID NO: 424914 - DNA, 101 bp, Homo sapiens; identical to SEQ ID NO: 293761
  chr19:19977572-19977673
  hyper

SEQ ID NO: 424915 - DNA, 323 bp, Homo sapiens; identical to SEQ ID NO: 205305
  chr19:20011267-20011590
  hyper

SEQ ID NO: 424916 - DNA, 60 bp, Homo sapiens
  chr19:20011770-20011830
  hyper
ggagctccaggtctcctcttcactactctgtgtcctgtgctcctacaggcccagcctctg

SEQ ID NO: 424917 - DNA, 180 bp, Homo sapiens; identical to SEQ ID NO: 240298
  chr19:20012430-20012610
  hyper

SEQ ID NO: 424918 - DNA, 145 bp, Homo sapiens; identical to SEQ ID NO: 205309
  chr19:20188872-20189017
  hyper

SEQ ID NO: 424919 - DNA, 120 bp, Homo sapiens; identical to SEQ ID NO: 205310
  chr19:20189077-20189197
  hyper

SEQ ID NO: 424920 - DNA, 52 bp, Homo sapiens; identical to SEQ ID NO: 400648
  chr19:21512074-21512126
  hyper

SEQ ID NO: 424921 - DNA, 120 bp, Homo sapiens; identical to SEQ ID NO: 205313
  chr19:21542309-21542429
  hyper

SEQ ID NO: 424922 - DNA, 40 bp, Homo sapiens; identical to SEQ ID NO: 205316
  chr19:21646195-21646235
  hyper

SEQ ID NO: 424923 - DNA, 97 bp, Homo sapiens; identical to SEQ ID NO: 205317
  chr19:21646437-21646534
  hyper

SEQ ID NO: 424924 - DNA, 46 bp, Homo sapiens; identical to SEQ ID NO: 293777
  chr19:21657508-21657554
  hyper

SEQ ID NO: 424925 - DNA, 173 bp, Homo sapiens; identical to SEQ ID NO: 293778
  chr19:21657590-21657763
  hyper

SEQ ID NO: 424926 - DNA, 39 bp, Homo sapiens
  chr19:21688462-21688501
  hyper
gtcttcatttctgtgtcctttgttcttagaggcccagcc

SEQ ID NO: 424927 - DNA, 170 bp, Homo sapiens; identical to SEQ ID NO: 205319
  chr19:21769119-21769289
  hyper

SEQ ID NO: 424928 - DNA, 83 bp, Homo sapiens; identical to SEQ ID NO: 293782
  chr19:21769600-21769683
  hyper

SEQ ID NO: 424929 - DNA, 99 bp, Homo sapiens; identical to SEQ ID NO: 293785
  chr19:22610387-22610486
  hyper

SEQ ID NO: 424930 - DNA, 92 bp, Homo sapiens; identical to SEQ ID NO: 293786
  chr19:22610883-22610975
  hyper

SEQ ID NO: 424931 - DNA, 185 bp, Homo sapiens; identical to SEQ ID NO: 293787
  chr19:22611005-22611190
  hyper

SEQ ID NO: 424932 - DNA, 42 bp, Homo sapiens; identical to SEQ ID NO: 131204
  chr19:22611241-22611283
  hyper

SEQ ID NO: 424933 - DNA, 117 bp, Homo sapiens; identical to SEQ ID NO: 293789
  chr19:22817085-22817202
  hyper

SEQ ID NO: 424934 - DNA, 87 bp, Homo sapiens; identical to SEQ ID NO: 205322
  chr19:23299824-23299911
  hyper

SEQ ID NO: 424935 - DNA, 40 bp, Homo sapiens; identical to SEQ ID NO: 400657
  chr19:23432793-23432833
  hyper

SEQ ID NO: 424936 - DNA, 45 bp, Homo sapiens
  chr19:23578195-23578240
  hyper
acacaggctgggcctcctggagcagaggacacagagcagtgaagt

SEQ ID NO: 424937 - DNA, 82 bp, Homo sapiens; identical to SEQ ID NO: 205331
  chr19:23598013-23598095
  hyper

SEQ ID NO: 424938 - DNA, 221 bp, Homo sapiens; identical to SEQ ID NO: 293801
  chr19:23653859-23654080
  hyper

SEQ ID NO: 424939 - DNA, 180 bp, Homo sapiens; identical to SEQ ID NO: 205333
  chr19:23869522-23869702
  hyper

SEQ ID NO: 424940 - DNA, 283 bp, Homo sapiens; identical to SEQ ID NO: 205334
  chr19:23869882-23870165
  hyper

SEQ ID NO: 424941 - DNA, 75 bp, Homo sapiens; identical to SEQ ID NO: 205336
  chr19:28284060-28284135
  hyper

SEQ ID NO: 424942 - DNA, 235 bp, Homo sapiens; identical to SEQ ID NO: 240349
  chr19:30096855-30097090
  hyper

SEQ ID NO: 424943 - DNA, 99 bp, Homo sapiens; identical to SEQ ID NO: 205339
  chr19:30155980-30156079
  hyper

SEQ ID NO: 424944 - DNA, 87 bp, Homo sapiens; identical to SEQ ID NO: 205340
  chr19:30156299-30156386
  hyper

SEQ ID NO: 424945 - DNA, 55 bp, Homo sapiens; identical to SEQ ID NO: 240352
  chr19:30206577-30206632
  hyper

SEQ ID NO: 424946 - DNA, 39 bp, Homo sapiens; identical to SEQ ID NO: 293813
  chr19:30215474-30215513
  hyper

SEQ ID NO: 424947 - DNA, 33 bp, Homo sapiens; identical to SEQ ID NO: 293816
  chr19:31210819-31210852
  hyper

SEQ ID NO: 424948 - DNA, 46 bp, Homo sapiens; identical to SEQ ID NO: 293820
  chr19:32532872-32532918
  hyper

SEQ ID NO: 424949 - DNA, 41 bp, Homo sapiens; identical to SEQ ID NO: 293821
  chr19:32533002-32533043
  hyper

SEQ ID NO: 424950 - DNA, 113 bp, Homo sapiens; identical to SEQ ID NO: 240369
  chr19:33166109-33166222
  hyper

SEQ ID NO: 424951 - DNA, 124 bp, Homo sapiens; identical to SEQ ID NO: 205346
  chr19:33166794-33166918
  hyper

SEQ ID NO: 424952 - DNA, 320 bp, Homo sapiens; identical to SEQ ID NO: 205347
  chr19:33167523-33167843
  hyper

SEQ ID NO: 424953 - DNA, 107 bp, Homo sapiens; identical to SEQ ID NO: 205348
  chr19:33167907-33168014
  hyper

SEQ ID NO: 424954 - DNA, 53 bp, Homo sapiens; identical to SEQ ID NO: 240373
  chr19:33462904-33462957
  hyper

SEQ ID NO: 424955 - DNA, 39 bp, Homo sapiens; identical to SEQ ID NO: 205350
  chr19:33555231-33555270
  hyper

SEQ ID NO: 424956 - DNA, 584 bp, Homo sapiens; identical to SEQ ID NO: 293829
  chr19:33555491-33556075
  hyper

SEQ ID NO: 424957 - DNA, 116 bp, Homo sapiens; identical to SEQ ID NO: 131290
  chr19:33717938-33718054
  hyper

SEQ ID NO: 424958 - DNA, 1022 bp, Homo sapiens; identical to SEQ ID NO: 384772
  chr19:33790839-33791861
  hyper

SEQ ID NO: 424959 - DNA, 71 bp, Homo sapiens; identical to SEQ ID NO: 400668
  chr19:33794329-33794400
  hyper

SEQ ID NO: 424960 - DNA, 112 bp, Homo sapiens; identical to SEQ ID NO: 205359
  chr19:34175322-34175434
  hyper

SEQ ID NO: 424961 - DNA, 89 bp, Homo sapiens; identical to SEQ ID NO: 293839
  chr19:34262994-34263083
  hyper

SEQ ID NO: 424962 - DNA, 566 bp, Homo sapiens; identical to SEQ ID NO: 293840
  chr19:34263272-34263838
  hyper

SEQ ID NO: 424963 - DNA, 217 bp, Homo sapiens; identical to SEQ ID NO: 225894
  chr19:34269016-34269233
  hyper

SEQ ID NO: 424964 - DNA, 997 bp, Homo sapiens; identical to SEQ ID NO: 225895
  chr19:34286493-34287490
  hyper

SEQ ID NO: 424965 - DNA, 279 bp, Homo sapiens; identical to SEQ ID NO: 293843
  chr19:34287808-34288087
  hyper

SEQ ID NO: 424966 - DNA, 107 bp, Homo sapiens; identical to SEQ ID NO: 293844
  chr19:34288675-34288782
  hyper

SEQ ID NO: 424967 - DNA, 190 bp, Homo sapiens; identical to SEQ ID NO: 240385
  chr19:34895108-34895298
  hyper

SEQ ID NO: 424968 - DNA, 85 bp, Homo sapiens; identical to SEQ ID NO: 240386
  chr19:34919058-34919143
  hyper

SEQ ID NO: 424969 - DNA, 149 bp, Homo sapiens; identical to SEQ ID NO: 205364
  chr19:35168260-35168409
  hyper

SEQ ID NO: 424970 - DNA, 87 bp, Homo sapiens; identical to SEQ ID NO: 293854
  chr19:35263998-35264085
  hyper

SEQ ID NO: 424971 - DNA, 84 bp, Homo sapiens; identical to SEQ ID NO: 293855
  chr19:35264119-35264203
  hyper

SEQ ID NO: 424972 - DNA, 542 bp, Homo sapiens; identical to SEQ ID NO: 240392
  chr19:35417688-35418230
  hyper

SEQ ID NO: 424973 - DNA, 343 bp, Homo sapiens; identical to SEQ ID NO: 240394
  chr19:35490295-35490638
  hyper

SEQ ID NO: 424974 - DNA, 69 bp, Homo sapiens; identical to SEQ ID NO: 293864
  chr19:36049462-36049531
  hyper

SEQ ID NO: 424975 - DNA, 116 bp, Homo sapiens; identical to SEQ ID NO: 205371
  chr19:36123862-36123978
  hyper

SEQ ID NO: 424976 - DNA, 405 bp, Homo sapiens; identical to SEQ ID NO: 240404
  chr19:36164097-36164502
  hyper

SEQ ID NO: 424977 - DNA, 194 bp, Homo sapiens; identical to SEQ ID NO: 205372
  chr19:36236368-36236562
  hyper

SEQ ID NO: 424978 - DNA, 419 bp, Homo sapiens; identical to SEQ ID NO: 240406
  chr19:36239184-36239603
  hyper

SEQ ID NO: 424979 - DNA, 197 bp, Homo sapiens; identical to SEQ ID NO: 240407
  chr19:36248725-36248922
  hyper

SEQ ID NO: 424980 - DNA, 119 bp, Homo sapiens; identical to SEQ ID NO: 293870
  chr19:36336291-36336410
  hyper

SEQ ID NO: 424981 - DNA, 220 bp, Homo sapiens; identical to SEQ ID NO: 293871
  chr19:36336769-36336989
  hyper

SEQ ID NO: 424982 - DNA, 88 bp, Homo sapiens; identical to SEQ ID NO: 293875
  chr19:36360475-36360563
  hyper

SEQ ID NO: 424983 - DNA, 101 bp, Homo sapiens; identical to SEQ ID NO: 293876
  chr19:36361310-36361411
  hyper

SEQ ID NO: 424984 - DNA, 113 bp, Homo sapiens; identical to SEQ ID NO: 240416
  chr19:36391019-36391132
  hyper

SEQ ID NO: 424985 - DNA, 67 bp, Homo sapiens; identical to SEQ ID NO: 240417
  chr19:36422567-36422634
  hyper

SEQ ID NO: 424986 - DNA, 174 bp, Homo sapiens; identical to SEQ ID NO: 205375
  chr19:36427160-36427334
  hyper

SEQ ID NO: 424987 - DNA, 68 bp, Homo sapiens; identical to SEQ ID NO: 240419
  chr19:36427554-36427622
  hyper

SEQ ID NO: 424988 - DNA, 188 bp, Homo sapiens; identical to SEQ ID NO: 240421
  chr19:36485952-36486140
  hyper

SEQ ID NO: 424989 - DNA, 55 bp, Homo sapiens; identical to SEQ ID NO: 293883
  chr19:36523212-36523267
  hyper

SEQ ID NO: 424990 - DNA, 80 bp, Homo sapiens; identical to SEQ ID NO: 293884
  chr19:36523921-36524001
  hyper

SEQ ID NO: 424991 - DNA, 214 bp, Homo sapiens; identical to SEQ ID NO: 240423
  chr19:36705178-36705392
  hyper

SEQ ID NO: 424992 - DNA, 102 bp, Homo sapiens; identical to SEQ ID NO: 240424
  chr19:36705646-36705748
  hyper

SEQ ID NO: 424993 - DNA, 219 bp, Homo sapiens; identical to SEQ ID NO: 293889
  chr19:36912593-36912812
  hyper

SEQ ID NO: 424994 - DNA, 162 bp, Homo sapiens; identical to SEQ ID NO: 293896
  chr19:37262838-37263000
  hyper

SEQ ID NO: 424995 - DNA, 155 bp, Homo sapiens; identical to SEQ ID NO: 225914
  chr19:37266863-37267018
  hyper

SEQ ID NO: 424996 - DNA, 43 bp, Homo sapiens; identical to SEQ ID NO: 205380
  chr19:37287861-37287904
  hyper

SEQ ID NO: 424997 - DNA, 497 bp, Homo sapiens; identical to SEQ ID NO: 240446
  chr19:37701189-37701686
  hyper

SEQ ID NO: 424998 - DNA, 62 bp, Homo sapiens; identical to SEQ ID NO: 293918
  chr19:38307858-38307920
  hyper

SEQ ID NO: 424999 - DNA, 103 bp, Homo sapiens; identical to SEQ ID NO: 293919
  chr19:38307977-38308080
  hyper

SEQ ID NO: 425000 - DNA, 57 bp, Homo sapiens; identical to SEQ ID NO: 225920
  chr19:38398221-38398278
  hyper

SEQ ID NO: 425001 - DNA, 126 bp, Homo sapiens; identical to SEQ ID NO: 205392
  chr19:38700328-38700454
  hyper

SEQ ID NO: 425002 - DNA, 40 bp, Homo sapiens; identical to SEQ ID NO: 205393
  chr19:38700557-38700597
  hyper

SEQ ID NO: 425003 - DNA, 163 bp, Homo sapiens; identical to SEQ ID NO: 205394
  chr19:38715050-38715213
  hyper

SEQ ID NO: 425004 - DNA, 41 bp, Homo sapiens; identical to SEQ ID NO: 240466
  chr19:38806820-38806861
  hyper

SEQ ID NO: 425005 - DNA, 232 bp, Homo sapiens; identical to SEQ ID NO: 293932
  chr19:38852095-38852327
  hyper

SEQ ID NO: 425006 - DNA, 141 bp, Homo sapiens; identical to SEQ ID NO: 293933
  chr19:38852387-38852528
  hyper

SEQ ID NO: 425007 - DNA, 427 bp, Homo sapiens; identical to SEQ ID NO: 240468
  chr19:38865006-38865433
  hyper

SEQ ID NO: 425008 - DNA, 41 bp, Homo sapiens; identical to SEQ ID NO: 240470
  chr19:38878539-38878580
  hyper

SEQ ID NO: 425009 - DNA, 50 bp, Homo sapiens; identical to SEQ ID NO: 293938
  chr19:38879530-38879580
  hyper

SEQ ID NO: 425010 - DNA, 76 bp, Homo sapiens; identical to SEQ ID NO: 293939
  chr19:38879612-38879688
  hyper

SEQ ID NO: 425011 - DNA, 265 bp, Homo sapiens; identical to SEQ ID NO: 240472
  chr19:39109442-39109707
  hyper

SEQ ID NO: 425012 - DNA, 507 bp, Homo sapiens; identical to SEQ ID NO: 205402
  chr19:39139398-39139905
  hyper

SEQ ID NO: 425013 - DNA, 63 bp, Homo sapiens; identical to SEQ ID NO: 205403
  chr19:39140557-39140620
  hyper

SEQ ID NO: 425014 - DNA, 676 bp, Homo sapiens; identical to SEQ ID NO: 240475
  chr19:39322018-39322694
  hyper

SEQ ID NO: 425015 - DNA, 447 bp, Homo sapiens; identical to SEQ ID NO: 240476
  chr19:39341808-39342255
  hyper

SEQ ID NO: 425016 - DNA, 183 bp, Homo sapiens; identical to SEQ ID NO: 240477
  chr19:39390792-39390975
  hyper

SEQ ID NO: 425017 - DNA, 215 bp, Homo sapiens; identical to SEQ ID NO: 240478
  chr19:39421219-39421434
  hyper

SEQ ID NO: 425018 - DNA, 42 bp, Homo sapiens; identical to SEQ ID NO: 293951
  chr19:39589841-39589883
  hyper

SEQ ID NO: 425019 - DNA, 218 bp, Homo sapiens; identical to SEQ ID NO: 240482
  chr19:39616203-39616421
  hyper

SEQ ID NO: 425020 - DNA, 35 bp, Homo sapiens; identical to SEQ ID NO: 293953
  chr19:39687547-39687582
  hyper

SEQ ID NO: 425021 - DNA, 45 bp, Homo sapiens; identical to SEQ ID NO: 293954
  chr19:39687977-39688022
  hyper

SEQ ID NO: 425022 - DNA, 117 bp, Homo sapiens; identical to SEQ ID NO: 240486
  chr19:39818898-39819015
  hyper

SEQ ID NO: 425023 - DNA, 258 bp, Homo sapiens; identical to SEQ ID NO: 240487
  chr19:39881951-39882209
  hyper

SEQ ID NO: 425024 - DNA, 32 bp, Homo sapiens; identical to SEQ ID NO: 205407
  chr19:39898001-39898033
  hyper

SEQ ID NO: 425025 - DNA, 72 bp, Homo sapiens; identical to SEQ ID NO: 131504
  chr19:39898533-39898605
  hyper

SEQ ID NO: 425026 - DNA, 107 bp, Homo sapiens; identical to SEQ ID NO: 240489
  chr19:39902955-39903062
  hyper

SEQ ID NO: 425027 - DNA, 137 bp, Homo sapiens; identical to SEQ ID NO: 131510
  chr19:39936090-39936227
  hyper

SEQ ID NO: 425028 - DNA, 710 bp, Homo sapiens; identical to SEQ ID NO: 240492
  chr19:39988486-39989196
  hyper

SEQ ID NO: 425029 - DNA, 98 bp, Homo sapiens; identical to SEQ ID NO: 293965
  chr19:39992838-39992936
  hyper

SEQ ID NO: 425030 - DNA, 39 bp, Homo sapiens; identical to SEQ ID NO: 205410
  chr19:40022937-40022976
  hyper

SEQ ID NO: 425031 - DNA, 227 bp, Homo sapiens; identical to SEQ ID NO: 240499
  chr19:40336895-40337122
  hyper

SEQ ID NO: 425032 - DNA, 121 bp, Homo sapiens; identical to SEQ ID NO: 293973
  chr19:40722968-40723089
  hyper

SEQ ID NO: 425033 - DNA, 301 bp, Homo sapiens; identical to SEQ ID NO: 293974
  chr19:40723125-40723426
  hyper

SEQ ID NO: 425034 - DNA, 66 bp, Homo sapiens; identical to SEQ ID NO: 240502
  chr19:40732062-40732128
  hyper

SEQ ID NO: 425035 - DNA, 409 bp, Homo sapiens; identical to SEQ ID NO: 240503
  chr19:40791307-40791716
  hyper

SEQ ID NO: 425036 - DNA, 373 bp, Homo sapiens; identical to SEQ ID NO: 240504
  chr19:40854360-40854733
  hyper

SEQ ID NO: 425037 - DNA, 75 bp, Homo sapiens; identical to SEQ ID NO: 240505
  chr19:40910078-40910153
  hyper

SEQ ID NO: 425038 - DNA, 186 bp, Homo sapiens; identical to SEQ ID NO: 205416
  chr19:40932005-40932191
  hyper

SEQ ID NO: 425039 - DNA, 150 bp, Homo sapiens; identical to SEQ ID NO: 205417
  chr19:40939939-40940089
  hyper

SEQ ID NO: 425040 - DNA, 121 bp, Homo sapiens; identical to SEQ ID NO: 240508
  chr19:40971818-40971939
  hyper

SEQ ID NO: 425041 - DNA, 85 bp, Homo sapiens; identical to SEQ ID NO: 205419
  chr19:41025294-41025379
  hyper

SEQ ID NO: 425042 - DNA, 79 bp, Homo sapiens; identical to SEQ ID NO: 240511
  chr19:41036239-41036318
  hyper

SEQ ID NO: 425043 - DNA, 104 bp, Homo sapiens; identical to SEQ ID NO: 205423
  chr19:41082277-41082381
  hyper

SEQ ID NO: 425044 - DNA, 36 bp, Homo sapiens; identical to SEQ ID NO: 240517
  chr19:41082735-41082771
  hyper

SEQ ID NO: 425045 - DNA, 97 bp, Homo sapiens; identical to SEQ ID NO: 240518
  chr19:41105082-41105179
  hyper

SEQ ID NO: 425046 - DNA, 77 bp, Homo sapiens; identical to SEQ ID NO: 240519
  chr19:41105406-41105483
  hyper

SEQ ID NO: 425047 - DNA, 46 bp, Homo sapiens; identical to SEQ ID NO: 240524
  chr19:41120296-41120342
  hyper

SEQ ID NO: 425048 - DNA, 34 bp, Homo sapiens; identical to SEQ ID NO: 240525
  chr19:41196715-41196749
  hyper

SEQ ID NO: 425049 - DNA, 73 bp, Homo sapiens; identical to SEQ ID NO: 205430
  chr19:41222270-41222343
  hyper

SEQ ID NO: 425050 - DNA, 106 bp, Homo sapiens; identical to SEQ ID NO: 205431
  chr19:41223422-41223528
  hyper

SEQ ID NO: 425051 - DNA, 33 bp, Homo sapiens; identical to SEQ ID NO: 225936
  chr19:41304119-41304152
  hyper

SEQ ID NO: 425052 - DNA, 101 bp, Homo sapiens; identical to SEQ ID NO: 240531
  chr19:41815855-41815956
  hyper

SEQ ID NO: 425053 - DNA, 326 bp, Homo sapiens; identical to SEQ ID NO: 240532
  chr19:41831045-41831371
  hyper

SEQ ID NO: 425054 - DNA, 333 bp, Homo sapiens; identical to SEQ ID NO: 240533
  chr19:41831742-41832075
  hyper

SEQ ID NO: 425055 - DNA, 594 bp, Homo sapiens; identical to SEQ ID NO: 240534
  chr19:41857122-41857716
  hyper

SEQ ID NO: 425056 - DNA, 458 bp, Homo sapiens; identical to SEQ ID NO: 294013
  chr19:41859852-41860310
  hyper

SEQ ID NO: 425057 - DNA, 221 bp, Homo sapiens; identical to SEQ ID NO: 205438
  chr19:41870211-41870432
  hyper

SEQ ID NO: 425058 - DNA, 33 bp, Homo sapiens; identical to SEQ ID NO: 240537
  chr19:41882553-41882586
  hyper

SEQ ID NO: 425059 - DNA, 337 bp, Homo sapiens; identical to SEQ ID NO: 240538
  chr19:41945338-41945675
  hyper

SEQ ID NO: 425060 - DNA, 181 bp, Homo sapiens; identical to SEQ ID NO: 205439
  chr19:42297160-42297341
  hyper

SEQ ID NO: 425061 - DNA, 35 bp, Homo sapiens; identical to SEQ ID NO: 240541
  chr19:42364647-42364682
  hyper

SEQ ID NO: 425062 - DNA, 187 bp, Homo sapiens; identical to SEQ ID NO: 205440
  chr19:42444456-42444643
  hyper

SEQ ID NO: 425063 - DNA, 106 bp, Homo sapiens; identical to SEQ ID NO: 205442
  chr19:42498571-42498677
  hyper

SEQ ID NO: 425064 - DNA, 135 bp, Homo sapiens; identical to SEQ ID NO: 205443
  chr19:42501286-42501421
  hyper

SEQ ID NO: 425065 - DNA, 167 bp, Homo sapiens; identical to SEQ ID NO: 294024
  chr19:42501451-42501618
  hyper

SEQ ID NO: 425066 - DNA, 179 bp, Homo sapiens; identical to SEQ ID NO: 205445
  chr19:42636653-42636832
  hyper

SEQ ID NO: 425067 - DNA, 370 bp, Homo sapiens; identical to SEQ ID NO: 205446
  chr19:42680242-42680612
  hyper

SEQ ID NO: 425068 - DNA, 347 bp, Homo sapiens; identical to SEQ ID NO: 240548
  chr19:42724177-42724524
  hyper

SEQ ID NO: 425069 - DNA, 111 bp, Homo sapiens; identical to SEQ ID NO: 225940
  chr19:42749161-42749272
  hyper

SEQ ID NO: 425070 - DNA, 39 bp, Homo sapiens; identical to SEQ ID NO: 205447
  chr19:42754954-42754993
  hyper

SEQ ID NO: 425071 - DNA, 88 bp, Homo sapiens; identical to SEQ ID NO: 240550
  chr19:42758962-42759050
  hyper

SEQ ID NO: 425072 - DNA, 116 bp, Homo sapiens; identical to SEQ ID NO: 205448
  chr19:42774659-42774775
  hyper

SEQ ID NO: 425073 - DNA, 129 bp, Homo sapiens; identical to SEQ ID NO: 240552
  chr19:42784479-42784608
  hyper

SEQ ID NO: 425074 - DNA, 194 bp, Homo sapiens; identical to SEQ ID NO: 240553
  chr19:42806829-42807023
  hyper

SEQ ID NO: 425075 - DNA, 344 bp, Homo sapiens; identical to SEQ ID NO: 240554
  chr19:42830248-42830592
  hyper

SEQ ID NO: 425076 - DNA, 597 bp, Homo sapiens; identical to SEQ ID NO: 240555
  chr19:42901074-42901671
  hyper

SEQ ID NO: 425077 - DNA, 171 bp, Homo sapiens; identical to SEQ ID NO: 294036
  chr19:42906199-42906370
  hyper

SEQ ID NO: 425078 - DNA, 359 bp, Homo sapiens; identical to SEQ ID NO: 240560
  chr19:44008462-44008821
  hyper

SEQ ID NO: 425079 - DNA, 272 bp, Homo sapiens; identical to SEQ ID NO: 205451
  chr19:44029739-44030011
  hyper

SEQ ID NO: 425080 - DNA, 233 bp, Homo sapiens; identical to SEQ ID NO: 240563
  chr19:44031371-44031604
  hyper

SEQ ID NO: 425081 - DNA, 222 bp, Homo sapiens; identical to SEQ ID NO: 240565
  chr19:44100424-44100646
  hyper

SEQ ID NO: 425082 - DNA, 778 bp, Homo sapiens; identical to SEQ ID NO: 294049
  chr19:44143630-44144408
  hyper

SEQ ID NO: 425083 - DNA, 362 bp, Homo sapiens; identical to SEQ ID NO: 240568
  chr19:44174057-44174419
  hyper

SEQ ID NO: 425084 - DNA, 129 bp, Homo sapiens; identical to SEQ ID NO: 240571
  chr19:44439732-44439861
  hyper

SEQ ID NO: 425085 - DNA, 212 bp, Homo sapiens; identical to SEQ ID NO: 205457
  chr19:44506686-44506898
  hyper

SEQ ID NO: 425086 - DNA, 72 bp, Homo sapiens; identical to SEQ ID NO: 205458
  chr19:44507929-44508001
  hyper

SEQ ID NO: 425087 - DNA, 65 bp, Homo sapiens; identical to SEQ ID NO: 294063
  chr19:44576036-44576101
  hyper

SEQ ID NO: 425088 - DNA, 221 bp, Homo sapiens; identical to SEQ ID NO: 294064
  chr19:44576405-44576626
  hyper

SEQ ID NO: 425089 - DNA, 250 bp, Homo sapiens; identical to SEQ ID NO: 205461
  chr19:44617149-44617399
  hyper

SEQ ID NO: 425090 - DNA, 364 bp, Homo sapiens; identical to SEQ ID NO: 240579
  chr19:44617607-44617971
  hyper

SEQ ID NO: 425091 - DNA, 185 bp, Homo sapiens; identical to SEQ ID NO: 294067
  chr19:44645331-44645516
  hyper

SEQ ID NO: 425092 - DNA, 611 bp, Homo sapiens; identical to SEQ ID NO: 294068
  chr19:44645571-44646182
  hyper

SEQ ID NO: 425093 - DNA, 195 bp, Homo sapiens; identical to SEQ ID NO: 240581
  chr19:44669064-44669259
  hyper

SEQ ID NO: 425094 - DNA, 380 bp, Homo sapiens; identical to SEQ ID NO: 205464
  chr19:44763972-44764352
  hyper

SEQ ID NO: 425095 - DNA, 327 bp, Homo sapiens; identical to SEQ ID NO: 240584
  chr19:44808916-44809243
  hyper

SEQ ID NO: 425096 - DNA, 103 bp, Homo sapiens; identical to SEQ ID NO: 294073
  chr19:44905611-44905714
  hyper

SEQ ID NO: 425097 - DNA, 218 bp, Homo sapiens; identical to SEQ ID NO: 205465
  chr19:44905783-44906001
  hyper

SEQ ID NO: 425098 - DNA, 175 bp, Homo sapiens; identical to SEQ ID NO: 294080
  chr19:45207399-45207574
  hyper

SEQ ID NO: 425099 - DNA, 158 bp, Homo sapiens; identical to SEQ ID NO: 294081
  chr19:45257690-45257848
  hyper

SEQ ID NO: 425100 - DNA, 60 bp, Homo sapiens; identical to SEQ ID NO: 205471
  chr19:45281278-45281338
  hyper

SEQ ID NO: 425101 - DNA, 198 bp, Homo sapiens; identical to SEQ ID NO: 205472
  chr19:45312126-45312324
  hyper

SEQ ID NO: 425102 - DNA, 368 bp, Homo sapiens; identical to SEQ ID NO: 294084
  chr19:45347906-45348274
  hyper

SEQ ID NO: 425103 - DNA, 264 bp, Homo sapiens; identical to SEQ ID NO: 294085
  chr19:45348808-45349072
  hyper

SEQ ID NO: 425104 - DNA, 238 bp, Homo sapiens; identical to SEQ ID NO: 205475
  chr19:45418006-45418244
  hyper

SEQ ID NO: 425105 - DNA, 56 bp, Homo sapiens; identical to SEQ ID NO: 294090
  chr19:45655081-45655137
  hyper

SEQ ID NO: 425106 - DNA, 77 bp, Homo sapiens; identical to SEQ ID NO: 294092
  chr19:45681393-45681470
  hyper

SEQ ID NO: 425107 - DNA, 62 bp, Homo sapiens; identical to SEQ ID NO: 205478
  chr19:45755078-45755140
  hyper

SEQ ID NO: 425108 - DNA, 46 bp, Homo sapiens; identical to SEQ ID NO: 240599
  chr19:45843863-45843909
  hyper

SEQ ID NO: 425109 - DNA, 61 bp, Homo sapiens; identical to SEQ ID NO: 240600
  chr19:45844196-45844257
  hyper

SEQ ID NO: 425110 - DNA, 465 bp, Homo sapiens; identical to SEQ ID NO: 240601
  chr19:45873582-45874047
  hyper

SEQ ID NO: 425111 - DNA, 34 bp, Homo sapiens; identical to SEQ ID NO: 240604
  chr19:45908310-45908344
  hyper

SEQ ID NO: 425112 - DNA, 46 bp, Homo sapiens; identical to SEQ ID NO: 225953
  chr19:45908810-45908856
  hyper

SEQ ID NO: 425113 - DNA, 38 bp, Homo sapiens; identical to SEQ ID NO: 240605
  chr19:45927243-45927281
  hyper

SEQ ID NO: 425114 - DNA, 230 bp, Homo sapiens; identical to SEQ ID NO: 225954
  chr19:45947821-45948051
  hyper

SEQ ID NO: 425115 - DNA, 262 bp, Homo sapiens; identical to SEQ ID NO: 205479
  chr19:45959073-45959335
  hyper

SEQ ID NO: 425116 - DNA, 219 bp, Homo sapiens; identical to SEQ ID NO: 240608
  chr19:45971036-45971255
  hyper

SEQ ID NO: 425117 - DNA, 106 bp, Homo sapiens; identical to SEQ ID NO: 240610
  chr19:46000728-46000834
  hyper

SEQ ID NO: 425118 - DNA, 90 bp, Homo sapiens; identical to SEQ ID NO: 240612
  chr19:46088261-46088351
  hyper

SEQ ID NO: 425119 - DNA, 239 bp, Homo sapiens; identical to SEQ ID NO: 205482
  chr19:46142560-46142799
  hyper

SEQ ID NO: 425120 - DNA, 540 bp, Homo sapiens; identical to SEQ ID NO: 240617
  chr19:46180865-46181405
  hyper

SEQ ID NO: 425121 - DNA, 348 bp, Homo sapiens; identical to SEQ ID NO: 294118
  chr19:46271267-46271615
  hyper

SEQ ID NO: 425122 - DNA, 221 bp, Homo sapiens; identical to SEQ ID NO: 240619
  chr19:46272454-46272675
  hyper

SEQ ID NO: 425123 - DNA, 33 bp, Homo sapiens; identical to SEQ ID NO: 225958
  chr19:46273813-46273846
  hyper

SEQ ID NO: 425124 - DNA, 35 bp, Homo sapiens; identical to SEQ ID NO: 240620
  chr19:46295860-46295895
  hyper

SEQ ID NO: 425125 - DNA, 55 bp, Homo sapiens; identical to SEQ ID NO: 240621
  chr19:46357489-46357544
  hyper

SEQ ID NO: 425126 - DNA, 47 bp, Homo sapiens; identical to SEQ ID NO: 240622
  chr19:46357574-46357621
  hyper

SEQ ID NO: 425127 - DNA, 222 bp, Homo sapiens; identical to SEQ ID NO: 240624
  chr19:46389400-46389622
  hyper

SEQ ID NO: 425128 - DNA, 345 bp, Homo sapiens; identical to SEQ ID NO: 205489
  chr19:46404950-46405295
  hyper

SEQ ID NO: 425129 - DNA, 147 bp, Homo sapiens; identical to SEQ ID NO: 205490
  chr19:46476433-46476580
  hyper

SEQ ID NO: 425130 - DNA, 141 bp, Homo sapiens; identical to SEQ ID NO: 205493
  chr19:46580427-46580568
  hyper

SEQ ID NO: 425131 - DNA, 224 bp, Homo sapiens; identical to SEQ ID NO: 205494
  chr19:46580598-46580822
  hyper

SEQ ID NO: 425132 - DNA, 324 bp, Homo sapiens; identical to SEQ ID NO: 240632
  chr19:46850468-46850792
  hyper

SEQ ID NO: 425133 - DNA, 192 bp, Homo sapiens; identical to SEQ ID NO: 240638
  chr19:46991213-46991405
  hyper

SEQ ID NO: 425134 - DNA, 155 bp, Homo sapiens; identical to SEQ ID NO: 240642
  chr19:47104723-47104878
  hyper

SEQ ID NO: 425135 - DNA, 364 bp, Homo sapiens; identical to SEQ ID NO: 240645
  chr19:47217682-47218046
  hyper

SEQ ID NO: 425136 - DNA, 751 bp, Homo sapiens; identical to SEQ ID NO: 294146
  chr19:47258852-47259603
  hyper

SEQ ID NO: 425137 - DNA, 71 bp, Homo sapiens; identical to SEQ ID NO: 240646
  chr19:47290660-47290731
  hyper

SEQ ID NO: 425138 - DNA, 139 bp, Homo sapiens; identical to SEQ ID NO: 240647
  chr19:47292036-47292175
  hyper

SEQ ID NO: 425139 - DNA, 270 bp, Homo sapiens; identical to SEQ ID NO: 225965
  chr19:47359761-47360031
  hyper

SEQ ID NO: 425140 - DNA, 117 bp, Homo sapiens; identical to SEQ ID NO: 205503
  chr19:47363286-47363403
  hyper

SEQ ID NO: 425141 - DNA, 43 bp, Homo sapiens; identical to SEQ ID NO: 205504
  chr19:47494573-47494616
  hyper

SEQ ID NO: 425142 - DNA, 69 bp, Homo sapiens; identical to SEQ ID NO: 294152
  chr19:47522920-47522989
  hyper

SEQ ID NO: 425143 - DNA, 46 bp, Homo sapiens; identical to SEQ ID NO: 240651
  chr19:47524452-47524498
  hyper

SEQ ID NO: 425144 - DNA, 34 bp, Homo sapiens; identical to SEQ ID NO: 240652
  chr19:47551879-47551913
  hyper

SEQ ID NO: 425145 - DNA, 48 bp, Homo sapiens
  chr19:47675972-47676020
  hyper
aaacagagtcaatcacagatcatctactccagagttgaaaagtgtaca

SEQ ID NO: 425146 - DNA, 152 bp, Homo sapiens; identical to SEQ ID NO: 225972
  chr19:47730760-47730912
  hyper

SEQ ID NO: 425147 - DNA, 86 bp, Homo sapiens; identical to SEQ ID NO: 240656
  chr19:47750797-47750883
  hyper

SEQ ID NO: 425148 - DNA, 216 bp, Homo sapiens; identical to SEQ ID NO: 205507
  chr19:47910163-47910379
  hyper

SEQ ID NO: 425149 - DNA, 58 bp, Homo sapiens; identical to SEQ ID NO: 56409
  chr19:47910679-47910737
  hyper

SEQ ID NO: 425150 - DNA, 114 bp, Homo sapiens; identical to SEQ ID NO: 240660
  chr19:47923668-47923782
  hyper

SEQ ID NO: 425151 - DNA, 142 bp, Homo sapiens; identical to SEQ ID NO: 294169
  chr19:47925411-47925553
  hyper

SEQ ID NO: 425152 - DNA, 41 bp, Homo sapiens; identical to SEQ ID NO: 294170
  chr19:47925592-47925633
  hyper

SEQ ID NO: 425153 - DNA, 313 bp, Homo sapiens; identical to SEQ ID NO: 240662
  chr19:47931515-47931828
  hyper

SEQ ID NO: 425154 - DNA, 165 bp, Homo sapiens; identical to SEQ ID NO: 294172
  chr19:47951123-47951288
  hyper

SEQ ID NO: 425155 - DNA, 175 bp, Homo sapiens; identical to SEQ ID NO: 294173
  chr19:47951318-47951493
  hyper

SEQ ID NO: 425156 - DNA, 51 bp, Homo sapiens; identical to SEQ ID NO: 294174
  chr19:47987534-47987585
  hyper

SEQ ID NO: 425157 - DNA, 104 bp, Homo sapiens; identical to SEQ ID NO: 131878
  chr19:47987618-47987722
  hyper

SEQ ID NO: 425158 - DNA, 300 bp, Homo sapiens; identical to SEQ ID NO: 240668
  chr19:48018496-48018796
  hyper

SEQ ID NO: 425159 - DNA, 99 bp, Homo sapiens; identical to SEQ ID NO: 294177
  chr19:48076347-48076446
  hyper

SEQ ID NO: 425160 - DNA, 141 bp, Homo sapiens; identical to SEQ ID NO: 240669
  chr19:48103693-48103834
  hyper

SEQ ID NO: 425161 - DNA, 202 bp, Homo sapiens; identical to SEQ ID NO: 240670
  chr19:48104041-48104243
  hyper

SEQ ID NO: 425162 - DNA, 81 bp, Homo sapiens; identical to SEQ ID NO: 240671
  chr19:48216436-48216517
  hyper

SEQ ID NO: 425163 - DNA, 263 bp, Homo sapiens; identical to SEQ ID NO: 240672
  chr19:48281435-48281698
  hyper

SEQ ID NO: 425164 - DNA, 169 bp, Homo sapiens; identical to SEQ ID NO: 205511
  chr19:48613936-48614105
  hyper

SEQ ID NO: 425165 - DNA, 317 bp, Homo sapiens; identical to SEQ ID NO: 240674
  chr19:48774331-48774648
  hyper

SEQ ID NO: 425166 - DNA, 110 bp, Homo sapiens; identical to SEQ ID NO: 205512
  chr19:48823626-48823736
  hyper

SEQ ID NO: 425167 - DNA, 383 bp, Homo sapiens; identical to SEQ ID NO: 240675
  chr19:48833439-48833822
  hyper

SEQ ID NO: 425168 - DNA, 250 bp, Homo sapiens; identical to SEQ ID NO: 294187
  chr19:48867042-48867292
  hyper

SEQ ID NO: 425169 - DNA, 142 bp, Homo sapiens; identical to SEQ ID NO: 131903
  chr19:48867354-48867496
  hyper

SEQ ID NO: 425170 - DNA, 140 bp, Homo sapiens; identical to SEQ ID NO: 240677
  chr19:48894905-48895045
  hyper

SEQ ID NO: 425171 - DNA, 51 bp, Homo sapiens; identical to SEQ ID NO: 240682
  chr19:48949427-48949478
  hyper

SEQ ID NO: 425172 - DNA, 179 bp, Homo sapiens; identical to SEQ ID NO: 240683
  chr19:48972233-48972412
  hyper

SEQ ID NO: 425173 - DNA, 183 bp, Homo sapiens; identical to SEQ ID NO: 294193
  chr19:48994398-48994581
  hyper

SEQ ID NO: 425174 - DNA, 182 bp, Homo sapiens; identical to SEQ ID NO: 205514
  chr19:48996833-48997015
  hyper

SEQ ID NO: 425175 - DNA, 216 bp, Homo sapiens; identical to SEQ ID NO: 205516
  chr19:49141163-49141379
  hyper

SEQ ID NO: 425176 - DNA, 53 bp, Homo sapiens; identical to SEQ ID NO: 240688
  chr19:49149535-49149588
  hyper

SEQ ID NO: 425177 - DNA, 97 bp, Homo sapiens; identical to SEQ ID NO: 240691
  chr19:49217819-49217916
  hyper

SEQ ID NO: 425178 - DNA, 556 bp, Homo sapiens; identical to SEQ ID NO: 240694
  chr19:49298357-49298913
  hyper

SEQ ID NO: 425179 - DNA, 153 bp, Homo sapiens; identical to SEQ ID NO: 205522
  chr19:49314168-49314321
  hyper

SEQ ID NO: 425180 - DNA, 210 bp, Homo sapiens; identical to SEQ ID NO: 205523
  chr19:49436772-49436982
  hyper

SEQ ID NO: 425181 - DNA, 205 bp, Homo sapiens; identical to SEQ ID NO: 240698
  chr19:49474212-49474417
  hyper

SEQ ID NO: 425182 - DNA, 170 bp, Homo sapiens; identical to SEQ ID NO: 240699
  chr19:49496546-49496716
  hyper

SEQ ID NO: 425183 - DNA, 193 bp, Homo sapiens; identical to SEQ ID NO: 205525
  chr19:49577262-49577455
  hyper

SEQ ID NO: 425184 - DNA, 32 bp, Homo sapiens; identical to SEQ ID NO: 240702
  chr19:49588345-49588377
  hyper

SEQ ID NO: 425185 - DNA, 222 bp, Homo sapiens; identical to SEQ ID NO: 240705
  chr19:49654220-49654442
  hyper

SEQ ID NO: 425186 - DNA, 145 bp, Homo sapiens; identical to SEQ ID NO: 240706
  chr19:49654472-49654617
  hyper

SEQ ID NO: 425187 - DNA, 164 bp, Homo sapiens; identical to SEQ ID NO: 240707
  chr19:49655173-49655337
  hyper

SEQ ID NO: 425188 - DNA, 34 bp, Homo sapiens; identical to SEQ ID NO: 205529
  chr19:49925606-49925640
  hyper

SEQ ID NO: 425189 - DNA, 108 bp, Homo sapiens; identical to SEQ ID NO: 205530
  chr19:49926734-49926842
  hyper

SEQ ID NO: 425190 - DNA, 232 bp, Homo sapiens; identical to SEQ ID NO: 240711
  chr19:49929636-49929868
  hyper

SEQ ID NO: 425191 - DNA, 192 bp, Homo sapiens; identical to SEQ ID NO: 240714
  chr19:49954990-49955182
  hyper

SEQ ID NO: 425192 - DNA, 108 bp, Homo sapiens; identical to SEQ ID NO: 205532
  chr19:49956760-49956868
  hyper

SEQ ID NO: 425193 - DNA, 82 bp, Homo sapiens; identical to SEQ ID NO: 240716
  chr19:49999403-49999485
  hyper

SEQ ID NO: 425194 - DNA, 273 bp, Homo sapiens; identical to SEQ ID NO: 225987
  chr19:50058957-50059230
  hyper

SEQ ID NO: 425195 - DNA, 96 bp, Homo sapiens; identical to SEQ ID NO: 240719
  chr19:50083836-50083932
  hyper

SEQ ID NO: 425196 - DNA, 83 bp, Homo sapiens; identical to SEQ ID NO: 240720
  chr19:50143412-50143495
  hyper

SEQ ID NO: 425197 - DNA, 104 bp, Homo sapiens; identical to SEQ ID NO: 240721
  chr19:50169139-50169243
  hyper

SEQ ID NO: 425198 - DNA, 302 bp, Homo sapiens; identical to SEQ ID NO: 294233
  chr19:50312465-50312767
  hyper

SEQ ID NO: 425199 - DNA, 194 bp, Homo sapiens; identical to SEQ ID NO: 205534
  chr19:50321281-50321475
  hyper

SEQ ID NO: 425200 - DNA, 213 bp, Homo sapiens; identical to SEQ ID NO: 240725
  chr19:50380586-50380799
  hyper

SEQ ID NO: 425201 - DNA, 251 bp, Homo sapiens; identical to SEQ ID NO: 240727
  chr19:50529274-50529525
  hyper

SEQ ID NO: 425202 - DNA, 182 bp, Homo sapiens; identical to SEQ ID NO: 294240
  chr19:50651066-50651248
  hyper

SEQ ID NO: 425203 - DNA, 190 bp, Homo sapiens; identical to SEQ ID NO: 294241
  chr19:50651358-50651548
  hyper

SEQ ID NO: 425204 - DNA, 31 bp, Homo sapiens; identical to SEQ ID NO: 240733
  chr19:50817682-50817713
  hyper

SEQ ID NO: 425205 - DNA, 224 bp, Homo sapiens; identical to SEQ ID NO: 294248
  chr19:50817943-50818167
  hyper

SEQ ID NO: 425206 - DNA, 42 bp, Homo sapiens; identical to SEQ ID NO: 294249
  chr19:50818204-50818246
  hyper

SEQ ID NO: 425207 - DNA, 94 bp, Homo sapiens; identical to SEQ ID NO: 240736
  chr19:50819426-50819520
  hyper

SEQ ID NO: 425208 - DNA, 49 bp, Homo sapiens
  chr19:50837477-50837526
  hyper
ggccctagtgatgtccaactaccagctccaccctctcaactccagtcat

SEQ ID NO: 425209 - DNA, 240 bp, Homo sapiens; identical to SEQ ID NO: 205544
  chr19:50871938-50872178
  hyper

SEQ ID NO: 425210 - DNA, 212 bp, Homo sapiens; identical to SEQ ID NO: 240742
  chr19:50887230-50887442
  hyper

SEQ ID NO: 425211 - DNA, 32 bp, Homo sapiens; identical to SEQ ID NO: 240743
  chr19:51142309-51142341
  hyper

SEQ ID NO: 425212 - DNA, 118 bp, Homo sapiens; identical to SEQ ID NO: 294268
  chr19:51170581-51170699
  hyper

SEQ ID NO: 425213 - DNA, 49 bp, Homo sapiens; identical to SEQ ID NO: 294269
  chr19:51171779-51171828
  hyper

SEQ ID NO: 425214 - DNA, 42 bp, Homo sapiens; identical to SEQ ID NO: 132051
  chr19:51171949-51171991
  hyper

SEQ ID NO: 425215 - DNA, 86 bp, Homo sapiens; identical to SEQ ID NO: 294273
  chr19:51199194-51199280
  hyper

SEQ ID NO: 425216 - DNA, 31 bp, Homo sapiens; identical to SEQ ID NO: 240750
  chr19:51221589-51221620
  hyper

SEQ ID NO: 425217 - DNA, 42 bp, Homo sapiens; identical to SEQ ID NO: 240754
  chr19:51307923-51307965
  hyper

SEQ ID NO: 425218 - DNA, 187 bp, Homo sapiens; identical to SEQ ID NO: 205547
  chr19:51412646-51412833
  hyper

SEQ ID NO: 425219 - DNA, 117 bp, Homo sapiens; identical to SEQ ID NO: 205552
  chr19:51527588-51527705
  hyper

SEQ ID NO: 425220 - DNA, 419 bp, Homo sapiens; identical to SEQ ID NO: 205554
  chr19:51869575-51869994
  hyper

SEQ ID NO: 425221 - DNA, 58 bp, Homo sapiens; identical to SEQ ID NO: 240763
  chr19:51870568-51870626
  hyper

SEQ ID NO: 425222 - DNA, 164 bp, Homo sapiens; identical to SEQ ID NO: 240764
  chr19:51897346-51897510
  hyper

SEQ ID NO: 425223 - DNA, 384 bp, Homo sapiens; identical to SEQ ID NO: 294293
  chr19:52407644-52408028
  hyper

SEQ ID NO: 425224 - DNA, 144 bp, Homo sapiens; identical to SEQ ID NO: 294294
  chr19:52408242-52408386
  hyper

SEQ ID NO: 425225 - DNA, 258 bp, Homo sapiens; identical to SEQ ID NO: 294295
  chr19:52430305-52430563
  hyper

SEQ ID NO: 425226 - DNA, 79 bp, Homo sapiens; identical to SEQ ID NO: 294296
  chr19:52430646-52430725
  hyper

SEQ ID NO: 425227 - DNA, 97 bp, Homo sapiens; identical to SEQ ID NO: 294297
  chr19:52489406-52489503
  hyper

SEQ ID NO: 425228 - DNA, 177 bp, Homo sapiens; identical to SEQ ID NO: 294298
  chr19:52489533-52489710
  hyper

SEQ ID NO: 425229 - DNA, 367 bp, Homo sapiens; identical to SEQ ID NO: 294299
  chr19:52489782-52490149
  hyper

SEQ ID NO: 425230 - DNA, 92 bp, Homo sapiens; identical to SEQ ID NO: 294300
  chr19:52490237-52490329
  hyper

SEQ ID NO: 425231 - DNA, 190 bp, Homo sapiens; identical to SEQ ID NO: 240776
  chr19:52642997-52643187
  hyper

SEQ ID NO: 425232 - DNA, 114 bp, Homo sapiens; identical to SEQ ID NO: 205561
  chr19:52643387-52643501
  hyper

SEQ ID NO: 425233 - DNA, 35 bp, Homo sapiens; identical to SEQ ID NO: 226008
  chr19:52674677-52674712
  hyper

SEQ ID NO: 425234 - DNA, 47 bp, Homo sapiens; identical to SEQ ID NO: 240777
  chr19:52674935-52674982
  hyper

SEQ ID NO: 425235 - DNA, 58 bp, Homo sapiens; identical to SEQ ID NO: 240778
  chr19:52693145-52693203
  hyper

SEQ ID NO: 425236 - DNA, 208 bp, Homo sapiens; identical to SEQ ID NO: 132122
  chr19:52901156-52901364
  hyper

SEQ ID NO: 425237 - DNA, 159 bp, Homo sapiens; identical to SEQ ID NO: 240792
  chr19:53360444-53360603
  hyper

SEQ ID NO: 425238 - DNA, 34 bp, Homo sapiens; identical to SEQ ID NO: 240793
  chr19:53360913-53360947
  hyper

SEQ ID NO: 425239 - DNA, 104 bp, Homo sapiens; identical to SEQ ID NO: 294333
  chr19:53446326-53446430
  hyper

SEQ ID NO: 425240 - DNA, 135 bp, Homo sapiens; identical to SEQ ID NO: 294339
  chr19:53561218-53561353
  hyper

SEQ ID NO: 425241 - DNA, 162 bp, Homo sapiens; identical to SEQ ID NO: 205579
  chr19:53561825-53561987
  hyper

SEQ ID NO: 425242 - DNA, 64 bp, Homo sapiens; identical to SEQ ID NO: 205588
  chr19:53758247-53758311
  hyper

SEQ ID NO: 425243 - DNA, 57 bp, Homo sapiens; identical to SEQ ID NO: 294351
  chr19:53811771-53811828
  hyper

SEQ ID NO: 425244 - DNA, 232 bp, Homo sapiens; identical to SEQ ID NO: 294352
  chr19:53836986-53837218
  hyper

SEQ ID NO: 425245 - DNA, 96 bp, Homo sapiens; identical to SEQ ID NO: 294353
  chr19:53837281-53837377
  hyper

SEQ ID NO: 425246 - DNA, 102 bp, Homo sapiens; identical to SEQ ID NO: 294354
  chr19:53837432-53837534
  hyper

SEQ ID NO: 425247 - DNA, 146 bp, Homo sapiens; identical to SEQ ID NO: 294356
  chr19:53869408-53869554
  hyper

SEQ ID NO: 425248 - DNA, 127 bp, Homo sapiens; identical to SEQ ID NO: 294357
  chr19:53934757-53934884
  hyper

SEQ ID NO: 425249 - DNA, 272 bp, Homo sapiens; identical to SEQ ID NO: 294359
  chr19:53935304-53935576
  hyper

SEQ ID NO: 425250 - DNA, 59 bp, Homo sapiens; identical to SEQ ID NO: 205590
  chr19:54024884-54024943
  hyper

SEQ ID NO: 425251 - DNA, 80 bp, Homo sapiens; identical to SEQ ID NO: 205591
  chr19:54206968-54207048
  hyper

SEQ ID NO: 425252 - DNA, 367 bp, Homo sapiens; identical to SEQ ID NO: 294363
  chr19:54371622-54371989
  hyper

SEQ ID NO: 425253 - DNA, 277 bp, Homo sapiens; identical to SEQ ID NO: 294364
  chr19:54372055-54372332
  hyper

SEQ ID NO: 425254 - DNA, 224 bp, Homo sapiens; identical to SEQ ID NO: 294365
  chr19:54372400-54372624
  hyper

SEQ ID NO: 425255 - DNA, 281 bp, Homo sapiens; identical to SEQ ID NO: 294366
  chr19:54372682-54372963
  hyper

SEQ ID NO: 425256 - DNA, 325 bp, Homo sapiens; identical to SEQ ID NO: 294367
  chr19:54382389-54382714
  hyper

SEQ ID NO: 425257 - DNA, 194 bp, Homo sapiens; identical to SEQ ID NO: 294368
  chr19:54382804-54382998
  hyper

SEQ ID NO: 425258 - DNA, 203 bp, Homo sapiens; identical to SEQ ID NO: 294371
  chr19:54445745-54445948
  hyper

SEQ ID NO: 425259 - DNA, 144 bp, Homo sapiens; identical to SEQ ID NO: 205597
  chr19:54461001-54461145
  hyper

SEQ ID NO: 425260 - DNA, 39 bp, Homo sapiens; identical to SEQ ID NO: 294373
  chr19:54461175-54461214
  hyper

SEQ ID NO: 425261 - DNA, 40 bp, Homo sapiens; identical to SEQ ID NO: 294374
  chr19:54466614-54466654
  hyper

SEQ ID NO: 425262 - DNA, 40 bp, Homo sapiens; identical to SEQ ID NO: 205599
  chr19:55598024-55598064
  hyper

SEQ ID NO: 425263 - DNA, 96 bp, Homo sapiens; identical to SEQ ID NO: 205601
  chr19:55691680-55691776
  hyper

SEQ ID NO: 425264 - DNA, 676 bp, Homo sapiens; identical to SEQ ID NO: 240832
  chr19:55727966-55728642
  hyper

SEQ ID NO: 425265 - DNA, 189 bp, Homo sapiens; identical to SEQ ID NO: 240833
  chr19:55770718-55770907
  hyper

SEQ ID NO: 425266 - DNA, 249 bp, Homo sapiens; identical to SEQ ID NO: 240834
  chr19:55851026-55851275
  hyper

SEQ ID NO: 425267 - DNA, 352 bp, Homo sapiens; identical to SEQ ID NO: 240835
  chr19:55864914-55865266
  hyper

SEQ ID NO: 425268 - DNA, 204 bp, Homo sapiens; identical to SEQ ID NO: 240837
  chr19:55919626-55919830
  hyper

SEQ ID NO: 425269 - DNA, 82 bp, Homo sapiens; identical to SEQ ID NO: 294387
  chr19:55951859-55951941
  hyper

SEQ ID NO: 425270 - DNA, 81 bp, Homo sapiens; identical to SEQ ID NO: 294388
  chr19:55951980-55952061
  hyper

SEQ ID NO: 425271 - DNA, 181 bp, Homo sapiens; identical to SEQ ID NO: 294390
  chr19:55953358-55953539
  hyper

SEQ ID NO: 425272 - DNA, 256 bp, Homo sapiens; identical to SEQ ID NO: 294391
  chr19:55962684-55962940
  hyper

SEQ ID NO: 425273 - DNA, 63 bp, Homo sapiens; identical to SEQ ID NO: 294392
  chr19:55963044-55963107
  hyper

SEQ ID NO: 425274 - DNA, 36 bp, Homo sapiens; identical to SEQ ID NO: 294393
  chr19:55963296-55963332
  hyper

SEQ ID NO: 425275 - DNA, 38 bp, Homo sapiens; identical to SEQ ID NO: 240844
  chr19:55987549-55987587
  hyper

SEQ ID NO: 425276 - DNA, 67 bp, Homo sapiens; identical to SEQ ID NO: 205605
  chr19:56098517-56098584
  hyper

SEQ ID NO: 425277 - DNA, 276 bp, Homo sapiens; identical to SEQ ID NO: 240847
  chr19:56111238-56111514
  hyper

SEQ ID NO: 425278 - DNA, 85 bp, Homo sapiens; identical to SEQ ID NO: 240850
  chr19:56633034-56633119
  hyper

SEQ ID NO: 425279 - DNA, 120 bp, Homo sapiens; identical to SEQ ID NO: 205608
  chr19:56987582-56987702
  hyper

SEQ ID NO: 425280 - DNA, 412 bp, Homo sapiens; identical to SEQ ID NO: 294407
  chr19:57019519-57019931
  hyper

SEQ ID NO: 425281 - DNA, 102 bp, Homo sapiens; identical to SEQ ID NO: 294410
  chr19:57050186-57050288
  hyper

SEQ ID NO: 425282 - DNA, 35 bp, Homo sapiens; identical to SEQ ID NO: 294411
  chr19:57050428-57050463
  hyper

SEQ ID NO: 425283 - DNA, 141 bp, Homo sapiens; identical to SEQ ID NO: 294412
  chr19:57050493-57050634
  hyper

SEQ ID NO: 425284 - DNA, 32 bp, Homo sapiens; identical to SEQ ID NO: 294415
  chr19:57149619-57149651
  hyper

SEQ ID NO: 425285 - DNA, 72 bp, Homo sapiens; identical to SEQ ID NO: 205613
  chr19:57182840-57182912
  hyper

SEQ ID NO: 425286 - DNA, 177 bp, Homo sapiens; identical to SEQ ID NO: 205618
  chr19:57791725-57791902
  hyper

SEQ ID NO: 425287 - DNA, 83 bp, Homo sapiens; identical to SEQ ID NO: 205625
  chr19:57901385-57901468
  hyper

SEQ ID NO: 425288 - DNA, 459 bp, Homo sapiens; identical to SEQ ID NO: 294432
  chr19:57988571-57989030
  hyper

SEQ ID NO: 425289 - DNA, 223 bp, Homo sapiens; identical to SEQ ID NO: 205635
  chr19:58175983-58176206
  hyper

SEQ ID NO: 425290 - DNA, 77 bp, Homo sapiens; identical to SEQ ID NO: 205642
  chr19:58331143-58331220
  hyper

SEQ ID NO: 425291 - DNA, 115 bp, Homo sapiens; identical to SEQ ID NO: 294451
  chr19:58361596-58361711
  hyper

SEQ ID NO: 425292 - DNA, 34 bp, Homo sapiens; identical to SEQ ID NO: 240904
  chr19:58789724-58789758
  hyper

SEQ ID NO: 425293 - DNA, 1174 bp, Homo sapiens; identical to SEQ ID NO: 240905
  chr19:58789818-58790992
  hyper

SEQ ID NO: 425294 - DNA, 89 bp, Homo sapiens; identical to SEQ ID NO: 240906
  chr19:58838428-58838517
  hyper

SEQ ID NO: 425295 - DNA, 197 bp, Homo sapiens; identical to SEQ ID NO: 205648
  chr19:58858560-58858757
  hyper

SEQ ID NO: 425296 - DNA, 332 bp, Homo sapiens; identical to SEQ ID NO: 294464
  chr19:58874184-58874516
  hyper

SEQ ID NO: 425297 - DNA, 113 bp, Homo sapiens; identical to SEQ ID NO: 240908
  chr19:58892481-58892594
  hyper

SEQ ID NO: 425298 - DNA, 398 bp, Homo sapiens; identical to SEQ ID NO: 240909
  chr19:58898386-58898784
  hyper

SEQ ID NO: 425299 - DNA, 379 bp, Homo sapiens; identical to SEQ ID NO: 56778
  chr19:58919475-58919854
  hyper

SEQ ID NO: 425300 - DNA, 71 bp, Homo sapiens; identical to SEQ ID NO: 226057
  chr19:58920316-58920387
  hyper

SEQ ID NO: 425301 - DNA, 97 bp, Homo sapiens; identical to SEQ ID NO: 240911
  chr19:58962923-58963020
  hyper

SEQ ID NO: 425302 - DNA, 284 bp, Homo sapiens; identical to SEQ ID NO: 240912
  chr19:58987608-58987892
  hyper

SEQ ID NO: 425303 - DNA, 206 bp, Homo sapiens; identical to SEQ ID NO: 240914
  chr19:59055682-59055888
  hyper

SEQ ID NO: 425304 - DNA, 308 bp, Homo sapiens; identical to SEQ ID NO: 205651
  chr19:59066308-59066616
  hyper

SEQ ID NO: 425305 - DNA, 149 bp, Homo sapiens; identical to SEQ ID NO: 240916
  chr19:59070407-59070556
  hyper

SEQ ID NO: 425306 - DNA, 64 bp, Homo sapiens; identical to SEQ ID NO: 240917
  chr19:59084981-59085045
  hyper

SEQ ID NO: 425307 - DNA, 291 bp, Homo sapiens; identical to SEQ ID NO: 294478
  chr20:327871-328162
  hyper

SEQ ID NO: 425308 - DNA, 41 bp, Homo sapiens; identical to SEQ ID NO: 205653
  chr20:362798-362839
  hyper

SEQ ID NO: 425309 - DNA, 112 bp, Homo sapiens; identical to SEQ ID NO: 240921
  chr20:388459-388571
  hyper

SEQ ID NO: 425310 - DNA, 426 bp, Homo sapiens; identical to SEQ ID NO: 240922
  chr20:524229-524655
  hyper

SEQ ID NO: 425311 - DNA, 110 bp, Homo sapiens; identical to SEQ ID NO: 294482
  chr20:656432-656542
  hyper

SEQ ID NO: 425312 - DNA, 280 bp, Homo sapiens; identical to SEQ ID NO: 294487
  chr20:865713-865993
  hyper

SEQ ID NO: 425313 - DNA, 229 bp, Homo sapiens; identical to SEQ ID NO: 240928
  chr20:1099000-1099229
  hyper

SEQ ID NO: 425314 - DNA, 286 bp, Homo sapiens; identical to SEQ ID NO: 240929
  chr20:1165689-1165975
  hyper

SEQ ID NO: 425315 - DNA, 132 bp, Homo sapiens; identical to SEQ ID NO: 240930
  chr20:1206201-1206333
  hyper

SEQ ID NO: 425316 - DNA, 104 bp, Homo sapiens; identical to SEQ ID NO: 240932
  chr20:1294287-1294391
  hyper

SEQ ID NO: 425317 - DNA, 328 bp, Homo sapiens; identical to SEQ ID NO: 240933
  chr20:1372854-1373182
  hyper

SEQ ID NO: 425318 - DNA, 291 bp, Homo sapiens; identical to SEQ ID NO: 240936
  chr20:2082271-2082562
  hyper

SEQ ID NO: 425319 - DNA, 39 bp, Homo sapiens; identical to SEQ ID NO: 205663
  chr20:2187674-2187713
  hyper

SEQ ID NO: 425320 - DNA, 487 bp, Homo sapiens; identical to SEQ ID NO: 205664
  chr20:2188036-2188523
  hyper

SEQ ID NO: 425321 - DNA, 236 bp, Homo sapiens; identical to SEQ ID NO: 294500
  chr20:2444432-2444668
  hyper

SEQ ID NO: 425322 - DNA, 88 bp, Homo sapiens; identical to SEQ ID NO: 240938
  chr20:2502471-2502559
  hyper

SEQ ID NO: 425323 - DNA, 111 bp, Homo sapiens; identical to SEQ ID NO: 205666
  chr20:2539193-2539304
  hyper

SEQ ID NO: 425324 - DNA, 240 bp, Homo sapiens; identical to SEQ ID NO: 294503
  chr20:2632928-2633168
  hyper

SEQ ID NO: 425325 - DNA, 56 bp, Homo sapiens; identical to SEQ ID NO: 132452
  chr20:2633217-2633273
  hyper

SEQ ID NO: 425326 - DNA, 113 bp, Homo sapiens; identical to SEQ ID NO: 240941
  chr20:2633591-2633704
  hyper

SEQ ID NO: 425327 - DNA, 68 bp, Homo sapiens; identical to SEQ ID NO: 294507
  chr20:2674067-2674135
  hyper

SEQ ID NO: 425328 - DNA, 165 bp, Homo sapiens; identical to SEQ ID NO: 240943
  chr20:2723863-2724028
  hyper

SEQ ID NO: 425329 - DNA, 241 bp, Homo sapiens; identical to SEQ ID NO: 240948
  chr20:2801877-2802118
  hyper

SEQ ID NO: 425330 - DNA, 152 bp, Homo sapiens; identical to SEQ ID NO: 240949
  chr20:2821253-2821405
  hyper

SEQ ID NO: 425331 - DNA, 35 bp, Homo sapiens; identical to SEQ ID NO: 240950
  chr20:2853882-2853917
  hyper

SEQ ID NO: 425332 - DNA, 66 bp, Homo sapiens; identical to SEQ ID NO: 294519
  chr20:3063059-3063125
  hyper

SEQ ID NO: 425333 - DNA, 94 bp, Homo sapiens; identical to SEQ ID NO: 294520
  chr20:3063391-3063485
  hyper

SEQ ID NO: 425334 - DNA, 99 bp, Homo sapiens; identical to SEQ ID NO: 205672
  chr20:3140538-3140637
  hyper

SEQ ID NO: 425335 - DNA, 260 bp, Homo sapiens; identical to SEQ ID NO: 205673
  chr20:3154656-3154916
  hyper

SEQ ID NO: 425336 - DNA, 48 bp, Homo sapiens; identical to SEQ ID NO: 240955
  chr20:3185344-3185392
  hyper

SEQ ID NO: 425337 - DNA, 256 bp, Homo sapiens
  chr20:3220010-3220266
  hyper
agccgggctgggctgctccccgccgcccgcagctgctgggccaaaccgagtagacccggctccttcgagcctgtgcgcgccggacccagcagacccagcgtcgcgagtttaggggctggacggggccggggagcttctgggaaaacgttcgactgcgccacgagcccaccgagctgtgcgactgaggcagaccccgggagggcttcccccgcgtccgctttaagtacgcggccggcccctgtctcctcctttcgac

SEQ ID NO: 425338 - DNA, 99 bp, Homo sapiens; identical to SEQ ID NO: 294529
  chr20:3387902-3388001
  hyper

SEQ ID NO: 425339 - DNA, 174 bp, Homo sapiens; identical to SEQ ID NO: 294530
  chr20:3388181-3388355
  hyper

SEQ ID NO: 425340 - DNA, 47 bp, Homo sapiens; identical to SEQ ID NO: 294531
  chr20:3388397-3388444
  hyper

SEQ ID NO: 425341 - DNA, 350 bp, Homo sapiens; identical to SEQ ID NO: 294532
  chr20:3388534-3388884
  hyper

SEQ ID NO: 425342 - DNA, 100 bp, Homo sapiens; identical to SEQ ID NO: 294533
  chr20:3388967-3389067
  hyper

SEQ ID NO: 425343 - DNA, 436 bp, Homo sapiens; identical to SEQ ID NO: 205679
  chr20:3451349-3451785
  hyper

SEQ ID NO: 425344 - DNA, 166 bp, Homo sapiens; identical to SEQ ID NO: 205680
  chr20:3452159-3452325
  hyper

SEQ ID NO: 425345 - DNA, 97 bp, Homo sapiens; identical to SEQ ID NO: 294537
  chr20:3759182-3759279
  hyper

SEQ ID NO: 425346 - DNA, 57 bp, Homo sapiens; identical to SEQ ID NO: 205681
  chr20:3766679-3766736
  hyper

SEQ ID NO: 425347 - DNA, 32 bp, Homo sapiens; identical to SEQ ID NO: 240967
  chr20:3767611-3767643
  hyper

SEQ ID NO: 425348 - DNA, 113 bp, Homo sapiens; identical to SEQ ID NO: 294540
  chr20:3801039-3801152
  hyper

SEQ ID NO: 425349 - DNA, 171 bp, Homo sapiens; identical to SEQ ID NO: 132507
  chr20:3801162-3801333
  hyper

SEQ ID NO: 425350 - DNA, 183 bp, Homo sapiens; identical to SEQ ID NO: 132509
  chr20:3869510-3869693
  hyper

SEQ ID NO: 425351 - DNA, 979 bp, Homo sapiens; identical to SEQ ID NO: 294543
  chr20:4129265-4130244
  hyper

SEQ ID NO: 425352 - DNA, 33 bp, Homo sapiens; identical to SEQ ID NO: 240974
  chr20:5093918-5093951
  hyper

SEQ ID NO: 425353 - DNA, 363 bp, Homo sapiens; identical to SEQ ID NO: 240975
  chr20:5100559-5100922
  hyper

SEQ ID NO: 425354 - DNA, 390 bp, Homo sapiens; identical to SEQ ID NO: 240976
  chr20:5107246-5107636
  hyper

SEQ ID NO: 425355 - DNA, 136 bp, Homo sapiens; identical to SEQ ID NO: 240981
  chr20:5591804-5591940
  hyper

SEQ ID NO: 425356 - DNA, 42 bp, Homo sapiens; identical to SEQ ID NO: 240984
  chr20:5931595-5931637
  hyper

SEQ ID NO: 425357 - DNA, 177 bp, Homo sapiens; identical to SEQ ID NO: 240985
  chr20:5986817-5986994
  hyper

SEQ ID NO: 425358 - DNA, 90 bp, Homo sapiens; identical to SEQ ID NO: 294555
  chr20:6032595-6032685
  hyper

SEQ ID NO: 425359 - DNA, 407 bp, Homo sapiens; identical to SEQ ID NO: 294556
  chr20:6103388-6103795
  hyper

SEQ ID NO: 425360 - DNA, 110 bp, Homo sapiens; identical to SEQ ID NO: 294557
  chr20:6103923-6104033
  hyper

SEQ ID NO: 425361 - DNA, 435 bp, Homo sapiens
  chr20:9049781-9050216
  hyper
gcgcgtacacactgggtctccaggcagcggccgtcgccgcatccccggcagcagctccaggcaaagtgacaggtaggaaaaggcatttcgggtcccgcccgaggatgctcccgcccgccttggccctcagggcttgtttgctttccgcgggtgcgtcccggacgcgcgcgcgcgcgcacccggatgcccagcggggaccccgtgcaggtgccgggtgccaggcgccctgtgcgcgcgggaggcaggggacccagacgccatcccccttcccctgcagtcatcgcctgctgggtttcctcagactctctccagacgttcaccctcttctgggctagaaatagctcggctcgacgtgtatatgattattttggttggaaatagttggcaccgtgcaacgcatgtaaatgtgtatgcgtgtggatcttcttgcctctt

SEQ ID NO: 425362 - DNA, 76 bp, Homo sapiens; identical to SEQ ID NO: 205692
  chr20:9488206-9488282
  hyper

SEQ ID NO: 425363 - DNA, 200 bp, Homo sapiens; identical to SEQ ID NO: 294568
  chr20:9494983-9495183
  hyper

SEQ ID NO: 425364 - DNA, 50 bp, Homo sapiens; identical to SEQ ID NO: 205696
  chr20:9495690-9495740
  hyper

SEQ ID NO: 425365 - DNA, 64 bp, Homo sapiens; identical to SEQ ID NO: 294570
  chr20:9495962-9496026
  hyper

SEQ ID NO: 425366 - DNA, 511 bp, Homo sapiens; identical to SEQ ID NO: 205698
  chr20:10015468-10015979
  hyper

SEQ ID NO: 425367 - DNA, 74 bp, Homo sapiens; identical to SEQ ID NO: 205700
  chr20:10199241-10199315
  hyper

SEQ ID NO: 425368 - DNA, 305 bp, Homo sapiens; identical to SEQ ID NO: 294578
  chr20:10199768-10200073
  hyper

SEQ ID NO: 425369 - DNA, 131 bp, Homo sapiens; identical to SEQ ID NO: 294579
  chr20:10200196-10200327
  hyper

SEQ ID NO: 425370 - DNA, 97 bp, Homo sapiens; identical to SEQ ID NO: 132561
  chr20:10200350-10200447
  hyper

SEQ ID NO: 425371 - DNA, 400 bp, Homo sapiens; identical to SEQ ID NO: 294582
  chr20:10653624-10654024
  hyper

SEQ ID NO: 425372 - DNA, 1019 bp, Homo sapiens; identical to SEQ ID NO: 205705
  chr20:10654669-10655688
  hyper

SEQ ID NO: 425373 - DNA, 1239 bp, Homo sapiens; identical to SEQ ID NO: 205706
  chr20:11871115-11872354
  hyper

SEQ ID NO: 425374 - DNA, 440 bp, Homo sapiens; identical to SEQ ID NO: 294585
  chr20:11872384-11872824
  hyper

SEQ ID NO: 425375 - DNA, 262 bp, Homo sapiens; identical to SEQ ID NO: 294586
  chr20:13200783-13201045
  hyper

SEQ ID NO: 425376 - DNA, 73 bp, Homo sapiens; identical to SEQ ID NO: 205709
  chr20:13201055-13201128
  hyper

SEQ ID NO: 425377 - DNA, 396 bp, Homo sapiens; identical to SEQ ID NO: 294588
  chr20:13201565-13201961
  hyper

SEQ ID NO: 425378 - DNA, 218 bp, Homo sapiens; identical to SEQ ID NO: 294589
  chr20:13202524-13202742
  hyper

SEQ ID NO: 425379 - DNA, 270 bp, Homo sapiens; identical to SEQ ID NO: 241010
  chr20:13619539-13619809
  hyper

SEQ ID NO: 425380 - DNA, 130 bp, Homo sapiens; identical to SEQ ID NO: 241011
  chr20:13765649-13765779
  hyper

SEQ ID NO: 425381 - DNA, 506 bp, Homo sapiens; identical to SEQ ID NO: 241013
  chr20:16553758-16554264
  hyper

SEQ ID NO: 425382 - DNA, 64 bp, Homo sapiens; identical to SEQ ID NO: 294594
  chr20:17208123-17208187
  hyper

SEQ ID NO: 425383 - DNA, 53 bp, Homo sapiens; identical to SEQ ID NO: 205713
  chr20:17208803-17208856
  hyper

SEQ ID NO: 425384 - DNA, 478 bp, Homo sapiens; identical to SEQ ID NO: 294597
  chr20:17549573-17550051
  hyper

SEQ ID NO: 425385 - DNA, 187 bp, Homo sapiens; identical to SEQ ID NO: 205715
  chr20:17661564-17661751
  hyper

SEQ ID NO: 425386 - DNA, 295 bp, Homo sapiens; identical to SEQ ID NO: 241019
  chr20:17949251-17949546
  hyper

SEQ ID NO: 425387 - DNA, 134 bp, Homo sapiens; identical to SEQ ID NO: 241020
  chr20:17976773-17976907
  hyper

SEQ ID NO: 425388 - DNA, 711 bp, Homo sapiens; identical to SEQ ID NO: 294602
  chr20:18037456-18038167
  hyper

SEQ ID NO: 425389 - DNA, 129 bp, Homo sapiens; identical to SEQ ID NO: 205718
  chr20:18038209-18038338
  hyper

SEQ ID NO: 425390 - DNA, 138 bp, Homo sapiens; identical to SEQ ID NO: 294604
  chr20:18038356-18038494
  hyper

SEQ ID NO: 425391 - DNA, 39 bp, Homo sapiens; identical to SEQ ID NO: 294605
  chr20:18038603-18038642
  hyper

SEQ ID NO: 425392 - DNA, 44 bp, Homo sapiens; identical to SEQ ID NO: 241022
  chr20:18038850-18038894
  hyper

SEQ ID NO: 425393 - DNA, 167 bp, Homo sapiens; identical to SEQ ID NO: 241023
  chr20:18039164-18039331
  hyper

SEQ ID NO: 425394 - DNA, 105 bp, Homo sapiens; identical to SEQ ID NO: 241024
  chr20:18118330-18118435
  hyper

SEQ ID NO: 425395 - DNA, 35 bp, Homo sapiens; identical to SEQ ID NO: 241025
  chr20:18118692-18118727
  hyper

SEQ ID NO: 425396 - DNA, 295 bp, Homo sapiens; identical to SEQ ID NO: 241026
  chr20:18268964-18269259
  hyper

SEQ ID NO: 425397 - DNA, 91 bp, Homo sapiens; identical to SEQ ID NO: 241027
  chr20:18447681-18447772
  hyper

SEQ ID NO: 425398 - DNA, 60 bp, Homo sapiens; identical to SEQ ID NO: 241028
  chr20:18448016-18448076
  hyper

SEQ ID NO: 425399 - DNA, 157 bp, Homo sapiens; identical to SEQ ID NO: 241029
  chr20:18477825-18477982
  hyper

SEQ ID NO: 425400 - DNA, 83 bp, Homo sapiens; identical to SEQ ID NO: 241030
  chr20:18488298-18488381
  hyper

SEQ ID NO: 425401 - DNA, 107 bp, Homo sapiens; identical to SEQ ID NO: 241031
  chr20:18547799-18547906
  hyper

SEQ ID NO: 425402 - DNA, 180 bp, Homo sapiens; identical to SEQ ID NO: 205724
  chr20:19738432-19738612
  hyper

SEQ ID NO: 425403 - DNA, 188 bp, Homo sapiens; identical to SEQ ID NO: 294625
  chr20:19997708-19997896
  hyper

SEQ ID NO: 425404 - DNA, 40 bp, Homo sapiens; identical to SEQ ID NO: 241038
  chr20:19998405-19998445
  hyper

SEQ ID NO: 425405 - DNA, 188 bp, Homo sapiens; identical to SEQ ID NO: 241039
  chr20:20033011-20033199
  hyper

SEQ ID NO: 425406 - DNA, 120 bp, Homo sapiens; identical to SEQ ID NO: 205729
  chr20:20693388-20693508
  hyper

SEQ ID NO: 425407 - DNA, 232 bp, Homo sapiens; identical to SEQ ID NO: 241050
  chr20:21106749-21106981
  hyper

SEQ ID NO: 425408 - DNA, 109 bp, Homo sapiens; identical to SEQ ID NO: 294637
  chr20:21489776-21489885
  hyper

SEQ ID NO: 425409 - DNA, 407 bp, Homo sapiens; identical to SEQ ID NO: 294638
  chr20:21495255-21495662
  hyper

SEQ ID NO: 425410 - DNA, 91 bp, Homo sapiens; identical to SEQ ID NO: 294639
  chr20:21499015-21499106
  hyper

SEQ ID NO: 425411 - DNA, 92 bp, Homo sapiens; identical to SEQ ID NO: 294640
  chr20:21499132-21499224
  hyper

SEQ ID NO: 425412 - DNA, 202 bp, Homo sapiens; identical to SEQ ID NO: 205733
  chr20:21501158-21501360
  hyper

SEQ ID NO: 425413 - DNA, 347 bp, Homo sapiens; identical to SEQ ID NO: 294642
  chr20:21681908-21682255
  hyper

SEQ ID NO: 425414 - DNA, 56 bp, Homo sapiens; identical to SEQ ID NO: 294643
  chr20:21683255-21683311
  hyper

SEQ ID NO: 425415 - DNA, 75 bp, Homo sapiens; identical to SEQ ID NO: 294644
  chr20:21685758-21685833
  hyper

SEQ ID NO: 425416 - DNA, 42 bp, Homo sapiens; identical to SEQ ID NO: 241075
  chr20:21689629-21689671
  hyper

SEQ ID NO: 425417 - DNA, 205 bp, Homo sapiens; identical to SEQ ID NO: 294647
  chr20:21693262-21693467
  hyper

SEQ ID NO: 425418 - DNA, 96 bp, Homo sapiens; identical to SEQ ID NO: 294648
  chr20:21693512-21693608
  hyper

SEQ ID NO: 425419 - DNA, 239 bp, Homo sapiens; identical to SEQ ID NO: 205737
  chr20:21694603-21694842
  hyper

SEQ ID NO: 425420 - DNA, 238 bp, Homo sapiens; identical to SEQ ID NO: 294650
  chr20:22557158-22557396
  hyper

SEQ ID NO: 425421 - DNA, 31 bp, Homo sapiens; identical to SEQ ID NO: 400882
  chr20:22558923-22558954
  hyper

SEQ ID NO: 425422 - DNA, 49 bp, Homo sapiens; identical to SEQ ID NO: 400883
  chr20:22559924-22559973
  hyper

SEQ ID NO: 425423 - DNA, 64 bp, Homo sapiens; identical to SEQ ID NO: 294655
  chr20:22560142-22560206
  hyper

SEQ ID NO: 425424 - DNA, 116 bp, Homo sapiens; identical to SEQ ID NO: 294656
  chr20:22562393-22562509
  hyper

SEQ ID NO: 425425 - DNA, 125 bp, Homo sapiens
  chr20:22563238-22563363
  hyper
cggatggagttctgccagcgctgctggttctgccggtagaaggggaagaggtccatgatccactggtagatctcgctcagcgtcagcatcttgttggggctctgctggatggccatggtgatgag

SEQ ID NO: 425426 - DNA, 46 bp, Homo sapiens
  chr20:22565247-22565293
  hyper
gggggctagtgggggggtggggaggaggaggaggaaggaggaggag

SEQ ID NO: 425427 - DNA, 326 bp, Homo sapiens; identical to SEQ ID NO: 241089
  chr20:23331168-23331494
  hyper

SEQ ID NO: 425428 - DNA, 109 bp, Homo sapiens; identical to SEQ ID NO: 205752
  chr20:25129521-25129630
  hyper

SEQ ID NO: 425429 - DNA, 317 bp, Homo sapiens; identical to SEQ ID NO: 241096
  chr20:25176135-25176452
  hyper

SEQ ID NO: 425430 - DNA, 83 bp, Homo sapiens; identical to SEQ ID NO: 205753
  chr20:25228118-25228201
  hyper

SEQ ID NO: 425431 - DNA, 40 bp, Homo sapiens; identical to SEQ ID NO: 241098
  chr20:25228555-25228595
  hyper

SEQ ID NO: 425432 - DNA, 48 bp, Homo sapiens; identical to SEQ ID NO: 241100
  chr20:25604726-25604774
  hyper

SEQ ID NO: 425433 - DNA, 101 bp, Homo sapiens; identical to SEQ ID NO: 294679
  chr20:25677482-25677583
  hyper

SEQ ID NO: 425434 - DNA, 113 bp, Homo sapiens; identical to SEQ ID NO: 294680
  chr20:26188699-26188812
  hyper

SEQ ID NO: 425435 - DNA, 60 bp, Homo sapiens; identical to SEQ ID NO: 294681
  chr20:26189532-26189592
  hyper

SEQ ID NO: 425436 - DNA, 126 bp, Homo sapiens; identical to SEQ ID NO: 294682
  chr20:26190361-26190487
  hyper

SEQ ID NO: 425437 - DNA, 87 bp, Homo sapiens; identical to SEQ ID NO: 294683
  chr20:30062956-30063043
  hyper

SEQ ID NO: 425438 - DNA, 247 bp, Homo sapiens; identical to SEQ ID NO: 241107
  chr20:30310626-30310873
  hyper

SEQ ID NO: 425439 - DNA, 447 bp, Homo sapiens; identical to SEQ ID NO: 241108
  chr20:30448991-30449438
  hyper

SEQ ID NO: 425440 - DNA, 304 bp, Homo sapiens; identical to SEQ ID NO: 205758
  chr20:30457820-30458124
  hyper

SEQ ID NO: 425441 - DNA, 54 bp, Homo sapiens; identical to SEQ ID NO: 205759
  chr20:30458610-30458664
  hyper

SEQ ID NO: 425442 - DNA, 70 bp, Homo sapiens; identical to SEQ ID NO: 12901
  chr20:30458690-30458760
  hyper

SEQ ID NO: 425443 - DNA, 43 bp, Homo sapiens; identical to SEQ ID NO: 294694
  chr20:30583025-30583068
  hyper

SEQ ID NO: 425444 - DNA, 298 bp, Homo sapiens; identical to SEQ ID NO: 241113
  chr20:30697227-30697525
  hyper

SEQ ID NO: 425445 - DNA, 98 bp, Homo sapiens; identical to SEQ ID NO: 241115
  chr20:30795269-30795367
  hyper

SEQ ID NO: 425446 - DNA, 83 bp, Homo sapiens; identical to SEQ ID NO: 205766
  chr20:30954186-30954269
  hyper

SEQ ID NO: 425447 - DNA, 109 bp, Homo sapiens; identical to SEQ ID NO: 205767
  chr20:30956817-30956926
  hyper

SEQ ID NO: 425448 - DNA, 386 bp, Homo sapiens; identical to SEQ ID NO: 205768
  chr20:30959966-30960352
  hyper

SEQ ID NO: 425449 - DNA, 295 bp, Homo sapiens; identical to SEQ ID NO: 205769
  chr20:31015930-31016225
  hyper

SEQ ID NO: 425450 - DNA, 104 bp, Homo sapiens; identical to SEQ ID NO: 205770
  chr20:31017140-31017244
  hyper

SEQ ID NO: 425451 - DNA, 153 bp, Homo sapiens; identical to SEQ ID NO: 205771
  chr20:31017703-31017856
  hyper

SEQ ID NO: 425452 - DNA, 359 bp, Homo sapiens; identical to SEQ ID NO: 205772
  chr20:31019123-31019482
  hyper

SEQ ID NO: 425453 - DNA, 106 bp, Homo sapiens; identical to SEQ ID NO: 205773
  chr20:31020682-31020788
  hyper

SEQ ID NO: 425454 - DNA, 634 bp, Homo sapiens; identical to SEQ ID NO: 205774
  chr20:31021086-31021720
  hyper

SEQ ID NO: 425455 - DNA, 4888 bp, Homo sapiens; identical to SEQ ID NO: 205775
  chr20:31022234-31027122
  hyper

SEQ ID NO: 425456 - DNA, 116 bp, Homo sapiens; identical to SEQ ID NO: 241116
  chr20:31072615-31072731
  hyper

SEQ ID NO: 425457 - DNA, 74 bp, Homo sapiens; identical to SEQ ID NO: 205776
  chr20:31172328-31172402
  hyper

SEQ ID NO: 425458 - DNA, 71 bp, Homo sapiens; identical to SEQ ID NO: 205777
  chr20:31172882-31172953
  hyper

SEQ ID NO: 425459 - DNA, 86 bp, Homo sapiens; identical to SEQ ID NO: 241119
  chr20:31173451-31173537
  hyper

SEQ ID NO: 425460 - DNA, 588 bp, Homo sapiens; identical to SEQ ID NO: 294717
  chr20:31350975-31351563
  hyper

SEQ ID NO: 425461 - DNA, 41 bp, Homo sapiens; identical to SEQ ID NO: 205779
  chr20:31797761-31797802
  hyper

SEQ ID NO: 425462 - DNA, 179 bp, Homo sapiens; identical to SEQ ID NO: 205780
  chr20:32031787-32031966
  hyper

SEQ ID NO: 425463 - DNA, 349 bp, Homo sapiens; identical to SEQ ID NO: 241122
  chr20:32262417-32262766
  hyper

SEQ ID NO: 425464 - DNA, 240 bp, Homo sapiens; identical to SEQ ID NO: 241124
  chr20:32398868-32399108
  hyper

SEQ ID NO: 425465 - DNA, 104 bp, Homo sapiens; identical to SEQ ID NO: 205782
  chr20:32700168-32700272
  hyper

SEQ ID NO: 425466 - DNA, 88 bp, Homo sapiens; identical to SEQ ID NO: 241126
  chr20:32891251-32891339
  hyper

SEQ ID NO: 425467 - DNA, 633 bp, Homo sapiens; identical to SEQ ID NO: 241128
  chr20:33103991-33104624
  hyper

SEQ ID NO: 425468 - DNA, 33 bp, Homo sapiens; identical to SEQ ID NO: 241129
  chr20:33292057-33292090
  hyper

SEQ ID NO: 425469 - DNA, 68 bp, Homo sapiens; identical to SEQ ID NO: 205786
  chr20:33297165-33297233
  hyper

SEQ ID NO: 425470 - DNA, 398 bp, Homo sapiens; identical to SEQ ID NO: 241131
  chr20:33460460-33460858
  hyper

SEQ ID NO: 425471 - DNA, 483 bp, Homo sapiens; identical to SEQ ID NO: 205787
  chr20:33464343-33464826
  hyper

SEQ ID NO: 425472 - DNA, 131 bp, Homo sapiens; identical to SEQ ID NO: 205788
  chr20:33680634-33680765
  hyper

SEQ ID NO: 425473 - DNA, 66 bp, Homo sapiens; identical to SEQ ID NO: 241133
  chr20:33999825-33999891
  hyper

SEQ ID NO: 425474 - DNA, 300 bp, Homo sapiens; identical to SEQ ID NO: 241134
  chr20:34129687-34129987
  hyper

SEQ ID NO: 425475 - DNA, 495 bp, Homo sapiens; identical to SEQ ID NO: 241136
  chr20:34252602-34253097
  hyper

SEQ ID NO: 425476 - DNA, 137 bp, Homo sapiens; identical to SEQ ID NO: 241137
  chr20:34329369-34329506
  hyper

SEQ ID NO: 425477 - DNA, 256 bp, Homo sapiens; identical to SEQ ID NO: 241138
  chr20:34330350-34330606
  hyper

SEQ ID NO: 425478 - DNA, 469 bp, Homo sapiens; identical to SEQ ID NO: 205791
  chr20:34359742-34360211
  hyper

SEQ ID NO: 425479 - DNA, 237 bp, Homo sapiens; identical to SEQ ID NO: 205792
  chr20:34680127-34680364
  hyper

SEQ ID NO: 425480 - DNA, 987 bp, Homo sapiens; identical to SEQ ID NO: 294742
  chr20:34680573-34681560
  hyper

SEQ ID NO: 425481 - DNA, 210 bp, Homo sapiens; identical to SEQ ID NO: 241142
  chr20:34824292-34824502
  hyper

SEQ ID NO: 425482 - DNA, 34 bp, Homo sapiens; identical to SEQ ID NO: 241144
  chr20:35234212-35234246
  hyper

SEQ ID NO: 425483 - DNA, 101 bp, Homo sapiens; identical to SEQ ID NO: 241145
  chr20:35374567-35374668
  hyper

SEQ ID NO: 425484 - DNA, 81 bp, Homo sapiens; identical to SEQ ID NO: 241146
  chr20:35402109-35402190
  hyper

SEQ ID NO: 425485 - DNA, 215 bp, Homo sapiens; identical to SEQ ID NO: 294750
  chr20:35491515-35491730
  hyper

SEQ ID NO: 425486 - DNA, 183 bp, Homo sapiens; identical to SEQ ID NO: 241147
  chr20:35492269-35492452
  hyper

SEQ ID NO: 425487 - DNA, 138 bp, Homo sapiens; identical to SEQ ID NO: 205797
  chr20:35579324-35579462
  hyper

SEQ ID NO: 425488 - DNA, 251 bp, Homo sapiens; identical to SEQ ID NO: 241149
  chr20:35724155-35724406
  hyper

SEQ ID NO: 425489 - DNA, 451 bp, Homo sapiens; identical to SEQ ID NO: 241151
  chr20:36156391-36156842
  hyper

SEQ ID NO: 425490 - DNA, 147 bp, Homo sapiens; identical to SEQ ID NO: 241152
  chr20:36529851-36529998
  hyper

SEQ ID NO: 425491 - DNA, 157 bp, Homo sapiens; identical to SEQ ID NO: 294756
  chr20:36530202-36530359
  hyper

SEQ ID NO: 425492 - DNA, 244 bp, Homo sapiens; identical to SEQ ID NO: 241154
  chr20:36531041-36531285
  hyper

SEQ ID NO: 425493 - DNA, 293 bp, Homo sapiens; identical to SEQ ID NO: 294758
  chr20:36774950-36775243
  hyper

SEQ ID NO: 425494 - DNA, 35 bp, Homo sapiens; identical to SEQ ID NO: 241157
  chr20:36793594-36793629
  hyper

SEQ ID NO: 425495 - DNA, 117 bp, Homo sapiens; identical to SEQ ID NO: 241160
  chr20:37063992-37064109
  hyper

SEQ ID NO: 425496 - DNA, 115 bp, Homo sapiens; identical to SEQ ID NO: 205800
  chr20:37075186-37075301
  hyper

SEQ ID NO: 425497 - DNA, 126 bp, Homo sapiens; identical to SEQ ID NO: 241162
  chr20:37101359-37101485
  hyper

SEQ ID NO: 425498 - DNA, 145 bp, Homo sapiens; identical to SEQ ID NO: 241177
  chr20:39657943-39658088
  hyper

SEQ ID NO: 425499 - DNA, 475 bp, Homo sapiens; identical to SEQ ID NO: 241178
  chr20:39765949-39766424
  hyper

SEQ ID NO: 425500 - DNA, 200 bp, Homo sapiens; identical to SEQ ID NO: 241179
  chr20:39945802-39946002
  hyper

SEQ ID NO: 425501 - DNA, 170 bp, Homo sapiens; identical to SEQ ID NO: 205809
  chr20:39968625-39968795
  hyper

SEQ ID NO: 425502 - DNA, 35 bp, Homo sapiens; identical to SEQ ID NO: 241181
  chr20:39969365-39969400
  hyper

SEQ ID NO: 425503 - DNA, 204 bp, Homo sapiens; identical to SEQ ID NO: 205810
  chr20:40247056-40247260
  hyper

SEQ ID NO: 425504 - DNA, 228 bp, Homo sapiens; identical to SEQ ID NO: 241184
  chr20:42086252-42086480
  hyper

SEQ ID NO: 425505 - DNA, 159 bp, Homo sapiens; identical to SEQ ID NO: 241186
  chr20:42219373-42219532
  hyper

SEQ ID NO: 425506 - DNA, 163 bp, Homo sapiens; identical to SEQ ID NO: 205812
  chr20:42296100-42296263
  hyper

SEQ ID NO: 425507 - DNA, 56 bp, Homo sapiens; identical to SEQ ID NO: 241189
  chr20:42588193-42588249
  hyper

SEQ ID NO: 425508 - DNA, 395 bp, Homo sapiens; identical to SEQ ID NO: 241190
  chr20:42839351-42839746
  hyper

SEQ ID NO: 425509 - DNA, 80 bp, Homo sapiens; identical to SEQ ID NO: 241194
  chr20:43150903-43150983
  hyper

SEQ ID NO: 425510 - DNA, 292 bp, Homo sapiens; identical to SEQ ID NO: 241195
  chr20:43271169-43271461
  hyper

SEQ ID NO: 425511 - DNA, 48 bp, Homo sapiens; identical to SEQ ID NO: 241196
  chr20:43280693-43280741
  hyper

SEQ ID NO: 425512 - DNA, 46 bp, Homo sapiens; identical to SEQ ID NO: 241199
  chr20:43514296-43514342
  hyper

SEQ ID NO: 425513 - DNA, 119 bp, Homo sapiens; identical to SEQ ID NO: 241200
  chr20:43538513-43538632
  hyper

SEQ ID NO: 425514 - DNA, 81 bp, Homo sapiens; identical to SEQ ID NO: 241202
  chr20:43594829-43594910
  hyper

SEQ ID NO: 425515 - DNA, 227 bp, Homo sapiens; identical to SEQ ID NO: 294798
  chr20:43726868-43727095
  hyper

SEQ ID NO: 425516 - DNA, 196 bp, Homo sapiens; identical to SEQ ID NO: 241205
  chr20:43991507-43991703
  hyper

SEQ ID NO: 425517 - DNA, 287 bp, Homo sapiens; identical to SEQ ID NO: 205818
  chr20:44034866-44035153
  hyper

SEQ ID NO: 425518 - DNA, 318 bp, Homo sapiens; identical to SEQ ID NO: 241207
  chr20:44044572-44044890
  hyper

SEQ ID NO: 425519 - DNA, 87 bp, Homo sapiens; identical to SEQ ID NO: 241211
  chr20:44441534-44441621
  hyper

SEQ ID NO: 425520 - DNA, 159 bp, Homo sapiens; identical to SEQ ID NO: 241213
  chr20:44462158-44462317
  hyper

SEQ ID NO: 425521 - DNA, 73 bp, Homo sapiens; identical to SEQ ID NO: 226157
  chr20:44462767-44462840
  hyper

SEQ ID NO: 425522 - DNA, 308 bp, Homo sapiens; identical to SEQ ID NO: 241214
  chr20:44509708-44510016
  hyper

SEQ ID NO: 425523 - DNA, 77 bp, Homo sapiens; identical to SEQ ID NO: 294810
  chr20:44519218-44519295
  hyper

SEQ ID NO: 425524 - DNA, 71 bp, Homo sapiens; identical to SEQ ID NO: 294811
  chr20:44540034-44540105
  hyper

SEQ ID NO: 425525 - DNA, 52 bp, Homo sapiens; identical to SEQ ID NO: 294812
  chr20:44540153-44540205
  hyper

SEQ ID NO: 425526 - DNA, 149 bp, Homo sapiens; identical to SEQ ID NO: 241216
  chr20:44600903-44601052
  hyper

SEQ ID NO: 425527 - DNA, 45 bp, Homo sapiens; identical to SEQ ID NO: 205820
  chr20:44639093-44639138
  hyper

SEQ ID NO: 425528 - DNA, 189 bp, Homo sapiens; identical to SEQ ID NO: 241220
  chr20:44650688-44650877
  hyper

SEQ ID NO: 425529 - DNA, 169 bp, Homo sapiens; identical to SEQ ID NO: 241221
  chr20:44651084-44651253
  hyper

SEQ ID NO: 425530 - DNA, 153 bp, Homo sapiens; identical to SEQ ID NO: 294819
  chr20:44658973-44659126
  hyper

SEQ ID NO: 425531 - DNA, 268 bp, Homo sapiens; identical to SEQ ID NO: 294820
  chr20:44660337-44660605
  hyper

SEQ ID NO: 425532 - DNA, 191 bp, Homo sapiens; identical to SEQ ID NO: 205823
  chr20:44669700-44669891
  hyper

SEQ ID NO: 425533 - DNA, 59 bp, Homo sapiens; identical to SEQ ID NO: 294822
  chr20:44686806-44686865
  hyper

SEQ ID NO: 425534 - DNA, 319 bp, Homo sapiens; identical to SEQ ID NO: 241228
  chr20:44718496-44718815
  hyper

SEQ ID NO: 425535 - DNA, 166 bp, Homo sapiens; identical to SEQ ID NO: 205826
  chr20:44935840-44936006
  hyper

SEQ ID NO: 425536 - DNA, 71 bp, Homo sapiens; identical to SEQ ID NO: 241236
  chr20:45035361-45035432
  hyper

SEQ ID NO: 425537 - DNA, 79 bp, Homo sapiens; identical to SEQ ID NO: 205828
  chr20:45142272-45142351
  hyper

SEQ ID NO: 425538 - DNA, 142 bp, Homo sapiens; identical to SEQ ID NO: 241239
  chr20:45440169-45440311
  hyper

SEQ ID NO: 425539 - DNA, 51 bp, Homo sapiens; identical to SEQ ID NO: 294830
  chr20:45523120-45523171
  hyper

SEQ ID NO: 425540 - DNA, 106 bp, Homo sapiens; identical to SEQ ID NO: 294831
  chr20:45524629-45524735
  hyper

SEQ ID NO: 425541 - DNA, 149 bp, Homo sapiens; identical to SEQ ID NO: 205829
  chr20:45985481-45985630
  hyper

SEQ ID NO: 425542 - DNA, 473 bp, Homo sapiens; identical to SEQ ID NO: 241245
  chr20:46130570-46131043
  hyper

SEQ ID NO: 425543 - DNA, 47 bp, Homo sapiens; identical to SEQ ID NO: 294835
  chr20:46413279-46413326
  hyper

SEQ ID NO: 425544 - DNA, 480 bp, Homo sapiens; identical to SEQ ID NO: 294836
  chr20:46413619-46414099
  hyper

SEQ ID NO: 425545 - DNA, 230 bp, Homo sapiens; identical to SEQ ID NO: 294837
  chr20:46414405-46414635
  hyper

SEQ ID NO: 425546 - DNA, 223 bp, Homo sapiens; identical to SEQ ID NO: 205831
  chr20:46414914-46415137
  hyper

SEQ ID NO: 425547 - DNA, 74 bp, Homo sapiens; identical to SEQ ID NO: 205832
  chr20:46415520-46415594
  hyper

SEQ ID NO: 425548 - DNA, 165 bp, Homo sapiens; identical to SEQ ID NO: 241248
  chr20:47662583-47662748
  hyper

SEQ ID NO: 425549 - DNA, 31 bp, Homo sapiens; identical to SEQ ID NO: 241249
  chr20:47805122-47805153
  hyper

SEQ ID NO: 425550 - DNA, 353 bp, Homo sapiens; identical to SEQ ID NO: 241250
  chr20:47835790-47836143
  hyper

SEQ ID NO: 425551 - DNA, 424 bp, Homo sapiens; identical to SEQ ID NO: 241251
  chr20:47895001-47895425
  hyper

SEQ ID NO: 425552 - DNA, 97 bp, Homo sapiens; identical to SEQ ID NO: 226172
  chr20:48194980-48195077
  hyper

SEQ ID NO: 425553 - DNA, 164 bp, Homo sapiens; identical to SEQ ID NO: 205838
  chr20:48330532-48330696
  hyper

SEQ ID NO: 425554 - DNA, 131 bp, Homo sapiens; identical to SEQ ID NO: 205840
  chr20:48729833-48729964
  hyper

SEQ ID NO: 425555 - DNA, 166 bp, Homo sapiens; identical to SEQ ID NO: 294856
  chr20:49410874-49411040
  hyper

SEQ ID NO: 425556 - DNA, 139 bp, Homo sapiens; identical to SEQ ID NO: 241261
  chr20:49575067-49575206
  hyper

SEQ ID NO: 425557 - DNA, 67 bp, Homo sapiens; identical to SEQ ID NO: 294858
  chr20:49575842-49575909
  hyper

SEQ ID NO: 425558 - DNA, 143 bp, Homo sapiens; identical to SEQ ID NO: 294859
  chr20:49575939-49576082
  hyper

SEQ ID NO: 425559 - DNA, 382 bp, Homo sapiens; identical to SEQ ID NO: 241268
  chr20:50179176-50179558
  hyper

SEQ ID NO: 425560 - DNA, 126 bp, Homo sapiens; identical to SEQ ID NO: 205851
  chr20:50417183-50417309
  hyper

SEQ ID NO: 425561 - DNA, 265 bp, Homo sapiens; identical to SEQ ID NO: 205852
  chr20:50418076-50418341
  hyper

SEQ ID NO: 425562 - DNA, 119 bp, Homo sapiens; identical to SEQ ID NO: 241275
  chr20:50808101-50808220
  hyper

SEQ ID NO: 425563 - DNA, 98 bp, Homo sapiens; identical to SEQ ID NO: 241276
  chr20:50808683-50808781
  hyper

SEQ ID NO: 425564 - DNA, 266 bp, Homo sapiens; identical to SEQ ID NO: 241277
  chr20:51588707-51588973
  hyper

SEQ ID NO: 425565 - DNA, 33 bp, Homo sapiens
  chr20:51589093-51589126
  hyper
agtgaattccagattttctgtctttccaaaacc

SEQ ID NO: 425566 - DNA, 166 bp, Homo sapiens; identical to SEQ ID NO: 205855
  chr20:52209197-52209363
  hyper

SEQ ID NO: 425567 - DNA, 402 bp, Homo sapiens; identical to SEQ ID NO: 294878
  chr20:52790210-52790612
  hyper

SEQ ID NO: 425568 - DNA, 32 bp, Homo sapiens
  chr20:54578942-54578974
  hyper
gaagtaaatgatgcgcgtcttgttgctcatct

SEQ ID NO: 425569 - DNA, 151 bp, Homo sapiens; identical to SEQ ID NO: 57368
  chr20:54579139-54579290
  hyper

SEQ ID NO: 425570 - DNA, 118 bp, Homo sapiens; identical to SEQ ID NO: 294882
  chr20:54579755-54579873
  hyper

SEQ ID NO: 425571 - DNA, 393 bp, Homo sapiens; identical to SEQ ID NO: 205861
  chr20:54934126-54934519
  hyper

SEQ ID NO: 425572 - DNA, 871 bp, Homo sapiens; identical to SEQ ID NO: 241287
  chr20:54966815-54967686
  hyper

SEQ ID NO: 425573 - DNA, 124 bp, Homo sapiens; identical to SEQ ID NO: 241291
  chr20:55503342-55503466
  hyper

SEQ ID NO: 425574 - DNA, 586 bp, Homo sapiens; identical to SEQ ID NO: 294896
  chr20:55840279-55840865
  hyper

SEQ ID NO: 425575 - DNA, 457 bp, Homo sapiens; identical to SEQ ID NO: 241297
  chr20:55926142-55926599
  hyper

SEQ ID NO: 425576 - DNA, 99 bp, Homo sapiens; identical to SEQ ID NO: 294900
  chr20:55965047-55965146
  hyper

SEQ ID NO: 425577 - DNA, 145 bp, Homo sapiens; identical to SEQ ID NO: 205870
  chr20:55966824-55966969
  hyper

SEQ ID NO: 425578 - DNA, 847 bp, Homo sapiens; identical to SEQ ID NO: 241301
  chr20:56284038-56284885
  hyper

SEQ ID NO: 425579 - DNA, 545 bp, Homo sapiens; identical to SEQ ID NO: 241302
  chr20:56285253-56285798
  hyper

SEQ ID NO: 425580 - DNA, 224 bp, Homo sapiens; identical to SEQ ID NO: 226188
  chr20:56811736-56811960
  hyper

SEQ ID NO: 425581 - DNA, 57 bp, Homo sapiens; identical to SEQ ID NO: 241307
  chr20:56964789-56964846
  hyper

SEQ ID NO: 425582 - DNA, 115 bp, Homo sapiens; identical to SEQ ID NO: 241308
  chr20:57056686-57056801
  hyper

SEQ ID NO: 425583 - DNA, 102 bp, Homo sapiens; identical to SEQ ID NO: 241311
  chr20:57226047-57226149
  hyper

SEQ ID NO: 425584 - DNA, 208 bp, Homo sapiens; identical to SEQ ID NO: 226190
  chr20:57414593-57414801
  hyper

SEQ ID NO: 425585 - DNA, 158 bp, Homo sapiens; identical to SEQ ID NO: 205875
  chr20:57415180-57415338
  hyper

SEQ ID NO: 425586 - DNA, 2076 bp, Homo sapiens; identical to SEQ ID NO: 205877
  chr20:57428311-57430387
  hyper

SEQ ID NO: 425587 - DNA, 86 bp, Homo sapiens; identical to SEQ ID NO: 241313
  chr20:57465844-57465930
  hyper

SEQ ID NO: 425588 - DNA, 100 bp, Homo sapiens; identical to SEQ ID NO: 205878
  chr20:57466877-57466977
  hyper

SEQ ID NO: 425589 - DNA, 33 bp, Homo sapiens; identical to SEQ ID NO: 205879
  chr20:57470653-57470686
  hyper

SEQ ID NO: 425590 - DNA, 251 bp, Homo sapiens; identical to SEQ ID NO: 205880
  chr20:57478608-57478859
  hyper

SEQ ID NO: 425591 - DNA, 397 bp, Homo sapiens; identical to SEQ ID NO: 205881
  chr20:57484445-57484842
  hyper

SEQ ID NO: 425592 - DNA, 204 bp, Homo sapiens; identical to SEQ ID NO: 205882
  chr20:57485751-57485955
  hyper

SEQ ID NO: 425593 - DNA, 63 bp, Homo sapiens; identical to SEQ ID NO: 241315
  chr20:57556038-57556101
  hyper

SEQ ID NO: 425594 - DNA, 228 bp, Homo sapiens; identical to SEQ ID NO: 241316
  chr20:57579614-57579842
  hyper

SEQ ID NO: 425595 - DNA, 674 bp, Homo sapiens; identical to SEQ ID NO: 241317
  chr20:57581889-57582563
  hyper

SEQ ID NO: 425596 - DNA, 57 bp, Homo sapiens; identical to SEQ ID NO: 205883
  chr20:57797335-57797392
  hyper

SEQ ID NO: 425597 - DNA, 135 bp, Homo sapiens; identical to SEQ ID NO: 205888
  chr20:58090760-58090895
  hyper

SEQ ID NO: 425598 - DNA, 90 bp, Homo sapiens; identical to SEQ ID NO: 294933
  chr20:58152282-58152372
  hyper

SEQ ID NO: 425599 - DNA, 75 bp, Homo sapiens; identical to SEQ ID NO: 294934
  chr20:58152388-58152463
  hyper

SEQ ID NO: 425600 - DNA, 141 bp, Homo sapiens; identical to SEQ ID NO: 241323
  chr20:58179412-58179553
  hyper

SEQ ID NO: 425601 - DNA, 104 bp, Homo sapiens; identical to SEQ ID NO: 241324
  chr20:58509170-58509274
  hyper

SEQ ID NO: 425602 - DNA, 285 bp, Homo sapiens; identical to SEQ ID NO: 294939
  chr20:58514845-58515130
  hyper

SEQ ID NO: 425603 - DNA, 38 bp, Homo sapiens; identical to SEQ ID NO: 294941
  chr20:59804278-59804316
  hyper

SEQ ID NO: 425604 - DNA, 164 bp, Homo sapiens; identical to SEQ ID NO: 205891
  chr20:60552337-60552501
  hyper

SEQ ID NO: 425605 - DNA, 52 bp, Homo sapiens; identical to SEQ ID NO: 241327
  chr20:60697691-60697743
  hyper

SEQ ID NO: 425606 - DNA, 180 bp, Homo sapiens; identical to SEQ ID NO: 205893
  chr20:60757905-60758085
  hyper

SEQ ID NO: 425607 - DNA, 93 bp, Homo sapiens; identical to SEQ ID NO: 241330
  chr20:60813107-60813200
  hyper

SEQ ID NO: 425608 - DNA, 243 bp, Homo sapiens; identical to SEQ ID NO: 205894
  chr20:60941671-60941914
  hyper

SEQ ID NO: 425609 - DNA, 511 bp, Homo sapiens; identical to SEQ ID NO: 294949
  chr20:60942652-60943163
  hyper

SEQ ID NO: 425610 - DNA, 176 bp, Homo sapiens; identical to SEQ ID NO: 294950
  chr20:60943200-60943376
  hyper

SEQ ID NO: 425611 - DNA, 122 bp, Homo sapiens; identical to SEQ ID NO: 241333
  chr20:60961539-60961661
  hyper

SEQ ID NO: 425612 - DNA, 117 bp, Homo sapiens; identical to SEQ ID NO: 133295
  chr20:60981936-60982053
  hyper

SEQ ID NO: 425613 - DNA, 61 bp, Homo sapiens; identical to SEQ ID NO: 241335
  chr20:61274240-61274301
  hyper

SEQ ID NO: 425614 - DNA, 53 bp, Homo sapiens; identical to SEQ ID NO: 241336
  chr20:61274663-61274716
  hyper

SEQ ID NO: 425615 - DNA, 61 bp, Homo sapiens; identical to SEQ ID NO: 205895
  chr20:61447609-61447670
  hyper

SEQ ID NO: 425616 - DNA, 346 bp, Homo sapiens; identical to SEQ ID NO: 294956
  chr20:61447763-61448109
  hyper

SEQ ID NO: 425617 - DNA, 639 bp, Homo sapiens; identical to SEQ ID NO: 294957
  chr20:61492377-61493016
  hyper

SEQ ID NO: 425618 - DNA, 148 bp, Homo sapiens; identical to SEQ ID NO: 241340
  chr20:61557990-61558138
  hyper

SEQ ID NO: 425619 - DNA, 113 bp, Homo sapiens; identical to SEQ ID NO: 294959
  chr20:61560172-61560285
  hyper

SEQ ID NO: 425620 - DNA, 158 bp, Homo sapiens; identical to SEQ ID NO: 241342
  chr20:61569192-61569350
  hyper

SEQ ID NO: 425621 - DNA, 103 bp, Homo sapiens; identical to SEQ ID NO: 294961
  chr20:61583882-61583985
  hyper

SEQ ID NO: 425622 - DNA, 316 bp, Homo sapiens; identical to SEQ ID NO: 294962
  chr20:61584015-61584331
  hyper

SEQ ID NO: 425623 - DNA, 93 bp, Homo sapiens; identical to SEQ ID NO: 205900
  chr20:61733167-61733260
  hyper

SEQ ID NO: 425624 - DNA, 74 bp, Homo sapiens; identical to SEQ ID NO: 205901
  chr20:61734534-61734608
  hyper

SEQ ID NO: 425625 - DNA, 249 bp, Homo sapiens; identical to SEQ ID NO: 294967
  chr20:61759828-61760077
  hyper

SEQ ID NO: 425626 - DNA, 178 bp, Homo sapiens; identical to SEQ ID NO: 205904
  chr20:61847113-61847291
  hyper

SEQ ID NO: 425627 - DNA, 92 bp, Homo sapiens; identical to SEQ ID NO: 241353
  chr20:61847573-61847665
  hyper

SEQ ID NO: 425628 - DNA, 36 bp, Homo sapiens; identical to SEQ ID NO: 205905
  chr20:61886327-61886363
  hyper

SEQ ID NO: 425629 - DNA, 294 bp, Homo sapiens; identical to SEQ ID NO: 241356
  chr20:61903935-61904229
  hyper

SEQ ID NO: 425630 - DNA, 88 bp, Homo sapiens; identical to SEQ ID NO: 294975
  chr20:62102699-62102787
  hyper

SEQ ID NO: 425631 - DNA, 42 bp, Homo sapiens; identical to SEQ ID NO: 226226
  chr20:62152087-62152129
  hyper

SEQ ID NO: 425632 - DNA, 176 bp, Homo sapiens; identical to SEQ ID NO: 294981
  chr20:62283519-62283695
  hyper

SEQ ID NO: 425633 - DNA, 651 bp, Homo sapiens; identical to SEQ ID NO: 294982
  chr20:62283836-62284487
  hyper

SEQ ID NO: 425634 - DNA, 69 bp, Homo sapiens; identical to SEQ ID NO: 294983
  chr20:62284615-62284684
  hyper

SEQ ID NO: 425635 - DNA, 209 bp, Homo sapiens; identical to SEQ ID NO: 241362
  chr20:62289788-62289997
  hyper

SEQ ID NO: 425636 - DNA, 40 bp, Homo sapiens; identical to SEQ ID NO: 241364
  chr20:62370782-62370822
  hyper

SEQ ID NO: 425637 - DNA, 419 bp, Homo sapiens; identical to SEQ ID NO: 241369
  chr20:62496242-62496661
  hyper

SEQ ID NO: 425638 - DNA, 361 bp, Homo sapiens; identical to SEQ ID NO: 226233
  chr20:62525784-62526145
  hyper

SEQ ID NO: 425639 - DNA, 238 bp, Homo sapiens; identical to SEQ ID NO: 226235
  chr20:62605238-62605476
  hyper

SEQ ID NO: 425640 - DNA, 83 bp, Homo sapiens; identical to SEQ ID NO: 241370
  chr20:62661737-62661820
  hyper

SEQ ID NO: 425641 - DNA, 79 bp, Homo sapiens; identical to SEQ ID NO: 241371
  chr20:62669743-62669822
  hyper

SEQ ID NO: 425642 - DNA, 205 bp, Homo sapiens; identical to SEQ ID NO: 294999
  chr20:62673632-62673837
  hyper

SEQ ID NO: 425643 - DNA, 322 bp, Homo sapiens; identical to SEQ ID NO: 295000
  chr20:62679894-62680216
  hyper

SEQ ID NO: 425644 - DNA, 148 bp, Homo sapiens; identical to SEQ ID NO: 205920
  chr20:62714866-62715014
  hyper

SEQ ID NO: 425645 - DNA, 102 bp, Homo sapiens; identical to SEQ ID NO: 205921
  chr20:62715069-62715171
  hyper

SEQ ID NO: 425646 - DNA, 175 bp, Homo sapiens; identical to SEQ ID NO: 205922
  chr20:62715621-62715796
  hyper

SEQ ID NO: 425647 - DNA, 115 bp, Homo sapiens; identical to SEQ ID NO: 241379
  chr21:15755438-15755553
  hyper

SEQ ID NO: 425648 - DNA, 208 bp, Homo sapiens; identical to SEQ ID NO: 295013
  chr21:16130747-16130955
  hyper

SEQ ID NO: 425649 - DNA, 254 bp, Homo sapiens; identical to SEQ ID NO: 241381
  chr21:16436424-16436678
  hyper

SEQ ID NO: 425650 - DNA, 57 bp, Homo sapiens; identical to SEQ ID NO: 241382
  chr21:16437726-16437783
  hyper

SEQ ID NO: 425651 - DNA, 268 bp, Homo sapiens; identical to SEQ ID NO: 295016
  chr21:16438267-16438535
  hyper

SEQ ID NO: 425652 - DNA, 117 bp, Homo sapiens; identical to SEQ ID NO: 241383
  chr21:17101957-17102074
  hyper

SEQ ID NO: 425653 - DNA, 83 bp, Homo sapiens; identical to SEQ ID NO: 226247
  chr21:17102748-17102831
  hyper

SEQ ID NO: 425654 - DNA, 1361 bp, Homo sapiens; identical to SEQ ID NO: 295019
  chr21:18885047-18886408
  hyper

SEQ ID NO: 425655 - DNA, 98 bp, Homo sapiens; identical to SEQ ID NO: 295021
  chr21:18985373-18985471
  hyper

SEQ ID NO: 425656 - DNA, 211 bp, Homo sapiens; identical to SEQ ID NO: 295027
  chr21:27541598-27541809
  hyper

SEQ ID NO: 425657 - DNA, 1562 bp, Homo sapiens; identical to SEQ ID NO: 205935
  chr21:27541871-27543433
  hyper

SEQ ID NO: 425658 - DNA, 160 bp, Homo sapiens; identical to SEQ ID NO: 205936
  chr21:27543508-27543668
  hyper

SEQ ID NO: 425659 - DNA, 155 bp, Homo sapiens; identical to SEQ ID NO: 205939
  chr21:28217933-28218088
  hyper

SEQ ID NO: 425660 - DNA, 183 bp, Homo sapiens; identical to SEQ ID NO: 295033
  chr21:28218369-28218552
  hyper

SEQ ID NO: 425661 - DNA, 56 bp, Homo sapiens; identical to SEQ ID NO: 295034
  chr21:28218718-28218774
  hyper

SEQ ID NO: 425662 - DNA, 83 bp, Homo sapiens; identical to SEQ ID NO: 205942
  chr21:28338753-28338836
  hyper

SEQ ID NO: 425663 - DNA, 275 bp, Homo sapiens; identical to SEQ ID NO: 295036
  chr21:28338887-28339162
  hyper

SEQ ID NO: 425664 - DNA, 350 bp, Homo sapiens; identical to SEQ ID NO: 205945
  chr21:28339501-28339851
  hyper

SEQ ID NO: 425665 - DNA, 38 bp, Homo sapiens; identical to SEQ ID NO: 241396
  chr21:30257747-30257785
  hyper

SEQ ID NO: 425666 - DNA, 115 bp, Homo sapiens; identical to SEQ ID NO: 205946
  chr21:30365298-30365413
  hyper

SEQ ID NO: 425667 - DNA, 188 bp, Homo sapiens; identical to SEQ ID NO: 205947
  chr21:30396784-30396972
  hyper

SEQ ID NO: 425668 - DNA, 132 bp, Homo sapiens; identical to SEQ ID NO: 205948
  chr21:31312181-31312313
  hyper

SEQ ID NO: 425669 - DNA, 154 bp, Homo sapiens; identical to SEQ ID NO: 205949
  chr21:31312503-31312657
  hyper

SEQ ID NO: 425670 - DNA, 89 bp, Homo sapiens; identical to SEQ ID NO: 13211
  chr21:32931770-32931859
  hyper

SEQ ID NO: 425671 - DNA, 154 bp, Homo sapiens; identical to SEQ ID NO: 205952
  chr21:32932326-32932480
  hyper

SEQ ID NO: 425672 - DNA, 111 bp, Homo sapiens; identical to SEQ ID NO: 241404
  chr21:33031744-33031855
  hyper

SEQ ID NO: 425673 - DNA, 45 bp, Homo sapiens; identical to SEQ ID NO: 205953
  chr21:33058221-33058266
  hyper

SEQ ID NO: 425674 - DNA, 49 bp, Homo sapiens; identical to SEQ ID NO: 241406
  chr21:33651478-33651527
  hyper

SEQ ID NO: 425675 - DNA, 90 bp, Homo sapiens; identical to SEQ ID NO: 205960
  chr21:33783941-33784031
  hyper

SEQ ID NO: 425676 - DNA, 832 bp, Homo sapiens; identical to SEQ ID NO: 205961
  chr21:33784080-33784912
  hyper

SEQ ID NO: 425677 - DNA, 323 bp, Homo sapiens; identical to SEQ ID NO: 205962
  chr21:33784965-33785288
  hyper

SEQ ID NO: 425678 - DNA, 49 bp, Homo sapiens; identical to SEQ ID NO: 205963
  chr21:33785325-33785374
  hyper

SEQ ID NO: 425679 - DNA, 139 bp, Homo sapiens; identical to SEQ ID NO: 241408
  chr21:33942018-33942157
  hyper

SEQ ID NO: 425680 - DNA, 110 bp, Homo sapiens; identical to SEQ ID NO: 241409
  chr21:33984700-33984810
  hyper

SEQ ID NO: 425681 - DNA, 51 bp, Homo sapiens; identical to SEQ ID NO: 205964
  chr21:34100892-34100943
  hyper

SEQ ID NO: 425682 - DNA, 191 bp, Homo sapiens; identical to SEQ ID NO: 295064
  chr21:34400540-34400731
  hyper

SEQ ID NO: 425683 - DNA, 686 bp, Homo sapiens; identical to SEQ ID NO: 295068
  chr21:34776086-34776772
  hyper

SEQ ID NO: 425684 - DNA, 41 bp, Homo sapiens; identical to SEQ ID NO: 295069
  chr21:34776997-34777038
  hyper

SEQ ID NO: 425685 - DNA, 317 bp, Homo sapiens; identical to SEQ ID NO: 241422
  chr21:34915084-34915401
  hyper

SEQ ID NO: 425686 - DNA, 318 bp, Homo sapiens; identical to SEQ ID NO: 241423
  chr21:34960938-34961256
  hyper

SEQ ID NO: 425687 - DNA, 57 bp, Homo sapiens; identical to SEQ ID NO: 205969
  chr21:35013432-35013489
  hyper

SEQ ID NO: 425688 - DNA, 412 bp, Homo sapiens; identical to SEQ ID NO: 241425
  chr21:35014227-35014639
  hyper

SEQ ID NO: 425689 - DNA, 50 bp, Homo sapiens; identical to SEQ ID NO: 205970
  chr21:35747796-35747846
  hyper

SEQ ID NO: 425690 - DNA, 247 bp, Homo sapiens; identical to SEQ ID NO: 205971
  chr21:35986732-35986979
  hyper

SEQ ID NO: 425691 - DNA, 117 bp, Homo sapiens; identical to SEQ ID NO: 241428
  chr21:35987695-35987812
  hyper

SEQ ID NO: 425692 - DNA, 1781 bp, Homo sapiens; identical to SEQ ID NO: 205972
  chr21:36160097-36161878
  hyper

SEQ ID NO: 425693 - DNA, 1943 bp, Homo sapiens
  chr21:36161932-36163875
  hyper
tgagacctatcgccaaaacaactacagtttgattttttttgaaacaattaaatactatatatgctggtaagagtctgtgaaactctaaatgaccaatccagtgagcctacaatagtgacaagccccctccacacatggctttgagagtaaaggttcaatgtaaaagattatctaatcagagcatgaggctggttttgagttggaatatcttcagttaacagaattaaactgaaaaacataattttttccttcatttttctccagcatttttgcaggtcagacatggtaacatgtgctgaaaaaaaacatttacgtttaatttgggggaaatgggctaatggtgcttttcagaaattaaatttttacatttgctgacattttatggtaatttagctgcaaaaatgtaatacggaataatatatgaaactgagttgtggagggaatcctgtcaaaaatgaaagtgaatatattctgagtttgtccgagatctgctatagctcttctctagataagaacgacctgacaacataagctgctttactctttaactcttaccaaagtgctactgcatgtgtgtaaaacaaataatcaatatatatataagaaaactcaaaaacaagttgttttaaataagtccagctgtttttgctgcctgcagccaaagatttgcctaatttgaatgcttaaatttataaaataaaaatcaaacactgttctgaagtcctgctttcaaatactcttcagagttgacctgaaatcgtttcaacgaattttaagaggtacgttaaataaccaccagatcatttggagcacacatgtgtcaaaatcagcagttagtatttatgagttgtacaacaactgcattctgaccaaatcctccaataaaaatagtgccataaaatttacagcgacattggatacctttgaattgtagccacggacagtagtgacatgaatctttcctgtcacactggtgcacaggtaaaagcccatataccccatagggtagggtctcagcctggtgaaagcaacacaaagatgttgttgagtgagcagcacaggacagggggtctcgcacaggtgggaccatgttttcccacttgtctccactgaggcacacagaggcaaattgactcctcgaggcctgcttctggtgggcccttaaattgctataatcgtaacccctaaattcattgatttggttcctatgtaaatgtggctcccctacacagtttactttggctgtgttctgttacacagcatctgtgaaattatcagatgaccttggggtgagcaaatccctgggcagaaatcaaatcctctccaaagatgtaattattggcacctgcctcaaccctctggaactagattgaccttctctgttttaaggaggaagttagatatgagacccttgttgagcctggcagaaaattccatacttctgatccttggagtgaccctcagtgtctaaaaatcctattaaaaacgttgctgcgtgagctactcacttgtttgattaacatgaaagggagtttaatgtaaacaatacttctggataaccaagcgatcacattactcattctttttttctagccttcttcaatgtgatacatttaactttggctactatcaagaacaaaagaaaatgtagtacttgatatttttcttaatataagtacatttaaataattaaaaaattatcaacacataaatgtctgaacatcaagatacataaatatctggggattccttgtgggaatacagtagttaaaaatgacccaaagctgtagctgtttctcaaaaaaacaaaacaaaacaaaaaaaaacaactacccaaaagtccaaaagaaaagttaaataaaacttaaagaaaagggaatcatatttctttccatggtcaaagcaagaaagaagcaagctcaatttatatatatttatataaa

SEQ ID NO: 425694 - DNA, 342 bp, Homo sapiens
  chr21:36164756-36165098
  hyper
gagcccatggccgacatgccgatgccgatgcccgaggtgaccggcgtcggggagtaggtgaaggcgcctggatagtgcatgcgggggtcggagatggagggcagcgcggggaactggcgcgggtcgctgaacgctgtcaggtcgggtgccgctgcagggcgggcaagagaacggagcggaagtgagtaggaggttgcggaggccacagctcttccctctgccccagggggctacccaggatgataccgcctaggaggatgggaagccacccaggatgctactgctggggaggacggggaccacccgggatgctactcccaagaggacgaggattacccagga

SEQ ID NO: 425695 - DNA, 162 bp, Homo sapiens; identical to SEQ ID NO: 205974
  chr21:36171597-36171759
  hyper

SEQ ID NO: 425696 - DNA, 67 bp, Homo sapiens; identical to SEQ ID NO: 401019
  chr21:36206695-36206762
  hyper

SEQ ID NO: 425697 - DNA, 105 bp, Homo sapiens; identical to SEQ ID NO: 205976
  chr21:36231770-36231875
  hyper

SEQ ID NO: 425698 - DNA, 179 bp, Homo sapiens; identical to SEQ ID NO: 205977
  chr21:36252845-36253024
  hyper

SEQ ID NO: 425699 - DNA, 266 bp, Homo sapiens; identical to SEQ ID NO: 205978
  chr21:36259127-36259393
  hyper

SEQ ID NO: 425700 - DNA, 169 bp, Homo sapiens; identical to SEQ ID NO: 205979
  chr21:36260355-36260524
  hyper

SEQ ID NO: 425701 - DNA, 395 bp, Homo sapiens; identical to SEQ ID NO: 241433
  chr21:36261485-36261880
  hyper

SEQ ID NO: 425702 - DNA, 39 bp, Homo sapiens; identical to SEQ ID NO: 205980
  chr21:36265221-36265260
  hyper

SEQ ID NO: 425703 - DNA, 117 bp, Homo sapiens; identical to SEQ ID NO: 205981
  chr21:36421138-36421255
  hyper

SEQ ID NO: 425704 - DNA, 131 bp, Homo sapiens; identical to SEQ ID NO: 205982
  chr21:36421464-36421595
  hyper

SEQ ID NO: 425705 - DNA, 186 bp, Homo sapiens; identical to SEQ ID NO: 241434
  chr21:37432611-37432797
  hyper

SEQ ID NO: 425706 - DNA, 139 bp, Homo sapiens; identical to SEQ ID NO: 205984
  chr21:37692217-37692356
  hyper

SEQ ID NO: 425707 - DNA, 293 bp, Homo sapiens; identical to SEQ ID NO: 295096
  chr21:38066516-38066809
  hyper

SEQ ID NO: 425708 - DNA, 47 bp, Homo sapiens; identical to SEQ ID NO: 295097
  chr21:38069046-38069093
  hyper

SEQ ID NO: 425709 - DNA, 571 bp, Homo sapiens; identical to SEQ ID NO: 205989
  chr21:38071064-38071635
  hyper

SEQ ID NO: 425710 - DNA, 77 bp, Homo sapiens; identical to SEQ ID NO: 401025
  chr21:38071687-38071764
  hyper

SEQ ID NO: 425711 - DNA, 186 bp, Homo sapiens; identical to SEQ ID NO: 401026
  chr21:38080899-38081085
  hyper

SEQ ID NO: 425712 - DNA, 199 bp, Homo sapiens; identical to SEQ ID NO: 295105
  chr21:38362192-38362391
  hyper

SEQ ID NO: 425713 - DNA, 300 bp, Homo sapiens; identical to SEQ ID NO: 205995
  chr21:38378628-38378928
  hyper

SEQ ID NO: 425714 - DNA, 260 bp, Homo sapiens; identical to SEQ ID NO: 205996
  chr21:38379263-38379523
  hyper

SEQ ID NO: 425715 - DNA, 244 bp, Homo sapiens; identical to SEQ ID NO: 241453
  chr21:38445155-38445399
  hyper

SEQ ID NO: 425716 - DNA, 415 bp, Homo sapiens; identical to SEQ ID NO: 295110
  chr21:38446375-38446790
  hyper

SEQ ID NO: 425717 - DNA, 109 bp, Homo sapiens; identical to SEQ ID NO: 205998
  chr21:38608386-38608495
  hyper

SEQ ID NO: 425718 - DNA, 428 bp, Homo sapiens; identical to SEQ ID NO: 133563
  chr21:38639615-38640043
  hyper

SEQ ID NO: 425719 - DNA, 253 bp, Homo sapiens; identical to SEQ ID NO: 241457
  chr21:38737938-38738191
  hyper

SEQ ID NO: 425720 - DNA, 67 bp, Homo sapiens
  chr21:40105802-40105869
  hyper
ttaaacccaaattattgccagagaaattggtatatttattcagatgaaaaatacttgcattagtaag

SEQ ID NO: 425721 - DNA, 1243 bp, Homo sapiens; identical to SEQ ID NO: 295130
  chr21:40177485-40178728
  hyper

SEQ ID NO: 425722 - DNA, 101 bp, Homo sapiens; identical to SEQ ID NO: 295131
  chr21:40751585-40751686
  hyper

SEQ ID NO: 425723 - DNA, 99 bp, Homo sapiens; identical to SEQ ID NO: 206011
  chr21:40752032-40752131
  hyper

SEQ ID NO: 425724 - DNA, 70 bp, Homo sapiens; identical to SEQ ID NO: 206012
  chr21:40941233-40941303
  hyper

SEQ ID NO: 425725 - DNA, 156 bp, Homo sapiens; identical to SEQ ID NO: 295134
  chr21:40984529-40984685
  hyper

SEQ ID NO: 425726 - DNA, 165 bp, Homo sapiens; identical to SEQ ID NO: 133596
  chr21:42218980-42219145
  hyper

SEQ ID NO: 425727 - DNA, 123 bp, Homo sapiens; identical to SEQ ID NO: 295136
  chr21:42539420-42539543
  hyper

SEQ ID NO: 425728 - DNA, 1593 bp, Homo sapiens; identical to SEQ ID NO: 133598
  chr21:42539583-42541176
  hyper

SEQ ID NO: 425729 - DNA, 87 bp, Homo sapiens; identical to SEQ ID NO: 226286
  chr21:43067058-43067145
  hyper

SEQ ID NO: 425730 - DNA, 837 bp, Homo sapiens; identical to SEQ ID NO: 133606
  chr21:43181626-43182463
  hyper

SEQ ID NO: 425731 - DNA, 979 bp, Homo sapiens; identical to SEQ ID NO: 295149
  chr21:43373386-43374365
  hyper

SEQ ID NO: 425732 - DNA, 129 bp, Homo sapiens; identical to SEQ ID NO: 295150
  chr21:43429158-43429287
  hyper

SEQ ID NO: 425733 - DNA, 66 bp, Homo sapiens; identical to SEQ ID NO: 133616
  chr21:43429338-43429404
  hyper

SEQ ID NO: 425734 - DNA, 46 bp, Homo sapiens; identical to SEQ ID NO: 206025
  chr21:43639848-43639894
  hyper

SEQ ID NO: 425735 - DNA, 65 bp, Homo sapiens; identical to SEQ ID NO: 295154
  chr21:44496297-44496362
  hyper

SEQ ID NO: 425736 - DNA, 110 bp, Homo sapiens; identical to SEQ ID NO: 206026
  chr21:44513219-44513329
  hyper

SEQ ID NO: 425737 - DNA, 176 bp, Homo sapiens; identical to SEQ ID NO: 206027
  chr21:44514586-44514762
  hyper

SEQ ID NO: 425738 - DNA, 251 bp, Homo sapiens; identical to SEQ ID NO: 241482
  chr21:44527798-44528049
  hyper

SEQ ID NO: 425739 - DNA, 75 bp, Homo sapiens; identical to SEQ ID NO: 241483
  chr21:44845911-44845986
  hyper

SEQ ID NO: 425740 - DNA, 179 bp, Homo sapiens; identical to SEQ ID NO: 226295
  chr21:45182012-45182191
  hyper

SEQ ID NO: 425741 - DNA, 156 bp, Homo sapiens; identical to SEQ ID NO: 295162
  chr21:45182669-45182825
  hyper

SEQ ID NO: 425742 - DNA, 159 bp, Homo sapiens; identical to SEQ ID NO: 241486
  chr21:45286201-45286360
  hyper

SEQ ID NO: 425743 - DNA, 429 bp, Homo sapiens; identical to SEQ ID NO: 295164
  chr21:45381212-45381641
  hyper

SEQ ID NO: 425744 - DNA, 71 bp, Homo sapiens; identical to SEQ ID NO: 206031
  chr21:45526943-45527014
  hyper

SEQ ID NO: 425745 - DNA, 63 bp, Homo sapiens; identical to SEQ ID NO: 206032
  chr21:45553436-45553499
  hyper

SEQ ID NO: 425746 - DNA, 92 bp, Homo sapiens; identical to SEQ ID NO: 241488
  chr21:45557938-45558030
  hyper

SEQ ID NO: 425747 - DNA, 164 bp, Homo sapiens; identical to SEQ ID NO: 206033
  chr21:45660235-45660399
  hyper

SEQ ID NO: 425748 - DNA, 90 bp, Homo sapiens; identical to SEQ ID NO: 241489
  chr21:45661247-45661337
  hyper

SEQ ID NO: 425749 - DNA, 228 bp, Homo sapiens; identical to SEQ ID NO: 241490
  chr21:45662076-45662304
  hyper

SEQ ID NO: 425750 - DNA, 540 bp, Homo sapiens; identical to SEQ ID NO: 295171
  chr21:45662515-45663055
  hyper

SEQ ID NO: 425751 - DNA, 277 bp, Homo sapiens; identical to SEQ ID NO: 206034
  chr21:45713496-45713773
  hyper

SEQ ID NO: 425752 - DNA, 139 bp, Homo sapiens; identical to SEQ ID NO: 241491
  chr21:45719673-45719812
  hyper

SEQ ID NO: 425753 - DNA, 169 bp, Homo sapiens; identical to SEQ ID NO: 206036
  chr21:46129207-46129376
  hyper

SEQ ID NO: 425754 - DNA, 923 bp, Homo sapiens; identical to SEQ ID NO: 241498
  chr21:46130970-46131893
  hyper

SEQ ID NO: 425755 - DNA, 352 bp, Homo sapiens; identical to SEQ ID NO: 295178
  chr21:46143227-46143579
  hyper

SEQ ID NO: 425756 - DNA, 275 bp, Homo sapiens; identical to SEQ ID NO: 241500
  chr21:46293549-46293824
  hyper

SEQ ID NO: 425757 - DNA, 79 bp, Homo sapiens; identical to SEQ ID NO: 241502
  chr21:46359652-46359731
  hyper

SEQ ID NO: 425758 - DNA, 220 bp, Homo sapiens; identical to SEQ ID NO: 133687
  chr21:46360167-46360387
  hyper

SEQ ID NO: 425759 - DNA, 60 bp, Homo sapiens; identical to SEQ ID NO: 241505
  chr21:46824687-46824747
  hyper

SEQ ID NO: 425760 - DNA, 104 bp, Homo sapiens; identical to SEQ ID NO: 206041
  chr21:46950778-46950882
  hyper

SEQ ID NO: 425761 - DNA, 89 bp, Homo sapiens; identical to SEQ ID NO: 295192
  chr21:47010001-47010090
  hyper

SEQ ID NO: 425762 - DNA, 173 bp, Homo sapiens; identical to SEQ ID NO: 226309
  chr21:47050917-47051090
  hyper

SEQ ID NO: 425763 - DNA, 106 bp, Homo sapiens; identical to SEQ ID NO: 206044
  chr21:47394340-47394446
  hyper

SEQ ID NO: 425764 - DNA, 280 bp, Homo sapiens; identical to SEQ ID NO: 241509
  chr21:47401140-47401420
  hyper

SEQ ID NO: 425765 - DNA, 149 bp, Homo sapiens; identical to SEQ ID NO: 295198
  chr21:47401762-47401911
  hyper

SEQ ID NO: 425766 - DNA, 110 bp, Homo sapiens; identical to SEQ ID NO: 206045
  chr21:47717450-47717560
  hyper

SEQ ID NO: 425767 - DNA, 84 bp, Homo sapiens; identical to SEQ ID NO: 206046
  chr21:47717589-47717673
  hyper

SEQ ID NO: 425768 - DNA, 116 bp, Homo sapiens; identical to SEQ ID NO: 206047
  chr21:47717748-47717864
  hyper

SEQ ID NO: 425769 - DNA, 45 bp, Homo sapiens; identical to SEQ ID NO: 295203
  chr21:47717865-47717910
  hyper

SEQ ID NO: 425770 - DNA, 165 bp, Homo sapiens; identical to SEQ ID NO: 241512
  chr21:47744098-47744263
  hyper

SEQ ID NO: 425771 - DNA, 44 bp, Homo sapiens; identical to SEQ ID NO: 206048
  chr21:47799137-47799181
  hyper

SEQ ID NO: 425772 - DNA, 52 bp, Homo sapiens; identical to SEQ ID NO: 206049
  chr21:47799225-47799277
  hyper

SEQ ID NO: 425773 - DNA, 40 bp, Homo sapiens; identical to SEQ ID NO: 241515
  chr22:17565650-17565690
  hyper

SEQ ID NO: 425774 - DNA, 285 bp, Homo sapiens; identical to SEQ ID NO: 295209
  chr22:17601506-17601791
  hyper

SEQ ID NO: 425775 - DNA, 139 bp, Homo sapiens; identical to SEQ ID NO: 295210
  chr22:17602027-17602166
  hyper

SEQ ID NO: 425776 - DNA, 50 bp, Homo sapiens; identical to SEQ ID NO: 241521
  chr22:18257398-18257448
  hyper

SEQ ID NO: 425777 - DNA, 36 bp, Homo sapiens; identical to SEQ ID NO: 206053
  chr22:18441176-18441212
  hyper

SEQ ID NO: 425778 - DNA, 186 bp, Homo sapiens; identical to SEQ ID NO: 241523
  chr22:18507000-18507186
  hyper

SEQ ID NO: 425779 - DNA, 198 bp, Homo sapiens; identical to SEQ ID NO: 241524
  chr22:18560627-18560825
  hyper

SEQ ID NO: 425780 - DNA, 31 bp, Homo sapiens; identical to SEQ ID NO: 206054
  chr22:18593348-18593379
  hyper

SEQ ID NO: 425781 - DNA, 274 bp, Homo sapiens; identical to SEQ ID NO: 133753
  chr22:18923626-18923900
  hyper

SEQ ID NO: 425782 - DNA, 130 bp, Homo sapiens; identical to SEQ ID NO: 241527
  chr22:19132116-19132246
  hyper

SEQ ID NO: 425783 - DNA, 426 bp, Homo sapiens; identical to SEQ ID NO: 241528
  chr22:19419825-19420251
  hyper

SEQ ID NO: 425784 - DNA, 472 bp, Homo sapiens; identical to SEQ ID NO: 241529
  chr22:19466618-19467090
  hyper

SEQ ID NO: 425785 - DNA, 589 bp, Homo sapiens; identical to SEQ ID NO: 295221
  chr22:19701676-19702265
  hyper

SEQ ID NO: 425786 - DNA, 119 bp, Homo sapiens; identical to SEQ ID NO: 241533
  chr22:19718927-19719046
  hyper

SEQ ID NO: 425787 - DNA, 343 bp, Homo sapiens; identical to SEQ ID NO: 295224
  chr22:19742992-19743335
  hyper

SEQ ID NO: 425788 - DNA, 81 bp, Homo sapiens; identical to SEQ ID NO: 133775
  chr22:19743352-19743433
  hyper

SEQ ID NO: 425789 - DNA, 80 bp, Homo sapiens; identical to SEQ ID NO: 295226
  chr22:19743887-19743967
  hyper

SEQ ID NO: 425790 - DNA, 59 bp, Homo sapiens; identical to SEQ ID NO: 133778
  chr22:19744034-19744093
  hyper

SEQ ID NO: 425791 - DNA, 288 bp, Homo sapiens; identical to SEQ ID NO: 295228
  chr22:19748301-19748589
  hyper

SEQ ID NO: 425792 - DNA, 40 bp, Homo sapiens; identical to SEQ ID NO: 133782
  chr22:19749084-19749124
  hyper

SEQ ID NO: 425793 - DNA, 169 bp, Homo sapiens; identical to SEQ ID NO: 295230
  chr22:19753518-19753687
  hyper

SEQ ID NO: 425794 - DNA, 105 bp, Homo sapiens; identical to SEQ ID NO: 133785
  chr22:19753869-19753974
  hyper

SEQ ID NO: 425795 - DNA, 38 bp, Homo sapiens; identical to SEQ ID NO: 241536
  chr22:19754288-19754326
  hyper

SEQ ID NO: 425796 - DNA, 36 bp, Homo sapiens; identical to SEQ ID NO: 295233
  chr22:19754610-19754646
  hyper

SEQ ID NO: 425797 - DNA, 42 bp, Homo sapiens; identical to SEQ ID NO: 241538
  chr22:20004350-20004392
  hyper

SEQ ID NO: 425798 - DNA, 251 bp, Homo sapiens; identical to SEQ ID NO: 241539
  chr22:20104760-20105011
  hyper

SEQ ID NO: 425799 - DNA, 433 bp, Homo sapiens; identical to SEQ ID NO: 206059
  chr22:20255237-20255670
  hyper

SEQ ID NO: 425800 - DNA, 353 bp, Homo sapiens; identical to SEQ ID NO: 241541
  chr22:20286611-20286964
  hyper

SEQ ID NO: 425801 - DNA, 116 bp, Homo sapiens; identical to SEQ ID NO: 241546
  chr22:21336323-21336439
  hyper

SEQ ID NO: 425802 - DNA, 156 bp, Homo sapiens; identical to SEQ ID NO: 241547
  chr22:21356377-21356533
  hyper

SEQ ID NO: 425803 - DNA, 251 bp, Homo sapiens; identical to SEQ ID NO: 295243
  chr22:21385764-21386015
  hyper

SEQ ID NO: 425804 - DNA, 195 bp, Homo sapiens; identical to SEQ ID NO: 241551
  chr22:21922624-21922819
  hyper

SEQ ID NO: 425805 - DNA, 96 bp, Homo sapiens; identical to SEQ ID NO: 241555
  chr22:22020155-22020251
  hyper

SEQ ID NO: 425806 - DNA, 42 bp, Homo sapiens; identical to SEQ ID NO: 295252
  chr22:22090486-22090528
  hyper

SEQ ID NO: 425807 - DNA, 331 bp, Homo sapiens; identical to SEQ ID NO: 295253
  chr22:22220990-22221321
  hyper

SEQ ID NO: 425808 - DNA, 216 bp, Homo sapiens; identical to SEQ ID NO: 226333
  chr22:22306476-22306692
  hyper

SEQ ID NO: 425809 - DNA, 311 bp, Homo sapiens; identical to SEQ ID NO: 295256
  chr22:22307056-22307367
  hyper

SEQ ID NO: 425810 - DNA, 257 bp, Homo sapiens; identical to SEQ ID NO: 241558
  chr22:22337127-22337384
  hyper

SEQ ID NO: 425811 - DNA, 351 bp, Homo sapiens; identical to SEQ ID NO: 241560
  chr22:23411783-23412134
  hyper

SEQ ID NO: 425812 - DNA, 166 bp, Homo sapiens; identical to SEQ ID NO: 241561
  chr22:23484157-23484323
  hyper

SEQ ID NO: 425813 - DNA, 80 bp, Homo sapiens; identical to SEQ ID NO: 241562
  chr22:23522446-23522526
  hyper

SEQ ID NO: 425814 - DNA, 441 bp, Homo sapiens; identical to SEQ ID NO: 295262
  chr22:23523110-23523551
  hyper

SEQ ID NO: 425815 - DNA, 91 bp, Homo sapiens; identical to SEQ ID NO: 241564
  chr22:23864330-23864421
  hyper

SEQ ID NO: 425816 - DNA, 718 bp, Homo sapiens; identical to SEQ ID NO: 295264
  chr22:24110159-24110877
  hyper

SEQ ID NO: 425817 - DNA, 89 bp, Homo sapiens; identical to SEQ ID NO: 206070
  chr22:24236849-24236938
  hyper

SEQ ID NO: 425818 - DNA, 36 bp, Homo sapiens; identical to SEQ ID NO: 241568
  chr22:24372937-24372973
  hyper

SEQ ID NO: 425819 - DNA, 36 bp, Homo sapiens; identical to SEQ ID NO: 206072
  chr22:24643678-24643714
  hyper

SEQ ID NO: 425820 - DNA, 237 bp, Homo sapiens; identical to SEQ ID NO: 241572
  chr22:24666726-24666963
  hyper

SEQ ID NO: 425821 - DNA, 91 bp, Homo sapiens; identical to SEQ ID NO: 206073
  chr22:24989196-24989287
  hyper

SEQ ID NO: 425822 - DNA, 514 bp, Homo sapiens; identical to SEQ ID NO: 295277
  chr22:25507304-25507818
  hyper

SEQ ID NO: 425823 - DNA, 315 bp, Homo sapiens; identical to SEQ ID NO: 206080
  chr22:26756625-26756940
  hyper

SEQ ID NO: 425824 - DNA, 247 bp, Homo sapiens; identical to SEQ ID NO: 206081
  chr22:26763714-26763961
  hyper

SEQ ID NO: 425825 - DNA, 215 bp, Homo sapiens; identical to SEQ ID NO: 241580
  chr22:26773510-26773725
  hyper

SEQ ID NO: 425826 - DNA, 112 bp, Homo sapiens; identical to SEQ ID NO: 206082
  chr22:26825000-26825112
  hyper

SEQ ID NO: 425827 - DNA, 171 bp, Homo sapiens; identical to SEQ ID NO: 206083
  chr22:26879459-26879630
  hyper

SEQ ID NO: 425828 - DNA, 139 bp, Homo sapiens; identical to SEQ ID NO: 206084
  chr22:26880366-26880505
  hyper

SEQ ID NO: 425829 - DNA, 45 bp, Homo sapiens; identical to SEQ ID NO: 295289
  chr22:26908201-26908246
  hyper

SEQ ID NO: 425830 - DNA, 99 bp, Homo sapiens; identical to SEQ ID NO: 133898
  chr22:26908292-26908391
  hyper

SEQ ID NO: 425831 - DNA, 345 bp, Homo sapiens; identical to SEQ ID NO: 241585
  chr22:27054544-27054889
  hyper

SEQ ID NO: 425832 - DNA, 163 bp, Homo sapiens; identical to SEQ ID NO: 206087
  chr22:27496885-27497048
  hyper

SEQ ID NO: 425833 - DNA, 63 bp, Homo sapiens; identical to SEQ ID NO: 295299
  chr22:28196459-28196522
  hyper

SEQ ID NO: 425834 - DNA, 414 bp, Homo sapiens; identical to SEQ ID NO: 295300
  chr22:28196552-28196966
  hyper

SEQ ID NO: 425835 - DNA, 210 bp, Homo sapiens; identical to SEQ ID NO: 295301
  chr22:28197049-28197259
  hyper

SEQ ID NO: 425836 - DNA, 66 bp, Homo sapiens; identical to SEQ ID NO: 206089
  chr22:28198503-28198569
  hyper

SEQ ID NO: 425837 - DNA, 48 bp, Homo sapiens; identical to SEQ ID NO: 206090
  chr22:28198605-28198653
  hyper

SEQ ID NO: 425838 - DNA, 188 bp, Homo sapiens; identical to SEQ ID NO: 295305
  chr22:28315374-28315562
  hyper

SEQ ID NO: 425839 - DNA, 88 bp, Homo sapiens; identical to SEQ ID NO: 241596
  chr22:28839653-28839741
  hyper

SEQ ID NO: 425840 - DNA, 95 bp, Homo sapiens; identical to SEQ ID NO: 241598
  chr22:29137894-29137989
  hyper

SEQ ID NO: 425841 - DNA, 73 bp, Homo sapiens; identical to SEQ ID NO: 241599
  chr22:29279556-29279629
  hyper

SEQ ID NO: 425842 - DNA, 73 bp, Homo sapiens; identical to SEQ ID NO: 241600
  chr22:29279911-29279984
  hyper

SEQ ID NO: 425843 - DNA, 425 bp, Homo sapiens; identical to SEQ ID NO: 206095
  chr22:29468748-29469173
  hyper

SEQ ID NO: 425844 - DNA, 202 bp, Homo sapiens; identical to SEQ ID NO: 206096
  chr22:29469213-29469415
  hyper

SEQ ID NO: 425845 - DNA, 45 bp, Homo sapiens; identical to SEQ ID NO: 13392
  chr22:29469460-29469505
  hyper

SEQ ID NO: 425846 - DNA, 40 bp, Homo sapiens; identical to SEQ ID NO: 241606
  chr22:29550779-29550819
  hyper

SEQ ID NO: 425847 - DNA, 213 bp, Homo sapiens; identical to SEQ ID NO: 241607
  chr22:29663973-29664186
  hyper

SEQ ID NO: 425848 - DNA, 968 bp, Homo sapiens; identical to SEQ ID NO: 295326
  chr22:29702352-29703320
  hyper

SEQ ID NO: 425849 - DNA, 42 bp, Homo sapiens; identical to SEQ ID NO: 241610
  chr22:29710517-29710559
  hyper

SEQ ID NO: 425850 - DNA, 566 bp, Homo sapiens; identical to SEQ ID NO: 295328
  chr22:29710589-29711155
  hyper

SEQ ID NO: 425851 - DNA, 39 bp, Homo sapiens; identical to SEQ ID NO: 241612
  chr22:29999383-29999422
  hyper

SEQ ID NO: 425852 - DNA, 105 bp, Homo sapiens; identical to SEQ ID NO: 295331
  chr22:30115856-30115961
  hyper

SEQ ID NO: 425853 - DNA, 490 bp, Homo sapiens; identical to SEQ ID NO: 241614
  chr22:30162876-30163366
  hyper

SEQ ID NO: 425854 - DNA, 92 bp, Homo sapiens; identical to SEQ ID NO: 295333
  chr22:30234279-30234371
  hyper

SEQ ID NO: 425855 - DNA, 126 bp, Homo sapiens; identical to SEQ ID NO: 133954
  chr22:30234397-30234523
  hyper

SEQ ID NO: 425856 - DNA, 112 bp, Homo sapiens; identical to SEQ ID NO: 206100
  chr22:30642966-30643078
  hyper

SEQ ID NO: 425857 - DNA, 69 bp, Homo sapiens; identical to SEQ ID NO: 241618
  chr22:30685652-30685721
  hyper

SEQ ID NO: 425858 - DNA, 192 bp, Homo sapiens; identical to SEQ ID NO: 226359
  chr22:30723111-30723303
  hyper

SEQ ID NO: 425859 - DNA, 264 bp, Homo sapiens; identical to SEQ ID NO: 206101
  chr22:30792874-30793138
  hyper

SEQ ID NO: 425860 - DNA, 36 bp, Homo sapiens; identical to SEQ ID NO: 241619
  chr22:30821612-30821648
  hyper

SEQ ID NO: 425861 - DNA, 86 bp, Homo sapiens; identical to SEQ ID NO: 241621
  chr22:30987535-30987621
  hyper

SEQ ID NO: 425862 - DNA, 102 bp, Homo sapiens; identical to SEQ ID NO: 241622
  chr22:30988134-30988236
  hyper

SEQ ID NO: 425863 - DNA, 328 bp, Homo sapiens; identical to SEQ ID NO: 295344
  chr22:31002803-31003131
  hyper

SEQ ID NO: 425864 - DNA, 43 bp, Homo sapiens; identical to SEQ ID NO: 206104
  chr22:31003186-31003229
  hyper

SEQ ID NO: 425865 - DNA, 211 bp, Homo sapiens; identical to SEQ ID NO: 241624
  chr22:31031671-31031882
  hyper

SEQ ID NO: 425866 - DNA, 120 bp, Homo sapiens; identical to SEQ ID NO: 206107
  chr22:31477077-31477197
  hyper

SEQ ID NO: 425867 - DNA, 306 bp, Homo sapiens; identical to SEQ ID NO: 206108
  chr22:31556066-31556372
  hyper

SEQ ID NO: 425868 - DNA, 31 bp, Homo sapiens; identical to SEQ ID NO: 241631
  chr22:31742464-31742495
  hyper

SEQ ID NO: 425869 - DNA, 99 bp, Homo sapiens; identical to SEQ ID NO: 241632
  chr22:31743474-31743573
  hyper

SEQ ID NO: 425870 - DNA, 127 bp, Homo sapiens; identical to SEQ ID NO: 241633
  chr22:31795654-31795781
  hyper

SEQ ID NO: 425871 - DNA, 219 bp, Homo sapiens; identical to SEQ ID NO: 241634
  chr22:31885559-31885778
  hyper

SEQ ID NO: 425872 - DNA, 51 bp, Homo sapiens; identical to SEQ ID NO: 241635
  chr22:31892031-31892082
  hyper

SEQ ID NO: 425873 - DNA, 248 bp, Homo sapiens; identical to SEQ ID NO: 241636
  chr22:31892329-31892577
  hyper

SEQ ID NO: 425874 - DNA, 304 bp, Homo sapiens; identical to SEQ ID NO: 241637
  chr22:32145988-32146292
  hyper

SEQ ID NO: 425875 - DNA, 360 bp, Homo sapiens; identical to SEQ ID NO: 241638
  chr22:32149110-32149470
  hyper

SEQ ID NO: 425876 - DNA, 347 bp, Homo sapiens; identical to SEQ ID NO: 241639
  chr22:32149786-32150133
  hyper

SEQ ID NO: 425877 - DNA, 233 bp, Homo sapiens; identical to SEQ ID NO: 134003
  chr22:32340155-32340388
  hyper

SEQ ID NO: 425878 - DNA, 85 bp, Homo sapiens; identical to SEQ ID NO: 241641
  chr22:32341314-32341399
  hyper

SEQ ID NO: 425879 - DNA, 35 bp, Homo sapiens; identical to SEQ ID NO: 241642
  chr22:32808157-32808192
  hyper

SEQ ID NO: 425880 - DNA, 63 bp, Homo sapiens; identical to SEQ ID NO: 241643
  chr22:32870503-32870566
  hyper

SEQ ID NO: 425881 - DNA, 105 bp, Homo sapiens; identical to SEQ ID NO: 241644
  chr22:32871125-32871230
  hyper

SEQ ID NO: 425882 - DNA, 313 bp, Homo sapiens
  chr22:34315937-34316250
  hyper
caccacggcgcccccgcggcgactctcgcgctccggggctcttaccttggccgtgactgccgccaggcagagggagacacggaagaacagggtggcgcggcggcgccgccgcctacgaggcgcagggggtccgggtcagggtcccggcaggcgctgccctactcggagcggcggtgccaagcacagagttcgggactgcccccggctccaaatgccgcggcgagggtccgggtcccccaagctgagcactgtcccttcttcctcttcctccggggccgctgcctggagctgctcccggcccgggggactcttc

SEQ ID NO: 425883 - DNA, 348 bp, Homo sapiens; identical to SEQ ID NO: 241649
  chr22:35695611-35695959
  hyper

SEQ ID NO: 425884 - DNA, 262 bp, Homo sapiens; identical to SEQ ID NO: 295372
  chr22:35767972-35768234
  hyper

SEQ ID NO: 425885 - DNA, 273 bp, Homo sapiens; identical to SEQ ID NO: 295373
  chr22:35776987-35777260
  hyper

SEQ ID NO: 425886 - DNA, 195 bp, Homo sapiens; identical to SEQ ID NO: 206116
  chr22:35796009-35796204
  hyper

SEQ ID NO: 425887 - DNA, 290 bp, Homo sapiens; identical to SEQ ID NO: 241652
  chr22:35937044-35937334
  hyper

SEQ ID NO: 425888 - DNA, 99 bp, Homo sapiens; identical to SEQ ID NO: 241653
  chr22:36424035-36424134
  hyper

SEQ ID NO: 425889 - DNA, 58 bp, Homo sapiens; identical to SEQ ID NO: 206117
  chr22:36424337-36424395
  hyper

SEQ ID NO: 425890 - DNA, 78 bp, Homo sapiens; identical to SEQ ID NO: 57980
  chr22:36424418-36424496
  hyper

SEQ ID NO: 425891 - DNA, 186 bp, Homo sapiens; identical to SEQ ID NO: 206119
  chr22:36425195-36425381
  hyper

SEQ ID NO: 425892 - DNA, 315 bp, Homo sapiens; identical to SEQ ID NO: 295380
  chr22:36462014-36462329
  hyper

SEQ ID NO: 425893 - DNA, 333 bp, Homo sapiens; identical to SEQ ID NO: 241656
  chr22:36784309-36784642
  hyper

SEQ ID NO: 425894 - DNA, 40 bp, Homo sapiens; identical to SEQ ID NO: 295383
  chr22:36848112-36848152
  hyper

SEQ ID NO: 425895 - DNA, 129 bp, Homo sapiens; identical to SEQ ID NO: 241658
  chr22:36850993-36851122
  hyper

SEQ ID NO: 425896 - DNA, 169 bp, Homo sapiens; identical to SEQ ID NO: 241659
  chr22:36925411-36925580
  hyper

SEQ ID NO: 425897 - DNA, 207 bp, Homo sapiens; identical to SEQ ID NO: 206121
  chr22:37172011-37172218
  hyper

SEQ ID NO: 425898 - DNA, 50 bp, Homo sapiens; identical to SEQ ID NO: 206122
  chr22:37172609-37172659
  hyper

SEQ ID NO: 425899 - DNA, 45 bp, Homo sapiens; identical to SEQ ID NO: 295388
  chr22:37212369-37212414
  hyper

SEQ ID NO: 425900 - DNA, 234 bp, Homo sapiens; identical to SEQ ID NO: 295389
  chr22:37212906-37213140
  hyper

SEQ ID NO: 425901 - DNA, 479 bp, Homo sapiens; identical to SEQ ID NO: 206124
  chr22:37414885-37415364
  hyper

SEQ ID NO: 425902 - DNA, 40 bp, Homo sapiens; identical to SEQ ID NO: 206125
  chr22:37595694-37595734
  hyper

SEQ ID NO: 425903 - DNA, 179 bp, Homo sapiens; identical to SEQ ID NO: 206126
  chr22:37640350-37640529
  hyper

SEQ ID NO: 425904 - DNA, 169 bp, Homo sapiens; identical to SEQ ID NO: 295394
  chr22:37720792-37720961
  hyper

SEQ ID NO: 425905 - DNA, 93 bp, Homo sapiens; identical to SEQ ID NO: 295395
  chr22:37721163-37721256
  hyper

SEQ ID NO: 425906 - DNA, 131 bp, Homo sapiens; identical to SEQ ID NO: 295397
  chr22:37816332-37816463
  hyper

SEQ ID NO: 425907 - DNA, 272 bp, Homo sapiens; identical to SEQ ID NO: 58004
  chr22:37816501-37816773
  hyper

SEQ ID NO: 425908 - DNA, 65 bp, Homo sapiens; identical to SEQ ID NO: 295399
  chr22:37823289-37823354
  hyper

SEQ ID NO: 425909 - DNA, 206 bp, Homo sapiens; identical to SEQ ID NO: 295400
  chr22:37823384-37823590
  hyper

SEQ ID NO: 425910 - DNA, 290 bp, Homo sapiens; identical to SEQ ID NO: 241672
  chr22:37882383-37882673
  hyper

SEQ ID NO: 425911 - DNA, 35 bp, Homo sapiens; identical to SEQ ID NO: 295402
  chr22:37914844-37914879
  hyper

SEQ ID NO: 425912 - DNA, 500 bp, Homo sapiens; identical to SEQ ID NO: 206127
  chr22:37914933-37915433
  hyper

SEQ ID NO: 425913 - DNA, 123 bp, Homo sapiens; identical to SEQ ID NO: 226374
  chr22:37915687-37915810
  hyper

SEQ ID NO: 425914 - DNA, 767 bp, Homo sapiens; identical to SEQ ID NO: 295405
  chr22:37956436-37957203
  hyper

SEQ ID NO: 425915 - DNA, 375 bp, Homo sapiens; identical to SEQ ID NO: 58009
  chr22:37957264-37957639
  hyper

SEQ ID NO: 425916 - DNA, 210 bp, Homo sapiens; identical to SEQ ID NO: 241674
  chr22:38004378-38004588
  hyper

SEQ ID NO: 425917 - DNA, 83 bp, Homo sapiens; identical to SEQ ID NO: 241675
  chr22:38054576-38054659
  hyper

SEQ ID NO: 425918 - DNA, 216 bp, Homo sapiens; identical to SEQ ID NO: 241676
  chr22:38070987-38071203
  hyper

SEQ ID NO: 425919 - DNA, 34 bp, Homo sapiens; identical to SEQ ID NO: 206130
  chr22:38072875-38072909
  hyper

SEQ ID NO: 425920 - DNA, 47 bp, Homo sapiens; identical to SEQ ID NO: 241678
  chr22:38082317-38082364
  hyper

SEQ ID NO: 425921 - DNA, 199 bp, Homo sapiens; identical to SEQ ID NO: 241679
  chr22:38142984-38143183
  hyper

SEQ ID NO: 425922 - DNA, 114 bp, Homo sapiens; identical to SEQ ID NO: 241680
  chr22:38200880-38200994
  hyper

SEQ ID NO: 425923 - DNA, 204 bp, Homo sapiens; identical to SEQ ID NO: 241681
  chr22:38201307-38201511
  hyper

SEQ ID NO: 425924 - DNA, 94 bp, Homo sapiens; identical to SEQ ID NO: 134095
  chr22:38203676-38203770
  hyper

SEQ ID NO: 425925 - DNA, 125 bp, Homo sapiens; identical to SEQ ID NO: 295416
  chr22:38214527-38214652
  hyper

SEQ ID NO: 425926 - DNA, 163 bp, Homo sapiens; identical to SEQ ID NO: 295417
  chr22:38214685-38214848
  hyper

SEQ ID NO: 425927 - DNA, 48 bp, Homo sapiens; identical to SEQ ID NO: 241685
  chr22:38239779-38239827
  hyper

SEQ ID NO: 425928 - DNA, 213 bp, Homo sapiens; identical to SEQ ID NO: 241686
  chr22:38240370-38240583
  hyper

SEQ ID NO: 425929 - DNA, 58 bp, Homo sapiens; identical to SEQ ID NO: 206131
  chr22:38302076-38302134
  hyper

SEQ ID NO: 425930 - DNA, 136 bp, Homo sapiens; identical to SEQ ID NO: 295421
  chr22:38349495-38349631
  hyper

SEQ ID NO: 425931 - DNA, 398 bp, Homo sapiens; identical to SEQ ID NO: 295422
  chr22:38577754-38578152
  hyper

SEQ ID NO: 425932 - DNA, 155 bp, Homo sapiens; identical to SEQ ID NO: 241691
  chr22:38597888-38598043
  hyper

SEQ ID NO: 425933 - DNA, 320 bp, Homo sapiens; identical to SEQ ID NO: 241692
  chr22:38598861-38599181
  hyper

SEQ ID NO: 425934 - DNA, 305 bp, Homo sapiens; identical to SEQ ID NO: 241693
  chr22:38668915-38669220
  hyper

SEQ ID NO: 425935 - DNA, 31 bp, Homo sapiens; identical to SEQ ID NO: 206133
  chr22:38713592-38713623
  hyper

SEQ ID NO: 425936 - DNA, 39 bp, Homo sapiens; identical to SEQ ID NO: 241696
  chr22:38857560-38857599
  hyper

SEQ ID NO: 425937 - DNA, 95 bp, Homo sapiens; identical to SEQ ID NO: 206134
  chr22:38863833-38863928
  hyper

SEQ ID NO: 425938 - DNA, 72 bp, Homo sapiens; identical to SEQ ID NO: 241698
  chr22:38864201-38864273
  hyper

SEQ ID NO: 425939 - DNA, 370 bp, Homo sapiens; identical to SEQ ID NO: 241699
  chr22:38902268-38902638
  hyper

SEQ ID NO: 425940 - DNA, 236 bp, Homo sapiens; identical to SEQ ID NO: 241701
  chr22:39052538-39052774
  hyper

SEQ ID NO: 425941 - DNA, 166 bp, Homo sapiens; identical to SEQ ID NO: 241702
  chr22:39078160-39078326
  hyper

SEQ ID NO: 425942 - DNA, 233 bp, Homo sapiens; identical to SEQ ID NO: 241703
  chr22:39096461-39096694
  hyper

SEQ ID NO: 425943 - DNA, 71 bp, Homo sapiens; identical to SEQ ID NO: 241704
  chr22:39101417-39101488
  hyper

SEQ ID NO: 425944 - DNA, 95 bp, Homo sapiens; identical to SEQ ID NO: 295436
  chr22:39150552-39150647
  hyper

SEQ ID NO: 425945 - DNA, 114 bp, Homo sapiens; identical to SEQ ID NO: 241706
  chr22:39189708-39189822
  hyper

SEQ ID NO: 425946 - DNA, 293 bp, Homo sapiens; identical to SEQ ID NO: 241707
  chr22:39190104-39190397
  hyper

SEQ ID NO: 425947 - DNA, 253 bp, Homo sapiens; identical to SEQ ID NO: 295439
  chr22:39239093-39239346
  hyper

SEQ ID NO: 425948 - DNA, 32 bp, Homo sapiens; identical to SEQ ID NO: 206137
  chr22:39239412-39239444
  hyper

SEQ ID NO: 425949 - DNA, 189 bp, Homo sapiens; identical to SEQ ID NO: 295441
  chr22:39239935-39240124
  hyper

SEQ ID NO: 425950 - DNA, 37 bp, Homo sapiens; identical to SEQ ID NO: 241709
  chr22:39268148-39268185
  hyper

SEQ ID NO: 425951 - DNA, 31 bp, Homo sapiens; identical to SEQ ID NO: 206138
  chr22:39268735-39268766
  hyper

SEQ ID NO: 425952 - DNA, 248 bp, Homo sapiens; identical to SEQ ID NO: 226380
  chr22:39268982-39269230
  hyper

SEQ ID NO: 425953 - DNA, 47 bp, Homo sapiens; identical to SEQ ID NO: 206139
  chr22:39638593-39638640
  hyper

SEQ ID NO: 425954 - DNA, 34 bp, Homo sapiens; identical to SEQ ID NO: 241711
  chr22:39641113-39641147
  hyper

SEQ ID NO: 425955 - DNA, 173 bp, Homo sapiens; identical to SEQ ID NO: 241712
  chr22:39696377-39696550
  hyper

SEQ ID NO: 425956 - DNA, 89 bp, Homo sapiens; identical to SEQ ID NO: 241713
  chr22:39715082-39715171
  hyper

SEQ ID NO: 425957 - DNA, 189 bp, Homo sapiens; identical to SEQ ID NO: 206140
  chr22:39715621-39715810
  hyper

SEQ ID NO: 425958 - DNA, 131 bp, Homo sapiens; identical to SEQ ID NO: 295452
  chr22:39745646-39745777
  hyper

SEQ ID NO: 425959 - DNA, 278 bp, Homo sapiens; identical to SEQ ID NO: 295453
  chr22:39746119-39746397
  hyper

SEQ ID NO: 425960 - DNA, 177 bp, Homo sapiens; identical to SEQ ID NO: 134161
  chr22:39898684-39898861
  hyper

SEQ ID NO: 425961 - DNA, 40 bp, Homo sapiens; identical to SEQ ID NO: 241718
  chr22:39928913-39928953
  hyper

SEQ ID NO: 425962 - DNA, 91 bp, Homo sapiens; identical to SEQ ID NO: 206142
  chr22:39930975-39931066
  hyper

SEQ ID NO: 425963 - DNA, 119 bp, Homo sapiens; identical to SEQ ID NO: 401173
  chr22:39954278-39954397
  hyper

SEQ ID NO: 425964 - DNA, 149 bp, Homo sapiens; identical to SEQ ID NO: 134172
  chr22:40060841-40060990
  hyper

SEQ ID NO: 425965 - DNA, 181 bp, Homo sapiens; identical to SEQ ID NO: 295466
  chr22:40081595-40081776
  hyper

SEQ ID NO: 425966 - DNA, 77 bp, Homo sapiens; identical to SEQ ID NO: 295467
  chr22:40082052-40082129
  hyper

SEQ ID NO: 425967 - DNA, 104 bp, Homo sapiens; identical to SEQ ID NO: 295468
  chr22:40082159-40082263
  hyper

SEQ ID NO: 425968 - DNA, 73 bp, Homo sapiens; identical to SEQ ID NO: 241723
  chr22:40440608-40440681
  hyper

SEQ ID NO: 425969 - DNA, 98 bp, Homo sapiens; identical to SEQ ID NO: 241724
  chr22:40742291-40742389
  hyper

SEQ ID NO: 425970 - DNA, 94 bp, Homo sapiens; identical to SEQ ID NO: 241725
  chr22:41215480-41215574
  hyper

SEQ ID NO: 425971 - DNA, 182 bp, Homo sapiens; identical to SEQ ID NO: 241726
  chr22:41252792-41252974
  hyper

SEQ ID NO: 425972 - DNA, 104 bp, Homo sapiens; identical to SEQ ID NO: 241729
  chr22:41593898-41594002
  hyper

SEQ ID NO: 425973 - DNA, 251 bp, Homo sapiens; identical to SEQ ID NO: 241730
  chr22:41601071-41601322
  hyper

SEQ ID NO: 425974 - DNA, 268 bp, Homo sapiens; identical to SEQ ID NO: 241731
  chr22:41682088-41682356
  hyper

SEQ ID NO: 425975 - DNA, 231 bp, Homo sapiens; identical to SEQ ID NO: 206146
  chr22:41682703-41682934
  hyper

SEQ ID NO: 425976 - DNA, 451 bp, Homo sapiens; identical to SEQ ID NO: 206147
  chr22:41697265-41697716
  hyper

SEQ ID NO: 425977 - DNA, 212 bp, Homo sapiens; identical to SEQ ID NO: 206148
  chr22:41763239-41763451
  hyper

SEQ ID NO: 425978 - DNA, 36 bp, Homo sapiens; identical to SEQ ID NO: 241735
  chr22:41843183-41843219
  hyper

SEQ ID NO: 425979 - DNA, 395 bp, Homo sapiens; identical to SEQ ID NO: 206149
  chr22:41864720-41865115
  hyper

SEQ ID NO: 425980 - DNA, 204 bp, Homo sapiens; identical to SEQ ID NO: 241737
  chr22:41940462-41940666
  hyper

SEQ ID NO: 425981 - DNA, 78 bp, Homo sapiens; identical to SEQ ID NO: 241738
  chr22:41985628-41985706
  hyper

SEQ ID NO: 425982 - DNA, 269 bp, Homo sapiens; identical to SEQ ID NO: 206150
  chr22:42016977-42017246
  hyper

SEQ ID NO: 425983 - DNA, 80 bp, Homo sapiens; identical to SEQ ID NO: 206151
  chr22:42228658-42228738
  hyper

SEQ ID NO: 425984 - DNA, 141 bp, Homo sapiens; identical to SEQ ID NO: 241741
  chr22:42229198-42229339
  hyper

SEQ ID NO: 425985 - DNA, 233 bp, Homo sapiens; identical to SEQ ID NO: 226386
  chr22:42229858-42230091
  hyper

SEQ ID NO: 425986 - DNA, 81 bp, Homo sapiens; identical to SEQ ID NO: 295489
  chr22:42305985-42306066
  hyper

SEQ ID NO: 425987 - DNA, 231 bp, Homo sapiens; identical to SEQ ID NO: 295490
  chr22:42306641-42306872
  hyper

SEQ ID NO: 425988 - DNA, 97 bp, Homo sapiens; identical to SEQ ID NO: 295491
  chr22:42307267-42307364
  hyper

SEQ ID NO: 425989 - DNA, 98 bp, Homo sapiens; identical to SEQ ID NO: 206152
  chr22:42310966-42311064
  hyper

SEQ ID NO: 425990 - DNA, 47 bp, Homo sapiens; identical to SEQ ID NO: 206153
  chr22:42311269-42311316
  hyper

SEQ ID NO: 425991 - DNA, 132 bp, Homo sapiens; identical to SEQ ID NO: 295494
  chr22:42315449-42315581
  hyper

SEQ ID NO: 425992 - DNA, 209 bp, Homo sapiens; identical to SEQ ID NO: 295495
  chr22:42315681-42315890
  hyper

SEQ ID NO: 425993 - DNA, 80 bp, Homo sapiens; identical to SEQ ID NO: 295496
  chr22:42315949-42316029
  hyper

SEQ ID NO: 425994 - DNA, 144 bp, Homo sapiens; identical to SEQ ID NO: 206154
  chr22:42322755-42322899
  hyper

SEQ ID NO: 425995 - DNA, 413 bp, Homo sapiens; identical to SEQ ID NO: 206155
  chr22:42470216-42470629
  hyper

SEQ ID NO: 425996 - DNA, 400 bp, Homo sapiens; identical to SEQ ID NO: 206156
  chr22:42669780-42670180
  hyper

SEQ ID NO: 425997 - DNA, 327 bp, Homo sapiens; identical to SEQ ID NO: 226390
  chr22:42765054-42765381
  hyper

SEQ ID NO: 425998 - DNA, 261 bp, Homo sapiens; identical to SEQ ID NO: 241751
  chr22:43010938-43011199
  hyper

SEQ ID NO: 425999 - DNA, 248 bp, Homo sapiens; identical to SEQ ID NO: 226391
  chr22:43015553-43015801
  hyper

SEQ ID NO: 426000 - DNA, 117 bp, Homo sapiens; identical to SEQ ID NO: 206158
  chr22:43116624-43116741
  hyper

SEQ ID NO: 426001 - DNA, 47 bp, Homo sapiens; identical to SEQ ID NO: 241754
  chr22:43411069-43411116
  hyper

SEQ ID NO: 426002 - DNA, 296 bp, Homo sapiens; identical to SEQ ID NO: 241755
  chr22:43506224-43506520
  hyper

SEQ ID NO: 426003 - DNA, 126 bp, Homo sapiens; identical to SEQ ID NO: 206159
  chr22:43547284-43547410
  hyper

SEQ ID NO: 426004 - DNA, 88 bp, Homo sapiens; identical to SEQ ID NO: 241757
  chr22:43583724-43583812
  hyper

SEQ ID NO: 426005 - DNA, 55 bp, Homo sapiens; identical to SEQ ID NO: 295512
  chr22:43738651-43738706
  hyper

SEQ ID NO: 426006 - DNA, 157 bp, Homo sapiens; identical to SEQ ID NO: 295513
  chr22:43738743-43738900
  hyper

SEQ ID NO: 426007 - DNA, 51 bp, Homo sapiens; identical to SEQ ID NO: 295514
  chr22:43738928-43738979
  hyper

SEQ ID NO: 426008 - DNA, 132 bp, Homo sapiens; identical to SEQ ID NO: 206161
  chr22:44287922-44288054
  hyper

SEQ ID NO: 426009 - DNA, 168 bp, Homo sapiens; identical to SEQ ID NO: 295520
  chr22:44319565-44319733
  hyper

SEQ ID NO: 426010 - DNA, 98 bp, Homo sapiens; identical to SEQ ID NO: 206162
  chr22:44351287-44351385
  hyper

SEQ ID NO: 426011 - DNA, 215 bp, Homo sapiens; identical to SEQ ID NO: 295526
  chr22:45015983-45016198
  hyper

SEQ ID NO: 426012 - DNA, 232 bp, Homo sapiens; identical to SEQ ID NO: 241774
  chr22:45402268-45402500
  hyper

SEQ ID NO: 426013 - DNA, 112 bp, Homo sapiens; identical to SEQ ID NO: 241777
  chr22:45559225-45559337
  hyper

SEQ ID NO: 426014 - DNA, 43 bp, Homo sapiens; identical to SEQ ID NO: 241778
  chr22:45560664-45560707
  hyper

SEQ ID NO: 426015 - DNA, 87 bp, Homo sapiens; identical to SEQ ID NO: 241779
  chr22:45664601-45664688
  hyper

SEQ ID NO: 426016 - DNA, 149 bp, Homo sapiens; identical to SEQ ID NO: 241781
  chr22:45973979-45974128
  hyper

SEQ ID NO: 426017 - DNA, 107 bp, Homo sapiens; identical to SEQ ID NO: 241782
  chr22:46067494-46067601
  hyper

SEQ ID NO: 426018 - DNA, 101 bp, Homo sapiens; identical to SEQ ID NO: 241784
  chr22:46274465-46274566
  hyper

SEQ ID NO: 426019 - DNA, 38 bp, Homo sapiens; identical to SEQ ID NO: 206173
  chr22:46302277-46302315
  hyper

SEQ ID NO: 426020 - DNA, 57 bp, Homo sapiens; identical to SEQ ID NO: 206174
  chr22:46363503-46363560
  hyper

SEQ ID NO: 426021 - DNA, 486 bp, Homo sapiens
  chr22:46366558-46367044
  hyper
gcctaaggctgaaacgccaggattctggggagggggaggcttcctggcctccaaccgctagacgctgaaattccaaagtcccctggttgatccagttcctggaaaggacaccagaagcaggacccagggaccctggcactttatcagcctgggtccccactgctcaggcggtccccacccgcatgcgccctgctgccccgcccccctcaggcgatgcctccgcagccggggctgcccgccgggcctggagcgctctctgtgcccggaccttgtaattatgtcccacagcccgggaaaccgcgggcctcgcagcatctggctgcggttgcgaacttttgtttcaagatgcgcgactatttatagaaggaaaactggtaggatagtaatttcctaggagcaagaggagaaattggctgcgtctttattaaatgggggtgggggcgaggcgatgtattaggactgcaaccgcatggggggagggggtgg

SEQ ID NO: 426022 - DNA, 519 bp, Homo sapiens; identical to SEQ ID NO: 295552
  chr22:46371534-46372053
  hyper

SEQ ID NO: 426023 - DNA, 304 bp, Homo sapiens; identical to SEQ ID NO: 295553
  chr22:46372457-46372761
  hyper

SEQ ID NO: 426024 - DNA, 175 bp, Homo sapiens; identical to SEQ ID NO: 295554
  chr22:46372769-46372944
  hyper

SEQ ID NO: 426025 - DNA, 97 bp, Homo sapiens; identical to SEQ ID NO: 295555
  chr22:46372974-46373071
  hyper

SEQ ID NO: 426026 - DNA, 165 bp, Homo sapiens; identical to SEQ ID NO: 241790
  chr22:46373380-46373545
  hyper

SEQ ID NO: 426027 - DNA, 368 bp, Homo sapiens; identical to SEQ ID NO: 226399
  chr22:46465893-46466261
  hyper

SEQ ID NO: 426028 - DNA, 359 bp, Homo sapiens; identical to SEQ ID NO: 226400
  chr22:46468170-46468529
  hyper

SEQ ID NO: 426029 - DNA, 42 bp, Homo sapiens; identical to SEQ ID NO: 206178
  chr22:46512497-46512539
  hyper

SEQ ID NO: 426030 - DNA, 31 bp, Homo sapiens; identical to SEQ ID NO: 241792
  chr22:46646367-46646398
  hyper

SEQ ID NO: 426031 - DNA, 111 bp, Homo sapiens; identical to SEQ ID NO: 226401
  chr22:46658172-46658283
  hyper

SEQ ID NO: 426032 - DNA, 170 bp, Homo sapiens; identical to SEQ ID NO: 241794
  chr22:46663531-46663701
  hyper

SEQ ID NO: 426033 - DNA, 179 bp, Homo sapiens; identical to SEQ ID NO: 241795
  chr22:46663946-46664125
  hyper

SEQ ID NO: 426034 - DNA, 87 bp, Homo sapiens; identical to SEQ ID NO: 295564
  chr22:46933002-46933089
  hyper

SEQ ID NO: 426035 - DNA, 255 bp, Homo sapiens
  chr22:46933237-46933492
  hyper
ggcctcccccgcagcttccacttcgagagcactttgcgaaagtttgcgaagttggtttcaagatggctcctccgcgcgtcccgggagggcgccgcgcatcaacctgcggcggcggcggcggctccaggcggctccaggtggctccggcgcgggctcggccggacgggcgtgggaagcggggcgggcccggcgcggggcgggggctgagttcccggagcgggctgggcagctccgcgccgcgcagaccccggcggc

SEQ ID NO: 426036 - DNA, 115 bp, Homo sapiens; identical to SEQ ID NO: 241797
  chr22:47158139-47158254
  hyper

SEQ ID NO: 426037 - DNA, 127 bp, Homo sapiens; identical to SEQ ID NO: 241798
  chr22:47158507-47158634
  hyper

SEQ ID NO: 426038 - DNA, 105 bp, Homo sapiens; identical to SEQ ID NO: 134357
  chr22:48972766-48972871
  hyper

SEQ ID NO: 426039 - DNA, 198 bp, Homo sapiens; identical to SEQ ID NO: 295570
  chr22:50118499-50118697
  hyper

SEQ ID NO: 426040 - DNA, 66 bp, Homo sapiens; identical to SEQ ID NO: 134360
  chr22:50118722-50118788
  hyper

SEQ ID NO: 426041 - DNA, 87 bp, Homo sapiens; identical to SEQ ID NO: 206183
  chr22:50242069-50242156
  hyper

SEQ ID NO: 426042 - DNA, 104 bp, Homo sapiens; identical to SEQ ID NO: 295574
  chr22:50242190-50242294
  hyper

SEQ ID NO: 426043 - DNA, 200 bp, Homo sapiens; identical to SEQ ID NO: 295575
  chr22:50242512-50242712
  hyper

SEQ ID NO: 426044 - DNA, 441 bp, Homo sapiens; identical to SEQ ID NO: 295576
  chr22:50246433-50246874
  hyper

SEQ ID NO: 426045 - DNA, 221 bp, Homo sapiens; identical to SEQ ID NO: 241803
  chr22:50311963-50312184
  hyper

SEQ ID NO: 426046 - DNA, 185 bp, Homo sapiens; identical to SEQ ID NO: 295578
  chr22:50422041-50422226
  hyper

SEQ ID NO: 426047 - DNA, 189 bp, Homo sapiens; identical to SEQ ID NO: 241807
  chr22:50699694-50699883
  hyper

SEQ ID NO: 426048 - DNA, 209 bp, Homo sapiens; identical to SEQ ID NO: 241808
  chr22:50708933-50709142
  hyper

SEQ ID NO: 426049 - DNA, 84 bp, Homo sapiens; identical to SEQ ID NO: 206187
  chr22:50745645-50745729
  hyper

SEQ ID NO: 426050 - DNA, 183 bp, Homo sapiens; identical to SEQ ID NO: 206188
  chr22:50765110-50765293
  hyper

SEQ ID NO: 426051 - DNA, 44 bp, Homo sapiens; identical to SEQ ID NO: 226414
  chr22:50766078-50766122
  hyper

SEQ ID NO: 426052 - DNA, 130 bp, Homo sapiens; identical to SEQ ID NO: 241809
  chr22:50781872-50782002
  hyper

SEQ ID NO: 426053 - DNA, 219 bp, Homo sapiens; identical to SEQ ID NO: 295589
  chr22:50873755-50873974
  hyper

SEQ ID NO: 426054 - DNA, 385 bp, Homo sapiens; identical to SEQ ID NO: 295590
  chr22:50874004-50874389
  hyper

SEQ ID NO: 426055 - DNA, 69 bp, Homo sapiens; identical to SEQ ID NO: 295591
  chr22:50919520-50919589
  hyper

SEQ ID NO: 426056 - DNA, 105 bp, Homo sapiens; identical to SEQ ID NO: 295592
  chr22:50919629-50919734
  hyper

SEQ ID NO: 426057 - DNA, 80 bp, Homo sapiens; identical to SEQ ID NO: 226417
  chr22:50920028-50920108
  hyper

SEQ ID NO: 426058 - DNA, 265 bp, Homo sapiens; identical to SEQ ID NO: 206190
  chr22:50964979-50965244
  hyper

SEQ ID NO: 426059 - DNA, 45 bp, Homo sapiens; identical to SEQ ID NO: 241813
  chr22:50968298-50968343
  hyper

SEQ ID NO: 426060 - DNA, 639 bp, Homo sapiens; identical to SEQ ID NO: 206191
  chr22:50970392-50971031
  hyper

SEQ ID NO: 426061 - DNA, 69 bp, Homo sapiens; identical to SEQ ID NO: 134410
  chr22:51021437-51021506
  hyper

SEQ ID NO: 426062 - DNA, 234 bp, Homo sapiens; identical to SEQ ID NO: 241817
  chr22:51066542-51066776
  hyper

SEQ ID NO: 426063 - DNA, 32 bp, Homo sapiens; identical to SEQ ID NO: 295602
  chr22:51113372-51113404
  hyper

SEQ ID NO: 426064 - DNA, 265 bp, Homo sapiens; identical to SEQ ID NO: 295603
  chr22:51113450-51113715
  hyper

SEQ ID NO: 426065 - DNA, 101 bp, Homo sapiens; identical to SEQ ID NO: 241820
  chrX:2747435-2747536
  hyper

SEQ ID NO: 426066 - DNA, 282 bp, Homo sapiens; identical to SEQ ID NO: 241823
  chrX:3630855-3631137
  hyper

SEQ ID NO: 426067 - DNA, 110 bp, Homo sapiens; identical to SEQ ID NO: 241824
  chrX:3631931-3632041
  hyper

SEQ ID NO: 426068 - DNA, 131 bp, Homo sapiens; identical to SEQ ID NO: 241825
  chrX:3632321-3632452
  hyper

SEQ ID NO: 426069 - DNA, 60 bp, Homo sapiens; identical to SEQ ID NO: 295612
  chrX:6143715-6143775
  hyper

SEQ ID NO: 426070 - DNA, 624 bp, Homo sapiens; identical to SEQ ID NO: 295613
  chrX:6144289-6144913
  hyper

SEQ ID NO: 426071 - DNA, 76 bp, Homo sapiens; identical to SEQ ID NO: 206199
  chrX:6145850-6145926
  hyper

SEQ ID NO: 426072 - DNA, 327 bp, Homo sapiens; identical to SEQ ID NO: 206200
  chrX:7065514-7065841
  hyper

SEQ ID NO: 426073 - DNA, 373 bp, Homo sapiens; identical to SEQ ID NO: 206201
  chrX:7066303-7066676
  hyper

SEQ ID NO: 426074 - DNA, 51 bp, Homo sapiens; identical to SEQ ID NO: 241831
  chrX:9310729-9310780
  hyper

SEQ ID NO: 426075 - DNA, 44 bp, Homo sapiens; identical to SEQ ID NO: 206208
  chrX:10023769-10023813
  hyper

SEQ ID NO: 426076 - DNA, 183 bp, Homo sapiens; identical to SEQ ID NO: 241836
  chrX:10583971-10584154
  hyper

SEQ ID NO: 426077 - DNA, 161 bp, Homo sapiens; identical to SEQ ID NO: 226428
  chrX:11776190-11776351
  hyper

SEQ ID NO: 426078 - DNA, 134 bp, Homo sapiens; identical to SEQ ID NO: 206213
  chrX:15808573-15808707
  hyper

SEQ ID NO: 426079 - DNA, 99 bp, Homo sapiens; identical to SEQ ID NO: 206214
  chrX:15809046-15809145
  hyper

SEQ ID NO: 426080 - DNA, 82 bp, Homo sapiens; identical to SEQ ID NO: 206215
  chrX:15817994-15818076
  hyper

SEQ ID NO: 426081 - DNA, 122 bp, Homo sapiens; identical to SEQ ID NO: 206216
  chrX:15821797-15821919
  hyper

SEQ ID NO: 426082 - DNA, 87 bp, Homo sapiens; identical to SEQ ID NO: 206217
  chrX:15822233-15822320
  hyper

SEQ ID NO: 426083 - DNA, 39 bp, Homo sapiens; identical to SEQ ID NO: 206218
  chrX:15826355-15826394
  hyper

SEQ ID NO: 426084 - DNA, 122 bp, Homo sapiens; identical to SEQ ID NO: 206219
  chrX:15827322-15827444
  hyper

SEQ ID NO: 426085 - DNA, 214 bp, Homo sapiens; identical to SEQ ID NO: 206220
  chrX:15833799-15834013
  hyper

SEQ ID NO: 426086 - DNA, 56 bp, Homo sapiens; identical to SEQ ID NO: 206221
  chrX:15836709-15836765
  hyper

SEQ ID NO: 426087 - DNA, 110 bp, Homo sapiens; identical to SEQ ID NO: 206222
  chrX:15838329-15838439
  hyper

SEQ ID NO: 426088 - DNA, 535 bp, Homo sapiens; identical to SEQ ID NO: 206223
  chrX:15840848-15841383
  hyper

SEQ ID NO: 426089 - DNA, 70 bp, Homo sapiens; identical to SEQ ID NO: 206227
  chrX:27999798-27999868
  hyper

SEQ ID NO: 426090 - DNA, 46 bp, Homo sapiens; identical to SEQ ID NO: 295657
  chrX:39868176-39868222
  hyper

SEQ ID NO: 426091 - DNA, 82 bp, Homo sapiens; identical to SEQ ID NO: 295658
  chrX:39868252-39868334
  hyper

SEQ ID NO: 426092 - DNA, 1155 bp, Homo sapiens; identical to SEQ ID NO: 206230
  chrX:39910498-39911653
  hyper

SEQ ID NO: 426093 - DNA, 157 bp, Homo sapiens; identical to SEQ ID NO: 206231
  chrX:39913138-39913295
  hyper

SEQ ID NO: 426094 - DNA, 78 bp, Homo sapiens; identical to SEQ ID NO: 206232
  chrX:39913508-39913586
  hyper

SEQ ID NO: 426095 - DNA, 146 bp, Homo sapiens; identical to SEQ ID NO: 206233
  chrX:39914620-39914766
  hyper

SEQ ID NO: 426096 - DNA, 167 bp, Homo sapiens; identical to SEQ ID NO: 206234
  chrX:39916407-39916574
  hyper

SEQ ID NO: 426097 - DNA, 31 bp, Homo sapiens
  chrX:39921382-39921413
  hyper
gggacacacctcatagccaagcctggctgcc

SEQ ID NO: 426098 - DNA, 345 bp, Homo sapiens; identical to SEQ ID NO: 206237
  chrX:39922860-39923205
  hyper

SEQ ID NO: 426099 - DNA, 264 bp, Homo sapiens; identical to SEQ ID NO: 206238
  chrX:39923588-39923852
  hyper

SEQ ID NO: 426100 - DNA, 187 bp, Homo sapiens; identical to SEQ ID NO: 206239
  chrX:39930225-39930412
  hyper

SEQ ID NO: 426101 - DNA, 54 bp, Homo sapiens; identical to SEQ ID NO: 206240
  chrX:39930889-39930943
  hyper

SEQ ID NO: 426102 - DNA, 1059 bp, Homo sapiens; identical to SEQ ID NO: 384879
  chrX:39932474-39933533
  hyper

SEQ ID NO: 426103 - DNA, 79 bp, Homo sapiens; identical to SEQ ID NO: 206242
  chrX:39935706-39935785
  hyper

SEQ ID NO: 426104 - DNA, 126 bp, Homo sapiens; identical to SEQ ID NO: 206243
  chrX:39937096-39937222
  hyper

SEQ ID NO: 426105 - DNA, 118 bp, Homo sapiens; identical to SEQ ID NO: 241868
  chrX:40506870-40506988
  hyper

SEQ ID NO: 426106 - DNA, 64 bp, Homo sapiens; identical to SEQ ID NO: 241870
  chrX:40944723-40944787
  hyper

SEQ ID NO: 426107 - DNA, 427 bp, Homo sapiens; identical to SEQ ID NO: 206262
  chrX:41135195-41135622
  hyper

SEQ ID NO: 426108 - DNA, 80 bp, Homo sapiens; identical to SEQ ID NO: 241873
  chrX:44402318-44402398
  hyper

SEQ ID NO: 426109 - DNA, 136 bp, Homo sapiens; identical to SEQ ID NO: 241874
  chrX:44732334-44732470
  hyper

SEQ ID NO: 426110 - DNA, 175 bp, Homo sapiens; identical to SEQ ID NO: 206263
  chrX:44733192-44733367
  hyper

SEQ ID NO: 426111 - DNA, 37 bp, Homo sapiens; identical to SEQ ID NO: 206264
  chrX:54834568-54834605
  hyper

SEQ ID NO: 426112 - DNA, 32 bp, Homo sapiens; identical to SEQ ID NO: 241878
  chrX:71497207-71497239
  hyper

SEQ ID NO: 426113 - DNA, 93 bp, Homo sapiens; identical to SEQ ID NO: 295712
  chrX:71524762-71524855
  hyper

SEQ ID NO: 426114 - DNA, 40 bp, Homo sapiens; identical to SEQ ID NO: 134551
  chrX:71524952-71524992
  hyper

SEQ ID NO: 426115 - DNA, 562 bp, Homo sapiens; identical to SEQ ID NO: 206269
  chrX:73163983-73164545
  hyper

SEQ ID NO: 426116 - DNA, 83 bp, Homo sapiens; identical to SEQ ID NO: 241882
  chrX:92928028-92928111
  hyper

SEQ ID NO: 426117 - DNA, 224 bp, Homo sapiens; identical to SEQ ID NO: 206270
  chrX:92928171-92928395
  hyper

SEQ ID NO: 426118 - DNA, 101 bp, Homo sapiens; identical to SEQ ID NO: 206271
  chrX:92928507-92928608
  hyper

SEQ ID NO: 426119 - DNA, 86 bp, Homo sapiens; identical to SEQ ID NO: 206272
  chrX:92928609-92928695
  hyper

SEQ ID NO: 426120 - DNA, 417 bp, Homo sapiens; identical to SEQ ID NO: 295722
  chrX:92928736-92929153
  hyper

SEQ ID NO: 426121 - DNA, 41 bp, Homo sapiens; identical to SEQ ID NO: 206274
  chrX:107003164-107003205
  hyper

SEQ ID NO: 426122 - DNA, 115 bp, Homo sapiens; identical to SEQ ID NO: 241887
  chrX:110342113-110342228
  hyper

SEQ ID NO: 426123 - DNA, 124 bp, Homo sapiens; identical to SEQ ID NO: 206277
  chrX:123095161-123095285
  hyper

SEQ ID NO: 426124 - DNA, 151 bp, Homo sapiens; identical to SEQ ID NO: 206278
  chrX:123095555-123095706
  hyper

SEQ ID NO: 426125 - DNA, 65 bp, Homo sapiens; identical to SEQ ID NO: 206279
  chrX:123155216-123155281
  hyper

SEQ ID NO: 426126 - DNA, 141 bp, Homo sapiens; identical to SEQ ID NO: 206280
  chrX:123156380-123156521
  hyper

SEQ ID NO: 426127 - DNA, 79 bp, Homo sapiens; identical to SEQ ID NO: 206281
  chrX:123159689-123159768
  hyper

SEQ ID NO: 426128 - DNA, 165 bp, Homo sapiens; identical to SEQ ID NO: 206282
  chrX:123164810-123164975
  hyper

SEQ ID NO: 426129 - DNA, 97 bp, Homo sapiens; identical to SEQ ID NO: 206283
  chrX:123171376-123171473
  hyper

SEQ ID NO: 426130 - DNA, 77 bp, Homo sapiens; identical to SEQ ID NO: 206284
  chrX:123176418-123176495
  hyper

SEQ ID NO: 426131 - DNA, 205 bp, Homo sapiens; identical to SEQ ID NO: 206285
  chrX:123179013-123179218
  hyper

SEQ ID NO: 426132 - DNA, 152 bp, Homo sapiens; identical to SEQ ID NO: 206286
  chrX:123181203-123181355
  hyper

SEQ ID NO: 426133 - DNA, 74 bp, Homo sapiens; identical to SEQ ID NO: 206287
  chrX:123182854-123182928
  hyper

SEQ ID NO: 426134 - DNA, 135 bp, Homo sapiens; identical to SEQ ID NO: 206288
  chrX:123184024-123184159
  hyper

SEQ ID NO: 426135 - DNA, 278 bp, Homo sapiens; identical to SEQ ID NO: 206289
  chrX:123184966-123185244
  hyper

SEQ ID NO: 426136 - DNA, 108 bp, Homo sapiens; identical to SEQ ID NO: 206290
  chrX:123189977-123190085
  hyper

SEQ ID NO: 426137 - DNA, 112 bp, Homo sapiens; identical to SEQ ID NO: 206291
  chrX:123191715-123191827
  hyper

SEQ ID NO: 426138 - DNA, 131 bp, Homo sapiens; identical to SEQ ID NO: 206292
  chrX:123195073-123195204
  hyper

SEQ ID NO: 426139 - DNA, 104 bp, Homo sapiens; identical to SEQ ID NO: 206293
  chrX:123195620-123195724
  hyper

SEQ ID NO: 426140 - DNA, 306 bp, Homo sapiens; identical to SEQ ID NO: 206294
  chrX:123196749-123197055
  hyper

SEQ ID NO: 426141 - DNA, 213 bp, Homo sapiens; identical to SEQ ID NO: 206295
  chrX:123197688-123197901
  hyper

SEQ ID NO: 426142 - DNA, 71 bp, Homo sapiens; identical to SEQ ID NO: 206296
  chrX:123199725-123199796
  hyper

SEQ ID NO: 426143 - DNA, 262 bp, Homo sapiens; identical to SEQ ID NO: 206297
  chrX:123200024-123200286
  hyper

SEQ ID NO: 426144 - DNA, 93 bp, Homo sapiens; identical to SEQ ID NO: 206298
  chrX:123202413-123202506
  hyper

SEQ ID NO: 426145 - DNA, 175 bp, Homo sapiens; identical to SEQ ID NO: 206299
  chrX:123204998-123205173
  hyper

SEQ ID NO: 426146 - DNA, 140 bp, Homo sapiens; identical to SEQ ID NO: 206300
  chrX:123210181-123210321
  hyper

SEQ ID NO: 426147 - DNA, 102 bp, Homo sapiens; identical to SEQ ID NO: 206301
  chrX:123211806-123211908
  hyper

SEQ ID NO: 426148 - DNA, 150 bp, Homo sapiens; identical to SEQ ID NO: 206302
  chrX:123215228-123215378
  hyper

SEQ ID NO: 426149 - DNA, 133 bp, Homo sapiens; identical to SEQ ID NO: 206303
  chrX:123217270-123217403
  hyper

SEQ ID NO: 426150 - DNA, 224 bp, Homo sapiens; identical to SEQ ID NO: 206304
  chrX:123220396-123220620
  hyper

SEQ ID NO: 426151 - DNA, 390 bp, Homo sapiens; identical to SEQ ID NO: 206305
  chrX:123224424-123224814
  hyper

SEQ ID NO: 426152 - DNA, 127 bp, Homo sapiens; identical to SEQ ID NO: 206306
  chrX:123227867-123227994
  hyper

SEQ ID NO: 426153 - DNA, 78 bp, Homo sapiens; identical to SEQ ID NO: 206307
  chrX:123229221-123229299
  hyper

SEQ ID NO: 426154 - DNA, 2083 bp, Homo sapiens; identical to SEQ ID NO: 206308
  chrX:123234423-123236506
  hyper

SEQ ID NO: 426155 - DNA, 136 bp, Homo sapiens; identical to SEQ ID NO: 206309
  chrX:129139163-129139299
  hyper

SEQ ID NO: 426156 - DNA, 91 bp, Homo sapiens; identical to SEQ ID NO: 206310
  chrX:129146553-129146644
  hyper

SEQ ID NO: 426157 - DNA, 2398 bp, Homo sapiens; identical to SEQ ID NO: 384886
  chrX:129147791-129150189
  hyper

SEQ ID NO: 426158 - DNA, 177 bp, Homo sapiens; identical to SEQ ID NO: 206312
  chrX:129154948-129155125
  hyper

SEQ ID NO: 426159 - DNA, 81 bp, Homo sapiens; identical to SEQ ID NO: 206313
  chrX:129156871-129156952
  hyper

SEQ ID NO: 426160 - DNA, 392 bp, Homo sapiens; identical to SEQ ID NO: 206314
  chrX:129158962-129159354
  hyper

SEQ ID NO: 426161 - DNA, 227 bp, Homo sapiens; identical to SEQ ID NO: 206315
  chrX:129162609-129162836
  hyper

SEQ ID NO: 426162 - DNA, 222 bp, Homo sapiens; identical to SEQ ID NO: 206316
  chrX:129168429-129168651
  hyper

SEQ ID NO: 426163 - DNA, 48 bp, Homo sapiens; identical to SEQ ID NO: 401276
  chrX:129171341-129171389
  hyper

SEQ ID NO: 426164 - DNA, 148 bp, Homo sapiens; identical to SEQ ID NO: 206318
  chrX:129173111-129173259
  hyper

SEQ ID NO: 426165 - DNA, 78 bp, Homo sapiens; identical to SEQ ID NO: 206319
  chrX:129184691-129184769
  hyper

SEQ ID NO: 426166 - DNA, 157 bp, Homo sapiens; identical to SEQ ID NO: 206320
  chrX:129185834-129185991
  hyper

SEQ ID NO: 426167 - DNA, 2230 bp, Homo sapiens; identical to SEQ ID NO: 206321
  chrX:129189828-129192058
  hyper

SEQ ID NO: 426168 - DNA, 51 bp, Homo sapiens; identical to SEQ ID NO: 206322
  chrX:130110130-130110181
  hyper

SEQ ID NO: 426169 - DNA, 184 bp, Homo sapiens; identical to SEQ ID NO: 206324
  chrX:133511601-133511785
  hyper

SEQ ID NO: 426170 - DNA, 102 bp, Homo sapiens; identical to SEQ ID NO: 206325
  chrX:133512034-133512136
  hyper

SEQ ID NO: 426171 - DNA, 134 bp, Homo sapiens; identical to SEQ ID NO: 206326
  chrX:133527530-133527664
  hyper

SEQ ID NO: 426172 - DNA, 44 bp, Homo sapiens; identical to SEQ ID NO: 206327
  chrX:133527938-133527982
  hyper

SEQ ID NO: 426173 - DNA, 479 bp, Homo sapiens; identical to SEQ ID NO: 206328
  chrX:133547517-133547996
  hyper

SEQ ID NO: 426174 - DNA, 277 bp, Homo sapiens; identical to SEQ ID NO: 206329
  chrX:133549045-133549322
  hyper

SEQ ID NO: 426175 - DNA, 134 bp, Homo sapiens; identical to SEQ ID NO: 206330
  chrX:133551198-133551332
  hyper

SEQ ID NO: 426176 - DNA, 130 bp, Homo sapiens; identical to SEQ ID NO: 206331
  chrX:133559230-133559360
  hyper

SEQ ID NO: 426177 - DNA, 3132 bp, Homo sapiens; identical to SEQ ID NO: 206332
  chrX:133559690-133562822
  hyper

SEQ ID NO: 426178 - DNA, 191 bp, Homo sapiens; identical to SEQ ID NO: 206333
  chrY:2802951-2803142
  hyper

SEQ ID NO: 426179 - DNA, 39 bp, Homo sapiens; identical to SEQ ID NO: 206334
  chrY:2804296-2804335
  hyper

SEQ ID NO: 426180 - DNA, 83 bp, Homo sapiens; identical to SEQ ID NO: 206335
  chrY:6778627-6778710
  hyper

SEQ ID NO: 426181 - DNA, 34 bp, Homo sapiens
  chrY:7140733-7140767
  hyper
gtcaccactagggggatatgctacccacaaaatg

SEQ ID NO: 426182 - DNA, 53 bp, Homo sapiens
  chrY:7140797-7140850
  hyper
ggggccagaaatccaaagcctgagccaggttcagacttcctgactcccactcc

SEQ ID NO: 426183 - DNA, 56 bp, Homo sapiens; identical to SEQ ID NO: 206337
  chrY:14533221-14533277
  hyper

SEQ ID NO: 426184 - DNA, 113 bp, Homo sapiens; identical to SEQ ID NO: 206341
  chrY:15591519-15591632
  hyper

SEQ ID NO: 426185 - DNA, 61 bp, Homo sapiens; identical to SEQ ID NO: 206346
  chrY:21729023-21729084
  hyper

SEQ ID NO: 426186 - DNA, 44 bp, Homo sapiens; identical to SEQ ID NO: 206347
  AC209420.3_23583-33864:1609-1653
  hyper

SEQ ID NO: 426187 - DNA, 45 bp, Homo sapiens; identical to SEQ ID NO: 206352
  FP325318.4_87426-89530:1058-1103
  hyper

SEQ ID NO: 426188 - DNA, 7860 bp, Homo sapiens; identical to SEQ ID NO: 58444
  HPV16:0-7860
  hyper

SEQ ID NO: 426189 - DNA, 7800 bp, Homo sapiens; identical to SEQ ID NO: 58445
  HPV18:0-7800
  hyper

SEQ ID NO: 426190 - DNA, 96 bp, Homo sapiens; identical to SEQ ID NO: 241915
  JH636052.4:1376242-1376338
  hyper

SEQ ID NO: 426191 - DNA, 112 bp, Homo sapiens; identical to SEQ ID NO: 206354
  NW_001838402.2_289580-297926:6069-6181
  hyper

SEQ ID NO: 426192 - DNA, 33 bp, Homo sapiens; identical to SEQ ID NO: 247270
  chr1:809313-809346
  hypo

SEQ ID NO: 426193 - DNA, 35 bp, Homo sapiens; identical to SEQ ID NO: 247271
  chr1:834689-834724
  hypo

SEQ ID NO: 426194 - DNA, 42 bp, Homo sapiens; identical to SEQ ID NO: 247272
  chr1:851057-851099
  hypo

SEQ ID NO: 426195 - DNA, 64 bp, Homo sapiens; identical to SEQ ID NO: 197231
  chr1:859736-859800
  hypo

SEQ ID NO: 426196 - DNA, 405 bp, Homo sapiens; identical to SEQ ID NO: 247273
  chr1:864734-865139
  hypo

SEQ ID NO: 426197 - DNA, 149 bp, Homo sapiens; identical to SEQ ID NO: 206356
  chr1:872320-872469
  hypo

SEQ ID NO: 426198 - DNA, 37 bp, Homo sapiens; identical to SEQ ID NO: 206357
  chr1:879361-879398
  hypo

SEQ ID NO: 426199 - DNA, 788 bp, Homo sapiens; identical to SEQ ID NO: 206362
  chr1:899137-899925
  hypo

SEQ ID NO: 426200 - DNA, 617 bp, Homo sapiens; identical to SEQ ID NO: 247280
  chr1:900230-900847
  hypo

SEQ ID NO: 426201 - DNA, 179 bp, Homo sapiens; identical to SEQ ID NO: 247281
  chr1:906924-907103
  hypo

SEQ ID NO: 426202 - DNA, 1005 bp, Homo sapiens; identical to SEQ ID NO: 247283
  chr1:915023-916028
  hypo

SEQ ID NO: 426203 - DNA, 214 bp, Homo sapiens; identical to SEQ ID NO: 206364
  chr1:918153-918367
  hypo

SEQ ID NO: 426204 - DNA, 53 bp, Homo sapiens; identical to SEQ ID NO: 206365
  chr1:918577-918630
  hypo

SEQ ID NO: 426205 - DNA, 898 bp, Homo sapiens; identical to SEQ ID NO: 221173
  chr1:935362-936260
  hypo

SEQ ID NO: 426206 - DNA, 392 bp, Homo sapiens; identical to SEQ ID NO: 197235
  chr1:955508-955900
  hypo

SEQ ID NO: 426207 - DNA, 206 bp, Homo sapiens; identical to SEQ ID NO: 247286
  chr1:959107-959313
  hypo

SEQ ID NO: 426208 - DNA, 35 bp, Homo sapiens; identical to SEQ ID NO: 277802
  chr1:975907-975942
  hypo

SEQ ID NO: 426209 - DNA, 221 bp, Homo sapiens; identical to SEQ ID NO: 247287
  chr1:980098-980319
  hypo

SEQ ID NO: 426210 - DNA, 191 bp, Homo sapiens; identical to SEQ ID NO: 206371
  chr1:982294-982485
  hypo

SEQ ID NO: 426211 - DNA, 228 bp, Homo sapiens; identical to SEQ ID NO: 206372
  chr1:984139-984367
  hypo

SEQ ID NO: 426212 - DNA, 266 bp, Homo sapiens; identical to SEQ ID NO: 295848
  chr1:984401-984667
  hypo

SEQ ID NO: 426213 - DNA, 395 bp, Homo sapiens; identical to SEQ ID NO: 295849
  chr1:984737-985132
  hypo

SEQ ID NO: 426214 - DNA, 1209 bp, Homo sapiens; identical to SEQ ID NO: 247290
  chr1:987799-989008
  hypo

SEQ ID NO: 426215 - DNA, 197 bp, Homo sapiens; identical to SEQ ID NO: 247291
  chr1:989210-989407
  hypo

SEQ ID NO: 426216 - DNA, 207 bp, Homo sapiens; identical to SEQ ID NO: 247292
  chr1:990294-990501
  hypo

SEQ ID NO: 426217 - DNA, 436 bp, Homo sapiens; identical to SEQ ID NO: 206375
  chr1:990531-990967
  hypo

SEQ ID NO: 426218 - DNA, 46 bp, Homo sapiens; identical to SEQ ID NO: 247294
  chr1:990997-991043
  hypo

SEQ ID NO: 426219 - DNA, 61 bp, Homo sapiens; identical to SEQ ID NO: 221176
  chr1:994999-995060
  hypo

SEQ ID NO: 426220 - DNA, 254 bp, Homo sapiens; identical to SEQ ID NO: 247295
  chr1:1018240-1018494
  hypo

SEQ ID NO: 426221 - DNA, 127 bp, Homo sapiens; identical to SEQ ID NO: 206377
  chr1:1019320-1019447
  hypo

SEQ ID NO: 426222 - DNA, 92 bp, Homo sapiens; identical to SEQ ID NO: 247297
  chr1:1022918-1023010
  hypo

SEQ ID NO: 426223 - DNA, 327 bp, Homo sapiens; identical to SEQ ID NO: 247299
  chr1:1046072-1046399
  hypo

SEQ ID NO: 426224 - DNA, 84 bp, Homo sapiens
  chr1:1048203-1048287
  hypo
gtctggccctcctccaagggtacttcctttccttcctgctctaaagcttcttcaacaactttcactcctgctctaaaacttgcc

SEQ ID NO: 426225 - DNA, 130 bp, Homo sapiens; identical to SEQ ID NO: 221177
  chr1:1052182-1052312
  hypo

SEQ ID NO: 426226 - DNA, 670 bp, Homo sapiens; identical to SEQ ID NO: 247302
  chr1:1062954-1063624
  hypo

SEQ ID NO: 426227 - DNA, 266 bp, Homo sapiens; identical to SEQ ID NO: 206381
  chr1:1064886-1065152
  hypo

SEQ ID NO: 426228 - DNA, 478 bp, Homo sapiens; identical to SEQ ID NO: 295867
  chr1:1065879-1066357
  hypo

SEQ ID NO: 426229 - DNA, 72 bp, Homo sapiens; identical to SEQ ID NO: 295868
  chr1:1066394-1066466
  hypo

SEQ ID NO: 426230 - DNA, 99 bp, Homo sapiens; identical to SEQ ID NO: 247305
  chr1:1066721-1066820
  hypo

SEQ ID NO: 426231 - DNA, 316 bp, Homo sapiens; identical to SEQ ID NO: 206382
  chr1:1069739-1070055
  hypo

SEQ ID NO: 426232 - DNA, 57 bp, Homo sapiens; identical to SEQ ID NO: 206383
  chr1:1079129-1079186
  hypo

SEQ ID NO: 426233 - DNA, 171 bp, Homo sapiens; identical to SEQ ID NO: 247310
  chr1:1084062-1084233
  hypo

SEQ ID NO: 426234 - DNA, 113 bp, Homo sapiens; identical to SEQ ID NO: 247311
  chr1:1091616-1091729
  hypo

SEQ ID NO: 426235 - DNA, 153 bp, Homo sapiens; identical to SEQ ID NO: 247312
  chr1:1094263-1094416
  hypo

SEQ ID NO: 426236 - DNA, 213 bp, Homo sapiens; identical to SEQ ID NO: 295875
  chr1:1094749-1094962
  hypo

SEQ ID NO: 426237 - DNA, 248 bp, Homo sapiens; identical to SEQ ID NO: 295876
  chr1:1095004-1095252
  hypo

SEQ ID NO: 426238 - DNA, 558 bp, Homo sapiens; identical to SEQ ID NO: 295877
  chr1:1095497-1096055
  hypo

SEQ ID NO: 426239 - DNA, 240 bp, Homo sapiens; identical to SEQ ID NO: 247317
  chr1:1111233-1111473
  hypo

SEQ ID NO: 426240 - DNA, 85 bp, Homo sapiens; identical to SEQ ID NO: 247318
  chr1:1114509-1114594
  hypo

SEQ ID NO: 426241 - DNA, 38 bp, Homo sapiens; identical to SEQ ID NO: 247320
  chr1:1140775-1140813
  hypo

SEQ ID NO: 426242 - DNA, 32 bp, Homo sapiens; identical to SEQ ID NO: 206386
  chr1:1146886-1146918
  hypo

SEQ ID NO: 426243 - DNA, 261 bp, Homo sapiens; identical to SEQ ID NO: 206387
  chr1:1151687-1151948
  hypo

SEQ ID NO: 426244 - DNA, 68 bp, Homo sapiens; identical to SEQ ID NO: 247325
  chr1:1153575-1153643
  hypo

SEQ ID NO: 426245 - DNA, 254 bp, Homo sapiens; identical to SEQ ID NO: 247326
  chr1:1154786-1155040
  hypo

SEQ ID NO: 426246 - DNA, 128 bp, Homo sapiens; identical to SEQ ID NO: 206391
  chr1:1190081-1190209
  hypo

SEQ ID NO: 426247 - DNA, 552 bp, Homo sapiens; identical to SEQ ID NO: 295893
  chr1:1190395-1190947
  hypo

SEQ ID NO: 426248 - DNA, 67 bp, Homo sapiens; identical to SEQ ID NO: 206393
  chr1:1221510-1221577
  hypo

SEQ ID NO: 426249 - DNA, 31 bp, Homo sapiens; identical to SEQ ID NO: 206394
  chr1:1221607-1221638
  hypo

SEQ ID NO: 426250 - DNA, 751 bp, Homo sapiens; identical to SEQ ID NO: 247335
  chr1:1228254-1229005
  hypo

SEQ ID NO: 426251 - DNA, 93 bp, Homo sapiens; identical to SEQ ID NO: 295901
  chr1:1236078-1236171
  hypo

SEQ ID NO: 426252 - DNA, 226 bp, Homo sapiens; identical to SEQ ID NO: 206396
  chr1:1238482-1238708
  hypo

SEQ ID NO: 426253 - DNA, 33 bp, Homo sapiens; identical to SEQ ID NO: 247343
  chr1:1258113-1258146
  hypo

SEQ ID NO: 426254 - DNA, 212 bp, Homo sapiens; identical to SEQ ID NO: 295909
  chr1:1264887-1265099
  hypo

SEQ ID NO: 426255 - DNA, 148 bp, Homo sapiens; identical to SEQ ID NO: 247345
  chr1:1265340-1265488
  hypo

SEQ ID NO: 426256 - DNA, 31 bp, Homo sapiens; identical to SEQ ID NO: 247346
  chr1:1265518-1265549
  hypo

SEQ ID NO: 426257 - DNA, 150 bp, Homo sapiens; identical to SEQ ID NO: 206400
  chr1:1266864-1267014
  hypo

SEQ ID NO: 426258 - DNA, 108 bp, Homo sapiens; identical to SEQ ID NO: 206401
  chr1:1272384-1272492
  hypo

SEQ ID NO: 426259 - DNA, 110 bp, Homo sapiens; identical to SEQ ID NO: 206402
  chr1:1273361-1273471
  hypo

SEQ ID NO: 426260 - DNA, 112 bp, Homo sapiens; identical to SEQ ID NO: 247351
  chr1:1277898-1278010
  hypo

SEQ ID NO: 426261 - DNA, 115 bp, Homo sapiens; identical to SEQ ID NO: 206403
  chr1:1280781-1280896
  hypo

SEQ ID NO: 426262 - DNA, 285 bp, Homo sapiens; identical to SEQ ID NO: 206404
  chr1:1280926-1281211
  hypo

SEQ ID NO: 426263 - DNA, 37 bp, Homo sapiens; identical to SEQ ID NO: 247353
  chr1:1329022-1329059
  hypo

SEQ ID NO: 426264 - DNA, 412 bp, Homo sapiens; identical to SEQ ID NO: 247355
  chr1:1377720-1378132
  hypo

SEQ ID NO: 426265 - DNA, 33 bp, Homo sapiens; identical to SEQ ID NO: 247356
  chr1:1388341-1388374
  hypo

SEQ ID NO: 426266 - DNA, 47 bp, Homo sapiens; identical to SEQ ID NO: 206406
  chr1:1389833-1389880
  hypo

SEQ ID NO: 426267 - DNA, 56 bp, Homo sapiens; identical to SEQ ID NO: 247358
  chr1:1390129-1390185
  hypo

SEQ ID NO: 426268 - DNA, 158 bp, Homo sapiens; identical to SEQ ID NO: 206407
  chr1:1400495-1400653
  hypo

SEQ ID NO: 426269 - DNA, 87 bp, Homo sapiens; identical to SEQ ID NO: 206408
  chr1:1421578-1421665
  hypo

SEQ ID NO: 426270 - DNA, 307 bp, Homo sapiens; identical to SEQ ID NO: 247361
  chr1:1476831-1477138
  hypo

SEQ ID NO: 426271 - DNA, 227 bp, Homo sapiens; identical to SEQ ID NO: 247362
  chr1:1487054-1487281
  hypo

SEQ ID NO: 426272 - DNA, 482 bp, Homo sapiens; identical to SEQ ID NO: 247365
  chr1:1494401-1494883
  hypo

SEQ ID NO: 426273 - DNA, 123 bp, Homo sapiens; identical to SEQ ID NO: 247366
  chr1:1496748-1496871
  hypo

SEQ ID NO: 426274 - DNA, 122 bp, Homo sapiens; identical to SEQ ID NO: 247368
  chr1:1519092-1519214
  hypo

SEQ ID NO: 426275 - DNA, 95 bp, Homo sapiens; identical to SEQ ID NO: 247369
  chr1:1525408-1525503
  hypo

SEQ ID NO: 426276 - DNA, 206 bp, Homo sapiens; identical to SEQ ID NO: 247370
  chr1:1552946-1553152
  hypo

SEQ ID NO: 426277 - DNA, 404 bp, Homo sapiens; identical to SEQ ID NO: 295939
  chr1:1563259-1563663
  hypo

SEQ ID NO: 426278 - DNA, 279 bp, Homo sapiens; identical to SEQ ID NO: 295940
  chr1:1563766-1564045
  hypo

SEQ ID NO: 426279 - DNA, 222 bp, Homo sapiens; identical to SEQ ID NO: 247373
  chr1:1597513-1597735
  hypo

SEQ ID NO: 426280 - DNA, 48 bp, Homo sapiens; identical to SEQ ID NO: 247374
  chr1:1610925-1610973
  hypo

SEQ ID NO: 426281 - DNA, 342 bp, Homo sapiens; identical to SEQ ID NO: 247375
  chr1:1611923-1612265
  hypo

SEQ ID NO: 426282 - DNA, 42 bp, Homo sapiens; identical to SEQ ID NO: 247376
  chr1:1612385-1612427
  hypo

SEQ ID NO: 426283 - DNA, 104 bp, Homo sapiens; identical to SEQ ID NO: 295945
  chr1:1625888-1625992
  hypo

SEQ ID NO: 426284 - DNA, 193 bp, Homo sapiens; identical to SEQ ID NO: 206415
  chr1:1647565-1647758
  hypo

SEQ ID NO: 426285 - DNA, 38 bp, Homo sapiens; identical to SEQ ID NO: 247379
  chr1:1652607-1652645
  hypo

SEQ ID NO: 426286 - DNA, 134 bp, Homo sapiens; identical to SEQ ID NO: 247380
  chr1:1668525-1668659
  hypo

SEQ ID NO: 426287 - DNA, 44 bp, Homo sapiens; identical to SEQ ID NO: 247381
  chr1:1671716-1671760
  hypo

SEQ ID NO: 426288 - DNA, 128 bp, Homo sapiens; identical to SEQ ID NO: 247382
  chr1:1691803-1691931
  hypo

SEQ ID NO: 426289 - DNA, 449 bp, Homo sapiens; identical to SEQ ID NO: 247383
  chr1:1694219-1694668
  hypo

SEQ ID NO: 426290 - DNA, 141 bp, Homo sapiens
  chr1:1706108-1706249
  hypo
ggtcaccactgtattttttgacaagggtgagtcaggactgacacttaattcatttgtttgatatattaactgctttaaaaggacacacaatgctagctgcaccaaagtgcattcaaattcctcatagcatgaatctaattt

SEQ ID NO: 426291 - DNA, 52 bp, Homo sapiens; identical to SEQ ID NO: 247385
  chr1:1713455-1713507
  hypo

SEQ ID NO: 426292 - DNA, 37 bp, Homo sapiens; identical to SEQ ID NO: 414664
  chr1:1713537-1713574
  hypo

SEQ ID NO: 426293 - DNA, 90 bp, Homo sapiens; identical to SEQ ID NO: 247386
  chr1:1715002-1715092
  hypo

SEQ ID NO: 426294 - DNA, 72 bp, Homo sapiens; identical to SEQ ID NO: 247388
  chr1:1718795-1718867
  hypo

SEQ ID NO: 426295 - DNA, 280 bp, Homo sapiens; identical to SEQ ID NO: 247389
  chr1:1724694-1724974
  hypo

SEQ ID NO: 426296 - DNA, 98 bp, Homo sapiens; identical to SEQ ID NO: 206416
  chr1:1729268-1729366
  hypo

SEQ ID NO: 426297 - DNA, 238 bp, Homo sapiens; identical to SEQ ID NO: 277822
  chr1:1737718-1737956
  hypo

SEQ ID NO: 426298 - DNA, 44 bp, Homo sapiens; identical to SEQ ID NO: 197244
  chr1:1747214-1747258
  hypo

SEQ ID NO: 426299 - DNA, 36 bp, Homo sapiens; identical to SEQ ID NO: 206419
  chr1:1781840-1781876
  hypo

SEQ ID NO: 426300 - DNA, 159 bp, Homo sapiens; identical to SEQ ID NO: 247393
  chr1:1848271-1848430
  hypo

SEQ ID NO: 426301 - DNA, 154 bp, Homo sapiens; identical to SEQ ID NO: 295965
  chr1:1861661-1861815
  hypo

SEQ ID NO: 426302 - DNA, 214 bp, Homo sapiens; identical to SEQ ID NO: 206420
  chr1:1874787-1875001
  hypo

SEQ ID NO: 426303 - DNA, 144 bp, Homo sapiens; identical to SEQ ID NO: 206421
  chr1:1888228-1888372
  hypo

SEQ ID NO: 426304 - DNA, 503 bp, Homo sapiens; identical to SEQ ID NO: 247397
  chr1:1888803-1889306
  hypo

SEQ ID NO: 426305 - DNA, 367 bp, Homo sapiens; identical to SEQ ID NO: 247398
  chr1:1901958-1902325
  hypo

SEQ ID NO: 426306 - DNA, 33 bp, Homo sapiens; identical to SEQ ID NO: 295972
  chr1:1914128-1914161
  hypo

SEQ ID NO: 426307 - DNA, 368 bp, Homo sapiens; identical to SEQ ID NO: 295973
  chr1:1914191-1914559
  hypo

SEQ ID NO: 426308 - DNA, 59 bp, Homo sapiens; identical to SEQ ID NO: 295974
  chr1:1923521-1923580
  hypo

SEQ ID NO: 426309 - DNA, 35 bp, Homo sapiens; identical to SEQ ID NO: 389954
  chr1:1974742-1974777
  hypo

SEQ ID NO: 426310 - DNA, 212 bp, Homo sapiens; identical to SEQ ID NO: 247404
  chr1:1990854-1991066
  hypo

SEQ ID NO: 426311 - DNA, 121 bp, Homo sapiens; identical to SEQ ID NO: 247405
  chr1:1992995-1993116
  hypo

SEQ ID NO: 426312 - DNA, 166 bp, Homo sapiens; identical to SEQ ID NO: 247406
  chr1:1999032-1999198
  hypo

SEQ ID NO: 426313 - DNA, 351 bp, Homo sapiens; identical to SEQ ID NO: 401347
  chr1:2014199-2014550
  hypo

SEQ ID NO: 426314 - DNA, 408 bp, Homo sapiens; identical to SEQ ID NO: 206426
  chr1:2016617-2017025
  hypo

SEQ ID NO: 426315 - DNA, 101 bp, Homo sapiens; identical to SEQ ID NO: 247409
  chr1:2025268-2025369
  hypo

SEQ ID NO: 426316 - DNA, 201 bp, Homo sapiens; identical to SEQ ID NO: 206428
  chr1:2039530-2039731
  hypo

SEQ ID NO: 426317 - DNA, 185 bp, Homo sapiens; identical to SEQ ID NO: 206429
  chr1:2041058-2041243
  hypo

SEQ ID NO: 426318 - DNA, 51 bp, Homo sapiens; identical to SEQ ID NO: 247413
  chr1:2058200-2058251
  hypo

SEQ ID NO: 426319 - DNA, 218 bp, Homo sapiens; identical to SEQ ID NO: 206430
  chr1:2065387-2065605
  hypo

SEQ ID NO: 426320 - DNA, 434 bp, Homo sapiens; identical to SEQ ID NO: 206431
  chr1:2065918-2066352
  hypo

SEQ ID NO: 426321 - DNA, 154 bp, Homo sapiens; identical to SEQ ID NO: 247416
  chr1:2068692-2068846
  hypo

SEQ ID NO: 426322 - DNA, 167 bp, Homo sapiens; identical to SEQ ID NO: 247417
  chr1:2069360-2069527
  hypo

SEQ ID NO: 426323 - DNA, 245 bp, Homo sapiens; identical to SEQ ID NO: 247419
  chr1:2103460-2103705
  hypo

SEQ ID NO: 426324 - DNA, 521 bp, Homo sapiens; identical to SEQ ID NO: 247420
  chr1:2107353-2107874
  hypo

SEQ ID NO: 426325 - DNA, 264 bp, Homo sapiens; identical to SEQ ID NO: 247421
  chr1:2111815-2112079
  hypo

SEQ ID NO: 426326 - DNA, 623 bp, Homo sapiens; identical to SEQ ID NO: 247422
  chr1:2116358-2116981
  hypo

SEQ ID NO: 426327 - DNA, 33 bp, Homo sapiens; identical to SEQ ID NO: 206435
  chr1:2121714-2121747
  hypo

SEQ ID NO: 426328 - DNA, 64 bp, Homo sapiens; identical to SEQ ID NO: 247424
  chr1:2123197-2123261
  hypo

SEQ ID NO: 426329 - DNA, 164 bp, Homo sapiens; identical to SEQ ID NO: 247425
  chr1:2123462-2123626
  hypo

SEQ ID NO: 426330 - DNA, 246 bp, Homo sapiens; identical to SEQ ID NO: 296004
  chr1:2129650-2129896
  hypo

SEQ ID NO: 426331 - DNA, 380 bp, Homo sapiens; identical to SEQ ID NO: 206436
  chr1:2132534-2132914
  hypo

SEQ ID NO: 426332 - DNA, 114 bp, Homo sapiens; identical to SEQ ID NO: 277832
  chr1:2135930-2136044
  hypo

SEQ ID NO: 426333 - DNA, 251 bp, Homo sapiens; identical to SEQ ID NO: 277833
  chr1:2136088-2136339
  hypo

SEQ ID NO: 426334 - DNA, 100 bp, Homo sapiens; identical to SEQ ID NO: 206441
  chr1:2154150-2154250
  hypo

SEQ ID NO: 426335 - DNA, 337 bp, Homo sapiens; identical to SEQ ID NO: 247432
  chr1:2167223-2167560
  hypo

SEQ ID NO: 426336 - DNA, 91 bp, Homo sapiens; identical to SEQ ID NO: 58672
  chr1:2188947-2189038
  hypo

SEQ ID NO: 426337 - DNA, 496 bp, Homo sapiens; identical to SEQ ID NO: 206444
  chr1:2190967-2191463
  hypo

SEQ ID NO: 426338 - DNA, 131 bp, Homo sapiens; identical to SEQ ID NO: 247436
  chr1:2205382-2205513
  hypo

SEQ ID NO: 426339 - DNA, 125 bp, Homo sapiens; identical to SEQ ID NO: 206445
  chr1:2218535-2218660
  hypo

SEQ ID NO: 426340 - DNA, 472 bp, Homo sapiens; identical to SEQ ID NO: 247438
  chr1:2234639-2235111
  hypo

SEQ ID NO: 426341 - DNA, 564 bp, Homo sapiens; identical to SEQ ID NO: 247439
  chr1:2237785-2238349
  hypo

SEQ ID NO: 426342 - DNA, 162 bp, Homo sapiens; identical to SEQ ID NO: 206447
  chr1:2238918-2239080
  hypo

SEQ ID NO: 426343 - DNA, 204 bp, Homo sapiens; identical to SEQ ID NO: 206450
  chr1:2254568-2254772
  hypo

SEQ ID NO: 426344 - DNA, 522 bp, Homo sapiens; identical to SEQ ID NO: 247444
  chr1:2259051-2259573
  hypo

SEQ ID NO: 426345 - DNA, 329 bp, Homo sapiens; identical to SEQ ID NO: 296029
  chr1:2268384-2268713
  hypo

SEQ ID NO: 426346 - DNA, 84 bp, Homo sapiens; identical to SEQ ID NO: 296030
  chr1:2268743-2268827
  hypo

SEQ ID NO: 426347 - DNA, 145 bp, Homo sapiens; identical to SEQ ID NO: 206456
  chr1:2269856-2270001
  hypo

SEQ ID NO: 426348 - DNA, 426 bp, Homo sapiens; identical to SEQ ID NO: 206457
  chr1:2270534-2270960
  hypo

SEQ ID NO: 426349 - DNA, 318 bp, Homo sapiens; identical to SEQ ID NO: 296033
  chr1:2273549-2273867
  hypo

SEQ ID NO: 426350 - DNA, 103 bp, Homo sapiens; identical to SEQ ID NO: 296034
  chr1:2273909-2274012
  hypo

SEQ ID NO: 426351 - DNA, 693 bp, Homo sapiens; identical to SEQ ID NO: 247453
  chr1:2279094-2279787
  hypo

SEQ ID NO: 426352 - DNA, 37 bp, Homo sapiens; identical to SEQ ID NO: 206461
  chr1:2283082-2283119
  hypo

SEQ ID NO: 426353 - DNA, 324 bp, Homo sapiens; identical to SEQ ID NO: 247455
  chr1:2288153-2288477
  hypo

SEQ ID NO: 426354 - DNA, 35 bp, Homo sapiens; identical to SEQ ID NO: 247456
  chr1:2303587-2303622
  hypo

SEQ ID NO: 426355 - DNA, 31 bp, Homo sapiens; identical to SEQ ID NO: 296043
  chr1:2307894-2307925
  hypo

SEQ ID NO: 426356 - DNA, 150 bp, Homo sapiens; identical to SEQ ID NO: 296044
  chr1:2307955-2308105
  hypo

SEQ ID NO: 426357 - DNA, 195 bp, Homo sapiens; identical to SEQ ID NO: 296045
  chr1:2309953-2310148
  hypo

SEQ ID NO: 426358 - DNA, 162 bp, Homo sapiens; identical to SEQ ID NO: 296046
  chr1:2310244-2310406
  hypo

SEQ ID NO: 426359 - DNA, 76 bp, Homo sapiens; identical to SEQ ID NO: 247460
  chr1:2315089-2315165
  hypo

SEQ ID NO: 426360 - DNA, 36 bp, Homo sapiens; identical to SEQ ID NO: 296048
  chr1:2316466-2316502
  hypo

SEQ ID NO: 426361 - DNA, 619 bp, Homo sapiens; identical to SEQ ID NO: 247462
  chr1:2328571-2329190
  hypo

SEQ ID NO: 426362 - DNA, 201 bp, Homo sapiens; identical to SEQ ID NO: 206465
  chr1:2329575-2329776
  hypo

SEQ ID NO: 426363 - DNA, 218 bp, Homo sapiens; identical to SEQ ID NO: 206469
  chr1:2334771-2334989
  hypo

SEQ ID NO: 426364 - DNA, 335 bp, Homo sapiens; identical to SEQ ID NO: 206470
  chr1:2336000-2336335
  hypo

SEQ ID NO: 426365 - DNA, 32 bp, Homo sapiens; identical to SEQ ID NO: 206471
  chr1:2336365-2336397
  hypo

SEQ ID NO: 426366 - DNA, 308 bp, Homo sapiens; identical to SEQ ID NO: 296058
  chr1:2336427-2336735
  hypo

SEQ ID NO: 426367 - DNA, 209 bp, Homo sapiens; identical to SEQ ID NO: 296059
  chr1:2337854-2338063
  hypo

SEQ ID NO: 426368 - DNA, 192 bp, Homo sapiens; identical to SEQ ID NO: 206473
  chr1:2341160-2341352
  hypo

SEQ ID NO: 426369 - DNA, 268 bp, Homo sapiens; identical to SEQ ID NO: 247473
  chr1:2384535-2384803
  hypo

SEQ ID NO: 426370 - DNA, 161 bp, Homo sapiens; identical to SEQ ID NO: 247474
  chr1:2403083-2403244
  hypo

SEQ ID NO: 426371 - DNA, 54 bp, Homo sapiens; identical to SEQ ID NO: 206475
  chr1:2411364-2411418
  hypo

SEQ ID NO: 426372 - DNA, 275 bp, Homo sapiens; identical to SEQ ID NO: 247476
  chr1:2412168-2412443
  hypo

SEQ ID NO: 426373 - DNA, 35 bp, Homo sapiens; identical to SEQ ID NO: 206477
  chr1:2412563-2412598
  hypo

SEQ ID NO: 426374 - DNA, 114 bp, Homo sapiens; identical to SEQ ID NO: 247479
  chr1:2430550-2430664
  hypo

SEQ ID NO: 426375 - DNA, 149 bp, Homo sapiens; identical to SEQ ID NO: 206478
  chr1:2439887-2440036
  hypo

SEQ ID NO: 426376 - DNA, 200 bp, Homo sapiens; identical to SEQ ID NO: 247482
  chr1:2445342-2445542
  hypo

SEQ ID NO: 426377 - DNA, 361 bp, Homo sapiens; identical to SEQ ID NO: 206479
  chr1:2450394-2450755
  hypo

SEQ ID NO: 426378 - DNA, 177 bp, Homo sapiens; identical to SEQ ID NO: 206481
  chr1:2463122-2463299
  hypo

SEQ ID NO: 426379 - DNA, 109 bp, Homo sapiens; identical to SEQ ID NO: 296076
  chr1:2468442-2468551
  hypo

SEQ ID NO: 426380 - DNA, 60 bp, Homo sapiens; identical to SEQ ID NO: 296077
  chr1:2468582-2468642
  hypo

SEQ ID NO: 426381 - DNA, 100 bp, Homo sapiens; identical to SEQ ID NO: 296078
  chr1:2468792-2468892
  hypo

SEQ ID NO: 426382 - DNA, 71 bp, Homo sapiens; identical to SEQ ID NO: 197256
  chr1:2477791-2477862
  hypo

SEQ ID NO: 426383 - DNA, 89 bp, Homo sapiens; identical to SEQ ID NO: 296082
  chr1:2507183-2507272
  hypo

SEQ ID NO: 426384 - DNA, 89 bp, Homo sapiens; identical to SEQ ID NO: 206485
  chr1:2522316-2522405
  hypo

SEQ ID NO: 426385 - DNA, 399 bp, Homo sapiens; identical to SEQ ID NO: 277845
  chr1:2559942-2560341
  hypo

SEQ ID NO: 426386 - DNA, 122 bp, Homo sapiens; identical to SEQ ID NO: 296091
  chr1:2719757-2719879
  hypo

SEQ ID NO: 426387 - DNA, 119 bp, Homo sapiens; identical to SEQ ID NO: 296092
  chr1:2719918-2720037
  hypo

SEQ ID NO: 426388 - DNA, 151 bp, Homo sapiens; identical to SEQ ID NO: 247499
  chr1:2746955-2747106
  hypo

SEQ ID NO: 426389 - DNA, 91 bp, Homo sapiens; identical to SEQ ID NO: 247500
  chr1:2752977-2753068
  hypo

SEQ ID NO: 426390 - DNA, 68 bp, Homo sapiens; identical to SEQ ID NO: 247501
  chr1:2798429-2798497
  hypo

SEQ ID NO: 426391 - DNA, 190 bp, Homo sapiens; identical to SEQ ID NO: 247502
  chr1:2810936-2811126
  hypo

SEQ ID NO: 426392 - DNA, 247 bp, Homo sapiens; identical to SEQ ID NO: 247504
  chr1:2823836-2824083
  hypo

SEQ ID NO: 426393 - DNA, 143 bp, Homo sapiens; identical to SEQ ID NO: 206489
  chr1:2833979-2834122
  hypo

SEQ ID NO: 426394 - DNA, 129 bp, Homo sapiens; identical to SEQ ID NO: 296105
  chr1:2859551-2859680
  hypo

SEQ ID NO: 426395 - DNA, 276 bp, Homo sapiens; identical to SEQ ID NO: 247511
  chr1:2878440-2878716
  hypo

SEQ ID NO: 426396 - DNA, 186 bp, Homo sapiens; identical to SEQ ID NO: 247512
  chr1:2908573-2908759
  hypo

SEQ ID NO: 426397 - DNA, 240 bp, Homo sapiens; identical to SEQ ID NO: 247514
  chr1:2936252-2936492
  hypo

SEQ ID NO: 426398 - DNA, 316 bp, Homo sapiens; identical to SEQ ID NO: 197259
  chr1:2984307-2984623
  hypo

SEQ ID NO: 426399 - DNA, 570 bp, Homo sapiens; identical to SEQ ID NO: 277849
  chr1:2985452-2986022
  hypo

SEQ ID NO: 426400 - DNA, 576 bp, Homo sapiens; identical to SEQ ID NO: 247516
  chr1:2997502-2998078
  hypo

SEQ ID NO: 426401 - DNA, 153 bp, Homo sapiens; identical to SEQ ID NO: 247520
  chr1:3006837-3006990
  hypo

SEQ ID NO: 426402 - DNA, 514 bp, Homo sapiens; identical to SEQ ID NO: 247521
  chr1:3007587-3008101
  hypo

SEQ ID NO: 426403 - DNA, 43 bp, Homo sapiens; identical to SEQ ID NO: 247523
  chr1:3013633-3013676
  hypo

SEQ ID NO: 426404 - DNA, 100 bp, Homo sapiens; identical to SEQ ID NO: 247524
  chr1:3015909-3016009
  hypo

SEQ ID NO: 426405 - DNA, 260 bp, Homo sapiens; identical to SEQ ID NO: 247526
  chr1:3034298-3034558
  hypo

SEQ ID NO: 426406 - DNA, 269 bp, Homo sapiens; identical to SEQ ID NO: 296127
  chr1:3035176-3035445
  hypo

SEQ ID NO: 426407 - DNA, 102 bp, Homo sapiens; identical to SEQ ID NO: 247529
  chr1:3037697-3037799
  hypo

SEQ ID NO: 426408 - DNA, 329 bp, Homo sapiens; identical to SEQ ID NO: 247532
  chr1:3059516-3059845
  hypo

SEQ ID NO: 426409 - DNA, 189 bp, Homo sapiens; identical to SEQ ID NO: 247533
  chr1:3063570-3063759
  hypo

SEQ ID NO: 426410 - DNA, 448 bp, Homo sapiens; identical to SEQ ID NO: 296135
  chr1:3079872-3080320
  hypo

SEQ ID NO: 426411 - DNA, 186 bp, Homo sapiens; identical to SEQ ID NO: 247535
  chr1:3086477-3086663
  hypo

SEQ ID NO: 426412 - DNA, 231 bp, Homo sapiens; identical to SEQ ID NO: 247536
  chr1:3094871-3095102
  hypo

SEQ ID NO: 426413 - DNA, 50 bp, Homo sapiens; identical to SEQ ID NO: 247537
  chr1:3106931-3106981
  hypo

SEQ ID NO: 426414 - DNA, 146 bp, Homo sapiens; identical to SEQ ID NO: 206501
  chr1:3107294-3107440
  hypo

SEQ ID NO: 426415 - DNA, 145 bp, Homo sapiens; identical to SEQ ID NO: 206502
  chr1:3109586-3109731
  hypo

SEQ ID NO: 426416 - DNA, 167 bp, Homo sapiens; identical to SEQ ID NO: 247540
  chr1:3110663-3110830
  hypo

SEQ ID NO: 426417 - DNA, 146 bp, Homo sapiens; identical to SEQ ID NO: 247543
  chr1:3122495-3122641
  hypo

SEQ ID NO: 426418 - DNA, 414 bp, Homo sapiens; identical to SEQ ID NO: 247544
  chr1:3122848-3123262
  hypo

SEQ ID NO: 426419 - DNA, 584 bp, Homo sapiens; identical to SEQ ID NO: 206507
  chr1:3127861-3128445
  hypo

SEQ ID NO: 426420 - DNA, 255 bp, Homo sapiens; identical to SEQ ID NO: 206508
  chr1:3128477-3128732
  hypo

SEQ ID NO: 426421 - DNA, 122 bp, Homo sapiens; identical to SEQ ID NO: 247548
  chr1:3130375-3130497
  hypo

SEQ ID NO: 426422 - DNA, 94 bp, Homo sapiens; identical to SEQ ID NO: 247549
  chr1:3147314-3147408
  hypo

SEQ ID NO: 426423 - DNA, 189 bp, Homo sapiens; identical to SEQ ID NO: 206509
  chr1:3179305-3179494
  hypo

SEQ ID NO: 426424 - DNA, 41 bp, Homo sapiens; identical to SEQ ID NO: 206512
  chr1:3184584-3184625
  hypo

SEQ ID NO: 426425 - DNA, 300 bp, Homo sapiens; identical to SEQ ID NO: 206513
  chr1:3184697-3184997
  hypo

SEQ ID NO: 426426 - DNA, 133 bp, Homo sapiens; identical to SEQ ID NO: 247555
  chr1:3194281-3194414
  hypo

SEQ ID NO: 426427 - DNA, 190 bp, Homo sapiens; identical to SEQ ID NO: 247557
  chr1:3204234-3204424
  hypo

SEQ ID NO: 426428 - DNA, 196 bp, Homo sapiens; identical to SEQ ID NO: 247560
  chr1:3248786-3248982
  hypo

SEQ ID NO: 426429 - DNA, 236 bp, Homo sapiens; identical to SEQ ID NO: 247561
  chr1:3258153-3258389
  hypo

SEQ ID NO: 426430 - DNA, 163 bp, Homo sapiens; identical to SEQ ID NO: 296169
  chr1:3315208-3315371
  hypo

SEQ ID NO: 426431 - DNA, 228 bp, Homo sapiens; identical to SEQ ID NO: 247565
  chr1:3323791-3324019
  hypo

SEQ ID NO: 426432 - DNA, 238 bp, Homo sapiens; identical to SEQ ID NO: 206519
  chr1:3327630-3327868
  hypo

SEQ ID NO: 426433 - DNA, 341 bp, Homo sapiens; identical to SEQ ID NO: 221196
  chr1:3370921-3371262
  hypo

SEQ ID NO: 426434 - DNA, 77 bp, Homo sapiens; identical to SEQ ID NO: 247575
  chr1:3373241-3373318
  hypo

SEQ ID NO: 426435 - DNA, 42 bp, Homo sapiens; identical to SEQ ID NO: 247576
  chr1:3373606-3373648
  hypo

SEQ ID NO: 426436 - DNA, 63 bp, Homo sapiens; identical to SEQ ID NO: 247577
  chr1:3377102-3377165
  hypo

SEQ ID NO: 426437 - DNA, 110 bp, Homo sapiens; identical to SEQ ID NO: 206525
  chr1:3378249-3378359
  hypo

SEQ ID NO: 426438 - DNA, 152 bp, Homo sapiens; identical to SEQ ID NO: 247581
  chr1:3384392-3384544
  hypo

SEQ ID NO: 426439 - DNA, 275 bp, Homo sapiens; identical to SEQ ID NO: 247583
  chr1:3387193-3387468
  hypo

SEQ ID NO: 426440 - DNA, 73 bp, Homo sapiens; identical to SEQ ID NO: 206529
  chr1:3393357-3393430
  hypo

SEQ ID NO: 426441 - DNA, 379 bp, Homo sapiens; identical to SEQ ID NO: 247586
  chr1:3406736-3407115
  hypo

SEQ ID NO: 426442 - DNA, 517 bp, Homo sapiens; identical to SEQ ID NO: 296201
  chr1:3410515-3411032
  hypo

SEQ ID NO: 426443 - DNA, 344 bp, Homo sapiens; identical to SEQ ID NO: 247589
  chr1:3413536-3413880
  hypo

SEQ ID NO: 426444 - DNA, 493 bp, Homo sapiens; identical to SEQ ID NO: 247590
  chr1:3422675-3423168
  hypo

SEQ ID NO: 426445 - DNA, 187 bp, Homo sapiens; identical to SEQ ID NO: 247593
  chr1:3436853-3437040
  hypo

SEQ ID NO: 426446 - DNA, 523 bp, Homo sapiens; identical to SEQ ID NO: 197262
  chr1:3447461-3447984
  hypo

SEQ ID NO: 426447 - DNA, 160 bp, Homo sapiens; identical to SEQ ID NO: 206533
  chr1:3448901-3449061
  hypo

SEQ ID NO: 426448 - DNA, 252 bp, Homo sapiens; identical to SEQ ID NO: 247596
  chr1:3466090-3466342
  hypo

SEQ ID NO: 426449 - DNA, 201 bp, Homo sapiens; identical to SEQ ID NO: 296210
  chr1:3466668-3466869
  hypo

SEQ ID NO: 426450 - DNA, 197 bp, Homo sapiens; identical to SEQ ID NO: 296211
  chr1:3467544-3467741
  hypo

SEQ ID NO: 426451 - DNA, 36 bp, Homo sapiens; identical to SEQ ID NO: 247599
  chr1:3468969-3469005
  hypo

SEQ ID NO: 426452 - DNA, 195 bp, Homo sapiens; identical to SEQ ID NO: 247600
  chr1:3470763-3470958
  hypo

SEQ ID NO: 426453 - DNA, 137 bp, Homo sapiens; identical to SEQ ID NO: 247601
  chr1:3484124-3484261
  hypo

SEQ ID NO: 426454 - DNA, 212 bp, Homo sapiens; identical to SEQ ID NO: 247602
  chr1:3512769-3512981
  hypo

SEQ ID NO: 426455 - DNA, 89 bp, Homo sapiens; identical to SEQ ID NO: 247603
  chr1:3524385-3524474
  hypo

SEQ ID NO: 426456 - DNA, 694 bp, Homo sapiens; identical to SEQ ID NO: 247604
  chr1:3548480-3549174
  hypo

SEQ ID NO: 426457 - DNA, 251 bp, Homo sapiens; identical to SEQ ID NO: 247606
  chr1:3556469-3556720
  hypo

SEQ ID NO: 426458 - DNA, 365 bp, Homo sapiens; identical to SEQ ID NO: 247607
  chr1:3559616-3559981
  hypo

SEQ ID NO: 426459 - DNA, 104 bp, Homo sapiens; identical to SEQ ID NO: 206536
  chr1:3562356-3562460
  hypo

SEQ ID NO: 426460 - DNA, 151 bp, Homo sapiens; identical to SEQ ID NO: 206537
  chr1:3576146-3576297
  hypo

SEQ ID NO: 426461 - DNA, 674 bp, Homo sapiens; identical to SEQ ID NO: 206538
  chr1:3615176-3615850
  hypo

SEQ ID NO: 426462 - DNA, 37 bp, Homo sapiens; identical to SEQ ID NO: 206539
  chr1:3622993-3623030
  hypo

SEQ ID NO: 426463 - DNA, 247 bp, Homo sapiens; identical to SEQ ID NO: 247614
  chr1:3623373-3623620
  hypo

SEQ ID NO: 426464 - DNA, 303 bp, Homo sapiens; identical to SEQ ID NO: 296226
  chr1:3644396-3644699
  hypo

SEQ ID NO: 426465 - DNA, 42 bp, Homo sapiens; identical to SEQ ID NO: 296227
  chr1:3644774-3644816
  hypo

SEQ ID NO: 426466 - DNA, 149 bp, Homo sapiens; identical to SEQ ID NO: 206541
  chr1:3651334-3651483
  hypo

SEQ ID NO: 426467 - DNA, 211 bp, Homo sapiens; identical to SEQ ID NO: 206542
  chr1:3655597-3655808
  hypo

SEQ ID NO: 426468 - DNA, 35 bp, Homo sapiens; identical to SEQ ID NO: 296234
  chr1:3664741-3664776
  hypo

SEQ ID NO: 426469 - DNA, 186 bp, Homo sapiens; identical to SEQ ID NO: 206548
  chr1:3695643-3695829
  hypo

SEQ ID NO: 426470 - DNA, 171 bp, Homo sapiens; identical to SEQ ID NO: 247625
  chr1:3696129-3696300
  hypo

SEQ ID NO: 426471 - DNA, 357 bp, Homo sapiens; identical to SEQ ID NO: 247629
  chr1:3731493-3731850
  hypo

SEQ ID NO: 426472 - DNA, 45 bp, Homo sapiens; identical to SEQ ID NO: 206551
  chr1:3746112-3746157
  hypo

SEQ ID NO: 426473 - DNA, 64 bp, Homo sapiens; identical to SEQ ID NO: 247631
  chr1:3781806-3781870
  hypo

SEQ ID NO: 426474 - DNA, 101 bp, Homo sapiens; identical to SEQ ID NO: 247632
  chr1:3786101-3786202
  hypo

SEQ ID NO: 426475 - DNA, 185 bp, Homo sapiens; identical to SEQ ID NO: 247633
  chr1:3786685-3786870
  hypo

SEQ ID NO: 426476 - DNA, 304 bp, Homo sapiens; identical to SEQ ID NO: 277872
  chr1:3817790-3818094
  hypo

SEQ ID NO: 426477 - DNA, 208 bp, Homo sapiens; identical to SEQ ID NO: 247634
  chr1:3818733-3818941
  hypo

SEQ ID NO: 426478 - DNA, 283 bp, Homo sapiens; identical to SEQ ID NO: 247636
  chr1:4057085-4057368
  hypo

SEQ ID NO: 426479 - DNA, 36 bp, Homo sapiens; identical to SEQ ID NO: 247637
  chr1:4212157-4212193
  hypo

SEQ ID NO: 426480 - DNA, 202 bp, Homo sapiens; identical to SEQ ID NO: 247638
  chr1:4359785-4359987
  hypo

SEQ ID NO: 426481 - DNA, 35 bp, Homo sapiens; identical to SEQ ID NO: 247639
  chr1:4391727-4391762
  hypo

SEQ ID NO: 426482 - DNA, 34 bp, Homo sapiens; identical to SEQ ID NO: 247640
  chr1:4392062-4392096
  hypo

SEQ ID NO: 426483 - DNA, 124 bp, Homo sapiens; identical to SEQ ID NO: 247641
  chr1:4460854-4460978
  hypo

SEQ ID NO: 426484 - DNA, 88 bp, Homo sapiens; identical to SEQ ID NO: 247642
  chr1:4468042-4468130
  hypo

SEQ ID NO: 426485 - DNA, 64 bp, Homo sapiens; identical to SEQ ID NO: 296259
  chr1:4542624-4542688
  hypo

SEQ ID NO: 426486 - DNA, 239 bp, Homo sapiens; identical to SEQ ID NO: 296260
  chr1:4542763-4543002
  hypo

SEQ ID NO: 426487 - DNA, 283 bp, Homo sapiens; identical to SEQ ID NO: 247646
  chr1:4675281-4675564
  hypo

SEQ ID NO: 426488 - DNA, 53 bp, Homo sapiens; identical to SEQ ID NO: 247647
  chr1:4696907-4696960
  hypo

SEQ ID NO: 426489 - DNA, 98 bp, Homo sapiens; identical to SEQ ID NO: 247649
  chr1:4794016-4794114
  hypo

SEQ ID NO: 426490 - DNA, 61 bp, Homo sapiens; identical to SEQ ID NO: 247650
  chr1:5371595-5371656
  hypo

SEQ ID NO: 426491 - DNA, 95 bp, Homo sapiens; identical to SEQ ID NO: 247651
  chr1:5587302-5587397
  hypo

SEQ ID NO: 426492 - DNA, 289 bp, Homo sapiens; identical to SEQ ID NO: 247653
  chr1:5839922-5840211
  hypo

SEQ ID NO: 426493 - DNA, 235 bp, Homo sapiens; identical to SEQ ID NO: 247655
  chr1:5922581-5922816
  hypo

SEQ ID NO: 426494 - DNA, 188 bp, Homo sapiens; identical to SEQ ID NO: 296272
  chr1:5924108-5924296
  hypo

SEQ ID NO: 426495 - DNA, 139 bp, Homo sapiens; identical to SEQ ID NO: 296273
  chr1:5924431-5924570
  hypo

SEQ ID NO: 426496 - DNA, 51 bp, Homo sapiens; identical to SEQ ID NO: 206556
  chr1:5927906-5927957
  hypo

SEQ ID NO: 426497 - DNA, 73 bp, Homo sapiens; identical to SEQ ID NO: 247658
  chr1:5931364-5931437
  hypo

SEQ ID NO: 426498 - DNA, 121 bp, Homo sapiens; identical to SEQ ID NO: 247659
  chr1:5931724-5931845
  hypo

SEQ ID NO: 426499 - DNA, 87 bp, Homo sapiens; identical to SEQ ID NO: 296277
  chr1:5932999-5933086
  hypo

SEQ ID NO: 426500 - DNA, 229 bp, Homo sapiens; identical to SEQ ID NO: 206558
  chr1:5933144-5933373
  hypo

SEQ ID NO: 426501 - DNA, 69 bp, Homo sapiens; identical to SEQ ID NO: 206559
  chr1:5935554-5935623
  hypo

SEQ ID NO: 426502 - DNA, 398 bp, Homo sapiens; identical to SEQ ID NO: 206560
  chr1:5940547-5940945
  hypo

SEQ ID NO: 426503 - DNA, 199 bp, Homo sapiens; identical to SEQ ID NO: 247663
  chr1:5941341-5941540
  hypo

SEQ ID NO: 426504 - DNA, 709 bp, Homo sapiens; identical to SEQ ID NO: 247664
  chr1:5942073-5942782
  hypo

SEQ ID NO: 426505 - DNA, 244 bp, Homo sapiens; identical to SEQ ID NO: 206562
  chr1:5943159-5943403
  hypo

SEQ ID NO: 426506 - DNA, 72 bp, Homo sapiens; identical to SEQ ID NO: 296284
  chr1:5944449-5944521
  hypo

SEQ ID NO: 426507 - DNA, 85 bp, Homo sapiens; identical to SEQ ID NO: 247667
  chr1:5946366-5946451
  hypo

SEQ ID NO: 426508 - DNA, 216 bp, Homo sapiens; identical to SEQ ID NO: 247668
  chr1:5946683-5946899
  hypo

SEQ ID NO: 426509 - DNA, 263 bp, Homo sapiens; identical to SEQ ID NO: 247669
  chr1:5947296-5947559
  hypo

SEQ ID NO: 426510 - DNA, 145 bp, Homo sapiens; identical to SEQ ID NO: 206565
  chr1:5958567-5958712
  hypo

SEQ ID NO: 426511 - DNA, 78 bp, Homo sapiens; identical to SEQ ID NO: 247672
  chr1:5977997-5978075
  hypo

SEQ ID NO: 426512 - DNA, 129 bp, Homo sapiens; identical to SEQ ID NO: 247673
  chr1:5987704-5987833
  hypo

SEQ ID NO: 426513 - DNA, 91 bp, Homo sapiens; identical to SEQ ID NO: 247674
  chr1:6007181-6007272
  hypo

SEQ ID NO: 426514 - DNA, 394 bp, Homo sapiens; identical to SEQ ID NO: 247676
  chr1:6047768-6048162
  hypo

SEQ ID NO: 426515 - DNA, 111 bp, Homo sapiens; identical to SEQ ID NO: 277877
  chr1:6053655-6053766
  hypo

SEQ ID NO: 426516 - DNA, 104 bp, Homo sapiens; identical to SEQ ID NO: 296298
  chr1:6056053-6056157
  hypo

SEQ ID NO: 426517 - DNA, 154 bp, Homo sapiens; identical to SEQ ID NO: 296299
  chr1:6056651-6056805
  hypo

SEQ ID NO: 426518 - DNA, 129 bp, Homo sapiens; identical to SEQ ID NO: 296300
  chr1:6059781-6059910
  hypo

SEQ ID NO: 426519 - DNA, 127 bp, Homo sapiens; identical to SEQ ID NO: 296301
  chr1:6059974-6060101
  hypo

SEQ ID NO: 426520 - DNA, 299 bp, Homo sapiens; identical to SEQ ID NO: 247680
  chr1:6076558-6076857
  hypo

SEQ ID NO: 426521 - DNA, 68 bp, Homo sapiens; identical to SEQ ID NO: 247681
  chr1:6111618-6111686
  hypo

SEQ ID NO: 426522 - DNA, 148 bp, Homo sapiens; identical to SEQ ID NO: 206568
  chr1:6129708-6129856
  hypo

SEQ ID NO: 426523 - DNA, 243 bp, Homo sapiens; identical to SEQ ID NO: 247684
  chr1:6133884-6134127
  hypo

SEQ ID NO: 426524 - DNA, 43 bp, Homo sapiens; identical to SEQ ID NO: 247685
  chr1:6134427-6134470
  hypo

SEQ ID NO: 426525 - DNA, 83 bp, Homo sapiens; identical to SEQ ID NO: 197275
  chr1:6137223-6137306
  hypo

SEQ ID NO: 426526 - DNA, 221 bp, Homo sapiens; identical to SEQ ID NO: 247688
  chr1:6155344-6155565
  hypo

SEQ ID NO: 426527 - DNA, 60 bp, Homo sapiens; identical to SEQ ID NO: 296313
  chr1:6188971-6189031
  hypo

SEQ ID NO: 426528 - DNA, 73 bp, Homo sapiens; identical to SEQ ID NO: 296314
  chr1:6189061-6189134
  hypo

SEQ ID NO: 426529 - DNA, 416 bp, Homo sapiens; identical to SEQ ID NO: 247692
  chr1:6202201-6202617
  hypo

SEQ ID NO: 426530 - DNA, 64 bp, Homo sapiens; identical to SEQ ID NO: 247693
  chr1:6243323-6243387
  hypo

SEQ ID NO: 426531 - DNA, 329 bp, Homo sapiens; identical to SEQ ID NO: 247694
  chr1:6278215-6278544
  hypo

SEQ ID NO: 426532 - DNA, 69 bp, Homo sapiens; identical to SEQ ID NO: 206571
  chr1:6280174-6280243
  hypo

SEQ ID NO: 426533 - DNA, 161 bp, Homo sapiens; identical to SEQ ID NO: 197279
  chr1:6296163-6296324
  hypo

SEQ ID NO: 426534 - DNA, 82 bp, Homo sapiens; identical to SEQ ID NO: 247698
  chr1:6297113-6297195
  hypo

SEQ ID NO: 426535 - DNA, 39 bp, Homo sapiens; identical to SEQ ID NO: 206577
  chr1:6313883-6313922
  hypo

SEQ ID NO: 426536 - DNA, 133 bp, Homo sapiens; identical to SEQ ID NO: 206578
  chr1:6313952-6314085
  hypo

SEQ ID NO: 426537 - DNA, 215 bp, Homo sapiens; identical to SEQ ID NO: 197280
  chr1:6321178-6321393
  hypo

SEQ ID NO: 426538 - DNA, 101 bp, Homo sapiens; identical to SEQ ID NO: 247701
  chr1:6329524-6329625
  hypo

SEQ ID NO: 426539 - DNA, 255 bp, Homo sapiens; identical to SEQ ID NO: 247703
  chr1:6333299-6333554
  hypo

SEQ ID NO: 426540 - DNA, 178 bp, Homo sapiens; identical to SEQ ID NO: 206582
  chr1:6334536-6334714
  hypo

SEQ ID NO: 426541 - DNA, 247 bp, Homo sapiens; identical to SEQ ID NO: 247706
  chr1:6338580-6338827
  hypo

SEQ ID NO: 426542 - DNA, 85 bp, Homo sapiens; identical to SEQ ID NO: 247707
  chr1:6340040-6340125
  hypo

SEQ ID NO: 426543 - DNA, 110 bp, Homo sapiens; identical to SEQ ID NO: 296337
  chr1:6360870-6360980
  hypo

SEQ ID NO: 426544 - DNA, 111 bp, Homo sapiens; identical to SEQ ID NO: 247711
  chr1:6361454-6361565
  hypo

SEQ ID NO: 426545 - DNA, 254 bp, Homo sapiens; identical to SEQ ID NO: 247712
  chr1:6361805-6362059
  hypo

SEQ ID NO: 426546 - DNA, 35 bp, Homo sapiens; identical to SEQ ID NO: 206586
  chr1:6363866-6363901
  hypo

SEQ ID NO: 426547 - DNA, 138 bp, Homo sapiens; identical to SEQ ID NO: 206587
  chr1:6382126-6382264
  hypo

SEQ ID NO: 426548 - DNA, 153 bp, Homo sapiens; identical to SEQ ID NO: 247715
  chr1:6385813-6385966
  hypo

SEQ ID NO: 426549 - DNA, 65 bp, Homo sapiens; identical to SEQ ID NO: 247717
  chr1:6397255-6397320
  hypo

SEQ ID NO: 426550 - DNA, 282 bp, Homo sapiens; identical to SEQ ID NO: 247718
  chr1:6405497-6405779
  hypo

SEQ ID NO: 426551 - DNA, 179 bp, Homo sapiens; identical to SEQ ID NO: 206589
  chr1:6409753-6409932
  hypo

SEQ ID NO: 426552 - DNA, 240 bp, Homo sapiens; identical to SEQ ID NO: 247721
  chr1:6415193-6415433
  hypo

SEQ ID NO: 426553 - DNA, 159 bp, Homo sapiens; identical to SEQ ID NO: 296349
  chr1:6422666-6422825
  hypo

SEQ ID NO: 426554 - DNA, 141 bp, Homo sapiens; identical to SEQ ID NO: 247723
  chr1:6434929-6435070
  hypo

SEQ ID NO: 426555 - DNA, 53 bp, Homo sapiens; identical to SEQ ID NO: 296351
  chr1:6445425-6445478
  hypo

SEQ ID NO: 426556 - DNA, 205 bp, Homo sapiens; identical to SEQ ID NO: 59004
  chr1:6445510-6445715
  hypo

SEQ ID NO: 426557 - DNA, 329 bp, Homo sapiens; identical to SEQ ID NO: 277898
  chr1:6484602-6484931
  hypo

SEQ ID NO: 426558 - DNA, 328 bp, Homo sapiens; identical to SEQ ID NO: 206590
  chr1:6486768-6487096
  hypo

SEQ ID NO: 426559 - DNA, 55 bp, Homo sapiens; identical to SEQ ID NO: 247727
  chr1:6504649-6504704
  hypo

SEQ ID NO: 426560 - DNA, 138 bp, Homo sapiens; identical to SEQ ID NO: 102452
  chr1:6526181-6526319
  hypo

SEQ ID NO: 426561 - DNA, 115 bp, Homo sapiens; identical to SEQ ID NO: 206591
  chr1:6527795-6527910
  hypo

SEQ ID NO: 426562 - DNA, 242 bp, Homo sapiens; identical to SEQ ID NO: 206592
  chr1:6528247-6528489
  hypo

SEQ ID NO: 426563 - DNA, 368 bp, Homo sapiens; identical to SEQ ID NO: 247730
  chr1:6530601-6530969
  hypo

SEQ ID NO: 426564 - DNA, 70 bp, Homo sapiens; identical to SEQ ID NO: 247731
  chr1:6534098-6534168
  hypo

SEQ ID NO: 426565 - DNA, 372 bp, Homo sapiens; identical to SEQ ID NO: 247732
  chr1:6534593-6534965
  hypo

SEQ ID NO: 426566 - DNA, 62 bp, Homo sapiens; identical to SEQ ID NO: 206593
  chr1:6537439-6537501
  hypo

SEQ ID NO: 426567 - DNA, 190 bp, Homo sapiens; identical to SEQ ID NO: 206594
  chr1:6537537-6537727
  hypo

SEQ ID NO: 426568 - DNA, 160 bp, Homo sapiens; identical to SEQ ID NO: 247734
  chr1:6562949-6563109
  hypo

SEQ ID NO: 426569 - DNA, 73 bp, Homo sapiens; identical to SEQ ID NO: 247735
  chr1:6565119-6565192
  hypo

SEQ ID NO: 426570 - DNA, 32 bp, Homo sapiens; identical to SEQ ID NO: 206595
  chr1:6639452-6639484
  hypo

SEQ ID NO: 426571 - DNA, 348 bp, Homo sapiens; identical to SEQ ID NO: 247738
  chr1:6648178-6648526
  hypo

SEQ ID NO: 426572 - DNA, 89 bp, Homo sapiens; identical to SEQ ID NO: 247739
  chr1:6653433-6653522
  hypo

SEQ ID NO: 426573 - DNA, 194 bp, Homo sapiens; identical to SEQ ID NO: 221214
  chr1:6659237-6659431
  hypo

SEQ ID NO: 426574 - DNA, 40 bp, Homo sapiens; identical to SEQ ID NO: 206596
  chr1:6672155-6672195
  hypo

SEQ ID NO: 426575 - DNA, 470 bp, Homo sapiens; identical to SEQ ID NO: 277908
  chr1:6675268-6675738
  hypo

SEQ ID NO: 426576 - DNA, 141 bp, Homo sapiens; identical to SEQ ID NO: 206597
  chr1:6675989-6676130
  hypo

SEQ ID NO: 426577 - DNA, 94 bp, Homo sapiens; identical to SEQ ID NO: 247742
  chr1:6688528-6688622
  hypo

SEQ ID NO: 426578 - DNA, 155 bp, Homo sapiens; identical to SEQ ID NO: 247746
  chr1:6720536-6720691
  hypo

SEQ ID NO: 426579 - DNA, 74 bp, Homo sapiens; identical to SEQ ID NO: 296382
  chr1:6776388-6776462
  hypo

SEQ ID NO: 426580 - DNA, 83 bp, Homo sapiens; identical to SEQ ID NO: 206603
  chr1:6871010-6871093
  hypo

SEQ ID NO: 426581 - DNA, 61 bp, Homo sapiens; identical to SEQ ID NO: 296384
  chr1:6964989-6965050
  hypo

SEQ ID NO: 426582 - DNA, 135 bp, Homo sapiens; identical to SEQ ID NO: 247752
  chr1:7279268-7279403
  hypo

SEQ ID NO: 426583 - DNA, 45 bp, Homo sapiens; identical to SEQ ID NO: 206604
  chr1:7407200-7407245
  hypo

SEQ ID NO: 426584 - DNA, 84 bp, Homo sapiens; identical to SEQ ID NO: 206605
  chr1:7550323-7550407
  hypo

SEQ ID NO: 426585 - DNA, 144 bp, Homo sapiens; identical to SEQ ID NO: 206606
  chr1:7550707-7550851
  hypo

SEQ ID NO: 426586 - DNA, 523 bp, Homo sapiens; identical to SEQ ID NO: 247756
  chr1:7560633-7561156
  hypo

SEQ ID NO: 426587 - DNA, 164 bp, Homo sapiens; identical to SEQ ID NO: 247757
  chr1:7562782-7562946
  hypo

SEQ ID NO: 426588 - DNA, 125 bp, Homo sapiens; identical to SEQ ID NO: 247758
  chr1:7567307-7567432
  hypo

SEQ ID NO: 426589 - DNA, 237 bp, Homo sapiens; identical to SEQ ID NO: 247759
  chr1:7700371-7700608
  hypo

SEQ ID NO: 426590 - DNA, 139 bp, Homo sapiens; identical to SEQ ID NO: 247760
  chr1:7710594-7710733
  hypo

SEQ ID NO: 426591 - DNA, 110 bp, Homo sapiens; identical to SEQ ID NO: 247761
  chr1:7717013-7717123
  hypo

SEQ ID NO: 426592 - DNA, 80 bp, Homo sapiens; identical to SEQ ID NO: 135597
  chr1:7728716-7728796
  hypo

SEQ ID NO: 426593 - DNA, 162 bp, Homo sapiens; identical to SEQ ID NO: 247764
  chr1:7742818-7742980
  hypo

SEQ ID NO: 426594 - DNA, 34 bp, Homo sapiens; identical to SEQ ID NO: 277911
  chr1:7764522-7764556
  hypo

SEQ ID NO: 426595 - DNA, 42 bp, Homo sapiens; identical to SEQ ID NO: 277912
  chr1:7764737-7764779
  hypo

SEQ ID NO: 426596 - DNA, 267 bp, Homo sapiens; identical to SEQ ID NO: 247765
  chr1:7777934-7778201
  hypo

SEQ ID NO: 426597 - DNA, 40 bp, Homo sapiens; identical to SEQ ID NO: 197291
  chr1:7843653-7843693
  hypo

SEQ ID NO: 426598 - DNA, 57 bp, Homo sapiens; identical to SEQ ID NO: 206612
  chr1:8044539-8044596
  hypo

SEQ ID NO: 426599 - DNA, 255 bp, Homo sapiens; identical to SEQ ID NO: 206613
  chr1:8044977-8045232
  hypo

SEQ ID NO: 426600 - DNA, 34 bp, Homo sapiens; identical to SEQ ID NO: 247769
  chr1:8106657-8106691
  hypo

SEQ ID NO: 426601 - DNA, 147 bp, Homo sapiens; identical to SEQ ID NO: 247770
  chr1:8148903-8149050
  hypo

SEQ ID NO: 426602 - DNA, 82 bp, Homo sapiens; identical to SEQ ID NO: 296411
  chr1:8152892-8152974
  hypo

SEQ ID NO: 426603 - DNA, 170 bp, Homo sapiens; identical to SEQ ID NO: 247772
  chr1:8212952-8213122
  hypo

SEQ ID NO: 426604 - DNA, 42 bp, Homo sapiens; identical to SEQ ID NO: 206616
  chr1:8385723-8385765
  hypo

SEQ ID NO: 426605 - DNA, 105 bp, Homo sapiens; identical to SEQ ID NO: 247774
  chr1:8385999-8386104
  hypo

SEQ ID NO: 426606 - DNA, 69 bp, Homo sapiens; identical to SEQ ID NO: 247775
  chr1:8395503-8395572
  hypo

SEQ ID NO: 426607 - DNA, 213 bp, Homo sapiens; identical to SEQ ID NO: 247776
  chr1:8399490-8399703
  hypo

SEQ ID NO: 426608 - DNA, 206 bp, Homo sapiens; identical to SEQ ID NO: 247777
  chr1:8427365-8427571
  hypo

SEQ ID NO: 426609 - DNA, 300 bp, Homo sapiens; identical to SEQ ID NO: 247778
  chr1:8437575-8437875
  hypo

SEQ ID NO: 426610 - DNA, 61 bp, Homo sapiens; identical to SEQ ID NO: 206617
  chr1:8442482-8442543
  hypo

SEQ ID NO: 426611 - DNA, 38 bp, Homo sapiens; identical to SEQ ID NO: 247781
  chr1:8627113-8627151
  hypo

SEQ ID NO: 426612 - DNA, 120 bp, Homo sapiens; identical to SEQ ID NO: 247782
  chr1:8693558-8693678
  hypo

SEQ ID NO: 426613 - DNA, 98 bp, Homo sapiens; identical to SEQ ID NO: 247783
  chr1:8694712-8694810
  hypo

SEQ ID NO: 426614 - DNA, 146 bp, Homo sapiens; identical to SEQ ID NO: 206619
  chr1:8746806-8746952
  hypo

SEQ ID NO: 426615 - DNA, 89 bp, Homo sapiens; identical to SEQ ID NO: 247785
  chr1:8748134-8748223
  hypo

SEQ ID NO: 426616 - DNA, 69 bp, Homo sapiens; identical to SEQ ID NO: 277924
  chr1:8762992-8763061
  hypo

SEQ ID NO: 426617 - DNA, 130 bp, Homo sapiens; identical to SEQ ID NO: 206620
  chr1:8781130-8781260
  hypo

SEQ ID NO: 426618 - DNA, 32 bp, Homo sapiens; identical to SEQ ID NO: 206621
  chr1:8781290-8781322
  hypo

SEQ ID NO: 426619 - DNA, 35 bp, Homo sapiens; identical to SEQ ID NO: 206622
  chr1:8941149-8941184
  hypo

SEQ ID NO: 426620 - DNA, 32 bp, Homo sapiens; identical to SEQ ID NO: 247789
  chr1:8997092-8997124
  hypo

SEQ ID NO: 426621 - DNA, 123 bp, Homo sapiens; identical to SEQ ID NO: 206623
  chr1:9004947-9005070
  hypo

SEQ ID NO: 426622 - DNA, 152 bp, Homo sapiens; identical to SEQ ID NO: 206624
  chr1:9027898-9028050
  hypo

SEQ ID NO: 426623 - DNA, 150 bp, Homo sapiens; identical to SEQ ID NO: 206625
  chr1:9074712-9074862
  hypo

SEQ ID NO: 426624 - DNA, 81 bp, Homo sapiens; identical to SEQ ID NO: 206626
  chr1:9084938-9085019
  hypo

SEQ ID NO: 426625 - DNA, 223 bp, Homo sapiens; identical to SEQ ID NO: 247794
  chr1:9165435-9165658
  hypo

SEQ ID NO: 426626 - DNA, 279 bp, Homo sapiens; identical to SEQ ID NO: 35016
  chr1:9188943-9189222
  hypo

SEQ ID NO: 426627 - DNA, 52 bp, Homo sapiens; identical to SEQ ID NO: 206629
  chr1:9205248-9205300
  hypo

SEQ ID NO: 426628 - DNA, 77 bp, Homo sapiens; identical to SEQ ID NO: 247796
  chr1:9324850-9324927
  hypo

SEQ ID NO: 426629 - DNA, 48 bp, Homo sapiens; identical to SEQ ID NO: 247797
  chr1:9332433-9332481
  hypo

SEQ ID NO: 426630 - DNA, 189 bp, Homo sapiens; identical to SEQ ID NO: 197299
  chr1:9352965-9353154
  hypo

SEQ ID NO: 426631 - DNA, 68 bp, Homo sapiens; identical to SEQ ID NO: 197300
  chr1:9353809-9353877
  hypo

SEQ ID NO: 426632 - DNA, 87 bp, Homo sapiens; identical to SEQ ID NO: 247798
  chr1:9357986-9358073
  hypo

SEQ ID NO: 426633 - DNA, 194 bp, Homo sapiens; identical to SEQ ID NO: 247799
  chr1:9361976-9362170
  hypo

SEQ ID NO: 426634 - DNA, 203 bp, Homo sapiens; identical to SEQ ID NO: 247800
  chr1:9384384-9384587
  hypo

SEQ ID NO: 426635 - DNA, 368 bp, Homo sapiens; identical to SEQ ID NO: 247801
  chr1:9384863-9385231
  hypo

SEQ ID NO: 426636 - DNA, 187 bp, Homo sapiens; identical to SEQ ID NO: 247802
  chr1:9396673-9396860
  hypo

SEQ ID NO: 426637 - DNA, 62 bp, Homo sapiens; identical to SEQ ID NO: 247803
  chr1:9399461-9399523
  hypo

SEQ ID NO: 426638 - DNA, 224 bp, Homo sapiens; identical to SEQ ID NO: 247804
  chr1:9400677-9400901
  hypo

SEQ ID NO: 426639 - DNA, 252 bp, Homo sapiens; identical to SEQ ID NO: 206635
  chr1:9420430-9420682
  hypo

SEQ ID NO: 426640 - DNA, 425 bp, Homo sapiens; identical to SEQ ID NO: 247807
  chr1:9427427-9427852
  hypo

SEQ ID NO: 426641 - DNA, 165 bp, Homo sapiens; identical to SEQ ID NO: 197301
  chr1:9489050-9489215
  hypo

SEQ ID NO: 426642 - DNA, 92 bp, Homo sapiens; identical to SEQ ID NO: 206637
  chr1:9539439-9539531
  hypo

SEQ ID NO: 426643 - DNA, 37 bp, Homo sapiens; identical to SEQ ID NO: 247809
  chr1:9549417-9549454
  hypo

SEQ ID NO: 426644 - DNA, 32 bp, Homo sapiens; identical to SEQ ID NO: 206638
  chr1:9579431-9579463
  hypo

SEQ ID NO: 426645 - DNA, 152 bp, Homo sapiens; identical to SEQ ID NO: 247811
  chr1:9579703-9579855
  hypo

SEQ ID NO: 426646 - DNA, 218 bp, Homo sapiens; identical to SEQ ID NO: 206639
  chr1:9655906-9656124
  hypo

SEQ ID NO: 426647 - DNA, 219 bp, Homo sapiens; identical to SEQ ID NO: 206640
  chr1:9664191-9664410
  hypo

SEQ ID NO: 426648 - DNA, 111 bp, Homo sapiens; identical to SEQ ID NO: 206641
  chr1:9664794-9664905
  hypo

SEQ ID NO: 426649 - DNA, 127 bp, Homo sapiens; identical to SEQ ID NO: 206642
  chr1:9666790-9666917
  hypo

SEQ ID NO: 426650 - DNA, 246 bp, Homo sapiens; identical to SEQ ID NO: 247817
  chr1:9667250-9667496
  hypo

SEQ ID NO: 426651 - DNA, 132 bp, Homo sapiens; identical to SEQ ID NO: 206643
  chr1:9670774-9670906
  hypo

SEQ ID NO: 426652 - DNA, 428 bp, Homo sapiens; identical to SEQ ID NO: 247820
  chr1:9775701-9776129
  hypo

SEQ ID NO: 426653 - DNA, 177 bp, Homo sapiens; identical to SEQ ID NO: 206645
  chr1:9780744-9780921
  hypo

SEQ ID NO: 426654 - DNA, 149 bp, Homo sapiens; identical to SEQ ID NO: 206646
  chr1:9781134-9781283
  hypo

SEQ ID NO: 426655 - DNA, 143 bp, Homo sapiens; identical to SEQ ID NO: 247823
  chr1:9787397-9787540
  hypo

SEQ ID NO: 426656 - DNA, 38 bp, Homo sapiens; identical to SEQ ID NO: 247825
  chr1:9841766-9841804
  hypo

SEQ ID NO: 426657 - DNA, 116 bp, Homo sapiens; identical to SEQ ID NO: 296473
  chr1:9897085-9897201
  hypo

SEQ ID NO: 426658 - DNA, 347 bp, Homo sapiens; identical to SEQ ID NO: 247828
  chr1:9929961-9930308
  hypo

SEQ ID NO: 426659 - DNA, 43 bp, Homo sapiens; identical to SEQ ID NO: 247829
  chr1:9938566-9938609
  hypo

SEQ ID NO: 426660 - DNA, 120 bp, Homo sapiens; identical to SEQ ID NO: 247830
  chr1:9981142-9981262
  hypo

SEQ ID NO: 426661 - DNA, 43 bp, Homo sapiens; identical to SEQ ID NO: 206651
  chr1:10123669-10123712
  hypo

SEQ ID NO: 426662 - DNA, 82 bp, Homo sapiens; identical to SEQ ID NO: 206652
  chr1:10150449-10150531
  hypo

SEQ ID NO: 426663 - DNA, 219 bp, Homo sapiens; identical to SEQ ID NO: 296481
  chr1:10166302-10166521
  hypo

SEQ ID NO: 426664 - DNA, 64 bp, Homo sapiens; identical to SEQ ID NO: 296482
  chr1:10166627-10166691
  hypo

SEQ ID NO: 426665 - DNA, 360 bp, Homo sapiens; identical to SEQ ID NO: 206653
  chr1:10174923-10175283
  hypo

SEQ ID NO: 426666 - DNA, 104 bp, Homo sapiens; identical to SEQ ID NO: 247837
  chr1:10189656-10189760
  hypo

SEQ ID NO: 426667 - DNA, 120 bp, Homo sapiens; identical to SEQ ID NO: 247838
  chr1:10190000-10190120
  hypo

SEQ ID NO: 426668 - DNA, 164 bp, Homo sapiens; identical to SEQ ID NO: 247839
  chr1:10190420-10190584
  hypo

SEQ ID NO: 426669 - DNA, 213 bp, Homo sapiens; identical to SEQ ID NO: 247841
  chr1:10238658-10238871
  hypo

SEQ ID NO: 426670 - DNA, 175 bp, Homo sapiens; identical to SEQ ID NO: 197307
  chr1:10271266-10271441
  hypo

SEQ ID NO: 426671 - DNA, 43 bp, Homo sapiens; identical to SEQ ID NO: 247843
  chr1:10310921-10310964
  hypo

SEQ ID NO: 426672 - DNA, 52 bp, Homo sapiens; identical to SEQ ID NO: 247844
  chr1:10355725-10355777
  hypo

SEQ ID NO: 426673 - DNA, 113 bp, Homo sapiens; identical to SEQ ID NO: 247846
  chr1:10556160-10556273
  hypo

SEQ ID NO: 426674 - DNA, 123 bp, Homo sapiens; identical to SEQ ID NO: 247848
  chr1:10597301-10597424
  hypo

SEQ ID NO: 426675 - DNA, 199 bp, Homo sapiens; identical to SEQ ID NO: 206656
  chr1:10653908-10654107
  hypo

SEQ ID NO: 426676 - DNA, 90 bp, Homo sapiens; identical to SEQ ID NO: 206657
  chr1:10659098-10659188
  hypo

SEQ ID NO: 426677 - DNA, 173 bp, Homo sapiens; identical to SEQ ID NO: 206662
  chr1:10699817-10699990
  hypo

SEQ ID NO: 426678 - DNA, 263 bp, Homo sapiens; identical to SEQ ID NO: 206663
  chr1:10703773-10704036
  hypo

SEQ ID NO: 426679 - DNA, 227 bp, Homo sapiens; identical to SEQ ID NO: 247857
  chr1:10706750-10706977
  hypo

SEQ ID NO: 426680 - DNA, 309 bp, Homo sapiens; identical to SEQ ID NO: 206665
  chr1:10708278-10708587
  hypo

SEQ ID NO: 426681 - DNA, 86 bp, Homo sapiens; identical to SEQ ID NO: 247860
  chr1:10713572-10713658
  hypo

SEQ ID NO: 426682 - DNA, 186 bp, Homo sapiens; identical to SEQ ID NO: 206666
  chr1:10714453-10714639
  hypo

SEQ ID NO: 426683 - DNA, 224 bp, Homo sapiens; identical to SEQ ID NO: 247863
  chr1:10715676-10715900
  hypo

SEQ ID NO: 426684 - DNA, 149 bp, Homo sapiens; identical to SEQ ID NO: 206668
  chr1:10716607-10716756
  hypo

SEQ ID NO: 426685 - DNA, 46 bp, Homo sapiens; identical to SEQ ID NO: 206671
  chr1:10725222-10725268
  hypo

SEQ ID NO: 426686 - DNA, 107 bp, Homo sapiens; identical to SEQ ID NO: 206672
  chr1:10725478-10725585
  hypo

SEQ ID NO: 426687 - DNA, 183 bp, Homo sapiens; identical to SEQ ID NO: 247868
  chr1:10729047-10729230
  hypo

SEQ ID NO: 426688 - DNA, 250 bp, Homo sapiens; identical to SEQ ID NO: 247869
  chr1:10741779-10742029
  hypo

SEQ ID NO: 426689 - DNA, 365 bp, Homo sapiens; identical to SEQ ID NO: 247870
  chr1:10757887-10758252
  hypo

SEQ ID NO: 426690 - DNA, 216 bp, Homo sapiens; identical to SEQ ID NO: 247871
  chr1:10765349-10765565
  hypo

SEQ ID NO: 426691 - DNA, 316 bp, Homo sapiens; identical to SEQ ID NO: 247872
  chr1:10765943-10766259
  hypo

SEQ ID NO: 426692 - DNA, 105 bp, Homo sapiens; identical to SEQ ID NO: 247873
  chr1:10775033-10775138
  hypo

SEQ ID NO: 426693 - DNA, 50 bp, Homo sapiens; identical to SEQ ID NO: 247874
  chr1:10775892-10775942
  hypo

SEQ ID NO: 426694 - DNA, 102 bp, Homo sapiens; identical to SEQ ID NO: 247875
  chr1:10779504-10779606
  hypo

SEQ ID NO: 426695 - DNA, 76 bp, Homo sapiens; identical to SEQ ID NO: 206674
  chr1:10780357-10780433
  hypo

SEQ ID NO: 426696 - DNA, 240 bp, Homo sapiens; identical to SEQ ID NO: 247877
  chr1:10782910-10783150
  hypo

SEQ ID NO: 426697 - DNA, 41 bp, Homo sapiens; identical to SEQ ID NO: 206675
  chr1:10810301-10810342
  hypo

SEQ ID NO: 426698 - DNA, 75 bp, Homo sapiens; identical to SEQ ID NO: 206676
  chr1:10815561-10815636
  hypo

SEQ ID NO: 426699 - DNA, 51 bp, Homo sapiens; identical to SEQ ID NO: 247880
  chr1:10819916-10819967
  hypo

SEQ ID NO: 426700 - DNA, 204 bp, Homo sapiens; identical to SEQ ID NO: 206677
  chr1:10823336-10823540
  hypo

SEQ ID NO: 426701 - DNA, 830 bp, Homo sapiens; identical to SEQ ID NO: 414754
  chr1:10855047-10855877
  hypo

SEQ ID NO: 426702 - DNA, 612 bp, Homo sapiens; identical to SEQ ID NO: 197312
  chr1:10856315-10856927
  hypo

SEQ ID NO: 426703 - DNA, 254 bp, Homo sapiens; identical to SEQ ID NO: 247883
  chr1:10901208-10901462
  hypo

SEQ ID NO: 426704 - DNA, 211 bp, Homo sapiens; identical to SEQ ID NO: 206680
  chr1:10997239-10997450
  hypo

SEQ ID NO: 426705 - DNA, 363 bp, Homo sapiens; identical to SEQ ID NO: 247885
  chr1:11018648-11019011
  hypo

SEQ ID NO: 426706 - DNA, 38 bp, Homo sapiens; identical to SEQ ID NO: 247887
  chr1:11070724-11070762
  hypo

SEQ ID NO: 426707 - DNA, 180 bp, Homo sapiens; identical to SEQ ID NO: 247889
  chr1:11092943-11093123
  hypo

SEQ ID NO: 426708 - DNA, 69 bp, Homo sapiens; identical to SEQ ID NO: 247890
  chr1:11115037-11115106
  hypo

SEQ ID NO: 426709 - DNA, 43 bp, Homo sapiens; identical to SEQ ID NO: 247891
  chr1:11118320-11118363
  hypo

SEQ ID NO: 426710 - DNA, 376 bp, Homo sapiens; identical to SEQ ID NO: 206681
  chr1:11130959-11131335
  hypo

SEQ ID NO: 426711 - DNA, 38 bp, Homo sapiens; identical to SEQ ID NO: 206683
  chr1:11141852-11141890
  hypo

SEQ ID NO: 426712 - DNA, 33 bp, Homo sapiens; identical to SEQ ID NO: 247897
  chr1:11178562-11178595
  hypo

SEQ ID NO: 426713 - DNA, 90 bp, Homo sapiens; identical to SEQ ID NO: 247898
  chr1:11236360-11236450
  hypo

SEQ ID NO: 426714 - DNA, 76 bp, Homo sapiens; identical to SEQ ID NO: 206684
  chr1:11264689-11264765
  hypo

SEQ ID NO: 426715 - DNA, 204 bp, Homo sapiens; identical to SEQ ID NO: 206685
  chr1:11308057-11308261
  hypo

SEQ ID NO: 426716 - DNA, 567 bp, Homo sapiens; identical to SEQ ID NO: 247901
  chr1:11313404-11313971
  hypo

SEQ ID NO: 426717 - DNA, 262 bp, Homo sapiens; identical to SEQ ID NO: 206687
  chr1:11315988-11316250
  hypo

SEQ ID NO: 426718 - DNA, 44 bp, Homo sapiens; identical to SEQ ID NO: 206688
  chr1:11323832-11323876
  hypo

SEQ ID NO: 426719 - DNA, 73 bp, Homo sapiens; identical to SEQ ID NO: 206692
  chr1:11809703-11809776
  hypo

SEQ ID NO: 426720 - DNA, 148 bp, Homo sapiens; identical to SEQ ID NO: 247906
  chr1:11825794-11825942
  hypo

SEQ ID NO: 426721 - DNA, 76 bp, Homo sapiens; identical to SEQ ID NO: 247907
  chr1:11848614-11848690
  hypo

SEQ ID NO: 426722 - DNA, 136 bp, Homo sapiens; identical to SEQ ID NO: 247908
  chr1:11852475-11852611
  hypo

SEQ ID NO: 426723 - DNA, 265 bp, Homo sapiens; identical to SEQ ID NO: 206694
  chr1:11861112-11861377
  hypo

SEQ ID NO: 426724 - DNA, 333 bp, Homo sapiens; identical to SEQ ID NO: 247912
  chr1:11940052-11940385
  hypo

SEQ ID NO: 426725 - DNA, 342 bp, Homo sapiens; identical to SEQ ID NO: 247914
  chr1:12004452-12004794
  hypo

SEQ ID NO: 426726 - DNA, 143 bp, Homo sapiens; identical to SEQ ID NO: 206695
  chr1:12041765-12041908
  hypo

SEQ ID NO: 426727 - DNA, 42 bp, Homo sapiens; identical to SEQ ID NO: 206696
  chr1:12075718-12075760
  hypo

SEQ ID NO: 426728 - DNA, 99 bp, Homo sapiens; identical to SEQ ID NO: 206697
  chr1:12078706-12078805
  hypo

SEQ ID NO: 426729 - DNA, 33 bp, Homo sapiens; identical to SEQ ID NO: 247919
  chr1:12183828-12183861
  hypo

SEQ ID NO: 426730 - DNA, 42 bp, Homo sapiens; identical to SEQ ID NO: 206699
  chr1:12188609-12188651
  hypo

SEQ ID NO: 426731 - DNA, 174 bp, Homo sapiens; identical to SEQ ID NO: 247921
  chr1:12194139-12194313
  hypo

SEQ ID NO: 426732 - DNA, 75 bp, Homo sapiens; identical to SEQ ID NO: 247922
  chr1:12205428-12205503
  hypo

SEQ ID NO: 426733 - DNA, 142 bp, Homo sapiens; identical to SEQ ID NO: 247923
  chr1:12218910-12219052
  hypo

SEQ ID NO: 426734 - DNA, 215 bp, Homo sapiens; identical to SEQ ID NO: 247926
  chr1:12252961-12253176
  hypo

SEQ ID NO: 426735 - DNA, 373 bp, Homo sapiens; identical to SEQ ID NO: 247927
  chr1:12260317-12260690
  hypo

SEQ ID NO: 426736 - DNA, 37 bp, Homo sapiens; identical to SEQ ID NO: 206703
  chr1:12267963-12268000
  hypo

SEQ ID NO: 426737 - DNA, 218 bp, Homo sapiens; identical to SEQ ID NO: 247929
  chr1:12285722-12285940
  hypo

SEQ ID NO: 426738 - DNA, 90 bp, Homo sapiens; identical to SEQ ID NO: 247931
  chr1:12333008-12333098
  hypo

SEQ ID NO: 426739 - DNA, 71 bp, Homo sapiens; identical to SEQ ID NO: 247932
  chr1:12368222-12368293
  hypo

SEQ ID NO: 426740 - DNA, 212 bp, Homo sapiens; identical to SEQ ID NO: 247933
  chr1:12368504-12368716
  hypo

SEQ ID NO: 426741 - DNA, 31 bp, Homo sapiens; identical to SEQ ID NO: 247934
  chr1:12440114-12440145
  hypo

SEQ ID NO: 426742 - DNA, 46 bp, Homo sapiens; identical to SEQ ID NO: 247936
  chr1:12510816-12510862
  hypo

SEQ ID NO: 426743 - DNA, 106 bp, Homo sapiens; identical to SEQ ID NO: 206706
  chr1:12565969-12566075
  hypo

SEQ ID NO: 426744 - DNA, 65 bp, Homo sapiens; identical to SEQ ID NO: 247938
  chr1:12567168-12567233
  hypo

SEQ ID NO: 426745 - DNA, 165 bp, Homo sapiens; identical to SEQ ID NO: 206707
  chr1:12607962-12608127
  hypo

SEQ ID NO: 426746 - DNA, 83 bp, Homo sapiens; identical to SEQ ID NO: 247941
  chr1:12628466-12628549
  hypo

SEQ ID NO: 426747 - DNA, 35 bp, Homo sapiens; identical to SEQ ID NO: 206708
  chr1:12629954-12629989
  hypo

SEQ ID NO: 426748 - DNA, 35 bp, Homo sapiens; identical to SEQ ID NO: 247945
  chr1:12639822-12639857
  hypo

SEQ ID NO: 426749 - DNA, 173 bp, Homo sapiens; identical to SEQ ID NO: 206710
  chr1:12663579-12663752
  hypo

SEQ ID NO: 426750 - DNA, 191 bp, Homo sapiens; identical to SEQ ID NO: 206711
  chr1:12711251-12711442
  hypo

SEQ ID NO: 426751 - DNA, 78 bp, Homo sapiens; identical to SEQ ID NO: 247948
  chr1:13852559-13852637
  hypo

SEQ ID NO: 426752 - DNA, 224 bp, Homo sapiens; identical to SEQ ID NO: 247949
  chr1:13881447-13881671
  hypo

SEQ ID NO: 426753 - DNA, 38 bp, Homo sapiens; identical to SEQ ID NO: 247950
  chr1:13937414-13937452
  hypo

SEQ ID NO: 426754 - DNA, 32 bp, Homo sapiens; identical to SEQ ID NO: 206714
  chr1:13952169-13952201
  hypo

SEQ ID NO: 426755 - DNA, 31 bp, Homo sapiens; identical to SEQ ID NO: 247952
  chr1:13952441-13952472
  hypo

SEQ ID NO: 426756 - DNA, 115 bp, Homo sapiens; identical to SEQ ID NO: 247953
  chr1:14021890-14022005
  hypo

SEQ ID NO: 426757 - DNA, 120 bp, Homo sapiens; identical to SEQ ID NO: 247954
  chr1:14025409-14025529
  hypo

SEQ ID NO: 426758 - DNA, 223 bp, Homo sapiens; identical to SEQ ID NO: 247955
  chr1:14087920-14088143
  hypo

SEQ ID NO: 426759 - DNA, 130 bp, Homo sapiens; identical to SEQ ID NO: 247956
  chr1:14105492-14105622
  hypo

SEQ ID NO: 426760 - DNA, 194 bp, Homo sapiens; identical to SEQ ID NO: 206715
  chr1:14121945-14122139
  hypo

SEQ ID NO: 426761 - DNA, 120 bp, Homo sapiens; identical to SEQ ID NO: 206716
  chr1:14746304-14746424
  hypo

SEQ ID NO: 426762 - DNA, 299 bp, Homo sapiens; identical to SEQ ID NO: 247963
  chr1:15042013-15042312
  hypo

SEQ ID NO: 426763 - DNA, 31 bp, Homo sapiens; identical to SEQ ID NO: 247964
  chr1:15095851-15095882
  hypo

SEQ ID NO: 426764 - DNA, 90 bp, Homo sapiens; identical to SEQ ID NO: 206717
  chr1:15107455-15107545
  hypo

SEQ ID NO: 426765 - DNA, 108 bp, Homo sapiens; identical to SEQ ID NO: 206718
  chr1:15110198-15110306
  hypo

SEQ ID NO: 426766 - DNA, 35 bp, Homo sapiens; identical to SEQ ID NO: 247968
  chr1:15127830-15127865
  hypo

SEQ ID NO: 426767 - DNA, 77 bp, Homo sapiens; identical to SEQ ID NO: 296620
  chr1:15128488-15128565
  hypo

SEQ ID NO: 426768 - DNA, 210 bp, Homo sapiens; identical to SEQ ID NO: 206719
  chr1:15129598-15129808
  hypo

SEQ ID NO: 426769 - DNA, 86 bp, Homo sapiens; identical to SEQ ID NO: 296622
  chr1:15149165-15149251
  hypo

SEQ ID NO: 426770 - DNA, 160 bp, Homo sapiens; identical to SEQ ID NO: 247972
  chr1:15149510-15149670
  hypo

SEQ ID NO: 426771 - DNA, 187 bp, Homo sapiens; identical to SEQ ID NO: 206720
  chr1:15151515-15151702
  hypo

SEQ ID NO: 426772 - DNA, 244 bp, Homo sapiens; identical to SEQ ID NO: 247976
  chr1:15262964-15263208
  hypo

SEQ ID NO: 426773 - DNA, 35 bp, Homo sapiens; identical to SEQ ID NO: 247978
  chr1:15344012-15344047
  hypo

SEQ ID NO: 426774 - DNA, 137 bp, Homo sapiens; identical to SEQ ID NO: 247979
  chr1:15356675-15356812
  hypo

SEQ ID NO: 426775 - DNA, 152 bp, Homo sapiens; identical to SEQ ID NO: 247981
  chr1:15397055-15397207
  hypo

SEQ ID NO: 426776 - DNA, 42 bp, Homo sapiens; identical to SEQ ID NO: 247982
  chr1:15524065-15524107
  hypo

SEQ ID NO: 426777 - DNA, 494 bp, Homo sapiens; identical to SEQ ID NO: 247983
  chr1:15541161-15541655
  hypo

SEQ ID NO: 426778 - DNA, 236 bp, Homo sapiens; identical to SEQ ID NO: 247984
  chr1:15556611-15556847
  hypo

SEQ ID NO: 426779 - DNA, 35 bp, Homo sapiens; identical to SEQ ID NO: 247985
  chr1:15751733-15751768
  hypo

SEQ ID NO: 426780 - DNA, 118 bp, Homo sapiens; identical to SEQ ID NO: 247986
  chr1:15755172-15755290
  hypo

SEQ ID NO: 426781 - DNA, 300 bp, Homo sapiens; identical to SEQ ID NO: 247987
  chr1:15836139-15836439
  hypo

SEQ ID NO: 426782 - DNA, 242 bp, Homo sapiens; identical to SEQ ID NO: 247988
  chr1:15844705-15844947
  hypo

SEQ ID NO: 426783 - DNA, 92 bp, Homo sapiens; identical to SEQ ID NO: 247989
  chr1:15885334-15885426
  hypo

SEQ ID NO: 426784 - DNA, 155 bp, Homo sapiens; identical to SEQ ID NO: 206725
  chr1:15892452-15892607
  hypo

SEQ ID NO: 426785 - DNA, 88 bp, Homo sapiens; identical to SEQ ID NO: 247991
  chr1:15904689-15904777
  hypo

SEQ ID NO: 426786 - DNA, 151 bp, Homo sapiens; identical to SEQ ID NO: 277993
  chr1:15905373-15905524
  hypo

SEQ ID NO: 426787 - DNA, 213 bp, Homo sapiens; identical to SEQ ID NO: 247993
  chr1:15919084-15919297
  hypo

SEQ ID NO: 426788 - DNA, 75 bp, Homo sapiens; identical to SEQ ID NO: 277994
  chr1:15928914-15928989
  hypo

SEQ ID NO: 426789 - DNA, 208 bp, Homo sapiens; identical to SEQ ID NO: 277995
  chr1:15929019-15929227
  hypo

SEQ ID NO: 426790 - DNA, 104 bp, Homo sapiens; identical to SEQ ID NO: 206727
  chr1:15930726-15930830
  hypo

SEQ ID NO: 426791 - DNA, 52 bp, Homo sapiens; identical to SEQ ID NO: 296648
  chr1:16049774-16049826
  hypo

SEQ ID NO: 426792 - DNA, 156 bp, Homo sapiens; identical to SEQ ID NO: 206728
  chr1:16053711-16053867
  hypo

SEQ ID NO: 426793 - DNA, 96 bp, Homo sapiens; identical to SEQ ID NO: 247998
  chr1:16058408-16058504
  hypo

SEQ ID NO: 426794 - DNA, 124 bp, Homo sapiens; identical to SEQ ID NO: 248001
  chr1:16092326-16092450
  hypo

SEQ ID NO: 426795 - DNA, 120 bp, Homo sapiens; identical to SEQ ID NO: 206729
  chr1:16101036-16101156
  hypo

SEQ ID NO: 426796 - DNA, 34 bp, Homo sapiens; identical to SEQ ID NO: 248003
  chr1:16138131-16138165
  hypo

SEQ ID NO: 426797 - DNA, 85 bp, Homo sapiens; identical to SEQ ID NO: 206730
  chr1:16165179-16165264
  hypo

SEQ ID NO: 426798 - DNA, 40 bp, Homo sapiens; identical to SEQ ID NO: 248005
  chr1:16250432-16250472
  hypo

SEQ ID NO: 426799 - DNA, 425 bp, Homo sapiens; identical to SEQ ID NO: 248006
  chr1:16254608-16255033
  hypo

SEQ ID NO: 426800 - DNA, 223 bp, Homo sapiens; identical to SEQ ID NO: 248007
  chr1:16259177-16259400
  hypo

SEQ ID NO: 426801 - DNA, 42 bp, Homo sapiens; identical to SEQ ID NO: 248008
  chr1:16264532-16264574
  hypo

SEQ ID NO: 426802 - DNA, 206 bp, Homo sapiens; identical to SEQ ID NO: 248010
  chr1:16272642-16272848
  hypo

SEQ ID NO: 426803 - DNA, 698 bp, Homo sapiens; identical to SEQ ID NO: 206731
  chr1:16273064-16273762
  hypo

SEQ ID NO: 426804 - DNA, 378 bp, Homo sapiens; identical to SEQ ID NO: 206732
  chr1:16274647-16275025
  hypo

SEQ ID NO: 426805 - DNA, 63 bp, Homo sapiens; identical to SEQ ID NO: 248013
  chr1:16276737-16276800
  hypo

SEQ ID NO: 426806 - DNA, 219 bp, Homo sapiens; identical to SEQ ID NO: 206733
  chr1:16283816-16284035
  hypo

SEQ ID NO: 426807 - DNA, 156 bp, Homo sapiens; identical to SEQ ID NO: 248015
  chr1:16314583-16314739
  hypo

SEQ ID NO: 426808 - DNA, 148 bp, Homo sapiens; identical to SEQ ID NO: 206734
  chr1:16457640-16457788
  hypo

SEQ ID NO: 426809 - DNA, 56 bp, Homo sapiens; identical to SEQ ID NO: 206735
  chr1:16458832-16458888
  hypo

SEQ ID NO: 426810 - DNA, 102 bp, Homo sapiens; identical to SEQ ID NO: 206737
  chr1:16466891-16466993
  hypo

SEQ ID NO: 426811 - DNA, 1218 bp, Homo sapiens; identical to SEQ ID NO: 278002
  chr1:16481258-16482476
  hypo

SEQ ID NO: 426812 - DNA, 251 bp, Homo sapiens; identical to SEQ ID NO: 197343
  chr1:16482544-16482795
  hypo

SEQ ID NO: 426813 - DNA, 39 bp, Homo sapiens; identical to SEQ ID NO: 248021
  chr1:16485264-16485303
  hypo

SEQ ID NO: 426814 - DNA, 79 bp, Homo sapiens; identical to SEQ ID NO: 248022
  chr1:16509214-16509293
  hypo

SEQ ID NO: 426815 - DNA, 92 bp, Homo sapiens; identical to SEQ ID NO: 296678
  chr1:16535205-16535297
  hypo

SEQ ID NO: 426816 - DNA, 127 bp, Homo sapiens; identical to SEQ ID NO: 221244
  chr1:16558626-16558753
  hypo

SEQ ID NO: 426817 - DNA, 54 bp, Homo sapiens; identical to SEQ ID NO: 206742
  chr1:16567830-16567884
  hypo

SEQ ID NO: 426818 - DNA, 274 bp, Homo sapiens; identical to SEQ ID NO: 248026
  chr1:16577954-16578228
  hypo

SEQ ID NO: 426819 - DNA, 32 bp, Homo sapiens; identical to SEQ ID NO: 206743
  chr1:16624057-16624089
  hypo

SEQ ID NO: 426820 - DNA, 133 bp, Homo sapiens
  chr1:16640766-16640899
  hypo
aaagatgtatatagggtctttgctgtttagagataaaatcaagtgacaaatgttttcaagaaagcagttgctaaaagtagctactcagagacaatctgtagccttaataagagcatggactttaaagccagat

SEQ ID NO: 426821 - DNA, 79 bp, Homo sapiens
  chr1:16641047-16641126
  hypo
gtgataaaagctatgttcacattggctattactattatcccatatccatttctattttgcccattcaagaacaatacaa

SEQ ID NO: 426822 - DNA, 37 bp, Homo sapiens; identical to SEQ ID NO: 248029
  chr1:16676066-16676103
  hypo

SEQ ID NO: 426823 - DNA, 33 bp, Homo sapiens; identical to SEQ ID NO: 248030
  chr1:16689684-16689717
  hypo

SEQ ID NO: 426824 - DNA, 86 bp, Homo sapiens; identical to SEQ ID NO: 248031
  chr1:16782820-16782906
  hypo

SEQ ID NO: 426825 - DNA, 135 bp, Homo sapiens; identical to SEQ ID NO: 206744
  chr1:16810656-16810791
  hypo

SEQ ID NO: 426826 - DNA, 329 bp, Homo sapiens; identical to SEQ ID NO: 248033
  chr1:16943749-16944078
  hypo

SEQ ID NO: 426827 - DNA, 35 bp, Homo sapiens; identical to SEQ ID NO: 206745
  chr1:16957469-16957504
  hypo

SEQ ID NO: 426828 - DNA, 137 bp, Homo sapiens; identical to SEQ ID NO: 248035
  chr1:17256389-17256526
  hypo

SEQ ID NO: 426829 - DNA, 152 bp, Homo sapiens; identical to SEQ ID NO: 248036
  chr1:17256874-17257026
  hypo

SEQ ID NO: 426830 - DNA, 44 bp, Homo sapiens; identical to SEQ ID NO: 206746
  chr1:17270869-17270913
  hypo

SEQ ID NO: 426831 - DNA, 138 bp, Homo sapiens; identical to SEQ ID NO: 248038
  chr1:17280804-17280942
  hypo

SEQ ID NO: 426832 - DNA, 37 bp, Homo sapiens; identical to SEQ ID NO: 206747
  chr1:17330879-17330916
  hypo

SEQ ID NO: 426833 - DNA, 146 bp, Homo sapiens; identical to SEQ ID NO: 248042
  chr1:17331872-17332018
  hypo

SEQ ID NO: 426834 - DNA, 81 bp, Homo sapiens; identical to SEQ ID NO: 248043
  chr1:17384527-17384608
  hypo

SEQ ID NO: 426835 - DNA, 341 bp, Homo sapiens; identical to SEQ ID NO: 248044
  chr1:17431216-17431557
  hypo

SEQ ID NO: 426836 - DNA, 95 bp, Homo sapiens; identical to SEQ ID NO: 248045
  chr1:17574315-17574410
  hypo

SEQ ID NO: 426837 - DNA, 145 bp, Homo sapiens; identical to SEQ ID NO: 248046
  chr1:17575586-17575731
  hypo

SEQ ID NO: 426838 - DNA, 208 bp, Homo sapiens; identical to SEQ ID NO: 197347
  chr1:17591036-17591244
  hypo

SEQ ID NO: 426839 - DNA, 60 bp, Homo sapiens; identical to SEQ ID NO: 248047
  chr1:17631994-17632054
  hypo

SEQ ID NO: 426840 - DNA, 114 bp, Homo sapiens; identical to SEQ ID NO: 248048
  chr1:17674435-17674549
  hypo

SEQ ID NO: 426841 - DNA, 200 bp, Homo sapiens; identical to SEQ ID NO: 248049
  chr1:17702234-17702434
  hypo

SEQ ID NO: 426842 - DNA, 324 bp, Homo sapiens; identical to SEQ ID NO: 248050
  chr1:17733440-17733764
  hypo

SEQ ID NO: 426843 - DNA, 44 bp, Homo sapiens; identical to SEQ ID NO: 206749
  chr1:17734378-17734422
  hypo

SEQ ID NO: 426844 - DNA, 252 bp, Homo sapiens; identical to SEQ ID NO: 248053
  chr1:17738623-17738875
  hypo

SEQ ID NO: 426845 - DNA, 454 bp, Homo sapiens; identical to SEQ ID NO: 248054
  chr1:17813199-17813653
  hypo

SEQ ID NO: 426846 - DNA, 731 bp, Homo sapiens; identical to SEQ ID NO: 197348
  chr1:17865970-17866701
  hypo

SEQ ID NO: 426847 - DNA, 130 bp, Homo sapiens; identical to SEQ ID NO: 206752
  chr1:17897819-17897949
  hypo

SEQ ID NO: 426848 - DNA, 230 bp, Homo sapiens; identical to SEQ ID NO: 248056
  chr1:17898658-17898888
  hypo

SEQ ID NO: 426849 - DNA, 213 bp, Homo sapiens; identical to SEQ ID NO: 248057
  chr1:17919150-17919363
  hypo

SEQ ID NO: 426850 - DNA, 121 bp, Homo sapiens; identical to SEQ ID NO: 248058
  chr1:17925973-17926094
  hypo

SEQ ID NO: 426851 - DNA, 41 bp, Homo sapiens; identical to SEQ ID NO: 248059
  chr1:17933052-17933093
  hypo

SEQ ID NO: 426852 - DNA, 51 bp, Homo sapiens; identical to SEQ ID NO: 206754
  chr1:17934561-17934612
  hypo

SEQ ID NO: 426853 - DNA, 225 bp, Homo sapiens; identical to SEQ ID NO: 248061
  chr1:17949438-17949663
  hypo

SEQ ID NO: 426854 - DNA, 169 bp, Homo sapiens; identical to SEQ ID NO: 248062
  chr1:17972154-17972323
  hypo

SEQ ID NO: 426855 - DNA, 225 bp, Homo sapiens; identical to SEQ ID NO: 248063
  chr1:17994585-17994810
  hypo

SEQ ID NO: 426856 - DNA, 67 bp, Homo sapiens; identical to SEQ ID NO: 206756
  chr1:17996867-17996934
  hypo

SEQ ID NO: 426857 - DNA, 35 bp, Homo sapiens; identical to SEQ ID NO: 206757
  chr1:17997213-17997248
  hypo

SEQ ID NO: 426858 - DNA, 262 bp, Homo sapiens; identical to SEQ ID NO: 248066
  chr1:18006381-18006643
  hypo

SEQ ID NO: 426859 - DNA, 56 bp, Homo sapiens; identical to SEQ ID NO: 206758
  chr1:18021388-18021444
  hypo

SEQ ID NO: 426860 - DNA, 35 bp, Homo sapiens; identical to SEQ ID NO: 248070
  chr1:18044920-18044955
  hypo

SEQ ID NO: 426861 - DNA, 91 bp, Homo sapiens; identical to SEQ ID NO: 248071
  chr1:18606300-18606391
  hypo

SEQ ID NO: 426862 - DNA, 753 bp, Homo sapiens; identical to SEQ ID NO: 278025
  chr1:18967250-18968003
  hypo

SEQ ID NO: 426863 - DNA, 131 bp, Homo sapiens; identical to SEQ ID NO: 206762
  chr1:19203883-19204014
  hypo

SEQ ID NO: 426864 - DNA, 379 bp, Homo sapiens; identical to SEQ ID NO: 206763
  chr1:19208520-19208899
  hypo

SEQ ID NO: 426865 - DNA, 137 bp, Homo sapiens; identical to SEQ ID NO: 248074
  chr1:19217051-19217188
  hypo

SEQ ID NO: 426866 - DNA, 143 bp, Homo sapiens; identical to SEQ ID NO: 206764
  chr1:19245955-19246098
  hypo

SEQ ID NO: 426867 - DNA, 107 bp, Homo sapiens; identical to SEQ ID NO: 248076
  chr1:19246819-19246926
  hypo

SEQ ID NO: 426868 - DNA, 361 bp, Homo sapiens; identical to SEQ ID NO: 248077
  chr1:19258523-19258884
  hypo

SEQ ID NO: 426869 - DNA, 57 bp, Homo sapiens; identical to SEQ ID NO: 248078
  chr1:19403632-19403689
  hypo

SEQ ID NO: 426870 - DNA, 194 bp, Homo sapiens; identical to SEQ ID NO: 248079
  chr1:19426355-19426549
  hypo

SEQ ID NO: 426871 - DNA, 54 bp, Homo sapiens; identical to SEQ ID NO: 248081
  chr1:19449490-19449544
  hypo

SEQ ID NO: 426872 - DNA, 232 bp, Homo sapiens; identical to SEQ ID NO: 248082
  chr1:19491254-19491486
  hypo

SEQ ID NO: 426873 - DNA, 325 bp, Homo sapiens; identical to SEQ ID NO: 197362
  chr1:19639187-19639512
  hypo

SEQ ID NO: 426874 - DNA, 31 bp, Homo sapiens; identical to SEQ ID NO: 206768
  chr1:19680339-19680370
  hypo

SEQ ID NO: 426875 - DNA, 341 bp, Homo sapiens; identical to SEQ ID NO: 248088
  chr1:19687681-19688022
  hypo

SEQ ID NO: 426876 - DNA, 357 bp, Homo sapiens; identical to SEQ ID NO: 248089
  chr1:19705019-19705376
  hypo

SEQ ID NO: 426877 - DNA, 72 bp, Homo sapiens; identical to SEQ ID NO: 206769
  chr1:19721243-19721315
  hypo

SEQ ID NO: 426878 - DNA, 284 bp, Homo sapiens; identical to SEQ ID NO: 221254
  chr1:19991372-19991656
  hypo

SEQ ID NO: 426879 - DNA, 388 bp, Homo sapiens; identical to SEQ ID NO: 206770
  chr1:20060808-20061196
  hypo

SEQ ID NO: 426880 - DNA, 224 bp, Homo sapiens; identical to SEQ ID NO: 248099
  chr1:20070441-20070665
  hypo

SEQ ID NO: 426881 - DNA, 156 bp, Homo sapiens; identical to SEQ ID NO: 248100
  chr1:20090954-20091110
  hypo

SEQ ID NO: 426882 - DNA, 31 bp, Homo sapiens; identical to SEQ ID NO: 248101
  chr1:20097098-20097129
  hypo

SEQ ID NO: 426883 - DNA, 39 bp, Homo sapiens; identical to SEQ ID NO: 248102
  chr1:20110731-20110770
  hypo

SEQ ID NO: 426884 - DNA, 68 bp, Homo sapiens; identical to SEQ ID NO: 206771
  chr1:20127471-20127539
  hypo

SEQ ID NO: 426885 - DNA, 205 bp, Homo sapiens; identical to SEQ ID NO: 248104
  chr1:20204369-20204574
  hypo

SEQ ID NO: 426886 - DNA, 98 bp, Homo sapiens; identical to SEQ ID NO: 248105
  chr1:20205020-20205118
  hypo

SEQ ID NO: 426887 - DNA, 116 bp, Homo sapiens; identical to SEQ ID NO: 296765
  chr1:20205178-20205294
  hypo

SEQ ID NO: 426888 - DNA, 274 bp, Homo sapiens; identical to SEQ ID NO: 296766
  chr1:20205324-20205598
  hypo

SEQ ID NO: 426889 - DNA, 44 bp, Homo sapiens; identical to SEQ ID NO: 248107
  chr1:20210240-20210284
  hypo

SEQ ID NO: 426890 - DNA, 152 bp, Homo sapiens; identical to SEQ ID NO: 248108
  chr1:20214381-20214533
  hypo

SEQ ID NO: 426891 - DNA, 289 bp, Homo sapiens; identical to SEQ ID NO: 206772
  chr1:20230247-20230536
  hypo

SEQ ID NO: 426892 - DNA, 118 bp, Homo sapiens; identical to SEQ ID NO: 248110
  chr1:20247673-20247791
  hypo

SEQ ID NO: 426893 - DNA, 199 bp, Homo sapiens; identical to SEQ ID NO: 206773
  chr1:20554750-20554949
  hypo

SEQ ID NO: 426894 - DNA, 34 bp, Homo sapiens; identical to SEQ ID NO: 206774
  chr1:20680360-20680394
  hypo

SEQ ID NO: 426895 - DNA, 140 bp, Homo sapiens; identical to SEQ ID NO: 197371
  chr1:20812696-20812836
  hypo

SEQ ID NO: 426896 - DNA, 178 bp, Homo sapiens; identical to SEQ ID NO: 197374
  chr1:20878727-20878905
  hypo

SEQ ID NO: 426897 - DNA, 34 bp, Homo sapiens; identical to SEQ ID NO: 206777
  chr1:20920113-20920147
  hypo

SEQ ID NO: 426898 - DNA, 92 bp, Homo sapiens; identical to SEQ ID NO: 197376
  chr1:20959849-20959941
  hypo

SEQ ID NO: 426899 - DNA, 156 bp, Homo sapiens; identical to SEQ ID NO: 206779
  chr1:20977499-20977655
  hypo

SEQ ID NO: 426900 - DNA, 136 bp, Homo sapiens; identical to SEQ ID NO: 206780
  chr1:20983634-20983770
  hypo

SEQ ID NO: 426901 - DNA, 256 bp, Homo sapiens; identical to SEQ ID NO: 248116
  chr1:21037714-21037970
  hypo

SEQ ID NO: 426902 - DNA, 218 bp, Homo sapiens; identical to SEQ ID NO: 278063
  chr1:21058417-21058635
  hypo

SEQ ID NO: 426903 - DNA, 157 bp, Homo sapiens; identical to SEQ ID NO: 206781
  chr1:21062548-21062705
  hypo

SEQ ID NO: 426904 - DNA, 41 bp, Homo sapiens; identical to SEQ ID NO: 206782
  chr1:21122639-21122680
  hypo

SEQ ID NO: 426905 - DNA, 79 bp, Homo sapiens; identical to SEQ ID NO: 248119
  chr1:21339357-21339436
  hypo

SEQ ID NO: 426906 - DNA, 313 bp, Homo sapiens; identical to SEQ ID NO: 248123
  chr1:21585135-21585448
  hypo

SEQ ID NO: 426907 - DNA, 178 bp, Homo sapiens; identical to SEQ ID NO: 248125
  chr1:21635873-21636051
  hypo

SEQ ID NO: 426908 - DNA, 42 bp, Homo sapiens; identical to SEQ ID NO: 248127
  chr1:21786548-21786590
  hypo

SEQ ID NO: 426909 - DNA, 114 bp, Homo sapiens; identical to SEQ ID NO: 248128
  chr1:21848420-21848534
  hypo

SEQ ID NO: 426910 - DNA, 252 bp, Homo sapiens; identical to SEQ ID NO: 248130
  chr1:21902093-21902345
  hypo

SEQ ID NO: 426911 - DNA, 166 bp, Homo sapiens; identical to SEQ ID NO: 206786
  chr1:21944017-21944183
  hypo

SEQ ID NO: 426912 - DNA, 409 bp, Homo sapiens; identical to SEQ ID NO: 248132
  chr1:21953296-21953705
  hypo

SEQ ID NO: 426913 - DNA, 133 bp, Homo sapiens; identical to SEQ ID NO: 206787
  chr1:22001538-22001671
  hypo

SEQ ID NO: 426914 - DNA, 66 bp, Homo sapiens; identical to SEQ ID NO: 206789
  chr1:22023365-22023431
  hypo

SEQ ID NO: 426915 - DNA, 193 bp, Homo sapiens; identical to SEQ ID NO: 206791
  chr1:22032531-22032724
  hypo

SEQ ID NO: 426916 - DNA, 49 bp, Homo sapiens; identical to SEQ ID NO: 248139
  chr1:22166018-22166067
  hypo

SEQ ID NO: 426917 - DNA, 42 bp, Homo sapiens; identical to SEQ ID NO: 248141
  chr1:22192126-22192168
  hypo

SEQ ID NO: 426918 - DNA, 162 bp, Homo sapiens; identical to SEQ ID NO: 248142
  chr1:22196201-22196363
  hypo

SEQ ID NO: 426919 - DNA, 709 bp, Homo sapiens; identical to SEQ ID NO: 248143
  chr1:22198753-22199462
  hypo

SEQ ID NO: 426920 - DNA, 513 bp, Homo sapiens; identical to SEQ ID NO: 248144
  chr1:22200941-22201454
  hypo

SEQ ID NO: 426921 - DNA, 46 bp, Homo sapiens; identical to SEQ ID NO: 206793
  chr1:22202047-22202093
  hypo

SEQ ID NO: 426922 - DNA, 118 bp, Homo sapiens; identical to SEQ ID NO: 206794
  chr1:22202123-22202241
  hypo

SEQ ID NO: 426923 - DNA, 272 bp, Homo sapiens; identical to SEQ ID NO: 248147
  chr1:22211060-22211332
  hypo

SEQ ID NO: 426924 - DNA, 55 bp, Homo sapiens; identical to SEQ ID NO: 248148
  chr1:22213894-22213949
  hypo

SEQ ID NO: 426925 - DNA, 35 bp, Homo sapiens; identical to SEQ ID NO: 248149
  chr1:22335485-22335520
  hypo

SEQ ID NO: 426926 - DNA, 41 bp, Homo sapiens; identical to SEQ ID NO: 248150
  chr1:22422720-22422761
  hypo

SEQ ID NO: 426927 - DNA, 157 bp, Homo sapiens; identical to SEQ ID NO: 206795
  chr1:22465799-22465956
  hypo

SEQ ID NO: 426928 - DNA, 79 bp, Homo sapiens; identical to SEQ ID NO: 248152
  chr1:22498374-22498453
  hypo

SEQ ID NO: 426929 - DNA, 179 bp, Homo sapiens; identical to SEQ ID NO: 248153
  chr1:22498768-22498947
  hypo

SEQ ID NO: 426930 - DNA, 187 bp, Homo sapiens; identical to SEQ ID NO: 248154
  chr1:22566065-22566252
  hypo

SEQ ID NO: 426931 - DNA, 218 bp, Homo sapiens; identical to SEQ ID NO: 206796
  chr1:22584478-22584696
  hypo

SEQ ID NO: 426932 - DNA, 102 bp, Homo sapiens; identical to SEQ ID NO: 248156
  chr1:22777190-22777292
  hypo

SEQ ID NO: 426933 - DNA, 68 bp, Homo sapiens; identical to SEQ ID NO: 384966
  chr1:22777322-22777390
  hypo

SEQ ID NO: 426934 - DNA, 38 bp, Homo sapiens; identical to SEQ ID NO: 248158
  chr1:22823351-22823389
  hypo

SEQ ID NO: 426935 - DNA, 134 bp, Homo sapiens; identical to SEQ ID NO: 248159
  chr1:22852708-22852842
  hypo

SEQ ID NO: 426936 - DNA, 78 bp, Homo sapiens; identical to SEQ ID NO: 248160
  chr1:22854345-22854423
  hypo

SEQ ID NO: 426937 - DNA, 145 bp, Homo sapiens; identical to SEQ ID NO: 296825
  chr1:22902957-22903102
  hypo

SEQ ID NO: 426938 - DNA, 56 bp, Homo sapiens; identical to SEQ ID NO: 206798
  chr1:22927884-22927940
  hypo

SEQ ID NO: 426939 - DNA, 106 bp, Homo sapiens; identical to SEQ ID NO: 248164
  chr1:23021935-23022041
  hypo

SEQ ID NO: 426940 - DNA, 575 bp, Homo sapiens; identical to SEQ ID NO: 278075
  chr1:23036966-23037541
  hypo

SEQ ID NO: 426941 - DNA, 582 bp, Homo sapiens; identical to SEQ ID NO: 278076
  chr1:23037595-23038177
  hypo

SEQ ID NO: 426942 - DNA, 108 bp, Homo sapiens; identical to SEQ ID NO: 197382
  chr1:23038250-23038358
  hypo

SEQ ID NO: 426943 - DNA, 98 bp, Homo sapiens; identical to SEQ ID NO: 248165
  chr1:23058329-23058427
  hypo

SEQ ID NO: 426944 - DNA, 133 bp, Homo sapiens; identical to SEQ ID NO: 206801
  chr1:23063031-23063164
  hypo

SEQ ID NO: 426945 - DNA, 33 bp, Homo sapiens; identical to SEQ ID NO: 206802
  chr1:23063499-23063532
  hypo

SEQ ID NO: 426946 - DNA, 85 bp, Homo sapiens; identical to SEQ ID NO: 206803
  chr1:23091396-23091481
  hypo

SEQ ID NO: 426947 - DNA, 386 bp, Homo sapiens; identical to SEQ ID NO: 248169
  chr1:23110981-23111367
  hypo

SEQ ID NO: 426948 - DNA, 214 bp, Homo sapiens; identical to SEQ ID NO: 248170
  chr1:23162009-23162223
  hypo

SEQ ID NO: 426949 - DNA, 132 bp, Homo sapiens; identical to SEQ ID NO: 248171
  chr1:23168730-23168862
  hypo

SEQ ID NO: 426950 - DNA, 343 bp, Homo sapiens; identical to SEQ ID NO: 248172
  chr1:23191506-23191849
  hypo

SEQ ID NO: 426951 - DNA, 211 bp, Homo sapiens; identical to SEQ ID NO: 206806
  chr1:23201492-23201703
  hypo

SEQ ID NO: 426952 - DNA, 97 bp, Homo sapiens; identical to SEQ ID NO: 248174
  chr1:23205285-23205382
  hypo

SEQ ID NO: 426953 - DNA, 179 bp, Homo sapiens; identical to SEQ ID NO: 248175
  chr1:23208896-23209075
  hypo

SEQ ID NO: 426954 - DNA, 79 bp, Homo sapiens; identical to SEQ ID NO: 248176
  chr1:23270402-23270481
  hypo

SEQ ID NO: 426955 - DNA, 48 bp, Homo sapiens; identical to SEQ ID NO: 278078
  chr1:23280132-23280180
  hypo

SEQ ID NO: 426956 - DNA, 169 bp, Homo sapiens; identical to SEQ ID NO: 102782
  chr1:23280211-23280380
  hypo

SEQ ID NO: 426957 - DNA, 181 bp, Homo sapiens; identical to SEQ ID NO: 197384
  chr1:23346189-23346370
  hypo

SEQ ID NO: 426958 - DNA, 36 bp, Homo sapiens; identical to SEQ ID NO: 206809
  chr1:23440075-23440111
  hypo

SEQ ID NO: 426959 - DNA, 149 bp, Homo sapiens; identical to SEQ ID NO: 278083
  chr1:23543645-23543794
  hypo

SEQ ID NO: 426960 - DNA, 82 bp, Homo sapiens; identical to SEQ ID NO: 248179
  chr1:23566833-23566915
  hypo

SEQ ID NO: 426961 - DNA, 120 bp, Homo sapiens; identical to SEQ ID NO: 206810
  chr1:23567755-23567875
  hypo

SEQ ID NO: 426962 - DNA, 168 bp, Homo sapiens; identical to SEQ ID NO: 296852
  chr1:23693910-23694078
  hypo

SEQ ID NO: 426963 - DNA, 137 bp, Homo sapiens; identical to SEQ ID NO: 248183
  chr1:23698583-23698720
  hypo

SEQ ID NO: 426964 - DNA, 138 bp, Homo sapiens; identical to SEQ ID NO: 206811
  chr1:23762544-23762682
  hypo

SEQ ID NO: 426965 - DNA, 78 bp, Homo sapiens; identical to SEQ ID NO: 248185
  chr1:23762922-23763000
  hypo

SEQ ID NO: 426966 - DNA, 203 bp, Homo sapiens; identical to SEQ ID NO: 248186
  chr1:23768673-23768876
  hypo

SEQ ID NO: 426967 - DNA, 197 bp, Homo sapiens; identical to SEQ ID NO: 197388
  chr1:23857853-23858050
  hypo

SEQ ID NO: 426968 - DNA, 101 bp, Homo sapiens; identical to SEQ ID NO: 206813
  chr1:23954418-23954519
  hypo

SEQ ID NO: 426969 - DNA, 143 bp, Homo sapiens; identical to SEQ ID NO: 206814
  chr1:23963133-23963276
  hypo

SEQ ID NO: 426970 - DNA, 34 bp, Homo sapiens; identical to SEQ ID NO: 248189
  chr1:24016636-24016670
  hypo

SEQ ID NO: 426971 - DNA, 105 bp, Homo sapiens; identical to SEQ ID NO: 206815
  chr1:24110632-24110737
  hypo

SEQ ID NO: 426972 - DNA, 45 bp, Homo sapiens; identical to SEQ ID NO: 206816
  chr1:24111037-24111082
  hypo

SEQ ID NO: 426973 - DNA, 38 bp, Homo sapiens; identical to SEQ ID NO: 248194
  chr1:24153112-24153150
  hypo

SEQ ID NO: 426974 - DNA, 268 bp, Homo sapiens; identical to SEQ ID NO: 278101
  chr1:24229167-24229435
  hypo

SEQ ID NO: 426975 - DNA, 268 bp, Homo sapiens; identical to SEQ ID NO: 248195
  chr1:24424243-24424511
  hypo

SEQ ID NO: 426976 - DNA, 205 bp, Homo sapiens; identical to SEQ ID NO: 248196
  chr1:24426174-24426379
  hypo

SEQ ID NO: 426977 - DNA, 45 bp, Homo sapiens; identical to SEQ ID NO: 206819
  chr1:24611879-24611924
  hypo

SEQ ID NO: 426978 - DNA, 106 bp, Homo sapiens; identical to SEQ ID NO: 206820
  chr1:24611967-24612073
  hypo

SEQ ID NO: 426979 - DNA, 52 bp, Homo sapiens; identical to SEQ ID NO: 248199
  chr1:24612363-24612415
  hypo

SEQ ID NO: 426980 - DNA, 105 bp, Homo sapiens; identical to SEQ ID NO: 248200
  chr1:24620325-24620430
  hypo

SEQ ID NO: 426981 - DNA, 32 bp, Homo sapiens; identical to SEQ ID NO: 206821
  chr1:24683006-24683038
  hypo

SEQ ID NO: 426982 - DNA, 142 bp, Homo sapiens; identical to SEQ ID NO: 206822
  chr1:24701524-24701666
  hypo

SEQ ID NO: 426983 - DNA, 58 bp, Homo sapiens; identical to SEQ ID NO: 248203
  chr1:24702011-24702069
  hypo

SEQ ID NO: 426984 - DNA, 88 bp, Homo sapiens; identical to SEQ ID NO: 206823
  chr1:24706236-24706324
  hypo

SEQ ID NO: 426985 - DNA, 33 bp, Homo sapiens; identical to SEQ ID NO: 248205
  chr1:24708666-24708699
  hypo

SEQ ID NO: 426986 - DNA, 43 bp, Homo sapiens; identical to SEQ ID NO: 248207
  chr1:24945574-24945617
  hypo

SEQ ID NO: 426987 - DNA, 35 bp, Homo sapiens; identical to SEQ ID NO: 248208
  chr1:24976035-24976070
  hypo

SEQ ID NO: 426988 - DNA, 287 bp, Homo sapiens; identical to SEQ ID NO: 248209
  chr1:24976291-24976578
  hypo

SEQ ID NO: 426989 - DNA, 135 bp, Homo sapiens; identical to SEQ ID NO: 248210
  chr1:25055531-25055666
  hypo

SEQ ID NO: 426990 - DNA, 39 bp, Homo sapiens; identical to SEQ ID NO: 206825
  chr1:25115718-25115757
  hypo

SEQ ID NO: 426991 - DNA, 42 bp, Homo sapiens; identical to SEQ ID NO: 248213
  chr1:25200671-25200713
  hypo

SEQ ID NO: 426992 - DNA, 570 bp, Homo sapiens; identical to SEQ ID NO: 296887
  chr1:25228637-25229207
  hypo

SEQ ID NO: 426993 - DNA, 31 bp, Homo sapiens; identical to SEQ ID NO: 206827
  chr1:25230202-25230233
  hypo

SEQ ID NO: 426994 - DNA, 42 bp, Homo sapiens; identical to SEQ ID NO: 248216
  chr1:25247524-25247566
  hypo

SEQ ID NO: 426995 - DNA, 230 bp, Homo sapiens; identical to SEQ ID NO: 248217
  chr1:25269413-25269643
  hypo

SEQ ID NO: 426996 - DNA, 133 bp, Homo sapiens; identical to SEQ ID NO: 206829
  chr1:25396320-25396453
  hypo

SEQ ID NO: 426997 - DNA, 191 bp, Homo sapiens; identical to SEQ ID NO: 248219
  chr1:25397931-25398122
  hypo

SEQ ID NO: 426998 - DNA, 192 bp, Homo sapiens; identical to SEQ ID NO: 248220
  chr1:25510193-25510385
  hypo

SEQ ID NO: 426999 - DNA, 185 bp, Homo sapiens; identical to SEQ ID NO: 248221
  chr1:25718494-25718679
  hypo

SEQ ID NO: 427000 - DNA, 61 bp, Homo sapiens; identical to SEQ ID NO: 248222
  chr1:25825875-25825936
  hypo

SEQ ID NO: 427001 - DNA, 52 bp, Homo sapiens; identical to SEQ ID NO: 248223
  chr1:25853937-25853989
  hypo

SEQ ID NO: 427002 - DNA, 201 bp, Homo sapiens; identical to SEQ ID NO: 248225
  chr1:25856754-25856955
  hypo

SEQ ID NO: 427003 - DNA, 110 bp, Homo sapiens; identical to SEQ ID NO: 248226
  chr1:25862319-25862429
  hypo

SEQ ID NO: 427004 - DNA, 90 bp, Homo sapiens; identical to SEQ ID NO: 248227
  chr1:25869054-25869144
  hypo

SEQ ID NO: 427005 - DNA, 168 bp, Homo sapiens; identical to SEQ ID NO: 197396
  chr1:25870618-25870786
  hypo

SEQ ID NO: 427006 - DNA, 263 bp, Homo sapiens; identical to SEQ ID NO: 248228
  chr1:25889407-25889670
  hypo

SEQ ID NO: 427007 - DNA, 158 bp, Homo sapiens; identical to SEQ ID NO: 206831
  chr1:25890394-25890552
  hypo

SEQ ID NO: 427008 - DNA, 76 bp, Homo sapiens; identical to SEQ ID NO: 248230
  chr1:25895704-25895780
  hypo

SEQ ID NO: 427009 - DNA, 87 bp, Homo sapiens; identical to SEQ ID NO: 248231
  chr1:25896264-25896351
  hypo

SEQ ID NO: 427010 - DNA, 76 bp, Homo sapiens; identical to SEQ ID NO: 248233
  chr1:26084118-26084194
  hypo

SEQ ID NO: 427011 - DNA, 214 bp, Homo sapiens; identical to SEQ ID NO: 206834
  chr1:26121478-26121692
  hypo

SEQ ID NO: 427012 - DNA, 120 bp, Homo sapiens; identical to SEQ ID NO: 206835
  chr1:26634350-26634470
  hypo

SEQ ID NO: 427013 - DNA, 194 bp, Homo sapiens; identical to SEQ ID NO: 248239
  chr1:26670609-26670803
  hypo

SEQ ID NO: 427014 - DNA, 142 bp, Homo sapiens; identical to SEQ ID NO: 206837
  chr1:26678029-26678171
  hypo

SEQ ID NO: 427015 - DNA, 207 bp, Homo sapiens; identical to SEQ ID NO: 248241
  chr1:26680626-26680833
  hypo

SEQ ID NO: 427016 - DNA, 54 bp, Homo sapiens; identical to SEQ ID NO: 248242
  chr1:26683592-26683646
  hypo

SEQ ID NO: 427017 - DNA, 44 bp, Homo sapiens; identical to SEQ ID NO: 248243
  chr1:26796229-26796273
  hypo

SEQ ID NO: 427018 - DNA, 97 bp, Homo sapiens; identical to SEQ ID NO: 206838
  chr1:26807958-26808055
  hypo

SEQ ID NO: 427019 - DNA, 106 bp, Homo sapiens; identical to SEQ ID NO: 197405
  chr1:26855980-26856086
  hypo

SEQ ID NO: 427020 - DNA, 43 bp, Homo sapiens; identical to SEQ ID NO: 248245
  chr1:26874361-26874404
  hypo

SEQ ID NO: 427021 - DNA, 68 bp, Homo sapiens; identical to SEQ ID NO: 248246
  chr1:26885364-26885432
  hypo

SEQ ID NO: 427022 - DNA, 39 bp, Homo sapiens; identical to SEQ ID NO: 248247
  chr1:26969659-26969698
  hypo

SEQ ID NO: 427023 - DNA, 190 bp, Homo sapiens; identical to SEQ ID NO: 248250
  chr1:27179351-27179541
  hypo

SEQ ID NO: 427024 - DNA, 125 bp, Homo sapiens; identical to SEQ ID NO: 197408
  chr1:27286497-27286622
  hypo

SEQ ID NO: 427025 - DNA, 141 bp, Homo sapiens; identical to SEQ ID NO: 206845
  chr1:27426938-27427079
  hypo

SEQ ID NO: 427026 - DNA, 79 bp, Homo sapiens; identical to SEQ ID NO: 206846
  chr1:27427840-27427919
  hypo

SEQ ID NO: 427027 - DNA, 168 bp, Homo sapiens; identical to SEQ ID NO: 248257
  chr1:27480389-27480557
  hypo

SEQ ID NO: 427028 - DNA, 44 bp, Homo sapiens; identical to SEQ ID NO: 248258
  chr1:27621918-27621962
  hypo

SEQ ID NO: 427029 - DNA, 68 bp, Homo sapiens; identical to SEQ ID NO: 248259
  chr1:27627840-27627908
  hypo

SEQ ID NO: 427030 - DNA, 87 bp, Homo sapiens; identical to SEQ ID NO: 248261
  chr1:27647873-27647960
  hypo

SEQ ID NO: 427031 - DNA, 102 bp, Homo sapiens; identical to SEQ ID NO: 248262
  chr1:27694479-27694581
  hypo

SEQ ID NO: 427032 - DNA, 95 bp, Homo sapiens; identical to SEQ ID NO: 248263
  chr1:27704688-27704783
  hypo

SEQ ID NO: 427033 - DNA, 372 bp, Homo sapiens; identical to SEQ ID NO: 278147
  chr1:27718844-27719216
  hypo

SEQ ID NO: 427034 - DNA, 52 bp, Homo sapiens; identical to SEQ ID NO: 248264
  chr1:27750893-27750945
  hypo

SEQ ID NO: 427035 - DNA, 44 bp, Homo sapiens; identical to SEQ ID NO: 206849
  chr1:27798548-27798592
  hypo

SEQ ID NO: 427036 - DNA, 75 bp, Homo sapiens; identical to SEQ ID NO: 296944
  chr1:27844443-27844518
  hypo

SEQ ID NO: 427037 - DNA, 76 bp, Homo sapiens; identical to SEQ ID NO: 248268
  chr1:27862696-27862772
  hypo

SEQ ID NO: 427038 - DNA, 227 bp, Homo sapiens; identical to SEQ ID NO: 248269
  chr1:27863985-27864212
  hypo

SEQ ID NO: 427039 - DNA, 95 bp, Homo sapiens; identical to SEQ ID NO: 197415
  chr1:27928761-27928856
  hypo

SEQ ID NO: 427040 - DNA, 279 bp, Homo sapiens; identical to SEQ ID NO: 278153
  chr1:27929078-27929357
  hypo

SEQ ID NO: 427041 - DNA, 128 bp, Homo sapiens; identical to SEQ ID NO: 206855
  chr1:27942073-27942201
  hypo

SEQ ID NO: 427042 - DNA, 228 bp, Homo sapiens; identical to SEQ ID NO: 248275
  chr1:27994765-27994993
  hypo

SEQ ID NO: 427043 - DNA, 33 bp, Homo sapiens; identical to SEQ ID NO: 206857
  chr1:28148833-28148866
  hypo

SEQ ID NO: 427044 - DNA, 37 bp, Homo sapiens; identical to SEQ ID NO: 206858
  chr1:28364954-28364991
  hypo

SEQ ID NO: 427045 - DNA, 185 bp, Homo sapiens; identical to SEQ ID NO: 248279
  chr1:28447726-28447911
  hypo

SEQ ID NO: 427046 - DNA, 36 bp, Homo sapiens; identical to SEQ ID NO: 248280
  chr1:28560005-28560041
  hypo

SEQ ID NO: 427047 - DNA, 216 bp, Homo sapiens; identical to SEQ ID NO: 278166
  chr1:28586719-28586935
  hypo

SEQ ID NO: 427048 - DNA, 280 bp, Homo sapiens; identical to SEQ ID NO: 102957
  chr1:28586972-28587252
  hypo

SEQ ID NO: 427049 - DNA, 34 bp, Homo sapiens; identical to SEQ ID NO: 248281
  chr1:28626665-28626699
  hypo

SEQ ID NO: 427050 - DNA, 91 bp, Homo sapiens; identical to SEQ ID NO: 206859
  chr1:28663349-28663440
  hypo

SEQ ID NO: 427051 - DNA, 78 bp, Homo sapiens; identical to SEQ ID NO: 206860
  chr1:28727742-28727820
  hypo

SEQ ID NO: 427052 - DNA, 44 bp, Homo sapiens; identical to SEQ ID NO: 248284
  chr1:28807198-28807242
  hypo

SEQ ID NO: 427053 - DNA, 120 bp, Homo sapiens; identical to SEQ ID NO: 248285
  chr1:28827219-28827339
  hypo

SEQ ID NO: 427054 - DNA, 33 bp, Homo sapiens; identical to SEQ ID NO: 248286
  chr1:28853112-28853145
  hypo

SEQ ID NO: 427055 - DNA, 52 bp, Homo sapiens; identical to SEQ ID NO: 206861
  chr1:28853770-28853822
  hypo

SEQ ID NO: 427056 - DNA, 43 bp, Homo sapiens; identical to SEQ ID NO: 206862
  chr1:28854229-28854272
  hypo

SEQ ID NO: 427057 - DNA, 323 bp, Homo sapiens; identical to SEQ ID NO: 206863
  chr1:28857207-28857530
  hypo

SEQ ID NO: 427058 - DNA, 38 bp, Homo sapiens; identical to SEQ ID NO: 248290
  chr1:28867211-28867249
  hypo

SEQ ID NO: 427059 - DNA, 340 bp, Homo sapiens; identical to SEQ ID NO: 278171
  chr1:28879651-28879991
  hypo

SEQ ID NO: 427060 - DNA, 120 bp, Homo sapiens; identical to SEQ ID NO: 248291
  chr1:28881382-28881502
  hypo

SEQ ID NO: 427061 - DNA, 34 bp, Homo sapiens; identical to SEQ ID NO: 206865
  chr1:28891701-28891735
  hypo

SEQ ID NO: 427062 - DNA, 80 bp, Homo sapiens; identical to SEQ ID NO: 278173
  chr1:28919321-28919401
  hypo

SEQ ID NO: 427063 - DNA, 34 bp, Homo sapiens; identical to SEQ ID NO: 248294
  chr1:28986972-28987006
  hypo

SEQ ID NO: 427064 - DNA, 82 bp, Homo sapiens; identical to SEQ ID NO: 248295
  chr1:28997959-28998041
  hypo

SEQ ID NO: 427065 - DNA, 283 bp, Homo sapiens; identical to SEQ ID NO: 278177
  chr1:29062800-29063083
  hypo

SEQ ID NO: 427066 - DNA, 46 bp, Homo sapiens; identical to SEQ ID NO: 206867
  chr1:29116013-29116059
  hypo

SEQ ID NO: 427067 - DNA, 97 bp, Homo sapiens; identical to SEQ ID NO: 248300
  chr1:29273976-29274073
  hypo

SEQ ID NO: 427068 - DNA, 66 bp, Homo sapiens; identical to SEQ ID NO: 206868
  chr1:29422743-29422809
  hypo

SEQ ID NO: 427069 - DNA, 244 bp, Homo sapiens; identical to SEQ ID NO: 278181
  chr1:29448271-29448515
  hypo

SEQ ID NO: 427070 - DNA, 467 bp, Homo sapiens; identical to SEQ ID NO: 278182
  chr1:29448910-29449377
  hypo

SEQ ID NO: 427071 - DNA, 119 bp, Homo sapiens; identical to SEQ ID NO: 296990
  chr1:29463322-29463441
  hypo

SEQ ID NO: 427072 - DNA, 79 bp, Homo sapiens; identical to SEQ ID NO: 248304
  chr1:29473803-29473882
  hypo

SEQ ID NO: 427073 - DNA, 31 bp, Homo sapiens; identical to SEQ ID NO: 206869
  chr1:29513701-29513732
  hypo

SEQ ID NO: 427074 - DNA, 54 bp, Homo sapiens; identical to SEQ ID NO: 206870
  chr1:29605969-29606023
  hypo

SEQ ID NO: 427075 - DNA, 177 bp, Homo sapiens; identical to SEQ ID NO: 248307
  chr1:29647168-29647345
  hypo

SEQ ID NO: 427076 - DNA, 86 bp, Homo sapiens; identical to SEQ ID NO: 248308
  chr1:30180749-30180835
  hypo

SEQ ID NO: 427077 - DNA, 620 bp, Homo sapiens; identical to SEQ ID NO: 278192
  chr1:31191732-31192352
  hypo

SEQ ID NO: 427078 - DNA, 157 bp, Homo sapiens; identical to SEQ ID NO: 206872
  chr1:31194412-31194569
  hypo

SEQ ID NO: 427079 - DNA, 34 bp, Homo sapiens; identical to SEQ ID NO: 206873
  chr1:31239979-31240013
  hypo

SEQ ID NO: 427080 - DNA, 87 bp, Homo sapiens; identical to SEQ ID NO: 206874
  chr1:31240595-31240682
  hypo

SEQ ID NO: 427081 - DNA, 116 bp, Homo sapiens; identical to SEQ ID NO: 297001
  chr1:31249895-31250011
  hypo

SEQ ID NO: 427082 - DNA, 88 bp, Homo sapiens; identical to SEQ ID NO: 206875
  chr1:31260793-31260881
  hypo

SEQ ID NO: 427083 - DNA, 284 bp, Homo sapiens; identical to SEQ ID NO: 248314
  chr1:31347131-31347415
  hypo

SEQ ID NO: 427084 - DNA, 75 bp, Homo sapiens; identical to SEQ ID NO: 248315
  chr1:31401181-31401256
  hypo

SEQ ID NO: 427085 - DNA, 33 bp, Homo sapiens; identical to SEQ ID NO: 248316
  chr1:31406884-31406917
  hypo

SEQ ID NO: 427086 - DNA, 178 bp, Homo sapiens; identical to SEQ ID NO: 248317
  chr1:31407298-31407476
  hypo

SEQ ID NO: 427087 - DNA, 64 bp, Homo sapiens; identical to SEQ ID NO: 206877
  chr1:31478716-31478780
  hypo

SEQ ID NO: 427088 - DNA, 76 bp, Homo sapiens; identical to SEQ ID NO: 248320
  chr1:31585281-31585357
  hypo

SEQ ID NO: 427089 - DNA, 143 bp, Homo sapiens; identical to SEQ ID NO: 248321
  chr1:31633840-31633983
  hypo

SEQ ID NO: 427090 - DNA, 62 bp, Homo sapiens; identical to SEQ ID NO: 206878
  chr1:31639518-31639580
  hypo

SEQ ID NO: 427091 - DNA, 64 bp, Homo sapiens; identical to SEQ ID NO: 248323
  chr1:31676127-31676191
  hypo

SEQ ID NO: 427092 - DNA, 68 bp, Homo sapiens; identical to SEQ ID NO: 248324
  chr1:31676221-31676289
  hypo

SEQ ID NO: 427093 - DNA, 36 bp, Homo sapiens; identical to SEQ ID NO: 206879
  chr1:31732224-31732260
  hypo

SEQ ID NO: 427094 - DNA, 37 bp, Homo sapiens; identical to SEQ ID NO: 206880
  chr1:31871814-31871851
  hypo

SEQ ID NO: 427095 - DNA, 55 bp, Homo sapiens; identical to SEQ ID NO: 248328
  chr1:32050770-32050825
  hypo

SEQ ID NO: 427096 - DNA, 668 bp, Homo sapiens; identical to SEQ ID NO: 248329
  chr1:32091929-32092597
  hypo

SEQ ID NO: 427097 - DNA, 196 bp, Homo sapiens; identical to SEQ ID NO: 206881
  chr1:32139297-32139493
  hypo

SEQ ID NO: 427098 - DNA, 176 bp, Homo sapiens; identical to SEQ ID NO: 248331
  chr1:32156856-32157032
  hypo

SEQ ID NO: 427099 - DNA, 126 bp, Homo sapiens; identical to SEQ ID NO: 248332
  chr1:32208523-32208649
  hypo

SEQ ID NO: 427100 - DNA, 119 bp, Homo sapiens; identical to SEQ ID NO: 206882
  chr1:32221874-32221993
  hypo

SEQ ID NO: 427101 - DNA, 77 bp, Homo sapiens; identical to SEQ ID NO: 206883
  chr1:32407225-32407302
  hypo

SEQ ID NO: 427102 - DNA, 120 bp, Homo sapiens; identical to SEQ ID NO: 248335
  chr1:32469886-32470006
  hypo

SEQ ID NO: 427103 - DNA, 55 bp, Homo sapiens; identical to SEQ ID NO: 248336
  chr1:32497745-32497800
  hypo

SEQ ID NO: 427104 - DNA, 143 bp, Homo sapiens; identical to SEQ ID NO: 278208
  chr1:32666250-32666393
  hypo

SEQ ID NO: 427105 - DNA, 39 bp, Homo sapiens; identical to SEQ ID NO: 248337
  chr1:32674989-32675028
  hypo

SEQ ID NO: 427106 - DNA, 113 bp, Homo sapiens; identical to SEQ ID NO: 297028
  chr1:32705375-32705488
  hypo

SEQ ID NO: 427107 - DNA, 82 bp, Homo sapiens; identical to SEQ ID NO: 297029
  chr1:32705579-32705661
  hypo

SEQ ID NO: 427108 - DNA, 67 bp, Homo sapiens; identical to SEQ ID NO: 297030
  chr1:32741544-32741611
  hypo

SEQ ID NO: 427109 - DNA, 106 bp, Homo sapiens; identical to SEQ ID NO: 401751
  chr1:32742405-32742511
  hypo

SEQ ID NO: 427110 - DNA, 47 bp, Homo sapiens; identical to SEQ ID NO: 206884
  chr1:32751094-32751141
  hypo

SEQ ID NO: 427111 - DNA, 299 bp, Homo sapiens; identical to SEQ ID NO: 197437
  chr1:32757388-32757687
  hypo

SEQ ID NO: 427112 - DNA, 240 bp, Homo sapiens; identical to SEQ ID NO: 248342
  chr1:32764105-32764345
  hypo

SEQ ID NO: 427113 - DNA, 156 bp, Homo sapiens; identical to SEQ ID NO: 248343
  chr1:32788457-32788613
  hypo

SEQ ID NO: 427114 - DNA, 76 bp, Homo sapiens; identical to SEQ ID NO: 248344
  chr1:32804501-32804577
  hypo

SEQ ID NO: 427115 - DNA, 101 bp, Homo sapiens; identical to SEQ ID NO: 197438
  chr1:32852880-32852981
  hypo

SEQ ID NO: 427116 - DNA, 79 bp, Homo sapiens; identical to SEQ ID NO: 248346
  chr1:32893209-32893288
  hypo

SEQ ID NO: 427117 - DNA, 140 bp, Homo sapiens; identical to SEQ ID NO: 248347
  chr1:32950770-32950910
  hypo

SEQ ID NO: 427118 - DNA, 36 bp, Homo sapiens; identical to SEQ ID NO: 197442
  chr1:33005606-33005642
  hypo

SEQ ID NO: 427119 - DNA, 32 bp, Homo sapiens; identical to SEQ ID NO: 248348
  chr1:33016264-33016296
  hypo

SEQ ID NO: 427120 - DNA, 33 bp, Homo sapiens; identical to SEQ ID NO: 248350
  chr1:33154203-33154236
  hypo

SEQ ID NO: 427121 - DNA, 322 bp, Homo sapiens; identical to SEQ ID NO: 248351
  chr1:33169543-33169865
  hypo

SEQ ID NO: 427122 - DNA, 326 bp, Homo sapiens; identical to SEQ ID NO: 278221
  chr1:33207544-33207870
  hypo

SEQ ID NO: 427123 - DNA, 35 bp, Homo sapiens; identical to SEQ ID NO: 248353
  chr1:33225964-33225999
  hypo

SEQ ID NO: 427124 - DNA, 93 bp, Homo sapiens; identical to SEQ ID NO: 248354
  chr1:33226462-33226555
  hypo

SEQ ID NO: 427125 - DNA, 935 bp, Homo sapiens; identical to SEQ ID NO: 248356
  chr1:33235318-33236253
  hypo

SEQ ID NO: 427126 - DNA, 502 bp, Homo sapiens; identical to SEQ ID NO: 248357
  chr1:33237281-33237783
  hypo

SEQ ID NO: 427127 - DNA, 146 bp, Homo sapiens; identical to SEQ ID NO: 248358
  chr1:33264160-33264306
  hypo

SEQ ID NO: 427128 - DNA, 164 bp, Homo sapiens; identical to SEQ ID NO: 206893
  chr1:33415196-33415360
  hypo

SEQ ID NO: 427129 - DNA, 78 bp, Homo sapiens; identical to SEQ ID NO: 206894
  chr1:33431248-33431326
  hypo

SEQ ID NO: 427130 - DNA, 37 bp, Homo sapiens; identical to SEQ ID NO: 206895
  chr1:33432070-33432107
  hypo

SEQ ID NO: 427131 - DNA, 43 bp, Homo sapiens; identical to SEQ ID NO: 248364
  chr1:33612963-33613006
  hypo

SEQ ID NO: 427132 - DNA, 498 bp, Homo sapiens; identical to SEQ ID NO: 197450
  chr1:33721208-33721706
  hypo

SEQ ID NO: 427133 - DNA, 42 bp, Homo sapiens; identical to SEQ ID NO: 248366
  chr1:33763431-33763473
  hypo

SEQ ID NO: 427134 - DNA, 94 bp, Homo sapiens; identical to SEQ ID NO: 248367
  chr1:33817184-33817278
  hypo

SEQ ID NO: 427135 - DNA, 97 bp, Homo sapiens; identical to SEQ ID NO: 248368
  chr1:33841565-33841662
  hypo

SEQ ID NO: 427136 - DNA, 80 bp, Homo sapiens; identical to SEQ ID NO: 206899
  chr1:33985125-33985205
  hypo

SEQ ID NO: 427137 - DNA, 250 bp, Homo sapiens; identical to SEQ ID NO: 248370
  chr1:35116224-35116474
  hypo

SEQ ID NO: 427138 - DNA, 292 bp, Homo sapiens; identical to SEQ ID NO: 248371
  chr1:35223069-35223361
  hypo

SEQ ID NO: 427139 - DNA, 548 bp, Homo sapiens; identical to SEQ ID NO: 206901
  chr1:35226870-35227418
  hypo

SEQ ID NO: 427140 - DNA, 84 bp, Homo sapiens; identical to SEQ ID NO: 221303
  chr1:35260186-35260270
  hypo

SEQ ID NO: 427141 - DNA, 46 bp, Homo sapiens; identical to SEQ ID NO: 248373
  chr1:35442224-35442270
  hypo

SEQ ID NO: 427142 - DNA, 36 bp, Homo sapiens; identical to SEQ ID NO: 248376
  chr1:35894111-35894147
  hypo

SEQ ID NO: 427143 - DNA, 40 bp, Homo sapiens; identical to SEQ ID NO: 248377
  chr1:35963895-35963935
  hypo

SEQ ID NO: 427144 - DNA, 39 bp, Homo sapiens; identical to SEQ ID NO: 206905
  chr1:36056553-36056592
  hypo

SEQ ID NO: 427145 - DNA, 156 bp, Homo sapiens; identical to SEQ ID NO: 278247
  chr1:36173085-36173241
  hypo

SEQ ID NO: 427146 - DNA, 414 bp, Homo sapiens; identical to SEQ ID NO: 278248
  chr1:36173282-36173696
  hypo

SEQ ID NO: 427147 - DNA, 44 bp, Homo sapiens; identical to SEQ ID NO: 248380
  chr1:36271181-36271225
  hypo

SEQ ID NO: 427148 - DNA, 201 bp, Homo sapiens; identical to SEQ ID NO: 248382
  chr1:36549011-36549212
  hypo

SEQ ID NO: 427149 - DNA, 147 bp, Homo sapiens; identical to SEQ ID NO: 248383
  chr1:36558327-36558474
  hypo

SEQ ID NO: 427150 - DNA, 82 bp, Homo sapiens; identical to SEQ ID NO: 248385
  chr1:36610554-36610636
  hypo

SEQ ID NO: 427151 - DNA, 59 bp, Homo sapiens; identical to SEQ ID NO: 248386
  chr1:36633228-36633287
  hypo

SEQ ID NO: 427152 - DNA, 88 bp, Homo sapiens; identical to SEQ ID NO: 248387
  chr1:36637143-36637231
  hypo

SEQ ID NO: 427153 - DNA, 62 bp, Homo sapiens; identical to SEQ ID NO: 248388
  chr1:36638185-36638247
  hypo

SEQ ID NO: 427154 - DNA, 93 bp, Homo sapiens; identical to SEQ ID NO: 206907
  chr1:36641759-36641852
  hypo

SEQ ID NO: 427155 - DNA, 155 bp, Homo sapiens; identical to SEQ ID NO: 248391
  chr1:36773758-36773913
  hypo

SEQ ID NO: 427156 - DNA, 42 bp, Homo sapiens; identical to SEQ ID NO: 206908
  chr1:36774202-36774244
  hypo

SEQ ID NO: 427157 - DNA, 116 bp, Homo sapiens; identical to SEQ ID NO: 248393
  chr1:36807404-36807520
  hypo

SEQ ID NO: 427158 - DNA, 66 bp, Homo sapiens; identical to SEQ ID NO: 248394
  chr1:36814516-36814582
  hypo

SEQ ID NO: 427159 - DNA, 76 bp, Homo sapiens; identical to SEQ ID NO: 248395
  chr1:36845272-36845348
  hypo

SEQ ID NO: 427160 - DNA, 186 bp, Homo sapiens; identical to SEQ ID NO: 206909
  chr1:36857026-36857212
  hypo

SEQ ID NO: 427161 - DNA, 223 bp, Homo sapiens; identical to SEQ ID NO: 206910
  chr1:36881339-36881562
  hypo

SEQ ID NO: 427162 - DNA, 39 bp, Homo sapiens; identical to SEQ ID NO: 248398
  chr1:36931309-36931348
  hypo

SEQ ID NO: 427163 - DNA, 866 bp, Homo sapiens; identical to SEQ ID NO: 197462
  chr1:36931643-36932509
  hypo

SEQ ID NO: 427164 - DNA, 218 bp, Homo sapiens; identical to SEQ ID NO: 197463
  chr1:36933230-36933448
  hypo

SEQ ID NO: 427165 - DNA, 321 bp, Homo sapiens; identical to SEQ ID NO: 278257
  chr1:36936920-36937241
  hypo

SEQ ID NO: 427166 - DNA, 77 bp, Homo sapiens; identical to SEQ ID NO: 197465
  chr1:36937669-36937746
  hypo

SEQ ID NO: 427167 - DNA, 150 bp, Homo sapiens; identical to SEQ ID NO: 206915
  chr1:36979463-36979613
  hypo

SEQ ID NO: 427168 - DNA, 142 bp, Homo sapiens; identical to SEQ ID NO: 248401
  chr1:37324710-37324852
  hypo

SEQ ID NO: 427169 - DNA, 44 bp, Homo sapiens; identical to SEQ ID NO: 248402
  chr1:37851536-37851580
  hypo

SEQ ID NO: 427170 - DNA, 45 bp, Homo sapiens; identical to SEQ ID NO: 248403
  chr1:37863807-37863852
  hypo

SEQ ID NO: 427171 - DNA, 179 bp, Homo sapiens; identical to SEQ ID NO: 248404
  chr1:37898813-37898992
  hypo

SEQ ID NO: 427172 - DNA, 395 bp, Homo sapiens; identical to SEQ ID NO: 278264
  chr1:37940474-37940869
  hypo

SEQ ID NO: 427173 - DNA, 32 bp, Homo sapiens; identical to SEQ ID NO: 248405
  chr1:38030259-38030291
  hypo

SEQ ID NO: 427174 - DNA, 92 bp, Homo sapiens; identical to SEQ ID NO: 248406
  chr1:38149928-38150020
  hypo

SEQ ID NO: 427175 - DNA, 181 bp, Homo sapiens; identical to SEQ ID NO: 248407
  chr1:38171209-38171390
  hypo

SEQ ID NO: 427176 - DNA, 42 bp, Homo sapiens; identical to SEQ ID NO: 248408
  chr1:38184577-38184619
  hypo

SEQ ID NO: 427177 - DNA, 58 bp, Homo sapiens; identical to SEQ ID NO: 248409
  chr1:38206997-38207055
  hypo

SEQ ID NO: 427178 - DNA, 37 bp, Homo sapiens; identical to SEQ ID NO: 206917
  chr1:38294272-38294309
  hypo

SEQ ID NO: 427179 - DNA, 96 bp, Homo sapiens; identical to SEQ ID NO: 248411
  chr1:38327726-38327822
  hypo

SEQ ID NO: 427180 - DNA, 313 bp, Homo sapiens; identical to SEQ ID NO: 206918
  chr1:38492844-38493157
  hypo

SEQ ID NO: 427181 - DNA, 98 bp, Homo sapiens; identical to SEQ ID NO: 221316
  chr1:38580185-38580283
  hypo

SEQ ID NO: 427182 - DNA, 56 bp, Homo sapiens; identical to SEQ ID NO: 297121
  chr1:38673133-38673189
  hypo

SEQ ID NO: 427183 - DNA, 144 bp, Homo sapiens; identical to SEQ ID NO: 206919
  chr1:39174396-39174540
  hypo

SEQ ID NO: 427184 - DNA, 367 bp, Homo sapiens; identical to SEQ ID NO: 278279
  chr1:39284066-39284433
  hypo

SEQ ID NO: 427185 - DNA, 120 bp, Homo sapiens; identical to SEQ ID NO: 206920
  chr1:39345657-39345777
  hypo

SEQ ID NO: 427186 - DNA, 82 bp, Homo sapiens; identical to SEQ ID NO: 248420
  chr1:39388385-39388467
  hypo

SEQ ID NO: 427187 - DNA, 31 bp, Homo sapiens; identical to SEQ ID NO: 206921
  chr1:39739272-39739303
  hypo

SEQ ID NO: 427188 - DNA, 31 bp, Homo sapiens; identical to SEQ ID NO: 206922
  chr1:39739543-39739574
  hypo

SEQ ID NO: 427189 - DNA, 39 bp, Homo sapiens; identical to SEQ ID NO: 248425
  chr1:39920597-39920636
  hypo

SEQ ID NO: 427190 - DNA, 101 bp, Homo sapiens; identical to SEQ ID NO: 248428
  chr1:40081557-40081658
  hypo

SEQ ID NO: 427191 - DNA, 33 bp, Homo sapiens; identical to SEQ ID NO: 248429
  chr1:40117400-40117433
  hypo

SEQ ID NO: 427192 - DNA, 248 bp, Homo sapiens; identical to SEQ ID NO: 248430
  chr1:40124818-40125066
  hypo

SEQ ID NO: 427193 - DNA, 31 bp, Homo sapiens; identical to SEQ ID NO: 248431
  chr1:40179273-40179304
  hypo

SEQ ID NO: 427194 - DNA, 344 bp, Homo sapiens; identical to SEQ ID NO: 278290
  chr1:40254463-40254807
  hypo

SEQ ID NO: 427195 - DNA, 121 bp, Homo sapiens; identical to SEQ ID NO: 278291
  chr1:40254922-40255043
  hypo

SEQ ID NO: 427196 - DNA, 35 bp, Homo sapiens; identical to SEQ ID NO: 278292
  chr1:40255068-40255103
  hypo

SEQ ID NO: 427197 - DNA, 81 bp, Homo sapiens; identical to SEQ ID NO: 278293
  chr1:40255104-40255185
  hypo

SEQ ID NO: 427198 - DNA, 280 bp, Homo sapiens; identical to SEQ ID NO: 278294
  chr1:40367951-40368231
  hypo

SEQ ID NO: 427199 - DNA, 31 bp, Homo sapiens; identical to SEQ ID NO: 221329
  chr1:40420568-40420599
  hypo

SEQ ID NO: 427200 - DNA, 122 bp, Homo sapiens; identical to SEQ ID NO: 221330
  chr1:40420932-40421054
  hypo

SEQ ID NO: 427201 - DNA, 162 bp, Homo sapiens; identical to SEQ ID NO: 248435
  chr1:41116838-41117000
  hypo

SEQ ID NO: 427202 - DNA, 32 bp, Homo sapiens; identical to SEQ ID NO: 248436
  chr1:41170004-41170036
  hypo

SEQ ID NO: 427203 - DNA, 79 bp, Homo sapiens; identical to SEQ ID NO: 248438
  chr1:41295714-41295793
  hypo

SEQ ID NO: 427204 - DNA, 394 bp, Homo sapiens; identical to SEQ ID NO: 248440
  chr1:41472915-41473309
  hypo

SEQ ID NO: 427205 - DNA, 137 bp, Homo sapiens; identical to SEQ ID NO: 248441
  chr1:41483523-41483660
  hypo

SEQ ID NO: 427206 - DNA, 51 bp, Homo sapiens; identical to SEQ ID NO: 248443
  chr1:41488287-41488338
  hypo

SEQ ID NO: 427207 - DNA, 59 bp, Homo sapiens; identical to SEQ ID NO: 297164
  chr1:41915194-41915253
  hypo

SEQ ID NO: 427208 - DNA, 98 bp, Homo sapiens; identical to SEQ ID NO: 248445
  chr1:41933801-41933899
  hypo

SEQ ID NO: 427209 - DNA, 253 bp, Homo sapiens; identical to SEQ ID NO: 248446
  chr1:41934216-41934469
  hypo

SEQ ID NO: 427210 - DNA, 47 bp, Homo sapiens; identical to SEQ ID NO: 206928
  chr1:41967566-41967613
  hypo

SEQ ID NO: 427211 - DNA, 211 bp, Homo sapiens; identical to SEQ ID NO: 248448
  chr1:41970958-41971169
  hypo

SEQ ID NO: 427212 - DNA, 149 bp, Homo sapiens; identical to SEQ ID NO: 248449
  chr1:41976354-41976503
  hypo

SEQ ID NO: 427213 - DNA, 182 bp, Homo sapiens; identical to SEQ ID NO: 248450
  chr1:41979369-41979551
  hypo

SEQ ID NO: 427214 - DNA, 494 bp, Homo sapiens; identical to SEQ ID NO: 197488
  chr1:41981667-41982161
  hypo

SEQ ID NO: 427215 - DNA, 35 bp, Homo sapiens; identical to SEQ ID NO: 206930
  chr1:42120784-42120819
  hypo

SEQ ID NO: 427216 - DNA, 66 bp, Homo sapiens; identical to SEQ ID NO: 248453
  chr1:42142944-42143010
  hypo

SEQ ID NO: 427217 - DNA, 178 bp, Homo sapiens; identical to SEQ ID NO: 248454
  chr1:42212494-42212672
  hypo

SEQ ID NO: 427218 - DNA, 66 bp, Homo sapiens; identical to SEQ ID NO: 248455
  chr1:42630381-42630447
  hypo

SEQ ID NO: 427219 - DNA, 35 bp, Homo sapiens; identical to SEQ ID NO: 206931
  chr1:42802314-42802349
  hypo

SEQ ID NO: 427220 - DNA, 189 bp, Homo sapiens; identical to SEQ ID NO: 206932
  chr1:43203989-43204178
  hypo

SEQ ID NO: 427221 - DNA, 183 bp, Homo sapiens; identical to SEQ ID NO: 248460
  chr1:43209438-43209621
  hypo

SEQ ID NO: 427222 - DNA, 88 bp, Homo sapiens; identical to SEQ ID NO: 206933
  chr1:43296453-43296541
  hypo

SEQ ID NO: 427223 - DNA, 293 bp, Homo sapiens; identical to SEQ ID NO: 248463
  chr1:43353271-43353564
  hypo

SEQ ID NO: 427224 - DNA, 319 bp, Homo sapiens; identical to SEQ ID NO: 297183
  chr1:43400386-43400705
  hypo

SEQ ID NO: 427225 - DNA, 169 bp, Homo sapiens; identical to SEQ ID NO: 248465
  chr1:43412604-43412773
  hypo

SEQ ID NO: 427226 - DNA, 31 bp, Homo sapiens; identical to SEQ ID NO: 97386
  chr1:43478271-43478302
  hypo

SEQ ID NO: 427227 - DNA, 89 bp, Homo sapiens; identical to SEQ ID NO: 206937
  chr1:43521465-43521554
  hypo

SEQ ID NO: 427228 - DNA, 145 bp, Homo sapiens; identical to SEQ ID NO: 248469
  chr1:43532590-43532735
  hypo

SEQ ID NO: 427229 - DNA, 83 bp, Homo sapiens; identical to SEQ ID NO: 206938
  chr1:43533472-43533555
  hypo

SEQ ID NO: 427230 - DNA, 404 bp, Homo sapiens; identical to SEQ ID NO: 206939
  chr1:43534661-43535065
  hypo

SEQ ID NO: 427231 - DNA, 35 bp, Homo sapiens; identical to SEQ ID NO: 248472
  chr1:43626939-43626974
  hypo

SEQ ID NO: 427232 - DNA, 32 bp, Homo sapiens; identical to SEQ ID NO: 206940
  chr1:43702286-43702318
  hypo

SEQ ID NO: 427233 - DNA, 238 bp, Homo sapiens; identical to SEQ ID NO: 248474
  chr1:43738645-43738883
  hypo

SEQ ID NO: 427234 - DNA, 70 bp, Homo sapiens; identical to SEQ ID NO: 297193
  chr1:43750607-43750677
  hypo

SEQ ID NO: 427235 - DNA, 151 bp, Homo sapiens; identical to SEQ ID NO: 297194
  chr1:43750707-43750858
  hypo

SEQ ID NO: 427236 - DNA, 163 bp, Homo sapiens; identical to SEQ ID NO: 206942
  chr1:43754321-43754484
  hypo

SEQ ID NO: 427237 - DNA, 201 bp, Homo sapiens; identical to SEQ ID NO: 248477
  chr1:43782856-43783057
  hypo

SEQ ID NO: 427238 - DNA, 151 bp, Homo sapiens; identical to SEQ ID NO: 206943
  chr1:43783572-43783723
  hypo

SEQ ID NO: 427239 - DNA, 43 bp, Homo sapiens; identical to SEQ ID NO: 197492
  chr1:43803509-43803552
  hypo

SEQ ID NO: 427240 - DNA, 208 bp, Homo sapiens; identical to SEQ ID NO: 197493
  chr1:43805020-43805228
  hypo

SEQ ID NO: 427241 - DNA, 67 bp, Homo sapiens; identical to SEQ ID NO: 197494
  chr1:43814927-43814994
  hypo

SEQ ID NO: 427242 - DNA, 268 bp, Homo sapiens; identical to SEQ ID NO: 197495
  chr1:43818177-43818445
  hypo

SEQ ID NO: 427243 - DNA, 332 bp, Homo sapiens; identical to SEQ ID NO: 248482
  chr1:43905359-43905691
  hypo

SEQ ID NO: 427244 - DNA, 34 bp, Homo sapiens; identical to SEQ ID NO: 248483
  chr1:43906214-43906248
  hypo

SEQ ID NO: 427245 - DNA, 287 bp, Homo sapiens; identical to SEQ ID NO: 197497
  chr1:43919241-43919528
  hypo

SEQ ID NO: 427246 - DNA, 119 bp, Homo sapiens; identical to SEQ ID NO: 391
  chr1:43919541-43919660
  hypo

SEQ ID NO: 427247 - DNA, 88 bp, Homo sapiens; identical to SEQ ID NO: 206951
  chr1:43969026-43969114
  hypo

SEQ ID NO: 427248 - DNA, 189 bp, Homo sapiens; identical to SEQ ID NO: 206952
  chr1:43987296-43987485
  hypo

SEQ ID NO: 427249 - DNA, 35 bp, Homo sapiens; identical to SEQ ID NO: 206953
  chr1:43991183-43991218
  hypo

SEQ ID NO: 427250 - DNA, 212 bp, Homo sapiens; identical to SEQ ID NO: 206954
  chr1:44029987-44030199
  hypo

SEQ ID NO: 427251 - DNA, 45 bp, Homo sapiens; identical to SEQ ID NO: 248488
  chr1:44030403-44030448
  hypo

SEQ ID NO: 427252 - DNA, 102 bp, Homo sapiens; identical to SEQ ID NO: 206955
  chr1:44044918-44045020
  hypo

SEQ ID NO: 427253 - DNA, 159 bp, Homo sapiens; identical to SEQ ID NO: 248490
  chr1:44047737-44047896
  hypo

SEQ ID NO: 427254 - DNA, 93 bp, Homo sapiens; identical to SEQ ID NO: 206956
  chr1:44063579-44063672
  hypo

SEQ ID NO: 427255 - DNA, 49 bp, Homo sapiens; identical to SEQ ID NO: 248492
  chr1:44068723-44068772
  hypo

SEQ ID NO: 427256 - DNA, 148 bp, Homo sapiens; identical to SEQ ID NO: 206957
  chr1:44069555-44069703
  hypo

SEQ ID NO: 427257 - DNA, 128 bp, Homo sapiens; identical to SEQ ID NO: 248494
  chr1:44070960-44071088
  hypo

SEQ ID NO: 427258 - DNA, 238 bp, Homo sapiens; identical to SEQ ID NO: 248495
  chr1:44072459-44072697
  hypo

SEQ ID NO: 427259 - DNA, 347 bp, Homo sapiens; identical to SEQ ID NO: 248496
  chr1:44084831-44085178
  hypo

SEQ ID NO: 427260 - DNA, 80 bp, Homo sapiens; identical to SEQ ID NO: 248497
  chr1:44110063-44110143
  hypo

SEQ ID NO: 427261 - DNA, 221 bp, Homo sapiens; identical to SEQ ID NO: 248499
  chr1:44137396-44137617
  hypo

SEQ ID NO: 427262 - DNA, 73 bp, Homo sapiens; identical to SEQ ID NO: 248500
  chr1:44138998-44139071
  hypo

SEQ ID NO: 427263 - DNA, 42 bp, Homo sapiens; identical to SEQ ID NO: 248502
  chr1:44303658-44303700
  hypo

SEQ ID NO: 427264 - DNA, 162 bp, Homo sapiens; identical to SEQ ID NO: 248503
  chr1:44303820-44303982
  hypo

SEQ ID NO: 427265 - DNA, 201 bp, Homo sapiens; identical to SEQ ID NO: 248504
  chr1:44309570-44309771
  hypo

SEQ ID NO: 427266 - DNA, 133 bp, Homo sapiens; identical to SEQ ID NO: 248506
  chr1:44380112-44380245
  hypo

SEQ ID NO: 427267 - DNA, 112 bp, Homo sapiens; identical to SEQ ID NO: 278338
  chr1:44402260-44402372
  hypo

SEQ ID NO: 427268 - DNA, 120 bp, Homo sapiens; identical to SEQ ID NO: 197500
  chr1:44444589-44444709
  hypo

SEQ ID NO: 427269 - DNA, 81 bp, Homo sapiens; identical to SEQ ID NO: 248507
  chr1:44446769-44446850
  hypo

SEQ ID NO: 427270 - DNA, 126 bp, Homo sapiens; identical to SEQ ID NO: 248508
  chr1:44447464-44447590
  hypo

SEQ ID NO: 427271 - DNA, 577 bp, Homo sapiens; identical to SEQ ID NO: 297235
  chr1:44463253-44463830
  hypo

SEQ ID NO: 427272 - DNA, 226 bp, Homo sapiens; identical to SEQ ID NO: 248510
  chr1:44483085-44483311
  hypo

SEQ ID NO: 427273 - DNA, 137 bp, Homo sapiens; identical to SEQ ID NO: 248511
  chr1:44490960-44491097
  hypo

SEQ ID NO: 427274 - DNA, 136 bp, Homo sapiens; identical to SEQ ID NO: 248515
  chr1:44755341-44755477
  hypo

SEQ ID NO: 427275 - DNA, 242 bp, Homo sapiens; identical to SEQ ID NO: 248516
  chr1:44792160-44792402
  hypo

SEQ ID NO: 427276 - DNA, 143 bp, Homo sapiens; identical to SEQ ID NO: 248518
  chr1:45068757-45068900
  hypo

SEQ ID NO: 427277 - DNA, 194 bp, Homo sapiens; identical to SEQ ID NO: 248520
  chr1:45090554-45090748
  hypo

SEQ ID NO: 427278 - DNA, 99 bp, Homo sapiens; identical to SEQ ID NO: 206968
  chr1:45101746-45101845
  hypo

SEQ ID NO: 427279 - DNA, 346 bp, Homo sapiens; identical to SEQ ID NO: 248524
  chr1:45120345-45120691
  hypo

SEQ ID NO: 427280 - DNA, 348 bp, Homo sapiens; identical to SEQ ID NO: 248526
  chr1:45190029-45190377
  hypo

SEQ ID NO: 427281 - DNA, 134 bp, Homo sapiens; identical to SEQ ID NO: 248527
  chr1:45190407-45190541
  hypo

SEQ ID NO: 427282 - DNA, 43 bp, Homo sapiens; identical to SEQ ID NO: 248528
  chr1:45190571-45190614
  hypo

SEQ ID NO: 427283 - DNA, 132 bp, Homo sapiens; identical to SEQ ID NO: 248529
  chr1:45190897-45191029
  hypo

SEQ ID NO: 427284 - DNA, 378 bp, Homo sapiens; identical to SEQ ID NO: 248530
  chr1:45253065-45253443
  hypo

SEQ ID NO: 427285 - DNA, 32 bp, Homo sapiens; identical to SEQ ID NO: 248531
  chr1:45264888-45264920
  hypo

SEQ ID NO: 427286 - DNA, 43 bp, Homo sapiens; identical to SEQ ID NO: 297259
  chr1:45280616-45280659
  hypo

SEQ ID NO: 427287 - DNA, 123 bp, Homo sapiens; identical to SEQ ID NO: 297260
  chr1:45293094-45293217
  hypo

SEQ ID NO: 427288 - DNA, 120 bp, Homo sapiens; identical to SEQ ID NO: 248536
  chr1:45409393-45409513
  hypo

SEQ ID NO: 427289 - DNA, 83 bp, Homo sapiens; identical to SEQ ID NO: 206973
  chr1:45454356-45454439
  hypo

SEQ ID NO: 427290 - DNA, 206 bp, Homo sapiens; identical to SEQ ID NO: 248538
  chr1:45457724-45457930
  hypo

SEQ ID NO: 427291 - DNA, 105 bp, Homo sapiens; identical to SEQ ID NO: 248539
  chr1:45529304-45529409
  hypo

SEQ ID NO: 427292 - DNA, 38 bp, Homo sapiens; identical to SEQ ID NO: 248540
  chr1:45656870-45656908
  hypo

SEQ ID NO: 427293 - DNA, 167 bp, Homo sapiens; identical to SEQ ID NO: 248541
  chr1:45759290-45759457
  hypo

SEQ ID NO: 427294 - DNA, 32 bp, Homo sapiens; identical to SEQ ID NO: 248542
  chr1:45801240-45801272
  hypo

SEQ ID NO: 427295 - DNA, 120 bp, Homo sapiens; identical to SEQ ID NO: 206974
  chr1:45950719-45950839
  hypo

SEQ ID NO: 427296 - DNA, 227 bp, Homo sapiens; identical to SEQ ID NO: 248544
  chr1:46089387-46089614
  hypo

SEQ ID NO: 427297 - DNA, 79 bp, Homo sapiens; identical to SEQ ID NO: 206975
  chr1:46131435-46131514
  hypo

SEQ ID NO: 427298 - DNA, 35 bp, Homo sapiens; identical to SEQ ID NO: 248547
  chr1:46338430-46338465
  hypo

SEQ ID NO: 427299 - DNA, 90 bp, Homo sapiens; identical to SEQ ID NO: 248548
  chr1:46476446-46476536
  hypo

SEQ ID NO: 427300 - DNA, 34 bp, Homo sapiens; identical to SEQ ID NO: 248550
  chr1:46618505-46618539
  hypo

SEQ ID NO: 427301 - DNA, 134 bp, Homo sapiens; identical to SEQ ID NO: 297276
  chr1:46653315-46653449
  hypo

SEQ ID NO: 427302 - DNA, 89 bp, Homo sapiens; identical to SEQ ID NO: 206976
  chr1:46751246-46751335
  hypo

SEQ ID NO: 427303 - DNA, 97 bp, Homo sapiens; identical to SEQ ID NO: 248554
  chr1:46751628-46751725
  hypo

SEQ ID NO: 427304 - DNA, 59 bp, Homo sapiens; identical to SEQ ID NO: 206977
  chr1:46752071-46752130
  hypo

SEQ ID NO: 427305 - DNA, 54 bp, Homo sapiens; identical to SEQ ID NO: 248556
  chr1:46805244-46805298
  hypo

SEQ ID NO: 427306 - DNA, 286 bp, Homo sapiens; identical to SEQ ID NO: 248557
  chr1:46807507-46807793
  hypo

SEQ ID NO: 427307 - DNA, 327 bp, Homo sapiens; identical to SEQ ID NO: 278378
  chr1:46932180-46932507
  hypo

SEQ ID NO: 427308 - DNA, 198 bp, Homo sapiens; identical to SEQ ID NO: 197515
  chr1:47078538-47078736
  hypo

SEQ ID NO: 427309 - DNA, 45 bp, Homo sapiens; identical to SEQ ID NO: 197516
  chr1:47078782-47078827
  hypo

SEQ ID NO: 427310 - DNA, 112 bp, Homo sapiens; identical to SEQ ID NO: 248564
  chr1:47684469-47684581
  hypo

SEQ ID NO: 427311 - DNA, 449 bp, Homo sapiens; identical to SEQ ID NO: 278392
  chr1:47903680-47904129
  hypo

SEQ ID NO: 427312 - DNA, 66 bp, Homo sapiens; identical to SEQ ID NO: 248566
  chr1:47974505-47974571
  hypo

SEQ ID NO: 427313 - DNA, 102 bp, Homo sapiens; identical to SEQ ID NO: 248567
  chr1:48187539-48187641
  hypo

SEQ ID NO: 427314 - DNA, 66 bp, Homo sapiens; identical to SEQ ID NO: 297299
  chr1:48246983-48247049
  hypo

SEQ ID NO: 427315 - DNA, 188 bp, Homo sapiens; identical to SEQ ID NO: 248569
  chr1:48257294-48257482
  hypo

SEQ ID NO: 427316 - DNA, 142 bp, Homo sapiens; identical to SEQ ID NO: 206987
  chr1:48270033-48270175
  hypo

SEQ ID NO: 427317 - DNA, 48 bp, Homo sapiens; identical to SEQ ID NO: 206990
  chr1:50919071-50919119
  hypo

SEQ ID NO: 427318 - DNA, 355 bp, Homo sapiens; identical to SEQ ID NO: 248574
  chr1:51165682-51166037
  hypo

SEQ ID NO: 427319 - DNA, 35 bp, Homo sapiens; identical to SEQ ID NO: 206991
  chr1:51424030-51424065
  hypo

SEQ ID NO: 427320 - DNA, 74 bp, Homo sapiens; identical to SEQ ID NO: 206993
  chr1:51761677-51761751
  hypo

SEQ ID NO: 427321 - DNA, 83 bp, Homo sapiens; identical to SEQ ID NO: 248579
  chr1:51848399-51848482
  hypo

SEQ ID NO: 427322 - DNA, 47 bp, Homo sapiens; identical to SEQ ID NO: 248580
  chr1:52049261-52049308
  hypo

SEQ ID NO: 427323 - DNA, 44 bp, Homo sapiens; identical to SEQ ID NO: 206995
  chr1:52060513-52060557
  hypo

SEQ ID NO: 427324 - DNA, 38 bp, Homo sapiens; identical to SEQ ID NO: 206997
  chr1:52089596-52089634
  hypo

SEQ ID NO: 427325 - DNA, 42 bp, Homo sapiens; identical to SEQ ID NO: 248584
  chr1:52284963-52285005
  hypo

SEQ ID NO: 427326 - DNA, 45 bp, Homo sapiens; identical to SEQ ID NO: 248585
  chr1:52310965-52311010
  hypo

SEQ ID NO: 427327 - DNA, 38 bp, Homo sapiens; identical to SEQ ID NO: 248586
  chr1:52337810-52337848
  hypo

SEQ ID NO: 427328 - DNA, 98 bp, Homo sapiens; identical to SEQ ID NO: 248588
  chr1:52505300-52505398
  hypo

SEQ ID NO: 427329 - DNA, 43 bp, Homo sapiens; identical to SEQ ID NO: 248590
  chr1:52549396-52549439
  hypo

SEQ ID NO: 427330 - DNA, 180 bp, Homo sapiens; identical to SEQ ID NO: 221355
  chr1:52608469-52608649
  hypo

SEQ ID NO: 427331 - DNA, 102 bp, Homo sapiens
  chr1:52659366-52659468
  hypo
aaaactctgtctcaaaaaaaaaaaaaaaaaaaaaaaaagatacacactaatgactcagtaattgtgcatcttaatgtcttaatgtttatcttcaaacacaca

SEQ ID NO: 427332 - DNA, 90 bp, Homo sapiens
  chr1:52659576-52659666
  hypo
gtgctttatataactgataaataacaggaaaattatgatatggttatattttagaattctatgtgtacaattaaagtagttgtaatccca

SEQ ID NO: 427333 - DNA, 104 bp, Homo sapiens; identical to SEQ ID NO: 206999
  chr1:53053490-53053594
  hypo

SEQ ID NO: 427334 - DNA, 79 bp, Homo sapiens; identical to SEQ ID NO: 207000
  chr1:53129044-53129123
  hypo

SEQ ID NO: 427335 - DNA, 47 bp, Homo sapiens; identical to SEQ ID NO: 207002
  chr1:53479848-53479895
  hypo

SEQ ID NO: 427336 - DNA, 92 bp, Homo sapiens; identical to SEQ ID NO: 248598
  chr1:53535642-53535734
  hypo

SEQ ID NO: 427337 - DNA, 263 bp, Homo sapiens; identical to SEQ ID NO: 248599
  chr1:53544125-53544388
  hypo

SEQ ID NO: 427338 - DNA, 192 bp, Homo sapiens; identical to SEQ ID NO: 297331
  chr1:53561225-53561417
  hypo

SEQ ID NO: 427339 - DNA, 91 bp, Homo sapiens; identical to SEQ ID NO: 248601
  chr1:53583644-53583735
  hypo

SEQ ID NO: 427340 - DNA, 212 bp, Homo sapiens; identical to SEQ ID NO: 248602
  chr1:53600839-53601051
  hypo

SEQ ID NO: 427341 - DNA, 326 bp, Homo sapiens; identical to SEQ ID NO: 248604
  chr1:53769484-53769810
  hypo

SEQ ID NO: 427342 - DNA, 236 bp, Homo sapiens; identical to SEQ ID NO: 248605
  chr1:53905598-53905834
  hypo

SEQ ID NO: 427343 - DNA, 56 bp, Homo sapiens; identical to SEQ ID NO: 248606
  chr1:53986260-53986316
  hypo

SEQ ID NO: 427344 - DNA, 77 bp, Homo sapiens; identical to SEQ ID NO: 248607
  chr1:54009675-54009752
  hypo

SEQ ID NO: 427345 - DNA, 82 bp, Homo sapiens; identical to SEQ ID NO: 248608
  chr1:54009966-54010048
  hypo

SEQ ID NO: 427346 - DNA, 37 bp, Homo sapiens; identical to SEQ ID NO: 248609
  chr1:54037530-54037567
  hypo

SEQ ID NO: 427347 - DNA, 75 bp, Homo sapiens; identical to SEQ ID NO: 207004
  chr1:54060385-54060460
  hypo

SEQ ID NO: 427348 - DNA, 128 bp, Homo sapiens; identical to SEQ ID NO: 248611
  chr1:54142673-54142801
  hypo

SEQ ID NO: 427349 - DNA, 160 bp, Homo sapiens; identical to SEQ ID NO: 207005
  chr1:54260083-54260243
  hypo

SEQ ID NO: 427350 - DNA, 166 bp, Homo sapiens; identical to SEQ ID NO: 207008
  chr1:54602338-54602504
  hypo

SEQ ID NO: 427351 - DNA, 204 bp, Homo sapiens; identical to SEQ ID NO: 207009
  chr1:54605374-54605578
  hypo

SEQ ID NO: 427352 - DNA, 50 bp, Homo sapiens; identical to SEQ ID NO: 207010
  chr1:54610116-54610166
  hypo

SEQ ID NO: 427353 - DNA, 245 bp, Homo sapiens; identical to SEQ ID NO: 297349
  chr1:54683814-54684059
  hypo

SEQ ID NO: 427354 - DNA, 63 bp, Homo sapiens; identical to SEQ ID NO: 297351
  chr1:54722603-54722666
  hypo

SEQ ID NO: 427355 - DNA, 416 bp, Homo sapiens; identical to SEQ ID NO: 248622
  chr1:54725170-54725586
  hypo

SEQ ID NO: 427356 - DNA, 60 bp, Homo sapiens; identical to SEQ ID NO: 248623
  chr1:54726656-54726716
  hypo

SEQ ID NO: 427357 - DNA, 207 bp, Homo sapiens; identical to SEQ ID NO: 207012
  chr1:54746227-54746434
  hypo

SEQ ID NO: 427358 - DNA, 358 bp, Homo sapiens; identical to SEQ ID NO: 248625
  chr1:54747983-54748341
  hypo

SEQ ID NO: 427359 - DNA, 105 bp, Homo sapiens; identical to SEQ ID NO: 248626
  chr1:54756002-54756107
  hypo

SEQ ID NO: 427360 - DNA, 43 bp, Homo sapiens; identical to SEQ ID NO: 248627
  chr1:54757160-54757203
  hypo

SEQ ID NO: 427361 - DNA, 92 bp, Homo sapiens; identical to SEQ ID NO: 248628
  chr1:54757486-54757578
  hypo

SEQ ID NO: 427362 - DNA, 60 bp, Homo sapiens; identical to SEQ ID NO: 297359
  chr1:54766194-54766254
  hypo

SEQ ID NO: 427363 - DNA, 31 bp, Homo sapiens; identical to SEQ ID NO: 248630
  chr1:54767237-54767268
  hypo

SEQ ID NO: 427364 - DNA, 257 bp, Homo sapiens; identical to SEQ ID NO: 248631
  chr1:54775634-54775891
  hypo

SEQ ID NO: 427365 - DNA, 279 bp, Homo sapiens; identical to SEQ ID NO: 248632
  chr1:54808633-54808912
  hypo

SEQ ID NO: 427366 - DNA, 121 bp, Homo sapiens; identical to SEQ ID NO: 207014
  chr1:54818601-54818722
  hypo

SEQ ID NO: 427367 - DNA, 78 bp, Homo sapiens; identical to SEQ ID NO: 248634
  chr1:54860655-54860733
  hypo

SEQ ID NO: 427368 - DNA, 138 bp, Homo sapiens; identical to SEQ ID NO: 248635
  chr1:54880303-54880441
  hypo

SEQ ID NO: 427369 - DNA, 36 bp, Homo sapiens; identical to SEQ ID NO: 248636
  chr1:54944840-54944876
  hypo

SEQ ID NO: 427370 - DNA, 44 bp, Homo sapiens; identical to SEQ ID NO: 248637
  chr1:55009517-55009561
  hypo

SEQ ID NO: 427371 - DNA, 94 bp, Homo sapiens; identical to SEQ ID NO: 207015
  chr1:55033218-55033312
  hypo

SEQ ID NO: 427372 - DNA, 155 bp, Homo sapiens; identical to SEQ ID NO: 207016
  chr1:55050846-55051001
  hypo

SEQ ID NO: 427373 - DNA, 72 bp, Homo sapiens; identical to SEQ ID NO: 207017
  chr1:55065738-55065810
  hypo

SEQ ID NO: 427374 - DNA, 293 bp, Homo sapiens; identical to SEQ ID NO: 248642
  chr1:55067377-55067670
  hypo

SEQ ID NO: 427375 - DNA, 206 bp, Homo sapiens; identical to SEQ ID NO: 248643
  chr1:55074067-55074273
  hypo

SEQ ID NO: 427376 - DNA, 205 bp, Homo sapiens; identical to SEQ ID NO: 248644
  chr1:55146065-55146270
  hypo

SEQ ID NO: 427377 - DNA, 269 bp, Homo sapiens; identical to SEQ ID NO: 248645
  chr1:55261713-55261982
  hypo

SEQ ID NO: 427378 - DNA, 134 bp, Homo sapiens; identical to SEQ ID NO: 248646
  chr1:55317920-55318054
  hypo

SEQ ID NO: 427379 - DNA, 97 bp, Homo sapiens; identical to SEQ ID NO: 248647
  chr1:55447258-55447355
  hypo

SEQ ID NO: 427380 - DNA, 485 bp, Homo sapiens; identical to SEQ ID NO: 278443
  chr1:55462188-55462673
  hypo

SEQ ID NO: 427381 - DNA, 198 bp, Homo sapiens; identical to SEQ ID NO: 207022
  chr1:55517831-55518029
  hypo

SEQ ID NO: 427382 - DNA, 50 bp, Homo sapiens; identical to SEQ ID NO: 297381
  chr1:55529041-55529091
  hypo

SEQ ID NO: 427383 - DNA, 75 bp, Homo sapiens; identical to SEQ ID NO: 248650
  chr1:55532714-55532789
  hypo

SEQ ID NO: 427384 - DNA, 118 bp, Homo sapiens; identical to SEQ ID NO: 248651
  chr1:55560944-55561062
  hypo

SEQ ID NO: 427385 - DNA, 41 bp, Homo sapiens; identical to SEQ ID NO: 248652
  chr1:55567199-55567240
  hypo

SEQ ID NO: 427386 - DNA, 40 bp, Homo sapiens; identical to SEQ ID NO: 248653
  chr1:55583107-55583147
  hypo

SEQ ID NO: 427387 - DNA, 293 bp, Homo sapiens; identical to SEQ ID NO: 248655
  chr1:55740624-55740917
  hypo

SEQ ID NO: 427388 - DNA, 331 bp, Homo sapiens; identical to SEQ ID NO: 221363
  chr1:56943370-56943701
  hypo

SEQ ID NO: 427389 - DNA, 747 bp, Homo sapiens; identical to SEQ ID NO: 221364
  chr1:57044295-57045042
  hypo

SEQ ID NO: 427390 - DNA, 121 bp, Homo sapiens; identical to SEQ ID NO: 197553
  chr1:59369443-59369564
  hypo

SEQ ID NO: 427391 - DNA, 190 bp, Homo sapiens; identical to SEQ ID NO: 278458
  chr1:59369778-59369968
  hypo

SEQ ID NO: 427392 - DNA, 34 bp, Homo sapiens; identical to SEQ ID NO: 248656
  chr1:59500703-59500737
  hypo

SEQ ID NO: 427393 - DNA, 46 bp, Homo sapiens; identical to SEQ ID NO: 248657
  chr1:59500767-59500813
  hypo

SEQ ID NO: 427394 - DNA, 190 bp, Homo sapiens; identical to SEQ ID NO: 197554
  chr1:59762030-59762220
  hypo

SEQ ID NO: 427395 - DNA, 54 bp, Homo sapiens; identical to SEQ ID NO: 248658
  chr1:59893085-59893139
  hypo

SEQ ID NO: 427396 - DNA, 155 bp, Homo sapiens; identical to SEQ ID NO: 297398
  chr1:59911863-59912018
  hypo

SEQ ID NO: 427397 - DNA, 204 bp, Homo sapiens; identical to SEQ ID NO: 207028
  chr1:60220992-60221196
  hypo

SEQ ID NO: 427398 - DNA, 219 bp, Homo sapiens; identical to SEQ ID NO: 278462
  chr1:60280122-60280341
  hypo

SEQ ID NO: 427399 - DNA, 279 bp, Homo sapiens; identical to SEQ ID NO: 35762
  chr1:60280812-60281091
  hypo

SEQ ID NO: 427400 - DNA, 198 bp, Homo sapiens; identical to SEQ ID NO: 248661
  chr1:60382733-60382931
  hypo

SEQ ID NO: 427401 - DNA, 42 bp, Homo sapiens; identical to SEQ ID NO: 248662
  chr1:61333528-61333570
  hypo

SEQ ID NO: 427402 - DNA, 62 bp, Homo sapiens; identical to SEQ ID NO: 297404
  chr1:61339555-61339617
  hypo

SEQ ID NO: 427403 - DNA, 76 bp, Homo sapiens; identical to SEQ ID NO: 207030
  chr1:61445392-61445468
  hypo

SEQ ID NO: 427404 - DNA, 216 bp, Homo sapiens; identical to SEQ ID NO: 248665
  chr1:61456417-61456633
  hypo

SEQ ID NO: 427405 - DNA, 133 bp, Homo sapiens; identical to SEQ ID NO: 278466
  chr1:61508554-61508687
  hypo

SEQ ID NO: 427406 - DNA, 215 bp, Homo sapiens; identical to SEQ ID NO: 278467
  chr1:61508954-61509169
  hypo

SEQ ID NO: 427407 - DNA, 40 bp, Homo sapiens; identical to SEQ ID NO: 197558
  chr1:61516034-61516074
  hypo

SEQ ID NO: 427408 - DNA, 36 bp, Homo sapiens; identical to SEQ ID NO: 207033
  chr1:61541526-61541562
  hypo

SEQ ID NO: 427409 - DNA, 359 bp, Homo sapiens; identical to SEQ ID NO: 197560
  chr1:61547845-61548204
  hypo

SEQ ID NO: 427410 - DNA, 771 bp, Homo sapiens; identical to SEQ ID NO: 278471
  chr1:61548437-61549208
  hypo

SEQ ID NO: 427411 - DNA, 267 bp, Homo sapiens; identical to SEQ ID NO: 278472
  chr1:61549310-61549577
  hypo

SEQ ID NO: 427412 - DNA, 159 bp, Homo sapiens; identical to SEQ ID NO: 248670
  chr1:61875330-61875489
  hypo

SEQ ID NO: 427413 - DNA, 117 bp, Homo sapiens; identical to SEQ ID NO: 207039
  chr1:62119988-62120105
  hypo

SEQ ID NO: 427414 - DNA, 316 bp, Homo sapiens; identical to SEQ ID NO: 395479
  chr1:62208494-62208810
  hypo

SEQ ID NO: 427415 - DNA, 36 bp, Homo sapiens; identical to SEQ ID NO: 248673
  chr1:62213623-62213659
  hypo

SEQ ID NO: 427416 - DNA, 58 bp, Homo sapiens; identical to SEQ ID NO: 207042
  chr1:62729380-62729438
  hypo

SEQ ID NO: 427417 - DNA, 60 bp, Homo sapiens; identical to SEQ ID NO: 248675
  chr1:62836529-62836589
  hypo

SEQ ID NO: 427418 - DNA, 38 bp, Homo sapiens; identical to SEQ ID NO: 248676
  chr1:63831676-63831714
  hypo

SEQ ID NO: 427419 - DNA, 224 bp, Homo sapiens; identical to SEQ ID NO: 248677
  chr1:63832612-63832836
  hypo

SEQ ID NO: 427420 - DNA, 41 bp, Homo sapiens; identical to SEQ ID NO: 248678
  chr1:64014770-64014811
  hypo

SEQ ID NO: 427421 - DNA, 184 bp, Homo sapiens; identical to SEQ ID NO: 248679
  chr1:64104294-64104478
  hypo

SEQ ID NO: 427422 - DNA, 130 bp, Homo sapiens; identical to SEQ ID NO: 207044
  chr1:64383872-64384002
  hypo

SEQ ID NO: 427423 - DNA, 149 bp, Homo sapiens; identical to SEQ ID NO: 248681
  chr1:64734441-64734590
  hypo

SEQ ID NO: 427424 - DNA, 419 bp, Homo sapiens; identical to SEQ ID NO: 35809
  chr1:65210939-65211358
  hypo

SEQ ID NO: 427425 - DNA, 68 bp, Homo sapiens; identical to SEQ ID NO: 248682
  chr1:65316659-65316727
  hypo

SEQ ID NO: 427426 - DNA, 91 bp, Homo sapiens; identical to SEQ ID NO: 248683
  chr1:65513412-65513503
  hypo

SEQ ID NO: 427427 - DNA, 39 bp, Homo sapiens; identical to SEQ ID NO: 197579
  chr1:65720329-65720368
  hypo

SEQ ID NO: 427428 - DNA, 81 bp, Homo sapiens; identical to SEQ ID NO: 248684
  chr1:65796414-65796495
  hypo

SEQ ID NO: 427429 - DNA, 230 bp, Homo sapiens; identical to SEQ ID NO: 197582
  chr1:66258847-66259077
  hypo

SEQ ID NO: 427430 - DNA, 127 bp, Homo sapiens; identical to SEQ ID NO: 248685
  chr1:66834312-66834439
  hypo

SEQ ID NO: 427431 - DNA, 111 bp, Homo sapiens; identical to SEQ ID NO: 248686
  chr1:68174580-68174691
  hypo

SEQ ID NO: 427432 - DNA, 36 bp, Homo sapiens; identical to SEQ ID NO: 248687
  chr1:68344803-68344839
  hypo

SEQ ID NO: 427433 - DNA, 130 bp, Homo sapiens; identical to SEQ ID NO: 248688
  chr1:68629018-68629148
  hypo

SEQ ID NO: 427434 - DNA, 35 bp, Homo sapiens; identical to SEQ ID NO: 248690
  chr1:69982630-69982665
  hypo

SEQ ID NO: 427435 - DNA, 34 bp, Homo sapiens; identical to SEQ ID NO: 248691
  chr1:69982905-69982939
  hypo

SEQ ID NO: 427436 - DNA, 186 bp, Homo sapiens; identical to SEQ ID NO: 297449
  chr1:71519814-71520000
  hypo

SEQ ID NO: 427437 - DNA, 36 bp, Homo sapiens; identical to SEQ ID NO: 207050
  chr1:71555024-71555060
  hypo

SEQ ID NO: 427438 - DNA, 34 bp, Homo sapiens; identical to SEQ ID NO: 207051
  chr1:72383170-72383204
  hypo

SEQ ID NO: 427439 - DNA, 144 bp, Homo sapiens; identical to SEQ ID NO: 248699
  chr1:72740462-72740606
  hypo

SEQ ID NO: 427440 - DNA, 41 bp, Homo sapiens; identical to SEQ ID NO: 207052
  chr1:73222393-73222434
  hypo

SEQ ID NO: 427441 - DNA, 73 bp, Homo sapiens; identical to SEQ ID NO: 248701
  chr1:77165571-77165644
  hypo

SEQ ID NO: 427442 - DNA, 95 bp, Homo sapiens; identical to SEQ ID NO: 248702
  chr1:77510044-77510139
  hypo

SEQ ID NO: 427443 - DNA, 35 bp, Homo sapiens; identical to SEQ ID NO: 248703
  chr1:78152467-78152502
  hypo

SEQ ID NO: 427444 - DNA, 162 bp, Homo sapiens; identical to SEQ ID NO: 207053
  chr1:78254759-78254921
  hypo

SEQ ID NO: 427445 - DNA, 90 bp, Homo sapiens; identical to SEQ ID NO: 207054
  chr1:78458353-78458443
  hypo

SEQ ID NO: 427446 - DNA, 35 bp, Homo sapiens; identical to SEQ ID NO: 248707
  chr1:78510240-78510275
  hypo

SEQ ID NO: 427447 - DNA, 31 bp, Homo sapiens; identical to SEQ ID NO: 248708
  chr1:79267843-79267874
  hypo

SEQ ID NO: 427448 - DNA, 129 bp, Homo sapiens; identical to SEQ ID NO: 207056
  chr1:83243221-83243350
  hypo

SEQ ID NO: 427449 - DNA, 150 bp, Homo sapiens; identical to SEQ ID NO: 415190
  chr1:84544068-84544218
  hypo

SEQ ID NO: 427450 - DNA, 34 bp, Homo sapiens; identical to SEQ ID NO: 278573
  chr1:85358277-85358311
  hypo

SEQ ID NO: 427451 - DNA, 38 bp, Homo sapiens; identical to SEQ ID NO: 248711
  chr1:85646087-85646125
  hypo

SEQ ID NO: 427452 - DNA, 436 bp, Homo sapiens; identical to SEQ ID NO: 278580
  chr1:85666727-85667163
  hypo

SEQ ID NO: 427453 - DNA, 86 bp, Homo sapiens; identical to SEQ ID NO: 401926
  chr1:85743256-85743342
  hypo

SEQ ID NO: 427454 - DNA, 1196 bp, Homo sapiens; identical to SEQ ID NO: 278584
  chr1:85929935-85931131
  hypo

SEQ ID NO: 427455 - DNA, 153 bp, Homo sapiens; identical to SEQ ID NO: 278585
  chr1:86042081-86042234
  hypo

SEQ ID NO: 427456 - DNA, 98 bp, Homo sapiens; identical to SEQ ID NO: 248713
  chr1:86048506-86048604
  hypo

SEQ ID NO: 427457 - DNA, 145 bp, Homo sapiens; identical to SEQ ID NO: 248714
  chr1:86175121-86175266
  hypo

SEQ ID NO: 427458 - DNA, 212 bp, Homo sapiens; identical to SEQ ID NO: 248717
  chr1:86973442-86973654
  hypo

SEQ ID NO: 427459 - DNA, 90 bp, Homo sapiens; identical to SEQ ID NO: 248718
  chr1:87299759-87299849
  hypo

SEQ ID NO: 427460 - DNA, 168 bp, Homo sapiens; identical to SEQ ID NO: 248719
  chr1:87607280-87607448
  hypo

SEQ ID NO: 427461 - DNA, 127 bp, Homo sapiens; identical to SEQ ID NO: 197623
  chr1:87793799-87793926
  hypo

SEQ ID NO: 427462 - DNA, 84 bp, Homo sapiens; identical to SEQ ID NO: 207063
  chr1:89148474-89148558
  hypo

SEQ ID NO: 427463 - DNA, 77 bp, Homo sapiens; identical to SEQ ID NO: 248721
  chr1:89228941-89229018
  hypo

SEQ ID NO: 427464 - DNA, 36 bp, Homo sapiens; identical to SEQ ID NO: 248722
  chr1:89451827-89451863
  hypo

SEQ ID NO: 427465 - DNA, 105 bp, Homo sapiens; identical to SEQ ID NO: 248723
  chr1:89919387-89919492
  hypo

SEQ ID NO: 427466 - DNA, 34 bp, Homo sapiens; identical to SEQ ID NO: 248724
  chr1:89984977-89985011
  hypo

SEQ ID NO: 427467 - DNA, 255 bp, Homo sapiens; identical to SEQ ID NO: 248725
  chr1:90075874-90076129
  hypo

SEQ ID NO: 427468 - DNA, 143 bp, Homo sapiens; identical to SEQ ID NO: 221399
  chr1:90228347-90228490
  hypo

SEQ ID NO: 427469 - DNA, 146 bp, Homo sapiens; identical to SEQ ID NO: 103789
  chr1:90228980-90229126
  hypo

SEQ ID NO: 427470 - DNA, 198 bp, Homo sapiens; identical to SEQ ID NO: 207066
  chr1:90448905-90449103
  hypo

SEQ ID NO: 427471 - DNA, 45 bp, Homo sapiens; identical to SEQ ID NO: 248728
  chr1:90725982-90726027
  hypo

SEQ ID NO: 427472 - DNA, 34 bp, Homo sapiens; identical to SEQ ID NO: 248729
  chr1:91072761-91072795
  hypo

SEQ ID NO: 427473 - DNA, 47 bp, Homo sapiens; identical to SEQ ID NO: 415224
  chr1:91184147-91184194
  hypo

SEQ ID NO: 427474 - DNA, 35 bp, Homo sapiens; identical to SEQ ID NO: 248730
  chr1:91483484-91483519
  hypo

SEQ ID NO: 427475 - DNA, 32 bp, Homo sapiens; identical to SEQ ID NO: 248732
  chr1:92068723-92068755
  hypo

SEQ ID NO: 427476 - DNA, 195 bp, Homo sapiens; identical to SEQ ID NO: 248733
  chr1:92102535-92102730
  hypo

SEQ ID NO: 427477 - DNA, 44 bp, Homo sapiens; identical to SEQ ID NO: 248734
  chr1:92371564-92371608
  hypo

SEQ ID NO: 427478 - DNA, 43 bp, Homo sapiens; identical to SEQ ID NO: 248735
  chr1:92662385-92662428
  hypo

SEQ ID NO: 427479 - DNA, 190 bp, Homo sapiens; identical to SEQ ID NO: 248736
  chr1:92683500-92683690
  hypo

SEQ ID NO: 427480 - DNA, 35 bp, Homo sapiens; identical to SEQ ID NO: 221405
  chr1:92946278-92946313
  hypo

SEQ ID NO: 427481 - DNA, 60 bp, Homo sapiens; identical to SEQ ID NO: 278633
  chr1:92946605-92946665
  hypo

SEQ ID NO: 427482 - DNA, 924 bp, Homo sapiens; identical to SEQ ID NO: 35990
  chr1:92946768-92947692
  hypo

SEQ ID NO: 427483 - DNA, 328 bp, Homo sapiens; identical to SEQ ID NO: 197643
  chr1:93250604-93250932
  hypo

SEQ ID NO: 427484 - DNA, 34 bp, Homo sapiens; identical to SEQ ID NO: 248737
  chr1:93647454-93647488
  hypo

SEQ ID NO: 427485 - DNA, 1055 bp, Homo sapiens; identical to SEQ ID NO: 197645
  chr1:93913410-93914465
  hypo

SEQ ID NO: 427486 - DNA, 44 bp, Homo sapiens; identical to SEQ ID NO: 248738
  chr1:93973207-93973251
  hypo

SEQ ID NO: 427487 - DNA, 33 bp, Homo sapiens; identical to SEQ ID NO: 248739
  chr1:93975136-93975169
  hypo

SEQ ID NO: 427488 - DNA, 99 bp, Homo sapiens; identical to SEQ ID NO: 248740
  chr1:94033359-94033458
  hypo

SEQ ID NO: 427489 - DNA, 140 bp, Homo sapiens; identical to SEQ ID NO: 248741
  chr1:94041432-94041572
  hypo

SEQ ID NO: 427490 - DNA, 167 bp, Homo sapiens; identical to SEQ ID NO: 248742
  chr1:94043256-94043423
  hypo

SEQ ID NO: 427491 - DNA, 307 bp, Homo sapiens; identical to SEQ ID NO: 278647
  chr1:94146398-94146705
  hypo

SEQ ID NO: 427492 - DNA, 150 bp, Homo sapiens; identical to SEQ ID NO: 278648
  chr1:94146706-94146856
  hypo

SEQ ID NO: 427493 - DNA, 52 bp, Homo sapiens; identical to SEQ ID NO: 297515
  chr1:94345695-94345747
  hypo

SEQ ID NO: 427494 - DNA, 32 bp, Homo sapiens; identical to SEQ ID NO: 248745
  chr1:94346027-94346059
  hypo

SEQ ID NO: 427495 - DNA, 192 bp, Homo sapiens; identical to SEQ ID NO: 248747
  chr1:94466588-94466780
  hypo

SEQ ID NO: 427496 - DNA, 43 bp, Homo sapiens; identical to SEQ ID NO: 207073
  chr1:94507308-94507351
  hypo

SEQ ID NO: 427497 - DNA, 102 bp, Homo sapiens; identical to SEQ ID NO: 207074
  chr1:94507711-94507813
  hypo

SEQ ID NO: 427498 - DNA, 102 bp, Homo sapiens; identical to SEQ ID NO: 207075
  chr1:94546400-94546502
  hypo

SEQ ID NO: 427499 - DNA, 49 bp, Homo sapiens; identical to SEQ ID NO: 248752
  chr1:94719184-94719233
  hypo

SEQ ID NO: 427500 - DNA, 765 bp, Homo sapiens; identical to SEQ ID NO: 197655
  chr1:95006902-95007667
  hypo

SEQ ID NO: 427501 - DNA, 31 bp, Homo sapiens; identical to SEQ ID NO: 248753
  chr1:95222491-95222522
  hypo

SEQ ID NO: 427502 - DNA, 106 bp, Homo sapiens; identical to SEQ ID NO: 248754
  chr1:95315114-95315220
  hypo

SEQ ID NO: 427503 - DNA, 143 bp, Homo sapiens; identical to SEQ ID NO: 248755
  chr1:95340131-95340274
  hypo

SEQ ID NO: 427504 - DNA, 151 bp, Homo sapiens; identical to SEQ ID NO: 248756
  chr1:95343781-95343932
  hypo

SEQ ID NO: 427505 - DNA, 345 bp, Homo sapiens; identical to SEQ ID NO: 197658
  chr1:95391395-95391740
  hypo

SEQ ID NO: 427506 - DNA, 935 bp, Homo sapiens; identical to SEQ ID NO: 278667
  chr1:95582633-95583568
  hypo

SEQ ID NO: 427507 - DNA, 42 bp, Homo sapiens; identical to SEQ ID NO: 207083
  chr1:97185733-97185775
  hypo

SEQ ID NO: 427508 - DNA, 83 bp, Homo sapiens; identical to SEQ ID NO: 248759
  chr1:98336379-98336462
  hypo

SEQ ID NO: 427509 - DNA, 372 bp, Homo sapiens; identical to SEQ ID NO: 278670
  chr1:98386195-98386567
  hypo

SEQ ID NO: 427510 - DNA, 310 bp, Homo sapiens; identical to SEQ ID NO: 36023
  chr1:98386618-98386928
  hypo

SEQ ID NO: 427511 - DNA, 168 bp, Homo sapiens; identical to SEQ ID NO: 207088
  chr1:99667088-99667256
  hypo

SEQ ID NO: 427512 - DNA, 163 bp, Homo sapiens; identical to SEQ ID NO: 248761
  chr1:100106764-100106927
  hypo

SEQ ID NO: 427513 - DNA, 181 bp, Homo sapiens; identical to SEQ ID NO: 207089
  chr1:100500499-100500680
  hypo

SEQ ID NO: 427514 - DNA, 216 bp, Homo sapiens; identical to SEQ ID NO: 248765
  chr1:100931955-100932171
  hypo

SEQ ID NO: 427515 - DNA, 35 bp, Homo sapiens; identical to SEQ ID NO: 207092
  chr1:101675509-101675544
  hypo

SEQ ID NO: 427516 - DNA, 38 bp, Homo sapiens; identical to SEQ ID NO: 297550
  chr1:101721447-101721485
  hypo

SEQ ID NO: 427517 - DNA, 90 bp, Homo sapiens; identical to SEQ ID NO: 248768
  chr1:101721807-101721897
  hypo

SEQ ID NO: 427518 - DNA, 32 bp, Homo sapiens; identical to SEQ ID NO: 248769
  chr1:102292873-102292905
  hypo

SEQ ID NO: 427519 - DNA, 105 bp, Homo sapiens; identical to SEQ ID NO: 248770
  chr1:108230624-108230729
  hypo

SEQ ID NO: 427520 - DNA, 44 bp, Homo sapiens; identical to SEQ ID NO: 248771
  chr1:108314147-108314191
  hypo

SEQ ID NO: 427521 - DNA, 350 bp, Homo sapiens; identical to SEQ ID NO: 248772
  chr1:108735214-108735564
  hypo

SEQ ID NO: 427522 - DNA, 203 bp, Homo sapiens; identical to SEQ ID NO: 248773
  chr1:109241833-109242036
  hypo

SEQ ID NO: 427523 - DNA, 38 bp, Homo sapiens; identical to SEQ ID NO: 248775
  chr1:109585725-109585763
  hypo

SEQ ID NO: 427524 - DNA, 104 bp, Homo sapiens; identical to SEQ ID NO: 207097
  chr1:109609236-109609340
  hypo

SEQ ID NO: 427525 - DNA, 91 bp, Homo sapiens; identical to SEQ ID NO: 248777
  chr1:109646190-109646281
  hypo

SEQ ID NO: 427526 - DNA, 294 bp, Homo sapiens; identical to SEQ ID NO: 297563
  chr1:109646918-109647212
  hypo

SEQ ID NO: 427527 - DNA, 33 bp, Homo sapiens; identical to SEQ ID NO: 248779
  chr1:109679037-109679070
  hypo

SEQ ID NO: 427528 - DNA, 92 bp, Homo sapiens; identical to SEQ ID NO: 248780
  chr1:109679130-109679222
  hypo

SEQ ID NO: 427529 - DNA, 76 bp, Homo sapiens; identical to SEQ ID NO: 207098
  chr1:109725168-109725244
  hypo

SEQ ID NO: 427530 - DNA, 145 bp, Homo sapiens; identical to SEQ ID NO: 248782
  chr1:109741855-109742000
  hypo

SEQ ID NO: 427531 - DNA, 600 bp, Homo sapiens; identical to SEQ ID NO: 207099
  chr1:109795509-109796109
  hypo

SEQ ID NO: 427532 - DNA, 287 bp, Homo sapiens; identical to SEQ ID NO: 297569
  chr1:109797580-109797867
  hypo

SEQ ID NO: 427533 - DNA, 40 bp, Homo sapiens; identical to SEQ ID NO: 297570
  chr1:109797897-109797937
  hypo

SEQ ID NO: 427534 - DNA, 35 bp, Homo sapiens; identical to SEQ ID NO: 207100
  chr1:109801647-109801682
  hypo

SEQ ID NO: 427535 - DNA, 113 bp, Homo sapiens; identical to SEQ ID NO: 207101
  chr1:109805486-109805599
  hypo

SEQ ID NO: 427536 - DNA, 31 bp, Homo sapiens; identical to SEQ ID NO: 248788
  chr1:109805822-109805853
  hypo

SEQ ID NO: 427537 - DNA, 67 bp, Homo sapiens; identical to SEQ ID NO: 207102
  chr1:109812120-109812187
  hypo

SEQ ID NO: 427538 - DNA, 262 bp, Homo sapiens; identical to SEQ ID NO: 207103
  chr1:109816071-109816333
  hypo

SEQ ID NO: 427539 - DNA, 617 bp, Homo sapiens; identical to SEQ ID NO: 278713
  chr1:109940219-109940836
  hypo

SEQ ID NO: 427540 - DNA, 99 bp, Homo sapiens; identical to SEQ ID NO: 278719
  chr1:110025979-110026078
  hypo

SEQ ID NO: 427541 - DNA, 78 bp, Homo sapiens; identical to SEQ ID NO: 207105
  chr1:110042271-110042349
  hypo

SEQ ID NO: 427542 - DNA, 206 bp, Homo sapiens; identical to SEQ ID NO: 197691
  chr1:110052079-110052285
  hypo

SEQ ID NO: 427543 - DNA, 260 bp, Homo sapiens; identical to SEQ ID NO: 248793
  chr1:110073072-110073332
  hypo

SEQ ID NO: 427544 - DNA, 170 bp, Homo sapiens; identical to SEQ ID NO: 207107
  chr1:110085339-110085509
  hypo

SEQ ID NO: 427545 - DNA, 44 bp, Homo sapiens; identical to SEQ ID NO: 207108
  chr1:110085848-110085892
  hypo

SEQ ID NO: 427546 - DNA, 37 bp, Homo sapiens; identical to SEQ ID NO: 207111
  chr1:110338324-110338361
  hypo

SEQ ID NO: 427547 - DNA, 147 bp, Homo sapiens; identical to SEQ ID NO: 197694
  chr1:110453160-110453307
  hypo

SEQ ID NO: 427548 - DNA, 421 bp, Homo sapiens; identical to SEQ ID NO: 197695
  chr1:110453531-110453952
  hypo

SEQ ID NO: 427549 - DNA, 151 bp, Homo sapiens; identical to SEQ ID NO: 248801
  chr1:110471934-110472085
  hypo

SEQ ID NO: 427550 - DNA, 189 bp, Homo sapiens; identical to SEQ ID NO: 248802
  chr1:110561015-110561204
  hypo

SEQ ID NO: 427551 - DNA, 37 bp, Homo sapiens; identical to SEQ ID NO: 248804
  chr1:110737245-110737282
  hypo

SEQ ID NO: 427552 - DNA, 290 bp, Homo sapiens; identical to SEQ ID NO: 248805
  chr1:110737984-110738274
  hypo

SEQ ID NO: 427553 - DNA, 107 bp, Homo sapiens; identical to SEQ ID NO: 248806
  chr1:110765710-110765817
  hypo

SEQ ID NO: 427554 - DNA, 177 bp, Homo sapiens; identical to SEQ ID NO: 248807
  chr1:110771215-110771392
  hypo

SEQ ID NO: 427555 - DNA, 33 bp, Homo sapiens; identical to SEQ ID NO: 207116
  chr1:110947365-110947398
  hypo

SEQ ID NO: 427556 - DNA, 120 bp, Homo sapiens; identical to SEQ ID NO: 207117
  chr1:110947698-110947818
  hypo

SEQ ID NO: 427557 - DNA, 32 bp, Homo sapiens; identical to SEQ ID NO: 248812
  chr1:111001561-111001593
  hypo

SEQ ID NO: 427558 - DNA, 151 bp, Homo sapiens; identical to SEQ ID NO: 207118
  chr1:111022638-111022789
  hypo

SEQ ID NO: 427559 - DNA, 600 bp, Homo sapiens; identical to SEQ ID NO: 197699
  chr1:111148988-111149588
  hypo

SEQ ID NO: 427560 - DNA, 227 bp, Homo sapiens; identical to SEQ ID NO: 248815
  chr1:111216247-111216474
  hypo

SEQ ID NO: 427561 - DNA, 99 bp, Homo sapiens; identical to SEQ ID NO: 248816
  chr1:111296098-111296197
  hypo

SEQ ID NO: 427562 - DNA, 159 bp, Homo sapiens; identical to SEQ ID NO: 248817
  chr1:111496808-111496967
  hypo

SEQ ID NO: 427563 - DNA, 34 bp, Homo sapiens; identical to SEQ ID NO: 248819
  chr1:112151467-112151501
  hypo

SEQ ID NO: 427564 - DNA, 76 bp, Homo sapiens; identical to SEQ ID NO: 248820
  chr1:112288929-112289005
  hypo

SEQ ID NO: 427565 - DNA, 172 bp, Homo sapiens; identical to SEQ ID NO: 207121
  chr1:112317425-112317597
  hypo

SEQ ID NO: 427566 - DNA, 1035 bp, Homo sapiens; identical to SEQ ID NO: 207122
  chr1:112524370-112525405
  hypo

SEQ ID NO: 427567 - DNA, 426 bp, Homo sapiens; identical to SEQ ID NO: 278753
  chr1:113051157-113051583
  hypo

SEQ ID NO: 427568 - DNA, 150 bp, Homo sapiens; identical to SEQ ID NO: 248824
  chr1:113067109-113067259
  hypo

SEQ ID NO: 427569 - DNA, 197 bp, Homo sapiens; identical to SEQ ID NO: 248825
  chr1:113185130-113185327
  hypo

SEQ ID NO: 427570 - DNA, 117 bp, Homo sapiens; identical to SEQ ID NO: 248826
  chr1:113230414-113230531
  hypo

SEQ ID NO: 427571 - DNA, 205 bp, Homo sapiens; identical to SEQ ID NO: 207124
  chr1:113244294-113244499
  hypo

SEQ ID NO: 427572 - DNA, 190 bp, Homo sapiens; identical to SEQ ID NO: 197708
  chr1:113249226-113249416
  hypo

SEQ ID NO: 427573 - DNA, 155 bp, Homo sapiens; identical to SEQ ID NO: 207126
  chr1:113290951-113291106
  hypo

SEQ ID NO: 427574 - DNA, 91 bp, Homo sapiens; identical to SEQ ID NO: 248829
  chr1:113412275-113412366
  hypo

SEQ ID NO: 427575 - DNA, 35 bp, Homo sapiens; identical to SEQ ID NO: 248830
  chr1:113442040-113442075
  hypo

SEQ ID NO: 427576 - DNA, 154 bp, Homo sapiens; identical to SEQ ID NO: 248831
  chr1:113465948-113466102
  hypo

SEQ ID NO: 427577 - DNA, 532 bp, Homo sapiens; identical to SEQ ID NO: 415327
  chr1:113498188-113498720
  hypo

SEQ ID NO: 427578 - DNA, 76 bp, Homo sapiens; identical to SEQ ID NO: 248832
  chr1:113630283-113630359
  hypo

SEQ ID NO: 427579 - DNA, 41 bp, Homo sapiens; identical to SEQ ID NO: 248833
  chr1:114246758-114246799
  hypo

SEQ ID NO: 427580 - DNA, 203 bp, Homo sapiens; identical to SEQ ID NO: 221447
  chr1:114302510-114302713
  hypo

SEQ ID NO: 427581 - DNA, 34 bp, Homo sapiens; identical to SEQ ID NO: 248835
  chr1:114435047-114435081
  hypo

SEQ ID NO: 427582 - DNA, 136 bp, Homo sapiens; identical to SEQ ID NO: 207130
  chr1:114522549-114522685
  hypo

SEQ ID NO: 427583 - DNA, 165 bp, Homo sapiens; identical to SEQ ID NO: 278770
  chr1:114695147-114695312
  hypo

SEQ ID NO: 427584 - DNA, 107 bp, Homo sapiens; identical to SEQ ID NO: 197718
  chr1:114697918-114698025
  hypo

SEQ ID NO: 427585 - DNA, 38 bp, Homo sapiens; identical to SEQ ID NO: 248838
  chr1:115184837-115184875
  hypo

SEQ ID NO: 427586 - DNA, 61 bp, Homo sapiens; identical to SEQ ID NO: 197721
  chr1:115258668-115258729
  hypo

SEQ ID NO: 427587 - DNA, 279 bp, Homo sapiens; identical to SEQ ID NO: 248840
  chr1:115829155-115829434
  hypo

SEQ ID NO: 427588 - DNA, 68 bp, Homo sapiens; identical to SEQ ID NO: 297640
  chr1:116214987-116215055
  hypo

SEQ ID NO: 427589 - DNA, 36 bp, Homo sapiens; identical to SEQ ID NO: 207135
  chr1:116224397-116224433
  hypo

SEQ ID NO: 427590 - DNA, 156 bp, Homo sapiens; identical to SEQ ID NO: 248845
  chr1:116225057-116225213
  hypo

SEQ ID NO: 427591 - DNA, 100 bp, Homo sapiens; identical to SEQ ID NO: 207136
  chr1:116226508-116226608
  hypo

SEQ ID NO: 427592 - DNA, 132 bp, Homo sapiens; identical to SEQ ID NO: 248847
  chr1:116233750-116233882
  hypo

SEQ ID NO: 427593 - DNA, 186 bp, Homo sapiens; identical to SEQ ID NO: 248848
  chr1:116295788-116295974
  hypo

SEQ ID NO: 427594 - DNA, 217 bp, Homo sapiens; identical to SEQ ID NO: 297647
  chr1:116573985-116574202
  hypo

SEQ ID NO: 427595 - DNA, 51 bp, Homo sapiens; identical to SEQ ID NO: 248850
  chr1:116840629-116840680
  hypo

SEQ ID NO: 427596 - DNA, 143 bp, Homo sapiens; identical to SEQ ID NO: 248851
  chr1:116935455-116935598
  hypo

SEQ ID NO: 427597 - DNA, 56 bp, Homo sapiens; identical to SEQ ID NO: 248852
  chr1:116952565-116952621
  hypo

SEQ ID NO: 427598 - DNA, 61 bp, Homo sapiens; identical to SEQ ID NO: 248853
  chr1:117060147-117060208
  hypo

SEQ ID NO: 427599 - DNA, 203 bp, Homo sapiens; identical to SEQ ID NO: 207137
  chr1:117076615-117076818
  hypo

SEQ ID NO: 427600 - DNA, 160 bp, Homo sapiens; identical to SEQ ID NO: 207138
  chr1:117077074-117077234
  hypo

SEQ ID NO: 427601 - DNA, 76 bp, Homo sapiens; identical to SEQ ID NO: 248856
  chr1:117127238-117127314
  hypo

SEQ ID NO: 427602 - DNA, 171 bp, Homo sapiens; identical to SEQ ID NO: 207139
  chr1:117131423-117131594
  hypo

SEQ ID NO: 427603 - DNA, 34 bp, Homo sapiens; identical to SEQ ID NO: 207140
  chr1:117157580-117157614
  hypo

SEQ ID NO: 427604 - DNA, 338 bp, Homo sapiens; identical to SEQ ID NO: 197729
  chr1:117209809-117210147
  hypo

SEQ ID NO: 427605 - DNA, 37 bp, Homo sapiens; identical to SEQ ID NO: 248859
  chr1:117250043-117250080
  hypo

SEQ ID NO: 427606 - DNA, 73 bp, Homo sapiens; identical to SEQ ID NO: 207142
  chr1:117297901-117297974
  hypo

SEQ ID NO: 427607 - DNA, 96 bp, Homo sapiens; identical to SEQ ID NO: 248861
  chr1:117450853-117450949
  hypo

SEQ ID NO: 427608 - DNA, 35 bp, Homo sapiens; identical to SEQ ID NO: 207143
  chr1:117451189-117451224
  hypo

SEQ ID NO: 427609 - DNA, 49 bp, Homo sapiens; identical to SEQ ID NO: 248863
  chr1:117490699-117490748
  hypo

SEQ ID NO: 427610 - DNA, 69 bp, Homo sapiens; identical to SEQ ID NO: 207144
  chr1:117503897-117503966
  hypo

SEQ ID NO: 427611 - DNA, 75 bp, Homo sapiens; identical to SEQ ID NO: 248865
  chr1:117527381-117527456
  hypo

SEQ ID NO: 427612 - DNA, 226 bp, Homo sapiens; identical to SEQ ID NO: 248866
  chr1:117529538-117529764
  hypo

SEQ ID NO: 427613 - DNA, 42 bp, Homo sapiens; identical to SEQ ID NO: 248867
  chr1:117560924-117560966
  hypo

SEQ ID NO: 427614 - DNA, 378 bp, Homo sapiens; identical to SEQ ID NO: 278790
  chr1:117664693-117665071
  hypo

SEQ ID NO: 427615 - DNA, 263 bp, Homo sapiens; identical to SEQ ID NO: 278791
  chr1:117665105-117665368
  hypo

SEQ ID NO: 427616 - DNA, 169 bp, Homo sapiens; identical to SEQ ID NO: 248871
  chr1:118083728-118083897
  hypo

SEQ ID NO: 427617 - DNA, 52 bp, Homo sapiens; identical to SEQ ID NO: 248872
  chr1:118114932-118114984
  hypo

SEQ ID NO: 427618 - DNA, 151 bp, Homo sapiens; identical to SEQ ID NO: 207145
  chr1:118147372-118147523
  hypo

SEQ ID NO: 427619 - DNA, 80 bp, Homo sapiens; identical to SEQ ID NO: 207146
  chr1:118163137-118163217
  hypo

SEQ ID NO: 427620 - DNA, 177 bp, Homo sapiens; identical to SEQ ID NO: 248879
  chr1:118198080-118198257
  hypo

SEQ ID NO: 427621 - DNA, 92 bp, Homo sapiens; identical to SEQ ID NO: 248880
  chr1:118223360-118223452
  hypo

SEQ ID NO: 427622 - DNA, 170 bp, Homo sapiens; identical to SEQ ID NO: 207152
  chr1:120166012-120166182
  hypo

SEQ ID NO: 427623 - DNA, 39 bp, Homo sapiens; identical to SEQ ID NO: 207153
  chr1:120166427-120166466
  hypo

SEQ ID NO: 427624 - DNA, 34 bp, Homo sapiens; identical to SEQ ID NO: 207154
  chr1:150283344-150283378
  hypo

SEQ ID NO: 427625 - DNA, 186 bp, Homo sapiens; identical to SEQ ID NO: 248886
  chr1:150484152-150484338
  hypo

SEQ ID NO: 427626 - DNA, 95 bp, Homo sapiens; identical to SEQ ID NO: 248887
  chr1:150502358-150502453
  hypo

SEQ ID NO: 427627 - DNA, 54 bp, Homo sapiens; identical to SEQ ID NO: 297688
  chr1:150504349-150504403
  hypo

SEQ ID NO: 427628 - DNA, 39 bp, Homo sapiens; identical to SEQ ID NO: 248890
  chr1:150519664-150519703
  hypo

SEQ ID NO: 427629 - DNA, 120 bp, Homo sapiens; identical to SEQ ID NO: 248891
  chr1:150520494-150520614
  hypo

SEQ ID NO: 427630 - DNA, 110 bp, Homo sapiens; identical to SEQ ID NO: 207155
  chr1:150529747-150529857
  hypo

SEQ ID NO: 427631 - DNA, 55 bp, Homo sapiens; identical to SEQ ID NO: 297693
  chr1:150565447-150565502
  hypo

SEQ ID NO: 427632 - DNA, 87 bp, Homo sapiens; identical to SEQ ID NO: 207156
  chr1:150579404-150579491
  hypo

SEQ ID NO: 427633 - DNA, 43 bp, Homo sapiens; identical to SEQ ID NO: 207157
  chr1:150581803-150581846
  hypo

SEQ ID NO: 427634 - DNA, 138 bp, Homo sapiens; identical to SEQ ID NO: 207158
  chr1:150633720-150633858
  hypo

SEQ ID NO: 427635 - DNA, 38 bp, Homo sapiens; identical to SEQ ID NO: 207159
  chr1:150643983-150644021
  hypo

SEQ ID NO: 427636 - DNA, 34 bp, Homo sapiens; identical to SEQ ID NO: 248899
  chr1:150722022-150722056
  hypo

SEQ ID NO: 427637 - DNA, 136 bp, Homo sapiens; identical to SEQ ID NO: 248900
  chr1:150722391-150722527
  hypo

SEQ ID NO: 427638 - DNA, 41 bp, Homo sapiens; identical to SEQ ID NO: 248901
  chr1:150748731-150748772
  hypo

SEQ ID NO: 427639 - DNA, 120 bp, Homo sapiens; identical to SEQ ID NO: 248902
  chr1:150850362-150850482
  hypo

SEQ ID NO: 427640 - DNA, 37 bp, Homo sapiens; identical to SEQ ID NO: 248903
  chr1:150858612-150858649
  hypo

SEQ ID NO: 427641 - DNA, 77 bp, Homo sapiens; identical to SEQ ID NO: 248904
  chr1:150889716-150889793
  hypo

SEQ ID NO: 427642 - DNA, 42 bp, Homo sapiens; identical to SEQ ID NO: 248905
  chr1:150890073-150890115
  hypo

SEQ ID NO: 427643 - DNA, 37 bp, Homo sapiens; identical to SEQ ID NO: 207162
  chr1:151019715-151019752
  hypo

SEQ ID NO: 427644 - DNA, 31 bp, Homo sapiens; identical to SEQ ID NO: 207163
  chr1:151098357-151098388
  hypo

SEQ ID NO: 427645 - DNA, 243 bp, Homo sapiens; identical to SEQ ID NO: 297710
  chr1:151105803-151106046
  hypo

SEQ ID NO: 427646 - DNA, 99 bp, Homo sapiens; identical to SEQ ID NO: 248911
  chr1:151146165-151146264
  hypo

SEQ ID NO: 427647 - DNA, 64 bp, Homo sapiens; identical to SEQ ID NO: 207164
  chr1:151148217-151148281
  hypo

SEQ ID NO: 427648 - DNA, 36 bp, Homo sapiens; identical to SEQ ID NO: 248915
  chr1:151173584-151173620
  hypo

SEQ ID NO: 427649 - DNA, 35 bp, Homo sapiens; identical to SEQ ID NO: 248916
  chr1:151231642-151231677
  hypo

SEQ ID NO: 427650 - DNA, 125 bp, Homo sapiens; identical to SEQ ID NO: 207165
  chr1:151252542-151252667
  hypo

SEQ ID NO: 427651 - DNA, 47 bp, Homo sapiens; identical to SEQ ID NO: 207166
  chr1:151252761-151252808
  hypo

SEQ ID NO: 427652 - DNA, 56 bp, Homo sapiens; identical to SEQ ID NO: 248918
  chr1:151293165-151293221
  hypo

SEQ ID NO: 427653 - DNA, 32 bp, Homo sapiens; identical to SEQ ID NO: 248919
  chr1:151322965-151322997
  hypo

SEQ ID NO: 427654 - DNA, 31 bp, Homo sapiens; identical to SEQ ID NO: 248920
  chr1:151323237-151323268
  hypo

SEQ ID NO: 427655 - DNA, 242 bp, Homo sapiens; identical to SEQ ID NO: 248921
  chr1:151338720-151338962
  hypo

SEQ ID NO: 427656 - DNA, 169 bp, Homo sapiens; identical to SEQ ID NO: 207168
  chr1:151339197-151339366
  hypo

SEQ ID NO: 427657 - DNA, 123 bp, Homo sapiens; identical to SEQ ID NO: 297722
  chr1:151345676-151345799
  hypo

SEQ ID NO: 427658 - DNA, 237 bp, Homo sapiens; identical to SEQ ID NO: 297723
  chr1:151345829-151346066
  hypo

SEQ ID NO: 427659 - DNA, 177 bp, Homo sapiens; identical to SEQ ID NO: 248924
  chr1:151356360-151356537
  hypo

SEQ ID NO: 427660 - DNA, 34 bp, Homo sapiens; identical to SEQ ID NO: 248927
  chr1:151378888-151378922
  hypo

SEQ ID NO: 427661 - DNA, 149 bp, Homo sapiens; identical to SEQ ID NO: 207170
  chr1:151481647-151481796
  hypo

SEQ ID NO: 427662 - DNA, 61 bp, Homo sapiens; identical to SEQ ID NO: 207171
  chr1:151557511-151557572
  hypo

SEQ ID NO: 427663 - DNA, 85 bp, Homo sapiens; identical to SEQ ID NO: 248932
  chr1:151742598-151742683
  hypo

SEQ ID NO: 427664 - DNA, 303 bp, Homo sapiens; identical to SEQ ID NO: 278838
  chr1:151763859-151764162
  hypo

SEQ ID NO: 427665 - DNA, 80 bp, Homo sapiens; identical to SEQ ID NO: 248933
  chr1:151829048-151829128
  hypo

SEQ ID NO: 427666 - DNA, 33 bp, Homo sapiens; identical to SEQ ID NO: 248934
  chr1:151952135-151952168
  hypo

SEQ ID NO: 427667 - DNA, 90 bp, Homo sapiens; identical to SEQ ID NO: 278845
  chr1:152084599-152084689
  hypo

SEQ ID NO: 427668 - DNA, 336 bp, Homo sapiens; identical to SEQ ID NO: 248935
  chr1:152191329-152191665
  hypo

SEQ ID NO: 427669 - DNA, 91 bp, Homo sapiens; identical to SEQ ID NO: 248938
  chr1:153265798-153265889
  hypo

SEQ ID NO: 427670 - DNA, 32 bp, Homo sapiens; identical to SEQ ID NO: 207176
  chr1:153352635-153352667
  hypo

SEQ ID NO: 427671 - DNA, 512 bp, Homo sapiens; identical to SEQ ID NO: 248940
  chr1:153352907-153353419
  hypo

SEQ ID NO: 427672 - DNA, 161 bp, Homo sapiens; identical to SEQ ID NO: 248941
  chr1:153519006-153519167
  hypo

SEQ ID NO: 427673 - DNA, 153 bp, Homo sapiens; identical to SEQ ID NO: 207178
  chr1:153537353-153537506
  hypo

SEQ ID NO: 427674 - DNA, 419 bp, Homo sapiens; identical to SEQ ID NO: 395602
  chr1:153651023-153651442
  hypo

SEQ ID NO: 427675 - DNA, 122 bp, Homo sapiens; identical to SEQ ID NO: 207181
  chr1:153914346-153914468
  hypo

SEQ ID NO: 427676 - DNA, 176 bp, Homo sapiens; identical to SEQ ID NO: 197756
  chr1:153936615-153936791
  hypo

SEQ ID NO: 427677 - DNA, 180 bp, Homo sapiens; identical to SEQ ID NO: 207183
  chr1:153937388-153937568
  hypo

SEQ ID NO: 427678 - DNA, 330 bp, Homo sapiens; identical to SEQ ID NO: 197758
  chr1:153958647-153958977
  hypo

SEQ ID NO: 427679 - DNA, 308 bp, Homo sapiens; identical to SEQ ID NO: 104239
  chr1:153963300-153963608
  hypo

SEQ ID NO: 427680 - DNA, 32 bp, Homo sapiens; identical to SEQ ID NO: 207186
  chr1:154115066-154115098
  hypo

SEQ ID NO: 427681 - DNA, 57 bp, Homo sapiens; identical to SEQ ID NO: 207187
  chr1:154116696-154116753
  hypo

SEQ ID NO: 427682 - DNA, 31 bp, Homo sapiens; identical to SEQ ID NO: 207189
  chr1:154243765-154243796
  hypo

SEQ ID NO: 427683 - DNA, 78 bp, Homo sapiens; identical to SEQ ID NO: 248953
  chr1:154273378-154273456
  hypo

SEQ ID NO: 427684 - DNA, 77 bp, Homo sapiens; identical to SEQ ID NO: 248954
  chr1:154315741-154315818
  hypo

SEQ ID NO: 427685 - DNA, 95 bp, Homo sapiens; identical to SEQ ID NO: 207192
  chr1:154343720-154343815
  hypo

SEQ ID NO: 427686 - DNA, 183 bp, Homo sapiens; identical to SEQ ID NO: 207193
  chr1:154402829-154403012
  hypo

SEQ ID NO: 427687 - DNA, 133 bp, Homo sapiens; identical to SEQ ID NO: 248957
  chr1:154407564-154407697
  hypo

SEQ ID NO: 427688 - DNA, 39 bp, Homo sapiens; identical to SEQ ID NO: 248961
  chr1:154933540-154933579
  hypo

SEQ ID NO: 427689 - DNA, 61 bp, Homo sapiens; identical to SEQ ID NO: 248962
  chr1:154933609-154933670
  hypo

SEQ ID NO: 427690 - DNA, 37 bp, Homo sapiens; identical to SEQ ID NO: 248963
  chr1:154944721-154944758
  hypo

SEQ ID NO: 427691 - DNA, 154 bp, Homo sapiens; identical to SEQ ID NO: 248965
  chr1:154965405-154965559
  hypo

SEQ ID NO: 427692 - DNA, 36 bp, Homo sapiens; identical to SEQ ID NO: 207196
  chr1:154987689-154987725
  hypo

SEQ ID NO: 427693 - DNA, 31 bp, Homo sapiens; identical to SEQ ID NO: 248967
  chr1:155005174-155005205
  hypo

SEQ ID NO: 427694 - DNA, 106 bp, Homo sapiens; identical to SEQ ID NO: 248969
  chr1:155065377-155065483
  hypo

SEQ ID NO: 427695 - DNA, 37 bp, Homo sapiens; identical to SEQ ID NO: 207198
  chr1:155082409-155082446
  hypo

SEQ ID NO: 427696 - DNA, 537 bp, Homo sapiens; identical to SEQ ID NO: 278874
  chr1:155099556-155100093
  hypo

SEQ ID NO: 427697 - DNA, 122 bp, Homo sapiens; identical to SEQ ID NO: 207201
  chr1:155149965-155150087
  hypo

SEQ ID NO: 427698 - DNA, 443 bp, Homo sapiens; identical to SEQ ID NO: 278878
  chr1:155152069-155152512
  hypo

SEQ ID NO: 427699 - DNA, 147 bp, Homo sapiens; identical to SEQ ID NO: 248975
  chr1:155156247-155156394
  hypo

SEQ ID NO: 427700 - DNA, 457 bp, Homo sapiens; identical to SEQ ID NO: 221478
  chr1:155294652-155295109
  hypo

SEQ ID NO: 427701 - DNA, 87 bp, Homo sapiens; identical to SEQ ID NO: 248979
  chr1:155362561-155362648
  hypo

SEQ ID NO: 427702 - DNA, 223 bp, Homo sapiens; identical to SEQ ID NO: 248980
  chr1:155363622-155363845
  hypo

SEQ ID NO: 427703 - DNA, 183 bp, Homo sapiens; identical to SEQ ID NO: 207206
  chr1:155403643-155403826
  hypo

SEQ ID NO: 427704 - DNA, 34 bp, Homo sapiens; identical to SEQ ID NO: 248982
  chr1:155412080-155412114
  hypo

SEQ ID NO: 427705 - DNA, 82 bp, Homo sapiens; identical to SEQ ID NO: 207207
  chr1:155466712-155466794
  hypo

SEQ ID NO: 427706 - DNA, 180 bp, Homo sapiens; identical to SEQ ID NO: 248984
  chr1:155516123-155516303
  hypo

SEQ ID NO: 427707 - DNA, 135 bp, Homo sapiens; identical to SEQ ID NO: 248985
  chr1:155518910-155519045
  hypo

SEQ ID NO: 427708 - DNA, 75 bp, Homo sapiens; identical to SEQ ID NO: 207208
  chr1:155640724-155640799
  hypo

SEQ ID NO: 427709 - DNA, 151 bp, Homo sapiens; identical to SEQ ID NO: 248989
  chr1:155654055-155654206
  hypo

SEQ ID NO: 427710 - DNA, 71 bp, Homo sapiens; identical to SEQ ID NO: 297799
  chr1:155659996-155660067
  hypo

SEQ ID NO: 427711 - DNA, 33 bp, Homo sapiens; identical to SEQ ID NO: 248991
  chr1:155674456-155674489
  hypo

SEQ ID NO: 427712 - DNA, 265 bp, Homo sapiens; identical to SEQ ID NO: 278886
  chr1:155830059-155830324
  hypo

SEQ ID NO: 427713 - DNA, 127 bp, Homo sapiens; identical to SEQ ID NO: 197775
  chr1:155830382-155830509
  hypo

SEQ ID NO: 427714 - DNA, 82 bp, Homo sapiens; identical to SEQ ID NO: 248992
  chr1:155862237-155862319
  hypo

SEQ ID NO: 427715 - DNA, 34 bp, Homo sapiens; identical to SEQ ID NO: 248993
  chr1:155881927-155881961
  hypo

SEQ ID NO: 427716 - DNA, 50 bp, Homo sapiens; identical to SEQ ID NO: 207211
  chr1:155893764-155893814
  hypo

SEQ ID NO: 427717 - DNA, 202 bp, Homo sapiens; identical to SEQ ID NO: 248997
  chr1:155931417-155931619
  hypo

SEQ ID NO: 427718 - DNA, 36 bp, Homo sapiens; identical to SEQ ID NO: 248999
  chr1:155972836-155972872
  hypo

SEQ ID NO: 427719 - DNA, 120 bp, Homo sapiens; identical to SEQ ID NO: 249000
  chr1:156009312-156009432
  hypo

SEQ ID NO: 427720 - DNA, 36 bp, Homo sapiens; identical to SEQ ID NO: 207213
  chr1:156032532-156032568
  hypo

SEQ ID NO: 427721 - DNA, 157 bp, Homo sapiens; identical to SEQ ID NO: 197778
  chr1:156084256-156084413
  hypo

SEQ ID NO: 427722 - DNA, 423 bp, Homo sapiens; identical to SEQ ID NO: 278895
  chr1:156084629-156085052
  hypo

SEQ ID NO: 427723 - DNA, 48 bp, Homo sapiens; identical to SEQ ID NO: 297817
  chr1:156111314-156111362
  hypo

SEQ ID NO: 427724 - DNA, 201 bp, Homo sapiens; identical to SEQ ID NO: 138312
  chr1:156111379-156111580
  hypo

SEQ ID NO: 427725 - DNA, 143 bp, Homo sapiens; identical to SEQ ID NO: 207216
  chr1:156143323-156143466
  hypo

SEQ ID NO: 427726 - DNA, 196 bp, Homo sapiens; identical to SEQ ID NO: 207217
  chr1:156179133-156179329
  hypo

SEQ ID NO: 427727 - DNA, 38 bp, Homo sapiens; identical to SEQ ID NO: 207218
  chr1:156239861-156239899
  hypo

SEQ ID NO: 427728 - DNA, 37 bp, Homo sapiens; identical to SEQ ID NO: 60959
  chr1:156254134-156254171
  hypo

SEQ ID NO: 427729 - DNA, 190 bp, Homo sapiens; identical to SEQ ID NO: 207221
  chr1:156256080-156256270
  hypo

SEQ ID NO: 427730 - DNA, 36 bp, Homo sapiens; identical to SEQ ID NO: 249012
  chr1:156269034-156269070
  hypo

SEQ ID NO: 427731 - DNA, 84 bp, Homo sapiens; identical to SEQ ID NO: 207222
  chr1:156276623-156276707
  hypo

SEQ ID NO: 427732 - DNA, 150 bp, Homo sapiens; identical to SEQ ID NO: 207223
  chr1:156362387-156362537
  hypo

SEQ ID NO: 427733 - DNA, 95 bp, Homo sapiens; identical to SEQ ID NO: 278903
  chr1:156406613-156406708
  hypo

SEQ ID NO: 427734 - DNA, 144 bp, Homo sapiens; identical to SEQ ID NO: 207225
  chr1:156432942-156433086
  hypo

SEQ ID NO: 427735 - DNA, 122 bp, Homo sapiens; identical to SEQ ID NO: 297832
  chr1:156433373-156433495
  hypo

SEQ ID NO: 427736 - DNA, 288 bp, Homo sapiens; identical to SEQ ID NO: 249019
  chr1:156445328-156445616
  hypo

SEQ ID NO: 427737 - DNA, 262 bp, Homo sapiens; identical to SEQ ID NO: 278906
  chr1:156541960-156542222
  hypo

SEQ ID NO: 427738 - DNA, 113 bp, Homo sapiens; identical to SEQ ID NO: 221488
  chr1:156542391-156542504
  hypo

SEQ ID NO: 427739 - DNA, 240 bp, Homo sapiens; identical to SEQ ID NO: 249021
  chr1:156572018-156572258
  hypo

SEQ ID NO: 427740 - DNA, 38 bp, Homo sapiens; identical to SEQ ID NO: 197784
  chr1:156595265-156595303
  hypo

SEQ ID NO: 427741 - DNA, 39 bp, Homo sapiens; identical to SEQ ID NO: 207229
  chr1:156664565-156664604
  hypo

SEQ ID NO: 427742 - DNA, 101 bp, Homo sapiens; identical to SEQ ID NO: 249023
  chr1:156667364-156667465
  hypo

SEQ ID NO: 427743 - DNA, 618 bp, Homo sapiens; identical to SEQ ID NO: 278921
  chr1:156675831-156676449
  hypo

SEQ ID NO: 427744 - DNA, 135 bp, Homo sapiens; identical to SEQ ID NO: 197790
  chr1:156676539-156676674
  hypo

SEQ ID NO: 427745 - DNA, 341 bp, Homo sapiens; identical to SEQ ID NO: 249024
  chr1:156754046-156754387
  hypo

SEQ ID NO: 427746 - DNA, 42 bp, Homo sapiens; identical to SEQ ID NO: 249025
  chr1:156768640-156768682
  hypo

SEQ ID NO: 427747 - DNA, 132 bp, Homo sapiens; identical to SEQ ID NO: 249026
  chr1:156785630-156785762
  hypo

SEQ ID NO: 427748 - DNA, 203 bp, Homo sapiens; identical to SEQ ID NO: 297847
  chr1:156823676-156823879
  hypo

SEQ ID NO: 427749 - DNA, 132 bp, Homo sapiens; identical to SEQ ID NO: 297848
  chr1:156823935-156824067
  hypo

SEQ ID NO: 427750 - DNA, 47 bp, Homo sapiens; identical to SEQ ID NO: 297849
  chr1:156838347-156838394
  hypo

SEQ ID NO: 427751 - DNA, 41 bp, Homo sapiens; identical to SEQ ID NO: 297850
  chr1:156849661-156849702
  hypo

SEQ ID NO: 427752 - DNA, 177 bp, Homo sapiens; identical to SEQ ID NO: 197793
  chr1:156897224-156897401
  hypo

SEQ ID NO: 427753 - DNA, 222 bp, Homo sapiens; identical to SEQ ID NO: 197794
  chr1:156897431-156897653
  hypo

SEQ ID NO: 427754 - DNA, 488 bp, Homo sapiens; identical to SEQ ID NO: 297854
  chr1:157895542-157896030
  hypo

SEQ ID NO: 427755 - DNA, 140 bp, Homo sapiens; identical to SEQ ID NO: 249033
  chr1:158059255-158059395
  hypo

SEQ ID NO: 427756 - DNA, 82 bp, Homo sapiens; identical to SEQ ID NO: 249034
  chr1:158098452-158098534
  hypo

SEQ ID NO: 427757 - DNA, 75 bp, Homo sapiens; identical to SEQ ID NO: 207236
  chr1:158237172-158237247
  hypo

SEQ ID NO: 427758 - DNA, 33 bp, Homo sapiens; identical to SEQ ID NO: 207239
  chr1:158753870-158753903
  hypo

SEQ ID NO: 427759 - DNA, 120 bp, Homo sapiens; identical to SEQ ID NO: 249039
  chr1:158992059-158992179
  hypo

SEQ ID NO: 427760 - DNA, 146 bp, Homo sapiens; identical to SEQ ID NO: 249040
  chr1:159075005-159075151
  hypo

SEQ ID NO: 427761 - DNA, 429 bp, Homo sapiens; identical to SEQ ID NO: 278938
  chr1:159141761-159142190
  hypo

SEQ ID NO: 427762 - DNA, 45 bp, Homo sapiens; identical to SEQ ID NO: 207241
  chr1:159229596-159229641
  hypo

SEQ ID NO: 427763 - DNA, 37 bp, Homo sapiens; identical to SEQ ID NO: 249043
  chr1:159714653-159714690
  hypo

SEQ ID NO: 427764 - DNA, 32 bp, Homo sapiens; identical to SEQ ID NO: 278940
  chr1:159750347-159750379
  hypo

SEQ ID NO: 427765 - DNA, 361 bp, Homo sapiens; identical to SEQ ID NO: 278941
  chr1:159750772-159751133
  hypo

SEQ ID NO: 427766 - DNA, 676 bp, Homo sapiens; identical to SEQ ID NO: 104420
  chr1:159824348-159825024
  hypo

SEQ ID NO: 427767 - DNA, 175 bp, Homo sapiens; identical to SEQ ID NO: 207243
  chr1:159842714-159842889
  hypo

SEQ ID NO: 427768 - DNA, 194 bp, Homo sapiens; identical to SEQ ID NO: 249046
  chr1:159909833-159910027
  hypo

SEQ ID NO: 427769 - DNA, 53 bp, Homo sapiens
  chr1:159931918-159931971
  hypo
gcctggggacagagcaagactccatctcaaaaaaaaaaaaggtttacctttga

SEQ ID NO: 427770 - DNA, 41 bp, Homo sapiens; identical to SEQ ID NO: 207246
  chr1:159932218-159932259
  hypo

SEQ ID NO: 427771 - DNA, 60 bp, Homo sapiens; identical to SEQ ID NO: 207247
  chr1:160063720-160063780
  hypo

SEQ ID NO: 427772 - DNA, 217 bp, Homo sapiens; identical to SEQ ID NO: 249051
  chr1:160121081-160121298
  hypo

SEQ ID NO: 427773 - DNA, 42 bp, Homo sapiens; identical to SEQ ID NO: 249052
  chr1:160121590-160121632
  hypo

SEQ ID NO: 427774 - DNA, 104 bp, Homo sapiens; identical to SEQ ID NO: 249053
  chr1:160155212-160155316
  hypo

SEQ ID NO: 427775 - DNA, 267 bp, Homo sapiens; identical to SEQ ID NO: 249054
  chr1:160255643-160255910
  hypo

SEQ ID NO: 427776 - DNA, 147 bp, Homo sapiens; identical to SEQ ID NO: 207248
  chr1:160293181-160293328
  hypo

SEQ ID NO: 427777 - DNA, 156 bp, Homo sapiens; identical to SEQ ID NO: 249056
  chr1:160385715-160385871
  hypo

SEQ ID NO: 427778 - DNA, 136 bp, Homo sapiens; identical to SEQ ID NO: 297884
  chr1:160523269-160523405
  hypo

SEQ ID NO: 427779 - DNA, 188 bp, Homo sapiens; identical to SEQ ID NO: 197809
  chr1:160526915-160527103
  hypo

SEQ ID NO: 427780 - DNA, 233 bp, Homo sapiens; identical to SEQ ID NO: 249061
  chr1:160771682-160771915
  hypo

SEQ ID NO: 427781 - DNA, 78 bp, Homo sapiens; identical to SEQ ID NO: 249062
  chr1:160865083-160865161
  hypo

SEQ ID NO: 427782 - DNA, 55 bp, Homo sapiens; identical to SEQ ID NO: 207253
  chr1:160924874-160924929
  hypo

SEQ ID NO: 427783 - DNA, 36 bp, Homo sapiens; identical to SEQ ID NO: 207254
  chr1:160985844-160985880
  hypo

SEQ ID NO: 427784 - DNA, 35 bp, Homo sapiens; identical to SEQ ID NO: 207255
  chr1:160986420-160986455
  hypo

SEQ ID NO: 427785 - DNA, 190 bp, Homo sapiens; identical to SEQ ID NO: 297894
  chr1:161044440-161044630
  hypo

SEQ ID NO: 427786 - DNA, 32 bp, Homo sapiens; identical to SEQ ID NO: 249071
  chr1:161055748-161055780
  hypo

SEQ ID NO: 427787 - DNA, 152 bp, Homo sapiens; identical to SEQ ID NO: 278962
  chr1:161068574-161068726
  hypo

SEQ ID NO: 427788 - DNA, 189 bp, Homo sapiens; identical to SEQ ID NO: 207256
  chr1:161145675-161145864
  hypo

SEQ ID NO: 427789 - DNA, 274 bp, Homo sapiens; identical to SEQ ID NO: 249073
  chr1:161166336-161166610
  hypo

SEQ ID NO: 427790 - DNA, 68 bp, Homo sapiens
  chr1:161367367-161367435
  hypo
catagctatgttaaggcttagctgacatacaataaactgaacatacttaaaatgtacaagttttgaca

SEQ ID NO: 427791 - DNA, 36 bp, Homo sapiens; identical to SEQ ID NO: 249077
  chr1:161370747-161370783
  hypo

SEQ ID NO: 427792 - DNA, 242 bp, Homo sapiens; identical to SEQ ID NO: 207262
  chr1:161953579-161953821
  hypo

SEQ ID NO: 427793 - DNA, 187 bp, Homo sapiens; identical to SEQ ID NO: 249081
  chr1:161982118-161982305
  hypo

SEQ ID NO: 427794 - DNA, 45 bp, Homo sapiens; identical to SEQ ID NO: 207264
  chr1:162116825-162116870
  hypo

SEQ ID NO: 427795 - DNA, 87 bp, Homo sapiens; identical to SEQ ID NO: 207265
  chr1:162335161-162335248
  hypo

SEQ ID NO: 427796 - DNA, 224 bp, Homo sapiens; identical to SEQ ID NO: 207266
  chr1:162343771-162343995
  hypo

SEQ ID NO: 427797 - DNA, 85 bp, Homo sapiens; identical to SEQ ID NO: 249085
  chr1:162344602-162344687
  hypo

SEQ ID NO: 427798 - DNA, 48 bp, Homo sapiens; identical to SEQ ID NO: 249086
  chr1:162346580-162346628
  hypo

SEQ ID NO: 427799 - DNA, 153 bp, Homo sapiens; identical to SEQ ID NO: 249087
  chr1:162351643-162351796
  hypo

SEQ ID NO: 427800 - DNA, 37 bp, Homo sapiens; identical to SEQ ID NO: 207267
  chr1:162426947-162426984
  hypo

SEQ ID NO: 427801 - DNA, 36 bp, Homo sapiens; identical to SEQ ID NO: 207268
  chr1:162427224-162427260
  hypo

SEQ ID NO: 427802 - DNA, 162 bp, Homo sapiens; identical to SEQ ID NO: 249090
  chr1:162428146-162428308
  hypo

SEQ ID NO: 427803 - DNA, 143 bp, Homo sapiens; identical to SEQ ID NO: 249093
  chr1:163662092-163662235
  hypo

SEQ ID NO: 427804 - DNA, 45 bp, Homo sapiens; identical to SEQ ID NO: 207270
  chr1:163872823-163872868
  hypo

SEQ ID NO: 427805 - DNA, 43 bp, Homo sapiens; identical to SEQ ID NO: 249095
  chr1:163900506-163900549
  hypo

SEQ ID NO: 427806 - DNA, 38 bp, Homo sapiens; identical to SEQ ID NO: 249096
  chr1:164079141-164079179
  hypo

SEQ ID NO: 427807 - DNA, 34 bp, Homo sapiens; identical to SEQ ID NO: 207271
  chr1:164518130-164518164
  hypo

SEQ ID NO: 427808 - DNA, 43 bp, Homo sapiens; identical to SEQ ID NO: 207272
  chr1:164550441-164550484
  hypo

SEQ ID NO: 427809 - DNA, 42 bp, Homo sapiens; identical to SEQ ID NO: 249099
  chr1:164550724-164550766
  hypo

SEQ ID NO: 427810 - DNA, 104 bp, Homo sapiens; identical to SEQ ID NO: 207273
  chr1:164590520-164590624
  hypo

SEQ ID NO: 427811 - DNA, 125 bp, Homo sapiens; identical to SEQ ID NO: 249103
  chr1:164651958-164652083
  hypo

SEQ ID NO: 427812 - DNA, 63 bp, Homo sapiens; identical to SEQ ID NO: 249104
  chr1:164658204-164658267
  hypo

SEQ ID NO: 427813 - DNA, 71 bp, Homo sapiens; identical to SEQ ID NO: 297934
  chr1:164667272-164667343
  hypo

SEQ ID NO: 427814 - DNA, 170 bp, Homo sapiens; identical to SEQ ID NO: 297935
  chr1:164667373-164667543
  hypo

SEQ ID NO: 427815 - DNA, 42 bp, Homo sapiens; identical to SEQ ID NO: 249106
  chr1:164723970-164724012
  hypo

SEQ ID NO: 427816 - DNA, 193 bp, Homo sapiens; identical to SEQ ID NO: 207277
  chr1:164753547-164753740
  hypo

SEQ ID NO: 427817 - DNA, 36 bp, Homo sapiens; identical to SEQ ID NO: 207279
  chr1:164765528-164765564
  hypo

SEQ ID NO: 427818 - DNA, 88 bp, Homo sapiens; identical to SEQ ID NO: 249111
  chr1:164776128-164776216
  hypo

SEQ ID NO: 427819 - DNA, 193 bp, Homo sapiens; identical to SEQ ID NO: 207280
  chr1:164790953-164791146
  hypo

SEQ ID NO: 427820 - DNA, 189 bp, Homo sapiens; identical to SEQ ID NO: 279005
  chr1:165345284-165345473
  hypo

SEQ ID NO: 427821 - DNA, 32 bp, Homo sapiens; identical to SEQ ID NO: 249113
  chr1:165495513-165495545
  hypo

SEQ ID NO: 427822 - DNA, 117 bp, Homo sapiens; identical to SEQ ID NO: 297948
  chr1:165809119-165809236
  hypo

SEQ ID NO: 427823 - DNA, 42 bp, Homo sapiens; identical to SEQ ID NO: 249116
  chr1:166266744-166266786
  hypo

SEQ ID NO: 427824 - DNA, 36 bp, Homo sapiens; identical to SEQ ID NO: 249117
  chr1:166479112-166479148
  hypo

SEQ ID NO: 427825 - DNA, 31 bp, Homo sapiens; identical to SEQ ID NO: 249119
  chr1:166958567-166958598
  hypo

SEQ ID NO: 427826 - DNA, 109 bp, Homo sapiens; identical to SEQ ID NO: 249120
  chr1:167032009-167032118
  hypo

SEQ ID NO: 427827 - DNA, 108 bp, Homo sapiens; identical to SEQ ID NO: 279019
  chr1:167090757-167090865
  hypo

SEQ ID NO: 427828 - DNA, 237 bp, Homo sapiens; identical to SEQ ID NO: 197839
  chr1:167190164-167190401
  hypo

SEQ ID NO: 427829 - DNA, 165 bp, Homo sapiens; identical to SEQ ID NO: 197840
  chr1:167423949-167424114
  hypo

SEQ ID NO: 427830 - DNA, 104 bp, Homo sapiens; identical to SEQ ID NO: 249125
  chr1:167443921-167444025
  hypo

SEQ ID NO: 427831 - DNA, 161 bp, Homo sapiens; identical to SEQ ID NO: 207288
  chr1:167487339-167487500
  hypo

SEQ ID NO: 427832 - DNA, 186 bp, Homo sapiens; identical to SEQ ID NO: 207289
  chr1:167524973-167525159
  hypo

SEQ ID NO: 427833 - DNA, 32 bp, Homo sapiens; identical to SEQ ID NO: 249129
  chr1:167690802-167690834
  hypo

SEQ ID NO: 427834 - DNA, 45 bp, Homo sapiens; identical to SEQ ID NO: 249130
  chr1:167732418-167732463
  hypo

SEQ ID NO: 427835 - DNA, 42 bp, Homo sapiens; identical to SEQ ID NO: 249132
  chr1:167844893-167844935
  hypo

SEQ ID NO: 427836 - DNA, 39 bp, Homo sapiens; identical to SEQ ID NO: 249133
  chr1:167852542-167852581
  hypo

SEQ ID NO: 427837 - DNA, 202 bp, Homo sapiens; identical to SEQ ID NO: 138615
  chr1:168054754-168054956
  hypo

SEQ ID NO: 427838 - DNA, 65 bp, Homo sapiens; identical to SEQ ID NO: 207290
  chr1:168058062-168058127
  hypo

SEQ ID NO: 427839 - DNA, 41 bp, Homo sapiens; identical to SEQ ID NO: 249136
  chr1:168062078-168062119
  hypo

SEQ ID NO: 427840 - DNA, 36 bp, Homo sapiens; identical to SEQ ID NO: 249137
  chr1:168104282-168104318
  hypo

SEQ ID NO: 427841 - DNA, 141 bp, Homo sapiens; identical to SEQ ID NO: 249142
  chr1:168198888-168199029
  hypo

SEQ ID NO: 427842 - DNA, 389 bp, Homo sapiens; identical to SEQ ID NO: 249143
  chr1:168250292-168250681
  hypo

SEQ ID NO: 427843 - DNA, 186 bp, Homo sapiens; identical to SEQ ID NO: 249144
  chr1:168260494-168260680
  hypo

SEQ ID NO: 427844 - DNA, 233 bp, Homo sapiens; identical to SEQ ID NO: 249145
  chr1:168399587-168399820
  hypo

SEQ ID NO: 427845 - DNA, 44 bp, Homo sapiens; identical to SEQ ID NO: 249146
  chr1:168445204-168445248
  hypo

SEQ ID NO: 427846 - DNA, 31 bp, Homo sapiens; identical to SEQ ID NO: 249147
  chr1:168698961-168698992
  hypo

SEQ ID NO: 427847 - DNA, 89 bp, Homo sapiens; identical to SEQ ID NO: 207293
  chr1:168878540-168878629
  hypo

SEQ ID NO: 427848 - DNA, 126 bp, Homo sapiens; identical to SEQ ID NO: 249149
  chr1:168882770-168882896
  hypo

SEQ ID NO: 427849 - DNA, 332 bp, Homo sapiens; identical to SEQ ID NO: 197845
  chr1:169076042-169076374
  hypo

SEQ ID NO: 427850 - DNA, 41 bp, Homo sapiens; identical to SEQ ID NO: 249151
  chr1:169355662-169355703
  hypo

SEQ ID NO: 427851 - DNA, 90 bp, Homo sapiens; identical to SEQ ID NO: 207295
  chr1:169457189-169457279
  hypo

SEQ ID NO: 427852 - DNA, 88 bp, Homo sapiens; identical to SEQ ID NO: 249153
  chr1:169575559-169575647
  hypo

SEQ ID NO: 427853 - DNA, 78 bp, Homo sapiens; identical to SEQ ID NO: 249155
  chr1:169850180-169850258
  hypo

SEQ ID NO: 427854 - DNA, 90 bp, Homo sapiens; identical to SEQ ID NO: 207296
  chr1:170064328-170064418
  hypo

SEQ ID NO: 427855 - DNA, 90 bp, Homo sapiens; identical to SEQ ID NO: 249159
  chr1:171554194-171554284
  hypo

SEQ ID NO: 427856 - DNA, 41 bp, Homo sapiens; identical to SEQ ID NO: 207299
  chr1:171640197-171640238
  hypo

SEQ ID NO: 427857 - DNA, 159 bp, Homo sapiens; identical to SEQ ID NO: 207300
  chr1:171707391-171707550
  hypo

SEQ ID NO: 427858 - DNA, 77 bp, Homo sapiens; identical to SEQ ID NO: 207301
  chr1:172449159-172449236
  hypo

SEQ ID NO: 427859 - DNA, 35 bp, Homo sapiens; identical to SEQ ID NO: 207302
  chr1:173714249-173714284
  hypo

SEQ ID NO: 427860 - DNA, 36 bp, Homo sapiens; identical to SEQ ID NO: 249170
  chr1:174048026-174048062
  hypo

SEQ ID NO: 427861 - DNA, 79 bp, Homo sapiens; identical to SEQ ID NO: 207303
  chr1:174166676-174166755
  hypo

SEQ ID NO: 427862 - DNA, 50 bp, Homo sapiens; identical to SEQ ID NO: 249172
  chr1:174634545-174634595
  hypo

SEQ ID NO: 427863 - DNA, 148 bp, Homo sapiens; identical to SEQ ID NO: 249173
  chr1:175014791-175014939
  hypo

SEQ ID NO: 427864 - DNA, 234 bp, Homo sapiens; identical to SEQ ID NO: 249179
  chr1:175384412-175384646
  hypo

SEQ ID NO: 427865 - DNA, 36 bp, Homo sapiens; identical to SEQ ID NO: 249180
  chr1:175385845-175385881
  hypo

SEQ ID NO: 427866 - DNA, 37 bp, Homo sapiens; identical to SEQ ID NO: 249182
  chr1:176694918-176694955
  hypo

SEQ ID NO: 427867 - DNA, 37 bp, Homo sapiens; identical to SEQ ID NO: 249183
  chr1:176695195-176695232
  hypo

SEQ ID NO: 427868 - DNA, 44 bp, Homo sapiens; identical to SEQ ID NO: 249184
  chr1:178099911-178099955
  hypo

SEQ ID NO: 427869 - DNA, 150 bp, Homo sapiens; identical to SEQ ID NO: 207312
  chr1:178271749-178271899
  hypo

SEQ ID NO: 427870 - DNA, 82 bp, Homo sapiens; identical to SEQ ID NO: 249186
  chr1:178362729-178362811
  hypo

SEQ ID NO: 427871 - DNA, 39 bp, Homo sapiens; identical to SEQ ID NO: 249187
  chr1:178465304-178465343
  hypo

SEQ ID NO: 427872 - DNA, 131 bp, Homo sapiens; identical to SEQ ID NO: 249188
  chr1:178469645-178469776
  hypo

SEQ ID NO: 427873 - DNA, 125 bp, Homo sapiens; identical to SEQ ID NO: 249189
  chr1:178514076-178514201
  hypo

SEQ ID NO: 427874 - DNA, 212 bp, Homo sapiens; identical to SEQ ID NO: 221520
  chr1:178693954-178694166
  hypo

SEQ ID NO: 427875 - DNA, 41 bp, Homo sapiens; identical to SEQ ID NO: 249191
  chr1:178828802-178828843
  hypo

SEQ ID NO: 427876 - DNA, 41 bp, Homo sapiens; identical to SEQ ID NO: 249192
  chr1:178829083-178829124
  hypo

SEQ ID NO: 427877 - DNA, 229 bp, Homo sapiens; identical to SEQ ID NO: 207315
  chr1:178928477-178928706
  hypo

SEQ ID NO: 427878 - DNA, 83 bp, Homo sapiens; identical to SEQ ID NO: 207316
  chr1:178988892-178988975
  hypo

SEQ ID NO: 427879 - DNA, 34 bp, Homo sapiens; identical to SEQ ID NO: 207317
  chr1:179046571-179046605
  hypo

SEQ ID NO: 427880 - DNA, 43 bp, Homo sapiens; identical to SEQ ID NO: 207318
  chr1:179229272-179229315
  hypo

SEQ ID NO: 427881 - DNA, 91 bp, Homo sapiens; identical to SEQ ID NO: 279077
  chr1:179545304-179545395
  hypo

SEQ ID NO: 427882 - DNA, 268 bp, Homo sapiens; identical to SEQ ID NO: 249200
  chr1:179557861-179558129
  hypo

SEQ ID NO: 427883 - DNA, 48 bp, Homo sapiens; identical to SEQ ID NO: 207319
  chr1:179782918-179782966
  hypo

SEQ ID NO: 427884 - DNA, 73 bp, Homo sapiens; identical to SEQ ID NO: 249203
  chr1:180039480-180039553
  hypo

SEQ ID NO: 427885 - DNA, 299 bp, Homo sapiens; identical to SEQ ID NO: 249204
  chr1:180097383-180097682
  hypo

SEQ ID NO: 427886 - DNA, 291 bp, Homo sapiens; identical to SEQ ID NO: 249205
  chr1:180134709-180135000
  hypo

SEQ ID NO: 427887 - DNA, 216 bp, Homo sapiens; identical to SEQ ID NO: 249206
  chr1:180137306-180137522
  hypo

SEQ ID NO: 427888 - DNA, 173 bp, Homo sapiens; identical to SEQ ID NO: 249207
  chr1:180138813-180138986
  hypo

SEQ ID NO: 427889 - DNA, 96 bp, Homo sapiens; identical to SEQ ID NO: 249208
  chr1:180223403-180223499
  hypo

SEQ ID NO: 427890 - DNA, 34 bp, Homo sapiens; identical to SEQ ID NO: 249210
  chr1:180302703-180302737
  hypo

SEQ ID NO: 427891 - DNA, 136 bp, Homo sapiens; identical to SEQ ID NO: 249211
  chr1:180404662-180404798
  hypo

SEQ ID NO: 427892 - DNA, 96 bp, Homo sapiens; identical to SEQ ID NO: 207322
  chr1:180477770-180477866
  hypo

SEQ ID NO: 427893 - DNA, 120 bp, Homo sapiens; identical to SEQ ID NO: 207324
  chr1:180497354-180497474
  hypo

SEQ ID NO: 427894 - DNA, 101 bp, Homo sapiens; identical to SEQ ID NO: 207325
  chr1:180497654-180497755
  hypo

SEQ ID NO: 427895 - DNA, 45 bp, Homo sapiens; identical to SEQ ID NO: 197867
  chr1:180881296-180881341
  hypo

SEQ ID NO: 427896 - DNA, 255 bp, Homo sapiens; identical to SEQ ID NO: 197868
  chr1:180881580-180881835
  hypo

SEQ ID NO: 427897 - DNA, 140 bp, Homo sapiens; identical to SEQ ID NO: 279089
  chr1:180881864-180882004
  hypo

SEQ ID NO: 427898 - DNA, 94 bp, Homo sapiens; identical to SEQ ID NO: 207329
  chr1:180885147-180885241
  hypo

SEQ ID NO: 427899 - DNA, 178 bp, Homo sapiens; identical to SEQ ID NO: 249217
  chr1:180888525-180888703
  hypo

SEQ ID NO: 427900 - DNA, 41 bp, Homo sapiens; identical to SEQ ID NO: 207330
  chr1:180891951-180891992
  hypo

SEQ ID NO: 427901 - DNA, 126 bp, Homo sapiens; identical to SEQ ID NO: 207332
  chr1:180896512-180896638
  hypo

SEQ ID NO: 427902 - DNA, 346 bp, Homo sapiens; identical to SEQ ID NO: 249221
  chr1:180917326-180917672
  hypo

SEQ ID NO: 427903 - DNA, 296 bp, Homo sapiens; identical to SEQ ID NO: 249222
  chr1:180918319-180918615
  hypo

SEQ ID NO: 427904 - DNA, 151 bp, Homo sapiens; identical to SEQ ID NO: 207334
  chr1:181066372-181066523
  hypo

SEQ ID NO: 427905 - DNA, 65 bp, Homo sapiens; identical to SEQ ID NO: 249227
  chr1:181111089-181111154
  hypo

SEQ ID NO: 427906 - DNA, 104 bp, Homo sapiens; identical to SEQ ID NO: 249231
  chr1:181979314-181979418
  hypo

SEQ ID NO: 427907 - DNA, 40 bp, Homo sapiens; identical to SEQ ID NO: 249232
  chr1:182148663-182148703
  hypo

SEQ ID NO: 427908 - DNA, 33 bp, Homo sapiens; identical to SEQ ID NO: 249233
  chr1:182230564-182230597
  hypo

SEQ ID NO: 427909 - DNA, 89 bp, Homo sapiens; identical to SEQ ID NO: 279097
  chr1:182359608-182359697
  hypo

SEQ ID NO: 427910 - DNA, 46 bp, Homo sapiens; identical to SEQ ID NO: 279098
  chr1:182359742-182359788
  hypo

SEQ ID NO: 427911 - DNA, 69 bp, Homo sapiens; identical to SEQ ID NO: 249234
  chr1:182637878-182637947
  hypo

SEQ ID NO: 427912 - DNA, 39 bp, Homo sapiens; identical to SEQ ID NO: 207340
  chr1:182767636-182767675
  hypo

SEQ ID NO: 427913 - DNA, 190 bp, Homo sapiens; identical to SEQ ID NO: 207341
  chr1:182827758-182827948
  hypo

SEQ ID NO: 427914 - DNA, 343 bp, Homo sapiens; identical to SEQ ID NO: 197876
  chr1:182992844-182993187
  hypo

SEQ ID NO: 427915 - DNA, 177 bp, Homo sapiens; identical to SEQ ID NO: 298086
  chr1:183129205-183129382
  hypo

SEQ ID NO: 427916 - DNA, 42 bp, Homo sapiens; identical to SEQ ID NO: 249240
  chr1:183132281-183132323
  hypo

SEQ ID NO: 427917 - DNA, 291 bp, Homo sapiens; identical to SEQ ID NO: 221529
  chr1:183155179-183155470
  hypo

SEQ ID NO: 427918 - DNA, 136 bp, Homo sapiens; identical to SEQ ID NO: 207345
  chr1:183338766-183338902
  hypo

SEQ ID NO: 427919 - DNA, 33 bp, Homo sapiens; identical to SEQ ID NO: 249242
  chr1:183443725-183443758
  hypo

SEQ ID NO: 427920 - DNA, 136 bp, Homo sapiens; identical to SEQ ID NO: 249244
  chr1:183551069-183551205
  hypo

SEQ ID NO: 427921 - DNA, 174 bp, Homo sapiens; identical to SEQ ID NO: 249245
  chr1:183944151-183944325
  hypo

SEQ ID NO: 427922 - DNA, 165 bp, Homo sapiens; identical to SEQ ID NO: 249246
  chr1:184333001-184333166
  hypo

SEQ ID NO: 427923 - DNA, 507 bp, Homo sapiens; identical to SEQ ID NO: 197878
  chr1:184355381-184355888
  hypo

SEQ ID NO: 427924 - DNA, 278 bp, Homo sapiens; identical to SEQ ID NO: 197879
  chr1:184355936-184356214
  hypo

SEQ ID NO: 427925 - DNA, 146 bp, Homo sapiens; identical to SEQ ID NO: 197880
  chr1:184356541-184356687
  hypo

SEQ ID NO: 427926 - DNA, 159 bp, Homo sapiens; identical to SEQ ID NO: 298097
  chr1:184442501-184442660
  hypo

SEQ ID NO: 427927 - DNA, 259 bp, Homo sapiens; identical to SEQ ID NO: 207349
  chr1:184448490-184448749
  hypo

SEQ ID NO: 427928 - DNA, 39 bp, Homo sapiens; identical to SEQ ID NO: 207350
  chr1:184720865-184720904
  hypo

SEQ ID NO: 427929 - DNA, 38 bp, Homo sapiens; identical to SEQ ID NO: 207351
  chr1:184721205-184721243
  hypo

SEQ ID NO: 427930 - DNA, 60 bp, Homo sapiens; identical to SEQ ID NO: 383773
  chr1:184722970-184723030
  hypo

SEQ ID NO: 427931 - DNA, 52 bp, Homo sapiens; identical to SEQ ID NO: 249251
  chr1:184764469-184764521
  hypo

SEQ ID NO: 427932 - DNA, 35 bp, Homo sapiens; identical to SEQ ID NO: 249252
  chr1:184934144-184934179
  hypo

SEQ ID NO: 427933 - DNA, 39 bp, Homo sapiens; identical to SEQ ID NO: 207353
  chr1:185024836-185024875
  hypo

SEQ ID NO: 427934 - DNA, 83 bp, Homo sapiens; identical to SEQ ID NO: 207354
  chr1:185336198-185336281
  hypo

SEQ ID NO: 427935 - DNA, 167 bp, Homo sapiens; identical to SEQ ID NO: 249255
  chr1:185554768-185554935
  hypo

SEQ ID NO: 427936 - DNA, 65 bp, Homo sapiens; identical to SEQ ID NO: 279127
  chr1:186344948-186345013
  hypo

SEQ ID NO: 427937 - DNA, 176 bp, Homo sapiens; identical to SEQ ID NO: 207355
  chr1:188612098-188612274
  hypo

SEQ ID NO: 427938 - DNA, 87 bp, Homo sapiens; identical to SEQ ID NO: 249257
  chr1:191980832-191980919
  hypo

SEQ ID NO: 427939 - DNA, 34 bp, Homo sapiens; identical to SEQ ID NO: 207356
  chr1:192197325-192197359
  hypo

SEQ ID NO: 427940 - DNA, 34 bp, Homo sapiens; identical to SEQ ID NO: 249259
  chr1:192469717-192469751
  hypo

SEQ ID NO: 427941 - DNA, 164 bp, Homo sapiens; identical to SEQ ID NO: 249261
  chr1:193377400-193377564
  hypo

SEQ ID NO: 427942 - DNA, 33 bp, Homo sapiens; identical to SEQ ID NO: 249262
  chr1:195578617-195578650
  hypo

SEQ ID NO: 427943 - DNA, 105 bp, Homo sapiens; identical to SEQ ID NO: 249264
  chr1:196902782-196902887
  hypo

SEQ ID NO: 427944 - DNA, 53 bp, Homo sapiens; identical to SEQ ID NO: 207358
  chr1:197091652-197091705
  hypo

SEQ ID NO: 427945 - DNA, 32 bp, Homo sapiens; identical to SEQ ID NO: 207359
  chr1:197116742-197116774
  hypo

SEQ ID NO: 427946 - DNA, 38 bp, Homo sapiens; identical to SEQ ID NO: 207360
  chr1:197324919-197324957
  hypo

SEQ ID NO: 427947 - DNA, 39 bp, Homo sapiens; identical to SEQ ID NO: 207361
  chr1:197418769-197418808
  hypo

SEQ ID NO: 427948 - DNA, 92 bp, Homo sapiens; identical to SEQ ID NO: 207362
  chr1:197704760-197704852
  hypo

SEQ ID NO: 427949 - DNA, 42 bp, Homo sapiens; identical to SEQ ID NO: 249273
  chr1:198326487-198326529
  hypo

SEQ ID NO: 427950 - DNA, 181 bp, Homo sapiens; identical to SEQ ID NO: 207363
  chr1:198828046-198828227
  hypo

SEQ ID NO: 427951 - DNA, 156 bp, Homo sapiens; identical to SEQ ID NO: 207364
  chr1:199636236-199636392
  hypo

SEQ ID NO: 427952 - DNA, 41 bp, Homo sapiens; identical to SEQ ID NO: 249276
  chr1:200027878-200027919
  hypo

SEQ ID NO: 427953 - DNA, 184 bp, Homo sapiens; identical to SEQ ID NO: 249277
  chr1:200182774-200182958
  hypo

SEQ ID NO: 427954 - DNA, 32 bp, Homo sapiens; identical to SEQ ID NO: 249278
  chr1:200386099-200386131
  hypo

SEQ ID NO: 427955 - DNA, 81 bp, Homo sapiens; identical to SEQ ID NO: 249279
  chr1:200486650-200486731
  hypo

SEQ ID NO: 427956 - DNA, 34 bp, Homo sapiens; identical to SEQ ID NO: 207366
  chr1:200556912-200556946
  hypo

SEQ ID NO: 427957 - DNA, 92 bp, Homo sapiens; identical to SEQ ID NO: 207367
  chr1:200588800-200588892
  hypo

SEQ ID NO: 427958 - DNA, 39 bp, Homo sapiens; identical to SEQ ID NO: 207368
  chr1:200612481-200612520
  hypo

SEQ ID NO: 427959 - DNA, 235 bp, Homo sapiens; identical to SEQ ID NO: 197899
  chr1:200708632-200708867
  hypo

SEQ ID NO: 427960 - DNA, 76 bp, Homo sapiens; identical to SEQ ID NO: 249283
  chr1:200882273-200882349
  hypo

SEQ ID NO: 427961 - DNA, 111 bp, Homo sapiens; identical to SEQ ID NO: 207370
  chr1:200942600-200942711
  hypo

SEQ ID NO: 427962 - DNA, 50 bp, Homo sapiens; identical to SEQ ID NO: 207371
  chr1:200956136-200956186
  hypo

SEQ ID NO: 427963 - DNA, 78 bp, Homo sapiens; identical to SEQ ID NO: 207372
  chr1:201055718-201055796
  hypo

SEQ ID NO: 427964 - DNA, 259 bp, Homo sapiens; identical to SEQ ID NO: 249289
  chr1:201058348-201058607
  hypo

SEQ ID NO: 427965 - DNA, 816 bp, Homo sapiens; identical to SEQ ID NO: 279158
  chr1:201083266-201084082
  hypo

SEQ ID NO: 427966 - DNA, 36 bp, Homo sapiens; identical to SEQ ID NO: 249290
  chr1:201103243-201103279
  hypo

SEQ ID NO: 427967 - DNA, 202 bp, Homo sapiens; identical to SEQ ID NO: 207375
  chr1:201168310-201168512
  hypo

SEQ ID NO: 427968 - DNA, 31 bp, Homo sapiens; identical to SEQ ID NO: 249293
  chr1:201238522-201238553
  hypo

SEQ ID NO: 427969 - DNA, 47 bp, Homo sapiens; identical to SEQ ID NO: 298146
  chr1:201244195-201244242
  hypo

SEQ ID NO: 427970 - DNA, 152 bp, Homo sapiens; identical to SEQ ID NO: 249295
  chr1:201244944-201245096
  hypo

SEQ ID NO: 427971 - DNA, 208 bp, Homo sapiens; identical to SEQ ID NO: 207377
  chr1:201261831-201262039
  hypo

SEQ ID NO: 427972 - DNA, 41 bp, Homo sapiens; identical to SEQ ID NO: 207378
  chr1:201276067-201276108
  hypo

SEQ ID NO: 427973 - DNA, 42 bp, Homo sapiens; identical to SEQ ID NO: 249298
  chr1:201325776-201325818
  hypo

SEQ ID NO: 427974 - DNA, 117 bp, Homo sapiens; identical to SEQ ID NO: 249299
  chr1:201328245-201328362
  hypo

SEQ ID NO: 427975 - DNA, 96 bp, Homo sapiens; identical to SEQ ID NO: 249300
  chr1:201351265-201351361
  hypo

SEQ ID NO: 427976 - DNA, 169 bp, Homo sapiens; identical to SEQ ID NO: 207379
  chr1:201355458-201355627
  hypo

SEQ ID NO: 427977 - DNA, 316 bp, Homo sapiens; identical to SEQ ID NO: 249302
  chr1:201380509-201380825
  hypo

SEQ ID NO: 427978 - DNA, 225 bp, Homo sapiens; identical to SEQ ID NO: 249303
  chr1:201400931-201401156
  hypo

SEQ ID NO: 427979 - DNA, 120 bp, Homo sapiens; identical to SEQ ID NO: 249304
  chr1:201432876-201432996
  hypo

SEQ ID NO: 427980 - DNA, 112 bp, Homo sapiens; identical to SEQ ID NO: 298159
  chr1:201981199-201981311
  hypo

SEQ ID NO: 427981 - DNA, 59 bp, Homo sapiens; identical to SEQ ID NO: 249308
  chr1:201981829-201981888
  hypo

SEQ ID NO: 427982 - DNA, 49 bp, Homo sapiens; identical to SEQ ID NO: 298161
  chr1:201982339-201982388
  hypo

SEQ ID NO: 427983 - DNA, 177 bp, Homo sapiens; identical to SEQ ID NO: 207383
  chr1:201982936-201983113
  hypo

SEQ ID NO: 427984 - DNA, 37 bp, Homo sapiens; identical to SEQ ID NO: 207384
  chr1:201984009-201984046
  hypo

SEQ ID NO: 427985 - DNA, 117 bp, Homo sapiens; identical to SEQ ID NO: 249312
  chr1:201984365-201984482
  hypo

SEQ ID NO: 427986 - DNA, 89 bp, Homo sapiens; identical to SEQ ID NO: 207385
  chr1:201997730-201997819
  hypo

SEQ ID NO: 427987 - DNA, 70 bp, Homo sapiens; identical to SEQ ID NO: 402198
  chr1:202009883-202009953
  hypo

SEQ ID NO: 427988 - DNA, 42 bp, Homo sapiens; identical to SEQ ID NO: 249315
  chr1:202022787-202022829
  hypo

SEQ ID NO: 427989 - DNA, 79 bp, Homo sapiens; identical to SEQ ID NO: 249316
  chr1:202032892-202032971
  hypo

SEQ ID NO: 427990 - DNA, 140 bp, Homo sapiens; identical to SEQ ID NO: 249317
  chr1:202041210-202041350
  hypo

SEQ ID NO: 427991 - DNA, 56 bp, Homo sapiens; identical to SEQ ID NO: 298170
  chr1:202042308-202042364
  hypo

SEQ ID NO: 427992 - DNA, 79 bp, Homo sapiens; identical to SEQ ID NO: 298171
  chr1:202042487-202042566
  hypo

SEQ ID NO: 427993 - DNA, 38 bp, Homo sapiens; identical to SEQ ID NO: 249319
  chr1:202052584-202052622
  hypo

SEQ ID NO: 427994 - DNA, 42 bp, Homo sapiens; identical to SEQ ID NO: 249320
  chr1:202058380-202058422
  hypo

SEQ ID NO: 427995 - DNA, 61 bp, Homo sapiens; identical to SEQ ID NO: 207386
  chr1:202097362-202097423
  hypo

SEQ ID NO: 427996 - DNA, 91 bp, Homo sapiens; identical to SEQ ID NO: 207387
  chr1:202115847-202115938
  hypo

SEQ ID NO: 427997 - DNA, 289 bp, Homo sapiens; identical to SEQ ID NO: 249323
  chr1:202134668-202134957
  hypo

SEQ ID NO: 427998 - DNA, 549 bp, Homo sapiens; identical to SEQ ID NO: 221540
  chr1:202162904-202163453
  hypo

SEQ ID NO: 427999 - DNA, 189 bp, Homo sapiens; identical to SEQ ID NO: 249324
  chr1:202218132-202218321
  hypo

SEQ ID NO: 428000 - DNA, 98 bp, Homo sapiens; identical to SEQ ID NO: 249325
  chr1:202237360-202237458
  hypo

SEQ ID NO: 428001 - DNA, 461 bp, Homo sapiens; identical to SEQ ID NO: 249326
  chr1:202287405-202287866
  hypo

SEQ ID NO: 428002 - DNA, 37 bp, Homo sapiens; identical to SEQ ID NO: 207390
  chr1:202306336-202306373
  hypo

SEQ ID NO: 428003 - DNA, 83 bp, Homo sapiens; identical to SEQ ID NO: 279176
  chr1:202611678-202611761
  hypo

SEQ ID NO: 428004 - DNA, 983 bp, Homo sapiens; identical to SEQ ID NO: 279177
  chr1:202612039-202613022
  hypo

SEQ ID NO: 428005 - DNA, 394 bp, Homo sapiens; identical to SEQ ID NO: 279181
  chr1:202830481-202830875
  hypo

SEQ ID NO: 428006 - DNA, 37 bp, Homo sapiens; identical to SEQ ID NO: 249329
  chr1:202830968-202831005
  hypo

SEQ ID NO: 428007 - DNA, 39 bp, Homo sapiens; identical to SEQ ID NO: 249330
  chr1:202831060-202831099
  hypo

SEQ ID NO: 428008 - DNA, 31 bp, Homo sapiens; identical to SEQ ID NO: 249331
  chr1:202859948-202859979
  hypo

SEQ ID NO: 428009 - DNA, 136 bp, Homo sapiens; identical to SEQ ID NO: 207391
  chr1:202934401-202934537
  hypo

SEQ ID NO: 428010 - DNA, 37 bp, Homo sapiens; identical to SEQ ID NO: 249335
  chr1:202940666-202940703
  hypo

SEQ ID NO: 428011 - DNA, 163 bp, Homo sapiens; identical to SEQ ID NO: 249337
  chr1:203014550-203014713
  hypo

SEQ ID NO: 428012 - DNA, 198 bp, Homo sapiens; identical to SEQ ID NO: 249338
  chr1:203017685-203017883
  hypo

SEQ ID NO: 428013 - DNA, 267 bp, Homo sapiens; identical to SEQ ID NO: 249339
  chr1:203098029-203098296
  hypo

SEQ ID NO: 428014 - DNA, 187 bp, Homo sapiens; identical to SEQ ID NO: 249341
  chr1:203139342-203139529
  hypo

SEQ ID NO: 428015 - DNA, 35 bp, Homo sapiens; identical to SEQ ID NO: 249342
  chr1:203140950-203140985
  hypo

SEQ ID NO: 428016 - DNA, 231 bp, Homo sapiens; identical to SEQ ID NO: 249343
  chr1:203192503-203192734
  hypo

SEQ ID NO: 428017 - DNA, 153 bp, Homo sapiens; identical to SEQ ID NO: 249346
  chr1:203455859-203456012
  hypo

SEQ ID NO: 428018 - DNA, 214 bp, Homo sapiens; identical to SEQ ID NO: 249347
  chr1:203524540-203524754
  hypo

SEQ ID NO: 428019 - DNA, 66 bp, Homo sapiens; identical to SEQ ID NO: 61485
  chr1:203525916-203525982
  hypo

SEQ ID NO: 428020 - DNA, 114 bp, Homo sapiens; identical to SEQ ID NO: 385105
  chr1:203690678-203690792
  hypo

SEQ ID NO: 428021 - DNA, 147 bp, Homo sapiens; identical to SEQ ID NO: 249350
  chr1:203708780-203708927
  hypo

SEQ ID NO: 428022 - DNA, 161 bp, Homo sapiens; identical to SEQ ID NO: 249351
  chr1:204003761-204003922
  hypo

SEQ ID NO: 428023 - DNA, 1003 bp, Homo sapiens; identical to SEQ ID NO: 197918
  chr1:204043134-204044137
  hypo

SEQ ID NO: 428024 - DNA, 283 bp, Homo sapiens; identical to SEQ ID NO: 249352
  chr1:204093885-204094168
  hypo

SEQ ID NO: 428025 - DNA, 76 bp, Homo sapiens; identical to SEQ ID NO: 249353
  chr1:204123782-204123858
  hypo

SEQ ID NO: 428026 - DNA, 38 bp, Homo sapiens; identical to SEQ ID NO: 249354
  chr1:204124154-204124192
  hypo

SEQ ID NO: 428027 - DNA, 35 bp, Homo sapiens; identical to SEQ ID NO: 249356
  chr1:204137844-204137879
  hypo

SEQ ID NO: 428028 - DNA, 34 bp, Homo sapiens; identical to SEQ ID NO: 249357
  chr1:204166951-204166985
  hypo

SEQ ID NO: 428029 - DNA, 58 bp, Homo sapiens; identical to SEQ ID NO: 207398
  chr1:204212336-204212394
  hypo

SEQ ID NO: 428030 - DNA, 103 bp, Homo sapiens; identical to SEQ ID NO: 207399
  chr1:204217170-204217273
  hypo

SEQ ID NO: 428031 - DNA, 52 bp, Homo sapiens; identical to SEQ ID NO: 249363
  chr1:204217934-204217986
  hypo

SEQ ID NO: 428032 - DNA, 100 bp, Homo sapiens; identical to SEQ ID NO: 249366
  chr1:204299942-204300042
  hypo

SEQ ID NO: 428033 - DNA, 165 bp, Homo sapiens; identical to SEQ ID NO: 249367
  chr1:204346113-204346278
  hypo

SEQ ID NO: 428034 - DNA, 193 bp, Homo sapiens; identical to SEQ ID NO: 249368
  chr1:204407991-204408184
  hypo

SEQ ID NO: 428035 - DNA, 250 bp, Homo sapiens; identical to SEQ ID NO: 249369
  chr1:204424236-204424486
  hypo

SEQ ID NO: 428036 - DNA, 43 bp, Homo sapiens; identical to SEQ ID NO: 207404
  chr1:204486800-204486843
  hypo

SEQ ID NO: 428037 - DNA, 43 bp, Homo sapiens; identical to SEQ ID NO: 207405
  chr1:204487138-204487181
  hypo

SEQ ID NO: 428038 - DNA, 105 bp, Homo sapiens; identical to SEQ ID NO: 197922
  chr1:204487763-204487868
  hypo

SEQ ID NO: 428039 - DNA, 120 bp, Homo sapiens; identical to SEQ ID NO: 249372
  chr1:204493508-204493628
  hypo

SEQ ID NO: 428040 - DNA, 200 bp, Homo sapiens; identical to SEQ ID NO: 279200
  chr1:204518656-204518856
  hypo

SEQ ID NO: 428041 - DNA, 100 bp, Homo sapiens; identical to SEQ ID NO: 249378
  chr1:204607424-204607524
  hypo

SEQ ID NO: 428042 - DNA, 103 bp, Homo sapiens; identical to SEQ ID NO: 249379
  chr1:204665810-204665913
  hypo

SEQ ID NO: 428043 - DNA, 195 bp, Homo sapiens; identical to SEQ ID NO: 249382
  chr1:204915799-204915994
  hypo

SEQ ID NO: 428044 - DNA, 212 bp, Homo sapiens; identical to SEQ ID NO: 249384
  chr1:204950968-204951180
  hypo

SEQ ID NO: 428045 - DNA, 199 bp, Homo sapiens; identical to SEQ ID NO: 207412
  chr1:204954945-204955144
  hypo

SEQ ID NO: 428046 - DNA, 45 bp, Homo sapiens; identical to SEQ ID NO: 249388
  chr1:205144484-205144529
  hypo

SEQ ID NO: 428047 - DNA, 41 bp, Homo sapiens; identical to SEQ ID NO: 249389
  chr1:205186851-205186892
  hypo

SEQ ID NO: 428048 - DNA, 101 bp, Homo sapiens; identical to SEQ ID NO: 249390
  chr1:205210756-205210857
  hypo

SEQ ID NO: 428049 - DNA, 70 bp, Homo sapiens; identical to SEQ ID NO: 249391
  chr1:205238244-205238314
  hypo

SEQ ID NO: 428050 - DNA, 32 bp, Homo sapiens; identical to SEQ ID NO: 207415
  chr1:205269967-205269999
  hypo

SEQ ID NO: 428051 - DNA, 48 bp, Homo sapiens; identical to SEQ ID NO: 249396
  chr1:205476129-205476177
  hypo

SEQ ID NO: 428052 - DNA, 153 bp, Homo sapiens; identical to SEQ ID NO: 298254
  chr1:205548953-205549106
  hypo

SEQ ID NO: 428053 - DNA, 145 bp, Homo sapiens; identical to SEQ ID NO: 249399
  chr1:205631578-205631723
  hypo

SEQ ID NO: 428054 - DNA, 139 bp, Homo sapiens; identical to SEQ ID NO: 197928
  chr1:205721778-205721917
  hypo

SEQ ID NO: 428055 - DNA, 123 bp, Homo sapiens; identical to SEQ ID NO: 207421
  chr1:207087070-207087193
  hypo

SEQ ID NO: 428056 - DNA, 189 bp, Homo sapiens; identical to SEQ ID NO: 207422
  chr1:207088568-207088757
  hypo

SEQ ID NO: 428057 - DNA, 98 bp, Homo sapiens; identical to SEQ ID NO: 249404
  chr1:207105076-207105174
  hypo

SEQ ID NO: 428058 - DNA, 183 bp, Homo sapiens; identical to SEQ ID NO: 249405
  chr1:207130059-207130242
  hypo

SEQ ID NO: 428059 - DNA, 140 bp, Homo sapiens; identical to SEQ ID NO: 207423
  chr1:207182657-207182797
  hypo

SEQ ID NO: 428060 - DNA, 93 bp, Homo sapiens; identical to SEQ ID NO: 298266
  chr1:207227084-207227177
  hypo

SEQ ID NO: 428061 - DNA, 73 bp, Homo sapiens; identical to SEQ ID NO: 207427
  chr1:207227556-207227629
  hypo

SEQ ID NO: 428062 - DNA, 104 bp, Homo sapiens; identical to SEQ ID NO: 249412
  chr1:207405710-207405814
  hypo

SEQ ID NO: 428063 - DNA, 153 bp, Homo sapiens; identical to SEQ ID NO: 207428
  chr1:207478915-207479068
  hypo

SEQ ID NO: 428064 - DNA, 223 bp, Homo sapiens; identical to SEQ ID NO: 249414
  chr1:207596170-207596393
  hypo

SEQ ID NO: 428065 - DNA, 102 bp, Homo sapiens; identical to SEQ ID NO: 249415
  chr1:207596453-207596555
  hypo

SEQ ID NO: 428066 - DNA, 108 bp, Homo sapiens; identical to SEQ ID NO: 249416
  chr1:207819222-207819330
  hypo

SEQ ID NO: 428067 - DNA, 36 bp, Homo sapiens; identical to SEQ ID NO: 249417
  chr1:207880637-207880673
  hypo

SEQ ID NO: 428068 - DNA, 37 bp, Homo sapiens; identical to SEQ ID NO: 207429
  chr1:207963085-207963122
  hypo

SEQ ID NO: 428069 - DNA, 41 bp, Homo sapiens; identical to SEQ ID NO: 249422
  chr1:207974074-207974115
  hypo

SEQ ID NO: 428070 - DNA, 60 bp, Homo sapiens; identical to SEQ ID NO: 207430
  chr1:207991594-207991654
  hypo

SEQ ID NO: 428071 - DNA, 199 bp, Homo sapiens; identical to SEQ ID NO: 298279
  chr1:207991753-207991952
  hypo

SEQ ID NO: 428072 - DNA, 282 bp, Homo sapiens; identical to SEQ ID NO: 249425
  chr1:207994389-207994671
  hypo

SEQ ID NO: 428073 - DNA, 208 bp, Homo sapiens; identical to SEQ ID NO: 279219
  chr1:207995189-207995397
  hypo

SEQ ID NO: 428074 - DNA, 212 bp, Homo sapiens; identical to SEQ ID NO: 207432
  chr1:208212991-208213203
  hypo

SEQ ID NO: 428075 - DNA, 78 bp, Homo sapiens; identical to SEQ ID NO: 249428
  chr1:208229181-208229259
  hypo

SEQ ID NO: 428076 - DNA, 109 bp, Homo sapiens; identical to SEQ ID NO: 249429
  chr1:208231748-208231857
  hypo

SEQ ID NO: 428077 - DNA, 165 bp, Homo sapiens; identical to SEQ ID NO: 249430
  chr1:208328464-208328629
  hypo

SEQ ID NO: 428078 - DNA, 751 bp, Homo sapiens; identical to SEQ ID NO: 249431
  chr1:208404328-208405079
  hypo

SEQ ID NO: 428079 - DNA, 530 bp, Homo sapiens; identical to SEQ ID NO: 197931
  chr1:208416772-208417302
  hypo

SEQ ID NO: 428080 - DNA, 150 bp, Homo sapiens; identical to SEQ ID NO: 197932
  chr1:208418636-208418786
  hypo

SEQ ID NO: 428081 - DNA, 34 bp, Homo sapiens; identical to SEQ ID NO: 249432
  chr1:208441467-208441501
  hypo

SEQ ID NO: 428082 - DNA, 38 bp, Homo sapiens; identical to SEQ ID NO: 207436
  chr1:208837628-208837666
  hypo

SEQ ID NO: 428083 - DNA, 147 bp, Homo sapiens; identical to SEQ ID NO: 249434
  chr1:209014977-209015124
  hypo

SEQ ID NO: 428084 - DNA, 223 bp, Homo sapiens; identical to SEQ ID NO: 249435
  chr1:209187689-209187912
  hypo

SEQ ID NO: 428085 - DNA, 40 bp, Homo sapiens; identical to SEQ ID NO: 249436
  chr1:209556781-209556821
  hypo

SEQ ID NO: 428086 - DNA, 197 bp, Homo sapiens; identical to SEQ ID NO: 249437
  chr1:209803089-209803286
  hypo

SEQ ID NO: 428087 - DNA, 51 bp, Homo sapiens; identical to SEQ ID NO: 249438
  chr1:209823346-209823397
  hypo

SEQ ID NO: 428088 - DNA, 96 bp, Homo sapiens; identical to SEQ ID NO: 249440
  chr1:209989431-209989527
  hypo

SEQ ID NO: 428089 - DNA, 40 bp, Homo sapiens; identical to SEQ ID NO: 249442
  chr1:210002384-210002424
  hypo

SEQ ID NO: 428090 - DNA, 120 bp, Homo sapiens; identical to SEQ ID NO: 207437
  chr1:210032048-210032168
  hypo

SEQ ID NO: 428091 - DNA, 254 bp, Homo sapiens; identical to SEQ ID NO: 197936
  chr1:210465689-210465943
  hypo

SEQ ID NO: 428092 - DNA, 133 bp, Homo sapiens; identical to SEQ ID NO: 197937
  chr1:210466012-210466145
  hypo

SEQ ID NO: 428093 - DNA, 113 bp, Homo sapiens; identical to SEQ ID NO: 249444
  chr1:210495070-210495183
  hypo

SEQ ID NO: 428094 - DNA, 46 bp, Homo sapiens; identical to SEQ ID NO: 207440
  chr1:210560011-210560057
  hypo

SEQ ID NO: 428095 - DNA, 148 bp, Homo sapiens; identical to SEQ ID NO: 249446
  chr1:210637837-210637985
  hypo

SEQ ID NO: 428096 - DNA, 42 bp, Homo sapiens; identical to SEQ ID NO: 249447
  chr1:210699157-210699199
  hypo

SEQ ID NO: 428097 - DNA, 31 bp, Homo sapiens; identical to SEQ ID NO: 207441
  chr1:210714466-210714497
  hypo

SEQ ID NO: 428098 - DNA, 691 bp, Homo sapiens; identical to SEQ ID NO: 249449
  chr1:210856748-210857439
  hypo

SEQ ID NO: 428099 - DNA, 105 bp, Homo sapiens; identical to SEQ ID NO: 249450
  chr1:211430456-211430561
  hypo

SEQ ID NO: 428100 - DNA, 76 bp, Homo sapiens; identical to SEQ ID NO: 249451
  chr1:211606711-211606787
  hypo

SEQ ID NO: 428101 - DNA, 242 bp, Homo sapiens; identical to SEQ ID NO: 249452
  chr1:211712704-211712946
  hypo

SEQ ID NO: 428102 - DNA, 77 bp, Homo sapiens; identical to SEQ ID NO: 249453
  chr1:211801003-211801080
  hypo

SEQ ID NO: 428103 - DNA, 70 bp, Homo sapiens; identical to SEQ ID NO: 249454
  chr1:211824879-211824949
  hypo

SEQ ID NO: 428104 - DNA, 767 bp, Homo sapiens; identical to SEQ ID NO: 197938
  chr1:212003416-212004183
  hypo

SEQ ID NO: 428105 - DNA, 52 bp, Homo sapiens; identical to SEQ ID NO: 249455
  chr1:212120899-212120951
  hypo

SEQ ID NO: 428106 - DNA, 166 bp, Homo sapiens; identical to SEQ ID NO: 249456
  chr1:212178248-212178414
  hypo

SEQ ID NO: 428107 - DNA, 33 bp, Homo sapiens; identical to SEQ ID NO: 207444
  chr1:212321601-212321634
  hypo

SEQ ID NO: 428108 - DNA, 44 bp, Homo sapiens; identical to SEQ ID NO: 207445
  chr1:212456677-212456721
  hypo

SEQ ID NO: 428109 - DNA, 39 bp, Homo sapiens; identical to SEQ ID NO: 207446
  chr1:212555382-212555421
  hypo

SEQ ID NO: 428110 - DNA, 39 bp, Homo sapiens; identical to SEQ ID NO: 207447
  chr1:212555661-212555700
  hypo

SEQ ID NO: 428111 - DNA, 40 bp, Homo sapiens; identical to SEQ ID NO: 402255
  chr1:212605273-212605313
  hypo

SEQ ID NO: 428112 - DNA, 209 bp, Homo sapiens; identical to SEQ ID NO: 249463
  chr1:212647420-212647629
  hypo

SEQ ID NO: 428113 - DNA, 42 bp, Homo sapiens; identical to SEQ ID NO: 249466
  chr1:213117545-213117587
  hypo

SEQ ID NO: 428114 - DNA, 204 bp, Homo sapiens; identical to SEQ ID NO: 249467
  chr1:213134379-213134583
  hypo

SEQ ID NO: 428115 - DNA, 35 bp, Homo sapiens; identical to SEQ ID NO: 249469
  chr1:214503108-214503143
  hypo

SEQ ID NO: 428116 - DNA, 226 bp, Homo sapiens; identical to SEQ ID NO: 249470
  chr1:214503350-214503576
  hypo

SEQ ID NO: 428117 - DNA, 762 bp, Homo sapiens; identical to SEQ ID NO: 207451
  chr1:214556792-214557554
  hypo

SEQ ID NO: 428118 - DNA, 38 bp, Homo sapiens; identical to SEQ ID NO: 249472
  chr1:214557876-214557914
  hypo

SEQ ID NO: 428119 - DNA, 124 bp, Homo sapiens; identical to SEQ ID NO: 249473
  chr1:214566283-214566407
  hypo

SEQ ID NO: 428120 - DNA, 189 bp, Homo sapiens; identical to SEQ ID NO: 249474
  chr1:214569256-214569445
  hypo

SEQ ID NO: 428121 - DNA, 32 bp, Homo sapiens; identical to SEQ ID NO: 390334
  chr1:214638124-214638156
  hypo

SEQ ID NO: 428122 - DNA, 51 bp, Homo sapiens; identical to SEQ ID NO: 207454
  chr1:214638186-214638237
  hypo

SEQ ID NO: 428123 - DNA, 200 bp, Homo sapiens; identical to SEQ ID NO: 249477
  chr1:214662584-214662784
  hypo

SEQ ID NO: 428124 - DNA, 209 bp, Homo sapiens; identical to SEQ ID NO: 207455
  chr1:214788823-214789032
  hypo

SEQ ID NO: 428125 - DNA, 99 bp, Homo sapiens; identical to SEQ ID NO: 249480
  chr1:214819261-214819360
  hypo

SEQ ID NO: 428126 - DNA, 351 bp, Homo sapiens; identical to SEQ ID NO: 279272
  chr1:215740687-215741038
  hypo

SEQ ID NO: 428127 - DNA, 31 bp, Homo sapiens; identical to SEQ ID NO: 226531
  chr1:215744970-215745001
  hypo

SEQ ID NO: 428128 - DNA, 90 bp, Homo sapiens; identical to SEQ ID NO: 207458
  chr1:215745301-215745391
  hypo

SEQ ID NO: 428129 - DNA, 38 bp, Homo sapiens; identical to SEQ ID NO: 207463
  chr1:220376260-220376298
  hypo

SEQ ID NO: 428130 - DNA, 37 bp, Homo sapiens; identical to SEQ ID NO: 207464
  chr1:220426847-220426884
  hypo

SEQ ID NO: 428131 - DNA, 56 bp, Homo sapiens; identical to SEQ ID NO: 415682
  chr1:220921312-220921368
  hypo

SEQ ID NO: 428132 - DNA, 378 bp, Homo sapiens; identical to SEQ ID NO: 249488
  chr1:221060168-221060546
  hypo

SEQ ID NO: 428133 - DNA, 45 bp, Homo sapiens; identical to SEQ ID NO: 249489
  chr1:221660546-221660591
  hypo

SEQ ID NO: 428134 - DNA, 116 bp, Homo sapiens; identical to SEQ ID NO: 249490
  chr1:221910203-221910319
  hypo

SEQ ID NO: 428135 - DNA, 42 bp, Homo sapiens; identical to SEQ ID NO: 207467
  chr1:222222865-222222907
  hypo

SEQ ID NO: 428136 - DNA, 195 bp, Homo sapiens; identical to SEQ ID NO: 207468
  chr1:222260739-222260934
  hypo

SEQ ID NO: 428137 - DNA, 254 bp, Homo sapiens; identical to SEQ ID NO: 249493
  chr1:222910923-222911177
  hypo

SEQ ID NO: 428138 - DNA, 44 bp, Homo sapiens; identical to SEQ ID NO: 207469
  chr1:223003690-223003734
  hypo

SEQ ID NO: 428139 - DNA, 405 bp, Homo sapiens; identical to SEQ ID NO: 249495
  chr1:223210752-223211157
  hypo

SEQ ID NO: 428140 - DNA, 385 bp, Homo sapiens; identical to SEQ ID NO: 249496
  chr1:223211666-223212051
  hypo

SEQ ID NO: 428141 - DNA, 187 bp, Homo sapiens; identical to SEQ ID NO: 207471
  chr1:223257415-223257602
  hypo

SEQ ID NO: 428142 - DNA, 198 bp, Homo sapiens; identical to SEQ ID NO: 197968
  chr1:223307128-223307326
  hypo

SEQ ID NO: 428143 - DNA, 142 bp, Homo sapiens; identical to SEQ ID NO: 249498
  chr1:223315690-223315832
  hypo

SEQ ID NO: 428144 - DNA, 212 bp, Homo sapiens; identical to SEQ ID NO: 279301
  chr1:223537946-223538158
  hypo

SEQ ID NO: 428145 - DNA, 86 bp, Homo sapiens; identical to SEQ ID NO: 197969
  chr1:223538641-223538727
  hypo

SEQ ID NO: 428146 - DNA, 164 bp, Homo sapiens; identical to SEQ ID NO: 207474
  chr1:223813496-223813660
  hypo

SEQ ID NO: 428147 - DNA, 56 bp, Homo sapiens; identical to SEQ ID NO: 207475
  chr1:223853104-223853160
  hypo

SEQ ID NO: 428148 - DNA, 198 bp, Homo sapiens; identical to SEQ ID NO: 207476
  chr1:223888417-223888615
  hypo

SEQ ID NO: 428149 - DNA, 100 bp, Homo sapiens; identical to SEQ ID NO: 207477
  chr1:223894433-223894533
  hypo

SEQ ID NO: 428150 - DNA, 775 bp, Homo sapiens; identical to SEQ ID NO: 279303
  chr1:223899911-223900686
  hypo

SEQ ID NO: 428151 - DNA, 42 bp, Homo sapiens; identical to SEQ ID NO: 249504
  chr1:223908289-223908331
  hypo

SEQ ID NO: 428152 - DNA, 63 bp, Homo sapiens; identical to SEQ ID NO: 298372
  chr1:223927891-223927954
  hypo

SEQ ID NO: 428153 - DNA, 61 bp, Homo sapiens; identical to SEQ ID NO: 249507
  chr1:223953251-223953312
  hypo

SEQ ID NO: 428154 - DNA, 104 bp, Homo sapiens; identical to SEQ ID NO: 207479
  chr1:224051404-224051508
  hypo

SEQ ID NO: 428155 - DNA, 139 bp, Homo sapiens; identical to SEQ ID NO: 207481
  chr1:224300563-224300702
  hypo

SEQ ID NO: 428156 - DNA, 89 bp, Homo sapiens; identical to SEQ ID NO: 249514
  chr1:224400597-224400686
  hypo

SEQ ID NO: 428157 - DNA, 34 bp, Homo sapiens; identical to SEQ ID NO: 249515
  chr1:224447975-224448009
  hypo

SEQ ID NO: 428158 - DNA, 85 bp, Homo sapiens; identical to SEQ ID NO: 221583
  chr1:224481061-224481146
  hypo

SEQ ID NO: 428159 - DNA, 164 bp, Homo sapiens; identical to SEQ ID NO: 249516
  chr1:224487331-224487495
  hypo

SEQ ID NO: 428160 - DNA, 43 bp, Homo sapiens; identical to SEQ ID NO: 249517
  chr1:224490849-224490892
  hypo

SEQ ID NO: 428161 - DNA, 34 bp, Homo sapiens; identical to SEQ ID NO: 197974
  chr1:224622766-224622800
  hypo

SEQ ID NO: 428162 - DNA, 250 bp, Homo sapiens; identical to SEQ ID NO: 197975
  chr1:224691180-224691430
  hypo

SEQ ID NO: 428163 - DNA, 49 bp, Homo sapiens; identical to SEQ ID NO: 207486
  chr1:225113074-225113123
  hypo

SEQ ID NO: 428164 - DNA, 33 bp, Homo sapiens; identical to SEQ ID NO: 207491
  chr1:225608023-225608056
  hypo

SEQ ID NO: 428165 - DNA, 243 bp, Homo sapiens; identical to SEQ ID NO: 207493
  chr1:225637174-225637417
  hypo

SEQ ID NO: 428166 - DNA, 45 bp, Homo sapiens; identical to SEQ ID NO: 249523
  chr1:225696995-225697040
  hypo

SEQ ID NO: 428167 - DNA, 92 bp, Homo sapiens; identical to SEQ ID NO: 249524
  chr1:225907936-225908028
  hypo

SEQ ID NO: 428168 - DNA, 92 bp, Homo sapiens; identical to SEQ ID NO: 249525
  chr1:225908328-225908420
  hypo

SEQ ID NO: 428169 - DNA, 82 bp, Homo sapiens; identical to SEQ ID NO: 249526
  chr1:225920484-225920566
  hypo

SEQ ID NO: 428170 - DNA, 43 bp, Homo sapiens; identical to SEQ ID NO: 249527
  chr1:225945260-225945303
  hypo

SEQ ID NO: 428171 - DNA, 36 bp, Homo sapiens; identical to SEQ ID NO: 249528
  chr1:225956132-225956168
  hypo

SEQ ID NO: 428172 - DNA, 78 bp, Homo sapiens; identical to SEQ ID NO: 207494
  chr1:225988363-225988441
  hypo

SEQ ID NO: 428173 - DNA, 50 bp, Homo sapiens; identical to SEQ ID NO: 221589
  chr1:225998107-225998157
  hypo

SEQ ID NO: 428174 - DNA, 55 bp, Homo sapiens; identical to SEQ ID NO: 249530
  chr1:226026645-226026700
  hypo

SEQ ID NO: 428175 - DNA, 108 bp, Homo sapiens; identical to SEQ ID NO: 207495
  chr1:226053432-226053540
  hypo

SEQ ID NO: 428176 - DNA, 130 bp, Homo sapiens; identical to SEQ ID NO: 249532
  chr1:226059446-226059576
  hypo

SEQ ID NO: 428177 - DNA, 390 bp, Homo sapiens; identical to SEQ ID NO: 249534
  chr1:226076321-226076711
  hypo

SEQ ID NO: 428178 - DNA, 147 bp, Homo sapiens; identical to SEQ ID NO: 207498
  chr1:226102816-226102963
  hypo

SEQ ID NO: 428179 - DNA, 158 bp, Homo sapiens; identical to SEQ ID NO: 207499
  chr1:226109458-226109616
  hypo

SEQ ID NO: 428180 - DNA, 126 bp, Homo sapiens; identical to SEQ ID NO: 207500
  chr1:226109706-226109832
  hypo

SEQ ID NO: 428181 - DNA, 171 bp, Homo sapiens; identical to SEQ ID NO: 197982
  chr1:226297380-226297551
  hypo

SEQ ID NO: 428182 - DNA, 35 bp, Homo sapiens; identical to SEQ ID NO: 249539
  chr1:226304036-226304071
  hypo

SEQ ID NO: 428183 - DNA, 35 bp, Homo sapiens; identical to SEQ ID NO: 249540
  chr1:226310959-226310994
  hypo

SEQ ID NO: 428184 - DNA, 148 bp, Homo sapiens; identical to SEQ ID NO: 279326
  chr1:226497226-226497374
  hypo

SEQ ID NO: 428185 - DNA, 56 bp, Homo sapiens; identical to SEQ ID NO: 221594
  chr1:226497394-226497450
  hypo

SEQ ID NO: 428186 - DNA, 204 bp, Homo sapiens; identical to SEQ ID NO: 249543
  chr1:226596303-226596507
  hypo

SEQ ID NO: 428187 - DNA, 342 bp, Homo sapiens; identical to SEQ ID NO: 207503
  chr1:226789939-226790281
  hypo

SEQ ID NO: 428188 - DNA, 152 bp, Homo sapiens; identical to SEQ ID NO: 249548
  chr1:226833941-226834093
  hypo

SEQ ID NO: 428189 - DNA, 69 bp, Homo sapiens; identical to SEQ ID NO: 249549
  chr1:226834885-226834954
  hypo

SEQ ID NO: 428190 - DNA, 98 bp, Homo sapiens; identical to SEQ ID NO: 249552
  chr1:226910144-226910242
  hypo

SEQ ID NO: 428191 - DNA, 144 bp, Homo sapiens; identical to SEQ ID NO: 249553
  chr1:226941995-226942139
  hypo

SEQ ID NO: 428192 - DNA, 71 bp, Homo sapiens; identical to SEQ ID NO: 221598
  chr1:227058816-227058887
  hypo

SEQ ID NO: 428193 - DNA, 121 bp, Homo sapiens; identical to SEQ ID NO: 207507
  chr1:227175823-227175944
  hypo

SEQ ID NO: 428194 - DNA, 195 bp, Homo sapiens; identical to SEQ ID NO: 249555
  chr1:227191027-227191222
  hypo

SEQ ID NO: 428195 - DNA, 82 bp, Homo sapiens; identical to SEQ ID NO: 207508
  chr1:227248038-227248120
  hypo

SEQ ID NO: 428196 - DNA, 171 bp, Homo sapiens; identical to SEQ ID NO: 249557
  chr1:227370569-227370740
  hypo

SEQ ID NO: 428197 - DNA, 44 bp, Homo sapiens; identical to SEQ ID NO: 207509
  chr1:227376422-227376466
  hypo

SEQ ID NO: 428198 - DNA, 35 bp, Homo sapiens; identical to SEQ ID NO: 249559
  chr1:227383163-227383198
  hypo

SEQ ID NO: 428199 - DNA, 119 bp, Homo sapiens; identical to SEQ ID NO: 207510
  chr1:227422355-227422474
  hypo

SEQ ID NO: 428200 - DNA, 34 bp, Homo sapiens; identical to SEQ ID NO: 207511
  chr1:227463301-227463335
  hypo

SEQ ID NO: 428201 - DNA, 152 bp, Homo sapiens; identical to SEQ ID NO: 249562
  chr1:227488575-227488727
  hypo

SEQ ID NO: 428202 - DNA, 210 bp, Homo sapiens; identical to SEQ ID NO: 207512
  chr1:227618270-227618480
  hypo

SEQ ID NO: 428203 - DNA, 205 bp, Homo sapiens; identical to SEQ ID NO: 197990
  chr1:227652539-227652744
  hypo

SEQ ID NO: 428204 - DNA, 181 bp, Homo sapiens; identical to SEQ ID NO: 249565
  chr1:227947116-227947297
  hypo

SEQ ID NO: 428205 - DNA, 204 bp, Homo sapiens; identical to SEQ ID NO: 207514
  chr1:227948693-227948897
  hypo

SEQ ID NO: 428206 - DNA, 204 bp, Homo sapiens; identical to SEQ ID NO: 249568
  chr1:227961299-227961503
  hypo

SEQ ID NO: 428207 - DNA, 747 bp, Homo sapiens; identical to SEQ ID NO: 207515
  chr1:227962631-227963378
  hypo

SEQ ID NO: 428208 - DNA, 78 bp, Homo sapiens; identical to SEQ ID NO: 207516
  chr1:228003875-228003953
  hypo

SEQ ID NO: 428209 - DNA, 84 bp, Homo sapiens; identical to SEQ ID NO: 249571
  chr1:228079084-228079168
  hypo

SEQ ID NO: 428210 - DNA, 45 bp, Homo sapiens; identical to SEQ ID NO: 249574
  chr1:228092976-228093021
  hypo

SEQ ID NO: 428211 - DNA, 32 bp, Homo sapiens; identical to SEQ ID NO: 207519
  chr1:228111802-228111834
  hypo

SEQ ID NO: 428212 - DNA, 354 bp, Homo sapiens; identical to SEQ ID NO: 249579
  chr1:228126652-228127006
  hypo

SEQ ID NO: 428213 - DNA, 216 bp, Homo sapiens; identical to SEQ ID NO: 197992
  chr1:228134891-228135107
  hypo

SEQ ID NO: 428214 - DNA, 207 bp, Homo sapiens; identical to SEQ ID NO: 197993
  chr1:228135899-228136106
  hypo

SEQ ID NO: 428215 - DNA, 119 bp, Homo sapiens; identical to SEQ ID NO: 197994
  chr1:228136152-228136271
  hypo

SEQ ID NO: 428216 - DNA, 149 bp, Homo sapiens; identical to SEQ ID NO: 279347
  chr1:228193977-228194126
  hypo

SEQ ID NO: 428217 - DNA, 95 bp, Homo sapiens; identical to SEQ ID NO: 298460
  chr1:228201126-228201221
  hypo

SEQ ID NO: 428218 - DNA, 70 bp, Homo sapiens; identical to SEQ ID NO: 249581
  chr1:228266733-228266803
  hypo

SEQ ID NO: 428219 - DNA, 89 bp, Homo sapiens; identical to SEQ ID NO: 249582
  chr1:228280525-228280614
  hypo

SEQ ID NO: 428220 - DNA, 142 bp, Homo sapiens; identical to SEQ ID NO: 249584
  chr1:228282125-228282267
  hypo

SEQ ID NO: 428221 - DNA, 65 bp, Homo sapiens; identical to SEQ ID NO: 249585
  chr1:228285354-228285419
  hypo

SEQ ID NO: 428222 - DNA, 356 bp, Homo sapiens; identical to SEQ ID NO: 249586
  chr1:228295266-228295622
  hypo

SEQ ID NO: 428223 - DNA, 36 bp, Homo sapiens; identical to SEQ ID NO: 207526
  chr1:228322365-228322401
  hypo

SEQ ID NO: 428224 - DNA, 200 bp, Homo sapiens; identical to SEQ ID NO: 207527
  chr1:228322431-228322631
  hypo

SEQ ID NO: 428225 - DNA, 36 bp, Homo sapiens; identical to SEQ ID NO: 298469
  chr1:228342784-228342820
  hypo

SEQ ID NO: 428226 - DNA, 205 bp, Homo sapiens; identical to SEQ ID NO: 298470
  chr1:228342850-228343055
  hypo

SEQ ID NO: 428227 - DNA, 42 bp, Homo sapiens; identical to SEQ ID NO: 249590
  chr1:228406668-228406710
  hypo

SEQ ID NO: 428228 - DNA, 302 bp, Homo sapiens; identical to SEQ ID NO: 279353
  chr1:228444468-228444770
  hypo

SEQ ID NO: 428229 - DNA, 76 bp, Homo sapiens; identical to SEQ ID NO: 298475
  chr1:228461082-228461158
  hypo

SEQ ID NO: 428230 - DNA, 94 bp, Homo sapiens; identical to SEQ ID NO: 249595
  chr1:228464861-228464955
  hypo

SEQ ID NO: 428231 - DNA, 330 bp, Homo sapiens; identical to SEQ ID NO: 207530
  chr1:228465319-228465649
  hypo

SEQ ID NO: 428232 - DNA, 40 bp, Homo sapiens; identical to SEQ ID NO: 298479
  chr1:228466467-228466507
  hypo

SEQ ID NO: 428233 - DNA, 267 bp, Homo sapiens; identical to SEQ ID NO: 298480
  chr1:228466537-228466804
  hypo

SEQ ID NO: 428234 - DNA, 254 bp, Homo sapiens; identical to SEQ ID NO: 249598
  chr1:228468385-228468639
  hypo

SEQ ID NO: 428235 - DNA, 112 bp, Homo sapiens; identical to SEQ ID NO: 249600
  chr1:228475449-228475561
  hypo

SEQ ID NO: 428236 - DNA, 559 bp, Homo sapiens; identical to SEQ ID NO: 249601
  chr1:228477493-228478052
  hypo

SEQ ID NO: 428237 - DNA, 57 bp, Homo sapiens; identical to SEQ ID NO: 249602
  chr1:228479782-228479839
  hypo

SEQ ID NO: 428238 - DNA, 98 bp, Homo sapiens; identical to SEQ ID NO: 249603
  chr1:228481995-228482093
  hypo

SEQ ID NO: 428239 - DNA, 43 bp, Homo sapiens; identical to SEQ ID NO: 249604
  chr1:228494680-228494723
  hypo

SEQ ID NO: 428240 - DNA, 397 bp, Homo sapiens; identical to SEQ ID NO: 249606
  chr1:228509315-228509712
  hypo

SEQ ID NO: 428241 - DNA, 234 bp, Homo sapiens; identical to SEQ ID NO: 249607
  chr1:228526490-228526724
  hypo

SEQ ID NO: 428242 - DNA, 60 bp, Homo sapiens; identical to SEQ ID NO: 249609
  chr1:228529845-228529905
  hypo

SEQ ID NO: 428243 - DNA, 118 bp, Homo sapiens; identical to SEQ ID NO: 249610
  chr1:228542268-228542386
  hypo

SEQ ID NO: 428244 - DNA, 91 bp, Homo sapiens; identical to SEQ ID NO: 207537
  chr1:228552502-228552593
  hypo

SEQ ID NO: 428245 - DNA, 82 bp, Homo sapiens; identical to SEQ ID NO: 207538
  chr1:228552623-228552705
  hypo

SEQ ID NO: 428246 - DNA, 190 bp, Homo sapiens; identical to SEQ ID NO: 249612
  chr1:228553842-228554032
  hypo

SEQ ID NO: 428247 - DNA, 44 bp, Homo sapiens; identical to SEQ ID NO: 298499
  chr1:228559963-228560007
  hypo

SEQ ID NO: 428248 - DNA, 51 bp, Homo sapiens; identical to SEQ ID NO: 279356
  chr1:228566672-228566723
  hypo

SEQ ID NO: 428249 - DNA, 87 bp, Homo sapiens; identical to SEQ ID NO: 279357
  chr1:228566969-228567056
  hypo

SEQ ID NO: 428250 - DNA, 38 bp, Homo sapiens; identical to SEQ ID NO: 249615
  chr1:228613059-228613097
  hypo

SEQ ID NO: 428251 - DNA, 37 bp, Homo sapiens; identical to SEQ ID NO: 249616
  chr1:228614003-228614040
  hypo

SEQ ID NO: 428252 - DNA, 35 bp, Homo sapiens; identical to SEQ ID NO: 249617
  chr1:228857021-228857056
  hypo

SEQ ID NO: 428253 - DNA, 133 bp, Homo sapiens; identical to SEQ ID NO: 207541
  chr1:228919237-228919370
  hypo

SEQ ID NO: 428254 - DNA, 44 bp, Homo sapiens; identical to SEQ ID NO: 207542
  chr1:228919416-228919460
  hypo

SEQ ID NO: 428255 - DNA, 54 bp, Homo sapiens; identical to SEQ ID NO: 207543
  chr1:229073283-229073337
  hypo

SEQ ID NO: 428256 - DNA, 267 bp, Homo sapiens; identical to SEQ ID NO: 207544
  chr1:229104403-229104670
  hypo

SEQ ID NO: 428257 - DNA, 90 bp, Homo sapiens; identical to SEQ ID NO: 249622
  chr1:229136329-229136419
  hypo

SEQ ID NO: 428258 - DNA, 130 bp, Homo sapiens; identical to SEQ ID NO: 207545
  chr1:229155568-229155698
  hypo

SEQ ID NO: 428259 - DNA, 158 bp, Homo sapiens; identical to SEQ ID NO: 207547
  chr1:229202157-229202315
  hypo

SEQ ID NO: 428260 - DNA, 145 bp, Homo sapiens; identical to SEQ ID NO: 249626
  chr1:229223744-229223889
  hypo

SEQ ID NO: 428261 - DNA, 113 bp, Homo sapiens; identical to SEQ ID NO: 249627
  chr1:229230354-229230467
  hypo

SEQ ID NO: 428262 - DNA, 148 bp, Homo sapiens; identical to SEQ ID NO: 207548
  chr1:229252027-229252175
  hypo

SEQ ID NO: 428263 - DNA, 86 bp, Homo sapiens; identical to SEQ ID NO: 249629
  chr1:229256678-229256764
  hypo

SEQ ID NO: 428264 - DNA, 51 bp, Homo sapiens; identical to SEQ ID NO: 249630
  chr1:229438667-229438718
  hypo

SEQ ID NO: 428265 - DNA, 143 bp, Homo sapiens; identical to SEQ ID NO: 207549
  chr1:229462409-229462552
  hypo

SEQ ID NO: 428266 - DNA, 390 bp, Homo sapiens; identical to SEQ ID NO: 249633
  chr1:229644848-229645238
  hypo

SEQ ID NO: 428267 - DNA, 160 bp, Homo sapiens; identical to SEQ ID NO: 249634
  chr1:229677940-229678100
  hypo

SEQ ID NO: 428268 - DNA, 35 bp, Homo sapiens; identical to SEQ ID NO: 207552
  chr1:229678578-229678613
  hypo

SEQ ID NO: 428269 - DNA, 120 bp, Homo sapiens; identical to SEQ ID NO: 249636
  chr1:229853311-229853431
  hypo

SEQ ID NO: 428270 - DNA, 62 bp, Homo sapiens; identical to SEQ ID NO: 249637
  chr1:230080283-230080345
  hypo

SEQ ID NO: 428271 - DNA, 61 bp, Homo sapiens; identical to SEQ ID NO: 249638
  chr1:230213776-230213837
  hypo

SEQ ID NO: 428272 - DNA, 200 bp, Homo sapiens; identical to SEQ ID NO: 207553
  chr1:230219680-230219880
  hypo

SEQ ID NO: 428273 - DNA, 219 bp, Homo sapiens; identical to SEQ ID NO: 198009
  chr1:230223230-230223449
  hypo

SEQ ID NO: 428274 - DNA, 99 bp, Homo sapiens; identical to SEQ ID NO: 249640
  chr1:230250129-230250228
  hypo

SEQ ID NO: 428275 - DNA, 219 bp, Homo sapiens; identical to SEQ ID NO: 249646
  chr1:230378964-230379183
  hypo

SEQ ID NO: 428276 - DNA, 41 bp, Homo sapiens; identical to SEQ ID NO: 207558
  chr1:230393113-230393154
  hypo

SEQ ID NO: 428277 - DNA, 76 bp, Homo sapiens; identical to SEQ ID NO: 207559
  chr1:230393524-230393600
  hypo

SEQ ID NO: 428278 - DNA, 312 bp, Homo sapiens; identical to SEQ ID NO: 249650
  chr1:230398099-230398411
  hypo

SEQ ID NO: 428279 - DNA, 206 bp, Homo sapiens; identical to SEQ ID NO: 249651
  chr1:230399606-230399812
  hypo

SEQ ID NO: 428280 - DNA, 245 bp, Homo sapiens; identical to SEQ ID NO: 249653
  chr1:230415001-230415246
  hypo

SEQ ID NO: 428281 - DNA, 72 bp, Homo sapiens; identical to SEQ ID NO: 298548
  chr1:230453225-230453297
  hypo

SEQ ID NO: 428282 - DNA, 103 bp, Homo sapiens; identical to SEQ ID NO: 298549
  chr1:230453705-230453808
  hypo

SEQ ID NO: 428283 - DNA, 109 bp, Homo sapiens; identical to SEQ ID NO: 249658
  chr1:230827245-230827354
  hypo

SEQ ID NO: 428284 - DNA, 42 bp, Homo sapiens; identical to SEQ ID NO: 249659
  chr1:230841595-230841637
  hypo

SEQ ID NO: 428285 - DNA, 35 bp, Homo sapiens; identical to SEQ ID NO: 249660
  chr1:230870971-230871006
  hypo

SEQ ID NO: 428286 - DNA, 509 bp, Homo sapiens; identical to SEQ ID NO: 249661
  chr1:230882795-230883304
  hypo

SEQ ID NO: 428287 - DNA, 131 bp, Homo sapiens; identical to SEQ ID NO: 249662
  chr1:230887782-230887913
  hypo

SEQ ID NO: 428288 - DNA, 196 bp, Homo sapiens; identical to SEQ ID NO: 249663
  chr1:230888881-230889077
  hypo

SEQ ID NO: 428289 - DNA, 147 bp, Homo sapiens; identical to SEQ ID NO: 249664
  chr1:230894274-230894421
  hypo

SEQ ID NO: 428290 - DNA, 359 bp, Homo sapiens; identical to SEQ ID NO: 207566
  chr1:230898511-230898870
  hypo

SEQ ID NO: 428291 - DNA, 100 bp, Homo sapiens; identical to SEQ ID NO: 249666
  chr1:230928474-230928574
  hypo

SEQ ID NO: 428292 - DNA, 799 bp, Homo sapiens; identical to SEQ ID NO: 249667
  chr1:230979103-230979902
  hypo

SEQ ID NO: 428293 - DNA, 120 bp, Homo sapiens; identical to SEQ ID NO: 207568
  chr1:230980022-230980142
  hypo

SEQ ID NO: 428294 - DNA, 124 bp, Homo sapiens; identical to SEQ ID NO: 249669
  chr1:230986635-230986759
  hypo

SEQ ID NO: 428295 - DNA, 68 bp, Homo sapiens; identical to SEQ ID NO: 249670
  chr1:230988836-230988904
  hypo

SEQ ID NO: 428296 - DNA, 131 bp, Homo sapiens; identical to SEQ ID NO: 298565
  chr1:230992696-230992827
  hypo

SEQ ID NO: 428297 - DNA, 40 bp, Homo sapiens; identical to SEQ ID NO: 207572
  chr1:231127690-231127730
  hypo

SEQ ID NO: 428298 - DNA, 248 bp, Homo sapiens; identical to SEQ ID NO: 298571
  chr1:231162838-231163086
  hypo

SEQ ID NO: 428299 - DNA, 50 bp, Homo sapiens; identical to SEQ ID NO: 249678
  chr1:231163531-231163581
  hypo

SEQ ID NO: 428300 - DNA, 132 bp, Homo sapiens; identical to SEQ ID NO: 249679
  chr1:231401053-231401185
  hypo

SEQ ID NO: 428301 - DNA, 31 bp, Homo sapiens; identical to SEQ ID NO: 207574
  chr1:231409278-231409309
  hypo

SEQ ID NO: 428302 - DNA, 126 bp, Homo sapiens; identical to SEQ ID NO: 207575
  chr1:231475548-231475674
  hypo

SEQ ID NO: 428303 - DNA, 90 bp, Homo sapiens; identical to SEQ ID NO: 207576
  chr1:231476372-231476462
  hypo

SEQ ID NO: 428304 - DNA, 64 bp, Homo sapiens; identical to SEQ ID NO: 249683
  chr1:231713057-231713121
  hypo

SEQ ID NO: 428305 - DNA, 79 bp, Homo sapiens; identical to SEQ ID NO: 249685
  chr1:231820898-231820977
  hypo

SEQ ID NO: 428306 - DNA, 131 bp, Homo sapiens; identical to SEQ ID NO: 249686
  chr1:231893611-231893742
  hypo

SEQ ID NO: 428307 - DNA, 204 bp, Homo sapiens; identical to SEQ ID NO: 207577
  chr1:232192429-232192633
  hypo

SEQ ID NO: 428308 - DNA, 87 bp, Homo sapiens; identical to SEQ ID NO: 249689
  chr1:232466923-232467010
  hypo

SEQ ID NO: 428309 - DNA, 217 bp, Homo sapiens; identical to SEQ ID NO: 249690
  chr1:232551394-232551611
  hypo

SEQ ID NO: 428310 - DNA, 198 bp, Homo sapiens; identical to SEQ ID NO: 207578
  chr1:232566620-232566818
  hypo

SEQ ID NO: 428311 - DNA, 192 bp, Homo sapiens; identical to SEQ ID NO: 249692
  chr1:232568782-232568974
  hypo

SEQ ID NO: 428312 - DNA, 60 bp, Homo sapiens; identical to SEQ ID NO: 207579
  chr1:232649854-232649914
  hypo

SEQ ID NO: 428313 - DNA, 478 bp, Homo sapiens; identical to SEQ ID NO: 415749
  chr1:232766006-232766484
  hypo

SEQ ID NO: 428314 - DNA, 89 bp, Homo sapiens; identical to SEQ ID NO: 249694
  chr1:232889011-232889100
  hypo

SEQ ID NO: 428315 - DNA, 61 bp, Homo sapiens; identical to SEQ ID NO: 207581
  chr1:232909165-232909226
  hypo

SEQ ID NO: 428316 - DNA, 153 bp, Homo sapiens; identical to SEQ ID NO: 249697
  chr1:233116464-233116617
  hypo

SEQ ID NO: 428317 - DNA, 32 bp, Homo sapiens; identical to SEQ ID NO: 207583
  chr1:233264703-233264735
  hypo

SEQ ID NO: 428318 - DNA, 39 bp, Homo sapiens; identical to SEQ ID NO: 249700
  chr1:233601999-233602038
  hypo

SEQ ID NO: 428319 - DNA, 245 bp, Homo sapiens; identical to SEQ ID NO: 249702
  chr1:234342550-234342795
  hypo

SEQ ID NO: 428320 - DNA, 127 bp, Homo sapiens; identical to SEQ ID NO: 249703
  chr1:234452341-234452468
  hypo

SEQ ID NO: 428321 - DNA, 211 bp, Homo sapiens; identical to SEQ ID NO: 207586
  chr1:234541033-234541244
  hypo

SEQ ID NO: 428322 - DNA, 161 bp, Homo sapiens; identical to SEQ ID NO: 207587
  chr1:234541509-234541670
  hypo

SEQ ID NO: 428323 - DNA, 277 bp, Homo sapiens; identical to SEQ ID NO: 249706
  chr1:234587511-234587788
  hypo

SEQ ID NO: 428324 - DNA, 91 bp, Homo sapiens; identical to SEQ ID NO: 249707
  chr1:234604775-234604866
  hypo

SEQ ID NO: 428325 - DNA, 92 bp, Homo sapiens; identical to SEQ ID NO: 298606
  chr1:234621343-234621435
  hypo

SEQ ID NO: 428326 - DNA, 45 bp, Homo sapiens; identical to SEQ ID NO: 249709
  chr1:234690619-234690664
  hypo

SEQ ID NO: 428327 - DNA, 181 bp, Homo sapiens; identical to SEQ ID NO: 207588
  chr1:234691150-234691331
  hypo

SEQ ID NO: 428328 - DNA, 207 bp, Homo sapiens; identical to SEQ ID NO: 249713
  chr1:234797012-234797219
  hypo

SEQ ID NO: 428329 - DNA, 110 bp, Homo sapiens; identical to SEQ ID NO: 249714
  chr1:234808101-234808211
  hypo

SEQ ID NO: 428330 - DNA, 141 bp, Homo sapiens; identical to SEQ ID NO: 198023
  chr1:234828214-234828355
  hypo

SEQ ID NO: 428331 - DNA, 35 bp, Homo sapiens; identical to SEQ ID NO: 249717
  chr1:234863731-234863766
  hypo

SEQ ID NO: 428332 - DNA, 210 bp, Homo sapiens; identical to SEQ ID NO: 249718
  chr1:234868420-234868630
  hypo

SEQ ID NO: 428333 - DNA, 383 bp, Homo sapiens; identical to SEQ ID NO: 249720
  chr1:234869963-234870346
  hypo

SEQ ID NO: 428334 - DNA, 284 bp, Homo sapiens; identical to SEQ ID NO: 207597
  chr1:234871741-234872025
  hypo

SEQ ID NO: 428335 - DNA, 99 bp, Homo sapiens; identical to SEQ ID NO: 207598
  chr1:234893900-234893999
  hypo

SEQ ID NO: 428336 - DNA, 159 bp, Homo sapiens; identical to SEQ ID NO: 207599
  chr1:234895630-234895789
  hypo

SEQ ID NO: 428337 - DNA, 191 bp, Homo sapiens; identical to SEQ ID NO: 207600
  chr1:234957454-234957645
  hypo

SEQ ID NO: 428338 - DNA, 83 bp, Homo sapiens; identical to SEQ ID NO: 298628
  chr1:234964830-234964913
  hypo

SEQ ID NO: 428339 - DNA, 85 bp, Homo sapiens; identical to SEQ ID NO: 249729
  chr1:235036868-235036953
  hypo

SEQ ID NO: 428340 - DNA, 169 bp, Homo sapiens; identical to SEQ ID NO: 207601
  chr1:235037109-235037278
  hypo

SEQ ID NO: 428341 - DNA, 79 bp, Homo sapiens; identical to SEQ ID NO: 207602
  chr1:235042107-235042186
  hypo

SEQ ID NO: 428342 - DNA, 280 bp, Homo sapiens; identical to SEQ ID NO: 207603
  chr1:235044523-235044803
  hypo

SEQ ID NO: 428343 - DNA, 76 bp, Homo sapiens; identical to SEQ ID NO: 207604
  chr1:235067968-235068044
  hypo

SEQ ID NO: 428344 - DNA, 177 bp, Homo sapiens; identical to SEQ ID NO: 207605
  chr1:235129830-235130007
  hypo

SEQ ID NO: 428345 - DNA, 121 bp, Homo sapiens; identical to SEQ ID NO: 298635
  chr1:235260410-235260531
  hypo

SEQ ID NO: 428346 - DNA, 34 bp, Homo sapiens; identical to SEQ ID NO: 298636
  chr1:235260561-235260595
  hypo

SEQ ID NO: 428347 - DNA, 206 bp, Homo sapiens; identical to SEQ ID NO: 207606
  chr1:235317095-235317301
  hypo

SEQ ID NO: 428348 - DNA, 40 bp, Homo sapiens; identical to SEQ ID NO: 249739
  chr1:235508756-235508796
  hypo

SEQ ID NO: 428349 - DNA, 99 bp, Homo sapiens; identical to SEQ ID NO: 249740
  chr1:235542866-235542965
  hypo

SEQ ID NO: 428350 - DNA, 242 bp, Homo sapiens; identical to SEQ ID NO: 207607
  chr1:235613456-235613698
  hypo

SEQ ID NO: 428351 - DNA, 70 bp, Homo sapiens; identical to SEQ ID NO: 207608
  chr1:235665736-235665806
  hypo

SEQ ID NO: 428352 - DNA, 31 bp, Homo sapiens; identical to SEQ ID NO: 207610
  chr1:235855354-235855385
  hypo

SEQ ID NO: 428353 - DNA, 68 bp, Homo sapiens; identical to SEQ ID NO: 249746
  chr1:235973154-235973222
  hypo

SEQ ID NO: 428354 - DNA, 94 bp, Homo sapiens; identical to SEQ ID NO: 249747
  chr1:236062548-236062642
  hypo

SEQ ID NO: 428355 - DNA, 39 bp, Homo sapiens; identical to SEQ ID NO: 249748
  chr1:236069953-236069992
  hypo

SEQ ID NO: 428356 - DNA, 351 bp, Homo sapiens; identical to SEQ ID NO: 298649
  chr1:236081468-236081819
  hypo

SEQ ID NO: 428357 - DNA, 120 bp, Homo sapiens; identical to SEQ ID NO: 249750
  chr1:236121531-236121651
  hypo

SEQ ID NO: 428358 - DNA, 185 bp, Homo sapiens; identical to SEQ ID NO: 249751
  chr1:236143072-236143257
  hypo

SEQ ID NO: 428359 - DNA, 247 bp, Homo sapiens; identical to SEQ ID NO: 249752
  chr1:236155722-236155969
  hypo

SEQ ID NO: 428360 - DNA, 202 bp, Homo sapiens; identical to SEQ ID NO: 249754
  chr1:236161321-236161523
  hypo

SEQ ID NO: 428361 - DNA, 181 bp, Homo sapiens; identical to SEQ ID NO: 207612
  chr1:236189253-236189434
  hypo

SEQ ID NO: 428362 - DNA, 282 bp, Homo sapiens; identical to SEQ ID NO: 207613
  chr1:236192826-236193108
  hypo

SEQ ID NO: 428363 - DNA, 84 bp, Homo sapiens; identical to SEQ ID NO: 207614
  chr1:236194737-236194821
  hypo

SEQ ID NO: 428364 - DNA, 268 bp, Homo sapiens; identical to SEQ ID NO: 207615
  chr1:236212016-236212284
  hypo

SEQ ID NO: 428365 - DNA, 180 bp, Homo sapiens; identical to SEQ ID NO: 249761
  chr1:236281071-236281251
  hypo

SEQ ID NO: 428366 - DNA, 43 bp, Homo sapiens; identical to SEQ ID NO: 249762
  chr1:236315001-236315044
  hypo

SEQ ID NO: 428367 - DNA, 33 bp, Homo sapiens; identical to SEQ ID NO: 249763
  chr1:236318110-236318143
  hypo

SEQ ID NO: 428368 - DNA, 103 bp, Homo sapiens; identical to SEQ ID NO: 249764
  chr1:236338712-236338815
  hypo

SEQ ID NO: 428369 - DNA, 210 bp, Homo sapiens; identical to SEQ ID NO: 207617
  chr1:236339561-236339771
  hypo

SEQ ID NO: 428370 - DNA, 450 bp, Homo sapiens; identical to SEQ ID NO: 198030
  chr1:236445121-236445571
  hypo

SEQ ID NO: 428371 - DNA, 199 bp, Homo sapiens; identical to SEQ ID NO: 249766
  chr1:236451640-236451839
  hypo

SEQ ID NO: 428372 - DNA, 44 bp, Homo sapiens; identical to SEQ ID NO: 249767
  chr1:236514730-236514774
  hypo

SEQ ID NO: 428373 - DNA, 120 bp, Homo sapiens; identical to SEQ ID NO: 207621
  chr1:236540755-236540875
  hypo

SEQ ID NO: 428374 - DNA, 56 bp, Homo sapiens; identical to SEQ ID NO: 207622
  chr1:236561305-236561361
  hypo

SEQ ID NO: 428375 - DNA, 153 bp, Homo sapiens; identical to SEQ ID NO: 249770
  chr1:236626420-236626573
  hypo

SEQ ID NO: 428376 - DNA, 75 bp, Homo sapiens; identical to SEQ ID NO: 249771
  chr1:236645856-236645931
  hypo

SEQ ID NO: 428377 - DNA, 312 bp, Homo sapiens; identical to SEQ ID NO: 249772
  chr1:236657369-236657681
  hypo

SEQ ID NO: 428378 - DNA, 59 bp, Homo sapiens; identical to SEQ ID NO: 249773
  chr1:236723110-236723169
  hypo

SEQ ID NO: 428379 - DNA, 134 bp, Homo sapiens; identical to SEQ ID NO: 249774
  chr1:236802444-236802578
  hypo

SEQ ID NO: 428380 - DNA, 100 bp, Homo sapiens; identical to SEQ ID NO: 207624
  chr1:236907979-236908079
  hypo

SEQ ID NO: 428381 - DNA, 161 bp, Homo sapiens; identical to SEQ ID NO: 249777
  chr1:237053951-237054112
  hypo

SEQ ID NO: 428382 - DNA, 271 bp, Homo sapiens; identical to SEQ ID NO: 249778
  chr1:237144673-237144944
  hypo

SEQ ID NO: 428383 - DNA, 38 bp, Homo sapiens; identical to SEQ ID NO: 249779
  chr1:237584239-237584277
  hypo

SEQ ID NO: 428384 - DNA, 181 bp, Homo sapiens; identical to SEQ ID NO: 298684
  chr1:237947071-237947252
  hypo

SEQ ID NO: 428385 - DNA, 479 bp, Homo sapiens; identical to SEQ ID NO: 298685
  chr1:237947323-237947802
  hypo

SEQ ID NO: 428386 - DNA, 45 bp, Homo sapiens; identical to SEQ ID NO: 207626
  chr1:238017558-238017603
  hypo

SEQ ID NO: 428387 - DNA, 520 bp, Homo sapiens; identical to SEQ ID NO: 249782
  chr1:238081767-238082287
  hypo

SEQ ID NO: 428388 - DNA, 162 bp, Homo sapiens; identical to SEQ ID NO: 249783
  chr1:239138492-239138654
  hypo

SEQ ID NO: 428389 - DNA, 82 bp, Homo sapiens; identical to SEQ ID NO: 207627
  chr1:239509033-239509115
  hypo

SEQ ID NO: 428390 - DNA, 121 bp, Homo sapiens; identical to SEQ ID NO: 249785
  chr1:240048929-240049050
  hypo

SEQ ID NO: 428391 - DNA, 200 bp, Homo sapiens; identical to SEQ ID NO: 249786
  chr1:240064135-240064335
  hypo

SEQ ID NO: 428392 - DNA, 83 bp, Homo sapiens; identical to SEQ ID NO: 249789
  chr1:240641239-240641322
  hypo

SEQ ID NO: 428393 - DNA, 45 bp, Homo sapiens; identical to SEQ ID NO: 207628
  chr1:241271635-241271680
  hypo

SEQ ID NO: 428394 - DNA, 150 bp, Homo sapiens; identical to SEQ ID NO: 207629
  chr1:241434339-241434489
  hypo

SEQ ID NO: 428395 - DNA, 84 bp, Homo sapiens; identical to SEQ ID NO: 207633
  chr1:241541312-241541396
  hypo

SEQ ID NO: 428396 - DNA, 88 bp, Homo sapiens; identical to SEQ ID NO: 207634
  chr1:241559203-241559291
  hypo

SEQ ID NO: 428397 - DNA, 33 bp, Homo sapiens; identical to SEQ ID NO: 221633
  chr1:241588237-241588270
  hypo

SEQ ID NO: 428398 - DNA, 80 bp, Homo sapiens; identical to SEQ ID NO: 207635
  chr1:241753331-241753411
  hypo

SEQ ID NO: 428399 - DNA, 49 bp, Homo sapiens; identical to SEQ ID NO: 249797
  chr1:241755369-241755418
  hypo

SEQ ID NO: 428400 - DNA, 161 bp, Homo sapiens; identical to SEQ ID NO: 249798
  chr1:241809726-241809887
  hypo

SEQ ID NO: 428401 - DNA, 129 bp, Homo sapiens; identical to SEQ ID NO: 249799
  chr1:242121115-242121244
  hypo

SEQ ID NO: 428402 - DNA, 87 bp, Homo sapiens; identical to SEQ ID NO: 249800
  chr1:242153594-242153681
  hypo

SEQ ID NO: 428403 - DNA, 144 bp, Homo sapiens; identical to SEQ ID NO: 249801
  chr1:242689621-242689765
  hypo

SEQ ID NO: 428404 - DNA, 325 bp, Homo sapiens; identical to SEQ ID NO: 207636
  chr1:242767712-242768037
  hypo

SEQ ID NO: 428405 - DNA, 77 bp, Homo sapiens; identical to SEQ ID NO: 249803
  chr1:243432191-243432268
  hypo

SEQ ID NO: 428406 - DNA, 131 bp, Homo sapiens; identical to SEQ ID NO: 207638
  chr1:243566401-243566532
  hypo

SEQ ID NO: 428407 - DNA, 39 bp, Homo sapiens; identical to SEQ ID NO: 207640
  chr1:243750610-243750649
  hypo

SEQ ID NO: 428408 - DNA, 353 bp, Homo sapiens; identical to SEQ ID NO: 298717
  chr1:244142604-244142957
  hypo

SEQ ID NO: 428409 - DNA, 73 bp, Homo sapiens; identical to SEQ ID NO: 298718
  chr1:244243852-244243925
  hypo

SEQ ID NO: 428410 - DNA, 216 bp, Homo sapiens; identical to SEQ ID NO: 207642
  chr1:244345254-244345470
  hypo

SEQ ID NO: 428411 - DNA, 218 bp, Homo sapiens; identical to SEQ ID NO: 249814
  chr1:244499987-244500205
  hypo

SEQ ID NO: 428412 - DNA, 143 bp, Homo sapiens; identical to SEQ ID NO: 207643
  chr1:244641921-244642064
  hypo

SEQ ID NO: 428413 - DNA, 81 bp, Homo sapiens; identical to SEQ ID NO: 249816
  chr1:244758875-244758956
  hypo

SEQ ID NO: 428414 - DNA, 86 bp, Homo sapiens; identical to SEQ ID NO: 249818
  chr1:244823752-244823838
  hypo

SEQ ID NO: 428415 - DNA, 89 bp, Homo sapiens; identical to SEQ ID NO: 249819
  chr1:244826768-244826857
  hypo

SEQ ID NO: 428416 - DNA, 95 bp, Homo sapiens; identical to SEQ ID NO: 249822
  chr1:244896511-244896606
  hypo

SEQ ID NO: 428417 - DNA, 140 bp, Homo sapiens; identical to SEQ ID NO: 249823
  chr1:244902172-244902312
  hypo

SEQ ID NO: 428418 - DNA, 193 bp, Homo sapiens; identical to SEQ ID NO: 249824
  chr1:244920545-244920738
  hypo

SEQ ID NO: 428419 - DNA, 75 bp, Homo sapiens; identical to SEQ ID NO: 249825
  chr1:244924623-244924698
  hypo

SEQ ID NO: 428420 - DNA, 142 bp, Homo sapiens; identical to SEQ ID NO: 249828
  chr1:245205094-245205236
  hypo

SEQ ID NO: 428421 - DNA, 92 bp, Homo sapiens; identical to SEQ ID NO: 249829
  chr1:245209851-245209943
  hypo

SEQ ID NO: 428422 - DNA, 97 bp, Homo sapiens; identical to SEQ ID NO: 207647
  chr1:245281663-245281760
  hypo

SEQ ID NO: 428423 - DNA, 157 bp, Homo sapiens; identical to SEQ ID NO: 249832
  chr1:245370678-245370835
  hypo

SEQ ID NO: 428424 - DNA, 160 bp, Homo sapiens; identical to SEQ ID NO: 298739
  chr1:245377013-245377173
  hypo

SEQ ID NO: 428425 - DNA, 95 bp, Homo sapiens; identical to SEQ ID NO: 249834
  chr1:245446511-245446606
  hypo

SEQ ID NO: 428426 - DNA, 139 bp, Homo sapiens; identical to SEQ ID NO: 249835
  chr1:245481134-245481273
  hypo

SEQ ID NO: 428427 - DNA, 82 bp, Homo sapiens; identical to SEQ ID NO: 249836
  chr1:245488058-245488140
  hypo

SEQ ID NO: 428428 - DNA, 269 bp, Homo sapiens; identical to SEQ ID NO: 298743
  chr1:245494226-245494495
  hypo

SEQ ID NO: 428429 - DNA, 52 bp, Homo sapiens; identical to SEQ ID NO: 249838
  chr1:245496614-245496666
  hypo

SEQ ID NO: 428430 - DNA, 99 bp, Homo sapiens; identical to SEQ ID NO: 207648
  chr1:245497279-245497378
  hypo

SEQ ID NO: 428431 - DNA, 104 bp, Homo sapiens; identical to SEQ ID NO: 298746
  chr1:245498869-245498973
  hypo

SEQ ID NO: 428432 - DNA, 146 bp, Homo sapiens
  chr1:245499005-245499151
  hypo
cccacgtggggaaagaagagtcccacgaggggaaaggagggtcccacgcagggagagtcccacgcagggaaaggagagtcccacgcagggaaaggaaggtcccacgcagggaaagaagagccccacgcggagaaggaggagtccca

SEQ ID NO: 428433 - DNA, 146 bp, Homo sapiens; identical to SEQ ID NO: 249841
  chr1:245508141-245508287
  hypo

SEQ ID NO: 428434 - DNA, 115 bp, Homo sapiens; identical to SEQ ID NO: 249842
  chr1:245512066-245512181
  hypo

SEQ ID NO: 428435 - DNA, 164 bp, Homo sapiens; identical to SEQ ID NO: 207651
  chr1:245525398-245525562
  hypo

SEQ ID NO: 428436 - DNA, 97 bp, Homo sapiens; identical to SEQ ID NO: 249845
  chr1:245537644-245537741
  hypo

SEQ ID NO: 428437 - DNA, 175 bp, Homo sapiens; identical to SEQ ID NO: 249846
  chr1:245548882-245549057
  hypo

SEQ ID NO: 428438 - DNA, 105 bp, Homo sapiens; identical to SEQ ID NO: 249847
  chr1:245576121-245576226
  hypo

SEQ ID NO: 428439 - DNA, 192 bp, Homo sapiens; identical to SEQ ID NO: 207653
  chr1:245576466-245576658
  hypo

SEQ ID NO: 428440 - DNA, 282 bp, Homo sapiens; identical to SEQ ID NO: 207654
  chr1:245582887-245583169
  hypo

SEQ ID NO: 428441 - DNA, 50 bp, Homo sapiens; identical to SEQ ID NO: 298758
  chr1:245627555-245627605
  hypo

SEQ ID NO: 428442 - DNA, 129 bp, Homo sapiens; identical to SEQ ID NO: 249852
  chr1:245628942-245629071
  hypo

SEQ ID NO: 428443 - DNA, 126 bp, Homo sapiens; identical to SEQ ID NO: 298760
  chr1:245633325-245633451
  hypo

SEQ ID NO: 428444 - DNA, 35 bp, Homo sapiens; identical to SEQ ID NO: 249854
  chr1:245704935-245704970
  hypo

SEQ ID NO: 428445 - DNA, 37 bp, Homo sapiens; identical to SEQ ID NO: 249855
  chr1:245722717-245722754
  hypo

SEQ ID NO: 428446 - DNA, 112 bp, Homo sapiens; identical to SEQ ID NO: 249856
  chr1:245752683-245752795
  hypo

SEQ ID NO: 428447 - DNA, 128 bp, Homo sapiens; identical to SEQ ID NO: 298764
  chr1:245753334-245753462
  hypo

SEQ ID NO: 428448 - DNA, 147 bp, Homo sapiens; identical to SEQ ID NO: 298765
  chr1:245753500-245753647
  hypo

SEQ ID NO: 428449 - DNA, 151 bp, Homo sapiens; identical to SEQ ID NO: 207655
  chr1:245764442-245764593
  hypo

SEQ ID NO: 428450 - DNA, 211 bp, Homo sapiens; identical to SEQ ID NO: 249859
  chr1:245765879-245766090
  hypo

SEQ ID NO: 428451 - DNA, 566 bp, Homo sapiens; identical to SEQ ID NO: 298769
  chr1:245849348-245849914
  hypo

SEQ ID NO: 428452 - DNA, 373 bp, Homo sapiens; identical to SEQ ID NO: 207658
  chr1:245849944-245850317
  hypo

SEQ ID NO: 428453 - DNA, 158 bp, Homo sapiens; identical to SEQ ID NO: 249864
  chr1:245859143-245859301
  hypo

SEQ ID NO: 428454 - DNA, 193 bp, Homo sapiens; identical to SEQ ID NO: 249865
  chr1:245866076-245866269
  hypo

SEQ ID NO: 428455 - DNA, 148 bp, Homo sapiens; identical to SEQ ID NO: 249866
  chr1:245911712-245911860
  hypo

SEQ ID NO: 428456 - DNA, 183 bp, Homo sapiens; identical to SEQ ID NO: 249869
  chr1:246019929-246020112
  hypo

SEQ ID NO: 428457 - DNA, 87 bp, Homo sapiens; identical to SEQ ID NO: 249870
  chr1:246026894-246026981
  hypo

SEQ ID NO: 428458 - DNA, 78 bp, Homo sapiens; identical to SEQ ID NO: 249871
  chr1:246032887-246032965
  hypo

SEQ ID NO: 428459 - DNA, 92 bp, Homo sapiens; identical to SEQ ID NO: 249872
  chr1:246033506-246033598
  hypo

SEQ ID NO: 428460 - DNA, 105 bp, Homo sapiens; identical to SEQ ID NO: 249873
  chr1:246094296-246094401
  hypo

SEQ ID NO: 428461 - DNA, 32 bp, Homo sapiens; identical to SEQ ID NO: 249875
  chr1:246171646-246171678
  hypo

SEQ ID NO: 428462 - DNA, 43 bp, Homo sapiens; identical to SEQ ID NO: 298784
  chr1:246171884-246171927
  hypo

SEQ ID NO: 428463 - DNA, 57 bp, Homo sapiens; identical to SEQ ID NO: 298785
  chr1:246172194-246172251
  hypo

SEQ ID NO: 428464 - DNA, 263 bp, Homo sapiens; identical to SEQ ID NO: 249880
  chr1:246320238-246320501
  hypo

SEQ ID NO: 428465 - DNA, 95 bp, Homo sapiens; identical to SEQ ID NO: 249884
  chr1:246518821-246518916
  hypo

SEQ ID NO: 428466 - DNA, 156 bp, Homo sapiens; identical to SEQ ID NO: 249885
  chr1:246569252-246569408
  hypo

SEQ ID NO: 428467 - DNA, 74 bp, Homo sapiens; identical to SEQ ID NO: 207664
  chr1:246582057-246582131
  hypo

SEQ ID NO: 428468 - DNA, 86 bp, Homo sapiens; identical to SEQ ID NO: 249887
  chr1:246611518-246611604
  hypo

SEQ ID NO: 428469 - DNA, 205 bp, Homo sapiens; identical to SEQ ID NO: 249888
  chr1:246652177-246652382
  hypo

SEQ ID NO: 428470 - DNA, 85 bp, Homo sapiens; identical to SEQ ID NO: 207665
  chr1:246783954-246784039
  hypo

SEQ ID NO: 428471 - DNA, 910 bp, Homo sapiens; identical to SEQ ID NO: 279443
  chr1:246887311-246888221
  hypo

SEQ ID NO: 428472 - DNA, 149 bp, Homo sapiens; identical to SEQ ID NO: 249891
  chr1:246899321-246899470
  hypo

SEQ ID NO: 428473 - DNA, 326 bp, Homo sapiens; identical to SEQ ID NO: 249892
  chr1:246918896-246919222
  hypo

SEQ ID NO: 428474 - DNA, 91 bp, Homo sapiens; identical to SEQ ID NO: 249895
  chr1:246944244-246944335
  hypo

SEQ ID NO: 428475 - DNA, 52 bp, Homo sapiens; identical to SEQ ID NO: 249896
  chr1:246954179-246954231
  hypo

SEQ ID NO: 428476 - DNA, 160 bp, Homo sapiens; identical to SEQ ID NO: 249897
  chr1:246969293-246969453
  hypo

SEQ ID NO: 428477 - DNA, 80 bp, Homo sapiens
  chr1:247017233-247017313
  hypo
gaaaaaccactttacaggcttctcatcaaatacataaaagtagtatacaaactttattggatacaacaataaaatattaa

SEQ ID NO: 428478 - DNA, 93 bp, Homo sapiens; identical to SEQ ID NO: 207669
  chr1:247027354-247027447
  hypo

SEQ ID NO: 428479 - DNA, 155 bp, Homo sapiens; identical to SEQ ID NO: 249900
  chr1:247109075-247109230
  hypo

SEQ ID NO: 428480 - DNA, 180 bp, Homo sapiens; identical to SEQ ID NO: 249901
  chr1:247146067-247146247
  hypo

SEQ ID NO: 428481 - DNA, 62 bp, Homo sapiens; identical to SEQ ID NO: 415778
  chr1:247170806-247170868
  hypo

SEQ ID NO: 428482 - DNA, 181 bp, Homo sapiens; identical to SEQ ID NO: 249902
  chr1:247253910-247254091
  hypo

SEQ ID NO: 428483 - DNA, 87 bp, Homo sapiens; identical to SEQ ID NO: 249904
  chr1:247399634-247399721
  hypo

SEQ ID NO: 428484 - DNA, 641 bp, Homo sapiens; identical to SEQ ID NO: 279450
  chr1:247495198-247495839
  hypo

SEQ ID NO: 428485 - DNA, 180 bp, Homo sapiens; identical to SEQ ID NO: 249905
  chr1:247527170-247527350
  hypo

SEQ ID NO: 428486 - DNA, 337 bp, Homo sapiens; identical to SEQ ID NO: 207672
  chr1:247587055-247587392
  hypo

SEQ ID NO: 428487 - DNA, 466 bp, Homo sapiens; identical to SEQ ID NO: 207673
  chr1:247587422-247587888
  hypo

SEQ ID NO: 428488 - DNA, 142 bp, Homo sapiens; identical to SEQ ID NO: 298820
  chr1:247590117-247590259
  hypo

SEQ ID NO: 428489 - DNA, 37 bp, Homo sapiens; identical to SEQ ID NO: 249910
  chr1:247808861-247808898
  hypo

SEQ ID NO: 428490 - DNA, 32 bp, Homo sapiens; identical to SEQ ID NO: 207675
  chr1:248000443-248000475
  hypo

SEQ ID NO: 428491 - DNA, 180 bp, Homo sapiens; identical to SEQ ID NO: 249912
  chr1:248003051-248003231
  hypo

SEQ ID NO: 428492 - DNA, 35 bp, Homo sapiens; identical to SEQ ID NO: 249914
  chr1:248036242-248036277
  hypo

SEQ ID NO: 428493 - DNA, 87 bp, Homo sapiens; identical to SEQ ID NO: 249916
  chr1:248047446-248047533
  hypo

SEQ ID NO: 428494 - DNA, 87 bp, Homo sapiens; identical to SEQ ID NO: 249917
  chr1:248047953-248048040
  hypo

SEQ ID NO: 428495 - DNA, 79 bp, Homo sapiens; identical to SEQ ID NO: 249922
  chr1:248470214-248470293
  hypo

SEQ ID NO: 428496 - DNA, 222 bp, Homo sapiens; identical to SEQ ID NO: 249923
  chr1:248685314-248685536
  hypo

SEQ ID NO: 428497 - DNA, 338 bp, Homo sapiens; identical to SEQ ID NO: 207678
  chr1:249106193-249106531
  hypo

SEQ ID NO: 428498 - DNA, 98 bp, Homo sapiens; identical to SEQ ID NO: 249925
  chr1:249113999-249114097
  hypo

SEQ ID NO: 428499 - DNA, 174 bp, Homo sapiens; identical to SEQ ID NO: 207679
  chr1:249141905-249142079
  hypo

SEQ ID NO: 428500 - DNA, 234 bp, Homo sapiens; identical to SEQ ID NO: 198045
  chr1:249167654-249167888
  hypo

SEQ ID NO: 428501 - DNA, 38 bp, Homo sapiens; identical to SEQ ID NO: 207681
  chr1:249172380-249172418
  hypo

SEQ ID NO: 428502 - DNA, 123 bp, Homo sapiens; identical to SEQ ID NO: 207682
  chr1:249212002-249212125
  hypo

SEQ ID NO: 428503 - DNA, 192 bp, Homo sapiens; identical to SEQ ID NO: 207683
  chr1:249218264-249218456
  hypo

SEQ ID NO: 428504 - DNA, 79 bp, Homo sapiens; identical to SEQ ID NO: 249932
  chr2:67491-67570
  hypo

SEQ ID NO: 428505 - DNA, 78 bp, Homo sapiens; identical to SEQ ID NO: 249933
  chr2:67750-67828
  hypo

SEQ ID NO: 428506 - DNA, 91 bp, Homo sapiens; identical to SEQ ID NO: 298844
  chr2:142722-142813
  hypo

SEQ ID NO: 428507 - DNA, 136 bp, Homo sapiens; identical to SEQ ID NO: 249935
  chr2:249730-249866
  hypo

SEQ ID NO: 428508 - DNA, 88 bp, Homo sapiens; identical to SEQ ID NO: 207685
  chr2:314740-314828
  hypo

SEQ ID NO: 428509 - DNA, 42 bp, Homo sapiens; identical to SEQ ID NO: 249942
  chr2:366701-366743
  hypo

SEQ ID NO: 428510 - DNA, 186 bp, Homo sapiens; identical to SEQ ID NO: 249943
  chr2:374752-374938
  hypo

SEQ ID NO: 428511 - DNA, 42 bp, Homo sapiens; identical to SEQ ID NO: 249944
  chr2:416712-416754
  hypo

SEQ ID NO: 428512 - DNA, 277 bp, Homo sapiens; identical to SEQ ID NO: 249945
  chr2:451671-451948
  hypo

SEQ ID NO: 428513 - DNA, 117 bp, Homo sapiens; identical to SEQ ID NO: 249946
  chr2:465771-465888
  hypo

SEQ ID NO: 428514 - DNA, 232 bp, Homo sapiens; identical to SEQ ID NO: 298859
  chr2:495958-496190
  hypo

SEQ ID NO: 428515 - DNA, 361 bp, Homo sapiens; identical to SEQ ID NO: 249948
  chr2:497070-497431
  hypo

SEQ ID NO: 428516 - DNA, 60 bp, Homo sapiens; identical to SEQ ID NO: 207691
  chr2:503731-503791
  hypo

SEQ ID NO: 428517 - DNA, 398 bp, Homo sapiens; identical to SEQ ID NO: 207692
  chr2:522158-522556
  hypo

SEQ ID NO: 428518 - DNA, 32 bp, Homo sapiens; identical to SEQ ID NO: 298866
  chr2:720804-720836
  hypo

SEQ ID NO: 428519 - DNA, 99 bp, Homo sapiens; identical to SEQ ID NO: 298867
  chr2:720897-720996
  hypo

SEQ ID NO: 428520 - DNA, 103 bp, Homo sapiens; identical to SEQ ID NO: 249955
  chr2:796467-796570
  hypo

SEQ ID NO: 428521 - DNA, 234 bp, Homo sapiens; identical to SEQ ID NO: 249956
  chr2:815047-815281
  hypo

SEQ ID NO: 428522 - DNA, 164 bp, Homo sapiens; identical to SEQ ID NO: 249957
  chr2:816397-816561
  hypo

SEQ ID NO: 428523 - DNA, 72 bp, Homo sapiens; identical to SEQ ID NO: 249958
  chr2:816591-816663
  hypo

SEQ ID NO: 428524 - DNA, 103 bp, Homo sapiens; identical to SEQ ID NO: 207693
  chr2:816916-817019
  hypo

SEQ ID NO: 428525 - DNA, 67 bp, Homo sapiens; identical to SEQ ID NO: 207694
  chr2:817049-817116
  hypo

SEQ ID NO: 428526 - DNA, 183 bp, Homo sapiens; identical to SEQ ID NO: 207695
  chr2:817146-817329
  hypo

SEQ ID NO: 428527 - DNA, 199 bp, Homo sapiens; identical to SEQ ID NO: 249962
  chr2:858100-858299
  hypo

SEQ ID NO: 428528 - DNA, 258 bp, Homo sapiens; identical to SEQ ID NO: 207698
  chr2:910392-910650
  hypo

SEQ ID NO: 428529 - DNA, 42 bp, Homo sapiens; identical to SEQ ID NO: 249965
  chr2:911370-911412
  hypo

SEQ ID NO: 428530 - DNA, 43 bp, Homo sapiens; identical to SEQ ID NO: 249966
  chr2:923173-923216
  hypo

SEQ ID NO: 428531 - DNA, 153 bp, Homo sapiens; identical to SEQ ID NO: 207699
  chr2:923246-923399
  hypo

SEQ ID NO: 428532 - DNA, 45 bp, Homo sapiens; identical to SEQ ID NO: 249968
  chr2:982994-983039
  hypo

SEQ ID NO: 428533 - DNA, 35 bp, Homo sapiens; identical to SEQ ID NO: 249969
  chr2:1130681-1130716
  hypo

SEQ ID NO: 428534 - DNA, 269 bp, Homo sapiens; identical to SEQ ID NO: 249970
  chr2:1204032-1204301
  hypo

SEQ ID NO: 428535 - DNA, 409 bp, Homo sapiens; identical to SEQ ID NO: 207700
  chr2:1311461-1311870
  hypo

SEQ ID NO: 428536 - DNA, 69 bp, Homo sapiens; identical to SEQ ID NO: 207703
  chr2:1501008-1501077
  hypo

SEQ ID NO: 428537 - DNA, 177 bp, Homo sapiens; identical to SEQ ID NO: 249976
  chr2:1506966-1507143
  hypo

SEQ ID NO: 428538 - DNA, 257 bp, Homo sapiens; identical to SEQ ID NO: 249977
  chr2:1516283-1516540
  hypo

SEQ ID NO: 428539 - DNA, 230 bp, Homo sapiens; identical to SEQ ID NO: 249980
  chr2:1589539-1589769
  hypo

SEQ ID NO: 428540 - DNA, 108 bp, Homo sapiens; identical to SEQ ID NO: 249981
  chr2:1606633-1606741
  hypo

SEQ ID NO: 428541 - DNA, 296 bp, Homo sapiens; identical to SEQ ID NO: 207705
  chr2:1613967-1614263
  hypo

SEQ ID NO: 428542 - DNA, 96 bp, Homo sapiens; identical to SEQ ID NO: 249985
  chr2:1652504-1652600
  hypo

SEQ ID NO: 428543 - DNA, 318 bp, Homo sapiens; identical to SEQ ID NO: 207707
  chr2:1653230-1653548
  hypo

SEQ ID NO: 428544 - DNA, 121 bp, Homo sapiens; identical to SEQ ID NO: 249987
  chr2:1666260-1666381
  hypo

SEQ ID NO: 428545 - DNA, 197 bp, Homo sapiens; identical to SEQ ID NO: 298902
  chr2:1669971-1670168
  hypo

SEQ ID NO: 428546 - DNA, 44 bp, Homo sapiens; identical to SEQ ID NO: 249992
  chr2:1793414-1793458
  hypo

SEQ ID NO: 428547 - DNA, 98 bp, Homo sapiens; identical to SEQ ID NO: 249993
  chr2:1796265-1796363
  hypo

SEQ ID NO: 428548 - DNA, 161 bp, Homo sapiens; identical to SEQ ID NO: 249994
  chr2:1816188-1816349
  hypo

SEQ ID NO: 428549 - DNA, 84 bp, Homo sapiens; identical to SEQ ID NO: 249995
  chr2:1828326-1828410
  hypo

SEQ ID NO: 428550 - DNA, 226 bp, Homo sapiens; identical to SEQ ID NO: 249999
  chr2:1887329-1887555
  hypo

SEQ ID NO: 428551 - DNA, 132 bp, Homo sapiens; identical to SEQ ID NO: 250001
  chr2:1915731-1915863
  hypo

SEQ ID NO: 428552 - DNA, 309 bp, Homo sapiens; identical to SEQ ID NO: 207713
  chr2:1926247-1926556
  hypo

SEQ ID NO: 428553 - DNA, 167 bp, Homo sapiens; identical to SEQ ID NO: 207714
  chr2:1932938-1933105
  hypo

SEQ ID NO: 428554 - DNA, 64 bp, Homo sapiens; identical to SEQ ID NO: 250005
  chr2:1987513-1987577
  hypo

SEQ ID NO: 428555 - DNA, 44 bp, Homo sapiens; identical to SEQ ID NO: 250006
  chr2:2125518-2125562
  hypo

SEQ ID NO: 428556 - DNA, 135 bp, Homo sapiens; identical to SEQ ID NO: 250007
  chr2:2142636-2142771
  hypo

SEQ ID NO: 428557 - DNA, 156 bp, Homo sapiens; identical to SEQ ID NO: 250009
  chr2:2176564-2176720
  hypo

SEQ ID NO: 428558 - DNA, 336 bp, Homo sapiens; identical to SEQ ID NO: 385162
  chr2:2189143-2189479
  hypo

SEQ ID NO: 428559 - DNA, 64 bp, Homo sapiens; identical to SEQ ID NO: 250012
  chr2:2325021-2325085
  hypo

SEQ ID NO: 428560 - DNA, 71 bp, Homo sapiens; identical to SEQ ID NO: 298928
  chr2:2569470-2569541
  hypo

SEQ ID NO: 428561 - DNA, 174 bp, Homo sapiens; identical to SEQ ID NO: 250014
  chr2:2572706-2572880
  hypo

SEQ ID NO: 428562 - DNA, 260 bp, Homo sapiens; identical to SEQ ID NO: 250016
  chr2:2584324-2584584
  hypo

SEQ ID NO: 428563 - DNA, 154 bp, Homo sapiens; identical to SEQ ID NO: 207717
  chr2:2584644-2584798
  hypo

SEQ ID NO: 428564 - DNA, 548 bp, Homo sapiens; identical to SEQ ID NO: 298934
  chr2:2584836-2585384
  hypo

SEQ ID NO: 428565 - DNA, 346 bp, Homo sapiens; identical to SEQ ID NO: 250018
  chr2:2639594-2639940
  hypo

SEQ ID NO: 428566 - DNA, 102 bp, Homo sapiens; identical to SEQ ID NO: 250019
  chr2:2667399-2667501
  hypo

SEQ ID NO: 428567 - DNA, 204 bp, Homo sapiens; identical to SEQ ID NO: 250020
  chr2:2668976-2669180
  hypo

SEQ ID NO: 428568 - DNA, 49 bp, Homo sapiens; identical to SEQ ID NO: 250021
  chr2:2672247-2672296
  hypo

SEQ ID NO: 428569 - DNA, 50 bp, Homo sapiens; identical to SEQ ID NO: 250023
  chr2:2693176-2693226
  hypo

SEQ ID NO: 428570 - DNA, 55 bp, Homo sapiens; identical to SEQ ID NO: 250026
  chr2:2724721-2724776
  hypo

SEQ ID NO: 428571 - DNA, 68 bp, Homo sapiens; identical to SEQ ID NO: 250027
  chr2:2724806-2724874
  hypo

SEQ ID NO: 428572 - DNA, 423 bp, Homo sapiens; identical to SEQ ID NO: 250029
  chr2:2734118-2734541
  hypo

SEQ ID NO: 428573 - DNA, 150 bp, Homo sapiens; identical to SEQ ID NO: 250030
  chr2:2734984-2735134
  hypo

SEQ ID NO: 428574 - DNA, 326 bp, Homo sapiens; identical to SEQ ID NO: 250031
  chr2:2735622-2735948
  hypo

SEQ ID NO: 428575 - DNA, 358 bp, Homo sapiens; identical to SEQ ID NO: 250033
  chr2:2755043-2755401
  hypo

SEQ ID NO: 428576 - DNA, 168 bp, Homo sapiens; identical to SEQ ID NO: 250035
  chr2:2795035-2795203
  hypo

SEQ ID NO: 428577 - DNA, 160 bp, Homo sapiens; identical to SEQ ID NO: 250037
  chr2:2799592-2799752
  hypo

SEQ ID NO: 428578 - DNA, 159 bp, Homo sapiens; identical to SEQ ID NO: 250038
  chr2:2800085-2800244
  hypo

SEQ ID NO: 428579 - DNA, 147 bp, Homo sapiens; identical to SEQ ID NO: 207722
  chr2:2849145-2849292
  hypo

SEQ ID NO: 428580 - DNA, 214 bp, Homo sapiens; identical to SEQ ID NO: 250041
  chr2:2876123-2876337
  hypo

SEQ ID NO: 428581 - DNA, 219 bp, Homo sapiens; identical to SEQ ID NO: 207725
  chr2:2879707-2879926
  hypo

SEQ ID NO: 428582 - DNA, 86 bp, Homo sapiens; identical to SEQ ID NO: 250044
  chr2:2897936-2898022
  hypo

SEQ ID NO: 428583 - DNA, 85 bp, Homo sapiens; identical to SEQ ID NO: 250045
  chr2:2936579-2936664
  hypo

SEQ ID NO: 428584 - DNA, 139 bp, Homo sapiens; identical to SEQ ID NO: 298964
  chr2:2939619-2939758
  hypo

SEQ ID NO: 428585 - DNA, 122 bp, Homo sapiens; identical to SEQ ID NO: 250047
  chr2:2940296-2940418
  hypo

SEQ ID NO: 428586 - DNA, 142 bp, Homo sapiens; identical to SEQ ID NO: 250048
  chr2:2945842-2945984
  hypo

SEQ ID NO: 428587 - DNA, 150 bp, Homo sapiens; identical to SEQ ID NO: 250049
  chr2:3039119-3039269
  hypo

SEQ ID NO: 428588 - DNA, 212 bp, Homo sapiens; identical to SEQ ID NO: 250050
  chr2:3041592-3041804
  hypo

SEQ ID NO: 428589 - DNA, 340 bp, Homo sapiens; identical to SEQ ID NO: 250051
  chr2:3063352-3063692
  hypo

SEQ ID NO: 428590 - DNA, 79 bp, Homo sapiens; identical to SEQ ID NO: 250052
  chr2:3066927-3067006
  hypo

SEQ ID NO: 428591 - DNA, 167 bp, Homo sapiens; identical to SEQ ID NO: 250053
  chr2:3113370-3113537
  hypo

SEQ ID NO: 428592 - DNA, 65 bp, Homo sapiens; identical to SEQ ID NO: 250054
  chr2:3118887-3118952
  hypo

SEQ ID NO: 428593 - DNA, 101 bp, Homo sapiens; identical to SEQ ID NO: 207726
  chr2:3173339-3173440
  hypo

SEQ ID NO: 428594 - DNA, 220 bp, Homo sapiens; identical to SEQ ID NO: 207727
  chr2:3176062-3176282
  hypo

SEQ ID NO: 428595 - DNA, 72 bp, Homo sapiens; identical to SEQ ID NO: 207728
  chr2:3201717-3201789
  hypo

SEQ ID NO: 428596 - DNA, 286 bp, Homo sapiens; identical to SEQ ID NO: 250058
  chr2:3214976-3215262
  hypo

SEQ ID NO: 428597 - DNA, 54 bp, Homo sapiens; identical to SEQ ID NO: 250059
  chr2:3215523-3215577
  hypo

SEQ ID NO: 428598 - DNA, 433 bp, Homo sapiens; identical to SEQ ID NO: 207730
  chr2:3260562-3260995
  hypo

SEQ ID NO: 428599 - DNA, 85 bp, Homo sapiens; identical to SEQ ID NO: 250061
  chr2:3266889-3266974
  hypo

SEQ ID NO: 428600 - DNA, 189 bp, Homo sapiens; identical to SEQ ID NO: 207731
  chr2:3280943-3281132
  hypo

SEQ ID NO: 428601 - DNA, 91 bp, Homo sapiens; identical to SEQ ID NO: 250063
  chr2:3281349-3281440
  hypo

SEQ ID NO: 428602 - DNA, 292 bp, Homo sapiens; identical to SEQ ID NO: 298982
  chr2:3285953-3286245
  hypo

SEQ ID NO: 428603 - DNA, 428 bp, Homo sapiens; identical to SEQ ID NO: 298983
  chr2:3286275-3286703
  hypo

SEQ ID NO: 428604 - DNA, 56 bp, Homo sapiens; identical to SEQ ID NO: 250065
  chr2:3289697-3289753
  hypo

SEQ ID NO: 428605 - DNA, 53 bp, Homo sapiens; identical to SEQ ID NO: 207733
  chr2:3290045-3290098
  hypo

SEQ ID NO: 428606 - DNA, 387 bp, Homo sapiens; identical to SEQ ID NO: 207734
  chr2:3290128-3290515
  hypo

SEQ ID NO: 428607 - DNA, 77 bp, Homo sapiens; identical to SEQ ID NO: 250067
  chr2:3290886-3290963
  hypo

SEQ ID NO: 428608 - DNA, 300 bp, Homo sapiens; identical to SEQ ID NO: 250068
  chr2:3291143-3291443
  hypo

SEQ ID NO: 428609 - DNA, 79 bp, Homo sapiens; identical to SEQ ID NO: 298989
  chr2:3292428-3292507
  hypo

SEQ ID NO: 428610 - DNA, 473 bp, Homo sapiens; identical to SEQ ID NO: 140516
  chr2:3293007-3293480
  hypo

SEQ ID NO: 428611 - DNA, 191 bp, Homo sapiens; identical to SEQ ID NO: 207736
  chr2:3303473-3303664
  hypo

SEQ ID NO: 428612 - DNA, 309 bp, Homo sapiens; identical to SEQ ID NO: 250072
  chr2:3313498-3313807
  hypo

SEQ ID NO: 428613 - DNA, 167 bp, Homo sapiens; identical to SEQ ID NO: 250074
  chr2:3321984-3322151
  hypo

SEQ ID NO: 428614 - DNA, 91 bp, Homo sapiens; identical to SEQ ID NO: 250075
  chr2:3325164-3325255
  hypo

SEQ ID NO: 428615 - DNA, 188 bp, Homo sapiens; identical to SEQ ID NO: 298997
  chr2:3346921-3347109
  hypo

SEQ ID NO: 428616 - DNA, 104 bp, Homo sapiens; identical to SEQ ID NO: 207740
  chr2:3347154-3347258
  hypo

SEQ ID NO: 428617 - DNA, 37 bp, Homo sapiens; identical to SEQ ID NO: 250077
  chr2:3347546-3347583
  hypo

SEQ ID NO: 428618 - DNA, 42 bp, Homo sapiens; identical to SEQ ID NO: 250078
  chr2:3347859-3347901
  hypo

SEQ ID NO: 428619 - DNA, 85 bp, Homo sapiens; identical to SEQ ID NO: 207742
  chr2:3391389-3391474
  hypo

SEQ ID NO: 428620 - DNA, 149 bp, Homo sapiens; identical to SEQ ID NO: 250084
  chr2:3425450-3425599
  hypo

SEQ ID NO: 428621 - DNA, 214 bp, Homo sapiens; identical to SEQ ID NO: 250085
  chr2:3427286-3427500
  hypo

SEQ ID NO: 428622 - DNA, 154 bp, Homo sapiens; identical to SEQ ID NO: 207744
  chr2:3446897-3447051
  hypo

SEQ ID NO: 428623 - DNA, 177 bp, Homo sapiens; identical to SEQ ID NO: 250087
  chr2:3449779-3449956
  hypo

SEQ ID NO: 428624 - DNA, 360 bp, Homo sapiens; identical to SEQ ID NO: 250088
  chr2:3452857-3453217
  hypo

SEQ ID NO: 428625 - DNA, 192 bp, Homo sapiens; identical to SEQ ID NO: 250089
  chr2:3456147-3456339
  hypo

SEQ ID NO: 428626 - DNA, 80 bp, Homo sapiens; identical to SEQ ID NO: 250090
  chr2:3458785-3458865
  hypo

SEQ ID NO: 428627 - DNA, 175 bp, Homo sapiens; identical to SEQ ID NO: 198054
  chr2:3465089-3465264
  hypo

SEQ ID NO: 428628 - DNA, 43 bp, Homo sapiens; identical to SEQ ID NO: 207747
  chr2:3467375-3467418
  hypo

SEQ ID NO: 428629 - DNA, 42 bp, Homo sapiens; identical to SEQ ID NO: 250093
  chr2:3498265-3498307
  hypo

SEQ ID NO: 428630 - DNA, 191 bp, Homo sapiens; identical to SEQ ID NO: 207748
  chr2:3504356-3504547
  hypo

SEQ ID NO: 428631 - DNA, 343 bp, Homo sapiens; identical to SEQ ID NO: 250096
  chr2:3586878-3587221
  hypo

SEQ ID NO: 428632 - DNA, 71 bp, Homo sapiens; identical to SEQ ID NO: 207750
  chr2:3593598-3593669
  hypo

SEQ ID NO: 428633 - DNA, 80 bp, Homo sapiens; identical to SEQ ID NO: 250098
  chr2:3648215-3648295
  hypo

SEQ ID NO: 428634 - DNA, 186 bp, Homo sapiens; identical to SEQ ID NO: 250099
  chr2:3649283-3649469
  hypo

SEQ ID NO: 428635 - DNA, 91 bp, Homo sapiens; identical to SEQ ID NO: 207751
  chr2:3675048-3675139
  hypo

SEQ ID NO: 428636 - DNA, 282 bp, Homo sapiens; identical to SEQ ID NO: 207752
  chr2:3675169-3675451
  hypo

SEQ ID NO: 428637 - DNA, 470 bp, Homo sapiens; identical to SEQ ID NO: 250102
  chr2:3681100-3681570
  hypo

SEQ ID NO: 428638 - DNA, 290 bp, Homo sapiens; identical to SEQ ID NO: 250103
  chr2:3685679-3685969
  hypo

SEQ ID NO: 428639 - DNA, 170 bp, Homo sapiens; identical to SEQ ID NO: 250104
  chr2:3695326-3695496
  hypo

SEQ ID NO: 428640 - DNA, 308 bp, Homo sapiens; identical to SEQ ID NO: 207754
  chr2:3714208-3714516
  hypo

SEQ ID NO: 428641 - DNA, 293 bp, Homo sapiens; identical to SEQ ID NO: 250106
  chr2:3810772-3811065
  hypo

SEQ ID NO: 428642 - DNA, 36 bp, Homo sapiens; identical to SEQ ID NO: 250108
  chr2:3888395-3888431
  hypo

SEQ ID NO: 428643 - DNA, 42 bp, Homo sapiens; identical to SEQ ID NO: 250109
  chr2:3919766-3919808
  hypo

SEQ ID NO: 428644 - DNA, 198 bp, Homo sapiens; identical to SEQ ID NO: 299033
  chr2:3990922-3991120
  hypo

SEQ ID NO: 428645 - DNA, 184 bp, Homo sapiens; identical to SEQ ID NO: 250111
  chr2:4976754-4976938
  hypo

SEQ ID NO: 428646 - DNA, 102 bp, Homo sapiens; identical to SEQ ID NO: 250112
  chr2:5584526-5584628
  hypo

SEQ ID NO: 428647 - DNA, 79 bp, Homo sapiens; identical to SEQ ID NO: 250113
  chr2:5694955-5695034
  hypo

SEQ ID NO: 428648 - DNA, 141 bp, Homo sapiens; identical to SEQ ID NO: 250114
  chr2:6024405-6024546
  hypo

SEQ ID NO: 428649 - DNA, 57 bp, Homo sapiens; identical to SEQ ID NO: 207755
  chr2:6402889-6402946
  hypo

SEQ ID NO: 428650 - DNA, 110 bp, Homo sapiens; identical to SEQ ID NO: 250116
  chr2:6635591-6635701
  hypo

SEQ ID NO: 428651 - DNA, 130 bp, Homo sapiens; identical to SEQ ID NO: 250118
  chr2:7099078-7099208
  hypo

SEQ ID NO: 428652 - DNA, 98 bp, Homo sapiens; identical to SEQ ID NO: 207758
  chr2:7109819-7109917
  hypo

SEQ ID NO: 428653 - DNA, 136 bp, Homo sapiens; identical to SEQ ID NO: 250120
  chr2:7128200-7128336
  hypo

SEQ ID NO: 428654 - DNA, 46 bp, Homo sapiens; identical to SEQ ID NO: 250121
  chr2:7149569-7149615
  hypo

SEQ ID NO: 428655 - DNA, 33 bp, Homo sapiens; identical to SEQ ID NO: 250123
  chr2:7180010-7180043
  hypo

SEQ ID NO: 428656 - DNA, 112 bp, Homo sapiens; identical to SEQ ID NO: 250124
  chr2:7229710-7229822
  hypo

SEQ ID NO: 428657 - DNA, 102 bp, Homo sapiens; identical to SEQ ID NO: 207760
  chr2:7237053-7237155
  hypo

SEQ ID NO: 428658 - DNA, 41 bp, Homo sapiens; identical to SEQ ID NO: 250127
  chr2:7931304-7931345
  hypo

SEQ ID NO: 428659 - DNA, 101 bp, Homo sapiens; identical to SEQ ID NO: 250128
  chr2:7931525-7931626
  hypo

SEQ ID NO: 428660 - DNA, 151 bp, Homo sapiens; identical to SEQ ID NO: 250129
  chr2:8214269-8214420
  hypo

SEQ ID NO: 428661 - DNA, 155 bp, Homo sapiens; identical to SEQ ID NO: 250130
  chr2:8364597-8364752
  hypo

SEQ ID NO: 428662 - DNA, 57 bp, Homo sapiens; identical to SEQ ID NO: 250131
  chr2:8476167-8476224
  hypo

SEQ ID NO: 428663 - DNA, 120 bp, Homo sapiens; identical to SEQ ID NO: 207762
  chr2:8647532-8647652
  hypo

SEQ ID NO: 428664 - DNA, 31 bp, Homo sapiens; identical to SEQ ID NO: 207764
  chr2:8648363-8648394
  hypo

SEQ ID NO: 428665 - DNA, 68 bp, Homo sapiens; identical to SEQ ID NO: 250136
  chr2:8668756-8668824
  hypo

SEQ ID NO: 428666 - DNA, 165 bp, Homo sapiens; identical to SEQ ID NO: 207765
  chr2:8691181-8691346
  hypo

SEQ ID NO: 428667 - DNA, 183 bp, Homo sapiens; identical to SEQ ID NO: 250138
  chr2:8706973-8707156
  hypo

SEQ ID NO: 428668 - DNA, 48 bp, Homo sapiens; identical to SEQ ID NO: 207767
  chr2:8736256-8736304
  hypo

SEQ ID NO: 428669 - DNA, 145 bp, Homo sapiens; identical to SEQ ID NO: 207768
  chr2:8768417-8768562
  hypo

SEQ ID NO: 428670 - DNA, 302 bp, Homo sapiens; identical to SEQ ID NO: 221656
  chr2:8818278-8818580
  hypo

SEQ ID NO: 428671 - DNA, 665 bp, Homo sapiens; identical to SEQ ID NO: 221657
  chr2:8818829-8819494
  hypo

SEQ ID NO: 428672 - DNA, 169 bp, Homo sapiens; identical to SEQ ID NO: 198061
  chr2:8821592-8821761
  hypo

SEQ ID NO: 428673 - DNA, 709 bp, Homo sapiens; identical to SEQ ID NO: 198062
  chr2:8821976-8822685
  hypo

SEQ ID NO: 428674 - DNA, 208 bp, Homo sapiens; identical to SEQ ID NO: 198064
  chr2:8825635-8825843
  hypo

SEQ ID NO: 428675 - DNA, 171 bp, Homo sapiens; identical to SEQ ID NO: 207775
  chr2:8854102-8854273
  hypo

SEQ ID NO: 428676 - DNA, 187 bp, Homo sapiens; identical to SEQ ID NO: 207778
  chr2:8983020-8983207
  hypo

SEQ ID NO: 428677 - DNA, 166 bp, Homo sapiens; identical to SEQ ID NO: 207779
  chr2:9002474-9002640
  hypo

SEQ ID NO: 428678 - DNA, 104 bp, Homo sapiens; identical to SEQ ID NO: 250154
  chr2:9076991-9077095
  hypo

SEQ ID NO: 428679 - DNA, 459 bp, Homo sapiens; identical to SEQ ID NO: 221662
  chr2:9144090-9144549
  hypo

SEQ ID NO: 428680 - DNA, 96 bp, Homo sapiens; identical to SEQ ID NO: 207783
  chr2:9218664-9218760
  hypo

SEQ ID NO: 428681 - DNA, 31 bp, Homo sapiens; identical to SEQ ID NO: 250159
  chr2:9234917-9234948
  hypo

SEQ ID NO: 428682 - DNA, 75 bp, Homo sapiens; identical to SEQ ID NO: 299092
  chr2:9244226-9244301
  hypo

SEQ ID NO: 428683 - DNA, 165 bp, Homo sapiens; identical to SEQ ID NO: 299093
  chr2:9244331-9244496
  hypo

SEQ ID NO: 428684 - DNA, 141 bp, Homo sapiens; identical to SEQ ID NO: 250163
  chr2:9250220-9250361
  hypo

SEQ ID NO: 428685 - DNA, 174 bp, Homo sapiens; identical to SEQ ID NO: 250164
  chr2:9250674-9250848
  hypo

SEQ ID NO: 428686 - DNA, 59 bp, Homo sapiens; identical to SEQ ID NO: 207785
  chr2:9251105-9251164
  hypo

SEQ ID NO: 428687 - DNA, 141 bp, Homo sapiens; identical to SEQ ID NO: 250166
  chr2:9289579-9289720
  hypo

SEQ ID NO: 428688 - DNA, 1192 bp, Homo sapiens; identical to SEQ ID NO: 198068
  chr2:9346368-9347560
  hypo

SEQ ID NO: 428689 - DNA, 316 bp, Homo sapiens; identical to SEQ ID NO: 198069
  chr2:9347677-9347993
  hypo

SEQ ID NO: 428690 - DNA, 187 bp, Homo sapiens; identical to SEQ ID NO: 207788
  chr2:9352815-9353002
  hypo

SEQ ID NO: 428691 - DNA, 174 bp, Homo sapiens; identical to SEQ ID NO: 207789
  chr2:9409365-9409539
  hypo

SEQ ID NO: 428692 - DNA, 95 bp, Homo sapiens; identical to SEQ ID NO: 250170
  chr2:9427258-9427353
  hypo

SEQ ID NO: 428693 - DNA, 470 bp, Homo sapiens; identical to SEQ ID NO: 207790
  chr2:9455454-9455924
  hypo

SEQ ID NO: 428694 - DNA, 138 bp, Homo sapiens; identical to SEQ ID NO: 207791
  chr2:9456808-9456946
  hypo

SEQ ID NO: 428695 - DNA, 180 bp, Homo sapiens; identical to SEQ ID NO: 207792
  chr2:9513162-9513342
  hypo

SEQ ID NO: 428696 - DNA, 488 bp, Homo sapiens; identical to SEQ ID NO: 250175
  chr2:9518892-9519380
  hypo

SEQ ID NO: 428697 - DNA, 42 bp, Homo sapiens; identical to SEQ ID NO: 250176
  chr2:9608090-9608132
  hypo

SEQ ID NO: 428698 - DNA, 216 bp, Homo sapiens; identical to SEQ ID NO: 250178
  chr2:9649999-9650215
  hypo

SEQ ID NO: 428699 - DNA, 131 bp, Homo sapiens; identical to SEQ ID NO: 250179
  chr2:9676812-9676943
  hypo

SEQ ID NO: 428700 - DNA, 32 bp, Homo sapiens; identical to SEQ ID NO: 250180
  chr2:9694210-9694242
  hypo

SEQ ID NO: 428701 - DNA, 45 bp, Homo sapiens; identical to SEQ ID NO: 402561
  chr2:9720411-9720456
  hypo

SEQ ID NO: 428702 - DNA, 49 bp, Homo sapiens; identical to SEQ ID NO: 250182
  chr2:9727412-9727461
  hypo

SEQ ID NO: 428703 - DNA, 42 bp, Homo sapiens; identical to SEQ ID NO: 250183
  chr2:9737397-9737439
  hypo

SEQ ID NO: 428704 - DNA, 104 bp, Homo sapiens; identical to SEQ ID NO: 250184
  chr2:9768526-9768630
  hypo

SEQ ID NO: 428705 - DNA, 100 bp, Homo sapiens; identical to SEQ ID NO: 250185
  chr2:9785031-9785131
  hypo

SEQ ID NO: 428706 - DNA, 134 bp, Homo sapiens; identical to SEQ ID NO: 250186
  chr2:9785578-9785712
  hypo

SEQ ID NO: 428707 - DNA, 90 bp, Homo sapiens; identical to SEQ ID NO: 250187
  chr2:9853195-9853285
  hypo

SEQ ID NO: 428708 - DNA, 144 bp, Homo sapiens; identical to SEQ ID NO: 299122
  chr2:9921477-9921621
  hypo

SEQ ID NO: 428709 - DNA, 122 bp, Homo sapiens; identical to SEQ ID NO: 250189
  chr2:9937923-9938045
  hypo

SEQ ID NO: 428710 - DNA, 42 bp, Homo sapiens; identical to SEQ ID NO: 250190
  chr2:9942207-9942249
  hypo

SEQ ID NO: 428711 - DNA, 235 bp, Homo sapiens; identical to SEQ ID NO: 250191
  chr2:9948880-9949115
  hypo

SEQ ID NO: 428712 - DNA, 175 bp, Homo sapiens; identical to SEQ ID NO: 250192
  chr2:9952204-9952379
  hypo

SEQ ID NO: 428713 - DNA, 105 bp, Homo sapiens; identical to SEQ ID NO: 207794
  chr2:9960809-9960914
  hypo

SEQ ID NO: 428714 - DNA, 37 bp, Homo sapiens; identical to SEQ ID NO: 207795
  chr2:9977944-9977981
  hypo

SEQ ID NO: 428715 - DNA, 134 bp, Homo sapiens; identical to SEQ ID NO: 250195
  chr2:10008084-10008218
  hypo

SEQ ID NO: 428716 - DNA, 213 bp, Homo sapiens; identical to SEQ ID NO: 207796
  chr2:10110633-10110846
  hypo

SEQ ID NO: 428717 - DNA, 120 bp, Homo sapiens; identical to SEQ ID NO: 207798
  chr2:10151095-10151215
  hypo

SEQ ID NO: 428718 - DNA, 531 bp, Homo sapiens; identical to SEQ ID NO: 250206
  chr2:10161988-10162519
  hypo

SEQ ID NO: 428719 - DNA, 160 bp, Homo sapiens; identical to SEQ ID NO: 250207
  chr2:10178432-10178592
  hypo

SEQ ID NO: 428720 - DNA, 114 bp, Homo sapiens; identical to SEQ ID NO: 250208
  chr2:10181969-10182083
  hypo

SEQ ID NO: 428721 - DNA, 126 bp, Homo sapiens; identical to SEQ ID NO: 250209
  chr2:10195850-10195976
  hypo

SEQ ID NO: 428722 - DNA, 42 bp, Homo sapiens; identical to SEQ ID NO: 250210
  chr2:10226144-10226186
  hypo

SEQ ID NO: 428723 - DNA, 79 bp, Homo sapiens; identical to SEQ ID NO: 299149
  chr2:10281194-10281273
  hypo

SEQ ID NO: 428724 - DNA, 37 bp, Homo sapiens; identical to SEQ ID NO: 207809
  chr2:10289569-10289606
  hypo

SEQ ID NO: 428725 - DNA, 228 bp, Homo sapiens; identical to SEQ ID NO: 299151
  chr2:10302790-10303018
  hypo

SEQ ID NO: 428726 - DNA, 152 bp, Homo sapiens; identical to SEQ ID NO: 250215
  chr2:10307112-10307264
  hypo

SEQ ID NO: 428727 - DNA, 120 bp, Homo sapiens; identical to SEQ ID NO: 250216
  chr2:10320484-10320604
  hypo

SEQ ID NO: 428728 - DNA, 82 bp, Homo sapiens; identical to SEQ ID NO: 250217
  chr2:10327405-10327487
  hypo

SEQ ID NO: 428729 - DNA, 139 bp, Homo sapiens; identical to SEQ ID NO: 250221
  chr2:10381451-10381590
  hypo

SEQ ID NO: 428730 - DNA, 84 bp, Homo sapiens; identical to SEQ ID NO: 250222
  chr2:10400306-10400390
  hypo

SEQ ID NO: 428731 - DNA, 512 bp, Homo sapiens; identical to SEQ ID NO: 279506
  chr2:10443618-10444130
  hypo

SEQ ID NO: 428732 - DNA, 165 bp, Homo sapiens; identical to SEQ ID NO: 279507
  chr2:10444193-10444358
  hypo

SEQ ID NO: 428733 - DNA, 163 bp, Homo sapiens; identical to SEQ ID NO: 250223
  chr2:10465386-10465549
  hypo

SEQ ID NO: 428734 - DNA, 60 bp, Homo sapiens; identical to SEQ ID NO: 250224
  chr2:10487204-10487264
  hypo

SEQ ID NO: 428735 - DNA, 66 bp, Homo sapiens; identical to SEQ ID NO: 250226
  chr2:10517629-10517695
  hypo

SEQ ID NO: 428736 - DNA, 160 bp, Homo sapiens; identical to SEQ ID NO: 250228
  chr2:10519035-10519195
  hypo

SEQ ID NO: 428737 - DNA, 40 bp, Homo sapiens; identical to SEQ ID NO: 250229
  chr2:10519315-10519355
  hypo

SEQ ID NO: 428738 - DNA, 540 bp, Homo sapiens; identical to SEQ ID NO: 299170
  chr2:10525735-10526275
  hypo

SEQ ID NO: 428739 - DNA, 42 bp, Homo sapiens; identical to SEQ ID NO: 250231
  chr2:10536068-10536110
  hypo

SEQ ID NO: 428740 - DNA, 137 bp, Homo sapiens; identical to SEQ ID NO: 250232
  chr2:10536465-10536602
  hypo

SEQ ID NO: 428741 - DNA, 114 bp, Homo sapiens; identical to SEQ ID NO: 15884
  chr2:10545012-10545126
  hypo

SEQ ID NO: 428742 - DNA, 57 bp, Homo sapiens; identical to SEQ ID NO: 250234
  chr2:10554979-10555036
  hypo

SEQ ID NO: 428743 - DNA, 78 bp, Homo sapiens; identical to SEQ ID NO: 250235
  chr2:10566539-10566617
  hypo

SEQ ID NO: 428744 - DNA, 171 bp, Homo sapiens; identical to SEQ ID NO: 299177
  chr2:10577346-10577517
  hypo

SEQ ID NO: 428745 - DNA, 61 bp, Homo sapiens; identical to SEQ ID NO: 250239
  chr2:10582244-10582305
  hypo

SEQ ID NO: 428746 - DNA, 100 bp, Homo sapiens; identical to SEQ ID NO: 207820
  chr2:10601535-10601635
  hypo

SEQ ID NO: 428747 - DNA, 79 bp, Homo sapiens; identical to SEQ ID NO: 207821
  chr2:10615284-10615363
  hypo

SEQ ID NO: 428748 - DNA, 84 bp, Homo sapiens; identical to SEQ ID NO: 207822
  chr2:10615573-10615657
  hypo

SEQ ID NO: 428749 - DNA, 166 bp, Homo sapiens; identical to SEQ ID NO: 250244
  chr2:10616028-10616194
  hypo

SEQ ID NO: 428750 - DNA, 249 bp, Homo sapiens; identical to SEQ ID NO: 299188
  chr2:10634192-10634441
  hypo

SEQ ID NO: 428751 - DNA, 277 bp, Homo sapiens; identical to SEQ ID NO: 207824
  chr2:10634471-10634748
  hypo

SEQ ID NO: 428752 - DNA, 43 bp, Homo sapiens; identical to SEQ ID NO: 250246
  chr2:10642586-10642629
  hypo

SEQ ID NO: 428753 - DNA, 108 bp, Homo sapiens; identical to SEQ ID NO: 250247
  chr2:10645140-10645248
  hypo

SEQ ID NO: 428754 - DNA, 50 bp, Homo sapiens; identical to SEQ ID NO: 250248
  chr2:10654938-10654988
  hypo

SEQ ID NO: 428755 - DNA, 67 bp, Homo sapiens; identical to SEQ ID NO: 250250
  chr2:10672799-10672866
  hypo

SEQ ID NO: 428756 - DNA, 136 bp, Homo sapiens; identical to SEQ ID NO: 250251
  chr2:10673122-10673258
  hypo

SEQ ID NO: 428757 - DNA, 461 bp, Homo sapiens; identical to SEQ ID NO: 250252
  chr2:10686607-10687068
  hypo

SEQ ID NO: 428758 - DNA, 102 bp, Homo sapiens; identical to SEQ ID NO: 250253
  chr2:10687534-10687636
  hypo

SEQ ID NO: 428759 - DNA, 117 bp, Homo sapiens; identical to SEQ ID NO: 207826
  chr2:10732499-10732616
  hypo

SEQ ID NO: 428760 - DNA, 524 bp, Homo sapiens; identical to SEQ ID NO: 250256
  chr2:10897430-10897954
  hypo

SEQ ID NO: 428761 - DNA, 127 bp, Homo sapiens; identical to SEQ ID NO: 250257
  chr2:10916395-10916522
  hypo

SEQ ID NO: 428762 - DNA, 691 bp, Homo sapiens; identical to SEQ ID NO: 250258
  chr2:10917385-10918076
  hypo

SEQ ID NO: 428763 - DNA, 58 bp, Homo sapiens; identical to SEQ ID NO: 250259
  chr2:10920052-10920110
  hypo

SEQ ID NO: 428764 - DNA, 95 bp, Homo sapiens; identical to SEQ ID NO: 207829
  chr2:10926448-10926543
  hypo

SEQ ID NO: 428765 - DNA, 207 bp, Homo sapiens; identical to SEQ ID NO: 279513
  chr2:10953101-10953308
  hypo

SEQ ID NO: 428766 - DNA, 52 bp, Homo sapiens; identical to SEQ ID NO: 279514
  chr2:10953334-10953386
  hypo

SEQ ID NO: 428767 - DNA, 32 bp, Homo sapiens; identical to SEQ ID NO: 250262
  chr2:11030196-11030228
  hypo

SEQ ID NO: 428768 - DNA, 114 bp, Homo sapiens; identical to SEQ ID NO: 207830
  chr2:11053788-11053902
  hypo

SEQ ID NO: 428769 - DNA, 206 bp, Homo sapiens; identical to SEQ ID NO: 250264
  chr2:11105561-11105767
  hypo

SEQ ID NO: 428770 - DNA, 241 bp, Homo sapiens; identical to SEQ ID NO: 250265
  chr2:11238183-11238424
  hypo

SEQ ID NO: 428771 - DNA, 68 bp, Homo sapiens; identical to SEQ ID NO: 299212
  chr2:11311987-11312055
  hypo

SEQ ID NO: 428772 - DNA, 39 bp, Homo sapiens; identical to SEQ ID NO: 299213
  chr2:11312087-11312126
  hypo

SEQ ID NO: 428773 - DNA, 67 bp, Homo sapiens; identical to SEQ ID NO: 299214
  chr2:11487872-11487939
  hypo

SEQ ID NO: 428774 - DNA, 69 bp, Homo sapiens; identical to SEQ ID NO: 250268
  chr2:11489277-11489346
  hypo

SEQ ID NO: 428775 - DNA, 40 bp, Homo sapiens; identical to SEQ ID NO: 250269
  chr2:11536462-11536502
  hypo

SEQ ID NO: 428776 - DNA, 79 bp, Homo sapiens; identical to SEQ ID NO: 250270
  chr2:11702174-11702253
  hypo

SEQ ID NO: 428777 - DNA, 250 bp, Homo sapiens; identical to SEQ ID NO: 250271
  chr2:11774323-11774573
  hypo

SEQ ID NO: 428778 - DNA, 213 bp, Homo sapiens; identical to SEQ ID NO: 250272
  chr2:11774874-11775087
  hypo

SEQ ID NO: 428779 - DNA, 145 bp, Homo sapiens; identical to SEQ ID NO: 250273
  chr2:11929296-11929441
  hypo

SEQ ID NO: 428780 - DNA, 260 bp, Homo sapiens; identical to SEQ ID NO: 207831
  chr2:12005882-12006142
  hypo

SEQ ID NO: 428781 - DNA, 157 bp, Homo sapiens; identical to SEQ ID NO: 250276
  chr2:12078414-12078571
  hypo

SEQ ID NO: 428782 - DNA, 142 bp, Homo sapiens; identical to SEQ ID NO: 207832
  chr2:12103332-12103474
  hypo

SEQ ID NO: 428783 - DNA, 145 bp, Homo sapiens; identical to SEQ ID NO: 250278
  chr2:12145187-12145332
  hypo

SEQ ID NO: 428784 - DNA, 160 bp, Homo sapiens; identical to SEQ ID NO: 299226
  chr2:12245941-12246101
  hypo

SEQ ID NO: 428785 - DNA, 41 bp, Homo sapiens; identical to SEQ ID NO: 250280
  chr2:12297695-12297736
  hypo

SEQ ID NO: 428786 - DNA, 147 bp, Homo sapiens; identical to SEQ ID NO: 250281
  chr2:12458692-12458839
  hypo

SEQ ID NO: 428787 - DNA, 158 bp, Homo sapiens; identical to SEQ ID NO: 250282
  chr2:12630982-12631140
  hypo

SEQ ID NO: 428788 - DNA, 38 bp, Homo sapiens; identical to SEQ ID NO: 250283
  chr2:12631200-12631238
  hypo

SEQ ID NO: 428789 - DNA, 96 bp, Homo sapiens; identical to SEQ ID NO: 250284
  chr2:14711510-14711606
  hypo

SEQ ID NO: 428790 - DNA, 42 bp, Homo sapiens; identical to SEQ ID NO: 250285
  chr2:14901341-14901383
  hypo

SEQ ID NO: 428791 - DNA, 38 bp, Homo sapiens; identical to SEQ ID NO: 250286
  chr2:14961050-14961088
  hypo

SEQ ID NO: 428792 - DNA, 37 bp, Homo sapiens; identical to SEQ ID NO: 207835
  chr2:14961328-14961365
  hypo

SEQ ID NO: 428793 - DNA, 179 bp, Homo sapiens; identical to SEQ ID NO: 250288
  chr2:15032512-15032691
  hypo

SEQ ID NO: 428794 - DNA, 87 bp, Homo sapiens; identical to SEQ ID NO: 250289
  chr2:15084089-15084176
  hypo

SEQ ID NO: 428795 - DNA, 90 bp, Homo sapiens; identical to SEQ ID NO: 207837
  chr2:15474600-15474690
  hypo

SEQ ID NO: 428796 - DNA, 45 bp, Homo sapiens; identical to SEQ ID NO: 250293
  chr2:15830329-15830374
  hypo

SEQ ID NO: 428797 - DNA, 74 bp, Homo sapiens; identical to SEQ ID NO: 250294
  chr2:15950473-15950547
  hypo

SEQ ID NO: 428798 - DNA, 312 bp, Homo sapiens; identical to SEQ ID NO: 250295
  chr2:15982989-15983301
  hypo

SEQ ID NO: 428799 - DNA, 231 bp, Homo sapiens; identical to SEQ ID NO: 198090
  chr2:16079905-16080136
  hypo

SEQ ID NO: 428800 - DNA, 87 bp, Homo sapiens; identical to SEQ ID NO: 105506
  chr2:16080304-16080391
  hypo

SEQ ID NO: 428801 - DNA, 168 bp, Homo sapiens; identical to SEQ ID NO: 279534
  chr2:16080606-16080774
  hypo

SEQ ID NO: 428802 - DNA, 42 bp, Homo sapiens; identical to SEQ ID NO: 250296
  chr2:16105582-16105624
  hypo

SEQ ID NO: 428803 - DNA, 42 bp, Homo sapiens; identical to SEQ ID NO: 207841
  chr2:16274079-16274121
  hypo

SEQ ID NO: 428804 - DNA, 144 bp, Homo sapiens; identical to SEQ ID NO: 250299
  chr2:16826647-16826791
  hypo

SEQ ID NO: 428805 - DNA, 39 bp, Homo sapiens; identical to SEQ ID NO: 250300
  chr2:17090481-17090520
  hypo

SEQ ID NO: 428806 - DNA, 68 bp, Homo sapiens; identical to SEQ ID NO: 207842
  chr2:17830610-17830678
  hypo

SEQ ID NO: 428807 - DNA, 254 bp, Homo sapiens; identical to SEQ ID NO: 250302
  chr2:17998149-17998403
  hypo

SEQ ID NO: 428808 - DNA, 284 bp, Homo sapiens; identical to SEQ ID NO: 250303
  chr2:18112741-18113025
  hypo

SEQ ID NO: 428809 - DNA, 63 bp, Homo sapiens; identical to SEQ ID NO: 250304
  chr2:20001578-20001641
  hypo

SEQ ID NO: 428810 - DNA, 119 bp, Homo sapiens; identical to SEQ ID NO: 198102
  chr2:20101402-20101521
  hypo

SEQ ID NO: 428811 - DNA, 169 bp, Homo sapiens; identical to SEQ ID NO: 207844
  chr2:20111757-20111926
  hypo

SEQ ID NO: 428812 - DNA, 737 bp, Homo sapiens; identical to SEQ ID NO: 279562
  chr2:20424156-20424893
  hypo

SEQ ID NO: 428813 - DNA, 81 bp, Homo sapiens; identical to SEQ ID NO: 250308
  chr2:20521041-20521122
  hypo

SEQ ID NO: 428814 - DNA, 120 bp, Homo sapiens; identical to SEQ ID NO: 250309
  chr2:20544755-20544875
  hypo

SEQ ID NO: 428815 - DNA, 163 bp, Homo sapiens; identical to SEQ ID NO: 207848
  chr2:20594843-20595006
  hypo

SEQ ID NO: 428816 - DNA, 95 bp, Homo sapiens; identical to SEQ ID NO: 207849
  chr2:20642251-20642346
  hypo

SEQ ID NO: 428817 - DNA, 361 bp, Homo sapiens; identical to SEQ ID NO: 198108
  chr2:20646413-20646774
  hypo

SEQ ID NO: 428818 - DNA, 139 bp, Homo sapiens; identical to SEQ ID NO: 207852
  chr2:20666559-20666698
  hypo

SEQ ID NO: 428819 - DNA, 48 bp, Homo sapiens; identical to SEQ ID NO: 250314
  chr2:20705785-20705833
  hypo

SEQ ID NO: 428820 - DNA, 533 bp, Homo sapiens; identical to SEQ ID NO: 250315
  chr2:20841042-20841575
  hypo

SEQ ID NO: 428821 - DNA, 64 bp, Homo sapiens; identical to SEQ ID NO: 250316
  chr2:20894621-20894685
  hypo

SEQ ID NO: 428822 - DNA, 162 bp, Homo sapiens; identical to SEQ ID NO: 250317
  chr2:20965392-20965554
  hypo

SEQ ID NO: 428823 - DNA, 101 bp, Homo sapiens; identical to SEQ ID NO: 250318
  chr2:21079879-21079980
  hypo

SEQ ID NO: 428824 - DNA, 130 bp, Homo sapiens; identical to SEQ ID NO: 250319
  chr2:21346724-21346854
  hypo

SEQ ID NO: 428825 - DNA, 72 bp, Homo sapiens; identical to SEQ ID NO: 250321
  chr2:23573445-23573517
  hypo

SEQ ID NO: 428826 - DNA, 109 bp, Homo sapiens; identical to SEQ ID NO: 250322
  chr2:23650984-23651093
  hypo

SEQ ID NO: 428827 - DNA, 79 bp, Homo sapiens; identical to SEQ ID NO: 250323
  chr2:23679398-23679477
  hypo

SEQ ID NO: 428828 - DNA, 434 bp, Homo sapiens; identical to SEQ ID NO: 250324
  chr2:23746911-23747345
  hypo

SEQ ID NO: 428829 - DNA, 214 bp, Homo sapiens; identical to SEQ ID NO: 207856
  chr2:23793022-23793236
  hypo

SEQ ID NO: 428830 - DNA, 76 bp, Homo sapiens; identical to SEQ ID NO: 250327
  chr2:23795841-23795917
  hypo

SEQ ID NO: 428831 - DNA, 150 bp, Homo sapiens; identical to SEQ ID NO: 250328
  chr2:23798774-23798924
  hypo

SEQ ID NO: 428832 - DNA, 206 bp, Homo sapiens; identical to SEQ ID NO: 250329
  chr2:23807140-23807346
  hypo

SEQ ID NO: 428833 - DNA, 175 bp, Homo sapiens; identical to SEQ ID NO: 250330
  chr2:23841357-23841532
  hypo

SEQ ID NO: 428834 - DNA, 210 bp, Homo sapiens; identical to SEQ ID NO: 207857
  chr2:23842953-23843163
  hypo

SEQ ID NO: 428835 - DNA, 179 bp, Homo sapiens; identical to SEQ ID NO: 250332
  chr2:23850377-23850556
  hypo

SEQ ID NO: 428836 - DNA, 35 bp, Homo sapiens; identical to SEQ ID NO: 250333
  chr2:23863678-23863713
  hypo

SEQ ID NO: 428837 - DNA, 65 bp, Homo sapiens; identical to SEQ ID NO: 250334
  chr2:23865088-23865153
  hypo

SEQ ID NO: 428838 - DNA, 44 bp, Homo sapiens; identical to SEQ ID NO: 207858
  chr2:23893204-23893248
  hypo

SEQ ID NO: 428839 - DNA, 149 bp, Homo sapiens; identical to SEQ ID NO: 250336
  chr2:23918665-23918814
  hypo

SEQ ID NO: 428840 - DNA, 174 bp, Homo sapiens; identical to SEQ ID NO: 207859
  chr2:24060295-24060469
  hypo

SEQ ID NO: 428841 - DNA, 98 bp, Homo sapiens; identical to SEQ ID NO: 250338
  chr2:24160944-24161042
  hypo

SEQ ID NO: 428842 - DNA, 97 bp, Homo sapiens; identical to SEQ ID NO: 207860
  chr2:24240164-24240261
  hypo

SEQ ID NO: 428843 - DNA, 39 bp, Homo sapiens; identical to SEQ ID NO: 207861
  chr2:24279835-24279874
  hypo

SEQ ID NO: 428844 - DNA, 34 bp, Homo sapiens; identical to SEQ ID NO: 250341
  chr2:24307975-24308009
  hypo

SEQ ID NO: 428845 - DNA, 38 bp, Homo sapiens; identical to SEQ ID NO: 250342
  chr2:24318006-24318044
  hypo

SEQ ID NO: 428846 - DNA, 214 bp, Homo sapiens; identical to SEQ ID NO: 207862
  chr2:24443622-24443836
  hypo

SEQ ID NO: 428847 - DNA, 44 bp, Homo sapiens; identical to SEQ ID NO: 250344
  chr2:24492774-24492818
  hypo

SEQ ID NO: 428848 - DNA, 40 bp, Homo sapiens; identical to SEQ ID NO: 250346
  chr2:24678878-24678918
  hypo

SEQ ID NO: 428849 - DNA, 36 bp, Homo sapiens; identical to SEQ ID NO: 207864
  chr2:24763333-24763369
  hypo

SEQ ID NO: 428850 - DNA, 43 bp, Homo sapiens; identical to SEQ ID NO: 250348
  chr2:24844611-24844654
  hypo

SEQ ID NO: 428851 - DNA, 155 bp, Homo sapiens; identical to SEQ ID NO: 250349
  chr2:25034777-25034932
  hypo

SEQ ID NO: 428852 - DNA, 348 bp, Homo sapiens; identical to SEQ ID NO: 250352
  chr2:25057323-25057671
  hypo

SEQ ID NO: 428853 - DNA, 38 bp, Homo sapiens; identical to SEQ ID NO: 250354
  chr2:25141802-25141840
  hypo

SEQ ID NO: 428854 - DNA, 79 bp, Homo sapiens; identical to SEQ ID NO: 198120
  chr2:25265055-25265134
  hypo

SEQ ID NO: 428855 - DNA, 59 bp, Homo sapiens; identical to SEQ ID NO: 207870
  chr2:25369951-25370010
  hypo

SEQ ID NO: 428856 - DNA, 32 bp, Homo sapiens; identical to SEQ ID NO: 250356
  chr2:25374806-25374838
  hypo

SEQ ID NO: 428857 - DNA, 120 bp, Homo sapiens; identical to SEQ ID NO: 198121
  chr2:25440006-25440126
  hypo

SEQ ID NO: 428858 - DNA, 149 bp, Homo sapiens; identical to SEQ ID NO: 198122
  chr2:25457152-25457301
  hypo

SEQ ID NO: 428859 - DNA, 139 bp, Homo sapiens; identical to SEQ ID NO: 198123
  chr2:25458563-25458702
  hypo

SEQ ID NO: 428860 - DNA, 95 bp, Homo sapiens; identical to SEQ ID NO: 198124
  chr2:25459791-25459886
  hypo

SEQ ID NO: 428861 - DNA, 108 bp, Homo sapiens; identical to SEQ ID NO: 198125
  chr2:25461984-25462092
  hypo

SEQ ID NO: 428862 - DNA, 448 bp, Homo sapiens; identical to SEQ ID NO: 198126
  chr2:25463164-25463612
  hypo

SEQ ID NO: 428863 - DNA, 52 bp, Homo sapiens; identical to SEQ ID NO: 387734
  chr2:25464537-25464589
  hypo

SEQ ID NO: 428864 - DNA, 774 bp, Homo sapiens; identical to SEQ ID NO: 198128
  chr2:25466755-25467529
  hypo

SEQ ID NO: 428865 - DNA, 98 bp, Homo sapiens; identical to SEQ ID NO: 198129
  chr2:25468111-25468209
  hypo

SEQ ID NO: 428866 - DNA, 310 bp, Homo sapiens; identical to SEQ ID NO: 198130
  chr2:25468877-25469187
  hypo

SEQ ID NO: 428867 - DNA, 173 bp, Homo sapiens; identical to SEQ ID NO: 198131
  chr2:25469474-25469647
  hypo

SEQ ID NO: 428868 - DNA, 123 bp, Homo sapiens; identical to SEQ ID NO: 198132
  chr2:25469906-25470029
  hypo

SEQ ID NO: 428869 - DNA, 162 bp, Homo sapiens; identical to SEQ ID NO: 198133
  chr2:25470449-25470611
  hypo

SEQ ID NO: 428870 - DNA, 192 bp, Homo sapiens; identical to SEQ ID NO: 198134
  chr2:25470892-25471084
  hypo

SEQ ID NO: 428871 - DNA, 90 bp, Homo sapiens; identical to SEQ ID NO: 198135
  chr2:25497816-25497906
  hypo

SEQ ID NO: 428872 - DNA, 237 bp, Homo sapiens; identical to SEQ ID NO: 198136
  chr2:25505304-25505541
  hypo

SEQ ID NO: 428873 - DNA, 188 bp, Homo sapiens; identical to SEQ ID NO: 250358
  chr2:25533430-25533618
  hypo

SEQ ID NO: 428874 - DNA, 100 bp, Homo sapiens; identical to SEQ ID NO: 250359
  chr2:25535161-25535261
  hypo

SEQ ID NO: 428875 - DNA, 161 bp, Homo sapiens; identical to SEQ ID NO: 250360
  chr2:25536307-25536468
  hypo

SEQ ID NO: 428876 - DNA, 180 bp, Homo sapiens; identical to SEQ ID NO: 207887
  chr2:25536757-25536937
  hypo

SEQ ID NO: 428877 - DNA, 84 bp, Homo sapiens; identical to SEQ ID NO: 250362
  chr2:25551561-25551645
  hypo

SEQ ID NO: 428878 - DNA, 70 bp, Homo sapiens; identical to SEQ ID NO: 250363
  chr2:25586741-25586811
  hypo

SEQ ID NO: 428879 - DNA, 89 bp, Homo sapiens; identical to SEQ ID NO: 207888
  chr2:25627711-25627800
  hypo

SEQ ID NO: 428880 - DNA, 129 bp, Homo sapiens; identical to SEQ ID NO: 250366
  chr2:25656662-25656791
  hypo

SEQ ID NO: 428881 - DNA, 209 bp, Homo sapiens; identical to SEQ ID NO: 250367
  chr2:25766960-25767169
  hypo

SEQ ID NO: 428882 - DNA, 44 bp, Homo sapiens; identical to SEQ ID NO: 250368
  chr2:25924790-25924834
  hypo

SEQ ID NO: 428883 - DNA, 40 bp, Homo sapiens; identical to SEQ ID NO: 207889
  chr2:25980217-25980257
  hypo

SEQ ID NO: 428884 - DNA, 104 bp, Homo sapiens; identical to SEQ ID NO: 207890
  chr2:26027551-26027655
  hypo

SEQ ID NO: 428885 - DNA, 99 bp, Homo sapiens; identical to SEQ ID NO: 207891
  chr2:26153169-26153268
  hypo

SEQ ID NO: 428886 - DNA, 249 bp, Homo sapiens; identical to SEQ ID NO: 250372
  chr2:26204216-26204465
  hypo

SEQ ID NO: 428887 - DNA, 115 bp, Homo sapiens; identical to SEQ ID NO: 250373
  chr2:26217601-26217716
  hypo

SEQ ID NO: 428888 - DNA, 37 bp, Homo sapiens; identical to SEQ ID NO: 250374
  chr2:26320144-26320181
  hypo

SEQ ID NO: 428889 - DNA, 163 bp, Homo sapiens; identical to SEQ ID NO: 250375
  chr2:26362293-26362456
  hypo

SEQ ID NO: 428890 - DNA, 330 bp, Homo sapiens; identical to SEQ ID NO: 221709
  chr2:26395999-26396329
  hypo

SEQ ID NO: 428891 - DNA, 31 bp, Homo sapiens; identical to SEQ ID NO: 250377
  chr2:26405760-26405791
  hypo

SEQ ID NO: 428892 - DNA, 34 bp, Homo sapiens
  chr2:26524653-26524687
  hypo
atattaaaaagccctttttttgtatgtgaataaa

SEQ ID NO: 428893 - DNA, 200 bp, Homo sapiens; identical to SEQ ID NO: 250379
  chr2:26525985-26526185
  hypo

SEQ ID NO: 428894 - DNA, 94 bp, Homo sapiens; identical to SEQ ID NO: 250380
  chr2:26527933-26528027
  hypo

SEQ ID NO: 428895 - DNA, 33 bp, Homo sapiens; identical to SEQ ID NO: 250381
  chr2:26528087-26528120
  hypo

SEQ ID NO: 428896 - DNA, 59 bp, Homo sapiens; identical to SEQ ID NO: 250382
  chr2:26528393-26528452
  hypo

SEQ ID NO: 428897 - DNA, 175 bp, Homo sapiens; identical to SEQ ID NO: 207894
  chr2:26534837-26535012
  hypo

SEQ ID NO: 428898 - DNA, 193 bp, Homo sapiens; identical to SEQ ID NO: 250384
  chr2:26535371-26535564
  hypo

SEQ ID NO: 428899 - DNA, 112 bp, Homo sapiens; identical to SEQ ID NO: 207895
  chr2:26541946-26542058
  hypo

SEQ ID NO: 428900 - DNA, 43 bp, Homo sapiens; identical to SEQ ID NO: 250386
  chr2:26566584-26566627
  hypo

SEQ ID NO: 428901 - DNA, 131 bp, Homo sapiens; identical to SEQ ID NO: 207896
  chr2:26706036-26706167
  hypo

SEQ ID NO: 428902 - DNA, 92 bp, Homo sapiens; identical to SEQ ID NO: 250389
  chr2:26788281-26788373
  hypo

SEQ ID NO: 428903 - DNA, 203 bp, Homo sapiens; identical to SEQ ID NO: 250390
  chr2:26800292-26800495
  hypo

SEQ ID NO: 428904 - DNA, 94 bp, Homo sapiens; identical to SEQ ID NO: 207897
  chr2:26832824-26832918
  hypo

SEQ ID NO: 428905 - DNA, 187 bp, Homo sapiens; identical to SEQ ID NO: 250392
  chr2:26965249-26965436
  hypo

SEQ ID NO: 428906 - DNA, 120 bp, Homo sapiens; identical to SEQ ID NO: 207899
  chr2:27007230-27007350
  hypo

SEQ ID NO: 428907 - DNA, 233 bp, Homo sapiens; identical to SEQ ID NO: 279619
  chr2:27071919-27072152
  hypo

SEQ ID NO: 428908 - DNA, 42 bp, Homo sapiens; identical to SEQ ID NO: 250396
  chr2:27224548-27224590
  hypo

SEQ ID NO: 428909 - DNA, 68 bp, Homo sapiens; identical to SEQ ID NO: 299373
  chr2:27354515-27354583
  hypo

SEQ ID NO: 428910 - DNA, 226 bp, Homo sapiens; identical to SEQ ID NO: 279632
  chr2:27485733-27485959
  hypo

SEQ ID NO: 428911 - DNA, 141 bp, Homo sapiens; identical to SEQ ID NO: 250400
  chr2:27498159-27498300
  hypo

SEQ ID NO: 428912 - DNA, 71 bp, Homo sapiens; identical to SEQ ID NO: 250401
  chr2:27538034-27538105
  hypo

SEQ ID NO: 428913 - DNA, 300 bp, Homo sapiens; identical to SEQ ID NO: 250402
  chr2:27601407-27601707
  hypo

SEQ ID NO: 428914 - DNA, 208 bp, Homo sapiens; identical to SEQ ID NO: 207904
  chr2:27703854-27704062
  hypo

SEQ ID NO: 428915 - DNA, 42 bp, Homo sapiens; identical to SEQ ID NO: 250405
  chr2:27704758-27704800
  hypo

SEQ ID NO: 428916 - DNA, 93 bp, Homo sapiens; identical to SEQ ID NO: 250406
  chr2:27711608-27711701
  hypo

SEQ ID NO: 428917 - DNA, 35 bp, Homo sapiens; identical to SEQ ID NO: 250407
  chr2:27764227-27764262
  hypo

SEQ ID NO: 428918 - DNA, 91 bp, Homo sapiens; identical to SEQ ID NO: 221715
  chr2:27937851-27937942
  hypo

SEQ ID NO: 428919 - DNA, 32 bp, Homo sapiens; identical to SEQ ID NO: 250408
  chr2:27993512-27993544
  hypo

SEQ ID NO: 428920 - DNA, 45 bp, Homo sapiens; identical to SEQ ID NO: 402679
  chr2:28065675-28065720
  hypo

SEQ ID NO: 428921 - DNA, 34 bp, Homo sapiens; identical to SEQ ID NO: 250410
  chr2:28269009-28269043
  hypo

SEQ ID NO: 428922 - DNA, 50 bp, Homo sapiens; identical to SEQ ID NO: 250411
  chr2:28572403-28572453
  hypo

SEQ ID NO: 428923 - DNA, 149 bp, Homo sapiens; identical to SEQ ID NO: 207906
  chr2:28586480-28586629
  hypo

SEQ ID NO: 428924 - DNA, 236 bp, Homo sapiens; identical to SEQ ID NO: 299391
  chr2:28676717-28676953
  hypo

SEQ ID NO: 428925 - DNA, 251 bp, Homo sapiens; identical to SEQ ID NO: 250414
  chr2:28819617-28819868
  hypo

SEQ ID NO: 428926 - DNA, 34 bp, Homo sapiens; identical to SEQ ID NO: 207907
  chr2:28919660-28919694
  hypo

SEQ ID NO: 428927 - DNA, 44 bp, Homo sapiens; identical to SEQ ID NO: 250416
  chr2:29062640-29062684
  hypo

SEQ ID NO: 428928 - DNA, 102 bp, Homo sapiens; identical to SEQ ID NO: 207910
  chr2:29469962-29470064
  hypo

SEQ ID NO: 428929 - DNA, 223 bp, Homo sapiens; identical to SEQ ID NO: 279657
  chr2:30369368-30369591
  hypo

SEQ ID NO: 428930 - DNA, 210 bp, Homo sapiens; identical to SEQ ID NO: 250419
  chr2:30480379-30480589
  hypo

SEQ ID NO: 428931 - DNA, 399 bp, Homo sapiens; identical to SEQ ID NO: 250420
  chr2:30481975-30482374
  hypo

SEQ ID NO: 428932 - DNA, 194 bp, Homo sapiens; identical to SEQ ID NO: 207914
  chr2:30495297-30495491
  hypo

SEQ ID NO: 428933 - DNA, 266 bp, Homo sapiens; identical to SEQ ID NO: 207915
  chr2:30525798-30526064
  hypo

SEQ ID NO: 428934 - DNA, 36 bp, Homo sapiens; identical to SEQ ID NO: 250423
  chr2:30587093-30587129
  hypo

SEQ ID NO: 428935 - DNA, 31 bp, Homo sapiens; identical to SEQ ID NO: 250424
  chr2:30634157-30634188
  hypo

SEQ ID NO: 428936 - DNA, 90 bp, Homo sapiens; identical to SEQ ID NO: 250425
  chr2:30794970-30795060
  hypo

SEQ ID NO: 428937 - DNA, 161 bp, Homo sapiens; identical to SEQ ID NO: 250426
  chr2:30863077-30863238
  hypo

SEQ ID NO: 428938 - DNA, 104 bp, Homo sapiens; identical to SEQ ID NO: 250427
  chr2:30863744-30863848
  hypo

SEQ ID NO: 428939 - DNA, 121 bp, Homo sapiens; identical to SEQ ID NO: 250428
  chr2:30982467-30982588
  hypo

SEQ ID NO: 428940 - DNA, 265 bp, Homo sapiens; identical to SEQ ID NO: 207919
  chr2:31477235-31477500
  hypo

SEQ ID NO: 428941 - DNA, 46 bp, Homo sapiens; identical to SEQ ID NO: 250430
  chr2:31480289-31480335
  hypo

SEQ ID NO: 428942 - DNA, 111 bp, Homo sapiens; identical to SEQ ID NO: 250431
  chr2:31480365-31480476
  hypo

SEQ ID NO: 428943 - DNA, 95 bp, Homo sapiens; identical to SEQ ID NO: 207921
  chr2:31551361-31551456
  hypo

SEQ ID NO: 428944 - DNA, 90 bp, Homo sapiens; identical to SEQ ID NO: 250434
  chr2:31560534-31560624
  hypo

SEQ ID NO: 428945 - DNA, 231 bp, Homo sapiens; identical to SEQ ID NO: 207922
  chr2:32142425-32142656
  hypo

SEQ ID NO: 428946 - DNA, 120 bp, Homo sapiens; identical to SEQ ID NO: 207923
  chr2:32244332-32244452
  hypo

SEQ ID NO: 428947 - DNA, 120 bp, Homo sapiens; identical to SEQ ID NO: 207924
  chr2:32291347-32291467
  hypo

SEQ ID NO: 428948 - DNA, 40 bp, Homo sapiens; identical to SEQ ID NO: 250439
  chr2:32315098-32315138
  hypo

SEQ ID NO: 428949 - DNA, 104 bp, Homo sapiens; identical to SEQ ID NO: 250440
  chr2:32361185-32361289
  hypo

SEQ ID NO: 428950 - DNA, 36 bp, Homo sapiens; identical to SEQ ID NO: 250444
  chr2:32798532-32798568
  hypo

SEQ ID NO: 428951 - DNA, 44 bp, Homo sapiens; identical to SEQ ID NO: 250445
  chr2:32980697-32980741
  hypo

SEQ ID NO: 428952 - DNA, 116 bp, Homo sapiens; identical to SEQ ID NO: 250446
  chr2:32983458-32983574
  hypo

SEQ ID NO: 428953 - DNA, 45 bp, Homo sapiens; identical to SEQ ID NO: 250447
  chr2:33215245-33215290
  hypo

SEQ ID NO: 428954 - DNA, 240 bp, Homo sapiens; identical to SEQ ID NO: 207925
  chr2:33281381-33281621
  hypo

SEQ ID NO: 428955 - DNA, 37 bp, Homo sapiens; identical to SEQ ID NO: 250449
  chr2:33304098-33304135
  hypo

SEQ ID NO: 428956 - DNA, 37 bp, Homo sapiens; identical to SEQ ID NO: 250450
  chr2:33317210-33317247
  hypo

SEQ ID NO: 428957 - DNA, 58 bp, Homo sapiens; identical to SEQ ID NO: 250451
  chr2:33346710-33346768
  hypo

SEQ ID NO: 428958 - DNA, 34 bp, Homo sapiens; identical to SEQ ID NO: 250452
  chr2:33513604-33513638
  hypo

SEQ ID NO: 428959 - DNA, 156 bp, Homo sapiens; identical to SEQ ID NO: 250453
  chr2:33534845-33535001
  hypo

SEQ ID NO: 428960 - DNA, 38 bp, Homo sapiens; identical to SEQ ID NO: 250454
  chr2:33637935-33637973
  hypo

SEQ ID NO: 428961 - DNA, 302 bp, Homo sapiens; identical to SEQ ID NO: 250455
  chr2:33952402-33952704
  hypo

SEQ ID NO: 428962 - DNA, 75 bp, Homo sapiens; identical to SEQ ID NO: 250456
  chr2:34065553-34065628
  hypo

SEQ ID NO: 428963 - DNA, 86 bp, Homo sapiens; identical to SEQ ID NO: 250457
  chr2:36071157-36071243
  hypo

SEQ ID NO: 428964 - DNA, 181 bp, Homo sapiens; identical to SEQ ID NO: 250458
  chr2:36668406-36668587
  hypo

SEQ ID NO: 428965 - DNA, 201 bp, Homo sapiens; identical to SEQ ID NO: 250459
  chr2:36805565-36805766
  hypo

SEQ ID NO: 428966 - DNA, 99 bp, Homo sapiens; identical to SEQ ID NO: 250461
  chr2:37027667-37027766
  hypo

SEQ ID NO: 428967 - DNA, 46 bp, Homo sapiens; identical to SEQ ID NO: 250463
  chr2:37076291-37076337
  hypo

SEQ ID NO: 428968 - DNA, 195 bp, Homo sapiens; identical to SEQ ID NO: 207926
  chr2:37076576-37076771
  hypo

SEQ ID NO: 428969 - DNA, 38 bp, Homo sapiens; identical to SEQ ID NO: 207927
  chr2:37149992-37150030
  hypo

SEQ ID NO: 428970 - DNA, 150 bp, Homo sapiens; identical to SEQ ID NO: 250466
  chr2:37195422-37195572
  hypo

SEQ ID NO: 428971 - DNA, 120 bp, Homo sapiens; identical to SEQ ID NO: 250467
  chr2:37227182-37227302
  hypo

SEQ ID NO: 428972 - DNA, 87 bp, Homo sapiens; identical to SEQ ID NO: 207928
  chr2:37241581-37241668
  hypo

SEQ ID NO: 428973 - DNA, 313 bp, Homo sapiens; identical to SEQ ID NO: 415929
  chr2:37898934-37899247
  hypo

SEQ ID NO: 428974 - DNA, 64 bp, Homo sapiens; identical to SEQ ID NO: 279683
  chr2:38152927-38152991
  hypo

SEQ ID NO: 428975 - DNA, 160 bp, Homo sapiens; identical to SEQ ID NO: 207930
  chr2:38157989-38158149
  hypo

SEQ ID NO: 428976 - DNA, 177 bp, Homo sapiens; identical to SEQ ID NO: 250471
  chr2:38201226-38201403
  hypo

SEQ ID NO: 428977 - DNA, 40 bp, Homo sapiens; identical to SEQ ID NO: 250472
  chr2:38241063-38241103
  hypo

SEQ ID NO: 428978 - DNA, 221 bp, Homo sapiens; identical to SEQ ID NO: 250473
  chr2:38489624-38489845
  hypo

SEQ ID NO: 428979 - DNA, 156 bp, Homo sapiens; identical to SEQ ID NO: 250474
  chr2:38546334-38546490
  hypo

SEQ ID NO: 428980 - DNA, 31 bp, Homo sapiens; identical to SEQ ID NO: 207933
  chr2:38551439-38551470
  hypo

SEQ ID NO: 428981 - DNA, 84 bp, Homo sapiens; identical to SEQ ID NO: 207934
  chr2:38585486-38585570
  hypo

SEQ ID NO: 428982 - DNA, 44 bp, Homo sapiens; identical to SEQ ID NO: 250477
  chr2:38594452-38594496
  hypo

SEQ ID NO: 428983 - DNA, 82 bp, Homo sapiens; identical to SEQ ID NO: 250478
  chr2:38610902-38610984
  hypo

SEQ ID NO: 428984 - DNA, 31 bp, Homo sapiens; identical to SEQ ID NO: 207935
  chr2:38649876-38649907
  hypo

SEQ ID NO: 428985 - DNA, 149 bp, Homo sapiens; identical to SEQ ID NO: 250480
  chr2:38742475-38742624
  hypo

SEQ ID NO: 428986 - DNA, 120 bp, Homo sapiens; identical to SEQ ID NO: 207936
  chr2:39016315-39016435
  hypo

SEQ ID NO: 428987 - DNA, 162 bp, Homo sapiens; identical to SEQ ID NO: 250487
  chr2:39406776-39406938
  hypo

SEQ ID NO: 428988 - DNA, 102 bp, Homo sapiens; identical to SEQ ID NO: 250489
  chr2:40560220-40560322
  hypo

SEQ ID NO: 428989 - DNA, 165 bp, Homo sapiens; identical to SEQ ID NO: 207939
  chr2:41223819-41223984
  hypo

SEQ ID NO: 428990 - DNA, 174 bp, Homo sapiens; identical to SEQ ID NO: 250491
  chr2:42155747-42155921
  hypo

SEQ ID NO: 428991 - DNA, 161 bp, Homo sapiens; identical to SEQ ID NO: 250492
  chr2:42157839-42158000
  hypo

SEQ ID NO: 428992 - DNA, 141 bp, Homo sapiens; identical to SEQ ID NO: 250494
  chr2:42282412-42282553
  hypo

SEQ ID NO: 428993 - DNA, 370 bp, Homo sapiens; identical to SEQ ID NO: 279694
  chr2:42395973-42396343
  hypo

SEQ ID NO: 428994 - DNA, 35 bp, Homo sapiens; identical to SEQ ID NO: 207942
  chr2:42403393-42403428
  hypo

SEQ ID NO: 428995 - DNA, 94 bp, Homo sapiens; identical to SEQ ID NO: 250497
  chr2:42530714-42530808
  hypo

SEQ ID NO: 428996 - DNA, 43 bp, Homo sapiens; identical to SEQ ID NO: 207944
  chr2:43002056-43002099
  hypo

SEQ ID NO: 428997 - DNA, 135 bp, Homo sapiens; identical to SEQ ID NO: 250499
  chr2:43051041-43051176
  hypo

SEQ ID NO: 428998 - DNA, 72 bp, Homo sapiens; identical to SEQ ID NO: 207945
  chr2:43103590-43103662
  hypo

SEQ ID NO: 428999 - DNA, 35 bp, Homo sapiens; identical to SEQ ID NO: 207946
  chr2:43123919-43123954
  hypo

SEQ ID NO: 429000 - DNA, 118 bp, Homo sapiens; identical to SEQ ID NO: 250502
  chr2:43147317-43147435
  hypo

SEQ ID NO: 429001 - DNA, 75 bp, Homo sapiens; identical to SEQ ID NO: 207947
  chr2:43148273-43148348
  hypo

SEQ ID NO: 429002 - DNA, 55 bp, Homo sapiens; identical to SEQ ID NO: 250504
  chr2:43159425-43159480
  hypo

SEQ ID NO: 429003 - DNA, 101 bp, Homo sapiens; identical to SEQ ID NO: 207948
  chr2:43173213-43173314
  hypo

SEQ ID NO: 429004 - DNA, 200 bp, Homo sapiens; identical to SEQ ID NO: 250506
  chr2:43185203-43185403
  hypo

SEQ ID NO: 429005 - DNA, 343 bp, Homo sapiens; identical to SEQ ID NO: 207949
  chr2:43248787-43249130
  hypo

SEQ ID NO: 429006 - DNA, 146 bp, Homo sapiens; identical to SEQ ID NO: 250509
  chr2:43266043-43266189
  hypo

SEQ ID NO: 429007 - DNA, 141 bp, Homo sapiens; identical to SEQ ID NO: 250510
  chr2:43294291-43294432
  hypo

SEQ ID NO: 429008 - DNA, 76 bp, Homo sapiens; identical to SEQ ID NO: 250511
  chr2:43296669-43296745
  hypo

SEQ ID NO: 429009 - DNA, 173 bp, Homo sapiens; identical to SEQ ID NO: 207950
  chr2:43299388-43299561
  hypo

SEQ ID NO: 429010 - DNA, 37 bp, Homo sapiens; identical to SEQ ID NO: 250513
  chr2:43365142-43365179
  hypo

SEQ ID NO: 429011 - DNA, 189 bp, Homo sapiens; identical to SEQ ID NO: 207951
  chr2:43373136-43373325
  hypo

SEQ ID NO: 429012 - DNA, 34 bp, Homo sapiens; identical to SEQ ID NO: 207952
  chr2:43388282-43388316
  hypo

SEQ ID NO: 429013 - DNA, 49 bp, Homo sapiens; identical to SEQ ID NO: 250517
  chr2:43411559-43411608
  hypo

SEQ ID NO: 429014 - DNA, 145 bp, Homo sapiens; identical to SEQ ID NO: 250519
  chr2:43420537-43420682
  hypo

SEQ ID NO: 429015 - DNA, 122 bp, Homo sapiens; identical to SEQ ID NO: 250520
  chr2:43496628-43496750
  hypo

SEQ ID NO: 429016 - DNA, 35 bp, Homo sapiens; identical to SEQ ID NO: 207954
  chr2:43820774-43820809
  hypo

SEQ ID NO: 429017 - DNA, 35 bp, Homo sapiens; identical to SEQ ID NO: 207955
  chr2:43821049-43821084
  hypo

SEQ ID NO: 429018 - DNA, 157 bp, Homo sapiens; identical to SEQ ID NO: 250524
  chr2:44047673-44047830
  hypo

SEQ ID NO: 429019 - DNA, 116 bp, Homo sapiens; identical to SEQ ID NO: 250525
  chr2:44104773-44104889
  hypo

SEQ ID NO: 429020 - DNA, 33 bp, Homo sapiens; identical to SEQ ID NO: 207956
  chr2:44113283-44113316
  hypo

SEQ ID NO: 429021 - DNA, 63 bp, Homo sapiens; identical to SEQ ID NO: 250529
  chr2:44315198-44315261
  hypo

SEQ ID NO: 429022 - DNA, 40 bp, Homo sapiens; identical to SEQ ID NO: 250530
  chr2:44402110-44402150
  hypo

SEQ ID NO: 429023 - DNA, 42 bp, Homo sapiens; identical to SEQ ID NO: 250531
  chr2:44436625-44436667
  hypo

SEQ ID NO: 429024 - DNA, 32 bp, Homo sapiens; identical to SEQ ID NO: 207959
  chr2:44439162-44439194
  hypo

SEQ ID NO: 429025 - DNA, 35 bp, Homo sapiens; identical to SEQ ID NO: 250533
  chr2:44468999-44469034
  hypo

SEQ ID NO: 429026 - DNA, 35 bp, Homo sapiens; identical to SEQ ID NO: 250534
  chr2:44469274-44469309
  hypo

SEQ ID NO: 429027 - DNA, 149 bp, Homo sapiens; identical to SEQ ID NO: 250536
  chr2:44502842-44502991
  hypo

SEQ ID NO: 429028 - DNA, 33 bp, Homo sapiens; identical to SEQ ID NO: 207960
  chr2:44505288-44505321
  hypo

SEQ ID NO: 429029 - DNA, 35 bp, Homo sapiens; identical to SEQ ID NO: 250538
  chr2:44528016-44528051
  hypo

SEQ ID NO: 429030 - DNA, 120 bp, Homo sapiens; identical to SEQ ID NO: 250539
  chr2:44534051-44534171
  hypo

SEQ ID NO: 429031 - DNA, 42 bp, Homo sapiens; identical to SEQ ID NO: 250541
  chr2:44729124-44729166
  hypo

SEQ ID NO: 429032 - DNA, 304 bp, Homo sapiens; identical to SEQ ID NO: 250542
  chr2:44933645-44933949
  hypo

SEQ ID NO: 429033 - DNA, 96 bp, Homo sapiens; identical to SEQ ID NO: 250543
  chr2:44999266-44999362
  hypo

SEQ ID NO: 429034 - DNA, 205 bp, Homo sapiens; identical to SEQ ID NO: 207962
  chr2:45927198-45927403
  hypo

SEQ ID NO: 429035 - DNA, 41 bp, Homo sapiens; identical to SEQ ID NO: 207963
  chr2:45940266-45940307
  hypo

SEQ ID NO: 429036 - DNA, 50 bp, Homo sapiens; identical to SEQ ID NO: 250546
  chr2:46399258-46399308
  hypo

SEQ ID NO: 429037 - DNA, 145 bp, Homo sapiens; identical to SEQ ID NO: 250547
  chr2:46399620-46399765
  hypo

SEQ ID NO: 429038 - DNA, 559 bp, Homo sapiens; identical to SEQ ID NO: 198187
  chr2:46524134-46524693
  hypo

SEQ ID NO: 429039 - DNA, 274 bp, Homo sapiens; identical to SEQ ID NO: 415958
  chr2:46524957-46525231
  hypo

SEQ ID NO: 429040 - DNA, 39 bp, Homo sapiens; identical to SEQ ID NO: 250548
  chr2:46635255-46635294
  hypo

SEQ ID NO: 429041 - DNA, 124 bp, Homo sapiens; identical to SEQ ID NO: 207966
  chr2:46707664-46707788
  hypo

SEQ ID NO: 429042 - DNA, 63 bp, Homo sapiens; identical to SEQ ID NO: 279735
  chr2:46770636-46770699
  hypo

SEQ ID NO: 429043 - DNA, 128 bp, Homo sapiens; identical to SEQ ID NO: 279736
  chr2:46770831-46770959
  hypo

SEQ ID NO: 429044 - DNA, 81 bp, Homo sapiens; identical to SEQ ID NO: 207967
  chr2:46834766-46834847
  hypo

SEQ ID NO: 429045 - DNA, 223 bp, Homo sapiens; identical to SEQ ID NO: 250551
  chr2:47095093-47095316
  hypo

SEQ ID NO: 429046 - DNA, 160 bp, Homo sapiens; identical to SEQ ID NO: 250552
  chr2:47102026-47102186
  hypo

SEQ ID NO: 429047 - DNA, 81 bp, Homo sapiens; identical to SEQ ID NO: 198192
  chr2:47167906-47167987
  hypo

SEQ ID NO: 429048 - DNA, 307 bp, Homo sapiens; identical to SEQ ID NO: 250555
  chr2:47232013-47232320
  hypo

SEQ ID NO: 429049 - DNA, 96 bp, Homo sapiens; identical to SEQ ID NO: 141542
  chr2:47234721-47234817
  hypo

SEQ ID NO: 429050 - DNA, 127 bp, Homo sapiens; identical to SEQ ID NO: 250557
  chr2:47238529-47238656
  hypo

SEQ ID NO: 429051 - DNA, 101 bp, Homo sapiens; identical to SEQ ID NO: 207969
  chr2:47247696-47247797
  hypo

SEQ ID NO: 429052 - DNA, 80 bp, Homo sapiens; identical to SEQ ID NO: 250560
  chr2:47370888-47370968
  hypo

SEQ ID NO: 429053 - DNA, 204 bp, Homo sapiens; identical to SEQ ID NO: 250561
  chr2:47419053-47419257
  hypo

SEQ ID NO: 429054 - DNA, 172 bp, Homo sapiens; identical to SEQ ID NO: 207970
  chr2:47475844-47476016
  hypo

SEQ ID NO: 429055 - DNA, 78 bp, Homo sapiens; identical to SEQ ID NO: 250563
  chr2:47574177-47574255
  hypo

SEQ ID NO: 429056 - DNA, 83 bp, Homo sapiens; identical to SEQ ID NO: 250564
  chr2:47595493-47595576
  hypo

SEQ ID NO: 429057 - DNA, 329 bp, Homo sapiens; identical to SEQ ID NO: 198194
  chr2:47596115-47596444
  hypo

SEQ ID NO: 429058 - DNA, 60 bp, Homo sapiens; identical to SEQ ID NO: 198195
  chr2:47596505-47596565
  hypo

SEQ ID NO: 429059 - DNA, 55 bp, Homo sapiens; identical to SEQ ID NO: 198196
  chr2:47596794-47596849
  hypo

SEQ ID NO: 429060 - DNA, 41 bp, Homo sapiens; identical to SEQ ID NO: 37435
  chr2:47596941-47596982
  hypo

SEQ ID NO: 429061 - DNA, 763 bp, Homo sapiens; identical to SEQ ID NO: 279748
  chr2:47629778-47630541
  hypo

SEQ ID NO: 429062 - DNA, 155 bp, Homo sapiens; identical to SEQ ID NO: 221744
  chr2:47635539-47635694
  hypo

SEQ ID NO: 429063 - DNA, 279 bp, Homo sapiens; identical to SEQ ID NO: 221745
  chr2:47637232-47637511
  hypo

SEQ ID NO: 429064 - DNA, 147 bp, Homo sapiens; identical to SEQ ID NO: 221746
  chr2:47639552-47639699
  hypo

SEQ ID NO: 429065 - DNA, 150 bp, Homo sapiens; identical to SEQ ID NO: 221747
  chr2:47641407-47641557
  hypo

SEQ ID NO: 429066 - DNA, 134 bp, Homo sapiens; identical to SEQ ID NO: 221748
  chr2:47643434-47643568
  hypo

SEQ ID NO: 429067 - DNA, 67 bp, Homo sapiens; identical to SEQ ID NO: 395893
  chr2:47656880-47656947
  hypo

SEQ ID NO: 429068 - DNA, 60 bp, Homo sapiens; identical to SEQ ID NO: 395894
  chr2:47657020-47657080
  hypo

SEQ ID NO: 429069 - DNA, 110 bp, Homo sapiens; identical to SEQ ID NO: 221750
  chr2:47672686-47672796
  hypo

SEQ ID NO: 429070 - DNA, 124 bp, Homo sapiens; identical to SEQ ID NO: 221751
  chr2:47690169-47690293
  hypo

SEQ ID NO: 429071 - DNA, 151 bp, Homo sapiens; identical to SEQ ID NO: 221752
  chr2:47693796-47693947
  hypo

SEQ ID NO: 429072 - DNA, 98 bp, Homo sapiens; identical to SEQ ID NO: 221753
  chr2:47698103-47698201
  hypo

SEQ ID NO: 429073 - DNA, 246 bp, Homo sapiens; identical to SEQ ID NO: 221754
  chr2:47702163-47702409
  hypo

SEQ ID NO: 429074 - DNA, 205 bp, Homo sapiens; identical to SEQ ID NO: 221755
  chr2:47703505-47703710
  hypo

SEQ ID NO: 429075 - DNA, 248 bp, Homo sapiens; identical to SEQ ID NO: 221756
  chr2:47705410-47705658
  hypo

SEQ ID NO: 429076 - DNA, 176 bp, Homo sapiens; identical to SEQ ID NO: 221757
  chr2:47707834-47708010
  hypo

SEQ ID NO: 429077 - DNA, 450 bp, Homo sapiens; identical to SEQ ID NO: 221758
  chr2:47709917-47710367
  hypo

SEQ ID NO: 429078 - DNA, 38 bp, Homo sapiens; identical to SEQ ID NO: 207977
  chr2:47802077-47802115
  hypo

SEQ ID NO: 429079 - DNA, 143 bp, Homo sapiens; identical to SEQ ID NO: 250568
  chr2:47845123-47845266
  hypo

SEQ ID NO: 429080 - DNA, 45 bp, Homo sapiens; identical to SEQ ID NO: 207978
  chr2:47918383-47918428
  hypo

SEQ ID NO: 429081 - DNA, 412 bp, Homo sapiens; identical to SEQ ID NO: 221761
  chr2:48010220-48010632
  hypo

SEQ ID NO: 429082 - DNA, 197 bp, Homo sapiens; identical to SEQ ID NO: 221762
  chr2:48018065-48018262
  hypo

SEQ ID NO: 429083 - DNA, 170 bp, Homo sapiens; identical to SEQ ID NO: 221763
  chr2:48023032-48023202
  hypo

SEQ ID NO: 429084 - DNA, 2545 bp, Homo sapiens; identical to SEQ ID NO: 221764
  chr2:48025749-48028294
  hypo

SEQ ID NO: 429085 - DNA, 266 bp, Homo sapiens; identical to SEQ ID NO: 221765
  chr2:48030558-48030824
  hypo

SEQ ID NO: 429086 - DNA, 118 bp, Homo sapiens; identical to SEQ ID NO: 221766
  chr2:48032048-48032166
  hypo

SEQ ID NO: 429087 - DNA, 90 bp, Homo sapiens; identical to SEQ ID NO: 221767
  chr2:48032756-48032846
  hypo

SEQ ID NO: 429088 - DNA, 750 bp, Homo sapiens; identical to SEQ ID NO: 221768
  chr2:48033342-48034092
  hypo

SEQ ID NO: 429089 - DNA, 100 bp, Homo sapiens; identical to SEQ ID NO: 207979
  chr2:48539633-48539733
  hypo

SEQ ID NO: 429090 - DNA, 86 bp, Homo sapiens; identical to SEQ ID NO: 250571
  chr2:48606934-48607020
  hypo

SEQ ID NO: 429091 - DNA, 107 bp, Homo sapiens; identical to SEQ ID NO: 250572
  chr2:48742859-48742966
  hypo

SEQ ID NO: 429092 - DNA, 91 bp, Homo sapiens; identical to SEQ ID NO: 207980
  chr2:49621663-49621754
  hypo

SEQ ID NO: 429093 - DNA, 36 bp, Homo sapiens; identical to SEQ ID NO: 207981
  chr2:54019055-54019091
  hypo

SEQ ID NO: 429094 - DNA, 88 bp, Homo sapiens; identical to SEQ ID NO: 250576
  chr2:54027326-54027414
  hypo

SEQ ID NO: 429095 - DNA, 154 bp, Homo sapiens; identical to SEQ ID NO: 207982
  chr2:54097367-54097521
  hypo

SEQ ID NO: 429096 - DNA, 159 bp, Homo sapiens; identical to SEQ ID NO: 250578
  chr2:54124939-54125098
  hypo

SEQ ID NO: 429097 - DNA, 114 bp, Homo sapiens; identical to SEQ ID NO: 250579
  chr2:54308420-54308534
  hypo

SEQ ID NO: 429098 - DNA, 292 bp, Homo sapiens; identical to SEQ ID NO: 250580
  chr2:54312128-54312420
  hypo

SEQ ID NO: 429099 - DNA, 65 bp, Homo sapiens
  chr2:54344031-54344096
  hypo
ggggtgaataatttggcaggaagggtggttacagaacaggtgactcaggatgattcaggtcagag

SEQ ID NO: 429100 - DNA, 140 bp, Homo sapiens; identical to SEQ ID NO: 221769
  chr2:54683032-54683172
  hypo

SEQ ID NO: 429101 - DNA, 137 bp, Homo sapiens; identical to SEQ ID NO: 250582
  chr2:54880809-54880946
  hypo

SEQ ID NO: 429102 - DNA, 79 bp, Homo sapiens; identical to SEQ ID NO: 250583
  chr2:54939737-54939816
  hypo

SEQ ID NO: 429103 - DNA, 31 bp, Homo sapiens; identical to SEQ ID NO: 250584
  chr2:55098810-55098841
  hypo

SEQ ID NO: 429104 - DNA, 360 bp, Homo sapiens; identical to SEQ ID NO: 250585
  chr2:55173805-55174165
  hypo

SEQ ID NO: 429105 - DNA, 207 bp, Homo sapiens; identical to SEQ ID NO: 250586
  chr2:55175832-55176039
  hypo

SEQ ID NO: 429106 - DNA, 232 bp, Homo sapiens; identical to SEQ ID NO: 250588
  chr2:55366223-55366455
  hypo

SEQ ID NO: 429107 - DNA, 112 bp, Homo sapiens; identical to SEQ ID NO: 250590
  chr2:55451552-55451664
  hypo

SEQ ID NO: 429108 - DNA, 84 bp, Homo sapiens; identical to SEQ ID NO: 207986
  chr2:55499046-55499130
  hypo

SEQ ID NO: 429109 - DNA, 101 bp, Homo sapiens; identical to SEQ ID NO: 279798
  chr2:55646327-55646428
  hypo

SEQ ID NO: 429110 - DNA, 680 bp, Homo sapiens; identical to SEQ ID NO: 279799
  chr2:55646458-55647138
  hypo

SEQ ID NO: 429111 - DNA, 84 bp, Homo sapiens; identical to SEQ ID NO: 402785
  chr2:55687115-55687199
  hypo

SEQ ID NO: 429112 - DNA, 38 bp, Homo sapiens; identical to SEQ ID NO: 250595
  chr2:55687319-55687357
  hypo

SEQ ID NO: 429113 - DNA, 42 bp, Homo sapiens; identical to SEQ ID NO: 250596
  chr2:55825329-55825371
  hypo

SEQ ID NO: 429114 - DNA, 87 bp, Homo sapiens; identical to SEQ ID NO: 250597
  chr2:55874486-55874573
  hypo

SEQ ID NO: 429115 - DNA, 77 bp, Homo sapiens; identical to SEQ ID NO: 250598
  chr2:57645780-57645857
  hypo

SEQ ID NO: 429116 - DNA, 33 bp, Homo sapiens; identical to SEQ ID NO: 198219
  chr2:58655395-58655428
  hypo

SEQ ID NO: 429117 - DNA, 348 bp, Homo sapiens; identical to SEQ ID NO: 279813
  chr2:58655631-58655979
  hypo

SEQ ID NO: 429118 - DNA, 101 bp, Homo sapiens; identical to SEQ ID NO: 198220
  chr2:58776940-58777041
  hypo

SEQ ID NO: 429119 - DNA, 34 bp, Homo sapiens; identical to SEQ ID NO: 250600
  chr2:58788931-58788965
  hypo

SEQ ID NO: 429120 - DNA, 38 bp, Homo sapiens; identical to SEQ ID NO: 250601
  chr2:59382731-59382769
  hypo

SEQ ID NO: 429121 - DNA, 45 bp, Homo sapiens; identical to SEQ ID NO: 250603
  chr2:60642569-60642614
  hypo

SEQ ID NO: 429122 - DNA, 81 bp, Homo sapiens; identical to SEQ ID NO: 250604
  chr2:60688977-60689058
  hypo

SEQ ID NO: 429123 - DNA, 205 bp, Homo sapiens; identical to SEQ ID NO: 250605
  chr2:60704080-60704285
  hypo

SEQ ID NO: 429124 - DNA, 36 bp, Homo sapiens; identical to SEQ ID NO: 207990
  chr2:60705871-60705907
  hypo

SEQ ID NO: 429125 - DNA, 63 bp, Homo sapiens; identical to SEQ ID NO: 250608
  chr2:60733548-60733611
  hypo

SEQ ID NO: 429126 - DNA, 58 bp, Homo sapiens; identical to SEQ ID NO: 250609
  chr2:60779104-60779162
  hypo

SEQ ID NO: 429127 - DNA, 124 bp, Homo sapiens; identical to SEQ ID NO: 250610
  chr2:60812484-60812608
  hypo

SEQ ID NO: 429128 - DNA, 35 bp, Homo sapiens; identical to SEQ ID NO: 250611
  chr2:60986216-60986251
  hypo

SEQ ID NO: 429129 - DNA, 261 bp, Homo sapiens; identical to SEQ ID NO: 250612
  chr2:61035610-61035871
  hypo

SEQ ID NO: 429130 - DNA, 85 bp, Homo sapiens; identical to SEQ ID NO: 250614
  chr2:61088705-61088790
  hypo

SEQ ID NO: 429131 - DNA, 104 bp, Homo sapiens; identical to SEQ ID NO: 207994
  chr2:61135144-61135248
  hypo

SEQ ID NO: 429132 - DNA, 53 bp, Homo sapiens; identical to SEQ ID NO: 207995
  chr2:61175238-61175291
  hypo

SEQ ID NO: 429133 - DNA, 40 bp, Homo sapiens; identical to SEQ ID NO: 250618
  chr2:61186779-61186819
  hypo

SEQ ID NO: 429134 - DNA, 126 bp, Homo sapiens; identical to SEQ ID NO: 207997
  chr2:61304102-61304228
  hypo

SEQ ID NO: 429135 - DNA, 39 bp, Homo sapiens; identical to SEQ ID NO: 250621
  chr2:61394939-61394978
  hypo

SEQ ID NO: 429136 - DNA, 139 bp, Homo sapiens; identical to SEQ ID NO: 207998
  chr2:61448896-61449035
  hypo

SEQ ID NO: 429137 - DNA, 40 bp, Homo sapiens; identical to SEQ ID NO: 207999
  chr2:61471724-61471764
  hypo

SEQ ID NO: 429138 - DNA, 35 bp, Homo sapiens; identical to SEQ ID NO: 208001
  chr2:61505211-61505246
  hypo

SEQ ID NO: 429139 - DNA, 32 bp, Homo sapiens; identical to SEQ ID NO: 208002
  chr2:61556157-61556189
  hypo

SEQ ID NO: 429140 - DNA, 120 bp, Homo sapiens; identical to SEQ ID NO: 250628
  chr2:61759938-61760058
  hypo

SEQ ID NO: 429141 - DNA, 163 bp, Homo sapiens; identical to SEQ ID NO: 250629
  chr2:61816741-61816904
  hypo

SEQ ID NO: 429142 - DNA, 32 bp, Homo sapiens; identical to SEQ ID NO: 250630
  chr2:61885815-61885847
  hypo

SEQ ID NO: 429143 - DNA, 95 bp, Homo sapiens; identical to SEQ ID NO: 221776
  chr2:61921788-61921883
  hypo

SEQ ID NO: 429144 - DNA, 42 bp, Homo sapiens; identical to SEQ ID NO: 250631
  chr2:61923843-61923885
  hypo

SEQ ID NO: 429145 - DNA, 826 bp, Homo sapiens; identical to SEQ ID NO: 279833
  chr2:61990960-61991786
  hypo

SEQ ID NO: 429146 - DNA, 38 bp, Homo sapiens; identical to SEQ ID NO: 208006
  chr2:62146652-62146690
  hypo

SEQ ID NO: 429147 - DNA, 250 bp, Homo sapiens; identical to SEQ ID NO: 250634
  chr2:62406299-62406549
  hypo

SEQ ID NO: 429148 - DNA, 38 bp, Homo sapiens; identical to SEQ ID NO: 208007
  chr2:62497414-62497452
  hypo

SEQ ID NO: 429149 - DNA, 33 bp, Homo sapiens; identical to SEQ ID NO: 250637
  chr2:62585418-62585451
  hypo

SEQ ID NO: 429150 - DNA, 267 bp, Homo sapiens; identical to SEQ ID NO: 250638
  chr2:62635425-62635692
  hypo

SEQ ID NO: 429151 - DNA, 71 bp, Homo sapiens; identical to SEQ ID NO: 250639
  chr2:62685374-62685445
  hypo

SEQ ID NO: 429152 - DNA, 169 bp, Homo sapiens; identical to SEQ ID NO: 208009
  chr2:63118747-63118916
  hypo

SEQ ID NO: 429153 - DNA, 237 bp, Homo sapiens; identical to SEQ ID NO: 208010
  chr2:63123375-63123612
  hypo

SEQ ID NO: 429154 - DNA, 217 bp, Homo sapiens; identical to SEQ ID NO: 208011
  chr2:63192034-63192251
  hypo

SEQ ID NO: 429155 - DNA, 149 bp, Homo sapiens; identical to SEQ ID NO: 208012
  chr2:63272200-63272349
  hypo

SEQ ID NO: 429156 - DNA, 52 bp, Homo sapiens; identical to SEQ ID NO: 250644
  chr2:63855250-63855302
  hypo

SEQ ID NO: 429157 - DNA, 31 bp, Homo sapiens; identical to SEQ ID NO: 250646
  chr2:64372516-64372547
  hypo

SEQ ID NO: 429158 - DNA, 120 bp, Homo sapiens; identical to SEQ ID NO: 250647
  chr2:64375241-64375361
  hypo

SEQ ID NO: 429159 - DNA, 108 bp, Homo sapiens; identical to SEQ ID NO: 250649
  chr2:64732412-64732520
  hypo

SEQ ID NO: 429160 - DNA, 99 bp, Homo sapiens; identical to SEQ ID NO: 250651
  chr2:64865161-64865260
  hypo

SEQ ID NO: 429161 - DNA, 142 bp, Homo sapiens; identical to SEQ ID NO: 221780
  chr2:64872367-64872509
  hypo

SEQ ID NO: 429162 - DNA, 36 bp, Homo sapiens; identical to SEQ ID NO: 250652
  chr2:65062638-65062674
  hypo

SEQ ID NO: 429163 - DNA, 357 bp, Homo sapiens; identical to SEQ ID NO: 221781
  chr2:65086836-65087193
  hypo

SEQ ID NO: 429164 - DNA, 482 bp, Homo sapiens; identical to SEQ ID NO: 221782
  chr2:65215348-65215830
  hypo

SEQ ID NO: 429165 - DNA, 35 bp, Homo sapiens; identical to SEQ ID NO: 250654
  chr2:65289380-65289415
  hypo

SEQ ID NO: 429166 - DNA, 38 bp, Homo sapiens; identical to SEQ ID NO: 250655
  chr2:65456602-65456640
  hypo

SEQ ID NO: 429167 - DNA, 65 bp, Homo sapiens; identical to SEQ ID NO: 250656
  chr2:65740149-65740214
  hypo

SEQ ID NO: 429168 - DNA, 38 bp, Homo sapiens; identical to SEQ ID NO: 208015
  chr2:65829225-65829263
  hypo

SEQ ID NO: 429169 - DNA, 37 bp, Homo sapiens; identical to SEQ ID NO: 208016
  chr2:65829503-65829540
  hypo

SEQ ID NO: 429170 - DNA, 50 bp, Homo sapiens; identical to SEQ ID NO: 299681
  chr2:65868440-65868490
  hypo

SEQ ID NO: 429171 - DNA, 92 bp, Homo sapiens; identical to SEQ ID NO: 208017
  chr2:66604303-66604395
  hypo

SEQ ID NO: 429172 - DNA, 34 bp, Homo sapiens; identical to SEQ ID NO: 250663
  chr2:67721499-67721533
  hypo

SEQ ID NO: 429173 - DNA, 38 bp, Homo sapiens; identical to SEQ ID NO: 208019
  chr2:68287484-68287522
  hypo

SEQ ID NO: 429174 - DNA, 79 bp, Homo sapiens; identical to SEQ ID NO: 208020
  chr2:68433262-68433341
  hypo

SEQ ID NO: 429175 - DNA, 37 bp, Homo sapiens; identical to SEQ ID NO: 250669
  chr2:69116719-69116756
  hypo

SEQ ID NO: 429176 - DNA, 40 bp, Homo sapiens; identical to SEQ ID NO: 198257
  chr2:69240028-69240068
  hypo

SEQ ID NO: 429177 - DNA, 505 bp, Homo sapiens; identical to SEQ ID NO: 279875
  chr2:69240720-69241225
  hypo

SEQ ID NO: 429178 - DNA, 64 bp, Homo sapiens; identical to SEQ ID NO: 250670
  chr2:69612624-69612688
  hypo

SEQ ID NO: 429179 - DNA, 45 bp, Homo sapiens; identical to SEQ ID NO: 250671
  chr2:69778023-69778068
  hypo

SEQ ID NO: 429180 - DNA, 33 bp, Homo sapiens; identical to SEQ ID NO: 250672
  chr2:69813143-69813176
  hypo

SEQ ID NO: 429181 - DNA, 374 bp, Homo sapiens; identical to SEQ ID NO: 279879
  chr2:69968429-69968803
  hypo

SEQ ID NO: 429182 - DNA, 120 bp, Homo sapiens; identical to SEQ ID NO: 208024
  chr2:69997975-69998095
  hypo

SEQ ID NO: 429183 - DNA, 45 bp, Homo sapiens; identical to SEQ ID NO: 250675
  chr2:70005612-70005657
  hypo

SEQ ID NO: 429184 - DNA, 141 bp, Homo sapiens; identical to SEQ ID NO: 299699
  chr2:70055299-70055440
  hypo

SEQ ID NO: 429185 - DNA, 48 bp, Homo sapiens; identical to SEQ ID NO: 208026
  chr2:70204037-70204085
  hypo

SEQ ID NO: 429186 - DNA, 60 bp, Homo sapiens; identical to SEQ ID NO: 208028
  chr2:70329617-70329677
  hypo

SEQ ID NO: 429187 - DNA, 224 bp, Homo sapiens; identical to SEQ ID NO: 250682
  chr2:70393988-70394212
  hypo

SEQ ID NO: 429188 - DNA, 206 bp, Homo sapiens; identical to SEQ ID NO: 279889
  chr2:70418110-70418316
  hypo

SEQ ID NO: 429189 - DNA, 34 bp, Homo sapiens; identical to SEQ ID NO: 299708
  chr2:70418627-70418661
  hypo

SEQ ID NO: 429190 - DNA, 101 bp, Homo sapiens; identical to SEQ ID NO: 208032
  chr2:70427484-70427585
  hypo

SEQ ID NO: 429191 - DNA, 53 bp, Homo sapiens; identical to SEQ ID NO: 299710
  chr2:70430895-70430948
  hypo

SEQ ID NO: 429192 - DNA, 40 bp, Homo sapiens; identical to SEQ ID NO: 250686
  chr2:70521965-70522005
  hypo

SEQ ID NO: 429193 - DNA, 39 bp, Homo sapiens; identical to SEQ ID NO: 250687
  chr2:70557159-70557198
  hypo

SEQ ID NO: 429194 - DNA, 212 bp, Homo sapiens; identical to SEQ ID NO: 250688
  chr2:71355399-71355611
  hypo

SEQ ID NO: 429195 - DNA, 68 bp, Homo sapiens; identical to SEQ ID NO: 279896
  chr2:71502821-71502889
  hypo

SEQ ID NO: 429196 - DNA, 87 bp, Homo sapiens; identical to SEQ ID NO: 250689
  chr2:71564761-71564848
  hypo

SEQ ID NO: 429197 - DNA, 293 bp, Homo sapiens; identical to SEQ ID NO: 250690
  chr2:71753210-71753503
  hypo

SEQ ID NO: 429198 - DNA, 174 bp, Homo sapiens; identical to SEQ ID NO: 208034
  chr2:71763615-71763789
  hypo

SEQ ID NO: 429199 - DNA, 32 bp, Homo sapiens; identical to SEQ ID NO: 250692
  chr2:71792491-71792523
  hypo

SEQ ID NO: 429200 - DNA, 49 bp, Homo sapiens; identical to SEQ ID NO: 250693
  chr2:71839446-71839495
  hypo

SEQ ID NO: 429201 - DNA, 438 bp, Homo sapiens; identical to SEQ ID NO: 250694
  chr2:71899491-71899929
  hypo

SEQ ID NO: 429202 - DNA, 33 bp, Homo sapiens; identical to SEQ ID NO: 250696
  chr2:72316766-72316799
  hypo

SEQ ID NO: 429203 - DNA, 53 bp, Homo sapiens; identical to SEQ ID NO: 250697
  chr2:72358940-72358993
  hypo

SEQ ID NO: 429204 - DNA, 155 bp, Homo sapiens; identical to SEQ ID NO: 208036
  chr2:72359982-72360137
  hypo

SEQ ID NO: 429205 - DNA, 240 bp, Homo sapiens; identical to SEQ ID NO: 250700
  chr2:72366138-72366378
  hypo

SEQ ID NO: 429206 - DNA, 316 bp, Homo sapiens; identical to SEQ ID NO: 279905
  chr2:72375582-72375898
  hypo

SEQ ID NO: 429207 - DNA, 180 bp, Homo sapiens; identical to SEQ ID NO: 250701
  chr2:72430074-72430254
  hypo

SEQ ID NO: 429208 - DNA, 31 bp, Homo sapiens; identical to SEQ ID NO: 250702
  chr2:72459902-72459933
  hypo

SEQ ID NO: 429209 - DNA, 159 bp, Homo sapiens; identical to SEQ ID NO: 250703
  chr2:73042122-73042281
  hypo

SEQ ID NO: 429210 - DNA, 372 bp, Homo sapiens; identical to SEQ ID NO: 279911
  chr2:73114130-73114502
  hypo

SEQ ID NO: 429211 - DNA, 489 bp, Homo sapiens; identical to SEQ ID NO: 198284
  chr2:73142998-73143487
  hypo

SEQ ID NO: 429212 - DNA, 266 bp, Homo sapiens; identical to SEQ ID NO: 250704
  chr2:73217260-73217526
  hypo

SEQ ID NO: 429213 - DNA, 282 bp, Homo sapiens; identical to SEQ ID NO: 208042
  chr2:73302643-73302925
  hypo

SEQ ID NO: 429214 - DNA, 293 bp, Homo sapiens; identical to SEQ ID NO: 250706
  chr2:73308598-73308891
  hypo

SEQ ID NO: 429215 - DNA, 100 bp, Homo sapiens; identical to SEQ ID NO: 208043
  chr2:73440150-73440250
  hypo

SEQ ID NO: 429216 - DNA, 122 bp, Homo sapiens; identical to SEQ ID NO: 299740
  chr2:73440293-73440415
  hypo

SEQ ID NO: 429217 - DNA, 189 bp, Homo sapiens; identical to SEQ ID NO: 250709
  chr2:74120176-74120365
  hypo

SEQ ID NO: 429218 - DNA, 33 bp, Homo sapiens; identical to SEQ ID NO: 250710
  chr2:74126220-74126253
  hypo

SEQ ID NO: 429219 - DNA, 92 bp, Homo sapiens; identical to SEQ ID NO: 208049
  chr2:74155569-74155661
  hypo

SEQ ID NO: 429220 - DNA, 41 bp, Homo sapiens; identical to SEQ ID NO: 208050
  chr2:74193107-74193148
  hypo

SEQ ID NO: 429221 - DNA, 245 bp, Homo sapiens; identical to SEQ ID NO: 250714
  chr2:74213648-74213893
  hypo

SEQ ID NO: 429222 - DNA, 120 bp, Homo sapiens; identical to SEQ ID NO: 208052
  chr2:74350566-74350686
  hypo

SEQ ID NO: 429223 - DNA, 421 bp, Homo sapiens; identical to SEQ ID NO: 198296
  chr2:74405756-74406177
  hypo

SEQ ID NO: 429224 - DNA, 211 bp, Homo sapiens; identical to SEQ ID NO: 208057
  chr2:74663402-74663613
  hypo

SEQ ID NO: 429225 - DNA, 38 bp, Homo sapiens; identical to SEQ ID NO: 208058
  chr2:74672959-74672997
  hypo

SEQ ID NO: 429226 - DNA, 86 bp, Homo sapiens; identical to SEQ ID NO: 250721
  chr2:74679101-74679187
  hypo

SEQ ID NO: 429227 - DNA, 106 bp, Homo sapiens; identical to SEQ ID NO: 208059
  chr2:74753267-74753373
  hypo

SEQ ID NO: 429228 - DNA, 231 bp, Homo sapiens; identical to SEQ ID NO: 208060
  chr2:74761647-74761878
  hypo

SEQ ID NO: 429229 - DNA, 39 bp, Homo sapiens; identical to SEQ ID NO: 250724
  chr2:74762274-74762313
  hypo

SEQ ID NO: 429230 - DNA, 36 bp, Homo sapiens; identical to SEQ ID NO: 198305
  chr2:74776040-74776076
  hypo

SEQ ID NO: 429231 - DNA, 134 bp, Homo sapiens; identical to SEQ ID NO: 250726
  chr2:75078340-75078474
  hypo

SEQ ID NO: 429232 - DNA, 105 bp, Homo sapiens; identical to SEQ ID NO: 250727
  chr2:75105986-75106091
  hypo

SEQ ID NO: 429233 - DNA, 222 bp, Homo sapiens; identical to SEQ ID NO: 250728
  chr2:75145462-75145684
  hypo

SEQ ID NO: 429234 - DNA, 74 bp, Homo sapiens; identical to SEQ ID NO: 250729
  chr2:75785491-75785565
  hypo

SEQ ID NO: 429235 - DNA, 151 bp, Homo sapiens; identical to SEQ ID NO: 250730
  chr2:75825236-75825387
  hypo

SEQ ID NO: 429236 - DNA, 138 bp, Homo sapiens; identical to SEQ ID NO: 250731
  chr2:76642426-76642564
  hypo

SEQ ID NO: 429237 - DNA, 37 bp, Homo sapiens; identical to SEQ ID NO: 250732
  chr2:78904026-78904063
  hypo

SEQ ID NO: 429238 - DNA, 38 bp, Homo sapiens; identical to SEQ ID NO: 250733
  chr2:79824567-79824605
  hypo

SEQ ID NO: 429239 - DNA, 89 bp, Homo sapiens; identical to SEQ ID NO: 208063
  chr2:79933147-79933236
  hypo

SEQ ID NO: 429240 - DNA, 105 bp, Homo sapiens; identical to SEQ ID NO: 299775
  chr2:81421431-81421536
  hypo

SEQ ID NO: 429241 - DNA, 499 bp, Homo sapiens; identical to SEQ ID NO: 250736
  chr2:81422010-81422509
  hypo

SEQ ID NO: 429242 - DNA, 115 bp, Homo sapiens; identical to SEQ ID NO: 279966
  chr2:85107819-85107934
  hypo

SEQ ID NO: 429243 - DNA, 37 bp, Homo sapiens; identical to SEQ ID NO: 208064
  chr2:85227244-85227281
  hypo

SEQ ID NO: 429244 - DNA, 37 bp, Homo sapiens; identical to SEQ ID NO: 208065
  chr2:85227521-85227558
  hypo

SEQ ID NO: 429245 - DNA, 54 bp, Homo sapiens; identical to SEQ ID NO: 208067
  chr2:85290474-85290528
  hypo

SEQ ID NO: 429246 - DNA, 31 bp, Homo sapiens; identical to SEQ ID NO: 208069
  chr2:85498072-85498103
  hypo

SEQ ID NO: 429247 - DNA, 149 bp, Homo sapiens; identical to SEQ ID NO: 250743
  chr2:85515479-85515628
  hypo

SEQ ID NO: 429248 - DNA, 94 bp, Homo sapiens; identical to SEQ ID NO: 250744
  chr2:85521476-85521570
  hypo

SEQ ID NO: 429249 - DNA, 155 bp, Homo sapiens; identical to SEQ ID NO: 250745
  chr2:85596563-85596718
  hypo

SEQ ID NO: 429250 - DNA, 35 bp, Homo sapiens; identical to SEQ ID NO: 250746
  chr2:85686732-85686767
  hypo

SEQ ID NO: 429251 - DNA, 34 bp, Homo sapiens; identical to SEQ ID NO: 208070
  chr2:85729115-85729149
  hypo

SEQ ID NO: 429252 - DNA, 292 bp, Homo sapiens; identical to SEQ ID NO: 250748
  chr2:85730475-85730767
  hypo

SEQ ID NO: 429253 - DNA, 44 bp, Homo sapiens; identical to SEQ ID NO: 250750
  chr2:85789679-85789723
  hypo

SEQ ID NO: 429254 - DNA, 235 bp, Homo sapiens; identical to SEQ ID NO: 198316
  chr2:85829251-85829486
  hypo

SEQ ID NO: 429255 - DNA, 42 bp, Homo sapiens; identical to SEQ ID NO: 250752
  chr2:85833323-85833365
  hypo

SEQ ID NO: 429256 - DNA, 211 bp, Homo sapiens; identical to SEQ ID NO: 250753
  chr2:85836004-85836215
  hypo

SEQ ID NO: 429257 - DNA, 88 bp, Homo sapiens; identical to SEQ ID NO: 250754
  chr2:85836532-85836620
  hypo

SEQ ID NO: 429258 - DNA, 90 bp, Homo sapiens; identical to SEQ ID NO: 208074
  chr2:85870244-85870334
  hypo

SEQ ID NO: 429259 - DNA, 47 bp, Homo sapiens; identical to SEQ ID NO: 385228
  chr2:85878798-85878845
  hypo

SEQ ID NO: 429260 - DNA, 44 bp, Homo sapiens; identical to SEQ ID NO: 208077
  chr2:85885944-85885988
  hypo

SEQ ID NO: 429261 - DNA, 841 bp, Homo sapiens; identical to SEQ ID NO: 106285
  chr2:85980859-85981700
  hypo

SEQ ID NO: 429262 - DNA, 32 bp, Homo sapiens; identical to SEQ ID NO: 208080
  chr2:86344875-86344907
  hypo

SEQ ID NO: 429263 - DNA, 92 bp, Homo sapiens; identical to SEQ ID NO: 208081
  chr2:86345207-86345299
  hypo

SEQ ID NO: 429264 - DNA, 60 bp, Homo sapiens; identical to SEQ ID NO: 208082
  chr2:86425628-86425688
  hypo

SEQ ID NO: 429265 - DNA, 147 bp, Homo sapiens; identical to SEQ ID NO: 208083
  chr2:86425718-86425865
  hypo

SEQ ID NO: 429266 - DNA, 123 bp, Homo sapiens; identical to SEQ ID NO: 208084
  chr2:86783960-86784083
  hypo

SEQ ID NO: 429267 - DNA, 89 bp, Homo sapiens; identical to SEQ ID NO: 250767
  chr2:86809396-86809485
  hypo

SEQ ID NO: 429268 - DNA, 53 bp, Homo sapiens; identical to SEQ ID NO: 198319
  chr2:86850368-86850421
  hypo

SEQ ID NO: 429269 - DNA, 63 bp, Homo sapiens
  chr2:86914623-86914686
  hypo
ggaaacaaatggttctctatgtaggttgatgaatcaacagattttaccaataaatgtcatatt

SEQ ID NO: 429270 - DNA, 81 bp, Homo sapiens; identical to SEQ ID NO: 279988
  chr2:87016937-87017018
  hypo

SEQ ID NO: 429271 - DNA, 76 bp, Homo sapiens; identical to SEQ ID NO: 208087
  chr2:87569214-87569290
  hypo

SEQ ID NO: 429272 - DNA, 120 bp, Homo sapiens; identical to SEQ ID NO: 250770
  chr2:88341849-88341969
  hypo

SEQ ID NO: 429273 - DNA, 67 bp, Homo sapiens; identical to SEQ ID NO: 250771
  chr2:88387492-88387559
  hypo

SEQ ID NO: 429274 - DNA, 196 bp, Homo sapiens; identical to SEQ ID NO: 250773
  chr2:88559425-88559621
  hypo

SEQ ID NO: 429275 - DNA, 126 bp, Homo sapiens; identical to SEQ ID NO: 250775
  chr2:88895917-88896043
  hypo

SEQ ID NO: 429276 - DNA, 39 bp, Homo sapiens; identical to SEQ ID NO: 208088
  chr2:89601945-89601984
  hypo

SEQ ID NO: 429277 - DNA, 85 bp, Homo sapiens; identical to SEQ ID NO: 250778
  chr2:92065784-92065869
  hypo

SEQ ID NO: 429278 - DNA, 34 bp, Homo sapiens; identical to SEQ ID NO: 250779
  chr2:95715631-95715665
  hypo

SEQ ID NO: 429279 - DNA, 133 bp, Homo sapiens; identical to SEQ ID NO: 208089
  chr2:95722588-95722721
  hypo

SEQ ID NO: 429280 - DNA, 540 bp, Homo sapiens; identical to SEQ ID NO: 250781
  chr2:95723256-95723796
  hypo

SEQ ID NO: 429281 - DNA, 345 bp, Homo sapiens; identical to SEQ ID NO: 280001
  chr2:95825283-95825628
  hypo

SEQ ID NO: 429282 - DNA, 153 bp, Homo sapiens; identical to SEQ ID NO: 250783
  chr2:95945593-95945746
  hypo

SEQ ID NO: 429283 - DNA, 246 bp, Homo sapiens; identical to SEQ ID NO: 250784
  chr2:95960727-95960973
  hypo

SEQ ID NO: 429284 - DNA, 245 bp, Homo sapiens; identical to SEQ ID NO: 250785
  chr2:95985468-95985713
  hypo

SEQ ID NO: 429285 - DNA, 160 bp, Homo sapiens; identical to SEQ ID NO: 250786
  chr2:95992199-95992359
  hypo

SEQ ID NO: 429286 - DNA, 42 bp, Homo sapiens; identical to SEQ ID NO: 250787
  chr2:96677724-96677766
  hypo

SEQ ID NO: 429287 - DNA, 241 bp, Homo sapiens; identical to SEQ ID NO: 250788
  chr2:96754442-96754683
  hypo

SEQ ID NO: 429288 - DNA, 313 bp, Homo sapiens; identical to SEQ ID NO: 250789
  chr2:96814766-96815079
  hypo

SEQ ID NO: 429289 - DNA, 223 bp, Homo sapiens; identical to SEQ ID NO: 208092
  chr2:96821757-96821980
  hypo

SEQ ID NO: 429290 - DNA, 121 bp, Homo sapiens; identical to SEQ ID NO: 208093
  chr2:96829031-96829152
  hypo

SEQ ID NO: 429291 - DNA, 37 bp, Homo sapiens; identical to SEQ ID NO: 250792
  chr2:96839116-96839153
  hypo

SEQ ID NO: 429292 - DNA, 534 bp, Homo sapiens; identical to SEQ ID NO: 280014
  chr2:96987312-96987846
  hypo

SEQ ID NO: 429293 - DNA, 33 bp, Homo sapiens; identical to SEQ ID NO: 250793
  chr2:96993131-96993164
  hypo

SEQ ID NO: 429294 - DNA, 189 bp, Homo sapiens; identical to SEQ ID NO: 250794
  chr2:97068616-97068805
  hypo

SEQ ID NO: 429295 - DNA, 210 bp, Homo sapiens; identical to SEQ ID NO: 198323
  chr2:97171202-97171412
  hypo

SEQ ID NO: 429296 - DNA, 286 bp, Homo sapiens; identical to SEQ ID NO: 280020
  chr2:97175214-97175500
  hypo

SEQ ID NO: 429297 - DNA, 101 bp, Homo sapiens; identical to SEQ ID NO: 250795
  chr2:97222251-97222352
  hypo

SEQ ID NO: 429298 - DNA, 104 bp, Homo sapiens; identical to SEQ ID NO: 250796
  chr2:97274644-97274748
  hypo

SEQ ID NO: 429299 - DNA, 228 bp, Homo sapiens; identical to SEQ ID NO: 280023
  chr2:97303973-97304201
  hypo

SEQ ID NO: 429300 - DNA, 148 bp, Homo sapiens; identical to SEQ ID NO: 208099
  chr2:97305376-97305524
  hypo

SEQ ID NO: 429301 - DNA, 143 bp, Homo sapiens; identical to SEQ ID NO: 250798
  chr2:97335818-97335961
  hypo

SEQ ID NO: 429302 - DNA, 77 bp, Homo sapiens; identical to SEQ ID NO: 208100
  chr2:97361031-97361108
  hypo

SEQ ID NO: 429303 - DNA, 154 bp, Homo sapiens; identical to SEQ ID NO: 250800
  chr2:97364039-97364193
  hypo

SEQ ID NO: 429304 - DNA, 36 bp, Homo sapiens; identical to SEQ ID NO: 208101
  chr2:97370003-97370039
  hypo

SEQ ID NO: 429305 - DNA, 35 bp, Homo sapiens; identical to SEQ ID NO: 250803
  chr2:97431125-97431160
  hypo

SEQ ID NO: 429306 - DNA, 136 bp, Homo sapiens; identical to SEQ ID NO: 250804
  chr2:97432863-97432999
  hypo

SEQ ID NO: 429307 - DNA, 88 bp, Homo sapiens; identical to SEQ ID NO: 250805
  chr2:97434629-97434717
  hypo

SEQ ID NO: 429308 - DNA, 43 bp, Homo sapiens; identical to SEQ ID NO: 402887
  chr2:97435335-97435378
  hypo

SEQ ID NO: 429309 - DNA, 129 bp, Homo sapiens; identical to SEQ ID NO: 250807
  chr2:97436177-97436306
  hypo

SEQ ID NO: 429310 - DNA, 88 bp, Homo sapiens; identical to SEQ ID NO: 208103
  chr2:97437494-97437582
  hypo

SEQ ID NO: 429311 - DNA, 230 bp, Homo sapiens; identical to SEQ ID NO: 250810
  chr2:97454844-97455074
  hypo

SEQ ID NO: 429312 - DNA, 176 bp, Homo sapiens; identical to SEQ ID NO: 208104
  chr2:97463244-97463420
  hypo

SEQ ID NO: 429313 - DNA, 97 bp, Homo sapiens; identical to SEQ ID NO: 208105
  chr2:97479660-97479757
  hypo

SEQ ID NO: 429314 - DNA, 298 bp, Homo sapiens; identical to SEQ ID NO: 198329
  chr2:97482863-97483161
  hypo

SEQ ID NO: 429315 - DNA, 112 bp, Homo sapiens; identical to SEQ ID NO: 208107
  chr2:97485585-97485697
  hypo

SEQ ID NO: 429316 - DNA, 36 bp, Homo sapiens; identical to SEQ ID NO: 208108
  chr2:97485727-97485763
  hypo

SEQ ID NO: 429317 - DNA, 96 bp, Homo sapiens; identical to SEQ ID NO: 208109
  chr2:97489047-97489143
  hypo

SEQ ID NO: 429318 - DNA, 33 bp, Homo sapiens; identical to SEQ ID NO: 208110
  chr2:97511924-97511957
  hypo

SEQ ID NO: 429319 - DNA, 156 bp, Homo sapiens; identical to SEQ ID NO: 198330
  chr2:97535760-97535916
  hypo

SEQ ID NO: 429320 - DNA, 83 bp, Homo sapiens; identical to SEQ ID NO: 250820
  chr2:97550184-97550267
  hypo

SEQ ID NO: 429321 - DNA, 99 bp, Homo sapiens; identical to SEQ ID NO: 250821
  chr2:97552035-97552134
  hypo

SEQ ID NO: 429322 - DNA, 145 bp, Homo sapiens; identical to SEQ ID NO: 250822
  chr2:97552402-97552547
  hypo

SEQ ID NO: 429323 - DNA, 158 bp, Homo sapiens; identical to SEQ ID NO: 208114
  chr2:97558027-97558185
  hypo

SEQ ID NO: 429324 - DNA, 86 bp, Homo sapiens; identical to SEQ ID NO: 250824
  chr2:97568145-97568231
  hypo

SEQ ID NO: 429325 - DNA, 228 bp, Homo sapiens; identical to SEQ ID NO: 250825
  chr2:97572471-97572699
  hypo

SEQ ID NO: 429326 - DNA, 32 bp, Homo sapiens; identical to SEQ ID NO: 250827
  chr2:97578424-97578456
  hypo

SEQ ID NO: 429327 - DNA, 68 bp, Homo sapiens; identical to SEQ ID NO: 390578
  chr2:97588990-97589058
  hypo

SEQ ID NO: 429328 - DNA, 161 bp, Homo sapiens; identical to SEQ ID NO: 250831
  chr2:97655847-97656008
  hypo

SEQ ID NO: 429329 - DNA, 103 bp, Homo sapiens; identical to SEQ ID NO: 198331
  chr2:97779476-97779579
  hypo

SEQ ID NO: 429330 - DNA, 146 bp, Homo sapiens; identical to SEQ ID NO: 250833
  chr2:98330282-98330428
  hypo

SEQ ID NO: 429331 - DNA, 343 bp, Homo sapiens; identical to SEQ ID NO: 250834
  chr2:98349361-98349704
  hypo

SEQ ID NO: 429332 - DNA, 32 bp, Homo sapiens; identical to SEQ ID NO: 250838
  chr2:98613858-98613890
  hypo

SEQ ID NO: 429333 - DNA, 32 bp, Homo sapiens; identical to SEQ ID NO: 250839
  chr2:98614130-98614162
  hypo

SEQ ID NO: 429334 - DNA, 47 bp, Homo sapiens; identical to SEQ ID NO: 250840
  chr2:98674829-98674876
  hypo

SEQ ID NO: 429335 - DNA, 164 bp, Homo sapiens; identical to SEQ ID NO: 250841
  chr2:98871119-98871283
  hypo

SEQ ID NO: 429336 - DNA, 90 bp, Homo sapiens; identical to SEQ ID NO: 208121
  chr2:99386853-99386943
  hypo

SEQ ID NO: 429337 - DNA, 77 bp, Homo sapiens; identical to SEQ ID NO: 208122
  chr2:99386973-99387050
  hypo

SEQ ID NO: 429338 - DNA, 206 bp, Homo sapiens; identical to SEQ ID NO: 250847
  chr2:99444496-99444702
  hypo

SEQ ID NO: 429339 - DNA, 38 bp, Homo sapiens; identical to SEQ ID NO: 250848
  chr2:99487423-99487461
  hypo

SEQ ID NO: 429340 - DNA, 189 bp, Homo sapiens; identical to SEQ ID NO: 250849
  chr2:99517365-99517554
  hypo

SEQ ID NO: 429341 - DNA, 47 bp, Homo sapiens; identical to SEQ ID NO: 250850
  chr2:99537760-99537807
  hypo

SEQ ID NO: 429342 - DNA, 86 bp, Homo sapiens; identical to SEQ ID NO: 250851
  chr2:99543362-99543448
  hypo

SEQ ID NO: 429343 - DNA, 169 bp, Homo sapiens; identical to SEQ ID NO: 299907
  chr2:99796478-99796647
  hypo

SEQ ID NO: 429344 - DNA, 32 bp, Homo sapiens; identical to SEQ ID NO: 250858
  chr2:100107725-100107757
  hypo

SEQ ID NO: 429345 - DNA, 120 bp, Homo sapiens; identical to SEQ ID NO: 250859
  chr2:100141754-100141874
  hypo

SEQ ID NO: 429346 - DNA, 82 bp, Homo sapiens; identical to SEQ ID NO: 250860
  chr2:100294013-100294095
  hypo

SEQ ID NO: 429347 - DNA, 66 bp, Homo sapiens; identical to SEQ ID NO: 208123
  chr2:100618385-100618451
  hypo

SEQ ID NO: 429348 - DNA, 476 bp, Homo sapiens; identical to SEQ ID NO: 280049
  chr2:100721429-100721905
  hypo

SEQ ID NO: 429349 - DNA, 391 bp, Homo sapiens; identical to SEQ ID NO: 221837
  chr2:100898414-100898805
  hypo

SEQ ID NO: 429350 - DNA, 103 bp, Homo sapiens; identical to SEQ ID NO: 250862
  chr2:100910680-100910783
  hypo

SEQ ID NO: 429351 - DNA, 120 bp, Homo sapiens; identical to SEQ ID NO: 250863
  chr2:101006128-101006248
  hypo

SEQ ID NO: 429352 - DNA, 70 bp, Homo sapiens; identical to SEQ ID NO: 299917
  chr2:101009997-101010067
  hypo

SEQ ID NO: 429353 - DNA, 125 bp, Homo sapiens; identical to SEQ ID NO: 250865
  chr2:101013988-101014113
  hypo

SEQ ID NO: 429354 - DNA, 37 bp, Homo sapiens; identical to SEQ ID NO: 250866
  chr2:101021653-101021690
  hypo

SEQ ID NO: 429355 - DNA, 43 bp, Homo sapiens; identical to SEQ ID NO: 208125
  chr2:101022688-101022731
  hypo

SEQ ID NO: 429356 - DNA, 40 bp, Homo sapiens; identical to SEQ ID NO: 250868
  chr2:101035289-101035329
  hypo

SEQ ID NO: 429357 - DNA, 197 bp, Homo sapiens; identical to SEQ ID NO: 208127
  chr2:101362900-101363097
  hypo

SEQ ID NO: 429358 - DNA, 177 bp, Homo sapiens; identical to SEQ ID NO: 208128
  chr2:101520349-101520526
  hypo

SEQ ID NO: 429359 - DNA, 290 bp, Homo sapiens; identical to SEQ ID NO: 250871
  chr2:101552507-101552797
  hypo

SEQ ID NO: 429360 - DNA, 40 bp, Homo sapiens; identical to SEQ ID NO: 250872
  chr2:101574054-101574094
  hypo

SEQ ID NO: 429361 - DNA, 40 bp, Homo sapiens; identical to SEQ ID NO: 250873
  chr2:101574394-101574434
  hypo

SEQ ID NO: 429362 - DNA, 151 bp, Homo sapiens; identical to SEQ ID NO: 208129
  chr2:101612186-101612337
  hypo

SEQ ID NO: 429363 - DNA, 93 bp, Homo sapiens; identical to SEQ ID NO: 250875
  chr2:101638838-101638931
  hypo

SEQ ID NO: 429364 - DNA, 704 bp, Homo sapiens; identical to SEQ ID NO: 198348
  chr2:101767139-101767843
  hypo

SEQ ID NO: 429365 - DNA, 38 bp, Homo sapiens; identical to SEQ ID NO: 208132
  chr2:101772516-101772554
  hypo

SEQ ID NO: 429366 - DNA, 105 bp, Homo sapiens; identical to SEQ ID NO: 208133
  chr2:101875536-101875641
  hypo

SEQ ID NO: 429367 - DNA, 248 bp, Homo sapiens; identical to SEQ ID NO: 250879
  chr2:101882441-101882689
  hypo

SEQ ID NO: 429368 - DNA, 67 bp, Homo sapiens; identical to SEQ ID NO: 208134
  chr2:101889654-101889721
  hypo

SEQ ID NO: 429369 - DNA, 955 bp, Homo sapiens; identical to SEQ ID NO: 198349
  chr2:101924527-101925482
  hypo

SEQ ID NO: 429370 - DNA, 186 bp, Homo sapiens; identical to SEQ ID NO: 208136
  chr2:101970928-101971114
  hypo

SEQ ID NO: 429371 - DNA, 34 bp, Homo sapiens; identical to SEQ ID NO: 250882
  chr2:102226228-102226262
  hypo

SEQ ID NO: 429372 - DNA, 163 bp, Homo sapiens; identical to SEQ ID NO: 250883
  chr2:102232955-102233118
  hypo

SEQ ID NO: 429373 - DNA, 332 bp, Homo sapiens; identical to SEQ ID NO: 198353
  chr2:102313750-102314082
  hypo

SEQ ID NO: 429374 - DNA, 153 bp, Homo sapiens; identical to SEQ ID NO: 37826
  chr2:102314091-102314244
  hypo

SEQ ID NO: 429375 - DNA, 82 bp, Homo sapiens; identical to SEQ ID NO: 250884
  chr2:102320123-102320205
  hypo

SEQ ID NO: 429376 - DNA, 79 bp, Homo sapiens; identical to SEQ ID NO: 208139
  chr2:102356564-102356643
  hypo

SEQ ID NO: 429377 - DNA, 219 bp, Homo sapiens; identical to SEQ ID NO: 250887
  chr2:102486857-102487076
  hypo

SEQ ID NO: 429378 - DNA, 176 bp, Homo sapiens; identical to SEQ ID NO: 208140
  chr2:102636186-102636362
  hypo

SEQ ID NO: 429379 - DNA, 32 bp, Homo sapiens; identical to SEQ ID NO: 208141
  chr2:102640214-102640246
  hypo

SEQ ID NO: 429380 - DNA, 68 bp, Homo sapiens; identical to SEQ ID NO: 250890
  chr2:102681929-102681997
  hypo

SEQ ID NO: 429381 - DNA, 39 bp, Homo sapiens; identical to SEQ ID NO: 250892
  chr2:102804745-102804784
  hypo

SEQ ID NO: 429382 - DNA, 64 bp, Homo sapiens; identical to SEQ ID NO: 250893
  chr2:102866731-102866795
  hypo

SEQ ID NO: 429383 - DNA, 51 bp, Homo sapiens; identical to SEQ ID NO: 208143
  chr2:102867171-102867222
  hypo

SEQ ID NO: 429384 - DNA, 42 bp, Homo sapiens; identical to SEQ ID NO: 208144
  chr2:103130075-103130117
  hypo

SEQ ID NO: 429385 - DNA, 107 bp, Homo sapiens; identical to SEQ ID NO: 250896
  chr2:103548794-103548901
  hypo

SEQ ID NO: 429386 - DNA, 41 bp, Homo sapiens; identical to SEQ ID NO: 250897
  chr2:104111995-104112036
  hypo

SEQ ID NO: 429387 - DNA, 209 bp, Homo sapiens; identical to SEQ ID NO: 396012
  chr2:105471213-105471422
  hypo

SEQ ID NO: 429388 - DNA, 245 bp, Homo sapiens; identical to SEQ ID NO: 198366
  chr2:105478381-105478626
  hypo

SEQ ID NO: 429389 - DNA, 248 bp, Homo sapiens; identical to SEQ ID NO: 208148
  chr2:105528549-105528797
  hypo

SEQ ID NO: 429390 - DNA, 120 bp, Homo sapiens; identical to SEQ ID NO: 250899
  chr2:105695482-105695602
  hypo

SEQ ID NO: 429391 - DNA, 241 bp, Homo sapiens; identical to SEQ ID NO: 208149
  chr2:105697575-105697816
  hypo

SEQ ID NO: 429392 - DNA, 55 bp, Homo sapiens; identical to SEQ ID NO: 250902
  chr2:105859043-105859098
  hypo

SEQ ID NO: 429393 - DNA, 163 bp, Homo sapiens; identical to SEQ ID NO: 250903
  chr2:105885967-105886130
  hypo

SEQ ID NO: 429394 - DNA, 650 bp, Homo sapiens; identical to SEQ ID NO: 250904
  chr2:105887868-105888518
  hypo

SEQ ID NO: 429395 - DNA, 244 bp, Homo sapiens; identical to SEQ ID NO: 250905
  chr2:105910432-105910676
  hypo

SEQ ID NO: 429396 - DNA, 69 bp, Homo sapiens; identical to SEQ ID NO: 250908
  chr2:106011679-106011748
  hypo

SEQ ID NO: 429397 - DNA, 91 bp, Homo sapiens; identical to SEQ ID NO: 208154
  chr2:106064705-106064796
  hypo

SEQ ID NO: 429398 - DNA, 36 bp, Homo sapiens; identical to SEQ ID NO: 208155
  chr2:106081974-106082010
  hypo

SEQ ID NO: 429399 - DNA, 241 bp, Homo sapiens; identical to SEQ ID NO: 250913
  chr2:106227199-106227440
  hypo

SEQ ID NO: 429400 - DNA, 214 bp, Homo sapiens; identical to SEQ ID NO: 198372
  chr2:106362018-106362232
  hypo

SEQ ID NO: 429401 - DNA, 200 bp, Homo sapiens; identical to SEQ ID NO: 250914
  chr2:106399856-106400056
  hypo

SEQ ID NO: 429402 - DNA, 97 bp, Homo sapiens; identical to SEQ ID NO: 250915
  chr2:106473751-106473848
  hypo

SEQ ID NO: 429403 - DNA, 380 bp, Homo sapiens; identical to SEQ ID NO: 250916
  chr2:106498148-106498528
  hypo

SEQ ID NO: 429404 - DNA, 167 bp, Homo sapiens; identical to SEQ ID NO: 250917
  chr2:106499100-106499267
  hypo

SEQ ID NO: 429405 - DNA, 240 bp, Homo sapiens; identical to SEQ ID NO: 250918
  chr2:106713428-106713668
  hypo

SEQ ID NO: 429406 - DNA, 61 bp, Homo sapiens; identical to SEQ ID NO: 250919
  chr2:106722162-106722223
  hypo

SEQ ID NO: 429407 - DNA, 168 bp, Homo sapiens; identical to SEQ ID NO: 250921
  chr2:106734893-106735061
  hypo

SEQ ID NO: 429408 - DNA, 152 bp, Homo sapiens; identical to SEQ ID NO: 208159
  chr2:106778555-106778707
  hypo

SEQ ID NO: 429409 - DNA, 299 bp, Homo sapiens; identical to SEQ ID NO: 250924
  chr2:106927123-106927422
  hypo

SEQ ID NO: 429410 - DNA, 32 bp, Homo sapiens; identical to SEQ ID NO: 250927
  chr2:107134450-107134482
  hypo

SEQ ID NO: 429411 - DNA, 78 bp, Homo sapiens; identical to SEQ ID NO: 250928
  chr2:107204235-107204313
  hypo

SEQ ID NO: 429412 - DNA, 57 bp, Homo sapiens; identical to SEQ ID NO: 208162
  chr2:107459358-107459415
  hypo

SEQ ID NO: 429413 - DNA, 199 bp, Homo sapiens; identical to SEQ ID NO: 402941
  chr2:107459445-107459644
  hypo

SEQ ID NO: 429414 - DNA, 56 bp, Homo sapiens; identical to SEQ ID NO: 250930
  chr2:107595241-107595297
  hypo

SEQ ID NO: 429415 - DNA, 156 bp, Homo sapiens; identical to SEQ ID NO: 250931
  chr2:107919281-107919437
  hypo

SEQ ID NO: 429416 - DNA, 75 bp, Homo sapiens; identical to SEQ ID NO: 250933
  chr2:108086318-108086393
  hypo

SEQ ID NO: 429417 - DNA, 120 bp, Homo sapiens; identical to SEQ ID NO: 250935
  chr2:108552484-108552604
  hypo

SEQ ID NO: 429418 - DNA, 87 bp, Homo sapiens; identical to SEQ ID NO: 208166
  chr2:108918020-108918107
  hypo

SEQ ID NO: 429419 - DNA, 39 bp, Homo sapiens; identical to SEQ ID NO: 208167
  chr2:109225030-109225069
  hypo

SEQ ID NO: 429420 - DNA, 83 bp, Homo sapiens; identical to SEQ ID NO: 250939
  chr2:109328951-109329034
  hypo

SEQ ID NO: 429421 - DNA, 102 bp, Homo sapiens; identical to SEQ ID NO: 250940
  chr2:109329294-109329396
  hypo

SEQ ID NO: 429422 - DNA, 74 bp, Homo sapiens; identical to SEQ ID NO: 300007
  chr2:109335166-109335240
  hypo

SEQ ID NO: 429423 - DNA, 274 bp, Homo sapiens; identical to SEQ ID NO: 280103
  chr2:109335510-109335784
  hypo

SEQ ID NO: 429424 - DNA, 37 bp, Homo sapiens; identical to SEQ ID NO: 208168
  chr2:109536234-109536271
  hypo

SEQ ID NO: 429425 - DNA, 37 bp, Homo sapiens; identical to SEQ ID NO: 208169
  chr2:109556840-109556877
  hypo

SEQ ID NO: 429426 - DNA, 474 bp, Homo sapiens; identical to SEQ ID NO: 250944
  chr2:109558967-109559441
  hypo

SEQ ID NO: 429427 - DNA, 181 bp, Homo sapiens; identical to SEQ ID NO: 250945
  chr2:109588359-109588540
  hypo

SEQ ID NO: 429428 - DNA, 114 bp, Homo sapiens; identical to SEQ ID NO: 250946
  chr2:109604152-109604266
  hypo

SEQ ID NO: 429429 - DNA, 197 bp, Homo sapiens; identical to SEQ ID NO: 250947
  chr2:109723678-109723875
  hypo

SEQ ID NO: 429430 - DNA, 34 bp, Homo sapiens; identical to SEQ ID NO: 250948
  chr2:109737056-109737090
  hypo

SEQ ID NO: 429431 - DNA, 185 bp, Homo sapiens; identical to SEQ ID NO: 250949
  chr2:109741776-109741961
  hypo

SEQ ID NO: 429432 - DNA, 959 bp, Homo sapiens; identical to SEQ ID NO: 250950
  chr2:110007111-110008070
  hypo

SEQ ID NO: 429433 - DNA, 40 bp, Homo sapiens; identical to SEQ ID NO: 208173
  chr2:110008967-110009007
  hypo

SEQ ID NO: 429434 - DNA, 40 bp, Homo sapiens; identical to SEQ ID NO: 208174
  chr2:110009247-110009287
  hypo

SEQ ID NO: 429435 - DNA, 51 bp, Homo sapiens
  chr2:110016940-110016991
  hypo
gtacaggtgcatttacacatacacccctccaggtgcacacctgcagataca

SEQ ID NO: 429436 - DNA, 72 bp, Homo sapiens; identical to SEQ ID NO: 250957
  chr2:110021041-110021113
  hypo

SEQ ID NO: 429437 - DNA, 113 bp, Homo sapiens; identical to SEQ ID NO: 250960
  chr2:110025459-110025572
  hypo

SEQ ID NO: 429438 - DNA, 157 bp, Homo sapiens; identical to SEQ ID NO: 250961
  chr2:110026466-110026623
  hypo

SEQ ID NO: 429439 - DNA, 224 bp, Homo sapiens; identical to SEQ ID NO: 250963
  chr2:110040036-110040260
  hypo

SEQ ID NO: 429440 - DNA, 49 bp, Homo sapiens; identical to SEQ ID NO: 208181
  chr2:110256842-110256891
  hypo

SEQ ID NO: 429441 - DNA, 194 bp, Homo sapiens; identical to SEQ ID NO: 208182
  chr2:110259063-110259257
  hypo

SEQ ID NO: 429442 - DNA, 126 bp, Homo sapiens; identical to SEQ ID NO: 250967
  chr2:110260107-110260233
  hypo

SEQ ID NO: 429443 - DNA, 93 bp, Homo sapiens; identical to SEQ ID NO: 250968
  chr2:110274998-110275091
  hypo

SEQ ID NO: 429444 - DNA, 37 bp, Homo sapiens; identical to SEQ ID NO: 208183
  chr2:110352252-110352289
  hypo

SEQ ID NO: 429445 - DNA, 161 bp, Homo sapiens; identical to SEQ ID NO: 250970
  chr2:110483973-110484134
  hypo

SEQ ID NO: 429446 - DNA, 196 bp, Homo sapiens; identical to SEQ ID NO: 250971
  chr2:110853614-110853810
  hypo

SEQ ID NO: 429447 - DNA, 145 bp, Homo sapiens; identical to SEQ ID NO: 250972
  chr2:110855514-110855659
  hypo

SEQ ID NO: 429448 - DNA, 175 bp, Homo sapiens; identical to SEQ ID NO: 250973
  chr2:110861845-110862020
  hypo

SEQ ID NO: 429449 - DNA, 96 bp, Homo sapiens; identical to SEQ ID NO: 250974
  chr2:111438060-111438156
  hypo

SEQ ID NO: 429450 - DNA, 32 bp, Homo sapiens; identical to SEQ ID NO: 300044
  chr2:111438523-111438555
  hypo

SEQ ID NO: 429451 - DNA, 85 bp, Homo sapiens; identical to SEQ ID NO: 221856
  chr2:111880646-111880731
  hypo

SEQ ID NO: 429452 - DNA, 86 bp, Homo sapiens; identical to SEQ ID NO: 250976
  chr2:111881445-111881531
  hypo

SEQ ID NO: 429453 - DNA, 111 bp, Homo sapiens; identical to SEQ ID NO: 250977
  chr2:111890892-111891003
  hypo

SEQ ID NO: 429454 - DNA, 310 bp, Homo sapiens; identical to SEQ ID NO: 250978
  chr2:111911293-111911603
  hypo

SEQ ID NO: 429455 - DNA, 45 bp, Homo sapiens; identical to SEQ ID NO: 208186
  chr2:111935999-111936044
  hypo

SEQ ID NO: 429456 - DNA, 147 bp, Homo sapiens; identical to SEQ ID NO: 250981
  chr2:112745416-112745563
  hypo

SEQ ID NO: 429457 - DNA, 33 bp, Homo sapiens; identical to SEQ ID NO: 300056
  chr2:112779013-112779046
  hypo

SEQ ID NO: 429458 - DNA, 106 bp, Homo sapiens; identical to SEQ ID NO: 250983
  chr2:112785956-112786062
  hypo

SEQ ID NO: 429459 - DNA, 94 bp, Homo sapiens; identical to SEQ ID NO: 208188
  chr2:112786372-112786466
  hypo

SEQ ID NO: 429460 - DNA, 142 bp, Homo sapiens; identical to SEQ ID NO: 250985
  chr2:112810885-112811027
  hypo

SEQ ID NO: 429461 - DNA, 47 bp, Homo sapiens; identical to SEQ ID NO: 208189
  chr2:112945140-112945187
  hypo

SEQ ID NO: 429462 - DNA, 35 bp, Homo sapiens; identical to SEQ ID NO: 208192
  chr2:113168035-113168070
  hypo

SEQ ID NO: 429463 - DNA, 188 bp, Homo sapiens; identical to SEQ ID NO: 208193
  chr2:113286635-113286823
  hypo

SEQ ID NO: 429464 - DNA, 44 bp, Homo sapiens; identical to SEQ ID NO: 250990
  chr2:113349169-113349213
  hypo

SEQ ID NO: 429465 - DNA, 33 bp, Homo sapiens; identical to SEQ ID NO: 208194
  chr2:113494876-113494909
  hypo

SEQ ID NO: 429466 - DNA, 32 bp, Homo sapiens; identical to SEQ ID NO: 250992
  chr2:113498451-113498483
  hypo

SEQ ID NO: 429467 - DNA, 104 bp, Homo sapiens; identical to SEQ ID NO: 250993
  chr2:113611570-113611674
  hypo

SEQ ID NO: 429468 - DNA, 169 bp, Homo sapiens; identical to SEQ ID NO: 250994
  chr2:113707198-113707367
  hypo

SEQ ID NO: 429469 - DNA, 31 bp, Homo sapiens; identical to SEQ ID NO: 208195
  chr2:113804066-113804097
  hypo

SEQ ID NO: 429470 - DNA, 86 bp, Homo sapiens; identical to SEQ ID NO: 250996
  chr2:113908444-113908530
  hypo

SEQ ID NO: 429471 - DNA, 342 bp, Homo sapiens; identical to SEQ ID NO: 250997
  chr2:113967316-113967658
  hypo

SEQ ID NO: 429472 - DNA, 188 bp, Homo sapiens; identical to SEQ ID NO: 208196
  chr2:113973331-113973519
  hypo

SEQ ID NO: 429473 - DNA, 111 bp, Homo sapiens; identical to SEQ ID NO: 250999
  chr2:114060817-114060928
  hypo

SEQ ID NO: 429474 - DNA, 67 bp, Homo sapiens; identical to SEQ ID NO: 251000
  chr2:114467013-114467080
  hypo

SEQ ID NO: 429475 - DNA, 31 bp, Homo sapiens; identical to SEQ ID NO: 251002
  chr2:114736319-114736350
  hypo

SEQ ID NO: 429476 - DNA, 43 bp, Homo sapiens; identical to SEQ ID NO: 251004
  chr2:115183213-115183256
  hypo

SEQ ID NO: 429477 - DNA, 145 bp, Homo sapiens; identical to SEQ ID NO: 251007
  chr2:118743611-118743756
  hypo

SEQ ID NO: 429478 - DNA, 85 bp, Homo sapiens; identical to SEQ ID NO: 251008
  chr2:118743816-118743901
  hypo

SEQ ID NO: 429479 - DNA, 43 bp, Homo sapiens; identical to SEQ ID NO: 251009
  chr2:118875673-118875716
  hypo

SEQ ID NO: 429480 - DNA, 67 bp, Homo sapiens; identical to SEQ ID NO: 251010
  chr2:119028306-119028373
  hypo

SEQ ID NO: 429481 - DNA, 111 bp, Homo sapiens; identical to SEQ ID NO: 280163
  chr2:119769050-119769161
  hypo

SEQ ID NO: 429482 - DNA, 185 bp, Homo sapiens; identical to SEQ ID NO: 251011
  chr2:120003178-120003363
  hypo

SEQ ID NO: 429483 - DNA, 150 bp, Homo sapiens; identical to SEQ ID NO: 208199
  chr2:120011808-120011958
  hypo

SEQ ID NO: 429484 - DNA, 250 bp, Homo sapiens; identical to SEQ ID NO: 208200
  chr2:120020672-120020922
  hypo

SEQ ID NO: 429485 - DNA, 82 bp, Homo sapiens; identical to SEQ ID NO: 208201
  chr2:120069741-120069823
  hypo

SEQ ID NO: 429486 - DNA, 35 bp, Homo sapiens; identical to SEQ ID NO: 251016
  chr2:120230476-120230511
  hypo

SEQ ID NO: 429487 - DNA, 184 bp, Homo sapiens; identical to SEQ ID NO: 208202
  chr2:120247827-120248011
  hypo

SEQ ID NO: 429488 - DNA, 162 bp, Homo sapiens; identical to SEQ ID NO: 251018
  chr2:120282306-120282468
  hypo

SEQ ID NO: 429489 - DNA, 239 bp, Homo sapiens; identical to SEQ ID NO: 251019
  chr2:120317342-120317581
  hypo

SEQ ID NO: 429490 - DNA, 129 bp, Homo sapiens; identical to SEQ ID NO: 198413
  chr2:120770809-120770938
  hypo

SEQ ID NO: 429491 - DNA, 218 bp, Homo sapiens; identical to SEQ ID NO: 106596
  chr2:120770966-120771184
  hypo

SEQ ID NO: 429492 - DNA, 101 bp, Homo sapiens; identical to SEQ ID NO: 208207
  chr2:120982088-120982189
  hypo

SEQ ID NO: 429493 - DNA, 172 bp, Homo sapiens; identical to SEQ ID NO: 251026
  chr2:120987006-120987178
  hypo

SEQ ID NO: 429494 - DNA, 75 bp, Homo sapiens; identical to SEQ ID NO: 251027
  chr2:120995063-120995138
  hypo

SEQ ID NO: 429495 - DNA, 46 bp, Homo sapiens; identical to SEQ ID NO: 251028
  chr2:120996940-120996986
  hypo

SEQ ID NO: 429496 - DNA, 253 bp, Homo sapiens; identical to SEQ ID NO: 251029
  chr2:121036317-121036570
  hypo

SEQ ID NO: 429497 - DNA, 284 bp, Homo sapiens; identical to SEQ ID NO: 208208
  chr2:121058175-121058459
  hypo

SEQ ID NO: 429498 - DNA, 523 bp, Homo sapiens; identical to SEQ ID NO: 251032
  chr2:121116365-121116888
  hypo

SEQ ID NO: 429499 - DNA, 123 bp, Homo sapiens; identical to SEQ ID NO: 251033
  chr2:121157066-121157189
  hypo

SEQ ID NO: 429500 - DNA, 241 bp, Homo sapiens; identical to SEQ ID NO: 251034
  chr2:121190385-121190626
  hypo

SEQ ID NO: 429501 - DNA, 134 bp, Homo sapiens; identical to SEQ ID NO: 208210
  chr2:121243025-121243159
  hypo

SEQ ID NO: 429502 - DNA, 136 bp, Homo sapiens; identical to SEQ ID NO: 251036
  chr2:121266977-121267113
  hypo

SEQ ID NO: 429503 - DNA, 39 bp, Homo sapiens; identical to SEQ ID NO: 208211
  chr2:121327691-121327730
  hypo

SEQ ID NO: 429504 - DNA, 172 bp, Homo sapiens; identical to SEQ ID NO: 251038
  chr2:121381302-121381474
  hypo

SEQ ID NO: 429505 - DNA, 33 bp, Homo sapiens; identical to SEQ ID NO: 251039
  chr2:121436963-121436996
  hypo

SEQ ID NO: 429506 - DNA, 96 bp, Homo sapiens; identical to SEQ ID NO: 208212
  chr2:121542641-121542737
  hypo

SEQ ID NO: 429507 - DNA, 100 bp, Homo sapiens; identical to SEQ ID NO: 251043
  chr2:121549851-121549951
  hypo

SEQ ID NO: 429508 - DNA, 211 bp, Homo sapiens; identical to SEQ ID NO: 251044
  chr2:121550760-121550971
  hypo

SEQ ID NO: 429509 - DNA, 139 bp, Homo sapiens; identical to SEQ ID NO: 208213
  chr2:121609723-121609862
  hypo

SEQ ID NO: 429510 - DNA, 52 bp, Homo sapiens; identical to SEQ ID NO: 251046
  chr2:121614060-121614112
  hypo

SEQ ID NO: 429511 - DNA, 80 bp, Homo sapiens; identical to SEQ ID NO: 251047
  chr2:121628105-121628185
  hypo

SEQ ID NO: 429512 - DNA, 201 bp, Homo sapiens; identical to SEQ ID NO: 251048
  chr2:121692170-121692371
  hypo

SEQ ID NO: 429513 - DNA, 75 bp, Homo sapiens; identical to SEQ ID NO: 251049
  chr2:121708535-121708610
  hypo

SEQ ID NO: 429514 - DNA, 117 bp, Homo sapiens; identical to SEQ ID NO: 251050
  chr2:121711198-121711315
  hypo

SEQ ID NO: 429515 - DNA, 130 bp, Homo sapiens; identical to SEQ ID NO: 208214
  chr2:121726279-121726409
  hypo

SEQ ID NO: 429516 - DNA, 1125 bp, Homo sapiens; identical to SEQ ID NO: 208216
  chr2:121745649-121746774
  hypo

SEQ ID NO: 429517 - DNA, 42 bp, Homo sapiens; identical to SEQ ID NO: 208217
  chr2:121924778-121924820
  hypo

SEQ ID NO: 429518 - DNA, 197 bp, Homo sapiens; identical to SEQ ID NO: 251055
  chr2:121932346-121932543
  hypo

SEQ ID NO: 429519 - DNA, 94 bp, Homo sapiens; identical to SEQ ID NO: 251056
  chr2:121962011-121962105
  hypo

SEQ ID NO: 429520 - DNA, 332 bp, Homo sapiens; identical to SEQ ID NO: 251057
  chr2:121970083-121970415
  hypo

SEQ ID NO: 429521 - DNA, 208 bp, Homo sapiens; identical to SEQ ID NO: 208218
  chr2:121975957-121976165
  hypo

SEQ ID NO: 429522 - DNA, 36 bp, Homo sapiens; identical to SEQ ID NO: 251062
  chr2:122013597-122013633
  hypo

SEQ ID NO: 429523 - DNA, 85 bp, Homo sapiens; identical to SEQ ID NO: 251063
  chr2:122094225-122094310
  hypo

SEQ ID NO: 429524 - DNA, 106 bp, Homo sapiens; identical to SEQ ID NO: 251065
  chr2:122096092-122096198
  hypo

SEQ ID NO: 429525 - DNA, 88 bp, Homo sapiens; identical to SEQ ID NO: 208219
  chr2:122102164-122102252
  hypo

SEQ ID NO: 429526 - DNA, 103 bp, Homo sapiens; identical to SEQ ID NO: 251068
  chr2:122118646-122118749
  hypo

SEQ ID NO: 429527 - DNA, 46 bp, Homo sapiens; identical to SEQ ID NO: 251070
  chr2:122260203-122260249
  hypo

SEQ ID NO: 429528 - DNA, 31 bp, Homo sapiens; identical to SEQ ID NO: 251071
  chr2:122274305-122274336
  hypo

SEQ ID NO: 429529 - DNA, 261 bp, Homo sapiens; identical to SEQ ID NO: 208220
  chr2:122305114-122305375
  hypo

SEQ ID NO: 429530 - DNA, 237 bp, Homo sapiens; identical to SEQ ID NO: 208221
  chr2:122312635-122312872
  hypo

SEQ ID NO: 429531 - DNA, 31 bp, Homo sapiens; identical to SEQ ID NO: 208222
  chr2:122497730-122497761
  hypo

SEQ ID NO: 429532 - DNA, 90 bp, Homo sapiens; identical to SEQ ID NO: 251075
  chr2:122498001-122498091
  hypo

SEQ ID NO: 429533 - DNA, 155 bp, Homo sapiens; identical to SEQ ID NO: 251076
  chr2:122511908-122512063
  hypo

SEQ ID NO: 429534 - DNA, 98 bp, Homo sapiens; identical to SEQ ID NO: 251077
  chr2:122783865-122783963
  hypo

SEQ ID NO: 429535 - DNA, 320 bp, Homo sapiens; identical to SEQ ID NO: 251078
  chr2:122976046-122976366
  hypo

SEQ ID NO: 429536 - DNA, 103 bp, Homo sapiens; identical to SEQ ID NO: 251079
  chr2:124441079-124441182
  hypo

SEQ ID NO: 429537 - DNA, 101 bp, Homo sapiens; identical to SEQ ID NO: 251080
  chr2:125119894-125119995
  hypo

SEQ ID NO: 429538 - DNA, 314 bp, Homo sapiens; identical to SEQ ID NO: 251085
  chr2:127734331-127734645
  hypo

SEQ ID NO: 429539 - DNA, 39 bp, Homo sapiens; identical to SEQ ID NO: 251087
  chr2:127855675-127855714
  hypo

SEQ ID NO: 429540 - DNA, 173 bp, Homo sapiens; identical to SEQ ID NO: 251089
  chr2:127895962-127896135
  hypo

SEQ ID NO: 429541 - DNA, 215 bp, Homo sapiens; identical to SEQ ID NO: 251090
  chr2:127933496-127933711
  hypo

SEQ ID NO: 429542 - DNA, 242 bp, Homo sapiens; identical to SEQ ID NO: 251092
  chr2:128128833-128129075
  hypo

SEQ ID NO: 429543 - DNA, 45 bp, Homo sapiens; identical to SEQ ID NO: 251094
  chr2:128214276-128214321
  hypo

SEQ ID NO: 429544 - DNA, 78 bp, Homo sapiens; identical to SEQ ID NO: 208229
  chr2:128273731-128273809
  hypo

SEQ ID NO: 429545 - DNA, 77 bp, Homo sapiens; identical to SEQ ID NO: 208230
  chr2:128273869-128273946
  hypo

SEQ ID NO: 429546 - DNA, 31 bp, Homo sapiens; identical to SEQ ID NO: 251097
  chr2:128292847-128292878
  hypo

SEQ ID NO: 429547 - DNA, 63 bp, Homo sapiens; identical to SEQ ID NO: 251098
  chr2:128293882-128293945
  hypo

SEQ ID NO: 429548 - DNA, 83 bp, Homo sapiens; identical to SEQ ID NO: 251099
  chr2:128306301-128306384
  hypo

SEQ ID NO: 429549 - DNA, 187 bp, Homo sapiens; identical to SEQ ID NO: 251100
  chr2:128398930-128399117
  hypo

SEQ ID NO: 429550 - DNA, 365 bp, Homo sapiens; identical to SEQ ID NO: 251101
  chr2:128402978-128403343
  hypo

SEQ ID NO: 429551 - DNA, 128 bp, Homo sapiens; identical to SEQ ID NO: 251102
  chr2:128415009-128415137
  hypo

SEQ ID NO: 429552 - DNA, 69 bp, Homo sapiens; identical to SEQ ID NO: 251103
  chr2:128434220-128434289
  hypo

SEQ ID NO: 429553 - DNA, 32 bp, Homo sapiens; identical to SEQ ID NO: 208233
  chr2:128472923-128472955
  hypo

SEQ ID NO: 429554 - DNA, 84 bp, Homo sapiens; identical to SEQ ID NO: 208235
  chr2:128600135-128600219
  hypo

SEQ ID NO: 429555 - DNA, 33 bp, Homo sapiens; identical to SEQ ID NO: 251108
  chr2:128666472-128666505
  hypo

SEQ ID NO: 429556 - DNA, 41 bp, Homo sapiens; identical to SEQ ID NO: 208236
  chr2:128679951-128679992
  hypo

SEQ ID NO: 429557 - DNA, 40 bp, Homo sapiens; identical to SEQ ID NO: 208237
  chr2:128680172-128680212
  hypo

SEQ ID NO: 429558 - DNA, 67 bp, Homo sapiens; identical to SEQ ID NO: 251111
  chr2:128826373-128826440
  hypo

SEQ ID NO: 429559 - DNA, 35 bp, Homo sapiens; identical to SEQ ID NO: 251112
  chr2:128826705-128826740
  hypo

SEQ ID NO: 429560 - DNA, 200 bp, Homo sapiens; identical to SEQ ID NO: 251113
  chr2:129021514-129021714
  hypo

SEQ ID NO: 429561 - DNA, 56 bp, Homo sapiens; identical to SEQ ID NO: 208238
  chr2:129027719-129027775
  hypo

SEQ ID NO: 429562 - DNA, 170 bp, Homo sapiens; identical to SEQ ID NO: 208239
  chr2:129250623-129250793
  hypo

SEQ ID NO: 429563 - DNA, 68 bp, Homo sapiens; identical to SEQ ID NO: 251117
  chr2:129284176-129284244
  hypo

SEQ ID NO: 429564 - DNA, 71 bp, Homo sapiens; identical to SEQ ID NO: 251118
  chr2:129448155-129448226
  hypo

SEQ ID NO: 429565 - DNA, 152 bp, Homo sapiens; identical to SEQ ID NO: 251119
  chr2:129539249-129539401
  hypo

SEQ ID NO: 429566 - DNA, 158 bp, Homo sapiens; identical to SEQ ID NO: 208240
  chr2:129542648-129542806
  hypo

SEQ ID NO: 429567 - DNA, 42 bp, Homo sapiens; identical to SEQ ID NO: 251121
  chr2:130174992-130175034
  hypo

SEQ ID NO: 429568 - DNA, 94 bp, Homo sapiens; identical to SEQ ID NO: 208241
  chr2:130356761-130356855
  hypo

SEQ ID NO: 429569 - DNA, 76 bp, Homo sapiens; identical to SEQ ID NO: 251124
  chr2:130626912-130626988
  hypo

SEQ ID NO: 429570 - DNA, 36 bp, Homo sapiens; identical to SEQ ID NO: 208242
  chr2:130670341-130670377
  hypo

SEQ ID NO: 429571 - DNA, 78 bp, Homo sapiens; identical to SEQ ID NO: 300202
  chr2:130886699-130886777
  hypo

SEQ ID NO: 429572 - DNA, 39 bp, Homo sapiens; identical to SEQ ID NO: 251128
  chr2:130919036-130919075
  hypo

SEQ ID NO: 429573 - DNA, 138 bp, Homo sapiens; identical to SEQ ID NO: 208243
  chr2:130943151-130943289
  hypo

SEQ ID NO: 429574 - DNA, 209 bp, Homo sapiens; identical to SEQ ID NO: 221870
  chr2:131113001-131113210
  hypo

SEQ ID NO: 429575 - DNA, 162 bp, Homo sapiens; identical to SEQ ID NO: 280215
  chr2:131114254-131114416
  hypo

SEQ ID NO: 429576 - DNA, 128 bp, Homo sapiens; identical to SEQ ID NO: 251131
  chr2:131116461-131116589
  hypo

SEQ ID NO: 429577 - DNA, 88 bp, Homo sapiens; identical to SEQ ID NO: 208244
  chr2:131502560-131502648
  hypo

SEQ ID NO: 429578 - DNA, 291 bp, Homo sapiens; identical to SEQ ID NO: 251134
  chr2:131583609-131583900
  hypo

SEQ ID NO: 429579 - DNA, 138 bp, Homo sapiens; identical to SEQ ID NO: 208245
  chr2:131639163-131639301
  hypo

SEQ ID NO: 429580 - DNA, 39 bp, Homo sapiens; identical to SEQ ID NO: 208246
  chr2:131639331-131639370
  hypo

SEQ ID NO: 429581 - DNA, 48 bp, Homo sapiens; identical to SEQ ID NO: 251136
  chr2:131674646-131674694
  hypo

SEQ ID NO: 429582 - DNA, 52 bp, Homo sapiens; identical to SEQ ID NO: 300214
  chr2:131813471-131813523
  hypo

SEQ ID NO: 429583 - DNA, 240 bp, Homo sapiens; identical to SEQ ID NO: 251138
  chr2:131818832-131819072
  hypo

SEQ ID NO: 429584 - DNA, 394 bp, Homo sapiens; identical to SEQ ID NO: 208248
  chr2:131878434-131878828
  hypo

SEQ ID NO: 429585 - DNA, 219 bp, Homo sapiens; identical to SEQ ID NO: 251140
  chr2:131883252-131883471
  hypo

SEQ ID NO: 429586 - DNA, 100 bp, Homo sapiens; identical to SEQ ID NO: 251141
  chr2:131962504-131962604
  hypo

SEQ ID NO: 429587 - DNA, 36 bp, Homo sapiens; identical to SEQ ID NO: 251142
  chr2:131966830-131966866
  hypo

SEQ ID NO: 429588 - DNA, 124 bp, Homo sapiens; identical to SEQ ID NO: 251146
  chr2:132274362-132274486
  hypo

SEQ ID NO: 429589 - DNA, 159 bp, Homo sapiens; identical to SEQ ID NO: 208251
  chr2:132348675-132348834
  hypo

SEQ ID NO: 429590 - DNA, 84 bp, Homo sapiens; identical to SEQ ID NO: 251149
  chr2:132403830-132403914
  hypo

SEQ ID NO: 429591 - DNA, 492 bp, Homo sapiens; identical to SEQ ID NO: 208252
  chr2:132415371-132415863
  hypo

SEQ ID NO: 429592 - DNA, 87 bp, Homo sapiens; identical to SEQ ID NO: 208253
  chr2:132586579-132586666
  hypo

SEQ ID NO: 429593 - DNA, 105 bp, Homo sapiens; identical to SEQ ID NO: 280221
  chr2:132767530-132767635
  hypo

SEQ ID NO: 429594 - DNA, 120 bp, Homo sapiens; identical to SEQ ID NO: 198435
  chr2:132795464-132795584
  hypo

SEQ ID NO: 429595 - DNA, 100 bp, Homo sapiens; identical to SEQ ID NO: 198436
  chr2:132796304-132796404
  hypo

SEQ ID NO: 429596 - DNA, 171 bp, Homo sapiens; identical to SEQ ID NO: 251153
  chr2:134897881-134898052
  hypo

SEQ ID NO: 429597 - DNA, 133 bp, Homo sapiens; identical to SEQ ID NO: 251154
  chr2:134948636-134948769
  hypo

SEQ ID NO: 429598 - DNA, 96 bp, Homo sapiens; identical to SEQ ID NO: 208259
  chr2:135707351-135707447
  hypo

SEQ ID NO: 429599 - DNA, 180 bp, Homo sapiens; identical to SEQ ID NO: 251157
  chr2:135718101-135718281
  hypo

SEQ ID NO: 429600 - DNA, 217 bp, Homo sapiens; identical to SEQ ID NO: 251158
  chr2:135926165-135926382
  hypo

SEQ ID NO: 429601 - DNA, 88 bp, Homo sapiens; identical to SEQ ID NO: 198446
  chr2:136288366-136288454
  hypo

SEQ ID NO: 429602 - DNA, 133 bp, Homo sapiens; identical to SEQ ID NO: 251159
  chr2:136555620-136555753
  hypo

SEQ ID NO: 429603 - DNA, 194 bp, Homo sapiens; identical to SEQ ID NO: 251160
  chr2:136602113-136602307
  hypo

SEQ ID NO: 429604 - DNA, 164 bp, Homo sapiens; identical to SEQ ID NO: 251161
  chr2:136721521-136721685
  hypo

SEQ ID NO: 429605 - DNA, 221 bp, Homo sapiens; identical to SEQ ID NO: 208261
  chr2:136785592-136785813
  hypo

SEQ ID NO: 429606 - DNA, 42 bp, Homo sapiens; identical to SEQ ID NO: 251163
  chr2:136845086-136845128
  hypo

SEQ ID NO: 429607 - DNA, 33 bp, Homo sapiens; identical to SEQ ID NO: 251164
  chr2:136911820-136911853
  hypo

SEQ ID NO: 429608 - DNA, 32 bp, Homo sapiens; identical to SEQ ID NO: 251165
  chr2:137088316-137088348
  hypo

SEQ ID NO: 429609 - DNA, 42 bp, Homo sapiens; identical to SEQ ID NO: 208264
  chr2:137195177-137195219
  hypo

SEQ ID NO: 429610 - DNA, 198 bp, Homo sapiens; identical to SEQ ID NO: 251167
  chr2:138689491-138689689
  hypo

SEQ ID NO: 429611 - DNA, 78 bp, Homo sapiens; identical to SEQ ID NO: 208266
  chr2:139436926-139437004
  hypo

SEQ ID NO: 429612 - DNA, 74 bp, Homo sapiens; identical to SEQ ID NO: 251169
  chr2:144227051-144227125
  hypo

SEQ ID NO: 429613 - DNA, 330 bp, Homo sapiens; identical to SEQ ID NO: 208267
  chr2:144478010-144478340
  hypo

SEQ ID NO: 429614 - DNA, 33 bp, Homo sapiens; identical to SEQ ID NO: 198457
  chr2:145090080-145090113
  hypo

SEQ ID NO: 429615 - DNA, 1170 bp, Homo sapiens; identical to SEQ ID NO: 280254
  chr2:148601349-148602519
  hypo

SEQ ID NO: 429616 - DNA, 193 bp, Homo sapiens; identical to SEQ ID NO: 251173
  chr2:148965103-148965296
  hypo

SEQ ID NO: 429617 - DNA, 41 bp, Homo sapiens; identical to SEQ ID NO: 251174
  chr2:149016010-149016051
  hypo

SEQ ID NO: 429618 - DNA, 49 bp, Homo sapiens; identical to SEQ ID NO: 251175
  chr2:149016081-149016130
  hypo

SEQ ID NO: 429619 - DNA, 37 bp, Homo sapiens; identical to SEQ ID NO: 208271
  chr2:149045675-149045712
  hypo

SEQ ID NO: 429620 - DNA, 136 bp, Homo sapiens; identical to SEQ ID NO: 251177
  chr2:149215521-149215657
  hypo

SEQ ID NO: 429621 - DNA, 194 bp, Homo sapiens; identical to SEQ ID NO: 208272
  chr2:149227323-149227517
  hypo

SEQ ID NO: 429622 - DNA, 32 bp, Homo sapiens; identical to SEQ ID NO: 208273
  chr2:149436588-149436620
  hypo

SEQ ID NO: 429623 - DNA, 40 bp, Homo sapiens; identical to SEQ ID NO: 251181
  chr2:149514920-149514960
  hypo

SEQ ID NO: 429624 - DNA, 143 bp, Homo sapiens; identical to SEQ ID NO: 208276
  chr2:150131807-150131950
  hypo

SEQ ID NO: 429625 - DNA, 734 bp, Homo sapiens; identical to SEQ ID NO: 280265
  chr2:150186117-150186851
  hypo

SEQ ID NO: 429626 - DNA, 79 bp, Homo sapiens; identical to SEQ ID NO: 251184
  chr2:150394600-150394679
  hypo

SEQ ID NO: 429627 - DNA, 278 bp, Homo sapiens; identical to SEQ ID NO: 251186
  chr2:152153950-152154228
  hypo

SEQ ID NO: 429628 - DNA, 33 bp, Homo sapiens; identical to SEQ ID NO: 251187
  chr2:152265327-152265360
  hypo

SEQ ID NO: 429629 - DNA, 206 bp, Homo sapiens; identical to SEQ ID NO: 208280
  chr2:152642697-152642903
  hypo

SEQ ID NO: 429630 - DNA, 249 bp, Homo sapiens; identical to SEQ ID NO: 280275
  chr2:152955492-152955741
  hypo

SEQ ID NO: 429631 - DNA, 100 bp, Homo sapiens; identical to SEQ ID NO: 198475
  chr2:152956050-152956150
  hypo

SEQ ID NO: 429632 - DNA, 94 bp, Homo sapiens; identical to SEQ ID NO: 208282
  chr2:153079539-153079633
  hypo

SEQ ID NO: 429633 - DNA, 77 bp, Homo sapiens; identical to SEQ ID NO: 251192
  chr2:153258694-153258771
  hypo

SEQ ID NO: 429634 - DNA, 98 bp, Homo sapiens; identical to SEQ ID NO: 251193
  chr2:153438094-153438192
  hypo

SEQ ID NO: 429635 - DNA, 39 bp, Homo sapiens; identical to SEQ ID NO: 251194
  chr2:153448030-153448069
  hypo

SEQ ID NO: 429636 - DNA, 405 bp, Homo sapiens; identical to SEQ ID NO: 280290
  chr2:157189365-157189770
  hypo

SEQ ID NO: 429637 - DNA, 34 bp, Homo sapiens; identical to SEQ ID NO: 251195
  chr2:157340915-157340949
  hypo

SEQ ID NO: 429638 - DNA, 349 bp, Homo sapiens; identical to SEQ ID NO: 38109
  chr2:158484949-158485298
  hypo

SEQ ID NO: 429639 - DNA, 100 bp, Homo sapiens; identical to SEQ ID NO: 251196
  chr2:158607940-158608040
  hypo

SEQ ID NO: 429640 - DNA, 90 bp, Homo sapiens; identical to SEQ ID NO: 251197
  chr2:158674928-158675018
  hypo

SEQ ID NO: 429641 - DNA, 33 bp, Homo sapiens; identical to SEQ ID NO: 251198
  chr2:158914982-158915015
  hypo

SEQ ID NO: 429642 - DNA, 157 bp, Homo sapiens; identical to SEQ ID NO: 208291
  chr2:159490660-159490817
  hypo

SEQ ID NO: 429643 - DNA, 119 bp, Homo sapiens; identical to SEQ ID NO: 251201
  chr2:159638827-159638946
  hypo

SEQ ID NO: 429644 - DNA, 288 bp, Homo sapiens; identical to SEQ ID NO: 251202
  chr2:159946996-159947284
  hypo

SEQ ID NO: 429645 - DNA, 39 bp, Homo sapiens; identical to SEQ ID NO: 251203
  chr2:159964843-159964882
  hypo

SEQ ID NO: 429646 - DNA, 86 bp, Homo sapiens; identical to SEQ ID NO: 251205
  chr2:160061390-160061476
  hypo

SEQ ID NO: 429647 - DNA, 244 bp, Homo sapiens; identical to SEQ ID NO: 251206
  chr2:160086244-160086488
  hypo

SEQ ID NO: 429648 - DNA, 506 bp, Homo sapiens; identical to SEQ ID NO: 198493
  chr2:160142449-160142955
  hypo

SEQ ID NO: 429649 - DNA, 42 bp, Homo sapiens; identical to SEQ ID NO: 208296
  chr2:160632631-160632673
  hypo

SEQ ID NO: 429650 - DNA, 678 bp, Homo sapiens; identical to SEQ ID NO: 280304
  chr2:160654215-160654893
  hypo

SEQ ID NO: 429651 - DNA, 79 bp, Homo sapiens; identical to SEQ ID NO: 251208
  chr2:161052031-161052110
  hypo

SEQ ID NO: 429652 - DNA, 115 bp, Homo sapiens; identical to SEQ ID NO: 208298
  chr2:161113756-161113871
  hypo

SEQ ID NO: 429653 - DNA, 657 bp, Homo sapiens; identical to SEQ ID NO: 280306
  chr2:161126281-161126938
  hypo

SEQ ID NO: 429654 - DNA, 91 bp, Homo sapiens; identical to SEQ ID NO: 208299
  chr2:161127528-161127619
  hypo

SEQ ID NO: 429655 - DNA, 152 bp, Homo sapiens; identical to SEQ ID NO: 208300
  chr2:161128081-161128233
  hypo

SEQ ID NO: 429656 - DNA, 38 bp, Homo sapiens; identical to SEQ ID NO: 251212
  chr2:161141483-161141521
  hypo

SEQ ID NO: 429657 - DNA, 63 bp, Homo sapiens; identical to SEQ ID NO: 251213
  chr2:161150182-161150245
  hypo

SEQ ID NO: 429658 - DNA, 126 bp, Homo sapiens; identical to SEQ ID NO: 280307
  chr2:161263704-161263830
  hypo

SEQ ID NO: 429659 - DNA, 147 bp, Homo sapiens; identical to SEQ ID NO: 396089
  chr2:161263896-161264043
  hypo

SEQ ID NO: 429660 - DNA, 165 bp, Homo sapiens; identical to SEQ ID NO: 251215
  chr2:161506269-161506434
  hypo

SEQ ID NO: 429661 - DNA, 161 bp, Homo sapiens; identical to SEQ ID NO: 208303
  chr2:161989985-161990146
  hypo

SEQ ID NO: 429662 - DNA, 208 bp, Homo sapiens; identical to SEQ ID NO: 251217
  chr2:162096297-162096505
  hypo

SEQ ID NO: 429663 - DNA, 59 bp, Homo sapiens; identical to SEQ ID NO: 251218
  chr2:162838347-162838406
  hypo

SEQ ID NO: 429664 - DNA, 38 bp, Homo sapiens; identical to SEQ ID NO: 251219
  chr2:163298803-163298841
  hypo

SEQ ID NO: 429665 - DNA, 138 bp, Homo sapiens; identical to SEQ ID NO: 251220
  chr2:164966392-164966530
  hypo

SEQ ID NO: 429666 - DNA, 129 bp, Homo sapiens; identical to SEQ ID NO: 280331
  chr2:165477434-165477563
  hypo

SEQ ID NO: 429667 - DNA, 574 bp, Homo sapiens; identical to SEQ ID NO: 280332
  chr2:165477596-165478170
  hypo

SEQ ID NO: 429668 - DNA, 214 bp, Homo sapiens; identical to SEQ ID NO: 208307
  chr2:165637158-165637372
  hypo

SEQ ID NO: 429669 - DNA, 1524 bp, Homo sapiens; identical to SEQ ID NO: 280333
  chr2:165697145-165698669
  hypo

SEQ ID NO: 429670 - DNA, 164 bp, Homo sapiens; identical to SEQ ID NO: 251222
  chr2:166726864-166727028
  hypo

SEQ ID NO: 429671 - DNA, 88 bp, Homo sapiens; identical to SEQ ID NO: 208311
  chr2:166790775-166790863
  hypo

SEQ ID NO: 429672 - DNA, 86 bp, Homo sapiens; identical to SEQ ID NO: 208312
  chr2:166894501-166894587
  hypo

SEQ ID NO: 429673 - DNA, 106 bp, Homo sapiens; identical to SEQ ID NO: 251225
  chr2:168921849-168921955
  hypo

SEQ ID NO: 429674 - DNA, 203 bp, Homo sapiens; identical to SEQ ID NO: 208315
  chr2:169073153-169073356
  hypo

SEQ ID NO: 429675 - DNA, 96 bp, Homo sapiens; identical to SEQ ID NO: 208318
  chr2:169337555-169337651
  hypo

SEQ ID NO: 429676 - DNA, 41 bp, Homo sapiens; identical to SEQ ID NO: 208319
  chr2:169436467-169436508
  hypo

SEQ ID NO: 429677 - DNA, 197 bp, Homo sapiens; identical to SEQ ID NO: 251229
  chr2:169533301-169533498
  hypo

SEQ ID NO: 429678 - DNA, 32 bp, Homo sapiens; identical to SEQ ID NO: 251230
  chr2:169561125-169561157
  hypo

SEQ ID NO: 429679 - DNA, 31 bp, Homo sapiens; identical to SEQ ID NO: 251231
  chr2:169561397-169561428
  hypo

SEQ ID NO: 429680 - DNA, 72 bp, Homo sapiens; identical to SEQ ID NO: 251232
  chr2:170031752-170031824
  hypo

SEQ ID NO: 429681 - DNA, 268 bp, Homo sapiens; identical to SEQ ID NO: 198518
  chr2:170218861-170219129
  hypo

SEQ ID NO: 429682 - DNA, 40 bp, Homo sapiens; identical to SEQ ID NO: 251234
  chr2:170283327-170283367
  hypo

SEQ ID NO: 429683 - DNA, 49 bp, Homo sapiens; identical to SEQ ID NO: 251235
  chr2:170337117-170337166
  hypo

SEQ ID NO: 429684 - DNA, 38 bp, Homo sapiens; identical to SEQ ID NO: 251236
  chr2:170337462-170337500
  hypo

SEQ ID NO: 429685 - DNA, 77 bp, Homo sapiens; identical to SEQ ID NO: 208323
  chr2:170373534-170373611
  hypo

SEQ ID NO: 429686 - DNA, 204 bp, Homo sapiens; identical to SEQ ID NO: 198519
  chr2:170430256-170430460
  hypo

SEQ ID NO: 429687 - DNA, 101 bp, Homo sapiens; identical to SEQ ID NO: 208326
  chr2:170569212-170569313
  hypo

SEQ ID NO: 429688 - DNA, 165 bp, Homo sapiens; identical to SEQ ID NO: 208328
  chr2:170584903-170585068
  hypo

SEQ ID NO: 429689 - DNA, 180 bp, Homo sapiens; identical to SEQ ID NO: 208329
  chr2:170620609-170620789
  hypo

SEQ ID NO: 429690 - DNA, 54 bp, Homo sapiens; identical to SEQ ID NO: 208330
  chr2:170682331-170682385
  hypo

SEQ ID NO: 429691 - DNA, 82 bp, Homo sapiens; identical to SEQ ID NO: 251245
  chr2:171542904-171542986
  hypo

SEQ ID NO: 429692 - DNA, 49 bp, Homo sapiens; identical to SEQ ID NO: 198527
  chr2:171627264-171627313
  hypo

SEQ ID NO: 429693 - DNA, 632 bp, Homo sapiens; identical to SEQ ID NO: 38182
  chr2:171627346-171627978
  hypo

SEQ ID NO: 429694 - DNA, 70 bp, Homo sapiens
  chr2:171730911-171730981
  hypo
ctgtctcaaaaaaaaaaaaaaaaaaggaatactagtgcagtggcctcaaggagctgggacaatgccagac

SEQ ID NO: 429695 - DNA, 157 bp, Homo sapiens; identical to SEQ ID NO: 251250
  chr2:171860123-171860280
  hypo

SEQ ID NO: 429696 - DNA, 70 bp, Homo sapiens; identical to SEQ ID NO: 251251
  chr2:171860310-171860380
  hypo

SEQ ID NO: 429697 - DNA, 41 bp, Homo sapiens; identical to SEQ ID NO: 251252
  chr2:172302764-172302805
  hypo

SEQ ID NO: 429698 - DNA, 193 bp, Homo sapiens; identical to SEQ ID NO: 280373
  chr2:172379339-172379532
  hypo

SEQ ID NO: 429699 - DNA, 506 bp, Homo sapiens; identical to SEQ ID NO: 280374
  chr2:172379723-172380229
  hypo

SEQ ID NO: 429700 - DNA, 152 bp, Homo sapiens; identical to SEQ ID NO: 251255
  chr2:172424323-172424475
  hypo

SEQ ID NO: 429701 - DNA, 32 bp, Homo sapiens; identical to SEQ ID NO: 251256
  chr2:172424535-172424567
  hypo

SEQ ID NO: 429702 - DNA, 39 bp, Homo sapiens; identical to SEQ ID NO: 208337
  chr2:173422734-173422773
  hypo

SEQ ID NO: 429703 - DNA, 32 bp, Homo sapiens; identical to SEQ ID NO: 251258
  chr2:173422953-173422985
  hypo

SEQ ID NO: 429704 - DNA, 100 bp, Homo sapiens; identical to SEQ ID NO: 208338
  chr2:173423968-173424068
  hypo

SEQ ID NO: 429705 - DNA, 47 bp, Homo sapiens; identical to SEQ ID NO: 251260
  chr2:173894916-173894963
  hypo

SEQ ID NO: 429706 - DNA, 59 bp, Homo sapiens; identical to SEQ ID NO: 251261
  chr2:173909415-173909474
  hypo

SEQ ID NO: 429707 - DNA, 319 bp, Homo sapiens; identical to SEQ ID NO: 198551
  chr2:173940416-173940735
  hypo

SEQ ID NO: 429708 - DNA, 120 bp, Homo sapiens; identical to SEQ ID NO: 251263
  chr2:174049586-174049706
  hypo

SEQ ID NO: 429709 - DNA, 103 bp, Homo sapiens; identical to SEQ ID NO: 221936
  chr2:174147823-174147926
  hypo

SEQ ID NO: 429710 - DNA, 141 bp, Homo sapiens; identical to SEQ ID NO: 251264
  chr2:174204828-174204969
  hypo

SEQ ID NO: 429711 - DNA, 74 bp, Homo sapiens; identical to SEQ ID NO: 251265
  chr2:174278557-174278631
  hypo

SEQ ID NO: 429712 - DNA, 217 bp, Homo sapiens; identical to SEQ ID NO: 198553
  chr2:174349951-174350168
  hypo

SEQ ID NO: 429713 - DNA, 159 bp, Homo sapiens; identical to SEQ ID NO: 251266
  chr2:174522467-174522626
  hypo

SEQ ID NO: 429714 - DNA, 276 bp, Homo sapiens; identical to SEQ ID NO: 251267
  chr2:174890601-174890877
  hypo

SEQ ID NO: 429715 - DNA, 72 bp, Homo sapiens; identical to SEQ ID NO: 251268
  chr2:175113858-175113930
  hypo

SEQ ID NO: 429716 - DNA, 35 bp, Homo sapiens; identical to SEQ ID NO: 208342
  chr2:175383905-175383940
  hypo

SEQ ID NO: 429717 - DNA, 35 bp, Homo sapiens; identical to SEQ ID NO: 208343
  chr2:175384180-175384215
  hypo

SEQ ID NO: 429718 - DNA, 286 bp, Homo sapiens; identical to SEQ ID NO: 208344
  chr2:175927666-175927952
  hypo

SEQ ID NO: 429719 - DNA, 32 bp, Homo sapiens; identical to SEQ ID NO: 208345
  chr2:176569574-176569606
  hypo

SEQ ID NO: 429720 - DNA, 104 bp, Homo sapiens; identical to SEQ ID NO: 280444
  chr2:177022459-177022563
  hypo

SEQ ID NO: 429721 - DNA, 90 bp, Homo sapiens; identical to SEQ ID NO: 208347
  chr2:177178833-177178923
  hypo

SEQ ID NO: 429722 - DNA, 32 bp, Homo sapiens; identical to SEQ ID NO: 251276
  chr2:178089624-178089656
  hypo

SEQ ID NO: 429723 - DNA, 136 bp, Homo sapiens; identical to SEQ ID NO: 251277
  chr2:178090224-178090360
  hypo

SEQ ID NO: 429724 - DNA, 48 bp, Homo sapiens; identical to SEQ ID NO: 300404
  chr2:178131810-178131858
  hypo

SEQ ID NO: 429725 - DNA, 207 bp, Homo sapiens; identical to SEQ ID NO: 251279
  chr2:178385809-178386016
  hypo

SEQ ID NO: 429726 - DNA, 93 bp, Homo sapiens; identical to SEQ ID NO: 251280
  chr2:178586888-178586981
  hypo

SEQ ID NO: 429727 - DNA, 59 bp, Homo sapiens; identical to SEQ ID NO: 251281
  chr2:178936539-178936598
  hypo

SEQ ID NO: 429728 - DNA, 293 bp, Homo sapiens; identical to SEQ ID NO: 251282
  chr2:178936628-178936921
  hypo

SEQ ID NO: 429729 - DNA, 40 bp, Homo sapiens; identical to SEQ ID NO: 208353
  chr2:179303355-179303395
  hypo

SEQ ID NO: 429730 - DNA, 640 bp, Homo sapiens; identical to SEQ ID NO: 221949
  chr2:179316084-179316724
  hypo

SEQ ID NO: 429731 - DNA, 31 bp, Homo sapiens; identical to SEQ ID NO: 251286
  chr2:180019921-180019952
  hypo

SEQ ID NO: 429732 - DNA, 80 bp, Homo sapiens; identical to SEQ ID NO: 208355
  chr2:180027694-180027774
  hypo

SEQ ID NO: 429733 - DNA, 69 bp, Homo sapiens; identical to SEQ ID NO: 251288
  chr2:180128504-180128573
  hypo

SEQ ID NO: 429734 - DNA, 85 bp, Homo sapiens; identical to SEQ ID NO: 198592
  chr2:180129611-180129696
  hypo

SEQ ID NO: 429735 - DNA, 163 bp, Homo sapiens; identical to SEQ ID NO: 251290
  chr2:182413425-182413588
  hypo

SEQ ID NO: 429736 - DNA, 35 bp, Homo sapiens; identical to SEQ ID NO: 251291
  chr2:183811123-183811158
  hypo

SEQ ID NO: 429737 - DNA, 92 bp, Homo sapiens; identical to SEQ ID NO: 251293
  chr2:185490893-185490985
  hypo

SEQ ID NO: 429738 - DNA, 43 bp, Homo sapiens; identical to SEQ ID NO: 251294
  chr2:186081368-186081411
  hypo

SEQ ID NO: 429739 - DNA, 284 bp, Homo sapiens; identical to SEQ ID NO: 198604
  chr2:187454990-187455274
  hypo

SEQ ID NO: 429740 - DNA, 32 bp, Homo sapiens; identical to SEQ ID NO: 251295
  chr2:188404596-188404628
  hypo

SEQ ID NO: 429741 - DNA, 82 bp, Homo sapiens; identical to SEQ ID NO: 251296
  chr2:190369341-190369423
  hypo

SEQ ID NO: 429742 - DNA, 115 bp, Homo sapiens; identical to SEQ ID NO: 251297
  chr2:190686869-190686984
  hypo

SEQ ID NO: 429743 - DNA, 97 bp, Homo sapiens; identical to SEQ ID NO: 208363
  chr2:190703660-190703757
  hypo

SEQ ID NO: 429744 - DNA, 120 bp, Homo sapiens; identical to SEQ ID NO: 251299
  chr2:191145274-191145394
  hypo

SEQ ID NO: 429745 - DNA, 125 bp, Homo sapiens; identical to SEQ ID NO: 251300
  chr2:191301773-191301898
  hypo

SEQ ID NO: 429746 - DNA, 139 bp, Homo sapiens; identical to SEQ ID NO: 198615
  chr2:191512982-191513121
  hypo

SEQ ID NO: 429747 - DNA, 120 bp, Homo sapiens; identical to SEQ ID NO: 208367
  chr2:191794489-191794609
  hypo

SEQ ID NO: 429748 - DNA, 111 bp, Homo sapiens; identical to SEQ ID NO: 251303
  chr2:191829751-191829862
  hypo

SEQ ID NO: 429749 - DNA, 84 bp, Homo sapiens; identical to SEQ ID NO: 208371
  chr2:192342592-192342676
  hypo

SEQ ID NO: 429750 - DNA, 145 bp, Homo sapiens; identical to SEQ ID NO: 208372
  chr2:192746555-192746700
  hypo

SEQ ID NO: 429751 - DNA, 42 bp, Homo sapiens; identical to SEQ ID NO: 251306
  chr2:196362209-196362251
  hypo

SEQ ID NO: 429752 - DNA, 44 bp, Homo sapiens; identical to SEQ ID NO: 208374
  chr2:196402553-196402597
  hypo

SEQ ID NO: 429753 - DNA, 99 bp, Homo sapiens; identical to SEQ ID NO: 251308
  chr2:196411141-196411240
  hypo

SEQ ID NO: 429754 - DNA, 105 bp, Homo sapiens; identical to SEQ ID NO: 251310
  chr2:196462782-196462887
  hypo

SEQ ID NO: 429755 - DNA, 40 bp, Homo sapiens; identical to SEQ ID NO: 251311
  chr2:196477243-196477283
  hypo

SEQ ID NO: 429756 - DNA, 31 bp, Homo sapiens; identical to SEQ ID NO: 251312
  chr2:197003966-197003997
  hypo

SEQ ID NO: 429757 - DNA, 386 bp, Homo sapiens; identical to SEQ ID NO: 198628
  chr2:197035576-197035962
  hypo

SEQ ID NO: 429758 - DNA, 89 bp, Homo sapiens; identical to SEQ ID NO: 251313
  chr2:197038938-197039027
  hypo

SEQ ID NO: 429759 - DNA, 38 bp, Homo sapiens; identical to SEQ ID NO: 208376
  chr2:197095851-197095889
  hypo

SEQ ID NO: 429760 - DNA, 149 bp, Homo sapiens; identical to SEQ ID NO: 251315
  chr2:197379963-197380112
  hypo

SEQ ID NO: 429761 - DNA, 121 bp, Homo sapiens; identical to SEQ ID NO: 198631
  chr2:198257786-198257907
  hypo

SEQ ID NO: 429762 - DNA, 106 bp, Homo sapiens; identical to SEQ ID NO: 198632
  chr2:198262740-198262846
  hypo

SEQ ID NO: 429763 - DNA, 148 bp, Homo sapiens; identical to SEQ ID NO: 198633
  chr2:198265015-198265163
  hypo

SEQ ID NO: 429764 - DNA, 178 bp, Homo sapiens; identical to SEQ ID NO: 198634
  chr2:198265429-198265607
  hypo

SEQ ID NO: 429765 - DNA, 341 bp, Homo sapiens; identical to SEQ ID NO: 198635
  chr2:198266479-198266820
  hypo

SEQ ID NO: 429766 - DNA, 376 bp, Homo sapiens; identical to SEQ ID NO: 198636
  chr2:198267374-198267750
  hypo

SEQ ID NO: 429767 - DNA, 70 bp, Homo sapiens; identical to SEQ ID NO: 198637
  chr2:198268366-198268436
  hypo

SEQ ID NO: 429768 - DNA, 93 bp, Homo sapiens; identical to SEQ ID NO: 198638
  chr2:198269812-198269905
  hypo

SEQ ID NO: 429769 - DNA, 81 bp, Homo sapiens; identical to SEQ ID NO: 198639
  chr2:198272718-198272799
  hypo

SEQ ID NO: 429770 - DNA, 147 bp, Homo sapiens; identical to SEQ ID NO: 198640
  chr2:198273117-198273264
  hypo

SEQ ID NO: 429771 - DNA, 43 bp, Homo sapiens; identical to SEQ ID NO: 251318
  chr2:198356153-198356196
  hypo

SEQ ID NO: 429772 - DNA, 1110 bp, Homo sapiens; identical to SEQ ID NO: 280531
  chr2:198669112-198670222
  hypo

SEQ ID NO: 429773 - DNA, 781 bp, Homo sapiens; identical to SEQ ID NO: 221975
  chr2:200323016-200323797
  hypo

SEQ ID NO: 429774 - DNA, 582 bp, Homo sapiens; identical to SEQ ID NO: 221976
  chr2:200324029-200324611
  hypo

SEQ ID NO: 429775 - DNA, 57 bp, Homo sapiens; identical to SEQ ID NO: 251320
  chr2:200938957-200939014
  hypo

SEQ ID NO: 429776 - DNA, 1349 bp, Homo sapiens; identical to SEQ ID NO: 198655
  chr2:201171095-201172444
  hypo

SEQ ID NO: 429777 - DNA, 119 bp, Homo sapiens; identical to SEQ ID NO: 198656
  chr2:201172480-201172599
  hypo

SEQ ID NO: 429778 - DNA, 143 bp, Homo sapiens; identical to SEQ ID NO: 208393
  chr2:201218934-201219077
  hypo

SEQ ID NO: 429779 - DNA, 317 bp, Homo sapiens; identical to SEQ ID NO: 251322
  chr2:201273680-201273997
  hypo

SEQ ID NO: 429780 - DNA, 350 bp, Homo sapiens; identical to SEQ ID NO: 251323
  chr2:201281660-201282010
  hypo

SEQ ID NO: 429781 - DNA, 323 bp, Homo sapiens; identical to SEQ ID NO: 208394
  chr2:201354840-201355163
  hypo

SEQ ID NO: 429782 - DNA, 339 bp, Homo sapiens; identical to SEQ ID NO: 251325
  chr2:201652446-201652785
  hypo

SEQ ID NO: 429783 - DNA, 82 bp, Homo sapiens; identical to SEQ ID NO: 208396
  chr2:201712542-201712624
  hypo

SEQ ID NO: 429784 - DNA, 120 bp, Homo sapiens; identical to SEQ ID NO: 251327
  chr2:201809208-201809328
  hypo

SEQ ID NO: 429785 - DNA, 182 bp, Homo sapiens; identical to SEQ ID NO: 251328
  chr2:202003519-202003701
  hypo

SEQ ID NO: 429786 - DNA, 257 bp, Homo sapiens; identical to SEQ ID NO: 251329
  chr2:202004689-202004946
  hypo

SEQ ID NO: 429787 - DNA, 35 bp, Homo sapiens; identical to SEQ ID NO: 251330
  chr2:202119808-202119843
  hypo

SEQ ID NO: 429788 - DNA, 97 bp, Homo sapiens; identical to SEQ ID NO: 251331
  chr2:202261466-202261563
  hypo

SEQ ID NO: 429789 - DNA, 41 bp, Homo sapiens; identical to SEQ ID NO: 251332
  chr2:202270408-202270449
  hypo

SEQ ID NO: 429790 - DNA, 204 bp, Homo sapiens; identical to SEQ ID NO: 221978
  chr2:202644945-202645149
  hypo

SEQ ID NO: 429791 - DNA, 104 bp, Homo sapiens; identical to SEQ ID NO: 251333
  chr2:202888728-202888832
  hypo

SEQ ID NO: 429792 - DNA, 43 bp, Homo sapiens; identical to SEQ ID NO: 251334
  chr2:202893412-202893455
  hypo

SEQ ID NO: 429793 - DNA, 726 bp, Homo sapiens; identical to SEQ ID NO: 198661
  chr2:202898961-202899687
  hypo

SEQ ID NO: 429794 - DNA, 34 bp, Homo sapiens; identical to SEQ ID NO: 198662
  chr2:202900077-202900111
  hypo

SEQ ID NO: 429795 - DNA, 45 bp, Homo sapiens; identical to SEQ ID NO: 251336
  chr2:203163327-203163372
  hypo

SEQ ID NO: 429796 - DNA, 36 bp, Homo sapiens; identical to SEQ ID NO: 251337
  chr2:203242156-203242192
  hypo

SEQ ID NO: 429797 - DNA, 104 bp, Homo sapiens; identical to SEQ ID NO: 221980
  chr2:203242328-203242432
  hypo

SEQ ID NO: 429798 - DNA, 34 bp, Homo sapiens; identical to SEQ ID NO: 208400
  chr2:203250365-203250399
  hypo

SEQ ID NO: 429799 - DNA, 162 bp, Homo sapiens; identical to SEQ ID NO: 208401
  chr2:203431925-203432087
  hypo

SEQ ID NO: 429800 - DNA, 79 bp, Homo sapiens; identical to SEQ ID NO: 251340
  chr2:203467678-203467757
  hypo

SEQ ID NO: 429801 - DNA, 209 bp, Homo sapiens; identical to SEQ ID NO: 208402
  chr2:203484399-203484608
  hypo

SEQ ID NO: 429802 - DNA, 33 bp, Homo sapiens; identical to SEQ ID NO: 208403
  chr2:203498545-203498578
  hypo

SEQ ID NO: 429803 - DNA, 97 bp, Homo sapiens; identical to SEQ ID NO: 251343
  chr2:203621984-203622081
  hypo

SEQ ID NO: 429804 - DNA, 45 bp, Homo sapiens; identical to SEQ ID NO: 208404
  chr2:204055398-204055443
  hypo

SEQ ID NO: 429805 - DNA, 32 bp, Homo sapiens; identical to SEQ ID NO: 251346
  chr2:204190592-204190624
  hypo

SEQ ID NO: 429806 - DNA, 31 bp, Homo sapiens; identical to SEQ ID NO: 251347
  chr2:204206113-204206144
  hypo

SEQ ID NO: 429807 - DNA, 195 bp, Homo sapiens; identical to SEQ ID NO: 198663
  chr2:204399768-204399963
  hypo

SEQ ID NO: 429808 - DNA, 69 bp, Homo sapiens; identical to SEQ ID NO: 251349
  chr2:204803398-204803467
  hypo

SEQ ID NO: 429809 - DNA, 126 bp, Homo sapiens; identical to SEQ ID NO: 251350
  chr2:204803497-204803623
  hypo

SEQ ID NO: 429810 - DNA, 34 bp, Homo sapiens; identical to SEQ ID NO: 208406
  chr2:205984487-205984521
  hypo

SEQ ID NO: 429811 - DNA, 44 bp, Homo sapiens; identical to SEQ ID NO: 208407
  chr2:206166494-206166538
  hypo

SEQ ID NO: 429812 - DNA, 106 bp, Homo sapiens; identical to SEQ ID NO: 280581
  chr2:206546583-206546689
  hypo

SEQ ID NO: 429813 - DNA, 476 bp, Homo sapiens; identical to SEQ ID NO: 280582
  chr2:206546770-206547246
  hypo

SEQ ID NO: 429814 - DNA, 149 bp, Homo sapiens; identical to SEQ ID NO: 251353
  chr2:206586382-206586531
  hypo

SEQ ID NO: 429815 - DNA, 114 bp, Homo sapiens; identical to SEQ ID NO: 208408
  chr2:206605278-206605392
  hypo

SEQ ID NO: 429816 - DNA, 176 bp, Homo sapiens; identical to SEQ ID NO: 251355
  chr2:206608212-206608388
  hypo

SEQ ID NO: 429817 - DNA, 88 bp, Homo sapiens; identical to SEQ ID NO: 251356
  chr2:206609770-206609858
  hypo

SEQ ID NO: 429818 - DNA, 315 bp, Homo sapiens; identical to SEQ ID NO: 251357
  chr2:206611452-206611767
  hypo

SEQ ID NO: 429819 - DNA, 56 bp, Homo sapiens; identical to SEQ ID NO: 251358
  chr2:206614128-206614184
  hypo

SEQ ID NO: 429820 - DNA, 103 bp, Homo sapiens; identical to SEQ ID NO: 251359
  chr2:206670208-206670311
  hypo

SEQ ID NO: 429821 - DNA, 153 bp, Homo sapiens; identical to SEQ ID NO: 208409
  chr2:206826960-206827113
  hypo

SEQ ID NO: 429822 - DNA, 148 bp, Homo sapiens; identical to SEQ ID NO: 208412
  chr2:206890498-206890646
  hypo

SEQ ID NO: 429823 - DNA, 41 bp, Homo sapiens; identical to SEQ ID NO: 208413
  chr2:206971201-206971242
  hypo

SEQ ID NO: 429824 - DNA, 41 bp, Homo sapiens; identical to SEQ ID NO: 208414
  chr2:206971482-206971523
  hypo

SEQ ID NO: 429825 - DNA, 43 bp, Homo sapiens; identical to SEQ ID NO: 208415
  chr2:207021944-207021987
  hypo

SEQ ID NO: 429826 - DNA, 80 bp, Homo sapiens; identical to SEQ ID NO: 251367
  chr2:207068388-207068468
  hypo

SEQ ID NO: 429827 - DNA, 37 bp, Homo sapiens; identical to SEQ ID NO: 251368
  chr2:207068777-207068814
  hypo

SEQ ID NO: 429828 - DNA, 178 bp, Homo sapiens; identical to SEQ ID NO: 251369
  chr2:208003599-208003777
  hypo

SEQ ID NO: 429829 - DNA, 298 bp, Homo sapiens; identical to SEQ ID NO: 251370
  chr2:208286407-208286705
  hypo

SEQ ID NO: 429830 - DNA, 42 bp, Homo sapiens; identical to SEQ ID NO: 251371
  chr2:208317603-208317645
  hypo

SEQ ID NO: 429831 - DNA, 40 bp, Homo sapiens; identical to SEQ ID NO: 251372
  chr2:208339132-208339172
  hypo

SEQ ID NO: 429832 - DNA, 47 bp, Homo sapiens; identical to SEQ ID NO: 208418
  chr2:208410314-208410361
  hypo

SEQ ID NO: 429833 - DNA, 41 bp, Homo sapiens; identical to SEQ ID NO: 251375
  chr2:208577542-208577583
  hypo

SEQ ID NO: 429834 - DNA, 155 bp, Homo sapiens; identical to SEQ ID NO: 208419
  chr2:208580710-208580865
  hypo

SEQ ID NO: 429835 - DNA, 137 bp, Homo sapiens; identical to SEQ ID NO: 208420
  chr2:208622063-208622200
  hypo

SEQ ID NO: 429836 - DNA, 68 bp, Homo sapiens; identical to SEQ ID NO: 208422
  chr2:208692452-208692520
  hypo

SEQ ID NO: 429837 - DNA, 95 bp, Homo sapiens; identical to SEQ ID NO: 251381
  chr2:208865897-208865992
  hypo

SEQ ID NO: 429838 - DNA, 110 bp, Homo sapiens; identical to SEQ ID NO: 251382
  chr2:208993012-208993122
  hypo

SEQ ID NO: 429839 - DNA, 150 bp, Homo sapiens; identical to SEQ ID NO: 208423
  chr2:208994585-208994735
  hypo

SEQ ID NO: 429840 - DNA, 78 bp, Homo sapiens; identical to SEQ ID NO: 198673
  chr2:209108240-209108318
  hypo

SEQ ID NO: 429841 - DNA, 261 bp, Homo sapiens; identical to SEQ ID NO: 198674
  chr2:209113128-209113389
  hypo

SEQ ID NO: 429842 - DNA, 211 bp, Homo sapiens; identical to SEQ ID NO: 198675
  chr2:209118761-209118972
  hypo

SEQ ID NO: 429843 - DNA, 300 bp, Homo sapiens; identical to SEQ ID NO: 251387
  chr2:210673260-210673560
  hypo

SEQ ID NO: 429844 - DNA, 110 bp, Homo sapiens; identical to SEQ ID NO: 251388
  chr2:211036650-211036760
  hypo

SEQ ID NO: 429845 - DNA, 41 bp, Homo sapiens; identical to SEQ ID NO: 208430
  chr2:211055940-211055981
  hypo

SEQ ID NO: 429846 - DNA, 44 bp, Homo sapiens; identical to SEQ ID NO: 251390
  chr2:214000555-214000599
  hypo

SEQ ID NO: 429847 - DNA, 34 bp, Homo sapiens; identical to SEQ ID NO: 251391
  chr2:214458777-214458811
  hypo

SEQ ID NO: 429848 - DNA, 44 bp, Homo sapiens; identical to SEQ ID NO: 251392
  chr2:215581840-215581884
  hypo

SEQ ID NO: 429849 - DNA, 58 bp, Homo sapiens; identical to SEQ ID NO: 251394
  chr2:216195106-216195164
  hypo

SEQ ID NO: 429850 - DNA, 37 bp, Homo sapiens; identical to SEQ ID NO: 208431
  chr2:216196377-216196414
  hypo

SEQ ID NO: 429851 - DNA, 82 bp, Homo sapiens; identical to SEQ ID NO: 251397
  chr2:216824991-216825073
  hypo

SEQ ID NO: 429852 - DNA, 45 bp, Homo sapiens; identical to SEQ ID NO: 208432
  chr2:216852232-216852277
  hypo

SEQ ID NO: 429853 - DNA, 183 bp, Homo sapiens; identical to SEQ ID NO: 208433
  chr2:216885426-216885609
  hypo

SEQ ID NO: 429854 - DNA, 41 bp, Homo sapiens; identical to SEQ ID NO: 198684
  chr2:217008385-217008426
  hypo

SEQ ID NO: 429855 - DNA, 310 bp, Homo sapiens; identical to SEQ ID NO: 280618
  chr2:217236253-217236563
  hypo

SEQ ID NO: 429856 - DNA, 56 bp, Homo sapiens; identical to SEQ ID NO: 208435
  chr2:217472021-217472077
  hypo

SEQ ID NO: 429857 - DNA, 116 bp, Homo sapiens; identical to SEQ ID NO: 251401
  chr2:217475514-217475630
  hypo

SEQ ID NO: 429858 - DNA, 75 bp, Homo sapiens; identical to SEQ ID NO: 251406
  chr2:217750176-217750251
  hypo

SEQ ID NO: 429859 - DNA, 405 bp, Homo sapiens; identical to SEQ ID NO: 251407
  chr2:217751663-217752068
  hypo

SEQ ID NO: 429860 - DNA, 274 bp, Homo sapiens; identical to SEQ ID NO: 251408
  chr2:217931328-217931602
  hypo

SEQ ID NO: 429861 - DNA, 193 bp, Homo sapiens; identical to SEQ ID NO: 251409
  chr2:218664472-218664665
  hypo

SEQ ID NO: 429862 - DNA, 61 bp, Homo sapiens; identical to SEQ ID NO: 300578
  chr2:218665147-218665208
  hypo

SEQ ID NO: 429863 - DNA, 103 bp, Homo sapiens; identical to SEQ ID NO: 300579
  chr2:218665238-218665341
  hypo

SEQ ID NO: 429864 - DNA, 46 bp, Homo sapiens; identical to SEQ ID NO: 208440
  chr2:218676420-218676466
  hypo

SEQ ID NO: 429865 - DNA, 46 bp, Homo sapiens; identical to SEQ ID NO: 251420
  chr2:218749830-218749876
  hypo

SEQ ID NO: 429866 - DNA, 202 bp, Homo sapiens; identical to SEQ ID NO: 208448
  chr2:218757381-218757583
  hypo

SEQ ID NO: 429867 - DNA, 87 bp, Homo sapiens; identical to SEQ ID NO: 251422
  chr2:218762564-218762651
  hypo

SEQ ID NO: 429868 - DNA, 193 bp, Homo sapiens; identical to SEQ ID NO: 251424
  chr2:218819724-218819917
  hypo

SEQ ID NO: 429869 - DNA, 44 bp, Homo sapiens; identical to SEQ ID NO: 251425
  chr2:219080906-219080950
  hypo

SEQ ID NO: 429870 - DNA, 111 bp, Homo sapiens; identical to SEQ ID NO: 251426
  chr2:219129431-219129542
  hypo

SEQ ID NO: 429871 - DNA, 37 bp, Homo sapiens; identical to SEQ ID NO: 251428
  chr2:219180148-219180185
  hypo

SEQ ID NO: 429872 - DNA, 89 bp, Homo sapiens; identical to SEQ ID NO: 251429
  chr2:219204242-219204331
  hypo

SEQ ID NO: 429873 - DNA, 398 bp, Homo sapiens; identical to SEQ ID NO: 208450
  chr2:219209330-219209728
  hypo

SEQ ID NO: 429874 - DNA, 67 bp, Homo sapiens; identical to SEQ ID NO: 251431
  chr2:219210001-219210068
  hypo

SEQ ID NO: 429875 - DNA, 57 bp, Homo sapiens; identical to SEQ ID NO: 403185
  chr2:219256291-219256348
  hypo

SEQ ID NO: 429876 - DNA, 241 bp, Homo sapiens; identical to SEQ ID NO: 221992
  chr2:219262922-219263163
  hypo

SEQ ID NO: 429877 - DNA, 989 bp, Homo sapiens; identical to SEQ ID NO: 280637
  chr2:219263453-219264442
  hypo

SEQ ID NO: 429878 - DNA, 44 bp, Homo sapiens; identical to SEQ ID NO: 208455
  chr2:219267986-219268030
  hypo

SEQ ID NO: 429879 - DNA, 170 bp, Homo sapiens; identical to SEQ ID NO: 251435
  chr2:219295536-219295706
  hypo

SEQ ID NO: 429880 - DNA, 31 bp, Homo sapiens; identical to SEQ ID NO: 208457
  chr2:219577395-219577426
  hypo

SEQ ID NO: 429881 - DNA, 86 bp, Homo sapiens; identical to SEQ ID NO: 251439
  chr2:219599483-219599569
  hypo

SEQ ID NO: 429882 - DNA, 37 bp, Homo sapiens; identical to SEQ ID NO: 251440
  chr2:219609749-219609786
  hypo

SEQ ID NO: 429883 - DNA, 48 bp, Homo sapiens; identical to SEQ ID NO: 251441
  chr2:219694762-219694810
  hypo

SEQ ID NO: 429884 - DNA, 42 bp, Homo sapiens; identical to SEQ ID NO: 280654
  chr2:219825939-219825981
  hypo

SEQ ID NO: 429885 - DNA, 177 bp, Homo sapiens; identical to SEQ ID NO: 208461
  chr2:219892664-219892841
  hypo

SEQ ID NO: 429886 - DNA, 33 bp, Homo sapiens; identical to SEQ ID NO: 251444
  chr2:219919242-219919275
  hypo

SEQ ID NO: 429887 - DNA, 92 bp, Homo sapiens; identical to SEQ ID NO: 251445
  chr2:219994459-219994551
  hypo

SEQ ID NO: 429888 - DNA, 41 bp, Homo sapiens; identical to SEQ ID NO: 208462
  chr2:220049820-220049861
  hypo

SEQ ID NO: 429889 - DNA, 210 bp, Homo sapiens; identical to SEQ ID NO: 251448
  chr2:220066674-220066884
  hypo

SEQ ID NO: 429890 - DNA, 127 bp, Homo sapiens; identical to SEQ ID NO: 251450
  chr2:220092640-220092767
  hypo

SEQ ID NO: 429891 - DNA, 130 bp, Homo sapiens; identical to SEQ ID NO: 251452
  chr2:220161581-220161711
  hypo

SEQ ID NO: 429892 - DNA, 99 bp, Homo sapiens; identical to SEQ ID NO: 251453
  chr2:220161741-220161840
  hypo

SEQ ID NO: 429893 - DNA, 205 bp, Homo sapiens; identical to SEQ ID NO: 300631
  chr2:220309514-220309719
  hypo

SEQ ID NO: 429894 - DNA, 129 bp, Homo sapiens; identical to SEQ ID NO: 300632
  chr2:220309749-220309878
  hypo

SEQ ID NO: 429895 - DNA, 39 bp, Homo sapiens; identical to SEQ ID NO: 251456
  chr2:220337590-220337629
  hypo

SEQ ID NO: 429896 - DNA, 83 bp, Homo sapiens; identical to SEQ ID NO: 208465
  chr2:220371685-220371768
  hypo

SEQ ID NO: 429897 - DNA, 199 bp, Homo sapiens; identical to SEQ ID NO: 198718
  chr2:220407985-220408184
  hypo

SEQ ID NO: 429898 - DNA, 56 bp, Homo sapiens; identical to SEQ ID NO: 198719
  chr2:220408723-220408779
  hypo

SEQ ID NO: 429899 - DNA, 234 bp, Homo sapiens; identical to SEQ ID NO: 251458
  chr2:220419207-220419441
  hypo

SEQ ID NO: 429900 - DNA, 79 bp, Homo sapiens; identical to SEQ ID NO: 251459
  chr2:220420853-220420932
  hypo

SEQ ID NO: 429901 - DNA, 86 bp, Homo sapiens; identical to SEQ ID NO: 208469
  chr2:220421317-220421403
  hypo

SEQ ID NO: 429902 - DNA, 117 bp, Homo sapiens; identical to SEQ ID NO: 208470
  chr2:220422087-220422204
  hypo

SEQ ID NO: 429903 - DNA, 176 bp, Homo sapiens; identical to SEQ ID NO: 251462
  chr2:220424030-220424206
  hypo

SEQ ID NO: 429904 - DNA, 57 bp, Homo sapiens; identical to SEQ ID NO: 208472
  chr2:220431758-220431815
  hypo

SEQ ID NO: 429905 - DNA, 337 bp, Homo sapiens; identical to SEQ ID NO: 208473
  chr2:220432724-220433061
  hypo

SEQ ID NO: 429906 - DNA, 367 bp, Homo sapiens; identical to SEQ ID NO: 251467
  chr2:220434651-220435018
  hypo

SEQ ID NO: 429907 - DNA, 237 bp, Homo sapiens; identical to SEQ ID NO: 280691
  chr2:220492470-220492707
  hypo

SEQ ID NO: 429908 - DNA, 148 bp, Homo sapiens; identical to SEQ ID NO: 208476
  chr2:220499163-220499311
  hypo

SEQ ID NO: 429909 - DNA, 119 bp, Homo sapiens; identical to SEQ ID NO: 251469
  chr2:220505456-220505575
  hypo

SEQ ID NO: 429910 - DNA, 34 bp, Homo sapiens; identical to SEQ ID NO: 251470
  chr2:220508877-220508911
  hypo

SEQ ID NO: 429911 - DNA, 86 bp, Homo sapiens; identical to SEQ ID NO: 251471
  chr2:220553963-220554049
  hypo

SEQ ID NO: 429912 - DNA, 230 bp, Homo sapiens; identical to SEQ ID NO: 251472
  chr2:222389989-222390219
  hypo

SEQ ID NO: 429913 - DNA, 379 bp, Homo sapiens; identical to SEQ ID NO: 416560
  chr2:223184405-223184784
  hypo

SEQ ID NO: 429914 - DNA, 143 bp, Homo sapiens; identical to SEQ ID NO: 208479
  chr2:223562591-223562734
  hypo

SEQ ID NO: 429915 - DNA, 81 bp, Homo sapiens; identical to SEQ ID NO: 251474
  chr2:223652842-223652923
  hypo

SEQ ID NO: 429916 - DNA, 32 bp, Homo sapiens; identical to SEQ ID NO: 251475
  chr2:223743763-223743795
  hypo

SEQ ID NO: 429917 - DNA, 120 bp, Homo sapiens; identical to SEQ ID NO: 251477
  chr2:223764176-223764296
  hypo

SEQ ID NO: 429918 - DNA, 96 bp, Homo sapiens; identical to SEQ ID NO: 251478
  chr2:223772743-223772839
  hypo

SEQ ID NO: 429919 - DNA, 200 bp, Homo sapiens; identical to SEQ ID NO: 208480
  chr2:224640636-224640836
  hypo

SEQ ID NO: 429920 - DNA, 42 bp, Homo sapiens; identical to SEQ ID NO: 251480
  chr2:224759073-224759115
  hypo

SEQ ID NO: 429921 - DNA, 88 bp, Homo sapiens; identical to SEQ ID NO: 251481
  chr2:224856517-224856605
  hypo

SEQ ID NO: 429922 - DNA, 404 bp, Homo sapiens; identical to SEQ ID NO: 280719
  chr2:224904237-224904641
  hypo

SEQ ID NO: 429923 - DNA, 42 bp, Homo sapiens; identical to SEQ ID NO: 251482
  chr2:225229321-225229363
  hypo

SEQ ID NO: 429924 - DNA, 39 bp, Homo sapiens; identical to SEQ ID NO: 208483
  chr2:225390998-225391037
  hypo

SEQ ID NO: 429925 - DNA, 35 bp, Homo sapiens; identical to SEQ ID NO: 251484
  chr2:225463886-225463921
  hypo

SEQ ID NO: 429926 - DNA, 32 bp, Homo sapiens; identical to SEQ ID NO: 251485
  chr2:225482441-225482473
  hypo

SEQ ID NO: 429927 - DNA, 48 bp, Homo sapiens; identical to SEQ ID NO: 208484
  chr2:225692101-225692149
  hypo

SEQ ID NO: 429928 - DNA, 149 bp, Homo sapiens; identical to SEQ ID NO: 251487
  chr2:227750577-227750726
  hypo

SEQ ID NO: 429929 - DNA, 154 bp, Homo sapiens; identical to SEQ ID NO: 251488
  chr2:227769068-227769222
  hypo

SEQ ID NO: 429930 - DNA, 40 bp, Homo sapiens; identical to SEQ ID NO: 251489
  chr2:227818767-227818807
  hypo

SEQ ID NO: 429931 - DNA, 90 bp, Homo sapiens; identical to SEQ ID NO: 208487
  chr2:228185366-228185456
  hypo

SEQ ID NO: 429932 - DNA, 75 bp, Homo sapiens; identical to SEQ ID NO: 208488
  chr2:228212000-228212075
  hypo

SEQ ID NO: 429933 - DNA, 87 bp, Homo sapiens; identical to SEQ ID NO: 251493
  chr2:228255400-228255487
  hypo

SEQ ID NO: 429934 - DNA, 103 bp, Homo sapiens; identical to SEQ ID NO: 251495
  chr2:228466845-228466948
  hypo

SEQ ID NO: 429935 - DNA, 246 bp, Homo sapiens; identical to SEQ ID NO: 251496
  chr2:228632576-228632822
  hypo

SEQ ID NO: 429936 - DNA, 37 bp, Homo sapiens; identical to SEQ ID NO: 208490
  chr2:228638407-228638444
  hypo

SEQ ID NO: 429937 - DNA, 41 bp, Homo sapiens; identical to SEQ ID NO: 300687
  chr2:228735639-228735680
  hypo

SEQ ID NO: 429938 - DNA, 60 bp, Homo sapiens; identical to SEQ ID NO: 300688
  chr2:228735736-228735796
  hypo

SEQ ID NO: 429939 - DNA, 94 bp, Homo sapiens; identical to SEQ ID NO: 251499
  chr2:228741009-228741103
  hypo

SEQ ID NO: 429940 - DNA, 120 bp, Homo sapiens; identical to SEQ ID NO: 208491
  chr2:230743170-230743290
  hypo

SEQ ID NO: 429941 - DNA, 45 bp, Homo sapiens; identical to SEQ ID NO: 251502
  chr2:230796254-230796299
  hypo

SEQ ID NO: 429942 - DNA, 250 bp, Homo sapiens; identical to SEQ ID NO: 251504
  chr2:231522219-231522469
  hypo

SEQ ID NO: 429943 - DNA, 268 bp, Homo sapiens; identical to SEQ ID NO: 251505
  chr2:231530668-231530936
  hypo

SEQ ID NO: 429944 - DNA, 34 bp, Homo sapiens; identical to SEQ ID NO: 251506
  chr2:231585404-231585438
  hypo

SEQ ID NO: 429945 - DNA, 237 bp, Homo sapiens; identical to SEQ ID NO: 198744
  chr2:231692871-231693108
  hypo

SEQ ID NO: 429946 - DNA, 141 bp, Homo sapiens; identical to SEQ ID NO: 251509
  chr2:231965554-231965695
  hypo

SEQ ID NO: 429947 - DNA, 38 bp, Homo sapiens; identical to SEQ ID NO: 251511
  chr2:231992333-231992371
  hypo

SEQ ID NO: 429948 - DNA, 42 bp, Homo sapiens; identical to SEQ ID NO: 251512
  chr2:232109613-232109655
  hypo

SEQ ID NO: 429949 - DNA, 140 bp, Homo sapiens; identical to SEQ ID NO: 208497
  chr2:232113118-232113258
  hypo

SEQ ID NO: 429950 - DNA, 42 bp, Homo sapiens; identical to SEQ ID NO: 251514
  chr2:232162354-232162396
  hypo

SEQ ID NO: 429951 - DNA, 99 bp, Homo sapiens; identical to SEQ ID NO: 251515
  chr2:232223174-232223273
  hypo

SEQ ID NO: 429952 - DNA, 125 bp, Homo sapiens; identical to SEQ ID NO: 208498
  chr2:232247495-232247620
  hypo

SEQ ID NO: 429953 - DNA, 154 bp, Homo sapiens; identical to SEQ ID NO: 251517
  chr2:232264149-232264303
  hypo

SEQ ID NO: 429954 - DNA, 78 bp, Homo sapiens; identical to SEQ ID NO: 208499
  chr2:232458617-232458695
  hypo

SEQ ID NO: 429955 - DNA, 80 bp, Homo sapiens; identical to SEQ ID NO: 251520
  chr2:232472540-232472620
  hypo

SEQ ID NO: 429956 - DNA, 92 bp, Homo sapiens; identical to SEQ ID NO: 300716
  chr2:232485559-232485651
  hypo

SEQ ID NO: 429957 - DNA, 551 bp, Homo sapiens; identical to SEQ ID NO: 222027
  chr2:232545577-232546128
  hypo

SEQ ID NO: 429958 - DNA, 182 bp, Homo sapiens; identical to SEQ ID NO: 251522
  chr2:232557590-232557772
  hypo

SEQ ID NO: 429959 - DNA, 245 bp, Homo sapiens; identical to SEQ ID NO: 251523
  chr2:232760319-232760564
  hypo

SEQ ID NO: 429960 - DNA, 120 bp, Homo sapiens; identical to SEQ ID NO: 251525
  chr2:233159520-233159640
  hypo

SEQ ID NO: 429961 - DNA, 94 bp, Homo sapiens; identical to SEQ ID NO: 251526
  chr2:233183056-233183150
  hypo

SEQ ID NO: 429962 - DNA, 78 bp, Homo sapiens; identical to SEQ ID NO: 222030
  chr2:233251508-233251586
  hypo

SEQ ID NO: 429963 - DNA, 40 bp, Homo sapiens; identical to SEQ ID NO: 251529
  chr2:233258360-233258400
  hypo

SEQ ID NO: 429964 - DNA, 82 bp, Homo sapiens; identical to SEQ ID NO: 222033
  chr2:233284387-233284469
  hypo

SEQ ID NO: 429965 - DNA, 365 bp, Homo sapiens; identical to SEQ ID NO: 280759
  chr2:233284687-233285052
  hypo

SEQ ID NO: 429966 - DNA, 238 bp, Homo sapiens; identical to SEQ ID NO: 280760
  chr2:233285131-233285369
  hypo

SEQ ID NO: 429967 - DNA, 235 bp, Homo sapiens; identical to SEQ ID NO: 280762
  chr2:233286008-233286243
  hypo

SEQ ID NO: 429968 - DNA, 45 bp, Homo sapiens; identical to SEQ ID NO: 208506
  chr2:233355393-233355438
  hypo

SEQ ID NO: 429969 - DNA, 42 bp, Homo sapiens; identical to SEQ ID NO: 251531
  chr2:233357813-233357855
  hypo

SEQ ID NO: 429970 - DNA, 37 bp, Homo sapiens; identical to SEQ ID NO: 251532
  chr2:233358340-233358377
  hypo

SEQ ID NO: 429971 - DNA, 108 bp, Homo sapiens; identical to SEQ ID NO: 251533
  chr2:233389942-233390050
  hypo

SEQ ID NO: 429972 - DNA, 143 bp, Homo sapiens; identical to SEQ ID NO: 251534
  chr2:233527389-233527532
  hypo

SEQ ID NO: 429973 - DNA, 149 bp, Homo sapiens; identical to SEQ ID NO: 251535
  chr2:233540161-233540310
  hypo

SEQ ID NO: 429974 - DNA, 48 bp, Homo sapiens; identical to SEQ ID NO: 208508
  chr2:233714270-233714318
  hypo

SEQ ID NO: 429975 - DNA, 116 bp, Homo sapiens; identical to SEQ ID NO: 251537
  chr2:233750024-233750140
  hypo

SEQ ID NO: 429976 - DNA, 63 bp, Homo sapiens; identical to SEQ ID NO: 300745
  chr2:233750442-233750505
  hypo

SEQ ID NO: 429977 - DNA, 120 bp, Homo sapiens; identical to SEQ ID NO: 300746
  chr2:233750555-233750675
  hypo

SEQ ID NO: 429978 - DNA, 165 bp, Homo sapiens; identical to SEQ ID NO: 251539
  chr2:233753188-233753353
  hypo

SEQ ID NO: 429979 - DNA, 187 bp, Homo sapiens; identical to SEQ ID NO: 251540
  chr2:233753918-233754105
  hypo

SEQ ID NO: 429980 - DNA, 192 bp, Homo sapiens; identical to SEQ ID NO: 208509
  chr2:233764817-233765009
  hypo

SEQ ID NO: 429981 - DNA, 173 bp, Homo sapiens; identical to SEQ ID NO: 251542
  chr2:233767045-233767218
  hypo

SEQ ID NO: 429982 - DNA, 171 bp, Homo sapiens; identical to SEQ ID NO: 251543
  chr2:233845597-233845768
  hypo

SEQ ID NO: 429983 - DNA, 143 bp, Homo sapiens; identical to SEQ ID NO: 208510
  chr2:233945670-233945813
  hypo

SEQ ID NO: 429984 - DNA, 174 bp, Homo sapiens; identical to SEQ ID NO: 251546
  chr2:234055893-234056067
  hypo

SEQ ID NO: 429985 - DNA, 192 bp, Homo sapiens; identical to SEQ ID NO: 208511
  chr2:234093875-234094067
  hypo

SEQ ID NO: 429986 - DNA, 94 bp, Homo sapiens; identical to SEQ ID NO: 251549
  chr2:234121798-234121892
  hypo

SEQ ID NO: 429987 - DNA, 33 bp, Homo sapiens; identical to SEQ ID NO: 251550
  chr2:234122192-234122225
  hypo

SEQ ID NO: 429988 - DNA, 43 bp, Homo sapiens; identical to SEQ ID NO: 208512
  chr2:234206550-234206593
  hypo

SEQ ID NO: 429989 - DNA, 49 bp, Homo sapiens; identical to SEQ ID NO: 390704
  chr2:234206623-234206672
  hypo

SEQ ID NO: 429990 - DNA, 91 bp, Homo sapiens; identical to SEQ ID NO: 208514
  chr2:234355709-234355800
  hypo

SEQ ID NO: 429991 - DNA, 37 bp, Homo sapiens; identical to SEQ ID NO: 300760
  chr2:234370112-234370149
  hypo

SEQ ID NO: 429992 - DNA, 304 bp, Homo sapiens; identical to SEQ ID NO: 251556
  chr2:234389316-234389620
  hypo

SEQ ID NO: 429993 - DNA, 291 bp, Homo sapiens; identical to SEQ ID NO: 251557
  chr2:234394404-234394695
  hypo

SEQ ID NO: 429994 - DNA, 103 bp, Homo sapiens; identical to SEQ ID NO: 251558
  chr2:234396520-234396623
  hypo

SEQ ID NO: 429995 - DNA, 283 bp, Homo sapiens; identical to SEQ ID NO: 251559
  chr2:234399624-234399907
  hypo

SEQ ID NO: 429996 - DNA, 154 bp, Homo sapiens; identical to SEQ ID NO: 251560
  chr2:234545055-234545209
  hypo

SEQ ID NO: 429997 - DNA, 46 bp, Homo sapiens; identical to SEQ ID NO: 251561
  chr2:234545415-234545461
  hypo

SEQ ID NO: 429998 - DNA, 58 bp, Homo sapiens; identical to SEQ ID NO: 251565
  chr2:235005079-235005137
  hypo

SEQ ID NO: 429999 - DNA, 62 bp, Homo sapiens; identical to SEQ ID NO: 251566
  chr2:235442549-235442611
  hypo

SEQ ID NO: 430000 - DNA, 89 bp, Homo sapiens; identical to SEQ ID NO: 208517
  chr2:235460414-235460503
  hypo

SEQ ID NO: 430001 - DNA, 102 bp, Homo sapiens; identical to SEQ ID NO: 251568
  chr2:235700054-235700156
  hypo

SEQ ID NO: 430002 - DNA, 73 bp, Homo sapiens; identical to SEQ ID NO: 251569
  chr2:235809204-235809277
  hypo

SEQ ID NO: 430003 - DNA, 37 bp, Homo sapiens; identical to SEQ ID NO: 208518
  chr2:235815939-235815976
  hypo

SEQ ID NO: 430004 - DNA, 95 bp, Homo sapiens; identical to SEQ ID NO: 251571
  chr2:235868188-235868283
  hypo

SEQ ID NO: 430005 - DNA, 353 bp, Homo sapiens; identical to SEQ ID NO: 251572
  chr2:235894218-235894571
  hypo

SEQ ID NO: 430006 - DNA, 97 bp, Homo sapiens; identical to SEQ ID NO: 251573
  chr2:235897309-235897406
  hypo

SEQ ID NO: 430007 - DNA, 113 bp, Homo sapiens; identical to SEQ ID NO: 251574
  chr2:235909181-235909294
  hypo

SEQ ID NO: 430008 - DNA, 164 bp, Homo sapiens; identical to SEQ ID NO: 208521
  chr2:235922810-235922974
  hypo

SEQ ID NO: 430009 - DNA, 63 bp, Homo sapiens; identical to SEQ ID NO: 208522
  chr2:235931227-235931290
  hypo

SEQ ID NO: 430010 - DNA, 312 bp, Homo sapiens; identical to SEQ ID NO: 251577
  chr2:235941053-235941365
  hypo

SEQ ID NO: 430011 - DNA, 93 bp, Homo sapiens; identical to SEQ ID NO: 251579
  chr2:235950684-235950777
  hypo

SEQ ID NO: 430012 - DNA, 227 bp, Homo sapiens; identical to SEQ ID NO: 251581
  chr2:236014701-236014928
  hypo

SEQ ID NO: 430013 - DNA, 186 bp, Homo sapiens; identical to SEQ ID NO: 251582
  chr2:236015360-236015546
  hypo

SEQ ID NO: 430014 - DNA, 199 bp, Homo sapiens; identical to SEQ ID NO: 208524
  chr2:236024875-236025074
  hypo

SEQ ID NO: 430015 - DNA, 137 bp, Homo sapiens; identical to SEQ ID NO: 208526
  chr2:236415971-236416108
  hypo

SEQ ID NO: 430016 - DNA, 115 bp, Homo sapiens; identical to SEQ ID NO: 300795
  chr2:236417496-236417611
  hypo

SEQ ID NO: 430017 - DNA, 225 bp, Homo sapiens; identical to SEQ ID NO: 251586
  chr2:236443810-236444035
  hypo

SEQ ID NO: 430018 - DNA, 106 bp, Homo sapiens; identical to SEQ ID NO: 208527
  chr2:236456629-236456735
  hypo

SEQ ID NO: 430019 - DNA, 70 bp, Homo sapiens; identical to SEQ ID NO: 251590
  chr2:236512589-236512659
  hypo

SEQ ID NO: 430020 - DNA, 322 bp, Homo sapiens; identical to SEQ ID NO: 208529
  chr2:236541634-236541956
  hypo

SEQ ID NO: 430021 - DNA, 94 bp, Homo sapiens; identical to SEQ ID NO: 208530
  chr2:236553452-236553546
  hypo

SEQ ID NO: 430022 - DNA, 194 bp, Homo sapiens; identical to SEQ ID NO: 251593
  chr2:236571425-236571619
  hypo

SEQ ID NO: 430023 - DNA, 75 bp, Homo sapiens; identical to SEQ ID NO: 208531
  chr2:236602265-236602340
  hypo

SEQ ID NO: 430024 - DNA, 146 bp, Homo sapiens; identical to SEQ ID NO: 208533
  chr2:236613260-236613406
  hypo

SEQ ID NO: 430025 - DNA, 109 bp, Homo sapiens; identical to SEQ ID NO: 208534
  chr2:236616175-236616284
  hypo

SEQ ID NO: 430026 - DNA, 174 bp, Homo sapiens; identical to SEQ ID NO: 208535
  chr2:236617715-236617889
  hypo

SEQ ID NO: 430027 - DNA, 192 bp, Homo sapiens; identical to SEQ ID NO: 208536
  chr2:236618370-236618562
  hypo

SEQ ID NO: 430028 - DNA, 187 bp, Homo sapiens; identical to SEQ ID NO: 208537
  chr2:236619770-236619957
  hypo

SEQ ID NO: 430029 - DNA, 188 bp, Homo sapiens; identical to SEQ ID NO: 208538
  chr2:236624442-236624630
  hypo

SEQ ID NO: 430030 - DNA, 192 bp, Homo sapiens; identical to SEQ ID NO: 208539
  chr2:236637398-236637590
  hypo

SEQ ID NO: 430031 - DNA, 192 bp, Homo sapiens; identical to SEQ ID NO: 208540
  chr2:236647745-236647937
  hypo

SEQ ID NO: 430032 - DNA, 125 bp, Homo sapiens; identical to SEQ ID NO: 251605
  chr2:236656836-236656961
  hypo

SEQ ID NO: 430033 - DNA, 274 bp, Homo sapiens; identical to SEQ ID NO: 208542
  chr2:236660557-236660831
  hypo

SEQ ID NO: 430034 - DNA, 421 bp, Homo sapiens; identical to SEQ ID NO: 251607
  chr2:236663445-236663866
  hypo

SEQ ID NO: 430035 - DNA, 80 bp, Homo sapiens; identical to SEQ ID NO: 208543
  chr2:236669006-236669086
  hypo

SEQ ID NO: 430036 - DNA, 530 bp, Homo sapiens; identical to SEQ ID NO: 251610
  chr2:236673974-236674504
  hypo

SEQ ID NO: 430037 - DNA, 62 bp, Homo sapiens; identical to SEQ ID NO: 251613
  chr2:236708151-236708213
  hypo

SEQ ID NO: 430038 - DNA, 96 bp, Homo sapiens; identical to SEQ ID NO: 251614
  chr2:236715042-236715138
  hypo

SEQ ID NO: 430039 - DNA, 328 bp, Homo sapiens; identical to SEQ ID NO: 251615
  chr2:236716147-236716475
  hypo

SEQ ID NO: 430040 - DNA, 59 bp, Homo sapiens; identical to SEQ ID NO: 208549
  chr2:236727033-236727092
  hypo

SEQ ID NO: 430041 - DNA, 98 bp, Homo sapiens; identical to SEQ ID NO: 208550
  chr2:236733470-236733568
  hypo

SEQ ID NO: 430042 - DNA, 188 bp, Homo sapiens; identical to SEQ ID NO: 208551
  chr2:236738719-236738907
  hypo

SEQ ID NO: 430043 - DNA, 192 bp, Homo sapiens; identical to SEQ ID NO: 208552
  chr2:236739767-236739959
  hypo

SEQ ID NO: 430044 - DNA, 188 bp, Homo sapiens; identical to SEQ ID NO: 208553
  chr2:236741689-236741877
  hypo

SEQ ID NO: 430045 - DNA, 229 bp, Homo sapiens; identical to SEQ ID NO: 208554
  chr2:236750708-236750937
  hypo

SEQ ID NO: 430046 - DNA, 37 bp, Homo sapiens; identical to SEQ ID NO: 208555
  chr2:236751637-236751674
  hypo

SEQ ID NO: 430047 - DNA, 194 bp, Homo sapiens; identical to SEQ ID NO: 251624
  chr2:236751879-236752073
  hypo

SEQ ID NO: 430048 - DNA, 228 bp, Homo sapiens; identical to SEQ ID NO: 251625
  chr2:236759876-236760104
  hypo

SEQ ID NO: 430049 - DNA, 157 bp, Homo sapiens; identical to SEQ ID NO: 208557
  chr2:236760926-236761083
  hypo

SEQ ID NO: 430050 - DNA, 268 bp, Homo sapiens; identical to SEQ ID NO: 251627
  chr2:236765492-236765760
  hypo

SEQ ID NO: 430051 - DNA, 127 bp, Homo sapiens; identical to SEQ ID NO: 251628
  chr2:236777009-236777136
  hypo

SEQ ID NO: 430052 - DNA, 166 bp, Homo sapiens; identical to SEQ ID NO: 208559
  chr2:236796532-236796698
  hypo

SEQ ID NO: 430053 - DNA, 37 bp, Homo sapiens; identical to SEQ ID NO: 208562
  chr2:236842447-236842484
  hypo

SEQ ID NO: 430054 - DNA, 123 bp, Homo sapiens; identical to SEQ ID NO: 208563
  chr2:236847371-236847494
  hypo

SEQ ID NO: 430055 - DNA, 35 bp, Homo sapiens; identical to SEQ ID NO: 208564
  chr2:236853751-236853786
  hypo

SEQ ID NO: 430056 - DNA, 35 bp, Homo sapiens; identical to SEQ ID NO: 208565
  chr2:236854026-236854061
  hypo

SEQ ID NO: 430057 - DNA, 208 bp, Homo sapiens; identical to SEQ ID NO: 208566
  chr2:236857148-236857356
  hypo

SEQ ID NO: 430058 - DNA, 40 bp, Homo sapiens; identical to SEQ ID NO: 208567
  chr2:236863816-236863856
  hypo

SEQ ID NO: 430059 - DNA, 223 bp, Homo sapiens; identical to SEQ ID NO: 251641
  chr2:236868108-236868331
  hypo

SEQ ID NO: 430060 - DNA, 148 bp, Homo sapiens; identical to SEQ ID NO: 208568
  chr2:236870133-236870281
  hypo

SEQ ID NO: 430061 - DNA, 147 bp, Homo sapiens; identical to SEQ ID NO: 251643
  chr2:236870521-236870668
  hypo

SEQ ID NO: 430062 - DNA, 197 bp, Homo sapiens; identical to SEQ ID NO: 208569
  chr2:236872390-236872587
  hypo

SEQ ID NO: 430063 - DNA, 47 bp, Homo sapiens; identical to SEQ ID NO: 208570
  chr2:236877179-236877226
  hypo

SEQ ID NO: 430064 - DNA, 110 bp, Homo sapiens; identical to SEQ ID NO: 300856
  chr2:236877399-236877509
  hypo

SEQ ID NO: 430065 - DNA, 109 bp, Homo sapiens; identical to SEQ ID NO: 208572
  chr2:236881386-236881495
  hypo

SEQ ID NO: 430066 - DNA, 107 bp, Homo sapiens; identical to SEQ ID NO: 251648
  chr2:236897390-236897497
  hypo

SEQ ID NO: 430067 - DNA, 156 bp, Homo sapiens; identical to SEQ ID NO: 208573
  chr2:236900737-236900893
  hypo

SEQ ID NO: 430068 - DNA, 216 bp, Homo sapiens; identical to SEQ ID NO: 251650
  chr2:236901340-236901556
  hypo

SEQ ID NO: 430069 - DNA, 171 bp, Homo sapiens; identical to SEQ ID NO: 208575
  chr2:236909411-236909582
  hypo

SEQ ID NO: 430070 - DNA, 155 bp, Homo sapiens; identical to SEQ ID NO: 251652
  chr2:236945110-236945265
  hypo

SEQ ID NO: 430071 - DNA, 176 bp, Homo sapiens; identical to SEQ ID NO: 251654
  chr2:236950837-236951013
  hypo

SEQ ID NO: 430072 - DNA, 211 bp, Homo sapiens; identical to SEQ ID NO: 251655
  chr2:236954182-236954393
  hypo

SEQ ID NO: 430073 - DNA, 45 bp, Homo sapiens; identical to SEQ ID NO: 251656
  chr2:236970389-236970434
  hypo

SEQ ID NO: 430074 - DNA, 165 bp, Homo sapiens; identical to SEQ ID NO: 208577
  chr2:236970494-236970659
  hypo

SEQ ID NO: 430075 - DNA, 56 bp, Homo sapiens; identical to SEQ ID NO: 251658
  chr2:236976366-236976422
  hypo

SEQ ID NO: 430076 - DNA, 188 bp, Homo sapiens; identical to SEQ ID NO: 251659
  chr2:236994423-236994611
  hypo

SEQ ID NO: 430077 - DNA, 154 bp, Homo sapiens; identical to SEQ ID NO: 208578
  chr2:236996175-236996329
  hypo

SEQ ID NO: 430078 - DNA, 143 bp, Homo sapiens; identical to SEQ ID NO: 251661
  chr2:236997672-236997815
  hypo

SEQ ID NO: 430079 - DNA, 93 bp, Homo sapiens; identical to SEQ ID NO: 251662
  chr2:236999643-236999736
  hypo

SEQ ID NO: 430080 - DNA, 39 bp, Homo sapiens; identical to SEQ ID NO: 208579
  chr2:237007808-237007847
  hypo

SEQ ID NO: 430081 - DNA, 133 bp, Homo sapiens; identical to SEQ ID NO: 208580
  chr2:237015289-237015422
  hypo

SEQ ID NO: 430082 - DNA, 161 bp, Homo sapiens; identical to SEQ ID NO: 208582
  chr2:237020448-237020609
  hypo

SEQ ID NO: 430083 - DNA, 275 bp, Homo sapiens; identical to SEQ ID NO: 251667
  chr2:237022763-237023038
  hypo

SEQ ID NO: 430084 - DNA, 164 bp, Homo sapiens; identical to SEQ ID NO: 208584
  chr2:237032441-237032605
  hypo

SEQ ID NO: 430085 - DNA, 54 bp, Homo sapiens; identical to SEQ ID NO: 251670
  chr2:237034241-237034295
  hypo

SEQ ID NO: 430086 - DNA, 161 bp, Homo sapiens; identical to SEQ ID NO: 208586
  chr2:237037749-237037910
  hypo

SEQ ID NO: 430087 - DNA, 371 bp, Homo sapiens; identical to SEQ ID NO: 198773
  chr2:237076187-237076558
  hypo

SEQ ID NO: 430088 - DNA, 176 bp, Homo sapiens; identical to SEQ ID NO: 280791
  chr2:237076815-237076991
  hypo

SEQ ID NO: 430089 - DNA, 238 bp, Homo sapiens; identical to SEQ ID NO: 280792
  chr2:237077608-237077846
  hypo

SEQ ID NO: 430090 - DNA, 421 bp, Homo sapiens; identical to SEQ ID NO: 222045
  chr2:237476438-237476859
  hypo

SEQ ID NO: 430091 - DNA, 373 bp, Homo sapiens; identical to SEQ ID NO: 251672
  chr2:237489568-237489941
  hypo

SEQ ID NO: 430092 - DNA, 463 bp, Homo sapiens; identical to SEQ ID NO: 251673
  chr2:237496907-237497370
  hypo

SEQ ID NO: 430093 - DNA, 101 bp, Homo sapiens; identical to SEQ ID NO: 300890
  chr2:237544239-237544340
  hypo

SEQ ID NO: 430094 - DNA, 209 bp, Homo sapiens; identical to SEQ ID NO: 251676
  chr2:237629784-237629993
  hypo

SEQ ID NO: 430095 - DNA, 54 bp, Homo sapiens; identical to SEQ ID NO: 251677
  chr2:237925352-237925406
  hypo

SEQ ID NO: 430096 - DNA, 56 bp, Homo sapiens; identical to SEQ ID NO: 208590
  chr2:237973044-237973100
  hypo

SEQ ID NO: 430097 - DNA, 159 bp, Homo sapiens; identical to SEQ ID NO: 251680
  chr2:238249170-238249329
  hypo

SEQ ID NO: 430098 - DNA, 186 bp, Homo sapiens; identical to SEQ ID NO: 251681
  chr2:238264427-238264613
  hypo

SEQ ID NO: 430099 - DNA, 535 bp, Homo sapiens; identical to SEQ ID NO: 208593
  chr2:238283029-238283564
  hypo

SEQ ID NO: 430100 - DNA, 36 bp, Homo sapiens; identical to SEQ ID NO: 251684
  chr2:238320937-238320973
  hypo

SEQ ID NO: 430101 - DNA, 354 bp, Homo sapiens; identical to SEQ ID NO: 251685
  chr2:238359242-238359596
  hypo

SEQ ID NO: 430102 - DNA, 151 bp, Homo sapiens; identical to SEQ ID NO: 198779
  chr2:238384223-238384374
  hypo

SEQ ID NO: 430103 - DNA, 41 bp, Homo sapiens; identical to SEQ ID NO: 251686
  chr2:238392737-238392778
  hypo

SEQ ID NO: 430104 - DNA, 144 bp, Homo sapiens; identical to SEQ ID NO: 251687
  chr2:238486156-238486300
  hypo

SEQ ID NO: 430105 - DNA, 205 bp, Homo sapiens; identical to SEQ ID NO: 251688
  chr2:238486659-238486864
  hypo

SEQ ID NO: 430106 - DNA, 82 bp, Homo sapiens; identical to SEQ ID NO: 208596
  chr2:238492723-238492805
  hypo

SEQ ID NO: 430107 - DNA, 31 bp, Homo sapiens; identical to SEQ ID NO: 198783
  chr2:238536853-238536884
  hypo

SEQ ID NO: 430108 - DNA, 171 bp, Homo sapiens; identical to SEQ ID NO: 251690
  chr2:238540447-238540618
  hypo

SEQ ID NO: 430109 - DNA, 176 bp, Homo sapiens; identical to SEQ ID NO: 222048
  chr2:238599864-238600040
  hypo

SEQ ID NO: 430110 - DNA, 62 bp, Homo sapiens; identical to SEQ ID NO: 251692
  chr2:238629646-238629708
  hypo

SEQ ID NO: 430111 - DNA, 131 bp, Homo sapiens; identical to SEQ ID NO: 251693
  chr2:238669911-238670042
  hypo

SEQ ID NO: 430112 - DNA, 332 bp, Homo sapiens; identical to SEQ ID NO: 251694
  chr2:238706995-238707327
  hypo

SEQ ID NO: 430113 - DNA, 40 bp, Homo sapiens; identical to SEQ ID NO: 208599
  chr2:238785779-238785819
  hypo

SEQ ID NO: 430114 - DNA, 176 bp, Homo sapiens; identical to SEQ ID NO: 208600
  chr2:238786045-238786221
  hypo

SEQ ID NO: 430115 - DNA, 33 bp, Homo sapiens; identical to SEQ ID NO: 208601
  chr2:238793664-238793697
  hypo

SEQ ID NO: 430116 - DNA, 185 bp, Homo sapiens; identical to SEQ ID NO: 251699
  chr2:238794726-238794911
  hypo

SEQ ID NO: 430117 - DNA, 32 bp, Homo sapiens; identical to SEQ ID NO: 208602
  chr2:238820428-238820460
  hypo

SEQ ID NO: 430118 - DNA, 354 bp, Homo sapiens; identical to SEQ ID NO: 251701
  chr2:238821616-238821970
  hypo

SEQ ID NO: 430119 - DNA, 157 bp, Homo sapiens; identical to SEQ ID NO: 208603
  chr2:238822319-238822476
  hypo

SEQ ID NO: 430120 - DNA, 210 bp, Homo sapiens; identical to SEQ ID NO: 198784
  chr2:238876150-238876360
  hypo

SEQ ID NO: 430121 - DNA, 39 bp, Homo sapiens; identical to SEQ ID NO: 208605
  chr2:239005248-239005287
  hypo

SEQ ID NO: 430122 - DNA, 278 bp, Homo sapiens; identical to SEQ ID NO: 251706
  chr2:239010179-239010457
  hypo

SEQ ID NO: 430123 - DNA, 71 bp, Homo sapiens; identical to SEQ ID NO: 208606
  chr2:239011437-239011508
  hypo

SEQ ID NO: 430124 - DNA, 73 bp, Homo sapiens; identical to SEQ ID NO: 251708
  chr2:239039048-239039121
  hypo

SEQ ID NO: 430125 - DNA, 169 bp, Homo sapiens; identical to SEQ ID NO: 208607
  chr2:239041690-239041859
  hypo

SEQ ID NO: 430126 - DNA, 789 bp, Homo sapiens; identical to SEQ ID NO: 208608
  chr2:239049320-239050109
  hypo

SEQ ID NO: 430127 - DNA, 265 bp, Homo sapiens; identical to SEQ ID NO: 208609
  chr2:239056521-239056786
  hypo

SEQ ID NO: 430128 - DNA, 512 bp, Homo sapiens; identical to SEQ ID NO: 208610
  chr2:239059358-239059870
  hypo

SEQ ID NO: 430129 - DNA, 174 bp, Homo sapiens; identical to SEQ ID NO: 208611
  chr2:239065004-239065178
  hypo

SEQ ID NO: 430130 - DNA, 139 bp, Homo sapiens; identical to SEQ ID NO: 251719
  chr2:239091203-239091342
  hypo

SEQ ID NO: 430131 - DNA, 316 bp, Homo sapiens; identical to SEQ ID NO: 251721
  chr2:239133161-239133477
  hypo

SEQ ID NO: 430132 - DNA, 1056 bp, Homo sapiens; identical to SEQ ID NO: 280814
  chr2:239148240-239149296
  hypo

SEQ ID NO: 430133 - DNA, 95 bp, Homo sapiens; identical to SEQ ID NO: 251723
  chr2:239167995-239168090
  hypo

SEQ ID NO: 430134 - DNA, 190 bp, Homo sapiens; identical to SEQ ID NO: 251724
  chr2:239186416-239186606
  hypo

SEQ ID NO: 430135 - DNA, 131 bp, Homo sapiens; identical to SEQ ID NO: 251726
  chr2:239189367-239189498
  hypo

SEQ ID NO: 430136 - DNA, 78 bp, Homo sapiens; identical to SEQ ID NO: 251727
  chr2:239192200-239192278
  hypo

SEQ ID NO: 430137 - DNA, 55 bp, Homo sapiens; identical to SEQ ID NO: 208618
  chr2:239211886-239211941
  hypo

SEQ ID NO: 430138 - DNA, 206 bp, Homo sapiens; identical to SEQ ID NO: 251729
  chr2:239212968-239213174
  hypo

SEQ ID NO: 430139 - DNA, 164 bp, Homo sapiens; identical to SEQ ID NO: 251730
  chr2:239224075-239224239
  hypo

SEQ ID NO: 430140 - DNA, 64 bp, Homo sapiens; identical to SEQ ID NO: 208619
  chr2:239265787-239265851
  hypo

SEQ ID NO: 430141 - DNA, 241 bp, Homo sapiens; identical to SEQ ID NO: 208620
  chr2:239306052-239306293
  hypo

SEQ ID NO: 430142 - DNA, 153 bp, Homo sapiens; identical to SEQ ID NO: 251734
  chr2:239321159-239321312
  hypo

SEQ ID NO: 430143 - DNA, 38 bp, Homo sapiens; identical to SEQ ID NO: 251735
  chr2:239344603-239344641
  hypo

SEQ ID NO: 430144 - DNA, 56 bp, Homo sapiens; identical to SEQ ID NO: 251736
  chr2:239467687-239467743
  hypo

SEQ ID NO: 430145 - DNA, 95 bp, Homo sapiens; identical to SEQ ID NO: 300958
  chr2:239482552-239482647
  hypo

SEQ ID NO: 430146 - DNA, 240 bp, Homo sapiens; identical to SEQ ID NO: 251738
  chr2:239494957-239495197
  hypo

SEQ ID NO: 430147 - DNA, 159 bp, Homo sapiens; identical to SEQ ID NO: 251739
  chr2:239684265-239684424
  hypo

SEQ ID NO: 430148 - DNA, 78 bp, Homo sapiens; identical to SEQ ID NO: 251742
  chr2:239925671-239925749
  hypo

SEQ ID NO: 430149 - DNA, 43 bp, Homo sapiens; identical to SEQ ID NO: 251743
  chr2:239947345-239947388
  hypo

SEQ ID NO: 430150 - DNA, 56 bp, Homo sapiens; identical to SEQ ID NO: 251746
  chr2:239958980-239959036
  hypo

SEQ ID NO: 430151 - DNA, 152 bp, Homo sapiens; identical to SEQ ID NO: 251748
  chr2:239971451-239971603
  hypo

SEQ ID NO: 430152 - DNA, 205 bp, Homo sapiens; identical to SEQ ID NO: 251750
  chr2:239986521-239986726
  hypo

SEQ ID NO: 430153 - DNA, 169 bp, Homo sapiens; identical to SEQ ID NO: 300972
  chr2:239997291-239997460
  hypo

SEQ ID NO: 430154 - DNA, 138 bp, Homo sapiens; identical to SEQ ID NO: 208626
  chr2:239999815-239999953
  hypo

SEQ ID NO: 430155 - DNA, 1132 bp, Homo sapiens; identical to SEQ ID NO: 300974
  chr2:240002664-240003796
  hypo

SEQ ID NO: 430156 - DNA, 258 bp, Homo sapiens; identical to SEQ ID NO: 300975
  chr2:240003826-240004084
  hypo

SEQ ID NO: 430157 - DNA, 169 bp, Homo sapiens; identical to SEQ ID NO: 251754
  chr2:240014779-240014948
  hypo

SEQ ID NO: 430158 - DNA, 179 bp, Homo sapiens; identical to SEQ ID NO: 208628
  chr2:240015872-240016051
  hypo

SEQ ID NO: 430159 - DNA, 388 bp, Homo sapiens; identical to SEQ ID NO: 251756
  chr2:240016397-240016785
  hypo

SEQ ID NO: 430160 - DNA, 55 bp, Homo sapiens; identical to SEQ ID NO: 251757
  chr2:240029183-240029238
  hypo

SEQ ID NO: 430161 - DNA, 198 bp, Homo sapiens; identical to SEQ ID NO: 251758
  chr2:240029726-240029924
  hypo

SEQ ID NO: 430162 - DNA, 127 bp, Homo sapiens; identical to SEQ ID NO: 251759
  chr2:240031620-240031747
  hypo

SEQ ID NO: 430163 - DNA, 156 bp, Homo sapiens; identical to SEQ ID NO: 251760
  chr2:240032302-240032458
  hypo

SEQ ID NO: 430164 - DNA, 552 bp, Homo sapiens; identical to SEQ ID NO: 251761
  chr2:240054228-240054780
  hypo

SEQ ID NO: 430165 - DNA, 40 bp, Homo sapiens; identical to SEQ ID NO: 208629
  chr2:240064716-240064756
  hypo

SEQ ID NO: 430166 - DNA, 361 bp, Homo sapiens; identical to SEQ ID NO: 251764
  chr2:240066060-240066421
  hypo

SEQ ID NO: 430167 - DNA, 64 bp, Homo sapiens; identical to SEQ ID NO: 208631
  chr2:240067065-240067129
  hypo

SEQ ID NO: 430168 - DNA, 52 bp, Homo sapiens; identical to SEQ ID NO: 208632
  chr2:240067159-240067211
  hypo

SEQ ID NO: 430169 - DNA, 215 bp, Homo sapiens; identical to SEQ ID NO: 251766
  chr2:240077356-240077571
  hypo

SEQ ID NO: 430170 - DNA, 44 bp, Homo sapiens; identical to SEQ ID NO: 300990
  chr2:240080565-240080609
  hypo

SEQ ID NO: 430171 - DNA, 152 bp, Homo sapiens; identical to SEQ ID NO: 251768
  chr2:240103122-240103274
  hypo

SEQ ID NO: 430172 - DNA, 274 bp, Homo sapiens; identical to SEQ ID NO: 300992
  chr2:240103304-240103578
  hypo

SEQ ID NO: 430173 - DNA, 171 bp, Homo sapiens; identical to SEQ ID NO: 251770
  chr2:240105072-240105243
  hypo

SEQ ID NO: 430174 - DNA, 173 bp, Homo sapiens; identical to SEQ ID NO: 251771
  chr2:240107031-240107204
  hypo

SEQ ID NO: 430175 - DNA, 183 bp, Homo sapiens; identical to SEQ ID NO: 251772
  chr2:240112235-240112418
  hypo

SEQ ID NO: 430176 - DNA, 458 bp, Homo sapiens; identical to SEQ ID NO: 208634
  chr2:240116630-240117088
  hypo

SEQ ID NO: 430177 - DNA, 188 bp, Homo sapiens; identical to SEQ ID NO: 208635
  chr2:240117493-240117681
  hypo

SEQ ID NO: 430178 - DNA, 36 bp, Homo sapiens; identical to SEQ ID NO: 251775
  chr2:240129719-240129755
  hypo

SEQ ID NO: 430179 - DNA, 41 bp, Homo sapiens; identical to SEQ ID NO: 208639
  chr2:240169831-240169872
  hypo

SEQ ID NO: 430180 - DNA, 192 bp, Homo sapiens; identical to SEQ ID NO: 208640
  chr2:240170922-240171114
  hypo

SEQ ID NO: 430181 - DNA, 131 bp, Homo sapiens; identical to SEQ ID NO: 208641
  chr2:240172542-240172673
  hypo

SEQ ID NO: 430182 - DNA, 511 bp, Homo sapiens; identical to SEQ ID NO: 208642
  chr2:240212280-240212791
  hypo

SEQ ID NO: 430183 - DNA, 312 bp, Homo sapiens; identical to SEQ ID NO: 251785
  chr2:240232940-240233252
  hypo

SEQ ID NO: 430184 - DNA, 46 bp, Homo sapiens; identical to SEQ ID NO: 208645
  chr2:240234573-240234619
  hypo

SEQ ID NO: 430185 - DNA, 112 bp, Homo sapiens; identical to SEQ ID NO: 251787
  chr2:240262930-240263042
  hypo

SEQ ID NO: 430186 - DNA, 114 bp, Homo sapiens; identical to SEQ ID NO: 251788
  chr2:240265816-240265930
  hypo

SEQ ID NO: 430187 - DNA, 796 bp, Homo sapiens
  chr2:240271027-240271823
  hypo
gtggctgtgctctgacacacctagaaatttcccgctcaagagagcaaactgaatcctttagtattaatgatttctcttcctcccaaaacccactaaaatgatgaaaagcaggattggaaagcacttccagcaatgcctgggagcggacggacaggtgcatcagctgacaagaaacacagaggaacttcccgaaactagagatctctggggatggagctgcttgggaaggcacacaagcgagtgggcctcgcccaggagggagggcacggttctgggcaagccccatcccccgcctgagacgtgggcagaggccgctgggccaccagccagtgtgtgcaggtggtggtatgcacgtgttgggcacaaggggtcctgcctcccaagggacctccgggcggaagggcagacacggcagggaaagatgacagcggacagggcagaggaggcagccagcagacttcaggccccaggcaaaccacctcagctgtaccccctgcacagatggagagcagagaatgggctgggccaaggggcagccctgccctcaccagtgcggcctgtcttcagcctccaacccactgagagagagaatggagaggtcgtgggtggcaataaggcgcacacaacccaactcacatgggcaggacaggcccgggcaggccggtgatcaaactgaaccgcagcggctgaaattcccacagaaaaggccaaacaaacccagcaccccgcggtttccagagctgagcctcaaagaacccggcctgaaaaggttagagacaagcggatggagaaatat

SEQ ID NO: 430188 - DNA, 245 bp, Homo sapiens; identical to SEQ ID NO: 251790
  chr2:240291771-240292016
  hypo

SEQ ID NO: 430189 - DNA, 240 bp, Homo sapiens; identical to SEQ ID NO: 38818
  chr2:240294231-240294471
  hypo

SEQ ID NO: 430190 - DNA, 246 bp, Homo sapiens; identical to SEQ ID NO: 251791
  chr2:240298221-240298467
  hypo

SEQ ID NO: 430191 - DNA, 43 bp, Homo sapiens; identical to SEQ ID NO: 208648
  chr2:240312832-240312875
  hypo

SEQ ID NO: 430192 - DNA, 251 bp, Homo sapiens; identical to SEQ ID NO: 251794
  chr2:240318370-240318621
  hypo

SEQ ID NO: 430193 - DNA, 38 bp, Homo sapiens; identical to SEQ ID NO: 251796
  chr2:240320282-240320320
  hypo

SEQ ID NO: 430194 - DNA, 42 bp, Homo sapiens; identical to SEQ ID NO: 251797
  chr2:240342330-240342372
  hypo

SEQ ID NO: 430195 - DNA, 120 bp, Homo sapiens; identical to SEQ ID NO: 208649
  chr2:240361083-240361203
  hypo

SEQ ID NO: 430196 - DNA, 142 bp, Homo sapiens; identical to SEQ ID NO: 198787
  chr2:240402418-240402560
  hypo

SEQ ID NO: 430197 - DNA, 48 bp, Homo sapiens; identical to SEQ ID NO: 251800
  chr2:240420316-240420364
  hypo

SEQ ID NO: 430198 - DNA, 128 bp, Homo sapiens; identical to SEQ ID NO: 251801
  chr2:240420394-240420522
  hypo

SEQ ID NO: 430199 - DNA, 80 bp, Homo sapiens; identical to SEQ ID NO: 301031
  chr2:240582220-240582300
  hypo

SEQ ID NO: 430200 - DNA, 259 bp, Homo sapiens; identical to SEQ ID NO: 208651
  chr2:240599653-240599912
  hypo

SEQ ID NO: 430201 - DNA, 114 bp, Homo sapiens; identical to SEQ ID NO: 251805
  chr2:240600458-240600572
  hypo

SEQ ID NO: 430202 - DNA, 34 bp, Homo sapiens; identical to SEQ ID NO: 208652
  chr2:240612328-240612362
  hypo

SEQ ID NO: 430203 - DNA, 110 bp, Homo sapiens; identical to SEQ ID NO: 251807
  chr2:240618673-240618783
  hypo

SEQ ID NO: 430204 - DNA, 225 bp, Homo sapiens; identical to SEQ ID NO: 251808
  chr2:240639523-240639748
  hypo

SEQ ID NO: 430205 - DNA, 151 bp, Homo sapiens; identical to SEQ ID NO: 251809
  chr2:240643423-240643574
  hypo

SEQ ID NO: 430206 - DNA, 206 bp, Homo sapiens; identical to SEQ ID NO: 251811
  chr2:240666723-240666929
  hypo

SEQ ID NO: 430207 - DNA, 130 bp, Homo sapiens; identical to SEQ ID NO: 251813
  chr2:240687707-240687837
  hypo

SEQ ID NO: 430208 - DNA, 206 bp, Homo sapiens; identical to SEQ ID NO: 208654
  chr2:240733615-240733821
  hypo

SEQ ID NO: 430209 - DNA, 105 bp, Homo sapiens; identical to SEQ ID NO: 208655
  chr2:240734677-240734782
  hypo

SEQ ID NO: 430210 - DNA, 139 bp, Homo sapiens; identical to SEQ ID NO: 251819
  chr2:240735060-240735199
  hypo

SEQ ID NO: 430211 - DNA, 187 bp, Homo sapiens; identical to SEQ ID NO: 251820
  chr2:240747276-240747463
  hypo

SEQ ID NO: 430212 - DNA, 90 bp, Homo sapiens; identical to SEQ ID NO: 251821
  chr2:240750695-240750785
  hypo

SEQ ID NO: 430213 - DNA, 138 bp, Homo sapiens; identical to SEQ ID NO: 251822
  chr2:240756517-240756655
  hypo

SEQ ID NO: 430214 - DNA, 90 bp, Homo sapiens; identical to SEQ ID NO: 251824
  chr2:240905550-240905640
  hypo

SEQ ID NO: 430215 - DNA, 146 bp, Homo sapiens; identical to SEQ ID NO: 251825
  chr2:240905881-240906027
  hypo

SEQ ID NO: 430216 - DNA, 58 bp, Homo sapiens; identical to SEQ ID NO: 251827
  chr2:240927101-240927159
  hypo

SEQ ID NO: 430217 - DNA, 86 bp, Homo sapiens; identical to SEQ ID NO: 251830
  chr2:240940091-240940177
  hypo

SEQ ID NO: 430218 - DNA, 82 bp, Homo sapiens; identical to SEQ ID NO: 251832
  chr2:240966216-240966298
  hypo

SEQ ID NO: 430219 - DNA, 193 bp, Homo sapiens; identical to SEQ ID NO: 251833
  chr2:241068023-241068216
  hypo

SEQ ID NO: 430220 - DNA, 173 bp, Homo sapiens; identical to SEQ ID NO: 208657
  chr2:241069130-241069303
  hypo

SEQ ID NO: 430221 - DNA, 195 bp, Homo sapiens; identical to SEQ ID NO: 251835
  chr2:241130457-241130652
  hypo

SEQ ID NO: 430222 - DNA, 214 bp, Homo sapiens; identical to SEQ ID NO: 251837
  chr2:241175124-241175338
  hypo

SEQ ID NO: 430223 - DNA, 99 bp, Homo sapiens; identical to SEQ ID NO: 251838
  chr2:241196841-241196940
  hypo

SEQ ID NO: 430224 - DNA, 72 bp, Homo sapiens; identical to SEQ ID NO: 251839
  chr2:241196970-241197042
  hypo

SEQ ID NO: 430225 - DNA, 141 bp, Homo sapiens; identical to SEQ ID NO: 251840
  chr2:241197102-241197243
  hypo

SEQ ID NO: 430226 - DNA, 154 bp, Homo sapiens; identical to SEQ ID NO: 251841
  chr2:241226633-241226787
  hypo

SEQ ID NO: 430227 - DNA, 264 bp, Homo sapiens; identical to SEQ ID NO: 280824
  chr2:241306313-241306577
  hypo

SEQ ID NO: 430228 - DNA, 311 bp, Homo sapiens; identical to SEQ ID NO: 251845
  chr2:241314526-241314837
  hypo

SEQ ID NO: 430229 - DNA, 194 bp, Homo sapiens; identical to SEQ ID NO: 208660
  chr2:241328246-241328440
  hypo

SEQ ID NO: 430230 - DNA, 172 bp, Homo sapiens; identical to SEQ ID NO: 251847
  chr2:241338271-241338443
  hypo

SEQ ID NO: 430231 - DNA, 340 bp, Homo sapiens; identical to SEQ ID NO: 251848
  chr2:241350508-241350848
  hypo

SEQ ID NO: 430232 - DNA, 348 bp, Homo sapiens; identical to SEQ ID NO: 251849
  chr2:241352750-241353098
  hypo

SEQ ID NO: 430233 - DNA, 236 bp, Homo sapiens; identical to SEQ ID NO: 251850
  chr2:241364406-241364642
  hypo

SEQ ID NO: 430234 - DNA, 218 bp, Homo sapiens; identical to SEQ ID NO: 280825
  chr2:241374397-241374615
  hypo

SEQ ID NO: 430235 - DNA, 331 bp, Homo sapiens; identical to SEQ ID NO: 198789
  chr2:241375298-241375629
  hypo

SEQ ID NO: 430236 - DNA, 73 bp, Homo sapiens; identical to SEQ ID NO: 251852
  chr2:241378904-241378977
  hypo

SEQ ID NO: 430237 - DNA, 599 bp, Homo sapiens; identical to SEQ ID NO: 251853
  chr2:241379290-241379889
  hypo

SEQ ID NO: 430238 - DNA, 114 bp, Homo sapiens; identical to SEQ ID NO: 251855
  chr2:241381612-241381726
  hypo

SEQ ID NO: 430239 - DNA, 157 bp, Homo sapiens; identical to SEQ ID NO: 251856
  chr2:241502881-241503038
  hypo

SEQ ID NO: 430240 - DNA, 95 bp, Homo sapiens; identical to SEQ ID NO: 251857
  chr2:241513636-241513731
  hypo

SEQ ID NO: 430241 - DNA, 41 bp, Homo sapiens; identical to SEQ ID NO: 251858
  chr2:241541853-241541894
  hypo

SEQ ID NO: 430242 - DNA, 48 bp, Homo sapiens; identical to SEQ ID NO: 208665
  chr2:241543042-241543090
  hypo

SEQ ID NO: 430243 - DNA, 81 bp, Homo sapiens; identical to SEQ ID NO: 251862
  chr2:241544693-241544774
  hypo

SEQ ID NO: 430244 - DNA, 138 bp, Homo sapiens; identical to SEQ ID NO: 208666
  chr2:241545031-241545169
  hypo

SEQ ID NO: 430245 - DNA, 47 bp, Homo sapiens; identical to SEQ ID NO: 208667
  chr2:241555876-241555923
  hypo

SEQ ID NO: 430246 - DNA, 33 bp, Homo sapiens; identical to SEQ ID NO: 208668
  chr2:241581263-241581296
  hypo

SEQ ID NO: 430247 - DNA, 115 bp, Homo sapiens; identical to SEQ ID NO: 251866
  chr2:241631410-241631525
  hypo

SEQ ID NO: 430248 - DNA, 40 bp, Homo sapiens; identical to SEQ ID NO: 208669
  chr2:241655278-241655318
  hypo

SEQ ID NO: 430249 - DNA, 160 bp, Homo sapiens; identical to SEQ ID NO: 251868
  chr2:241660274-241660434
  hypo

SEQ ID NO: 430250 - DNA, 242 bp, Homo sapiens; identical to SEQ ID NO: 251869
  chr2:241661235-241661477
  hypo

SEQ ID NO: 430251 - DNA, 229 bp, Homo sapiens; identical to SEQ ID NO: 208671
  chr2:241721305-241721534
  hypo

SEQ ID NO: 430252 - DNA, 61 bp, Homo sapiens; identical to SEQ ID NO: 385323
  chr2:241721587-241721648
  hypo

SEQ ID NO: 430253 - DNA, 173 bp, Homo sapiens; identical to SEQ ID NO: 251874
  chr2:241727448-241727621
  hypo

SEQ ID NO: 430254 - DNA, 156 bp, Homo sapiens; identical to SEQ ID NO: 208675
  chr2:241750153-241750309
  hypo

SEQ ID NO: 430255 - DNA, 112 bp, Homo sapiens; identical to SEQ ID NO: 251876
  chr2:241776236-241776348
  hypo

SEQ ID NO: 430256 - DNA, 208 bp, Homo sapiens; identical to SEQ ID NO: 251877
  chr2:241842760-241842968
  hypo

SEQ ID NO: 430257 - DNA, 115 bp, Homo sapiens; identical to SEQ ID NO: 208676
  chr2:241858348-241858463
  hypo

SEQ ID NO: 430258 - DNA, 38 bp, Homo sapiens; identical to SEQ ID NO: 301110
  chr2:241862320-241862358
  hypo

SEQ ID NO: 430259 - DNA, 268 bp, Homo sapiens; identical to SEQ ID NO: 251882
  chr2:241872036-241872304
  hypo

SEQ ID NO: 430260 - DNA, 75 bp, Homo sapiens; identical to SEQ ID NO: 251883
  chr2:241872595-241872670
  hypo

SEQ ID NO: 430261 - DNA, 160 bp, Homo sapiens; identical to SEQ ID NO: 251884
  chr2:241896341-241896501
  hypo

SEQ ID NO: 430262 - DNA, 112 bp, Homo sapiens; identical to SEQ ID NO: 208678
  chr2:241896820-241896932
  hypo

SEQ ID NO: 430263 - DNA, 39 bp, Homo sapiens; identical to SEQ ID NO: 208679
  chr2:241897078-241897117
  hypo

SEQ ID NO: 430264 - DNA, 85 bp, Homo sapiens; identical to SEQ ID NO: 301116
  chr2:241971087-241971172
  hypo

SEQ ID NO: 430265 - DNA, 31 bp, Homo sapiens; identical to SEQ ID NO: 301117
  chr2:241971202-241971233
  hypo

SEQ ID NO: 430266 - DNA, 91 bp, Homo sapiens; identical to SEQ ID NO: 251887
  chr2:241988026-241988117
  hypo

SEQ ID NO: 430267 - DNA, 250 bp, Homo sapiens; identical to SEQ ID NO: 251889
  chr2:241992477-241992727
  hypo

SEQ ID NO: 430268 - DNA, 217 bp, Homo sapiens; identical to SEQ ID NO: 208683
  chr2:242010983-242011200
  hypo

SEQ ID NO: 430269 - DNA, 212 bp, Homo sapiens; identical to SEQ ID NO: 208684
  chr2:242011230-242011442
  hypo

SEQ ID NO: 430270 - DNA, 89 bp, Homo sapiens; identical to SEQ ID NO: 301125
  chr2:242021672-242021761
  hypo

SEQ ID NO: 430271 - DNA, 148 bp, Homo sapiens; identical to SEQ ID NO: 251894
  chr2:242065197-242065345
  hypo

SEQ ID NO: 430272 - DNA, 92 bp, Homo sapiens; identical to SEQ ID NO: 208685
  chr2:242076563-242076655
  hypo

SEQ ID NO: 430273 - DNA, 110 bp, Homo sapiens; identical to SEQ ID NO: 251896
  chr2:242102770-242102880
  hypo

SEQ ID NO: 430274 - DNA, 314 bp, Homo sapiens; identical to SEQ ID NO: 251897
  chr2:242122192-242122506
  hypo

SEQ ID NO: 430275 - DNA, 174 bp, Homo sapiens; identical to SEQ ID NO: 301130
  chr2:242128594-242128768
  hypo

SEQ ID NO: 430276 - DNA, 680 bp, Homo sapiens; identical to SEQ ID NO: 301131
  chr2:242128827-242129507
  hypo

SEQ ID NO: 430277 - DNA, 45 bp, Homo sapiens; identical to SEQ ID NO: 251899
  chr2:242130373-242130418
  hypo

SEQ ID NO: 430278 - DNA, 52 bp, Homo sapiens; identical to SEQ ID NO: 251900
  chr2:242142973-242143025
  hypo

SEQ ID NO: 430279 - DNA, 67 bp, Homo sapiens; identical to SEQ ID NO: 251902
  chr2:242169267-242169334
  hypo

SEQ ID NO: 430280 - DNA, 222 bp, Homo sapiens; identical to SEQ ID NO: 251905
  chr2:242209285-242209507
  hypo

SEQ ID NO: 430281 - DNA, 120 bp, Homo sapiens; identical to SEQ ID NO: 208688
  chr2:242268832-242268952
  hypo

SEQ ID NO: 430282 - DNA, 255 bp, Homo sapiens; identical to SEQ ID NO: 251908
  chr2:242277632-242277887
  hypo

SEQ ID NO: 430283 - DNA, 283 bp, Homo sapiens; identical to SEQ ID NO: 208691
  chr2:242353962-242354245
  hypo

SEQ ID NO: 430284 - DNA, 42 bp, Homo sapiens; identical to SEQ ID NO: 251911
  chr2:242354475-242354517
  hypo

SEQ ID NO: 430285 - DNA, 85 bp, Homo sapiens; identical to SEQ ID NO: 251912
  chr2:242357376-242357461
  hypo

SEQ ID NO: 430286 - DNA, 85 bp, Homo sapiens; identical to SEQ ID NO: 251913
  chr2:242393498-242393583
  hypo

SEQ ID NO: 430287 - DNA, 208 bp, Homo sapiens; identical to SEQ ID NO: 251914
  chr2:242435159-242435367
  hypo

SEQ ID NO: 430288 - DNA, 222 bp, Homo sapiens; identical to SEQ ID NO: 251915
  chr2:242435718-242435940
  hypo

SEQ ID NO: 430289 - DNA, 413 bp, Homo sapiens; identical to SEQ ID NO: 251917
  chr2:242438422-242438835
  hypo

SEQ ID NO: 430290 - DNA, 162 bp, Homo sapiens; identical to SEQ ID NO: 208693
  chr2:242439377-242439539
  hypo

SEQ ID NO: 430291 - DNA, 95 bp, Homo sapiens; identical to SEQ ID NO: 208694
  chr2:242439569-242439664
  hypo

SEQ ID NO: 430292 - DNA, 77 bp, Homo sapiens; identical to SEQ ID NO: 251920
  chr2:242459133-242459210
  hypo

SEQ ID NO: 430293 - DNA, 36 bp, Homo sapiens
  chr2:242523726-242523762
  hypo
caccacacccagcccccttcttaatttcttagggaa

SEQ ID NO: 430294 - DNA, 560 bp, Homo sapiens; identical to SEQ ID NO: 251925
  chr2:242578416-242578976
  hypo

SEQ ID NO: 430295 - DNA, 71 bp, Homo sapiens; identical to SEQ ID NO: 208698
  chr2:242585229-242585300
  hypo

SEQ ID NO: 430296 - DNA, 252 bp, Homo sapiens; identical to SEQ ID NO: 251928
  chr2:242600213-242600465
  hypo

SEQ ID NO: 430297 - DNA, 390 bp, Homo sapiens; identical to SEQ ID NO: 251931
  chr2:242608061-242608451
  hypo

SEQ ID NO: 430298 - DNA, 214 bp, Homo sapiens; identical to SEQ ID NO: 251932
  chr2:242608728-242608942
  hypo

SEQ ID NO: 430299 - DNA, 33 bp, Homo sapiens; identical to SEQ ID NO: 251933
  chr2:242609242-242609275
  hypo

SEQ ID NO: 430300 - DNA, 184 bp, Homo sapiens; identical to SEQ ID NO: 208700
  chr2:242610782-242610966
  hypo

SEQ ID NO: 430301 - DNA, 206 bp, Homo sapiens; identical to SEQ ID NO: 208701
  chr2:242611928-242612134
  hypo

SEQ ID NO: 430302 - DNA, 55 bp, Homo sapiens; identical to SEQ ID NO: 403403
  chr2:242618832-242618887
  hypo

SEQ ID NO: 430303 - DNA, 103 bp, Homo sapiens; identical to SEQ ID NO: 251939
  chr2:242618947-242619050
  hypo

SEQ ID NO: 430304 - DNA, 37 bp, Homo sapiens; identical to SEQ ID NO: 251940
  chr2:242620782-242620819
  hypo

SEQ ID NO: 430305 - DNA, 120 bp, Homo sapiens; identical to SEQ ID NO: 251941
  chr2:242636478-242636598
  hypo

SEQ ID NO: 430306 - DNA, 105 bp, Homo sapiens; identical to SEQ ID NO: 208707
  chr2:242637132-242637237
  hypo

SEQ ID NO: 430307 - DNA, 79 bp, Homo sapiens; identical to SEQ ID NO: 251944
  chr2:242648697-242648776
  hypo

SEQ ID NO: 430308 - DNA, 245 bp, Homo sapiens; identical to SEQ ID NO: 251945
  chr2:242664010-242664255
  hypo

SEQ ID NO: 430309 - DNA, 107 bp, Homo sapiens; identical to SEQ ID NO: 251947
  chr2:242712093-242712200
  hypo

SEQ ID NO: 430310 - DNA, 117 bp, Homo sapiens; identical to SEQ ID NO: 301187
  chr2:242716188-242716305
  hypo

SEQ ID NO: 430311 - DNA, 388 bp, Homo sapiens; identical to SEQ ID NO: 301188
  chr2:242716335-242716723
  hypo

SEQ ID NO: 430312 - DNA, 43 bp, Homo sapiens; identical to SEQ ID NO: 301189
  chr2:242716760-242716803
  hypo

SEQ ID NO: 430313 - DNA, 78 bp, Homo sapiens; identical to SEQ ID NO: 208711
  chr2:242734968-242735046
  hypo

SEQ ID NO: 430314 - DNA, 320 bp, Homo sapiens; identical to SEQ ID NO: 251952
  chr2:242754378-242754698
  hypo

SEQ ID NO: 430315 - DNA, 171 bp, Homo sapiens; identical to SEQ ID NO: 208715
  chr2:242755673-242755844
  hypo

SEQ ID NO: 430316 - DNA, 104 bp, Homo sapiens; identical to SEQ ID NO: 208716
  chr2:242762674-242762778
  hypo

SEQ ID NO: 430317 - DNA, 253 bp, Homo sapiens; identical to SEQ ID NO: 208717
  chr2:242762831-242763084
  hypo

SEQ ID NO: 430318 - DNA, 281 bp, Homo sapiens; identical to SEQ ID NO: 251956
  chr2:242791134-242791415
  hypo

SEQ ID NO: 430319 - DNA, 53 bp, Homo sapiens; identical to SEQ ID NO: 301202
  chr2:242836340-242836393
  hypo

SEQ ID NO: 430320 - DNA, 85 bp, Homo sapiens; identical to SEQ ID NO: 251963
  chr2:242845592-242845677
  hypo

SEQ ID NO: 430321 - DNA, 175 bp, Homo sapiens; identical to SEQ ID NO: 208719
  chr2:242874827-242875002
  hypo

SEQ ID NO: 430322 - DNA, 189 bp, Homo sapiens; identical to SEQ ID NO: 208720
  chr2:242887764-242887953
  hypo

SEQ ID NO: 430323 - DNA, 47 bp, Homo sapiens; identical to SEQ ID NO: 301206
  chr2:242890344-242890391
  hypo

SEQ ID NO: 430324 - DNA, 141 bp, Homo sapiens; identical to SEQ ID NO: 251969
  chr2:242938360-242938501
  hypo

SEQ ID NO: 430325 - DNA, 113 bp, Homo sapiens; identical to SEQ ID NO: 251970
  chr2:242948202-242948315
  hypo

SEQ ID NO: 430326 - DNA, 190 bp, Homo sapiens; identical to SEQ ID NO: 301212
  chr2:242948375-242948565
  hypo

SEQ ID NO: 430327 - DNA, 61 bp, Homo sapiens; identical to SEQ ID NO: 301213
  chr3:3167927-3167988
  hypo

SEQ ID NO: 430328 - DNA, 209 bp, Homo sapiens; identical to SEQ ID NO: 208721
  chr3:3179063-3179272
  hypo

SEQ ID NO: 430329 - DNA, 37 bp, Homo sapiens; identical to SEQ ID NO: 251975
  chr3:3426022-3426059
  hypo

SEQ ID NO: 430330 - DNA, 41 bp, Homo sapiens; identical to SEQ ID NO: 251976
  chr3:3639126-3639167
  hypo

SEQ ID NO: 430331 - DNA, 165 bp, Homo sapiens; identical to SEQ ID NO: 208722
  chr3:3786390-3786555
  hypo

SEQ ID NO: 430332 - DNA, 83 bp, Homo sapiens; identical to SEQ ID NO: 251979
  chr3:4669493-4669576
  hypo

SEQ ID NO: 430333 - DNA, 218 bp, Homo sapiens; identical to SEQ ID NO: 251980
  chr3:4735234-4735452
  hypo

SEQ ID NO: 430334 - DNA, 96 bp, Homo sapiens; identical to SEQ ID NO: 208724
  chr3:4755878-4755974
  hypo

SEQ ID NO: 430335 - DNA, 279 bp, Homo sapiens; identical to SEQ ID NO: 301222
  chr3:4756004-4756283
  hypo

SEQ ID NO: 430336 - DNA, 62 bp, Homo sapiens; identical to SEQ ID NO: 251982
  chr3:4840917-4840979
  hypo

SEQ ID NO: 430337 - DNA, 760 bp, Homo sapiens; identical to SEQ ID NO: 251983
  chr3:4865776-4866536
  hypo

SEQ ID NO: 430338 - DNA, 37 bp, Homo sapiens; identical to SEQ ID NO: 208728
  chr3:4993606-4993643
  hypo

SEQ ID NO: 430339 - DNA, 176 bp, Homo sapiens; identical to SEQ ID NO: 251985
  chr3:5030720-5030896
  hypo

SEQ ID NO: 430340 - DNA, 31 bp, Homo sapiens; identical to SEQ ID NO: 251986
  chr3:5126485-5126516
  hypo

SEQ ID NO: 430341 - DNA, 174 bp, Homo sapiens; identical to SEQ ID NO: 251988
  chr3:5252798-5252972
  hypo

SEQ ID NO: 430342 - DNA, 42 bp, Homo sapiens; identical to SEQ ID NO: 251989
  chr3:5296187-5296229
  hypo

SEQ ID NO: 430343 - DNA, 93 bp, Homo sapiens; identical to SEQ ID NO: 251990
  chr3:5824093-5824186
  hypo

SEQ ID NO: 430344 - DNA, 35 bp, Homo sapiens; identical to SEQ ID NO: 251991
  chr3:6109803-6109838
  hypo

SEQ ID NO: 430345 - DNA, 35 bp, Homo sapiens; identical to SEQ ID NO: 251992
  chr3:6110078-6110113
  hypo

SEQ ID NO: 430346 - DNA, 84 bp, Homo sapiens; identical to SEQ ID NO: 208730
  chr3:6811742-6811826
  hypo

SEQ ID NO: 430347 - DNA, 161 bp, Homo sapiens; identical to SEQ ID NO: 416660
  chr3:6903264-6903425
  hypo

SEQ ID NO: 430348 - DNA, 125 bp, Homo sapiens; identical to SEQ ID NO: 280871
  chr3:6903463-6903588
  hypo

SEQ ID NO: 430349 - DNA, 161 bp, Homo sapiens; identical to SEQ ID NO: 251994
  chr3:7188149-7188310
  hypo

SEQ ID NO: 430350 - DNA, 47 bp, Homo sapiens; identical to SEQ ID NO: 251995
  chr3:7620289-7620336
  hypo

SEQ ID NO: 430351 - DNA, 76 bp, Homo sapiens; identical to SEQ ID NO: 251996
  chr3:8505219-8505295
  hypo

SEQ ID NO: 430352 - DNA, 43 bp, Homo sapiens; identical to SEQ ID NO: 208731
  chr3:8595738-8595781
  hypo

SEQ ID NO: 430353 - DNA, 45 bp, Homo sapiens; identical to SEQ ID NO: 208733
  chr3:8669371-8669416
  hypo

SEQ ID NO: 430354 - DNA, 213 bp, Homo sapiens; identical to SEQ ID NO: 252000
  chr3:9173888-9174101
  hypo

SEQ ID NO: 430355 - DNA, 148 bp, Homo sapiens; identical to SEQ ID NO: 252001
  chr3:9553508-9553656
  hypo

SEQ ID NO: 430356 - DNA, 36 bp, Homo sapiens; identical to SEQ ID NO: 252002
  chr3:9554924-9554960
  hypo

SEQ ID NO: 430357 - DNA, 127 bp, Homo sapiens; identical to SEQ ID NO: 252003
  chr3:9704771-9704898
  hypo

SEQ ID NO: 430358 - DNA, 154 bp, Homo sapiens; identical to SEQ ID NO: 208734
  chr3:9782960-9783114
  hypo

SEQ ID NO: 430359 - DNA, 39 bp, Homo sapiens; identical to SEQ ID NO: 208735
  chr3:9793443-9793482
  hypo

SEQ ID NO: 430360 - DNA, 257 bp, Homo sapiens; identical to SEQ ID NO: 208736
  chr3:9905283-9905540
  hypo

SEQ ID NO: 430361 - DNA, 120 bp, Homo sapiens; identical to SEQ ID NO: 252007
  chr3:9924114-9924234
  hypo

SEQ ID NO: 430362 - DNA, 33 bp, Homo sapiens; identical to SEQ ID NO: 208737
  chr3:9947648-9947681
  hypo

SEQ ID NO: 430363 - DNA, 155 bp, Homo sapiens; identical to SEQ ID NO: 252010
  chr3:9987359-9987514
  hypo

SEQ ID NO: 430364 - DNA, 229 bp, Homo sapiens; identical to SEQ ID NO: 252011
  chr3:9991408-9991637
  hypo

SEQ ID NO: 430365 - DNA, 73 bp, Homo sapiens; identical to SEQ ID NO: 403433
  chr3:10132062-10132135
  hypo

SEQ ID NO: 430366 - DNA, 139 bp, Homo sapiens; identical to SEQ ID NO: 208741
  chr3:10212191-10212330
  hypo

SEQ ID NO: 430367 - DNA, 112 bp, Homo sapiens; identical to SEQ ID NO: 252017
  chr3:10332492-10332604
  hypo

SEQ ID NO: 430368 - DNA, 41 bp, Homo sapiens; identical to SEQ ID NO: 208742
  chr3:10363448-10363489
  hypo

SEQ ID NO: 430369 - DNA, 242 bp, Homo sapiens; identical to SEQ ID NO: 252019
  chr3:10384503-10384745
  hypo

SEQ ID NO: 430370 - DNA, 131 bp, Homo sapiens; identical to SEQ ID NO: 252021
  chr3:10569429-10569560
  hypo

SEQ ID NO: 430371 - DNA, 201 bp, Homo sapiens; identical to SEQ ID NO: 208744
  chr3:10959983-10960184
  hypo

SEQ ID NO: 430372 - DNA, 33 bp, Homo sapiens; identical to SEQ ID NO: 252024
  chr3:10976104-10976137
  hypo

SEQ ID NO: 430373 - DNA, 127 bp, Homo sapiens; identical to SEQ ID NO: 252025
  chr3:10991635-10991762
  hypo

SEQ ID NO: 430374 - DNA, 120 bp, Homo sapiens; identical to SEQ ID NO: 208745
  chr3:11133518-11133638
  hypo

SEQ ID NO: 430375 - DNA, 215 bp, Homo sapiens; identical to SEQ ID NO: 208746
  chr3:11210148-11210363
  hypo

SEQ ID NO: 430376 - DNA, 42 bp, Homo sapiens; identical to SEQ ID NO: 208747
  chr3:11300932-11300974
  hypo

SEQ ID NO: 430377 - DNA, 37 bp, Homo sapiens; identical to SEQ ID NO: 252029
  chr3:11574543-11574580
  hypo

SEQ ID NO: 430378 - DNA, 88 bp, Homo sapiens; identical to SEQ ID NO: 252032
  chr3:11595081-11595169
  hypo

SEQ ID NO: 430379 - DNA, 357 bp, Homo sapiens; identical to SEQ ID NO: 252033
  chr3:11600065-11600422
  hypo

SEQ ID NO: 430380 - DNA, 38 bp, Homo sapiens; identical to SEQ ID NO: 208750
  chr3:11606285-11606323
  hypo

SEQ ID NO: 430381 - DNA, 32 bp, Homo sapiens; identical to SEQ ID NO: 252035
  chr3:11607101-11607133
  hypo

SEQ ID NO: 430382 - DNA, 135 bp, Homo sapiens; identical to SEQ ID NO: 208752
  chr3:11707751-11707886
  hypo

SEQ ID NO: 430383 - DNA, 99 bp, Homo sapiens; identical to SEQ ID NO: 252038
  chr3:12186545-12186644
  hypo

SEQ ID NO: 430384 - DNA, 81 bp, Homo sapiens; identical to SEQ ID NO: 208753
  chr3:12204374-12204455
  hypo

SEQ ID NO: 430385 - DNA, 119 bp, Homo sapiens; identical to SEQ ID NO: 252040
  chr3:12486439-12486558
  hypo

SEQ ID NO: 430386 - DNA, 120 bp, Homo sapiens; identical to SEQ ID NO: 252041
  chr3:12486827-12486947
  hypo

SEQ ID NO: 430387 - DNA, 39 bp, Homo sapiens; identical to SEQ ID NO: 252042
  chr3:12558547-12558586
  hypo

SEQ ID NO: 430388 - DNA, 43 bp, Homo sapiens; identical to SEQ ID NO: 208754
  chr3:12575984-12576027
  hypo

SEQ ID NO: 430389 - DNA, 118 bp, Homo sapiens; identical to SEQ ID NO: 208758
  chr3:12660087-12660205
  hypo

SEQ ID NO: 430390 - DNA, 40 bp, Homo sapiens; identical to SEQ ID NO: 252050
  chr3:12761057-12761097
  hypo

SEQ ID NO: 430391 - DNA, 94 bp, Homo sapiens; identical to SEQ ID NO: 252051
  chr3:12820702-12820796
  hypo

SEQ ID NO: 430392 - DNA, 78 bp, Homo sapiens; identical to SEQ ID NO: 208760
  chr3:12821389-12821467
  hypo

SEQ ID NO: 430393 - DNA, 125 bp, Homo sapiens; identical to SEQ ID NO: 252053
  chr3:12856636-12856761
  hypo

SEQ ID NO: 430394 - DNA, 43 bp, Homo sapiens; identical to SEQ ID NO: 208761
  chr3:12940404-12940447
  hypo

SEQ ID NO: 430395 - DNA, 102 bp, Homo sapiens; identical to SEQ ID NO: 208762
  chr3:12940862-12940964
  hypo

SEQ ID NO: 430396 - DNA, 215 bp, Homo sapiens; identical to SEQ ID NO: 208763
  chr3:12949721-12949936
  hypo

SEQ ID NO: 430397 - DNA, 75 bp, Homo sapiens; identical to SEQ ID NO: 208764
  chr3:12956289-12956364
  hypo

SEQ ID NO: 430398 - DNA, 439 bp, Homo sapiens; identical to SEQ ID NO: 252060
  chr3:12984507-12984946
  hypo

SEQ ID NO: 430399 - DNA, 218 bp, Homo sapiens; identical to SEQ ID NO: 198825
  chr3:13008720-13008938
  hypo

SEQ ID NO: 430400 - DNA, 124 bp, Homo sapiens; identical to SEQ ID NO: 280909
  chr3:13009023-13009147
  hypo

SEQ ID NO: 430401 - DNA, 106 bp, Homo sapiens; identical to SEQ ID NO: 252061
  chr3:13020986-13021092
  hypo

SEQ ID NO: 430402 - DNA, 57 bp, Homo sapiens; identical to SEQ ID NO: 252062
  chr3:13028240-13028297
  hypo

SEQ ID NO: 430403 - DNA, 148 bp, Homo sapiens; identical to SEQ ID NO: 252063
  chr3:13028558-13028706
  hypo

SEQ ID NO: 430404 - DNA, 124 bp, Homo sapiens; identical to SEQ ID NO: 301310
  chr3:13028736-13028860
  hypo

SEQ ID NO: 430405 - DNA, 85 bp, Homo sapiens; identical to SEQ ID NO: 301311
  chr3:13028890-13028975
  hypo

SEQ ID NO: 430406 - DNA, 108 bp, Homo sapiens; identical to SEQ ID NO: 208768
  chr3:13083878-13083986
  hypo

SEQ ID NO: 430407 - DNA, 94 bp, Homo sapiens; identical to SEQ ID NO: 208769
  chr3:13205534-13205628
  hypo

SEQ ID NO: 430408 - DNA, 52 bp, Homo sapiens; identical to SEQ ID NO: 252068
  chr3:13501985-13502037
  hypo

SEQ ID NO: 430409 - DNA, 206 bp, Homo sapiens; identical to SEQ ID NO: 252070
  chr3:13669960-13670166
  hypo

SEQ ID NO: 430410 - DNA, 216 bp, Homo sapiens; identical to SEQ ID NO: 252072
  chr3:14174613-14174829
  hypo

SEQ ID NO: 430411 - DNA, 44 bp, Homo sapiens; identical to SEQ ID NO: 252073
  chr3:14208688-14208732
  hypo

SEQ ID NO: 430412 - DNA, 93 bp, Homo sapiens; identical to SEQ ID NO: 252074
  chr3:14291143-14291236
  hypo

SEQ ID NO: 430413 - DNA, 35 bp, Homo sapiens; identical to SEQ ID NO: 252075
  chr3:14313488-14313523
  hypo

SEQ ID NO: 430414 - DNA, 144 bp, Homo sapiens; identical to SEQ ID NO: 208773
  chr3:14383872-14384016
  hypo

SEQ ID NO: 430415 - DNA, 265 bp, Homo sapiens; identical to SEQ ID NO: 208774
  chr3:14384852-14385117
  hypo

SEQ ID NO: 430416 - DNA, 105 bp, Homo sapiens; identical to SEQ ID NO: 222076
  chr3:14444658-14444763
  hypo

SEQ ID NO: 430417 - DNA, 91 bp, Homo sapiens; identical to SEQ ID NO: 252079
  chr3:14452944-14453035
  hypo

SEQ ID NO: 430418 - DNA, 36 bp, Homo sapiens; identical to SEQ ID NO: 252080
  chr3:14508072-14508108
  hypo

SEQ ID NO: 430419 - DNA, 270 bp, Homo sapiens; identical to SEQ ID NO: 252082
  chr3:14535135-14535405
  hypo

SEQ ID NO: 430420 - DNA, 112 bp, Homo sapiens; identical to SEQ ID NO: 252083
  chr3:14563228-14563340
  hypo

SEQ ID NO: 430421 - DNA, 131 bp, Homo sapiens; identical to SEQ ID NO: 252084
  chr3:14564198-14564329
  hypo

SEQ ID NO: 430422 - DNA, 210 bp, Homo sapiens; identical to SEQ ID NO: 252085
  chr3:14565824-14566034
  hypo

SEQ ID NO: 430423 - DNA, 40 bp, Homo sapiens; identical to SEQ ID NO: 252086
  chr3:15004944-15004984
  hypo

SEQ ID NO: 430424 - DNA, 39 bp, Homo sapiens; identical to SEQ ID NO: 252087
  chr3:15005224-15005263
  hypo

SEQ ID NO: 430425 - DNA, 213 bp, Homo sapiens; identical to SEQ ID NO: 301343
  chr3:15105313-15105526
  hypo

SEQ ID NO: 430426 - DNA, 163 bp, Homo sapiens; identical to SEQ ID NO: 208778
  chr3:15116204-15116367
  hypo

SEQ ID NO: 430427 - DNA, 142 bp, Homo sapiens; identical to SEQ ID NO: 252092
  chr3:15349228-15349370
  hypo

SEQ ID NO: 430428 - DNA, 79 bp, Homo sapiens; identical to SEQ ID NO: 208781
  chr3:15374528-15374607
  hypo

SEQ ID NO: 430429 - DNA, 92 bp, Homo sapiens; identical to SEQ ID NO: 252094
  chr3:15432501-15432593
  hypo

SEQ ID NO: 430430 - DNA, 152 bp, Homo sapiens; identical to SEQ ID NO: 208782
  chr3:15540528-15540680
  hypo

SEQ ID NO: 430431 - DNA, 98 bp, Homo sapiens; identical to SEQ ID NO: 252096
  chr3:15674931-15675029
  hypo

SEQ ID NO: 430432 - DNA, 232 bp, Homo sapiens; identical to SEQ ID NO: 252097
  chr3:16363981-16364213
  hypo

SEQ ID NO: 430433 - DNA, 215 bp, Homo sapiens; identical to SEQ ID NO: 208783
  chr3:16439262-16439477
  hypo

SEQ ID NO: 430434 - DNA, 78 bp, Homo sapiens; identical to SEQ ID NO: 252099
  chr3:16542424-16542502
  hypo

SEQ ID NO: 430435 - DNA, 77 bp, Homo sapiens; identical to SEQ ID NO: 252100
  chr3:16542622-16542699
  hypo

SEQ ID NO: 430436 - DNA, 120 bp, Homo sapiens; identical to SEQ ID NO: 252101
  chr3:17101442-17101562
  hypo

SEQ ID NO: 430437 - DNA, 70 bp, Homo sapiens; identical to SEQ ID NO: 252102
  chr3:17560360-17560430
  hypo

SEQ ID NO: 430438 - DNA, 89 bp, Homo sapiens; identical to SEQ ID NO: 252103
  chr3:18427927-18428016
  hypo

SEQ ID NO: 430439 - DNA, 152 bp, Homo sapiens; identical to SEQ ID NO: 208787
  chr3:18452751-18452903
  hypo

SEQ ID NO: 430440 - DNA, 668 bp, Homo sapiens; identical to SEQ ID NO: 280946
  chr3:18485652-18486320
  hypo

SEQ ID NO: 430441 - DNA, 76 bp, Homo sapiens; identical to SEQ ID NO: 252106
  chr3:19276255-19276331
  hypo

SEQ ID NO: 430442 - DNA, 86 bp, Homo sapiens; identical to SEQ ID NO: 208790
  chr3:19790879-19790965
  hypo

SEQ ID NO: 430443 - DNA, 147 bp, Homo sapiens; identical to SEQ ID NO: 252108
  chr3:19992379-19992526
  hypo

SEQ ID NO: 430444 - DNA, 44 bp, Homo sapiens; identical to SEQ ID NO: 208791
  chr3:20070404-20070448
  hypo

SEQ ID NO: 430445 - DNA, 97 bp, Homo sapiens; identical to SEQ ID NO: 208792
  chr3:20071112-20071209
  hypo

SEQ ID NO: 430446 - DNA, 132 bp, Homo sapiens; identical to SEQ ID NO: 252112
  chr3:20113812-20113944
  hypo

SEQ ID NO: 430447 - DNA, 36 bp, Homo sapiens; identical to SEQ ID NO: 252113
  chr3:20120131-20120167
  hypo

SEQ ID NO: 430448 - DNA, 38 bp, Homo sapiens; identical to SEQ ID NO: 252114
  chr3:20630727-20630765
  hypo

SEQ ID NO: 430449 - DNA, 156 bp, Homo sapiens; identical to SEQ ID NO: 301376
  chr3:23031955-23032111
  hypo

SEQ ID NO: 430450 - DNA, 133 bp, Homo sapiens; identical to SEQ ID NO: 301377
  chr3:23032141-23032274
  hypo

SEQ ID NO: 430451 - DNA, 57 bp, Homo sapiens; identical to SEQ ID NO: 252116
  chr3:23521987-23522044
  hypo

SEQ ID NO: 430452 - DNA, 162 bp, Homo sapiens; identical to SEQ ID NO: 208793
  chr3:23750593-23750755
  hypo

SEQ ID NO: 430453 - DNA, 94 bp, Homo sapiens; identical to SEQ ID NO: 252118
  chr3:23838424-23838518
  hypo

SEQ ID NO: 430454 - DNA, 45 bp, Homo sapiens; identical to SEQ ID NO: 252119
  chr3:23848677-23848722
  hypo

SEQ ID NO: 430455 - DNA, 204 bp, Homo sapiens; identical to SEQ ID NO: 198843
  chr3:23986746-23986950
  hypo

SEQ ID NO: 430456 - DNA, 82 bp, Homo sapiens; identical to SEQ ID NO: 252120
  chr3:24060721-24060803
  hypo

SEQ ID NO: 430457 - DNA, 169 bp, Homo sapiens; identical to SEQ ID NO: 208796
  chr3:24344850-24345019
  hypo

SEQ ID NO: 430458 - DNA, 31 bp, Homo sapiens; identical to SEQ ID NO: 208797
  chr3:24374243-24374274
  hypo

SEQ ID NO: 430459 - DNA, 195 bp, Homo sapiens; identical to SEQ ID NO: 208798
  chr3:24436870-24437065
  hypo

SEQ ID NO: 430460 - DNA, 254 bp, Homo sapiens; identical to SEQ ID NO: 280960
  chr3:24535595-24535849
  hypo

SEQ ID NO: 430461 - DNA, 372 bp, Homo sapiens; identical to SEQ ID NO: 416725
  chr3:24535988-24536360
  hypo

SEQ ID NO: 430462 - DNA, 654 bp, Homo sapiens; identical to SEQ ID NO: 280962
  chr3:24562965-24563619
  hypo

SEQ ID NO: 430463 - DNA, 41 bp, Homo sapiens; identical to SEQ ID NO: 198847
  chr3:24563737-24563778
  hypo

SEQ ID NO: 430464 - DNA, 178 bp, Homo sapiens; identical to SEQ ID NO: 252125
  chr3:25619924-25620102
  hypo

SEQ ID NO: 430465 - DNA, 100 bp, Homo sapiens; identical to SEQ ID NO: 208804
  chr3:27519021-27519121
  hypo

SEQ ID NO: 430466 - DNA, 36 bp, Homo sapiens; identical to SEQ ID NO: 252128
  chr3:27563872-27563908
  hypo

SEQ ID NO: 430467 - DNA, 35 bp, Homo sapiens; identical to SEQ ID NO: 208805
  chr3:27564148-27564183
  hypo

SEQ ID NO: 430468 - DNA, 37 bp, Homo sapiens; identical to SEQ ID NO: 208806
  chr3:27587341-27587378
  hypo

SEQ ID NO: 430469 - DNA, 36 bp, Homo sapiens; identical to SEQ ID NO: 208807
  chr3:30574870-30574906
  hypo

SEQ ID NO: 430470 - DNA, 51 bp, Homo sapiens; identical to SEQ ID NO: 252134
  chr3:30885631-30885682
  hypo

SEQ ID NO: 430471 - DNA, 37 bp, Homo sapiens; identical to SEQ ID NO: 208809
  chr3:31717147-31717184
  hypo

SEQ ID NO: 430472 - DNA, 139 bp, Homo sapiens; identical to SEQ ID NO: 252137
  chr3:31786601-31786740
  hypo

SEQ ID NO: 430473 - DNA, 329 bp, Homo sapiens; identical to SEQ ID NO: 280998
  chr3:32612447-32612776
  hypo

SEQ ID NO: 430474 - DNA, 273 bp, Homo sapiens; identical to SEQ ID NO: 252139
  chr3:32663085-32663358
  hypo

SEQ ID NO: 430475 - DNA, 41 bp, Homo sapiens; identical to SEQ ID NO: 252140
  chr3:32886051-32886092
  hypo

SEQ ID NO: 430476 - DNA, 145 bp, Homo sapiens; identical to SEQ ID NO: 208814
  chr3:33012238-33012383
  hypo

SEQ ID NO: 430477 - DNA, 284 bp, Homo sapiens; identical to SEQ ID NO: 252142
  chr3:33104315-33104599
  hypo

SEQ ID NO: 430478 - DNA, 223 bp, Homo sapiens; identical to SEQ ID NO: 252149
  chr3:36778835-36779058
  hypo

SEQ ID NO: 430479 - DNA, 41 bp, Homo sapiens; identical to SEQ ID NO: 208817
  chr3:36984642-36984683
  hypo

SEQ ID NO: 430480 - DNA, 91 bp, Homo sapiens; identical to SEQ ID NO: 222102
  chr3:37038109-37038200
  hypo

SEQ ID NO: 430481 - DNA, 99 bp, Homo sapiens; identical to SEQ ID NO: 222103
  chr3:37042445-37042544
  hypo

SEQ ID NO: 430482 - DNA, 74 bp, Homo sapiens; identical to SEQ ID NO: 222104
  chr3:37045891-37045965
  hypo

SEQ ID NO: 430483 - DNA, 73 bp, Homo sapiens; identical to SEQ ID NO: 222105
  chr3:37048481-37048554
  hypo

SEQ ID NO: 430484 - DNA, 92 bp, Homo sapiens; identical to SEQ ID NO: 222106
  chr3:37050304-37050396
  hypo

SEQ ID NO: 430485 - DNA, 280 bp, Homo sapiens; identical to SEQ ID NO: 222107
  chr3:37053310-37053590
  hypo

SEQ ID NO: 430486 - DNA, 113 bp, Homo sapiens; identical to SEQ ID NO: 222108
  chr3:37055922-37056035
  hypo

SEQ ID NO: 430487 - DNA, 94 bp, Homo sapiens; identical to SEQ ID NO: 222109
  chr3:37058996-37059090
  hypo

SEQ ID NO: 430488 - DNA, 154 bp, Homo sapiens; identical to SEQ ID NO: 222110
  chr3:37061800-37061954
  hypo

SEQ ID NO: 430489 - DNA, 371 bp, Homo sapiens; identical to SEQ ID NO: 222111
  chr3:37067127-37067498
  hypo

SEQ ID NO: 430490 - DNA, 149 bp, Homo sapiens; identical to SEQ ID NO: 222112
  chr3:37070274-37070423
  hypo

SEQ ID NO: 430491 - DNA, 109 bp, Homo sapiens; identical to SEQ ID NO: 222113
  chr3:37081676-37081785
  hypo

SEQ ID NO: 430492 - DNA, 64 bp, Homo sapiens; identical to SEQ ID NO: 222114
  chr3:37083758-37083822
  hypo

SEQ ID NO: 430493 - DNA, 165 bp, Homo sapiens; identical to SEQ ID NO: 222115
  chr3:37089009-37089174
  hypo

SEQ ID NO: 430494 - DNA, 93 bp, Homo sapiens; identical to SEQ ID NO: 222116
  chr3:37090007-37090100
  hypo

SEQ ID NO: 430495 - DNA, 114 bp, Homo sapiens; identical to SEQ ID NO: 222117
  chr3:37090394-37090508
  hypo

SEQ ID NO: 430496 - DNA, 361 bp, Homo sapiens; identical to SEQ ID NO: 222118
  chr3:37091976-37092337
  hypo

SEQ ID NO: 430497 - DNA, 137 bp, Homo sapiens; identical to SEQ ID NO: 252152
  chr3:37144393-37144530
  hypo

SEQ ID NO: 430498 - DNA, 38 bp, Homo sapiens; identical to SEQ ID NO: 252153
  chr3:37214389-37214427
  hypo

SEQ ID NO: 430499 - DNA, 146 bp, Homo sapiens; identical to SEQ ID NO: 252155
  chr3:37649401-37649547
  hypo

SEQ ID NO: 430500 - DNA, 61 bp, Homo sapiens; identical to SEQ ID NO: 252156
  chr3:37774454-37774515
  hypo

SEQ ID NO: 430501 - DNA, 162 bp, Homo sapiens; identical to SEQ ID NO: 208820
  chr3:38017265-38017427
  hypo

SEQ ID NO: 430502 - DNA, 128 bp, Homo sapiens; identical to SEQ ID NO: 301448
  chr3:38030490-38030618
  hypo

SEQ ID NO: 430503 - DNA, 90 bp, Homo sapiens; identical to SEQ ID NO: 208822
  chr3:38030782-38030872
  hypo

SEQ ID NO: 430504 - DNA, 539 bp, Homo sapiens; identical to SEQ ID NO: 252160
  chr3:38033410-38033949
  hypo

SEQ ID NO: 430505 - DNA, 176 bp, Homo sapiens; identical to SEQ ID NO: 252161
  chr3:38051945-38052121
  hypo

SEQ ID NO: 430506 - DNA, 129 bp, Homo sapiens; identical to SEQ ID NO: 198883
  chr3:38182655-38182784
  hypo

SEQ ID NO: 430507 - DNA, 123 bp, Homo sapiens; identical to SEQ ID NO: 252162
  chr3:38217259-38217382
  hypo

SEQ ID NO: 430508 - DNA, 143 bp, Homo sapiens; identical to SEQ ID NO: 252163
  chr3:38323910-38324053
  hypo

SEQ ID NO: 430509 - DNA, 100 bp, Homo sapiens; identical to SEQ ID NO: 252164
  chr3:38413411-38413511
  hypo

SEQ ID NO: 430510 - DNA, 40 bp, Homo sapiens; identical to SEQ ID NO: 252165
  chr3:38413541-38413581
  hypo

SEQ ID NO: 430511 - DNA, 78 bp, Homo sapiens; identical to SEQ ID NO: 198884
  chr3:38495097-38495175
  hypo

SEQ ID NO: 430512 - DNA, 52 bp, Homo sapiens; identical to SEQ ID NO: 39102
  chr3:38495213-38495265
  hypo

SEQ ID NO: 430513 - DNA, 101 bp, Homo sapiens; identical to SEQ ID NO: 198886
  chr3:38495679-38495780
  hypo

SEQ ID NO: 430514 - DNA, 1234 bp, Homo sapiens; identical to SEQ ID NO: 198887
  chr3:38496021-38497255
  hypo

SEQ ID NO: 430515 - DNA, 177 bp, Homo sapiens; identical to SEQ ID NO: 252166
  chr3:38674620-38674797
  hypo

SEQ ID NO: 430516 - DNA, 91 bp, Homo sapiens; identical to SEQ ID NO: 252167
  chr3:38755471-38755562
  hypo

SEQ ID NO: 430517 - DNA, 57 bp, Homo sapiens; identical to SEQ ID NO: 252168
  chr3:38984804-38984861
  hypo

SEQ ID NO: 430518 - DNA, 277 bp, Homo sapiens; identical to SEQ ID NO: 222128
  chr3:39148232-39148509
  hypo

SEQ ID NO: 430519 - DNA, 106 bp, Homo sapiens; identical to SEQ ID NO: 208830
  chr3:39234910-39235016
  hypo

SEQ ID NO: 430520 - DNA, 45 bp, Homo sapiens; identical to SEQ ID NO: 208831
  chr3:40172135-40172180
  hypo

SEQ ID NO: 430521 - DNA, 68 bp, Homo sapiens; identical to SEQ ID NO: 208832
  chr3:40231758-40231826
  hypo

SEQ ID NO: 430522 - DNA, 104 bp, Homo sapiens; identical to SEQ ID NO: 252173
  chr3:40374174-40374278
  hypo

SEQ ID NO: 430523 - DNA, 381 bp, Homo sapiens; identical to SEQ ID NO: 252174
  chr3:40429457-40429838
  hypo

SEQ ID NO: 430524 - DNA, 153 bp, Homo sapiens; identical to SEQ ID NO: 208834
  chr3:40510132-40510285
  hypo

SEQ ID NO: 430525 - DNA, 190 bp, Homo sapiens; identical to SEQ ID NO: 208835
  chr3:41119485-41119675
  hypo

SEQ ID NO: 430526 - DNA, 171 bp, Homo sapiens; identical to SEQ ID NO: 252177
  chr3:41283296-41283467
  hypo

SEQ ID NO: 430527 - DNA, 42 bp, Homo sapiens; identical to SEQ ID NO: 252179
  chr3:42159859-42159901
  hypo

SEQ ID NO: 430528 - DNA, 251 bp, Homo sapiens; identical to SEQ ID NO: 252181
  chr3:42207053-42207304
  hypo

SEQ ID NO: 430529 - DNA, 96 bp, Homo sapiens; identical to SEQ ID NO: 252183
  chr3:42223003-42223099
  hypo

SEQ ID NO: 430530 - DNA, 133 bp, Homo sapiens; identical to SEQ ID NO: 252184
  chr3:42243987-42244120
  hypo

SEQ ID NO: 430531 - DNA, 62 bp, Homo sapiens; identical to SEQ ID NO: 252185
  chr3:42249920-42249982
  hypo

SEQ ID NO: 430532 - DNA, 88 bp, Homo sapiens; identical to SEQ ID NO: 252186
  chr3:42268588-42268676
  hypo

SEQ ID NO: 430533 - DNA, 37 bp, Homo sapiens; identical to SEQ ID NO: 252187
  chr3:42569053-42569090
  hypo

SEQ ID NO: 430534 - DNA, 104 bp, Homo sapiens; identical to SEQ ID NO: 208838
  chr3:42577666-42577770
  hypo

SEQ ID NO: 430535 - DNA, 87 bp, Homo sapiens; identical to SEQ ID NO: 252189
  chr3:42630386-42630473
  hypo

SEQ ID NO: 430536 - DNA, 39 bp, Homo sapiens; identical to SEQ ID NO: 208839
  chr3:42659548-42659587
  hypo

SEQ ID NO: 430537 - DNA, 382 bp, Homo sapiens; identical to SEQ ID NO: 198897
  chr3:42696177-42696559
  hypo

SEQ ID NO: 430538 - DNA, 71 bp, Homo sapiens; identical to SEQ ID NO: 252192
  chr3:42815889-42815960
  hypo

SEQ ID NO: 430539 - DNA, 71 bp, Homo sapiens; identical to SEQ ID NO: 301490
  chr3:42851033-42851104
  hypo

SEQ ID NO: 430540 - DNA, 45 bp, Homo sapiens; identical to SEQ ID NO: 252194
  chr3:42860055-42860100
  hypo

SEQ ID NO: 430541 - DNA, 73 bp, Homo sapiens; identical to SEQ ID NO: 208841
  chr3:42906566-42906639
  hypo

SEQ ID NO: 430542 - DNA, 44 bp, Homo sapiens; identical to SEQ ID NO: 208842
  chr3:43075000-43075044
  hypo

SEQ ID NO: 430543 - DNA, 99 bp, Homo sapiens; identical to SEQ ID NO: 252198
  chr3:43121444-43121543
  hypo

SEQ ID NO: 430544 - DNA, 110 bp, Homo sapiens; identical to SEQ ID NO: 208844
  chr3:43121573-43121683
  hypo

SEQ ID NO: 430545 - DNA, 214 bp, Homo sapiens; identical to SEQ ID NO: 198903
  chr3:43663334-43663548
  hypo

SEQ ID NO: 430546 - DNA, 34 bp, Homo sapiens; identical to SEQ ID NO: 252201
  chr3:44237214-44237248
  hypo

SEQ ID NO: 430547 - DNA, 384 bp, Homo sapiens; identical to SEQ ID NO: 252202
  chr3:44283269-44283653
  hypo

SEQ ID NO: 430548 - DNA, 50 bp, Homo sapiens; identical to SEQ ID NO: 198908
  chr3:44379864-44379914
  hypo

SEQ ID NO: 430549 - DNA, 153 bp, Homo sapiens; identical to SEQ ID NO: 252203
  chr3:44461798-44461951
  hypo

SEQ ID NO: 430550 - DNA, 232 bp, Homo sapiens; identical to SEQ ID NO: 281089
  chr3:44518642-44518874
  hypo

SEQ ID NO: 430551 - DNA, 291 bp, Homo sapiens; identical to SEQ ID NO: 252204
  chr3:44752300-44752591
  hypo

SEQ ID NO: 430552 - DNA, 805 bp, Homo sapiens; identical to SEQ ID NO: 222139
  chr3:44802848-44803653
  hypo

SEQ ID NO: 430553 - DNA, 37 bp, Homo sapiens; identical to SEQ ID NO: 252205
  chr3:44807340-44807377
  hypo

SEQ ID NO: 430554 - DNA, 37 bp, Homo sapiens; identical to SEQ ID NO: 208852
  chr3:44808574-44808611
  hypo

SEQ ID NO: 430555 - DNA, 210 bp, Homo sapiens; identical to SEQ ID NO: 208853
  chr3:44816761-44816971
  hypo

SEQ ID NO: 430556 - DNA, 76 bp, Homo sapiens; identical to SEQ ID NO: 208854
  chr3:44882438-44882514
  hypo

SEQ ID NO: 430557 - DNA, 152 bp, Homo sapiens; identical to SEQ ID NO: 301513
  chr3:45000029-45000181
  hypo

SEQ ID NO: 430558 - DNA, 91 bp, Homo sapiens; identical to SEQ ID NO: 252212
  chr3:45684621-45684712
  hypo

SEQ ID NO: 430559 - DNA, 43 bp, Homo sapiens; identical to SEQ ID NO: 208857
  chr3:45968554-45968597
  hypo

SEQ ID NO: 430560 - DNA, 42 bp, Homo sapiens; identical to SEQ ID NO: 208858
  chr3:45968717-45968759
  hypo

SEQ ID NO: 430561 - DNA, 86 bp, Homo sapiens; identical to SEQ ID NO: 252218
  chr3:46020639-46020725
  hypo

SEQ ID NO: 430562 - DNA, 226 bp, Homo sapiens; identical to SEQ ID NO: 252219
  chr3:46230413-46230639
  hypo

SEQ ID NO: 430563 - DNA, 76 bp, Homo sapiens; identical to SEQ ID NO: 301524
  chr3:46245385-46245461
  hypo

SEQ ID NO: 430564 - DNA, 102 bp, Homo sapiens; identical to SEQ ID NO: 252221
  chr3:46586214-46586316
  hypo

SEQ ID NO: 430565 - DNA, 36 bp, Homo sapiens; identical to SEQ ID NO: 252222
  chr3:46769541-46769577
  hypo

SEQ ID NO: 430566 - DNA, 35 bp, Homo sapiens; identical to SEQ ID NO: 252223
  chr3:46769817-46769852
  hypo

SEQ ID NO: 430567 - DNA, 54 bp, Homo sapiens; identical to SEQ ID NO: 252224
  chr3:46775530-46775584
  hypo

SEQ ID NO: 430568 - DNA, 352 bp, Homo sapiens; identical to SEQ ID NO: 252225
  chr3:46874965-46875317
  hypo

SEQ ID NO: 430569 - DNA, 195 bp, Homo sapiens; identical to SEQ ID NO: 208859
  chr3:46943639-46943834
  hypo

SEQ ID NO: 430570 - DNA, 182 bp, Homo sapiens; identical to SEQ ID NO: 252227
  chr3:46944572-46944754
  hypo

SEQ ID NO: 430571 - DNA, 31 bp, Homo sapiens; identical to SEQ ID NO: 208860
  chr3:46985694-46985725
  hypo

SEQ ID NO: 430572 - DNA, 159 bp, Homo sapiens; identical to SEQ ID NO: 208861
  chr3:46985755-46985914
  hypo

SEQ ID NO: 430573 - DNA, 38 bp, Homo sapiens; identical to SEQ ID NO: 208862
  chr3:47007698-47007736
  hypo

SEQ ID NO: 430574 - DNA, 199 bp, Homo sapiens; identical to SEQ ID NO: 252231
  chr3:47043982-47044181
  hypo

SEQ ID NO: 430575 - DNA, 78 bp, Homo sapiens; identical to SEQ ID NO: 222142
  chr3:47050739-47050817
  hypo

SEQ ID NO: 430576 - DNA, 80 bp, Homo sapiens; identical to SEQ ID NO: 108238
  chr3:47051151-47051231
  hypo

SEQ ID NO: 430577 - DNA, 36 bp, Homo sapiens; identical to SEQ ID NO: 252232
  chr3:47185204-47185240
  hypo

SEQ ID NO: 430578 - DNA, 36 bp, Homo sapiens; identical to SEQ ID NO: 252233
  chr3:47185480-47185516
  hypo

SEQ ID NO: 430579 - DNA, 32 bp, Homo sapiens; identical to SEQ ID NO: 252235
  chr3:47240137-47240169
  hypo

SEQ ID NO: 430580 - DNA, 120 bp, Homo sapiens; identical to SEQ ID NO: 252236
  chr3:47370605-47370725
  hypo

SEQ ID NO: 430581 - DNA, 138 bp, Homo sapiens; identical to SEQ ID NO: 252237
  chr3:47373436-47373574
  hypo

SEQ ID NO: 430582 - DNA, 96 bp, Homo sapiens; identical to SEQ ID NO: 252238
  chr3:47677842-47677938
  hypo

SEQ ID NO: 430583 - DNA, 81 bp, Homo sapiens; identical to SEQ ID NO: 208863
  chr3:47889946-47890027
  hypo

SEQ ID NO: 430584 - DNA, 581 bp, Homo sapiens; identical to SEQ ID NO: 281120
  chr3:47890801-47891382
  hypo

SEQ ID NO: 430585 - DNA, 89 bp, Homo sapiens; identical to SEQ ID NO: 252241
  chr3:48053067-48053156
  hypo

SEQ ID NO: 430586 - DNA, 168 bp, Homo sapiens; identical to SEQ ID NO: 208865
  chr3:48263634-48263802
  hypo

SEQ ID NO: 430587 - DNA, 32 bp, Homo sapiens; identical to SEQ ID NO: 208866
  chr3:48275732-48275764
  hypo

SEQ ID NO: 430588 - DNA, 35 bp, Homo sapiens; identical to SEQ ID NO: 252245
  chr3:48316727-48316762
  hypo

SEQ ID NO: 430589 - DNA, 76 bp, Homo sapiens; identical to SEQ ID NO: 252246
  chr3:48456672-48456748
  hypo

SEQ ID NO: 430590 - DNA, 257 bp, Homo sapiens; identical to SEQ ID NO: 252247
  chr3:48459418-48459675
  hypo

SEQ ID NO: 430591 - DNA, 70 bp, Homo sapiens; identical to SEQ ID NO: 252248
  chr3:48461257-48461327
  hypo

SEQ ID NO: 430592 - DNA, 296 bp, Homo sapiens; identical to SEQ ID NO: 208868
  chr3:48474263-48474559
  hypo

SEQ ID NO: 430593 - DNA, 187 bp, Homo sapiens; identical to SEQ ID NO: 252250
  chr3:48506154-48506341
  hypo

SEQ ID NO: 430594 - DNA, 84 bp, Homo sapiens; identical to SEQ ID NO: 208869
  chr3:48563029-48563113
  hypo

SEQ ID NO: 430595 - DNA, 132 bp, Homo sapiens; identical to SEQ ID NO: 252252
  chr3:48575984-48576116
  hypo

SEQ ID NO: 430596 - DNA, 39 bp, Homo sapiens; identical to SEQ ID NO: 208870
  chr3:48607711-48607750
  hypo

SEQ ID NO: 430597 - DNA, 106 bp, Homo sapiens; identical to SEQ ID NO: 252254
  chr3:48636553-48636659
  hypo

SEQ ID NO: 430598 - DNA, 76 bp, Homo sapiens; identical to SEQ ID NO: 252255
  chr3:48659179-48659255
  hypo

SEQ ID NO: 430599 - DNA, 257 bp, Homo sapiens; identical to SEQ ID NO: 198926
  chr3:48700956-48701213
  hypo

SEQ ID NO: 430600 - DNA, 40 bp, Homo sapiens; identical to SEQ ID NO: 252257
  chr3:48702183-48702223
  hypo

SEQ ID NO: 430601 - DNA, 73 bp, Homo sapiens; identical to SEQ ID NO: 301566
  chr3:48732603-48732676
  hypo

SEQ ID NO: 430602 - DNA, 35 bp, Homo sapiens; identical to SEQ ID NO: 208875
  chr3:48733584-48733619
  hypo

SEQ ID NO: 430603 - DNA, 31 bp, Homo sapiens; identical to SEQ ID NO: 252262
  chr3:48752182-48752213
  hypo

SEQ ID NO: 430604 - DNA, 39 bp, Homo sapiens; identical to SEQ ID NO: 252263
  chr3:48797086-48797125
  hypo

SEQ ID NO: 430605 - DNA, 34 bp, Homo sapiens; identical to SEQ ID NO: 252264
  chr3:48948535-48948569
  hypo

SEQ ID NO: 430606 - DNA, 120 bp, Homo sapiens; identical to SEQ ID NO: 252265
  chr3:48954852-48954972
  hypo

SEQ ID NO: 430607 - DNA, 33 bp, Homo sapiens; identical to SEQ ID NO: 252266
  chr3:48978307-48978340
  hypo

SEQ ID NO: 430608 - DNA, 31 bp, Homo sapiens; identical to SEQ ID NO: 208876
  chr3:48986829-48986860
  hypo

SEQ ID NO: 430609 - DNA, 120 bp, Homo sapiens; identical to SEQ ID NO: 252268
  chr3:49014624-49014744
  hypo

SEQ ID NO: 430610 - DNA, 85 bp, Homo sapiens; identical to SEQ ID NO: 208877
  chr3:49023684-49023769
  hypo

SEQ ID NO: 430611 - DNA, 323 bp, Homo sapiens; identical to SEQ ID NO: 208879
  chr3:49035605-49035928
  hypo

SEQ ID NO: 430612 - DNA, 42 bp, Homo sapiens; identical to SEQ ID NO: 208880
  chr3:49080008-49080050
  hypo

SEQ ID NO: 430613 - DNA, 180 bp, Homo sapiens; identical to SEQ ID NO: 208881
  chr3:49095131-49095311
  hypo

SEQ ID NO: 430614 - DNA, 31 bp, Homo sapiens; identical to SEQ ID NO: 252274
  chr3:49142764-49142795
  hypo

SEQ ID NO: 430615 - DNA, 32 bp, Homo sapiens; identical to SEQ ID NO: 208882
  chr3:49145906-49145938
  hypo

SEQ ID NO: 430616 - DNA, 31 bp, Homo sapiens; identical to SEQ ID NO: 208883
  chr3:49433706-49433737
  hypo

SEQ ID NO: 430617 - DNA, 32 bp, Homo sapiens; identical to SEQ ID NO: 252277
  chr3:49522230-49522262
  hypo

SEQ ID NO: 430618 - DNA, 36 bp, Homo sapiens; identical to SEQ ID NO: 208884
  chr3:49532336-49532372
  hypo

SEQ ID NO: 430619 - DNA, 368 bp, Homo sapiens; identical to SEQ ID NO: 281158
  chr3:49592076-49592444
  hypo

SEQ ID NO: 430620 - DNA, 97 bp, Homo sapiens; identical to SEQ ID NO: 252279
  chr3:49636112-49636209
  hypo

SEQ ID NO: 430621 - DNA, 181 bp, Homo sapiens; identical to SEQ ID NO: 208885
  chr3:49688341-49688522
  hypo

SEQ ID NO: 430622 - DNA, 117 bp, Homo sapiens; identical to SEQ ID NO: 208886
  chr3:49690065-49690182
  hypo

SEQ ID NO: 430623 - DNA, 57 bp, Homo sapiens; identical to SEQ ID NO: 208887
  chr3:49690212-49690269
  hypo

SEQ ID NO: 430624 - DNA, 57 bp, Homo sapiens; identical to SEQ ID NO: 252284
  chr3:49698935-49698992
  hypo

SEQ ID NO: 430625 - DNA, 210 bp, Homo sapiens; identical to SEQ ID NO: 252285
  chr3:49699563-49699773
  hypo

SEQ ID NO: 430626 - DNA, 159 bp, Homo sapiens; identical to SEQ ID NO: 301594
  chr3:49723051-49723210
  hypo

SEQ ID NO: 430627 - DNA, 233 bp, Homo sapiens; identical to SEQ ID NO: 208890
  chr3:49940594-49940827
  hypo

SEQ ID NO: 430628 - DNA, 226 bp, Homo sapiens; identical to SEQ ID NO: 208891
  chr3:49948218-49948444
  hypo

SEQ ID NO: 430629 - DNA, 100 bp, Homo sapiens; identical to SEQ ID NO: 252293
  chr3:50140300-50140400
  hypo

SEQ ID NO: 430630 - DNA, 39 bp, Homo sapiens; identical to SEQ ID NO: 252295
  chr3:50145392-50145431
  hypo

SEQ ID NO: 430631 - DNA, 114 bp, Homo sapiens; identical to SEQ ID NO: 198941
  chr3:50192966-50193080
  hypo

SEQ ID NO: 430632 - DNA, 42 bp, Homo sapiens; identical to SEQ ID NO: 252296
  chr3:50210490-50210532
  hypo

SEQ ID NO: 430633 - DNA, 126 bp, Homo sapiens; identical to SEQ ID NO: 252297
  chr3:50214171-50214297
  hypo

SEQ ID NO: 430634 - DNA, 57 bp, Homo sapiens; identical to SEQ ID NO: 208893
  chr3:50224043-50224100
  hypo

SEQ ID NO: 430635 - DNA, 48 bp, Homo sapiens; identical to SEQ ID NO: 252299
  chr3:50225313-50225361
  hypo

SEQ ID NO: 430636 - DNA, 458 bp, Homo sapiens; identical to SEQ ID NO: 252300
  chr3:50255800-50256258
  hypo

SEQ ID NO: 430637 - DNA, 57 bp, Homo sapiens; identical to SEQ ID NO: 252301
  chr3:50395835-50395892
  hypo

SEQ ID NO: 430638 - DNA, 133 bp, Homo sapiens; identical to SEQ ID NO: 252302
  chr3:50404009-50404142
  hypo

SEQ ID NO: 430639 - DNA, 40 bp, Homo sapiens; identical to SEQ ID NO: 252303
  chr3:50420382-50420422
  hypo

SEQ ID NO: 430640 - DNA, 53 bp, Homo sapiens; identical to SEQ ID NO: 252305
  chr3:50523258-50523311
  hypo

SEQ ID NO: 430641 - DNA, 31 bp, Homo sapiens; identical to SEQ ID NO: 301615
  chr3:50575571-50575602
  hypo

SEQ ID NO: 430642 - DNA, 84 bp, Homo sapiens; identical to SEQ ID NO: 252307
  chr3:50605776-50605860
  hypo

SEQ ID NO: 430643 - DNA, 38 bp, Homo sapiens; identical to SEQ ID NO: 252308
  chr3:51617714-51617752
  hypo

SEQ ID NO: 430644 - DNA, 37 bp, Homo sapiens; identical to SEQ ID NO: 252310
  chr3:51660728-51660765
  hypo

SEQ ID NO: 430645 - DNA, 119 bp, Homo sapiens; identical to SEQ ID NO: 252311
  chr3:51680379-51680498
  hypo

SEQ ID NO: 430646 - DNA, 107 bp, Homo sapiens; identical to SEQ ID NO: 252312
  chr3:51737837-51737944
  hypo

SEQ ID NO: 430647 - DNA, 241 bp, Homo sapiens; identical to SEQ ID NO: 252313
  chr3:51743195-51743436
  hypo

SEQ ID NO: 430648 - DNA, 175 bp, Homo sapiens; identical to SEQ ID NO: 252314
  chr3:51749174-51749349
  hypo

SEQ ID NO: 430649 - DNA, 206 bp, Homo sapiens; identical to SEQ ID NO: 252315
  chr3:51749768-51749974
  hypo

SEQ ID NO: 430650 - DNA, 66 bp, Homo sapiens; identical to SEQ ID NO: 208896
  chr3:51996783-51996849
  hypo

SEQ ID NO: 430651 - DNA, 195 bp, Homo sapiens; identical to SEQ ID NO: 198950
  chr3:52001297-52001492
  hypo

SEQ ID NO: 430652 - DNA, 485 bp, Homo sapiens; identical to SEQ ID NO: 281189
  chr3:52009693-52010178
  hypo

SEQ ID NO: 430653 - DNA, 166 bp, Homo sapiens; identical to SEQ ID NO: 208898
  chr3:52088124-52088290
  hypo

SEQ ID NO: 430654 - DNA, 202 bp, Homo sapiens; identical to SEQ ID NO: 252318
  chr3:52255938-52256140
  hypo

SEQ ID NO: 430655 - DNA, 115 bp, Homo sapiens; identical to SEQ ID NO: 252319
  chr3:52256498-52256613
  hypo

SEQ ID NO: 430656 - DNA, 282 bp, Homo sapiens; identical to SEQ ID NO: 208899
  chr3:52257379-52257661
  hypo

SEQ ID NO: 430657 - DNA, 133 bp, Homo sapiens; identical to SEQ ID NO: 252321
  chr3:52258190-52258323
  hypo

SEQ ID NO: 430658 - DNA, 36 bp, Homo sapiens; identical to SEQ ID NO: 208900
  chr3:52440357-52440393
  hypo

SEQ ID NO: 430659 - DNA, 286 bp, Homo sapiens; identical to SEQ ID NO: 252325
  chr3:52526249-52526535
  hypo

SEQ ID NO: 430660 - DNA, 303 bp, Homo sapiens; identical to SEQ ID NO: 252326
  chr3:52537789-52538092
  hypo

SEQ ID NO: 430661 - DNA, 422 bp, Homo sapiens; identical to SEQ ID NO: 252327
  chr3:52540175-52540597
  hypo

SEQ ID NO: 430662 - DNA, 45 bp, Homo sapiens; identical to SEQ ID NO: 301641
  chr3:52553162-52553207
  hypo

SEQ ID NO: 430663 - DNA, 53 bp, Homo sapiens; identical to SEQ ID NO: 208905
  chr3:52553499-52553552
  hypo

SEQ ID NO: 430664 - DNA, 113 bp, Homo sapiens; identical to SEQ ID NO: 252330
  chr3:52556286-52556399
  hypo

SEQ ID NO: 430665 - DNA, 59 bp, Homo sapiens; identical to SEQ ID NO: 301644
  chr3:52558899-52558958
  hypo

SEQ ID NO: 430666 - DNA, 132 bp, Homo sapiens; identical to SEQ ID NO: 301645
  chr3:52568498-52568630
  hypo

SEQ ID NO: 430667 - DNA, 267 bp, Homo sapiens; identical to SEQ ID NO: 301646
  chr3:52568668-52568935
  hypo

SEQ ID NO: 430668 - DNA, 49 bp, Homo sapiens; identical to SEQ ID NO: 301647
  chr3:52599767-52599816
  hypo

SEQ ID NO: 430669 - DNA, 75 bp, Homo sapiens; identical to SEQ ID NO: 252335
  chr3:52901657-52901732
  hypo

SEQ ID NO: 430670 - DNA, 139 bp, Homo sapiens; identical to SEQ ID NO: 208909
  chr3:53054013-53054152
  hypo

SEQ ID NO: 430671 - DNA, 124 bp, Homo sapiens; identical to SEQ ID NO: 208910
  chr3:53132045-53132169
  hypo

SEQ ID NO: 430672 - DNA, 147 bp, Homo sapiens; identical to SEQ ID NO: 222158
  chr3:53190592-53190739
  hypo

SEQ ID NO: 430673 - DNA, 201 bp, Homo sapiens; identical to SEQ ID NO: 252340
  chr3:53216915-53217116
  hypo

SEQ ID NO: 430674 - DNA, 111 bp, Homo sapiens; identical to SEQ ID NO: 208912
  chr3:53276152-53276263
  hypo

SEQ ID NO: 430675 - DNA, 229 bp, Homo sapiens; identical to SEQ ID NO: 281206
  chr3:53528643-53528872
  hypo

SEQ ID NO: 430676 - DNA, 98 bp, Homo sapiens; identical to SEQ ID NO: 252342
  chr3:53560156-53560254
  hypo

SEQ ID NO: 430677 - DNA, 202 bp, Homo sapiens; identical to SEQ ID NO: 252343
  chr3:53675067-53675269
  hypo

SEQ ID NO: 430678 - DNA, 34 bp, Homo sapiens; identical to SEQ ID NO: 208913
  chr3:53842746-53842780
  hypo

SEQ ID NO: 430679 - DNA, 43 bp, Homo sapiens; identical to SEQ ID NO: 252345
  chr3:53844088-53844131
  hypo

SEQ ID NO: 430680 - DNA, 227 bp, Homo sapiens; identical to SEQ ID NO: 252346
  chr3:53845189-53845416
  hypo

SEQ ID NO: 430681 - DNA, 59 bp, Homo sapiens; identical to SEQ ID NO: 208914
  chr3:53857419-53857478
  hypo

SEQ ID NO: 430682 - DNA, 79 bp, Homo sapiens; identical to SEQ ID NO: 252348
  chr3:53857925-53858004
  hypo

SEQ ID NO: 430683 - DNA, 147 bp, Homo sapiens; identical to SEQ ID NO: 252349
  chr3:54067944-54068091
  hypo

SEQ ID NO: 430684 - DNA, 35 bp, Homo sapiens
  chr3:54237861-54237896
  hypo
gtgtctgcttgctagggtctcagatttttataggc

SEQ ID NO: 430685 - DNA, 35 bp, Homo sapiens; identical to SEQ ID NO: 208916
  chr3:56093398-56093433
  hypo

SEQ ID NO: 430686 - DNA, 82 bp, Homo sapiens; identical to SEQ ID NO: 208917
  chr3:56691370-56691452
  hypo

SEQ ID NO: 430687 - DNA, 41 bp, Homo sapiens; identical to SEQ ID NO: 252355
  chr3:56792413-56792454
  hypo

SEQ ID NO: 430688 - DNA, 107 bp, Homo sapiens; identical to SEQ ID NO: 252356
  chr3:56840408-56840515
  hypo

SEQ ID NO: 430689 - DNA, 97 bp, Homo sapiens; identical to SEQ ID NO: 208920
  chr3:56882998-56883095
  hypo

SEQ ID NO: 430690 - DNA, 147 bp, Homo sapiens; identical to SEQ ID NO: 301677
  chr3:57040317-57040464
  hypo

SEQ ID NO: 430691 - DNA, 325 bp, Homo sapiens; identical to SEQ ID NO: 301678
  chr3:57040499-57040824
  hypo

SEQ ID NO: 430692 - DNA, 898 bp, Homo sapiens; identical to SEQ ID NO: 281220
  chr3:57112574-57113472
  hypo

SEQ ID NO: 430693 - DNA, 48 bp, Homo sapiens; identical to SEQ ID NO: 252360
  chr3:57117482-57117530
  hypo

SEQ ID NO: 430694 - DNA, 256 bp, Homo sapiens; identical to SEQ ID NO: 252361
  chr3:57131629-57131885
  hypo

SEQ ID NO: 430695 - DNA, 120 bp, Homo sapiens; identical to SEQ ID NO: 208925
  chr3:57529373-57529493
  hypo

SEQ ID NO: 430696 - DNA, 120 bp, Homo sapiens; identical to SEQ ID NO: 252363
  chr3:57536863-57536983
  hypo

SEQ ID NO: 430697 - DNA, 36 bp, Homo sapiens; identical to SEQ ID NO: 208926
  chr3:57539555-57539591
  hypo

SEQ ID NO: 430698 - DNA, 44 bp, Homo sapiens; identical to SEQ ID NO: 252365
  chr3:57544223-57544267
  hypo

SEQ ID NO: 430699 - DNA, 180 bp, Homo sapiens; identical to SEQ ID NO: 252366
  chr3:57544507-57544687
  hypo

SEQ ID NO: 430700 - DNA, 39 bp, Homo sapiens; identical to SEQ ID NO: 252368
  chr3:57674950-57674989
  hypo

SEQ ID NO: 430701 - DNA, 93 bp, Homo sapiens; identical to SEQ ID NO: 208929
  chr3:57906367-57906460
  hypo

SEQ ID NO: 430702 - DNA, 144 bp, Homo sapiens; identical to SEQ ID NO: 252372
  chr3:58090180-58090324
  hypo

SEQ ID NO: 430703 - DNA, 136 bp, Homo sapiens; identical to SEQ ID NO: 208930
  chr3:58109087-58109223
  hypo

SEQ ID NO: 430704 - DNA, 84 bp, Homo sapiens; identical to SEQ ID NO: 252376
  chr3:58652283-58652367
  hypo

SEQ ID NO: 430705 - DNA, 37 bp, Homo sapiens; identical to SEQ ID NO: 252377
  chr3:59041984-59042021
  hypo

SEQ ID NO: 430706 - DNA, 384 bp, Homo sapiens; identical to SEQ ID NO: 396407
  chr3:61546308-61546692
  hypo

SEQ ID NO: 430707 - DNA, 90 bp, Homo sapiens; identical to SEQ ID NO: 198973
  chr3:61656126-61656216
  hypo

SEQ ID NO: 430708 - DNA, 92 bp, Homo sapiens; identical to SEQ ID NO: 252378
  chr3:63082429-63082521
  hypo

SEQ ID NO: 430709 - DNA, 123 bp, Homo sapiens; identical to SEQ ID NO: 252379
  chr3:64142936-64143059
  hypo

SEQ ID NO: 430710 - DNA, 139 bp, Homo sapiens; identical to SEQ ID NO: 252380
  chr3:64317485-64317624
  hypo

SEQ ID NO: 430711 - DNA, 337 bp, Homo sapiens; identical to SEQ ID NO: 208932
  chr3:64547143-64547480
  hypo

SEQ ID NO: 430712 - DNA, 155 bp, Homo sapiens; identical to SEQ ID NO: 208934
  chr3:65364855-65365010
  hypo

SEQ ID NO: 430713 - DNA, 241 bp, Homo sapiens; identical to SEQ ID NO: 252383
  chr3:65368390-65368631
  hypo

SEQ ID NO: 430714 - DNA, 39 bp, Homo sapiens; identical to SEQ ID NO: 208935
  chr3:65435159-65435198
  hypo

SEQ ID NO: 430715 - DNA, 83 bp, Homo sapiens; identical to SEQ ID NO: 208937
  chr3:66053363-66053446
  hypo

SEQ ID NO: 430716 - DNA, 103 bp, Homo sapiens; identical to SEQ ID NO: 208938
  chr3:66053766-66053869
  hypo

SEQ ID NO: 430717 - DNA, 254 bp, Homo sapiens; identical to SEQ ID NO: 252387
  chr3:66423428-66423682
  hypo

SEQ ID NO: 430718 - DNA, 134 bp, Homo sapiens; identical to SEQ ID NO: 252389
  chr3:66455988-66456122
  hypo

SEQ ID NO: 430719 - DNA, 51 bp, Homo sapiens; identical to SEQ ID NO: 252390
  chr3:66460441-66460492
  hypo

SEQ ID NO: 430720 - DNA, 96 bp, Homo sapiens; identical to SEQ ID NO: 252391
  chr3:66461118-66461214
  hypo

SEQ ID NO: 430721 - DNA, 196 bp, Homo sapiens; identical to SEQ ID NO: 208940
  chr3:66482908-66483104
  hypo

SEQ ID NO: 430722 - DNA, 178 bp, Homo sapiens; identical to SEQ ID NO: 252393
  chr3:66521940-66522118
  hypo

SEQ ID NO: 430723 - DNA, 155 bp, Homo sapiens; identical to SEQ ID NO: 252394
  chr3:66852898-66853053
  hypo

SEQ ID NO: 430724 - DNA, 43 bp, Homo sapiens; identical to SEQ ID NO: 252395
  chr3:67079756-67079799
  hypo

SEQ ID NO: 430725 - DNA, 158 bp, Homo sapiens; identical to SEQ ID NO: 198993
  chr3:69062098-69062256
  hypo

SEQ ID NO: 430726 - DNA, 136 bp, Homo sapiens; identical to SEQ ID NO: 252397
  chr3:69230707-69230843
  hypo

SEQ ID NO: 430727 - DNA, 76 bp, Homo sapiens; identical to SEQ ID NO: 208944
  chr3:69309454-69309530
  hypo

SEQ ID NO: 430728 - DNA, 36 bp, Homo sapiens; identical to SEQ ID NO: 252399
  chr3:69585561-69585597
  hypo

SEQ ID NO: 430729 - DNA, 180 bp, Homo sapiens; identical to SEQ ID NO: 252400
  chr3:69589306-69589486
  hypo

SEQ ID NO: 430730 - DNA, 81 bp, Homo sapiens; identical to SEQ ID NO: 252401
  chr3:69928166-69928247
  hypo

SEQ ID NO: 430731 - DNA, 86 bp, Homo sapiens; identical to SEQ ID NO: 252403
  chr3:69970991-69971077
  hypo

SEQ ID NO: 430732 - DNA, 368 bp, Homo sapiens; identical to SEQ ID NO: 252404
  chr3:69986972-69987340
  hypo

SEQ ID NO: 430733 - DNA, 49 bp, Homo sapiens; identical to SEQ ID NO: 252405
  chr3:70008507-70008556
  hypo

SEQ ID NO: 430734 - DNA, 40 bp, Homo sapiens; identical to SEQ ID NO: 252406
  chr3:70901512-70901552
  hypo

SEQ ID NO: 430735 - DNA, 118 bp, Homo sapiens; identical to SEQ ID NO: 252407
  chr3:71019767-71019885
  hypo

SEQ ID NO: 430736 - DNA, 270 bp, Homo sapiens; identical to SEQ ID NO: 208950
  chr3:71049502-71049772
  hypo

SEQ ID NO: 430737 - DNA, 449 bp, Homo sapiens; identical to SEQ ID NO: 252410
  chr3:71119374-71119823
  hypo

SEQ ID NO: 430738 - DNA, 77 bp, Homo sapiens; identical to SEQ ID NO: 252411
  chr3:71120998-71121075
  hypo

SEQ ID NO: 430739 - DNA, 454 bp, Homo sapiens; identical to SEQ ID NO: 252412
  chr3:71163557-71164011
  hypo

SEQ ID NO: 430740 - DNA, 109 bp, Homo sapiens; identical to SEQ ID NO: 252414
  chr3:71218264-71218373
  hypo

SEQ ID NO: 430741 - DNA, 77 bp, Homo sapiens; identical to SEQ ID NO: 252415
  chr3:71247380-71247457
  hypo

SEQ ID NO: 430742 - DNA, 56 bp, Homo sapiens; identical to SEQ ID NO: 252416
  chr3:71307162-71307218
  hypo

SEQ ID NO: 430743 - DNA, 185 bp, Homo sapiens; identical to SEQ ID NO: 208953
  chr3:71357101-71357286
  hypo

SEQ ID NO: 430744 - DNA, 152 bp, Homo sapiens; identical to SEQ ID NO: 208954
  chr3:71366445-71366597
  hypo

SEQ ID NO: 430745 - DNA, 80 bp, Homo sapiens; identical to SEQ ID NO: 252419
  chr3:71408816-71408896
  hypo

SEQ ID NO: 430746 - DNA, 285 bp, Homo sapiens; identical to SEQ ID NO: 208955
  chr3:71410779-71411064
  hypo

SEQ ID NO: 430747 - DNA, 118 bp, Homo sapiens; identical to SEQ ID NO: 252421
  chr3:71451127-71451245
  hypo

SEQ ID NO: 430748 - DNA, 65 bp, Homo sapiens; identical to SEQ ID NO: 252422
  chr3:71496761-71496826
  hypo

SEQ ID NO: 430749 - DNA, 93 bp, Homo sapiens; identical to SEQ ID NO: 252423
  chr3:71533900-71533993
  hypo

SEQ ID NO: 430750 - DNA, 56 bp, Homo sapiens; identical to SEQ ID NO: 252424
  chr3:71563898-71563954
  hypo

SEQ ID NO: 430751 - DNA, 43 bp, Homo sapiens; identical to SEQ ID NO: 252425
  chr3:71581510-71581553
  hypo

SEQ ID NO: 430752 - DNA, 38 bp, Homo sapiens; identical to SEQ ID NO: 281282
  chr3:71833528-71833566
  hypo

SEQ ID NO: 430753 - DNA, 225 bp, Homo sapiens; identical to SEQ ID NO: 281283
  chr3:71833751-71833976
  hypo

SEQ ID NO: 430754 - DNA, 115 bp, Homo sapiens; identical to SEQ ID NO: 252426
  chr3:72192477-72192592
  hypo

SEQ ID NO: 430755 - DNA, 272 bp, Homo sapiens; identical to SEQ ID NO: 222183
  chr3:72496511-72496783
  hypo

SEQ ID NO: 430756 - DNA, 38 bp, Homo sapiens; identical to SEQ ID NO: 252428
  chr3:72506011-72506049
  hypo

SEQ ID NO: 430757 - DNA, 98 bp, Homo sapiens; identical to SEQ ID NO: 252430
  chr3:72680453-72680551
  hypo

SEQ ID NO: 430758 - DNA, 41 bp, Homo sapiens; identical to SEQ ID NO: 252432
  chr3:72773317-72773358
  hypo

SEQ ID NO: 430759 - DNA, 241 bp, Homo sapiens; identical to SEQ ID NO: 252433
  chr3:72778073-72778314
  hypo

SEQ ID NO: 430760 - DNA, 84 bp, Homo sapiens; identical to SEQ ID NO: 252434
  chr3:72795276-72795360
  hypo

SEQ ID NO: 430761 - DNA, 152 bp, Homo sapiens; identical to SEQ ID NO: 208959
  chr3:72877846-72877998
  hypo

SEQ ID NO: 430762 - DNA, 31 bp, Homo sapiens; identical to SEQ ID NO: 252436
  chr3:72964698-72964729
  hypo

SEQ ID NO: 430763 - DNA, 45 bp, Homo sapiens; identical to SEQ ID NO: 403634
  chr3:73045686-73045731
  hypo

SEQ ID NO: 430764 - DNA, 818 bp, Homo sapiens; identical to SEQ ID NO: 252439
  chr3:73433224-73434042
  hypo

SEQ ID NO: 430765 - DNA, 391 bp, Homo sapiens; identical to SEQ ID NO: 222184
  chr3:73673262-73673653
  hypo

SEQ ID NO: 430766 - DNA, 448 bp, Homo sapiens; identical to SEQ ID NO: 281292
  chr3:74663366-74663814
  hypo

SEQ ID NO: 430767 - DNA, 92 bp, Homo sapiens; identical to SEQ ID NO: 252440
  chr3:77427993-77428085
  hypo

SEQ ID NO: 430768 - DNA, 198 bp, Homo sapiens; identical to SEQ ID NO: 252441
  chr3:82247999-82248197
  hypo

SEQ ID NO: 430769 - DNA, 40 bp, Homo sapiens; identical to SEQ ID NO: 252442
  chr3:84175659-84175699
  hypo

SEQ ID NO: 430770 - DNA, 42 bp, Homo sapiens; identical to SEQ ID NO: 252445
  chr3:87652052-87652094
  hypo

SEQ ID NO: 430771 - DNA, 36 bp, Homo sapiens; identical to SEQ ID NO: 208963
  chr3:87737840-87737876
  hypo

SEQ ID NO: 430772 - DNA, 53 bp, Homo sapiens; identical to SEQ ID NO: 252447
  chr3:88098566-88098619
  hypo

SEQ ID NO: 430773 - DNA, 77 bp, Homo sapiens; identical to SEQ ID NO: 252448
  chr3:88098649-88098726
  hypo

SEQ ID NO: 430774 - DNA, 38 bp, Homo sapiens; identical to SEQ ID NO: 208964
  chr3:93697929-93697967
  hypo

SEQ ID NO: 430775 - DNA, 155 bp, Homo sapiens; identical to SEQ ID NO: 208965
  chr3:93707709-93707864
  hypo

SEQ ID NO: 430776 - DNA, 78 bp, Homo sapiens; identical to SEQ ID NO: 252452
  chr3:93780314-93780392
  hypo

SEQ ID NO: 430777 - DNA, 84 bp, Homo sapiens; identical to SEQ ID NO: 252453
  chr3:94174884-94174968
  hypo

SEQ ID NO: 430778 - DNA, 112 bp, Homo sapiens; identical to SEQ ID NO: 208966
  chr3:94656925-94657037
  hypo

SEQ ID NO: 430779 - DNA, 108 bp, Homo sapiens; identical to SEQ ID NO: 252455
  chr3:96984570-96984678
  hypo

SEQ ID NO: 430780 - DNA, 37 bp, Homo sapiens; identical to SEQ ID NO: 252456
  chr3:97473826-97473863
  hypo

SEQ ID NO: 430781 - DNA, 271 bp, Homo sapiens; identical to SEQ ID NO: 222186
  chr3:97690771-97691042
  hypo

SEQ ID NO: 430782 - DNA, 105 bp, Homo sapiens; identical to SEQ ID NO: 208968
  chr3:97744980-97745085
  hypo

SEQ ID NO: 430783 - DNA, 45 bp, Homo sapiens; identical to SEQ ID NO: 252458
  chr3:98290224-98290269
  hypo

SEQ ID NO: 430784 - DNA, 82 bp, Homo sapiens; identical to SEQ ID NO: 252459
  chr3:98304459-98304541
  hypo

SEQ ID NO: 430785 - DNA, 86 bp, Homo sapiens; identical to SEQ ID NO: 208971
  chr3:99944288-99944374
  hypo

SEQ ID NO: 430786 - DNA, 184 bp, Homo sapiens; identical to SEQ ID NO: 252461
  chr3:100329428-100329612
  hypo

SEQ ID NO: 430787 - DNA, 45 bp, Homo sapiens; identical to SEQ ID NO: 252462
  chr3:100796978-100797023
  hypo

SEQ ID NO: 430788 - DNA, 127 bp, Homo sapiens; identical to SEQ ID NO: 252464
  chr3:100998459-100998586
  hypo

SEQ ID NO: 430789 - DNA, 153 bp, Homo sapiens; identical to SEQ ID NO: 301806
  chr3:101021637-101021790
  hypo

SEQ ID NO: 430790 - DNA, 149 bp, Homo sapiens; identical to SEQ ID NO: 208972
  chr3:101157528-101157677
  hypo

SEQ ID NO: 430791 - DNA, 981 bp, Homo sapiens; identical to SEQ ID NO: 199027
  chr3:101231399-101232380
  hypo

SEQ ID NO: 430792 - DNA, 81 bp, Homo sapiens; identical to SEQ ID NO: 252468
  chr3:101232951-101233032
  hypo

SEQ ID NO: 430793 - DNA, 120 bp, Homo sapiens; identical to SEQ ID NO: 252469
  chr3:101393171-101393291
  hypo

SEQ ID NO: 430794 - DNA, 37 bp, Homo sapiens; identical to SEQ ID NO: 252471
  chr3:101441002-101441039
  hypo

SEQ ID NO: 430795 - DNA, 43 bp, Homo sapiens; identical to SEQ ID NO: 208976
  chr3:101575167-101575210
  hypo

SEQ ID NO: 430796 - DNA, 262 bp, Homo sapiens; identical to SEQ ID NO: 252473
  chr3:101588885-101589147
  hypo

SEQ ID NO: 430797 - DNA, 196 bp, Homo sapiens; identical to SEQ ID NO: 252474
  chr3:105444398-105444594
  hypo

SEQ ID NO: 430798 - DNA, 173 bp, Homo sapiens; identical to SEQ ID NO: 252475
  chr3:106350366-106350539
  hypo

SEQ ID NO: 430799 - DNA, 377 bp, Homo sapiens; identical to SEQ ID NO: 281356
  chr3:107244663-107245040
  hypo

SEQ ID NO: 430800 - DNA, 43 bp, Homo sapiens; identical to SEQ ID NO: 252480
  chr3:107552852-107552895
  hypo

SEQ ID NO: 430801 - DNA, 84 bp, Homo sapiens; identical to SEQ ID NO: 252481
  chr3:107750328-107750412
  hypo

SEQ ID NO: 430802 - DNA, 55 bp, Homo sapiens; identical to SEQ ID NO: 252483
  chr3:107832937-107832992
  hypo

SEQ ID NO: 430803 - DNA, 239 bp, Homo sapiens; identical to SEQ ID NO: 252484
  chr3:108836864-108837103
  hypo

SEQ ID NO: 430804 - DNA, 92 bp, Homo sapiens; identical to SEQ ID NO: 252485
  chr3:109035085-109035177
  hypo

SEQ ID NO: 430805 - DNA, 69 bp, Homo sapiens; identical to SEQ ID NO: 208981
  chr3:109035957-109036026
  hypo

SEQ ID NO: 430806 - DNA, 145 bp, Homo sapiens; identical to SEQ ID NO: 208982
  chr3:109061756-109061901
  hypo

SEQ ID NO: 430807 - DNA, 142 bp, Homo sapiens; identical to SEQ ID NO: 252488
  chr3:109128854-109128996
  hypo

SEQ ID NO: 430808 - DNA, 123 bp, Homo sapiens; identical to SEQ ID NO: 199038
  chr3:111393432-111393555
  hypo

SEQ ID NO: 430809 - DNA, 120 bp, Homo sapiens; identical to SEQ ID NO: 208984
  chr3:112207345-112207465
  hypo

SEQ ID NO: 430810 - DNA, 41 bp, Homo sapiens; identical to SEQ ID NO: 252490
  chr3:112249242-112249283
  hypo

SEQ ID NO: 430811 - DNA, 154 bp, Homo sapiens; identical to SEQ ID NO: 252491
  chr3:112357813-112357967
  hypo

SEQ ID NO: 430812 - DNA, 38 bp, Homo sapiens; identical to SEQ ID NO: 208985
  chr3:112543790-112543828
  hypo

SEQ ID NO: 430813 - DNA, 292 bp, Homo sapiens; identical to SEQ ID NO: 281372
  chr3:112931274-112931566
  hypo

SEQ ID NO: 430814 - DNA, 111 bp, Homo sapiens; identical to SEQ ID NO: 252493
  chr3:113159894-113160005
  hypo

SEQ ID NO: 430815 - DNA, 252 bp, Homo sapiens; identical to SEQ ID NO: 281376
  chr3:113557555-113557807
  hypo

SEQ ID NO: 430816 - DNA, 252 bp, Homo sapiens; identical to SEQ ID NO: 252494
  chr3:113957889-113958141
  hypo

SEQ ID NO: 430817 - DNA, 40 bp, Homo sapiens; identical to SEQ ID NO: 301846
  chr3:118864573-118864613
  hypo

SEQ ID NO: 430818 - DNA, 38 bp, Homo sapiens; identical to SEQ ID NO: 208993
  chr3:119011022-119011060
  hypo

SEQ ID NO: 430819 - DNA, 96 bp, Homo sapiens; identical to SEQ ID NO: 252498
  chr3:119342487-119342583
  hypo

SEQ ID NO: 430820 - DNA, 44 bp, Homo sapiens; identical to SEQ ID NO: 252499
  chr3:119432910-119432954
  hypo

SEQ ID NO: 430821 - DNA, 42 bp, Homo sapiens; identical to SEQ ID NO: 208994
  chr3:119517358-119517400
  hypo

SEQ ID NO: 430822 - DNA, 31 bp, Homo sapiens; identical to SEQ ID NO: 252502
  chr3:119827279-119827310
  hypo

SEQ ID NO: 430823 - DNA, 141 bp, Homo sapiens; identical to SEQ ID NO: 252503
  chr3:120023463-120023604
  hypo

SEQ ID NO: 430824 - DNA, 158 bp, Homo sapiens; identical to SEQ ID NO: 252504
  chr3:120064577-120064735
  hypo

SEQ ID NO: 430825 - DNA, 41 bp, Homo sapiens; identical to SEQ ID NO: 252505
  chr3:120150381-120150422
  hypo

SEQ ID NO: 430826 - DNA, 101 bp, Homo sapiens; identical to SEQ ID NO: 252506
  chr3:120150482-120150583
  hypo

SEQ ID NO: 430827 - DNA, 38 bp, Homo sapiens; identical to SEQ ID NO: 252507
  chr3:120313290-120313328
  hypo

SEQ ID NO: 430828 - DNA, 182 bp, Homo sapiens; identical to SEQ ID NO: 208997
  chr3:121438459-121438641
  hypo

SEQ ID NO: 430829 - DNA, 33 bp, Homo sapiens; identical to SEQ ID NO: 252515
  chr3:121638472-121638505
  hypo

SEQ ID NO: 430830 - DNA, 240 bp, Homo sapiens; identical to SEQ ID NO: 209001
  chr3:122003336-122003576
  hypo

SEQ ID NO: 430831 - DNA, 45 bp, Homo sapiens; identical to SEQ ID NO: 209002
  chr3:122231267-122231312
  hypo

SEQ ID NO: 430832 - DNA, 57 bp, Homo sapiens; identical to SEQ ID NO: 252519
  chr3:122355300-122355357
  hypo

SEQ ID NO: 430833 - DNA, 180 bp, Homo sapiens; identical to SEQ ID NO: 209003
  chr3:122451547-122451727
  hypo

SEQ ID NO: 430834 - DNA, 636 bp, Homo sapiens; identical to SEQ ID NO: 281409
  chr3:122513919-122514555
  hypo

SEQ ID NO: 430835 - DNA, 69 bp, Homo sapiens; identical to SEQ ID NO: 209005
  chr3:122573579-122573648
  hypo

SEQ ID NO: 430836 - DNA, 31 bp, Homo sapiens; identical to SEQ ID NO: 252522
  chr3:122573970-122574001
  hypo

SEQ ID NO: 430837 - DNA, 163 bp, Homo sapiens; identical to SEQ ID NO: 199063
  chr3:122785820-122785983
  hypo

SEQ ID NO: 430838 - DNA, 455 bp, Homo sapiens; identical to SEQ ID NO: 209007
  chr3:123166198-123166653
  hypo

SEQ ID NO: 430839 - DNA, 42 bp, Homo sapiens; identical to SEQ ID NO: 252525
  chr3:123200212-123200254
  hypo

SEQ ID NO: 430840 - DNA, 81 bp, Homo sapiens; identical to SEQ ID NO: 209009
  chr3:123340748-123340829
  hypo

SEQ ID NO: 430841 - DNA, 181 bp, Homo sapiens; identical to SEQ ID NO: 252527
  chr3:123456130-123456311
  hypo

SEQ ID NO: 430842 - DNA, 253 bp, Homo sapiens; identical to SEQ ID NO: 252529
  chr3:123813450-123813703
  hypo

SEQ ID NO: 430843 - DNA, 345 bp, Homo sapiens; identical to SEQ ID NO: 252530
  chr3:124103487-124103832
  hypo

SEQ ID NO: 430844 - DNA, 94 bp, Homo sapiens; identical to SEQ ID NO: 209012
  chr3:124126552-124126646
  hypo

SEQ ID NO: 430845 - DNA, 95 bp, Homo sapiens; identical to SEQ ID NO: 209014
  chr3:124436154-124436249
  hypo

SEQ ID NO: 430846 - DNA, 84 bp, Homo sapiens; identical to SEQ ID NO: 252534
  chr3:124465924-124466008
  hypo

SEQ ID NO: 430847 - DNA, 203 bp, Homo sapiens; identical to SEQ ID NO: 252535
  chr3:124466068-124466271
  hypo

SEQ ID NO: 430848 - DNA, 193 bp, Homo sapiens; identical to SEQ ID NO: 209015
  chr3:124518663-124518856
  hypo

SEQ ID NO: 430849 - DNA, 523 bp, Homo sapiens; identical to SEQ ID NO: 281420
  chr3:124605380-124605903
  hypo

SEQ ID NO: 430850 - DNA, 185 bp, Homo sapiens; identical to SEQ ID NO: 209017
  chr3:124885658-124885843
  hypo

SEQ ID NO: 430851 - DNA, 110 bp, Homo sapiens; identical to SEQ ID NO: 209019
  chr3:125078701-125078811
  hypo

SEQ ID NO: 430852 - DNA, 39 bp, Homo sapiens; identical to SEQ ID NO: 252542
  chr3:125210665-125210704
  hypo

SEQ ID NO: 430853 - DNA, 149 bp, Homo sapiens; identical to SEQ ID NO: 209020
  chr3:125261068-125261217
  hypo

SEQ ID NO: 430854 - DNA, 31 bp, Homo sapiens; identical to SEQ ID NO: 252544
  chr3:125321256-125321287
  hypo

SEQ ID NO: 430855 - DNA, 43 bp, Homo sapiens; identical to SEQ ID NO: 252545
  chr3:125411624-125411667
  hypo

SEQ ID NO: 430856 - DNA, 32 bp, Homo sapiens; identical to SEQ ID NO: 252546
  chr3:125412960-125412992
  hypo

SEQ ID NO: 430857 - DNA, 120 bp, Homo sapiens; identical to SEQ ID NO: 252547
  chr3:125477671-125477791
  hypo

SEQ ID NO: 430858 - DNA, 42 bp, Homo sapiens; identical to SEQ ID NO: 252548
  chr3:125678379-125678421
  hypo

SEQ ID NO: 430859 - DNA, 170 bp, Homo sapiens; identical to SEQ ID NO: 252549
  chr3:125679708-125679878
  hypo

SEQ ID NO: 430860 - DNA, 186 bp, Homo sapiens; identical to SEQ ID NO: 252550
  chr3:125774553-125774739
  hypo

SEQ ID NO: 430861 - DNA, 34 bp, Homo sapiens; identical to SEQ ID NO: 252551
  chr3:125793294-125793328
  hypo

SEQ ID NO: 430862 - DNA, 93 bp, Homo sapiens; identical to SEQ ID NO: 252552
  chr3:125793388-125793481
  hypo

SEQ ID NO: 430863 - DNA, 114 bp, Homo sapiens; identical to SEQ ID NO: 252553
  chr3:125826120-125826234
  hypo

SEQ ID NO: 430864 - DNA, 55 bp, Homo sapiens; identical to SEQ ID NO: 252554
  chr3:125875512-125875567
  hypo

SEQ ID NO: 430865 - DNA, 189 bp, Homo sapiens; identical to SEQ ID NO: 252555
  chr3:125977272-125977461
  hypo

SEQ ID NO: 430866 - DNA, 361 bp, Homo sapiens; identical to SEQ ID NO: 281430
  chr3:126074822-126075183
  hypo

SEQ ID NO: 430867 - DNA, 36 bp, Homo sapiens; identical to SEQ ID NO: 252557
  chr3:126137173-126137209
  hypo

SEQ ID NO: 430868 - DNA, 109 bp, Homo sapiens; identical to SEQ ID NO: 301913
  chr3:126157663-126157772
  hypo

SEQ ID NO: 430869 - DNA, 318 bp, Homo sapiens; identical to SEQ ID NO: 281433
  chr3:126195083-126195401
  hypo

SEQ ID NO: 430870 - DNA, 38 bp, Homo sapiens; identical to SEQ ID NO: 252559
  chr3:126195713-126195751
  hypo

SEQ ID NO: 430871 - DNA, 87 bp, Homo sapiens; identical to SEQ ID NO: 209021
  chr3:126218194-126218281
  hypo

SEQ ID NO: 430872 - DNA, 272 bp, Homo sapiens; identical to SEQ ID NO: 252561
  chr3:126253863-126254135
  hypo

SEQ ID NO: 430873 - DNA, 152 bp, Homo sapiens; identical to SEQ ID NO: 209022
  chr3:126254315-126254467
  hypo

SEQ ID NO: 430874 - DNA, 158 bp, Homo sapiens; identical to SEQ ID NO: 252564
  chr3:126274128-126274286
  hypo

SEQ ID NO: 430875 - DNA, 266 bp, Homo sapiens; identical to SEQ ID NO: 252565
  chr3:126439995-126440261
  hypo

SEQ ID NO: 430876 - DNA, 53 bp, Homo sapiens; identical to SEQ ID NO: 252566
  chr3:126465315-126465368
  hypo

SEQ ID NO: 430877 - DNA, 83 bp, Homo sapiens; identical to SEQ ID NO: 252568
  chr3:126501195-126501278
  hypo

SEQ ID NO: 430878 - DNA, 64 bp, Homo sapiens; identical to SEQ ID NO: 252569
  chr3:126516696-126516760
  hypo

SEQ ID NO: 430879 - DNA, 422 bp, Homo sapiens; identical to SEQ ID NO: 209025
  chr3:126577518-126577940
  hypo

SEQ ID NO: 430880 - DNA, 164 bp, Homo sapiens; identical to SEQ ID NO: 209026
  chr3:126676242-126676406
  hypo

SEQ ID NO: 430881 - DNA, 117 bp, Homo sapiens; identical to SEQ ID NO: 252572
  chr3:126707399-126707516
  hypo

SEQ ID NO: 430882 - DNA, 402 bp, Homo sapiens; identical to SEQ ID NO: 209027
  chr3:126724696-126725098
  hypo

SEQ ID NO: 430883 - DNA, 328 bp, Homo sapiens; identical to SEQ ID NO: 252574
  chr3:126730805-126731133
  hypo

SEQ ID NO: 430884 - DNA, 64 bp, Homo sapiens; identical to SEQ ID NO: 252575
  chr3:126736637-126736701
  hypo

SEQ ID NO: 430885 - DNA, 181 bp, Homo sapiens; identical to SEQ ID NO: 252576
  chr3:126747049-126747230
  hypo

SEQ ID NO: 430886 - DNA, 84 bp, Homo sapiens; identical to SEQ ID NO: 252578
  chr3:126796239-126796323
  hypo

SEQ ID NO: 430887 - DNA, 168 bp, Homo sapiens; identical to SEQ ID NO: 209029
  chr3:126894145-126894313
  hypo

SEQ ID NO: 430888 - DNA, 158 bp, Homo sapiens; identical to SEQ ID NO: 252580
  chr3:127285885-127286043
  hypo

SEQ ID NO: 430889 - DNA, 219 bp, Homo sapiens; identical to SEQ ID NO: 252581
  chr3:127286318-127286537
  hypo

SEQ ID NO: 430890 - DNA, 79 bp, Homo sapiens; identical to SEQ ID NO: 209030
  chr3:127292370-127292449
  hypo

SEQ ID NO: 430891 - DNA, 284 bp, Homo sapiens; identical to SEQ ID NO: 252583
  chr3:127325614-127325898
  hypo

SEQ ID NO: 430892 - DNA, 207 bp, Homo sapiens; identical to SEQ ID NO: 199079
  chr3:127348123-127348330
  hypo

SEQ ID NO: 430893 - DNA, 203 bp, Homo sapiens; identical to SEQ ID NO: 252585
  chr3:127349664-127349867
  hypo

SEQ ID NO: 430894 - DNA, 268 bp, Homo sapiens; identical to SEQ ID NO: 252586
  chr3:127366356-127366624
  hypo

SEQ ID NO: 430895 - DNA, 56 bp, Homo sapiens; identical to SEQ ID NO: 252590
  chr3:127439440-127439496
  hypo

SEQ ID NO: 430896 - DNA, 143 bp, Homo sapiens; identical to SEQ ID NO: 252591
  chr3:127439917-127440060
  hypo

SEQ ID NO: 430897 - DNA, 72 bp, Homo sapiens; identical to SEQ ID NO: 252593
  chr3:127515530-127515602
  hypo

SEQ ID NO: 430898 - DNA, 38 bp, Homo sapiens; identical to SEQ ID NO: 252596
  chr3:127537084-127537122
  hypo

SEQ ID NO: 430899 - DNA, 109 bp, Homo sapiens; identical to SEQ ID NO: 301953
  chr3:127570889-127570998
  hypo

SEQ ID NO: 430900 - DNA, 80 bp, Homo sapiens; identical to SEQ ID NO: 252598
  chr3:127637229-127637309
  hypo

SEQ ID NO: 430901 - DNA, 155 bp, Homo sapiens; identical to SEQ ID NO: 301955
  chr3:127731083-127731238
  hypo

SEQ ID NO: 430902 - DNA, 81 bp, Homo sapiens; identical to SEQ ID NO: 252600
  chr3:127788443-127788524
  hypo

SEQ ID NO: 430903 - DNA, 104 bp, Homo sapiens; identical to SEQ ID NO: 281452
  chr3:127795650-127795754
  hypo

SEQ ID NO: 430904 - DNA, 182 bp, Homo sapiens; identical to SEQ ID NO: 252601
  chr3:127798795-127798977
  hypo

SEQ ID NO: 430905 - DNA, 213 bp, Homo sapiens; identical to SEQ ID NO: 252602
  chr3:127816140-127816353
  hypo

SEQ ID NO: 430906 - DNA, 73 bp, Homo sapiens; identical to SEQ ID NO: 252603
  chr3:127865562-127865635
  hypo

SEQ ID NO: 430907 - DNA, 262 bp, Homo sapiens; identical to SEQ ID NO: 252604
  chr3:127937301-127937563
  hypo

SEQ ID NO: 430908 - DNA, 210 bp, Homo sapiens; identical to SEQ ID NO: 252605
  chr3:127993823-127994033
  hypo

SEQ ID NO: 430909 - DNA, 308 bp, Homo sapiens; identical to SEQ ID NO: 252608
  chr3:128070501-128070809
  hypo

SEQ ID NO: 430910 - DNA, 136 bp, Homo sapiens; identical to SEQ ID NO: 209041
  chr3:128080966-128081102
  hypo

SEQ ID NO: 430911 - DNA, 117 bp, Homo sapiens; identical to SEQ ID NO: 252610
  chr3:128110728-128110845
  hypo

SEQ ID NO: 430912 - DNA, 62 bp, Homo sapiens; identical to SEQ ID NO: 209042
  chr3:128118207-128118269
  hypo

SEQ ID NO: 430913 - DNA, 361 bp, Homo sapiens; identical to SEQ ID NO: 252612
  chr3:128123187-128123548
  hypo

SEQ ID NO: 430914 - DNA, 102 bp, Homo sapiens; identical to SEQ ID NO: 252613
  chr3:128179465-128179567
  hypo

SEQ ID NO: 430915 - DNA, 205 bp, Homo sapiens; identical to SEQ ID NO: 209043
  chr3:128182027-128182232
  hypo

SEQ ID NO: 430916 - DNA, 39 bp, Homo sapiens; identical to SEQ ID NO: 209044
  chr3:128290742-128290781
  hypo

SEQ ID NO: 430917 - DNA, 45 bp, Homo sapiens; identical to SEQ ID NO: 252617
  chr3:128401972-128402017
  hypo

SEQ ID NO: 430918 - DNA, 120 bp, Homo sapiens; identical to SEQ ID NO: 252618
  chr3:128500450-128500570
  hypo

SEQ ID NO: 430919 - DNA, 120 bp, Homo sapiens; identical to SEQ ID NO: 252619
  chr3:128526383-128526503
  hypo

SEQ ID NO: 430920 - DNA, 142 bp, Homo sapiens; identical to SEQ ID NO: 252620
  chr3:128581911-128582053
  hypo

SEQ ID NO: 430921 - DNA, 271 bp, Homo sapiens; identical to SEQ ID NO: 252623
  chr3:128782774-128783045
  hypo

SEQ ID NO: 430922 - DNA, 163 bp, Homo sapiens; identical to SEQ ID NO: 209046
  chr3:128785014-128785177
  hypo

SEQ ID NO: 430923 - DNA, 84 bp, Homo sapiens; identical to SEQ ID NO: 209047
  chr3:128791633-128791717
  hypo

SEQ ID NO: 430924 - DNA, 120 bp, Homo sapiens; identical to SEQ ID NO: 252626
  chr3:128908773-128908893
  hypo

SEQ ID NO: 430925 - DNA, 67 bp, Homo sapiens; identical to SEQ ID NO: 252627
  chr3:128973540-128973607
  hypo

SEQ ID NO: 430926 - DNA, 31 bp, Homo sapiens; identical to SEQ ID NO: 209048
  chr3:129008731-129008762
  hypo

SEQ ID NO: 430927 - DNA, 478 bp, Homo sapiens; identical to SEQ ID NO: 252629
  chr3:129045163-129045641
  hypo

SEQ ID NO: 430928 - DNA, 106 bp, Homo sapiens; identical to SEQ ID NO: 209049
  chr3:129221882-129221988
  hypo

SEQ ID NO: 430929 - DNA, 194 bp, Homo sapiens; identical to SEQ ID NO: 301990
  chr3:129240358-129240552
  hypo

SEQ ID NO: 430930 - DNA, 166 bp, Homo sapiens; identical to SEQ ID NO: 252633
  chr3:129246205-129246371
  hypo

SEQ ID NO: 430931 - DNA, 82 bp, Homo sapiens; identical to SEQ ID NO: 252634
  chr3:129247538-129247620
  hypo

SEQ ID NO: 430932 - DNA, 166 bp, Homo sapiens; identical to SEQ ID NO: 252635
  chr3:129251136-129251302
  hypo

SEQ ID NO: 430933 - DNA, 111 bp, Homo sapiens; identical to SEQ ID NO: 252636
  chr3:129252488-129252599
  hypo

SEQ ID NO: 430934 - DNA, 181 bp, Homo sapiens; identical to SEQ ID NO: 252637
  chr3:129284111-129284292
  hypo

SEQ ID NO: 430935 - DNA, 138 bp, Homo sapiens; identical to SEQ ID NO: 252638
  chr3:129289962-129290100
  hypo

SEQ ID NO: 430936 - DNA, 124 bp, Homo sapiens; identical to SEQ ID NO: 199088
  chr3:129324048-129324172
  hypo

SEQ ID NO: 430937 - DNA, 365 bp, Homo sapiens; identical to SEQ ID NO: 199089
  chr3:129324202-129324567
  hypo

SEQ ID NO: 430938 - DNA, 234 bp, Homo sapiens; identical to SEQ ID NO: 199090
  chr3:129324659-129324893
  hypo

SEQ ID NO: 430939 - DNA, 52 bp, Homo sapiens; identical to SEQ ID NO: 252640
  chr3:129370402-129370454
  hypo

SEQ ID NO: 430940 - DNA, 86 bp, Homo sapiens; identical to SEQ ID NO: 209054
  chr3:129372595-129372681
  hypo

SEQ ID NO: 430941 - DNA, 87 bp, Homo sapiens; identical to SEQ ID NO: 252643
  chr3:129398051-129398138
  hypo

SEQ ID NO: 430942 - DNA, 33 bp, Homo sapiens; identical to SEQ ID NO: 252644
  chr3:129487992-129488025
  hypo

SEQ ID NO: 430943 - DNA, 87 bp, Homo sapiens; identical to SEQ ID NO: 252645
  chr3:129510237-129510324
  hypo

SEQ ID NO: 430944 - DNA, 39 bp, Homo sapiens; identical to SEQ ID NO: 252646
  chr3:129511160-129511199
  hypo

SEQ ID NO: 430945 - DNA, 39 bp, Homo sapiens; identical to SEQ ID NO: 252647
  chr3:129511379-129511418
  hypo

SEQ ID NO: 430946 - DNA, 37 bp, Homo sapiens; identical to SEQ ID NO: 252648
  chr3:129597082-129597119
  hypo

SEQ ID NO: 430947 - DNA, 84 bp, Homo sapiens; identical to SEQ ID NO: 199095
  chr3:130235709-130235793
  hypo

SEQ ID NO: 430948 - DNA, 43 bp, Homo sapiens; identical to SEQ ID NO: 209057
  chr3:130237352-130237395
  hypo

SEQ ID NO: 430949 - DNA, 157 bp, Homo sapiens; identical to SEQ ID NO: 252653
  chr3:130464453-130464610
  hypo

SEQ ID NO: 430950 - DNA, 120 bp, Homo sapiens; identical to SEQ ID NO: 252654
  chr3:131595102-131595222
  hypo

SEQ ID NO: 430951 - DNA, 151 bp, Homo sapiens; identical to SEQ ID NO: 209058
  chr3:132034534-132034685
  hypo

SEQ ID NO: 430952 - DNA, 156 bp, Homo sapiens; identical to SEQ ID NO: 209059
  chr3:132398975-132399131
  hypo

SEQ ID NO: 430953 - DNA, 36 bp, Homo sapiens; identical to SEQ ID NO: 209060
  chr3:132399371-132399407
  hypo

SEQ ID NO: 430954 - DNA, 49 bp, Homo sapiens; identical to SEQ ID NO: 199099
  chr3:133276458-133276507
  hypo

SEQ ID NO: 430955 - DNA, 98 bp, Homo sapiens; identical to SEQ ID NO: 252661
  chr3:133364598-133364696
  hypo

SEQ ID NO: 430956 - DNA, 108 bp, Homo sapiens; identical to SEQ ID NO: 209062
  chr3:133560513-133560621
  hypo

SEQ ID NO: 430957 - DNA, 134 bp, Homo sapiens; identical to SEQ ID NO: 281499
  chr3:133646157-133646291
  hypo

SEQ ID NO: 430958 - DNA, 266 bp, Homo sapiens; identical to SEQ ID NO: 281500
  chr3:133646451-133646717
  hypo

SEQ ID NO: 430959 - DNA, 227 bp, Homo sapiens; identical to SEQ ID NO: 209063
  chr3:133648404-133648631
  hypo

SEQ ID NO: 430960 - DNA, 74 bp, Homo sapiens; identical to SEQ ID NO: 281502
  chr3:133748245-133748319
  hypo

SEQ ID NO: 430961 - DNA, 52 bp, Homo sapiens; identical to SEQ ID NO: 199100
  chr3:133969907-133969959
  hypo

SEQ ID NO: 430962 - DNA, 475 bp, Homo sapiens; identical to SEQ ID NO: 199102
  chr3:134092643-134093118
  hypo

SEQ ID NO: 430963 - DNA, 404 bp, Homo sapiens; identical to SEQ ID NO: 199103
  chr3:134093148-134093552
  hypo

SEQ ID NO: 430964 - DNA, 239 bp, Homo sapiens; identical to SEQ ID NO: 39653
  chr3:134093626-134093865
  hypo

SEQ ID NO: 430965 - DNA, 174 bp, Homo sapiens; identical to SEQ ID NO: 252665
  chr3:134195846-134196020
  hypo

SEQ ID NO: 430966 - DNA, 157 bp, Homo sapiens; identical to SEQ ID NO: 209069
  chr3:134203266-134203423
  hypo

SEQ ID NO: 430967 - DNA, 78 bp, Homo sapiens; identical to SEQ ID NO: 281515
  chr3:134514788-134514866
  hypo

SEQ ID NO: 430968 - DNA, 140 bp, Homo sapiens; identical to SEQ ID NO: 281516
  chr3:134514895-134515035
  hypo

SEQ ID NO: 430969 - DNA, 85 bp, Homo sapiens; identical to SEQ ID NO: 252668
  chr3:135601878-135601963
  hypo

SEQ ID NO: 430970 - DNA, 172 bp, Homo sapiens; identical to SEQ ID NO: 252669
  chr3:135741866-135742038
  hypo

SEQ ID NO: 430971 - DNA, 310 bp, Homo sapiens; identical to SEQ ID NO: 252670
  chr3:135870037-135870347
  hypo

SEQ ID NO: 430972 - DNA, 147 bp, Homo sapiens; identical to SEQ ID NO: 252671
  chr3:135900336-135900483
  hypo

SEQ ID NO: 430973 - DNA, 135 bp, Homo sapiens; identical to SEQ ID NO: 252672
  chr3:136454636-136454771
  hypo

SEQ ID NO: 430974 - DNA, 37 bp, Homo sapiens; identical to SEQ ID NO: 209072
  chr3:136582612-136582649
  hypo

SEQ ID NO: 430975 - DNA, 36 bp, Homo sapiens; identical to SEQ ID NO: 209073
  chr3:136583309-136583345
  hypo

SEQ ID NO: 430976 - DNA, 31 bp, Homo sapiens; identical to SEQ ID NO: 252676
  chr3:136593312-136593343
  hypo

SEQ ID NO: 430977 - DNA, 132 bp, Homo sapiens; identical to SEQ ID NO: 252677
  chr3:136678363-136678495
  hypo

SEQ ID NO: 430978 - DNA, 120 bp, Homo sapiens; identical to SEQ ID NO: 252678
  chr3:137433349-137433469
  hypo

SEQ ID NO: 430979 - DNA, 32 bp, Homo sapiens; identical to SEQ ID NO: 252680
  chr3:137561456-137561488
  hypo

SEQ ID NO: 430980 - DNA, 195 bp, Homo sapiens; identical to SEQ ID NO: 252683
  chr3:137783021-137783216
  hypo

SEQ ID NO: 430981 - DNA, 195 bp, Homo sapiens; identical to SEQ ID NO: 209074
  chr3:137822427-137822622
  hypo

SEQ ID NO: 430982 - DNA, 162 bp, Homo sapiens; identical to SEQ ID NO: 252685
  chr3:137831298-137831460
  hypo

SEQ ID NO: 430983 - DNA, 31 bp, Homo sapiens; identical to SEQ ID NO: 209075
  chr3:137891419-137891450
  hypo

SEQ ID NO: 430984 - DNA, 34 bp, Homo sapiens; identical to SEQ ID NO: 209076
  chr3:138001202-138001236
  hypo

SEQ ID NO: 430985 - DNA, 41 bp, Homo sapiens; identical to SEQ ID NO: 252688
  chr3:138020318-138020359
  hypo

SEQ ID NO: 430986 - DNA, 58 bp, Homo sapiens; identical to SEQ ID NO: 252689
  chr3:138081464-138081522
  hypo

SEQ ID NO: 430987 - DNA, 201 bp, Homo sapiens; identical to SEQ ID NO: 209079
  chr3:138158923-138159124
  hypo

SEQ ID NO: 430988 - DNA, 161 bp, Homo sapiens; identical to SEQ ID NO: 222238
  chr3:138327435-138327596
  hypo

SEQ ID NO: 430989 - DNA, 146 bp, Homo sapiens; identical to SEQ ID NO: 252691
  chr3:138413616-138413762
  hypo

SEQ ID NO: 430990 - DNA, 34 bp, Homo sapiens; identical to SEQ ID NO: 209080
  chr3:138542243-138542277
  hypo

SEQ ID NO: 430991 - DNA, 34 bp, Homo sapiens; identical to SEQ ID NO: 209081
  chr3:138542517-138542551
  hypo

SEQ ID NO: 430992 - DNA, 38 bp, Homo sapiens; identical to SEQ ID NO: 209082
  chr3:138577523-138577561
  hypo

SEQ ID NO: 430993 - DNA, 83 bp, Homo sapiens; identical to SEQ ID NO: 252695
  chr3:138635480-138635563
  hypo

SEQ ID NO: 430994 - DNA, 457 bp, Homo sapiens; identical to SEQ ID NO: 222239
  chr3:138654715-138655172
  hypo

SEQ ID NO: 430995 - DNA, 36 bp, Homo sapiens; identical to SEQ ID NO: 209083
  chr3:138981444-138981480
  hypo

SEQ ID NO: 430996 - DNA, 212 bp, Homo sapiens; identical to SEQ ID NO: 252697
  chr3:139180923-139181135
  hypo

SEQ ID NO: 430997 - DNA, 498 bp, Homo sapiens; identical to SEQ ID NO: 252699
  chr3:140401392-140401890
  hypo

SEQ ID NO: 430998 - DNA, 42 bp, Homo sapiens; identical to SEQ ID NO: 302077
  chr3:140434249-140434291
  hypo

SEQ ID NO: 430999 - DNA, 38 bp, Homo sapiens; identical to SEQ ID NO: 252701
  chr3:141053875-141053913
  hypo

SEQ ID NO: 431000 - DNA, 232 bp, Homo sapiens; identical to SEQ ID NO: 209087
  chr3:141086062-141086294
  hypo

SEQ ID NO: 431001 - DNA, 313 bp, Homo sapiens; identical to SEQ ID NO: 209088
  chr3:141161722-141162035
  hypo

SEQ ID NO: 431002 - DNA, 61 bp, Homo sapiens; identical to SEQ ID NO: 252705
  chr3:141174927-141174988
  hypo

SEQ ID NO: 431003 - DNA, 33 bp, Homo sapiens; identical to SEQ ID NO: 252706
  chr3:141363515-141363548
  hypo

SEQ ID NO: 431004 - DNA, 143 bp, Homo sapiens; identical to SEQ ID NO: 252709
  chr3:141495874-141496017
  hypo

SEQ ID NO: 431005 - DNA, 38 bp, Homo sapiens; identical to SEQ ID NO: 209090
  chr3:141509677-141509715
  hypo

SEQ ID NO: 431006 - DNA, 130 bp, Homo sapiens; identical to SEQ ID NO: 252711
  chr3:141523991-141524121
  hypo

SEQ ID NO: 431007 - DNA, 46 bp, Homo sapiens
  chr3:141622569-141622615
  hypo
gtgaccagattcctagcccaggtaattatcttgcagttatgacttt

SEQ ID NO: 431008 - DNA, 53 bp, Homo sapiens
  chr3:141664267-141664320
  hypo
gcatacccacctcttttgtccaaaactcaagagtgatggtggtgaaccaagtg

SEQ ID NO: 431009 - DNA, 104 bp, Homo sapiens; identical to SEQ ID NO: 252715
  chr3:141664566-141664670
  hypo

SEQ ID NO: 431010 - DNA, 35 bp, Homo sapiens; identical to SEQ ID NO: 209094
  chr3:141954424-141954459
  hypo

SEQ ID NO: 431011 - DNA, 102 bp, Homo sapiens; identical to SEQ ID NO: 209095
  chr3:142321774-142321876
  hypo

SEQ ID NO: 431012 - DNA, 40 bp, Homo sapiens; identical to SEQ ID NO: 252720
  chr3:142354392-142354432
  hypo

SEQ ID NO: 431013 - DNA, 143 bp, Homo sapiens; identical to SEQ ID NO: 302099
  chr3:142499677-142499820
  hypo

SEQ ID NO: 431014 - DNA, 38 bp, Homo sapiens
  chr3:142537575-142537613
  hypo
ttgtgcctggatgataaaatctgttttaagactctcat

SEQ ID NO: 431015 - DNA, 39 bp, Homo sapiens; identical to SEQ ID NO: 209098
  chr3:142727625-142727664
  hypo

SEQ ID NO: 431016 - DNA, 38 bp, Homo sapiens; identical to SEQ ID NO: 209099
  chr3:142727844-142727882
  hypo

SEQ ID NO: 431017 - DNA, 44 bp, Homo sapiens; identical to SEQ ID NO: 209100
  chr3:142728140-142728184
  hypo

SEQ ID NO: 431018 - DNA, 131 bp, Homo sapiens; identical to SEQ ID NO: 252730
  chr3:142775176-142775307
  hypo

SEQ ID NO: 431019 - DNA, 158 bp, Homo sapiens; identical to SEQ ID NO: 252733
  chr3:142820241-142820399
  hypo

SEQ ID NO: 431020 - DNA, 299 bp, Homo sapiens; identical to SEQ ID NO: 403764
  chr3:142895258-142895557
  hypo

SEQ ID NO: 431021 - DNA, 33 bp, Homo sapiens; identical to SEQ ID NO: 252735
  chr3:142930276-142930309
  hypo

SEQ ID NO: 431022 - DNA, 99 bp, Homo sapiens; identical to SEQ ID NO: 209104
  chr3:142957651-142957750
  hypo

SEQ ID NO: 431023 - DNA, 98 bp, Homo sapiens; identical to SEQ ID NO: 209105
  chr3:143027449-143027547
  hypo

SEQ ID NO: 431024 - DNA, 78 bp, Homo sapiens; identical to SEQ ID NO: 252739
  chr3:143316755-143316833
  hypo

SEQ ID NO: 431025 - DNA, 72 bp, Homo sapiens; identical to SEQ ID NO: 252740
  chr3:143317071-143317143
  hypo

SEQ ID NO: 431026 - DNA, 140 bp, Homo sapiens; identical to SEQ ID NO: 252742
  chr3:148394230-148394370
  hypo

SEQ ID NO: 431027 - DNA, 39 bp, Homo sapiens; identical to SEQ ID NO: 252743
  chr3:148472162-148472201
  hypo

SEQ ID NO: 431028 - DNA, 203 bp, Homo sapiens; identical to SEQ ID NO: 252744
  chr3:148556040-148556243
  hypo

SEQ ID NO: 431029 - DNA, 214 bp, Homo sapiens; identical to SEQ ID NO: 199133
  chr3:148709993-148710207
  hypo

SEQ ID NO: 431030 - DNA, 33 bp, Homo sapiens; identical to SEQ ID NO: 209110
  chr3:148726132-148726165
  hypo

SEQ ID NO: 431031 - DNA, 54 bp, Homo sapiens; identical to SEQ ID NO: 252747
  chr3:148802384-148802438
  hypo

SEQ ID NO: 431032 - DNA, 342 bp, Homo sapiens; identical to SEQ ID NO: 281594
  chr3:148803822-148804164
  hypo

SEQ ID NO: 431033 - DNA, 365 bp, Homo sapiens; identical to SEQ ID NO: 281595
  chr3:148804199-148804564
  hypo

SEQ ID NO: 431034 - DNA, 58 bp, Homo sapiens; identical to SEQ ID NO: 209111
  chr3:148867081-148867139
  hypo

SEQ ID NO: 431035 - DNA, 62 bp, Homo sapiens; identical to SEQ ID NO: 252751
  chr3:148904409-148904471
  hypo

SEQ ID NO: 431036 - DNA, 143 bp, Homo sapiens; identical to SEQ ID NO: 209112
  chr3:149096959-149097102
  hypo

SEQ ID NO: 431037 - DNA, 32 bp, Homo sapiens; identical to SEQ ID NO: 209113
  chr3:149233987-149234019
  hypo

SEQ ID NO: 431038 - DNA, 44 bp, Homo sapiens; identical to SEQ ID NO: 252755
  chr3:149470937-149470981
  hypo

SEQ ID NO: 431039 - DNA, 288 bp, Homo sapiens; identical to SEQ ID NO: 252756
  chr3:149700884-149701172
  hypo

SEQ ID NO: 431040 - DNA, 173 bp, Homo sapiens; identical to SEQ ID NO: 252757
  chr3:149931181-149931354
  hypo

SEQ ID NO: 431041 - DNA, 189 bp, Homo sapiens; identical to SEQ ID NO: 252759
  chr3:150026518-150026707
  hypo

SEQ ID NO: 431042 - DNA, 150 bp, Homo sapiens; identical to SEQ ID NO: 252760
  chr3:150086093-150086243
  hypo

SEQ ID NO: 431043 - DNA, 227 bp, Homo sapiens; identical to SEQ ID NO: 199137
  chr3:150320966-150321193
  hypo

SEQ ID NO: 431044 - DNA, 430 bp, Homo sapiens; identical to SEQ ID NO: 252764
  chr3:150329378-150329808
  hypo

SEQ ID NO: 431045 - DNA, 159 bp, Homo sapiens; identical to SEQ ID NO: 252765
  chr3:150379955-150380114
  hypo

SEQ ID NO: 431046 - DNA, 41 bp, Homo sapiens; identical to SEQ ID NO: 252766
  chr3:150420384-150420425
  hypo

SEQ ID NO: 431047 - DNA, 136 bp, Homo sapiens; identical to SEQ ID NO: 302146
  chr3:150443086-150443222
  hypo

SEQ ID NO: 431048 - DNA, 186 bp, Homo sapiens; identical to SEQ ID NO: 209118
  chr3:150497417-150497603
  hypo

SEQ ID NO: 431049 - DNA, 86 bp, Homo sapiens; identical to SEQ ID NO: 209119
  chr3:150670268-150670354
  hypo

SEQ ID NO: 431050 - DNA, 56 bp, Homo sapiens; identical to SEQ ID NO: 252772
  chr3:152786503-152786559
  hypo

SEQ ID NO: 431051 - DNA, 120 bp, Homo sapiens; identical to SEQ ID NO: 252773
  chr3:152830629-152830749
  hypo

SEQ ID NO: 431052 - DNA, 149 bp, Homo sapiens; identical to SEQ ID NO: 209123
  chr3:152877717-152877866
  hypo

SEQ ID NO: 431053 - DNA, 39 bp, Homo sapiens; identical to SEQ ID NO: 252775
  chr3:152891478-152891517
  hypo

SEQ ID NO: 431054 - DNA, 45 bp, Homo sapiens; identical to SEQ ID NO: 209124
  chr3:153010523-153010568
  hypo

SEQ ID NO: 431055 - DNA, 45 bp, Homo sapiens; identical to SEQ ID NO: 209125
  chr3:153010748-153010793
  hypo

SEQ ID NO: 431056 - DNA, 37 bp, Homo sapiens; identical to SEQ ID NO: 252778
  chr3:153403754-153403791
  hypo

SEQ ID NO: 431057 - DNA, 37 bp, Homo sapiens; identical to SEQ ID NO: 252779
  chr3:153404031-153404068
  hypo

SEQ ID NO: 431058 - DNA, 81 bp, Homo sapiens; identical to SEQ ID NO: 209126
  chr3:153824879-153824960
  hypo

SEQ ID NO: 431059 - DNA, 161 bp, Homo sapiens; identical to SEQ ID NO: 252781
  chr3:154907062-154907223
  hypo

SEQ ID NO: 431060 - DNA, 42 bp, Homo sapiens; identical to SEQ ID NO: 252782
  chr3:155315612-155315654
  hypo

SEQ ID NO: 431061 - DNA, 39 bp, Homo sapiens; identical to SEQ ID NO: 209127
  chr3:155454719-155454758
  hypo

SEQ ID NO: 431062 - DNA, 38 bp, Homo sapiens; identical to SEQ ID NO: 209128
  chr3:155454998-155455036
  hypo

SEQ ID NO: 431063 - DNA, 139 bp, Homo sapiens; identical to SEQ ID NO: 302166
  chr3:155460891-155461030
  hypo

SEQ ID NO: 431064 - DNA, 41 bp, Homo sapiens; identical to SEQ ID NO: 199149
  chr3:155722292-155722333
  hypo

SEQ ID NO: 431065 - DNA, 85 bp, Homo sapiens; identical to SEQ ID NO: 252787
  chr3:156015533-156015618
  hypo

SEQ ID NO: 431066 - DNA, 65 bp, Homo sapiens; identical to SEQ ID NO: 209130
  chr3:156543100-156543165
  hypo

SEQ ID NO: 431067 - DNA, 163 bp, Homo sapiens; identical to SEQ ID NO: 252790
  chr3:156795059-156795222
  hypo

SEQ ID NO: 431068 - DNA, 167 bp, Homo sapiens; identical to SEQ ID NO: 199152
  chr3:156799361-156799528
  hypo

SEQ ID NO: 431069 - DNA, 43 bp, Homo sapiens; identical to SEQ ID NO: 252791
  chr3:156843278-156843321
  hypo

SEQ ID NO: 431070 - DNA, 32 bp, Homo sapiens; identical to SEQ ID NO: 252792
  chr3:156862936-156862968
  hypo

SEQ ID NO: 431071 - DNA, 42 bp, Homo sapiens; identical to SEQ ID NO: 209133
  chr3:157866879-157866921
  hypo

SEQ ID NO: 431072 - DNA, 97 bp, Homo sapiens; identical to SEQ ID NO: 252794
  chr3:158361237-158361334
  hypo

SEQ ID NO: 431073 - DNA, 37 bp, Homo sapiens; identical to SEQ ID NO: 252795
  chr3:158434648-158434685
  hypo

SEQ ID NO: 431074 - DNA, 76 bp, Homo sapiens; identical to SEQ ID NO: 252796
  chr3:158448986-158449062
  hypo

SEQ ID NO: 431075 - DNA, 193 bp, Homo sapiens; identical to SEQ ID NO: 252798
  chr3:158690125-158690318
  hypo

SEQ ID NO: 431076 - DNA, 37 bp, Homo sapiens; identical to SEQ ID NO: 252799
  chr3:159001224-159001261
  hypo

SEQ ID NO: 431077 - DNA, 211 bp, Homo sapiens; identical to SEQ ID NO: 222257
  chr3:159706814-159707025
  hypo

SEQ ID NO: 431078 - DNA, 170 bp, Homo sapiens; identical to SEQ ID NO: 252800
  chr3:159814276-159814446
  hypo

SEQ ID NO: 431079 - DNA, 38 bp, Homo sapiens; identical to SEQ ID NO: 252801
  chr3:160328305-160328343
  hypo

SEQ ID NO: 431080 - DNA, 1581 bp, Homo sapiens; identical to SEQ ID NO: 199171
  chr3:160472497-160474078
  hypo

SEQ ID NO: 431081 - DNA, 31 bp, Homo sapiens; identical to SEQ ID NO: 252802
  chr3:160821777-160821808
  hypo

SEQ ID NO: 431082 - DNA, 35 bp, Homo sapiens; identical to SEQ ID NO: 252803
  chr3:160863217-160863252
  hypo

SEQ ID NO: 431083 - DNA, 214 bp, Homo sapiens; identical to SEQ ID NO: 252804
  chr3:160879673-160879887
  hypo

SEQ ID NO: 431084 - DNA, 112 bp, Homo sapiens; identical to SEQ ID NO: 252805
  chr3:166834368-166834480
  hypo

SEQ ID NO: 431085 - DNA, 39 bp, Homo sapiens; identical to SEQ ID NO: 252806
  chr3:167911807-167911846
  hypo

SEQ ID NO: 431086 - DNA, 122 bp, Homo sapiens; identical to SEQ ID NO: 302192
  chr3:167916991-167917113
  hypo

SEQ ID NO: 431087 - DNA, 37 bp, Homo sapiens; identical to SEQ ID NO: 252808
  chr3:168197107-168197144
  hypo

SEQ ID NO: 431088 - DNA, 31 bp, Homo sapiens; identical to SEQ ID NO: 209137
  chr3:169030445-169030476
  hypo

SEQ ID NO: 431089 - DNA, 77 bp, Homo sapiens; identical to SEQ ID NO: 209138
  chr3:169200020-169200097
  hypo

SEQ ID NO: 431090 - DNA, 77 bp, Homo sapiens; identical to SEQ ID NO: 209139
  chr3:169200397-169200474
  hypo

SEQ ID NO: 431091 - DNA, 53 bp, Homo sapiens; identical to SEQ ID NO: 222260
  chr3:169380561-169380614
  hypo

SEQ ID NO: 431092 - DNA, 87 bp, Homo sapiens; identical to SEQ ID NO: 222261
  chr3:169380983-169381070
  hypo

SEQ ID NO: 431093 - DNA, 262 bp, Homo sapiens; identical to SEQ ID NO: 281682
  chr3:169381408-169381670
  hypo

SEQ ID NO: 431094 - DNA, 270 bp, Homo sapiens; identical to SEQ ID NO: 281688
  chr3:169530401-169530671
  hypo

SEQ ID NO: 431095 - DNA, 110 bp, Homo sapiens; identical to SEQ ID NO: 209142
  chr3:169656714-169656824
  hypo

SEQ ID NO: 431096 - DNA, 42 bp, Homo sapiens; identical to SEQ ID NO: 252815
  chr3:169727690-169727732
  hypo

SEQ ID NO: 431097 - DNA, 79 bp, Homo sapiens; identical to SEQ ID NO: 252816
  chr3:169780674-169780753
  hypo

SEQ ID NO: 431098 - DNA, 32 bp, Homo sapiens; identical to SEQ ID NO: 252817
  chr3:169795277-169795309
  hypo

SEQ ID NO: 431099 - DNA, 91 bp, Homo sapiens; identical to SEQ ID NO: 252818
  chr3:169795489-169795580
  hypo

SEQ ID NO: 431100 - DNA, 60 bp, Homo sapiens; identical to SEQ ID NO: 252819
  chr3:169796500-169796560
  hypo

SEQ ID NO: 431101 - DNA, 96 bp, Homo sapiens; identical to SEQ ID NO: 209143
  chr3:169896229-169896325
  hypo

SEQ ID NO: 431102 - DNA, 100 bp, Homo sapiens; identical to SEQ ID NO: 209144
  chr3:169915438-169915538
  hypo

SEQ ID NO: 431103 - DNA, 39 bp, Homo sapiens; identical to SEQ ID NO: 252822
  chr3:169916138-169916177
  hypo

SEQ ID NO: 431104 - DNA, 36 bp, Homo sapiens; identical to SEQ ID NO: 252823
  chr3:169917047-169917083
  hypo

SEQ ID NO: 431105 - DNA, 40 bp, Homo sapiens; identical to SEQ ID NO: 252825
  chr3:170154037-170154077
  hypo

SEQ ID NO: 431106 - DNA, 74 bp, Homo sapiens; identical to SEQ ID NO: 209145
  chr3:170179927-170180001
  hypo

SEQ ID NO: 431107 - DNA, 203 bp, Homo sapiens; identical to SEQ ID NO: 252827
  chr3:170184923-170185126
  hypo

SEQ ID NO: 431108 - DNA, 42 bp, Homo sapiens; identical to SEQ ID NO: 252828
  chr3:170267374-170267416
  hypo

SEQ ID NO: 431109 - DNA, 96 bp, Homo sapiens; identical to SEQ ID NO: 209146
  chr3:170555017-170555113
  hypo

SEQ ID NO: 431110 - DNA, 93 bp, Homo sapiens; identical to SEQ ID NO: 252831
  chr3:170588743-170588836
  hypo

SEQ ID NO: 431111 - DNA, 45 bp, Homo sapiens; identical to SEQ ID NO: 252833
  chr3:170870834-170870879
  hypo

SEQ ID NO: 431112 - DNA, 36 bp, Homo sapiens; identical to SEQ ID NO: 252834
  chr3:171121104-171121140
  hypo

SEQ ID NO: 431113 - DNA, 110 bp, Homo sapiens; identical to SEQ ID NO: 252835
  chr3:171171982-171172092
  hypo

SEQ ID NO: 431114 - DNA, 89 bp, Homo sapiens; identical to SEQ ID NO: 252836
  chr3:171243544-171243633
  hypo

SEQ ID NO: 431115 - DNA, 163 bp, Homo sapiens; identical to SEQ ID NO: 209150
  chr3:171363249-171363412
  hypo

SEQ ID NO: 431116 - DNA, 78 bp, Homo sapiens; identical to SEQ ID NO: 209151
  chr3:171493948-171494026
  hypo

SEQ ID NO: 431117 - DNA, 45 bp, Homo sapiens; identical to SEQ ID NO: 209152
  chr3:171529766-171529811
  hypo

SEQ ID NO: 431118 - DNA, 154 bp, Homo sapiens; identical to SEQ ID NO: 199199
  chr3:171758579-171758733
  hypo

SEQ ID NO: 431119 - DNA, 153 bp, Homo sapiens; identical to SEQ ID NO: 252842
  chr3:171886950-171887103
  hypo

SEQ ID NO: 431120 - DNA, 278 bp, Homo sapiens; identical to SEQ ID NO: 209154
  chr3:171965332-171965610
  hypo

SEQ ID NO: 431121 - DNA, 193 bp, Homo sapiens; identical to SEQ ID NO: 302235
  chr3:172033319-172033512
  hypo

SEQ ID NO: 431122 - DNA, 38 bp, Homo sapiens; identical to SEQ ID NO: 252846
  chr3:172056805-172056843
  hypo

SEQ ID NO: 431123 - DNA, 50 bp, Homo sapiens; identical to SEQ ID NO: 252847
  chr3:172341459-172341509
  hypo

SEQ ID NO: 431124 - DNA, 421 bp, Homo sapiens; identical to SEQ ID NO: 252848
  chr3:172341539-172341960
  hypo

SEQ ID NO: 431125 - DNA, 35 bp, Homo sapiens; identical to SEQ ID NO: 252849
  chr3:172351503-172351538
  hypo

SEQ ID NO: 431126 - DNA, 90 bp, Homo sapiens; identical to SEQ ID NO: 209158
  chr3:172355805-172355895
  hypo

SEQ ID NO: 431127 - DNA, 141 bp, Homo sapiens; identical to SEQ ID NO: 252851
  chr3:172394009-172394150
  hypo

SEQ ID NO: 431128 - DNA, 38 bp, Homo sapiens; identical to SEQ ID NO: 252852
  chr3:172394537-172394575
  hypo

SEQ ID NO: 431129 - DNA, 80 bp, Homo sapiens; identical to SEQ ID NO: 209159
  chr3:172395702-172395782
  hypo

SEQ ID NO: 431130 - DNA, 33 bp, Homo sapiens; identical to SEQ ID NO: 252854
  chr3:172409440-172409473
  hypo

SEQ ID NO: 431131 - DNA, 77 bp, Homo sapiens; identical to SEQ ID NO: 252855
  chr3:172424594-172424671
  hypo

SEQ ID NO: 431132 - DNA, 41 bp, Homo sapiens; identical to SEQ ID NO: 252858
  chr3:172426415-172426456
  hypo

SEQ ID NO: 431133 - DNA, 83 bp, Homo sapiens; identical to SEQ ID NO: 209160
  chr3:172475922-172476005
  hypo

SEQ ID NO: 431134 - DNA, 108 bp, Homo sapiens; identical to SEQ ID NO: 209161
  chr3:172727654-172727762
  hypo

SEQ ID NO: 431135 - DNA, 36 bp, Homo sapiens; identical to SEQ ID NO: 209162
  chr3:173162774-173162810
  hypo

SEQ ID NO: 431136 - DNA, 180 bp, Homo sapiens; identical to SEQ ID NO: 209163
  chr3:173864875-173865055
  hypo

SEQ ID NO: 431137 - DNA, 133 bp, Homo sapiens; identical to SEQ ID NO: 209164
  chr3:174095072-174095205
  hypo

SEQ ID NO: 431138 - DNA, 912 bp, Homo sapiens; identical to SEQ ID NO: 281718
  chr3:174158358-174159270
  hypo

SEQ ID NO: 431139 - DNA, 125 bp, Homo sapiens; identical to SEQ ID NO: 281719
  chr3:174159306-174159431
  hypo

SEQ ID NO: 431140 - DNA, 32 bp, Homo sapiens; identical to SEQ ID NO: 209167
  chr3:175307701-175307733
  hypo

SEQ ID NO: 431141 - DNA, 43 bp, Homo sapiens; identical to SEQ ID NO: 302255
  chr3:175338091-175338134
  hypo

SEQ ID NO: 431142 - DNA, 466 bp, Homo sapiens; identical to SEQ ID NO: 302256
  chr3:175338171-175338637
  hypo

SEQ ID NO: 431143 - DNA, 53 bp, Homo sapiens; identical to SEQ ID NO: 209169
  chr3:176545044-176545097
  hypo

SEQ ID NO: 431144 - DNA, 218 bp, Homo sapiens; identical to SEQ ID NO: 252870
  chr3:176710430-176710648
  hypo

SEQ ID NO: 431145 - DNA, 87 bp, Homo sapiens; identical to SEQ ID NO: 252871
  chr3:176753533-176753620
  hypo

SEQ ID NO: 431146 - DNA, 34 bp, Homo sapiens; identical to SEQ ID NO: 209170
  chr3:176854102-176854136
  hypo

SEQ ID NO: 431147 - DNA, 58 bp, Homo sapiens; identical to SEQ ID NO: 302261
  chr3:176869559-176869617
  hypo

SEQ ID NO: 431148 - DNA, 75 bp, Homo sapiens; identical to SEQ ID NO: 209171
  chr3:176890964-176891039
  hypo

SEQ ID NO: 431149 - DNA, 34 bp, Homo sapiens; identical to SEQ ID NO: 252875
  chr3:176893551-176893585
  hypo

SEQ ID NO: 431150 - DNA, 210 bp, Homo sapiens; identical to SEQ ID NO: 252877
  chr3:176963512-176963722
  hypo

SEQ ID NO: 431151 - DNA, 36 bp, Homo sapiens; identical to SEQ ID NO: 252878
  chr3:176990424-176990460
  hypo

SEQ ID NO: 431152 - DNA, 35 bp, Homo sapiens; identical to SEQ ID NO: 252879
  chr3:176990700-176990735
  hypo

SEQ ID NO: 431153 - DNA, 45 bp, Homo sapiens; identical to SEQ ID NO: 252880
  chr3:177001716-177001761
  hypo

SEQ ID NO: 431154 - DNA, 88 bp, Homo sapiens; identical to SEQ ID NO: 252881
  chr3:177030449-177030537
  hypo

SEQ ID NO: 431155 - DNA, 103 bp, Homo sapiens; identical to SEQ ID NO: 252882
  chr3:177085605-177085708
  hypo

SEQ ID NO: 431156 - DNA, 230 bp, Homo sapiens; identical to SEQ ID NO: 252883
  chr3:177094901-177095131
  hypo

SEQ ID NO: 431157 - DNA, 89 bp, Homo sapiens; identical to SEQ ID NO: 209173
  chr3:177158385-177158474
  hypo

SEQ ID NO: 431158 - DNA, 120 bp, Homo sapiens; identical to SEQ ID NO: 252885
  chr3:177238533-177238653
  hypo

SEQ ID NO: 431159 - DNA, 80 bp, Homo sapiens; identical to SEQ ID NO: 252887
  chr3:177239193-177239273
  hypo

SEQ ID NO: 431160 - DNA, 33 bp, Homo sapiens; identical to SEQ ID NO: 252888
  chr3:177269266-177269299
  hypo

SEQ ID NO: 431161 - DNA, 31 bp, Homo sapiens; identical to SEQ ID NO: 252889
  chr3:177308262-177308293
  hypo

SEQ ID NO: 431162 - DNA, 43 bp, Homo sapiens; identical to SEQ ID NO: 252890
  chr3:177829173-177829216
  hypo

SEQ ID NO: 431163 - DNA, 180 bp, Homo sapiens; identical to SEQ ID NO: 209175
  chr3:178860953-178861133
  hypo

SEQ ID NO: 431164 - DNA, 42 bp, Homo sapiens; identical to SEQ ID NO: 252893
  chr3:178978410-178978452
  hypo

SEQ ID NO: 431165 - DNA, 40 bp, Homo sapiens; identical to SEQ ID NO: 199210
  chr3:179064154-179064194
  hypo

SEQ ID NO: 431166 - DNA, 44 bp, Homo sapiens; identical to SEQ ID NO: 209177
  chr3:179085022-179085066
  hypo

SEQ ID NO: 431167 - DNA, 39 bp, Homo sapiens; identical to SEQ ID NO: 252895
  chr3:179159869-179159908
  hypo

SEQ ID NO: 431168 - DNA, 36 bp, Homo sapiens; identical to SEQ ID NO: 209178
  chr3:179203080-179203116
  hypo

SEQ ID NO: 431169 - DNA, 88 bp, Homo sapiens; identical to SEQ ID NO: 252897
  chr3:179319791-179319879
  hypo

SEQ ID NO: 431170 - DNA, 79 bp, Homo sapiens; identical to SEQ ID NO: 230001
  chr3:179367505-179367584
  hypo

SEQ ID NO: 431171 - DNA, 35 bp, Homo sapiens
  chr3:179377824-179377859
  hypo
tgtctcaaaaaacaaacaaacaaaacattttaact

SEQ ID NO: 431172 - DNA, 178 bp, Homo sapiens; identical to SEQ ID NO: 252899
  chr3:179383082-179383260
  hypo

SEQ ID NO: 431173 - DNA, 160 bp, Homo sapiens; identical to SEQ ID NO: 252901
  chr3:179398900-179399060
  hypo

SEQ ID NO: 431174 - DNA, 373 bp, Homo sapiens; identical to SEQ ID NO: 252902
  chr3:179449287-179449660
  hypo

SEQ ID NO: 431175 - DNA, 53 bp, Homo sapiens; identical to SEQ ID NO: 222274
  chr3:180396751-180396804
  hypo

SEQ ID NO: 431176 - DNA, 34 bp, Homo sapiens; identical to SEQ ID NO: 252903
  chr3:180502777-180502811
  hypo

SEQ ID NO: 431177 - DNA, 87 bp, Homo sapiens; identical to SEQ ID NO: 252905
  chr3:181466764-181466851
  hypo

SEQ ID NO: 431178 - DNA, 89 bp, Homo sapiens; identical to SEQ ID NO: 209184
  chr3:181521187-181521276
  hypo

SEQ ID NO: 431179 - DNA, 292 bp, Homo sapiens; identical to SEQ ID NO: 199224
  chr3:182510867-182511159
  hypo

SEQ ID NO: 431180 - DNA, 170 bp, Homo sapiens; identical to SEQ ID NO: 199225
  chr3:182511623-182511793
  hypo

SEQ ID NO: 431181 - DNA, 34 bp, Homo sapiens; identical to SEQ ID NO: 209187
  chr3:182650849-182650883
  hypo

SEQ ID NO: 431182 - DNA, 42 bp, Homo sapiens; identical to SEQ ID NO: 252912
  chr3:182725059-182725101
  hypo

SEQ ID NO: 431183 - DNA, 76 bp, Homo sapiens; identical to SEQ ID NO: 209189
  chr3:182778669-182778745
  hypo

SEQ ID NO: 431184 - DNA, 73 bp, Homo sapiens; identical to SEQ ID NO: 209190
  chr3:182788794-182788867
  hypo

SEQ ID NO: 431185 - DNA, 41 bp, Homo sapiens; identical to SEQ ID NO: 252918
  chr3:182882985-182883026
  hypo

SEQ ID NO: 431186 - DNA, 163 bp, Homo sapiens; identical to SEQ ID NO: 252920
  chr3:182935983-182936146
  hypo

SEQ ID NO: 431187 - DNA, 43 bp, Homo sapiens; identical to SEQ ID NO: 252921
  chr3:182976027-182976070
  hypo

SEQ ID NO: 431188 - DNA, 147 bp, Homo sapiens; identical to SEQ ID NO: 209191
  chr3:182976758-182976905
  hypo

SEQ ID NO: 431189 - DNA, 42 bp, Homo sapiens; identical to SEQ ID NO: 252923
  chr3:183014966-183015008
  hypo

SEQ ID NO: 431190 - DNA, 190 bp, Homo sapiens; identical to SEQ ID NO: 209192
  chr3:183035119-183035309
  hypo

SEQ ID NO: 431191 - DNA, 76 bp, Homo sapiens; identical to SEQ ID NO: 209193
  chr3:183035339-183035415
  hypo

SEQ ID NO: 431192 - DNA, 83 bp, Homo sapiens; identical to SEQ ID NO: 252925
  chr3:183052206-183052289
  hypo

SEQ ID NO: 431193 - DNA, 120 bp, Homo sapiens; identical to SEQ ID NO: 209195
  chr3:183183284-183183404
  hypo

SEQ ID NO: 431194 - DNA, 35 bp, Homo sapiens; identical to SEQ ID NO: 252928
  chr3:183199496-183199531
  hypo

SEQ ID NO: 431195 - DNA, 31 bp, Homo sapiens; identical to SEQ ID NO: 252929
  chr3:183208295-183208326
  hypo

SEQ ID NO: 431196 - DNA, 41 bp, Homo sapiens; identical to SEQ ID NO: 209196
  chr3:183209172-183209213
  hypo

SEQ ID NO: 431197 - DNA, 57 bp, Homo sapiens; identical to SEQ ID NO: 252933
  chr3:183245666-183245723
  hypo

SEQ ID NO: 431198 - DNA, 120 bp, Homo sapiens; identical to SEQ ID NO: 209199
  chr3:183357000-183357120
  hypo

SEQ ID NO: 431199 - DNA, 171 bp, Homo sapiens; identical to SEQ ID NO: 209200
  chr3:183381135-183381306
  hypo

SEQ ID NO: 431200 - DNA, 220 bp, Homo sapiens; identical to SEQ ID NO: 209202
  chr3:183479752-183479972
  hypo

SEQ ID NO: 431201 - DNA, 55 bp, Homo sapiens; identical to SEQ ID NO: 209203
  chr3:183525222-183525277
  hypo

SEQ ID NO: 431202 - DNA, 168 bp, Homo sapiens; identical to SEQ ID NO: 209204
  chr3:183525714-183525882
  hypo

SEQ ID NO: 431203 - DNA, 48 bp, Homo sapiens; identical to SEQ ID NO: 252941
  chr3:183529223-183529271
  hypo

SEQ ID NO: 431204 - DNA, 44 bp, Homo sapiens; identical to SEQ ID NO: 252942
  chr3:183529476-183529520
  hypo

SEQ ID NO: 431205 - DNA, 321 bp, Homo sapiens; identical to SEQ ID NO: 281774
  chr3:183602724-183603045
  hypo

SEQ ID NO: 431206 - DNA, 84 bp, Homo sapiens; identical to SEQ ID NO: 252944
  chr3:183639003-183639087
  hypo

SEQ ID NO: 431207 - DNA, 44 bp, Homo sapiens; identical to SEQ ID NO: 252945
  chr3:183642080-183642124
  hypo

SEQ ID NO: 431208 - DNA, 66 bp, Homo sapiens; identical to SEQ ID NO: 209206
  chr3:183642828-183642894
  hypo

SEQ ID NO: 431209 - DNA, 60 bp, Homo sapiens; identical to SEQ ID NO: 252949
  chr3:183652390-183652450
  hypo

SEQ ID NO: 431210 - DNA, 101 bp, Homo sapiens; identical to SEQ ID NO: 209209
  chr3:183670355-183670456
  hypo

SEQ ID NO: 431211 - DNA, 31 bp, Homo sapiens; identical to SEQ ID NO: 209210
  chr3:183676454-183676485
  hypo

SEQ ID NO: 431212 - DNA, 194 bp, Homo sapiens; identical to SEQ ID NO: 252954
  chr3:183688726-183688920
  hypo

SEQ ID NO: 431213 - DNA, 31 bp, Homo sapiens; identical to SEQ ID NO: 252955
  chr3:183698521-183698552
  hypo

SEQ ID NO: 431214 - DNA, 40 bp, Homo sapiens; identical to SEQ ID NO: 209211
  chr3:183710273-183710313
  hypo

SEQ ID NO: 431215 - DNA, 199 bp, Homo sapiens; identical to SEQ ID NO: 252958
  chr3:183720218-183720417
  hypo

SEQ ID NO: 431216 - DNA, 164 bp, Homo sapiens; identical to SEQ ID NO: 252960
  chr3:183731933-183732097
  hypo

SEQ ID NO: 431217 - DNA, 144 bp, Homo sapiens; identical to SEQ ID NO: 252961
  chr3:183775518-183775662
  hypo

SEQ ID NO: 431218 - DNA, 127 bp, Homo sapiens; identical to SEQ ID NO: 302348
  chr3:183801859-183801986
  hypo

SEQ ID NO: 431219 - DNA, 186 bp, Homo sapiens; identical to SEQ ID NO: 302349
  chr3:183802021-183802207
  hypo

SEQ ID NO: 431220 - DNA, 86 bp, Homo sapiens; identical to SEQ ID NO: 199238
  chr3:183851915-183852001
  hypo

SEQ ID NO: 431221 - DNA, 43 bp, Homo sapiens; identical to SEQ ID NO: 209213
  chr3:183872152-183872195
  hypo

SEQ ID NO: 431222 - DNA, 214 bp, Homo sapiens; identical to SEQ ID NO: 252965
  chr3:183898698-183898912
  hypo

SEQ ID NO: 431223 - DNA, 100 bp, Homo sapiens; identical to SEQ ID NO: 252966
  chr3:183921232-183921332
  hypo

SEQ ID NO: 431224 - DNA, 116 bp, Homo sapiens; identical to SEQ ID NO: 302355
  chr3:184015973-184016089
  hypo

SEQ ID NO: 431225 - DNA, 291 bp, Homo sapiens; identical to SEQ ID NO: 252970
  chr3:184026067-184026358
  hypo

SEQ ID NO: 431226 - DNA, 143 bp, Homo sapiens; identical to SEQ ID NO: 252973
  chr3:184043272-184043415
  hypo

SEQ ID NO: 431227 - DNA, 86 bp, Homo sapiens; identical to SEQ ID NO: 252974
  chr3:184045150-184045236
  hypo

SEQ ID NO: 431228 - DNA, 58 bp, Homo sapiens; identical to SEQ ID NO: 403869
  chr3:184057190-184057248
  hypo

SEQ ID NO: 431229 - DNA, 163 bp, Homo sapiens; identical to SEQ ID NO: 209219
  chr3:184059511-184059674
  hypo

SEQ ID NO: 431230 - DNA, 53 bp, Homo sapiens
  chr3:184060024-184060077
  hypo
gctttgcagcaggtggatggcagaaaggggataagctacactcttggcacagg

SEQ ID NO: 431231 - DNA, 189 bp, Homo sapiens; identical to SEQ ID NO: 252978
  chr3:184067618-184067807
  hypo

SEQ ID NO: 431232 - DNA, 107 bp, Homo sapiens; identical to SEQ ID NO: 252979
  chr3:184070507-184070614
  hypo

SEQ ID NO: 431233 - DNA, 325 bp, Homo sapiens; identical to SEQ ID NO: 252980
  chr3:184071379-184071704
  hypo

SEQ ID NO: 431234 - DNA, 33 bp, Homo sapiens; identical to SEQ ID NO: 209222
  chr3:184072073-184072106
  hypo

SEQ ID NO: 431235 - DNA, 224 bp, Homo sapiens; identical to SEQ ID NO: 281784
  chr3:184097688-184097912
  hypo

SEQ ID NO: 431236 - DNA, 280 bp, Homo sapiens; identical to SEQ ID NO: 222284
  chr3:184098372-184098652
  hypo

SEQ ID NO: 431237 - DNA, 86 bp, Homo sapiens; identical to SEQ ID NO: 281786
  chr3:184099331-184099417
  hypo

SEQ ID NO: 431238 - DNA, 34 bp, Homo sapiens; identical to SEQ ID NO: 281787
  chr3:184099446-184099480
  hypo

SEQ ID NO: 431239 - DNA, 212 bp, Homo sapiens; identical to SEQ ID NO: 252982
  chr3:184133791-184134003
  hypo

SEQ ID NO: 431240 - DNA, 146 bp, Homo sapiens; identical to SEQ ID NO: 252983
  chr3:184144868-184145014
  hypo

SEQ ID NO: 431241 - DNA, 86 bp, Homo sapiens; identical to SEQ ID NO: 209225
  chr3:184186552-184186638
  hypo

SEQ ID NO: 431242 - DNA, 101 bp, Homo sapiens; identical to SEQ ID NO: 252987
  chr3:184257024-184257125
  hypo

SEQ ID NO: 431243 - DNA, 171 bp, Homo sapiens; identical to SEQ ID NO: 209227
  chr3:184273717-184273888
  hypo

SEQ ID NO: 431244 - DNA, 42 bp, Homo sapiens; identical to SEQ ID NO: 252989
  chr3:184282049-184282091
  hypo

SEQ ID NO: 431245 - DNA, 31 bp, Homo sapiens; identical to SEQ ID NO: 252990
  chr3:184294858-184294889
  hypo

SEQ ID NO: 431246 - DNA, 165 bp, Homo sapiens; identical to SEQ ID NO: 209229
  chr3:184295484-184295649
  hypo

SEQ ID NO: 431247 - DNA, 190 bp, Homo sapiens; identical to SEQ ID NO: 252992
  chr3:184316126-184316316
  hypo

SEQ ID NO: 431248 - DNA, 178 bp, Homo sapiens; identical to SEQ ID NO: 281793
  chr3:184319612-184319790
  hypo

SEQ ID NO: 431249 - DNA, 135 bp, Homo sapiens; identical to SEQ ID NO: 281794
  chr3:184320096-184320231
  hypo

SEQ ID NO: 431250 - DNA, 182 bp, Homo sapiens; identical to SEQ ID NO: 252993
  chr3:184331111-184331293
  hypo

SEQ ID NO: 431251 - DNA, 148 bp, Homo sapiens; identical to SEQ ID NO: 209232
  chr3:184340018-184340166
  hypo

SEQ ID NO: 431252 - DNA, 111 bp, Homo sapiens; identical to SEQ ID NO: 252995
  chr3:184347419-184347530
  hypo

SEQ ID NO: 431253 - DNA, 88 bp, Homo sapiens; identical to SEQ ID NO: 252996
  chr3:184357510-184357598
  hypo

SEQ ID NO: 431254 - DNA, 45 bp, Homo sapiens; identical to SEQ ID NO: 209233
  chr3:184378704-184378749
  hypo

SEQ ID NO: 431255 - DNA, 213 bp, Homo sapiens; identical to SEQ ID NO: 252998
  chr3:184434953-184435166
  hypo

SEQ ID NO: 431256 - DNA, 108 bp, Homo sapiens; identical to SEQ ID NO: 253000
  chr3:184580626-184580734
  hypo

SEQ ID NO: 431257 - DNA, 31 bp, Homo sapiens; identical to SEQ ID NO: 403885
  chr3:184626377-184626408
  hypo

SEQ ID NO: 431258 - DNA, 38 bp, Homo sapiens; identical to SEQ ID NO: 253002
  chr3:184630019-184630057
  hypo

SEQ ID NO: 431259 - DNA, 99 bp, Homo sapiens; identical to SEQ ID NO: 209236
  chr3:184661515-184661614
  hypo

SEQ ID NO: 431260 - DNA, 341 bp, Homo sapiens; identical to SEQ ID NO: 253005
  chr3:184800447-184800788
  hypo

SEQ ID NO: 431261 - DNA, 63 bp, Homo sapiens; identical to SEQ ID NO: 209239
  chr3:184800818-184800881
  hypo

SEQ ID NO: 431262 - DNA, 93 bp, Homo sapiens; identical to SEQ ID NO: 209240
  chr3:184833596-184833689
  hypo

SEQ ID NO: 431263 - DNA, 92 bp, Homo sapiens; identical to SEQ ID NO: 209241
  chr3:184833749-184833841
  hypo

SEQ ID NO: 431264 - DNA, 130 bp, Homo sapiens; identical to SEQ ID NO: 253009
  chr3:184880628-184880758
  hypo

SEQ ID NO: 431265 - DNA, 45 bp, Homo sapiens; identical to SEQ ID NO: 253011
  chr3:185055821-185055866
  hypo

SEQ ID NO: 431266 - DNA, 97 bp, Homo sapiens; identical to SEQ ID NO: 253012
  chr3:185061154-185061251
  hypo

SEQ ID NO: 431267 - DNA, 153 bp, Homo sapiens; identical to SEQ ID NO: 253013
  chr3:185069789-185069942
  hypo

SEQ ID NO: 431268 - DNA, 142 bp, Homo sapiens; identical to SEQ ID NO: 209243
  chr3:185191405-185191547
  hypo

SEQ ID NO: 431269 - DNA, 278 bp, Homo sapiens; identical to SEQ ID NO: 253015
  chr3:185245476-185245754
  hypo

SEQ ID NO: 431270 - DNA, 33 bp, Homo sapiens; identical to SEQ ID NO: 209244
  chr3:185266642-185266675
  hypo

SEQ ID NO: 431271 - DNA, 50 bp, Homo sapiens; identical to SEQ ID NO: 302408
  chr3:185270832-185270882
  hypo

SEQ ID NO: 431272 - DNA, 119 bp, Homo sapiens; identical to SEQ ID NO: 209245
  chr3:185277645-185277764
  hypo

SEQ ID NO: 431273 - DNA, 161 bp, Homo sapiens; identical to SEQ ID NO: 209246
  chr3:185277844-185278005
  hypo

SEQ ID NO: 431274 - DNA, 67 bp, Homo sapiens; identical to SEQ ID NO: 209247
  chr3:185303180-185303247
  hypo

SEQ ID NO: 431275 - DNA, 342 bp, Homo sapiens; identical to SEQ ID NO: 253021
  chr3:185317867-185318209
  hypo

SEQ ID NO: 431276 - DNA, 80 bp, Homo sapiens; identical to SEQ ID NO: 209249
  chr3:185352337-185352417
  hypo

SEQ ID NO: 431277 - DNA, 78 bp, Homo sapiens; identical to SEQ ID NO: 209251
  chr3:185362626-185362704
  hypo

SEQ ID NO: 431278 - DNA, 104 bp, Homo sapiens; identical to SEQ ID NO: 209253
  chr3:185363652-185363756
  hypo

SEQ ID NO: 431279 - DNA, 47 bp, Homo sapiens; identical to SEQ ID NO: 403896
  chr3:185365929-185365976
  hypo

SEQ ID NO: 431280 - DNA, 73 bp, Homo sapiens; identical to SEQ ID NO: 253028
  chr3:185373822-185373895
  hypo

SEQ ID NO: 431281 - DNA, 158 bp, Homo sapiens; identical to SEQ ID NO: 253030
  chr3:185376173-185376331
  hypo

SEQ ID NO: 431282 - DNA, 34 bp, Homo sapiens; identical to SEQ ID NO: 209258
  chr3:185551485-185551519
  hypo

SEQ ID NO: 431283 - DNA, 166 bp, Homo sapiens; identical to SEQ ID NO: 209259
  chr3:185551759-185551925
  hypo

SEQ ID NO: 431284 - DNA, 32 bp, Homo sapiens; identical to SEQ ID NO: 253036
  chr3:185565288-185565320
  hypo

SEQ ID NO: 431285 - DNA, 38 bp, Homo sapiens; identical to SEQ ID NO: 253037
  chr3:185630395-185630433
  hypo

SEQ ID NO: 431286 - DNA, 37 bp, Homo sapiens; identical to SEQ ID NO: 209260
  chr3:185630673-185630710
  hypo

SEQ ID NO: 431287 - DNA, 80 bp, Homo sapiens; identical to SEQ ID NO: 209262
  chr3:185656908-185656988
  hypo

SEQ ID NO: 431288 - DNA, 95 bp, Homo sapiens; identical to SEQ ID NO: 209263
  chr3:185668397-185668492
  hypo

SEQ ID NO: 431289 - DNA, 80 bp, Homo sapiens; identical to SEQ ID NO: 209264
  chr3:185681620-185681700
  hypo

SEQ ID NO: 431290 - DNA, 713 bp, Homo sapiens; identical to SEQ ID NO: 199251
  chr3:185825460-185826173
  hypo

SEQ ID NO: 431291 - DNA, 1075 bp, Homo sapiens; identical to SEQ ID NO: 199252
  chr3:185826425-185827500
  hypo

SEQ ID NO: 431292 - DNA, 43 bp, Homo sapiens; identical to SEQ ID NO: 209268
  chr3:186142830-186142873
  hypo

SEQ ID NO: 431293 - DNA, 36 bp, Homo sapiens; identical to SEQ ID NO: 209269
  chr3:186271905-186271941
  hypo

SEQ ID NO: 431294 - DNA, 34 bp, Homo sapiens; identical to SEQ ID NO: 253046
  chr3:186309945-186309979
  hypo

SEQ ID NO: 431295 - DNA, 191 bp, Homo sapiens; identical to SEQ ID NO: 209270
  chr3:186409540-186409731
  hypo

SEQ ID NO: 431296 - DNA, 99 bp, Homo sapiens; identical to SEQ ID NO: 209271
  chr3:186429029-186429128
  hypo

SEQ ID NO: 431297 - DNA, 224 bp, Homo sapiens; identical to SEQ ID NO: 253050
  chr3:186471842-186472066
  hypo

SEQ ID NO: 431298 - DNA, 83 bp, Homo sapiens; identical to SEQ ID NO: 253051
  chr3:186530263-186530346
  hypo

SEQ ID NO: 431299 - DNA, 47 bp, Homo sapiens; identical to SEQ ID NO: 199254
  chr3:186544979-186545026
  hypo

SEQ ID NO: 431300 - DNA, 149 bp, Homo sapiens; identical to SEQ ID NO: 253053
  chr3:186713655-186713804
  hypo

SEQ ID NO: 431301 - DNA, 202 bp, Homo sapiens; identical to SEQ ID NO: 209274
  chr3:186783728-186783930
  hypo

SEQ ID NO: 431302 - DNA, 50 bp, Homo sapiens; identical to SEQ ID NO: 209275
  chr3:186938675-186938725
  hypo

SEQ ID NO: 431303 - DNA, 165 bp, Homo sapiens; identical to SEQ ID NO: 253056
  chr3:187242734-187242899
  hypo

SEQ ID NO: 431304 - DNA, 143 bp, Homo sapiens; identical to SEQ ID NO: 253057
  chr3:187281941-187282084
  hypo

SEQ ID NO: 431305 - DNA, 367 bp, Homo sapiens; identical to SEQ ID NO: 199260
  chr3:187462445-187462812
  hypo

SEQ ID NO: 431306 - DNA, 227 bp, Homo sapiens; identical to SEQ ID NO: 281825
  chr3:187463100-187463327
  hypo

SEQ ID NO: 431307 - DNA, 171 bp, Homo sapiens; identical to SEQ ID NO: 253060
  chr3:187930467-187930638
  hypo

SEQ ID NO: 431308 - DNA, 83 bp, Homo sapiens; identical to SEQ ID NO: 253061
  chr3:187984522-187984605
  hypo

SEQ ID NO: 431309 - DNA, 164 bp, Homo sapiens; identical to SEQ ID NO: 209280
  chr3:188070251-188070415
  hypo

SEQ ID NO: 431310 - DNA, 38 bp, Homo sapiens; identical to SEQ ID NO: 253063
  chr3:188246127-188246165
  hypo

SEQ ID NO: 431311 - DNA, 94 bp, Homo sapiens; identical to SEQ ID NO: 209281
  chr3:188353741-188353835
  hypo

SEQ ID NO: 431312 - DNA, 69 bp, Homo sapiens; identical to SEQ ID NO: 253065
  chr3:188365074-188365143
  hypo

SEQ ID NO: 431313 - DNA, 32 bp, Homo sapiens; identical to SEQ ID NO: 253066
  chr3:189160152-189160184
  hypo

SEQ ID NO: 431314 - DNA, 202 bp, Homo sapiens; identical to SEQ ID NO: 253067
  chr3:189557797-189557999
  hypo

SEQ ID NO: 431315 - DNA, 132 bp, Homo sapiens; identical to SEQ ID NO: 253068
  chr3:189612057-189612189
  hypo

SEQ ID NO: 431316 - DNA, 93 bp, Homo sapiens; identical to SEQ ID NO: 209282
  chr3:189618732-189618825
  hypo

SEQ ID NO: 431317 - DNA, 297 bp, Homo sapiens; identical to SEQ ID NO: 209283
  chr3:189900376-189900673
  hypo

SEQ ID NO: 431318 - DNA, 80 bp, Homo sapiens; identical to SEQ ID NO: 253071
  chr3:190105540-190105620
  hypo

SEQ ID NO: 431319 - DNA, 161 bp, Homo sapiens; identical to SEQ ID NO: 253072
  chr3:190278465-190278626
  hypo

SEQ ID NO: 431320 - DNA, 540 bp, Homo sapiens; identical to SEQ ID NO: 281835
  chr3:191046935-191047475
  hypo

SEQ ID NO: 431321 - DNA, 31 bp, Homo sapiens; identical to SEQ ID NO: 253075
  chr3:192670616-192670647
  hypo

SEQ ID NO: 431322 - DNA, 87 bp, Homo sapiens; identical to SEQ ID NO: 209285
  chr3:193235538-193235625
  hypo

SEQ ID NO: 431323 - DNA, 378 bp, Homo sapiens; identical to SEQ ID NO: 253077
  chr3:193303430-193303808
  hypo

SEQ ID NO: 431324 - DNA, 147 bp, Homo sapiens; identical to SEQ ID NO: 253078
  chr3:193314534-193314681
  hypo

SEQ ID NO: 431325 - DNA, 219 bp, Homo sapiens; identical to SEQ ID NO: 209287
  chr3:193392562-193392781
  hypo

SEQ ID NO: 431326 - DNA, 87 bp, Homo sapiens; identical to SEQ ID NO: 209290
  chr3:193428478-193428565
  hypo

SEQ ID NO: 431327 - DNA, 67 bp, Homo sapiens; identical to SEQ ID NO: 209291
  chr3:193428950-193429017
  hypo

SEQ ID NO: 431328 - DNA, 45 bp, Homo sapiens; identical to SEQ ID NO: 209292
  chr3:193438390-193438435
  hypo

SEQ ID NO: 431329 - DNA, 99 bp, Homo sapiens; identical to SEQ ID NO: 253086
  chr3:193489691-193489790
  hypo

SEQ ID NO: 431330 - DNA, 251 bp, Homo sapiens; identical to SEQ ID NO: 209294
  chr3:193490130-193490381
  hypo

SEQ ID NO: 431331 - DNA, 35 bp, Homo sapiens; identical to SEQ ID NO: 209295
  chr3:193503310-193503345
  hypo

SEQ ID NO: 431332 - DNA, 208 bp, Homo sapiens; identical to SEQ ID NO: 209296
  chr3:193505272-193505480
  hypo

SEQ ID NO: 431333 - DNA, 102 bp, Homo sapiens; identical to SEQ ID NO: 253090
  chr3:193509945-193510047
  hypo

SEQ ID NO: 431334 - DNA, 160 bp, Homo sapiens; identical to SEQ ID NO: 253091
  chr3:193513920-193514080
  hypo

SEQ ID NO: 431335 - DNA, 105 bp, Homo sapiens; identical to SEQ ID NO: 253095
  chr3:193589776-193589881
  hypo

SEQ ID NO: 431336 - DNA, 147 bp, Homo sapiens; identical to SEQ ID NO: 209298
  chr3:193659935-193660082
  hypo

SEQ ID NO: 431337 - DNA, 55 bp, Homo sapiens; identical to SEQ ID NO: 253097
  chr3:193696015-193696070
  hypo

SEQ ID NO: 431338 - DNA, 169 bp, Homo sapiens; identical to SEQ ID NO: 209299
  chr3:193711554-193711723
  hypo

SEQ ID NO: 431339 - DNA, 648 bp, Homo sapiens; identical to SEQ ID NO: 281842
  chr3:193721033-193721681
  hypo

SEQ ID NO: 431340 - DNA, 635 bp, Homo sapiens; identical to SEQ ID NO: 281845
  chr3:193853736-193854371
  hypo

SEQ ID NO: 431341 - DNA, 121 bp, Homo sapiens; identical to SEQ ID NO: 222312
  chr3:193859656-193859777
  hypo

SEQ ID NO: 431342 - DNA, 111 bp, Homo sapiens; identical to SEQ ID NO: 253101
  chr3:193940699-193940810
  hypo

SEQ ID NO: 431343 - DNA, 151 bp, Homo sapiens; identical to SEQ ID NO: 281850
  chr3:193987504-193987655
  hypo

SEQ ID NO: 431344 - DNA, 92 bp, Homo sapiens; identical to SEQ ID NO: 209308
  chr3:194012769-194012861
  hypo

SEQ ID NO: 431345 - DNA, 68 bp, Homo sapiens; identical to SEQ ID NO: 403934
  chr3:194049272-194049340
  hypo

SEQ ID NO: 431346 - DNA, 93 bp, Homo sapiens; identical to SEQ ID NO: 253106
  chr3:194058380-194058473
  hypo

SEQ ID NO: 431347 - DNA, 202 bp, Homo sapiens; identical to SEQ ID NO: 209311
  chr3:194066805-194067007
  hypo

SEQ ID NO: 431348 - DNA, 82 bp, Homo sapiens; identical to SEQ ID NO: 253109
  chr3:194078512-194078594
  hypo

SEQ ID NO: 431349 - DNA, 405 bp, Homo sapiens; identical to SEQ ID NO: 253110
  chr3:194080454-194080859
  hypo

SEQ ID NO: 431350 - DNA, 148 bp, Homo sapiens; identical to SEQ ID NO: 253111
  chr3:194105561-194105709
  hypo

SEQ ID NO: 431351 - DNA, 160 bp, Homo sapiens; identical to SEQ ID NO: 302516
  chr3:194128258-194128418
  hypo

SEQ ID NO: 431352 - DNA, 111 bp, Homo sapiens; identical to SEQ ID NO: 253113
  chr3:194166905-194167016
  hypo

SEQ ID NO: 431353 - DNA, 67 bp, Homo sapiens; identical to SEQ ID NO: 253114
  chr3:194208004-194208071
  hypo

SEQ ID NO: 431354 - DNA, 147 bp, Homo sapiens; identical to SEQ ID NO: 253115
  chr3:194228176-194228323
  hypo

SEQ ID NO: 431355 - DNA, 115 bp, Homo sapiens; identical to SEQ ID NO: 199273
  chr3:194278585-194278700
  hypo

SEQ ID NO: 431356 - DNA, 240 bp, Homo sapiens; identical to SEQ ID NO: 209315
  chr3:194301031-194301271
  hypo

SEQ ID NO: 431357 - DNA, 147 bp, Homo sapiens; identical to SEQ ID NO: 253117
  chr3:194316644-194316791
  hypo

SEQ ID NO: 431358 - DNA, 217 bp, Homo sapiens; identical to SEQ ID NO: 253118
  chr3:194324945-194325162
  hypo

SEQ ID NO: 431359 - DNA, 34 bp, Homo sapiens; identical to SEQ ID NO: 253120
  chr3:194341460-194341494
  hypo

SEQ ID NO: 431360 - DNA, 571 bp, Homo sapiens; identical to SEQ ID NO: 222316
  chr3:194353932-194354503
  hypo

SEQ ID NO: 431361 - DNA, 219 bp, Homo sapiens; identical to SEQ ID NO: 209317
  chr3:194365661-194365880
  hypo

SEQ ID NO: 431362 - DNA, 43 bp, Homo sapiens
  chr3:194374239-194374282
  hypo
ctcacaaaaaaaaaaaaaagatgaacaggggacaagcaaagtt

SEQ ID NO: 431363 - DNA, 112 bp, Homo sapiens
  chr3:194374367-194374479
  hypo
gccctcctggaggggagaattggaccttcccttcactttttactttatatgtttctgtactatttgaactctgtacaaagaacatgtattacttttgtaatttaaaataact

SEQ ID NO: 431364 - DNA, 76 bp, Homo sapiens; identical to SEQ ID NO: 253123
  chr3:194558268-194558344
  hypo

SEQ ID NO: 431365 - DNA, 186 bp, Homo sapiens; identical to SEQ ID NO: 209320
  chr3:194596888-194597074
  hypo

SEQ ID NO: 431366 - DNA, 184 bp, Homo sapiens; identical to SEQ ID NO: 253125
  chr3:194669150-194669334
  hypo

SEQ ID NO: 431367 - DNA, 63 bp, Homo sapiens; identical to SEQ ID NO: 209321
  chr3:194766334-194766397
  hypo

SEQ ID NO: 431368 - DNA, 42 bp, Homo sapiens; identical to SEQ ID NO: 253127
  chr3:194778173-194778215
  hypo

SEQ ID NO: 431369 - DNA, 48 bp, Homo sapiens; identical to SEQ ID NO: 253128
  chr3:194783225-194783273
  hypo

SEQ ID NO: 431370 - DNA, 84 bp, Homo sapiens; identical to SEQ ID NO: 209322
  chr3:194790286-194790370
  hypo

SEQ ID NO: 431371 - DNA, 158 bp, Homo sapiens; identical to SEQ ID NO: 253131
  chr3:194790635-194790793
  hypo

SEQ ID NO: 431372 - DNA, 52 bp, Homo sapiens; identical to SEQ ID NO: 253132
  chr3:194793570-194793622
  hypo

SEQ ID NO: 431373 - DNA, 38 bp, Homo sapiens; identical to SEQ ID NO: 209323
  chr3:194799662-194799700
  hypo

SEQ ID NO: 431374 - DNA, 69 bp, Homo sapiens; identical to SEQ ID NO: 209324
  chr3:194818059-194818128
  hypo

SEQ ID NO: 431375 - DNA, 163 bp, Homo sapiens; identical to SEQ ID NO: 253135
  chr3:194825299-194825462
  hypo

SEQ ID NO: 431376 - DNA, 124 bp, Homo sapiens; identical to SEQ ID NO: 253136
  chr3:194832848-194832972
  hypo

SEQ ID NO: 431377 - DNA, 601 bp, Homo sapiens; identical to SEQ ID NO: 253137
  chr3:194835412-194836013
  hypo

SEQ ID NO: 431378 - DNA, 504 bp, Homo sapiens; identical to SEQ ID NO: 209325
  chr3:194851494-194851998
  hypo

SEQ ID NO: 431379 - DNA, 166 bp, Homo sapiens; identical to SEQ ID NO: 209326
  chr3:194866034-194866200
  hypo

SEQ ID NO: 431380 - DNA, 180 bp, Homo sapiens; identical to SEQ ID NO: 209327
  chr3:194927046-194927226
  hypo

SEQ ID NO: 431381 - DNA, 152 bp, Homo sapiens; identical to SEQ ID NO: 209328
  chr3:194935163-194935315
  hypo

SEQ ID NO: 431382 - DNA, 258 bp, Homo sapiens; identical to SEQ ID NO: 222317
  chr3:194980253-194980511
  hypo

SEQ ID NO: 431383 - DNA, 187 bp, Homo sapiens; identical to SEQ ID NO: 209330
  chr3:195012971-195013158
  hypo

SEQ ID NO: 431384 - DNA, 69 bp, Homo sapiens; identical to SEQ ID NO: 253143
  chr3:195058610-195058679
  hypo

SEQ ID NO: 431385 - DNA, 78 bp, Homo sapiens; identical to SEQ ID NO: 209332
  chr3:195134178-195134256
  hypo

SEQ ID NO: 431386 - DNA, 77 bp, Homo sapiens; identical to SEQ ID NO: 253146
  chr3:195139467-195139544
  hypo

SEQ ID NO: 431387 - DNA, 38 bp, Homo sapiens; identical to SEQ ID NO: 209334
  chr3:195183766-195183804
  hypo

SEQ ID NO: 431388 - DNA, 240 bp, Homo sapiens; identical to SEQ ID NO: 209335
  chr3:195194375-195194615
  hypo

SEQ ID NO: 431389 - DNA, 155 bp, Homo sapiens; identical to SEQ ID NO: 209336
  chr3:195393196-195393351
  hypo

SEQ ID NO: 431390 - DNA, 227 bp, Homo sapiens; identical to SEQ ID NO: 209337
  chr3:195419009-195419236
  hypo

SEQ ID NO: 431391 - DNA, 126 bp, Homo sapiens; identical to SEQ ID NO: 253152
  chr3:195448190-195448316
  hypo

SEQ ID NO: 431392 - DNA, 497 bp, Homo sapiens; identical to SEQ ID NO: 253154
  chr3:195537487-195537984
  hypo

SEQ ID NO: 431393 - DNA, 195 bp, Homo sapiens; identical to SEQ ID NO: 209339
  chr3:195539283-195539478
  hypo

SEQ ID NO: 431394 - DNA, 181 bp, Homo sapiens; identical to SEQ ID NO: 253156
  chr3:195573453-195573634
  hypo

SEQ ID NO: 431395 - DNA, 87 bp, Homo sapiens; identical to SEQ ID NO: 253158
  chr3:195591689-195591776
  hypo

SEQ ID NO: 431396 - DNA, 279 bp, Homo sapiens; identical to SEQ ID NO: 253159
  chr3:195592096-195592375
  hypo

SEQ ID NO: 431397 - DNA, 159 bp, Homo sapiens; identical to SEQ ID NO: 253160
  chr3:195592435-195592594
  hypo

SEQ ID NO: 431398 - DNA, 159 bp, Homo sapiens; identical to SEQ ID NO: 209341
  chr3:195595789-195595948
  hypo

SEQ ID NO: 431399 - DNA, 115 bp, Homo sapiens; identical to SEQ ID NO: 209347
  chr3:195604987-195605102
  hypo

SEQ ID NO: 431400 - DNA, 204 bp, Homo sapiens; identical to SEQ ID NO: 253168
  chr3:195605370-195605574
  hypo

SEQ ID NO: 431401 - DNA, 141 bp, Homo sapiens; identical to SEQ ID NO: 281866
  chr3:195610106-195610247
  hypo

SEQ ID NO: 431402 - DNA, 33 bp, Homo sapiens; identical to SEQ ID NO: 199281
  chr3:195636198-195636231
  hypo

SEQ ID NO: 431403 - DNA, 180 bp, Homo sapiens; identical to SEQ ID NO: 209350
  chr3:195639452-195639632
  hypo

SEQ ID NO: 431404 - DNA, 99 bp, Homo sapiens; identical to SEQ ID NO: 253173
  chr3:195643956-195644055
  hypo

SEQ ID NO: 431405 - DNA, 80 bp, Homo sapiens; identical to SEQ ID NO: 253175
  chr3:195691554-195691634
  hypo

SEQ ID NO: 431406 - DNA, 342 bp, Homo sapiens; identical to SEQ ID NO: 253176
  chr3:195735474-195735816
  hypo

SEQ ID NO: 431407 - DNA, 71 bp, Homo sapiens; identical to SEQ ID NO: 209351
  chr3:195752039-195752110
  hypo

SEQ ID NO: 431408 - DNA, 259 bp, Homo sapiens; identical to SEQ ID NO: 253179
  chr3:195763583-195763842
  hypo

SEQ ID NO: 431409 - DNA, 94 bp, Homo sapiens; identical to SEQ ID NO: 253180
  chr3:195770516-195770610
  hypo

SEQ ID NO: 431410 - DNA, 344 bp, Homo sapiens; identical to SEQ ID NO: 253181
  chr3:195778818-195779162
  hypo

SEQ ID NO: 431411 - DNA, 505 bp, Homo sapiens; identical to SEQ ID NO: 281869
  chr3:195808865-195809370
  hypo

SEQ ID NO: 431412 - DNA, 36 bp, Homo sapiens; identical to SEQ ID NO: 209354
  chr3:195863857-195863893
  hypo

SEQ ID NO: 431413 - DNA, 37 bp, Homo sapiens; identical to SEQ ID NO: 209355
  chr3:195866855-195866892
  hypo

SEQ ID NO: 431414 - DNA, 197 bp, Homo sapiens; identical to SEQ ID NO: 253185
  chr3:195867976-195868173
  hypo

SEQ ID NO: 431415 - DNA, 35 bp, Homo sapiens; identical to SEQ ID NO: 209356
  chr3:195901887-195901922
  hypo

SEQ ID NO: 431416 - DNA, 97 bp, Homo sapiens; identical to SEQ ID NO: 253187
  chr3:195910787-195910884
  hypo

SEQ ID NO: 431417 - DNA, 169 bp, Homo sapiens; identical to SEQ ID NO: 253188
  chr3:195923150-195923319
  hypo

SEQ ID NO: 431418 - DNA, 32 bp, Homo sapiens; identical to SEQ ID NO: 253189
  chr3:195960904-195960936
  hypo

SEQ ID NO: 431419 - DNA, 32 bp, Homo sapiens; identical to SEQ ID NO: 253190
  chr3:195961176-195961208
  hypo

SEQ ID NO: 431420 - DNA, 44 bp, Homo sapiens; identical to SEQ ID NO: 209357
  chr3:195990771-195990815
  hypo

SEQ ID NO: 431421 - DNA, 39 bp, Homo sapiens; identical to SEQ ID NO: 253192
  chr3:196039339-196039378
  hypo

SEQ ID NO: 431422 - DNA, 98 bp, Homo sapiens; identical to SEQ ID NO: 209358
  chr3:196039618-196039716
  hypo

SEQ ID NO: 431423 - DNA, 123 bp, Homo sapiens; identical to SEQ ID NO: 302605
  chr3:196099522-196099645
  hypo

SEQ ID NO: 431424 - DNA, 38 bp, Homo sapiens; identical to SEQ ID NO: 209359
  chr3:196138792-196138830
  hypo

SEQ ID NO: 431425 - DNA, 138 bp, Homo sapiens; identical to SEQ ID NO: 209360
  chr3:196143804-196143942
  hypo

SEQ ID NO: 431426 - DNA, 77 bp, Homo sapiens; identical to SEQ ID NO: 209361
  chr3:196144182-196144259
  hypo

SEQ ID NO: 431427 - DNA, 242 bp, Homo sapiens; identical to SEQ ID NO: 209362
  chr3:196199259-196199501
  hypo

SEQ ID NO: 431428 - DNA, 81 bp, Homo sapiens; identical to SEQ ID NO: 253202
  chr3:196245241-196245322
  hypo

SEQ ID NO: 431429 - DNA, 44 bp, Homo sapiens; identical to SEQ ID NO: 253204
  chr3:196263529-196263573
  hypo

SEQ ID NO: 431430 - DNA, 240 bp, Homo sapiens; identical to SEQ ID NO: 253205
  chr3:196297367-196297607
  hypo

SEQ ID NO: 431431 - DNA, 149 bp, Homo sapiens; identical to SEQ ID NO: 253206
  chr3:196302878-196303027
  hypo

SEQ ID NO: 431432 - DNA, 148 bp, Homo sapiens; identical to SEQ ID NO: 302615
  chr3:196318576-196318724
  hypo

SEQ ID NO: 431433 - DNA, 144 bp, Homo sapiens; identical to SEQ ID NO: 302616
  chr3:196318763-196318907
  hypo

SEQ ID NO: 431434 - DNA, 197 bp, Homo sapiens; identical to SEQ ID NO: 253208
  chr3:196376654-196376851
  hypo

SEQ ID NO: 431435 - DNA, 224 bp, Homo sapiens; identical to SEQ ID NO: 253209
  chr3:196382389-196382613
  hypo

SEQ ID NO: 431436 - DNA, 209 bp, Homo sapiens; identical to SEQ ID NO: 209365
  chr3:196402791-196403000
  hypo

SEQ ID NO: 431437 - DNA, 88 bp, Homo sapiens; identical to SEQ ID NO: 253214
  chr3:196412488-196412576
  hypo

SEQ ID NO: 431438 - DNA, 36 bp, Homo sapiens; identical to SEQ ID NO: 302623
  chr3:196440474-196440510
  hypo

SEQ ID NO: 431439 - DNA, 42 bp, Homo sapiens; identical to SEQ ID NO: 253217
  chr3:196469496-196469538
  hypo

SEQ ID NO: 431440 - DNA, 163 bp, Homo sapiens; identical to SEQ ID NO: 253218
  chr3:196477978-196478141
  hypo

SEQ ID NO: 431441 - DNA, 202 bp, Homo sapiens; identical to SEQ ID NO: 209367
  chr3:196530355-196530557
  hypo

SEQ ID NO: 431442 - DNA, 245 bp, Homo sapiens; identical to SEQ ID NO: 253220
  chr3:196674980-196675225
  hypo

SEQ ID NO: 431443 - DNA, 223 bp, Homo sapiens; identical to SEQ ID NO: 222323
  chr3:196695305-196695528
  hypo

SEQ ID NO: 431444 - DNA, 89 bp, Homo sapiens; identical to SEQ ID NO: 253221
  chr3:196700062-196700151
  hypo

SEQ ID NO: 431445 - DNA, 291 bp, Homo sapiens; identical to SEQ ID NO: 209368
  chr3:196723696-196723987
  hypo

SEQ ID NO: 431446 - DNA, 613 bp, Homo sapiens; identical to SEQ ID NO: 253224
  chr3:196752264-196752877
  hypo

SEQ ID NO: 431447 - DNA, 112 bp, Homo sapiens; identical to SEQ ID NO: 209373
  chr3:196766007-196766119
  hypo

SEQ ID NO: 431448 - DNA, 86 bp, Homo sapiens; identical to SEQ ID NO: 209374
  chr3:196766195-196766281
  hypo

SEQ ID NO: 431449 - DNA, 61 bp, Homo sapiens; identical to SEQ ID NO: 302637
  chr3:196784269-196784330
  hypo

SEQ ID NO: 431450 - DNA, 192 bp, Homo sapiens; identical to SEQ ID NO: 209375
  chr3:196817782-196817974
  hypo

SEQ ID NO: 431451 - DNA, 147 bp, Homo sapiens; identical to SEQ ID NO: 253229
  chr3:196907217-196907364
  hypo

SEQ ID NO: 431452 - DNA, 85 bp, Homo sapiens; identical to SEQ ID NO: 302640
  chr3:196910545-196910630
  hypo

SEQ ID NO: 431453 - DNA, 156 bp, Homo sapiens; identical to SEQ ID NO: 253231
  chr3:197027476-197027632
  hypo

SEQ ID NO: 431454 - DNA, 158 bp, Homo sapiens; identical to SEQ ID NO: 253232
  chr3:197094180-197094338
  hypo

SEQ ID NO: 431455 - DNA, 380 bp, Homo sapiens; identical to SEQ ID NO: 253233
  chr3:197121210-197121590
  hypo

SEQ ID NO: 431456 - DNA, 283 bp, Homo sapiens; identical to SEQ ID NO: 253234
  chr3:197124819-197125102
  hypo

SEQ ID NO: 431457 - DNA, 86 bp, Homo sapiens; identical to SEQ ID NO: 253235
  chr3:197127430-197127516
  hypo

SEQ ID NO: 431458 - DNA, 251 bp, Homo sapiens; identical to SEQ ID NO: 209376
  chr3:197133872-197134123
  hypo

SEQ ID NO: 431459 - DNA, 31 bp, Homo sapiens; identical to SEQ ID NO: 253237
  chr3:197136800-197136831
  hypo

SEQ ID NO: 431460 - DNA, 74 bp, Homo sapiens; identical to SEQ ID NO: 209377
  chr3:197152285-197152359
  hypo

SEQ ID NO: 431461 - DNA, 160 bp, Homo sapiens; identical to SEQ ID NO: 253239
  chr3:197170406-197170566
  hypo

SEQ ID NO: 431462 - DNA, 94 bp, Homo sapiens; identical to SEQ ID NO: 253240
  chr3:197216365-197216459
  hypo

SEQ ID NO: 431463 - DNA, 96 bp, Homo sapiens; identical to SEQ ID NO: 199284
  chr3:197222652-197222748
  hypo

SEQ ID NO: 431464 - DNA, 141 bp, Homo sapiens; identical to SEQ ID NO: 253242
  chr3:197231739-197231880
  hypo

SEQ ID NO: 431465 - DNA, 300 bp, Homo sapiens; identical to SEQ ID NO: 253243
  chr3:197238899-197239199
  hypo

SEQ ID NO: 431466 - DNA, 360 bp, Homo sapiens; identical to SEQ ID NO: 253244
  chr3:197241231-197241591
  hypo

SEQ ID NO: 431467 - DNA, 223 bp, Homo sapiens; identical to SEQ ID NO: 209380
  chr3:197243349-197243572
  hypo

SEQ ID NO: 431468 - DNA, 100 bp, Homo sapiens; identical to SEQ ID NO: 209381
  chr3:197246890-197246990
  hypo

SEQ ID NO: 431469 - DNA, 211 bp, Homo sapiens; identical to SEQ ID NO: 209382
  chr3:197250416-197250627
  hypo

SEQ ID NO: 431470 - DNA, 156 bp, Homo sapiens; identical to SEQ ID NO: 281883
  chr3:197281702-197281858
  hypo

SEQ ID NO: 431471 - DNA, 238 bp, Homo sapiens; identical to SEQ ID NO: 109572
  chr3:197281920-197282158
  hypo

SEQ ID NO: 431472 - DNA, 132 bp, Homo sapiens; identical to SEQ ID NO: 302662
  chr3:197327641-197327773
  hypo

SEQ ID NO: 431473 - DNA, 180 bp, Homo sapiens; identical to SEQ ID NO: 209386
  chr3:197330487-197330667
  hypo

SEQ ID NO: 431474 - DNA, 99 bp, Homo sapiens; identical to SEQ ID NO: 253252
  chr3:197401910-197402009
  hypo

SEQ ID NO: 431475 - DNA, 221 bp, Homo sapiens; identical to SEQ ID NO: 253254
  chr3:197582614-197582835
  hypo

SEQ ID NO: 431476 - DNA, 39 bp, Homo sapiens; identical to SEQ ID NO: 302668
  chr3:197608011-197608050
  hypo

SEQ ID NO: 431477 - DNA, 114 bp, Homo sapiens; identical to SEQ ID NO: 209388
  chr3:197616593-197616707
  hypo

SEQ ID NO: 431478 - DNA, 155 bp, Homo sapiens; identical to SEQ ID NO: 253258
  chr3:197640193-197640348
  hypo

SEQ ID NO: 431479 - DNA, 76 bp, Homo sapiens; identical to SEQ ID NO: 209389
  chr3:197663680-197663756
  hypo

SEQ ID NO: 431480 - DNA, 35 bp, Homo sapiens; identical to SEQ ID NO: 253261
  chr3:197714311-197714346
  hypo

SEQ ID NO: 431481 - DNA, 87 bp, Homo sapiens; identical to SEQ ID NO: 253262
  chr3:197726426-197726513
  hypo

SEQ ID NO: 431482 - DNA, 183 bp, Homo sapiens; identical to SEQ ID NO: 209391
  chr3:197764838-197765021
  hypo

SEQ ID NO: 431483 - DNA, 230 bp, Homo sapiens; identical to SEQ ID NO: 209392
  chr4:503184-503414
  hypo

SEQ ID NO: 431484 - DNA, 58 bp, Homo sapiens
  chr4:513955-514013
  hypo
gagcctgccaagaggcacagctgagacccttcttggcatggctcttctggagtaggaa

SEQ ID NO: 431485 - DNA, 135 bp, Homo sapiens; identical to SEQ ID NO: 253267
  chr4:530423-530558
  hypo

SEQ ID NO: 431486 - DNA, 111 bp, Homo sapiens; identical to SEQ ID NO: 253268
  chr4:610967-611078
  hypo

SEQ ID NO: 431487 - DNA, 253 bp, Homo sapiens; identical to SEQ ID NO: 209396
  chr4:616352-616605
  hypo

SEQ ID NO: 431488 - DNA, 153 bp, Homo sapiens; identical to SEQ ID NO: 253271
  chr4:618645-618798
  hypo

SEQ ID NO: 431489 - DNA, 236 bp, Homo sapiens; identical to SEQ ID NO: 209403
  chr4:655879-656115
  hypo

SEQ ID NO: 431490 - DNA, 226 bp, Homo sapiens; identical to SEQ ID NO: 281898
  chr4:667540-667766
  hypo

SEQ ID NO: 431491 - DNA, 254 bp, Homo sapiens; identical to SEQ ID NO: 209406
  chr4:679512-679766
  hypo

SEQ ID NO: 431492 - DNA, 44 bp, Homo sapiens; identical to SEQ ID NO: 253278
  chr4:708090-708134
  hypo

SEQ ID NO: 431493 - DNA, 81 bp, Homo sapiens; identical to SEQ ID NO: 302702
  chr4:718240-718321
  hypo

SEQ ID NO: 431494 - DNA, 187 bp, Homo sapiens; identical to SEQ ID NO: 209407
  chr4:722182-722369
  hypo

SEQ ID NO: 431495 - DNA, 167 bp, Homo sapiens; identical to SEQ ID NO: 302705
  chr4:741787-741954
  hypo

SEQ ID NO: 431496 - DNA, 275 bp, Homo sapiens; identical to SEQ ID NO: 253283
  chr4:744982-745257
  hypo

SEQ ID NO: 431497 - DNA, 185 bp, Homo sapiens; identical to SEQ ID NO: 253284
  chr4:745651-745836
  hypo

SEQ ID NO: 431498 - DNA, 474 bp, Homo sapiens; identical to SEQ ID NO: 209408
  chr4:756822-757296
  hypo

SEQ ID NO: 431499 - DNA, 183 bp, Homo sapiens; identical to SEQ ID NO: 209409
  chr4:757326-757509
  hypo

SEQ ID NO: 431500 - DNA, 210 bp, Homo sapiens; identical to SEQ ID NO: 209411
  chr4:765529-765739
  hypo

SEQ ID NO: 431501 - DNA, 34 bp, Homo sapiens; identical to SEQ ID NO: 253289
  chr4:793059-793093
  hypo

SEQ ID NO: 431502 - DNA, 139 bp, Homo sapiens; identical to SEQ ID NO: 253290
  chr4:793648-793787
  hypo

SEQ ID NO: 431503 - DNA, 458 bp, Homo sapiens; identical to SEQ ID NO: 253291
  chr4:812189-812647
  hypo

SEQ ID NO: 431504 - DNA, 97 bp, Homo sapiens; identical to SEQ ID NO: 253292
  chr4:815186-815283
  hypo

SEQ ID NO: 431505 - DNA, 219 bp, Homo sapiens; identical to SEQ ID NO: 253294
  chr4:841555-841774
  hypo

SEQ ID NO: 431506 - DNA, 726 bp, Homo sapiens; identical to SEQ ID NO: 253295
  chr4:843330-844056
  hypo

SEQ ID NO: 431507 - DNA, 121 bp, Homo sapiens; identical to SEQ ID NO: 209413
  chr4:854460-854581
  hypo

SEQ ID NO: 431508 - DNA, 378 bp, Homo sapiens; identical to SEQ ID NO: 253298
  chr4:860587-860965
  hypo

SEQ ID NO: 431509 - DNA, 114 bp, Homo sapiens; identical to SEQ ID NO: 253299
  chr4:864981-865095
  hypo

SEQ ID NO: 431510 - DNA, 177 bp, Homo sapiens; identical to SEQ ID NO: 253300
  chr4:866140-866317
  hypo

SEQ ID NO: 431511 - DNA, 247 bp, Homo sapiens; identical to SEQ ID NO: 253301
  chr4:872637-872884
  hypo

SEQ ID NO: 431512 - DNA, 149 bp, Homo sapiens; identical to SEQ ID NO: 253302
  chr4:873652-873801
  hypo

SEQ ID NO: 431513 - DNA, 111 bp, Homo sapiens; identical to SEQ ID NO: 253303
  chr4:877548-877659
  hypo

SEQ ID NO: 431514 - DNA, 38 bp, Homo sapiens; identical to SEQ ID NO: 209415
  chr4:881388-881426
  hypo

SEQ ID NO: 431515 - DNA, 135 bp, Homo sapiens; identical to SEQ ID NO: 209416
  chr4:882583-882718
  hypo

SEQ ID NO: 431516 - DNA, 123 bp, Homo sapiens; identical to SEQ ID NO: 253306
  chr4:887622-887745
  hypo

SEQ ID NO: 431517 - DNA, 113 bp, Homo sapiens; identical to SEQ ID NO: 209417
  chr4:891957-892070
  hypo

SEQ ID NO: 431518 - DNA, 224 bp, Homo sapiens; identical to SEQ ID NO: 253308
  chr4:899761-899985
  hypo

SEQ ID NO: 431519 - DNA, 36 bp, Homo sapiens; identical to SEQ ID NO: 253310
  chr4:907579-907615
  hypo

SEQ ID NO: 431520 - DNA, 92 bp, Homo sapiens; identical to SEQ ID NO: 253311
  chr4:937313-937405
  hypo

SEQ ID NO: 431521 - DNA, 89 bp, Homo sapiens; identical to SEQ ID NO: 253312
  chr4:937752-937841
  hypo

SEQ ID NO: 431522 - DNA, 41 bp, Homo sapiens; identical to SEQ ID NO: 209421
  chr4:949385-949426
  hypo

SEQ ID NO: 431523 - DNA, 109 bp, Homo sapiens
  chr4:957300-957409
  hypo
ggctggctgcctggcactcccagcacaaaggcctcagacctgcccactgagctgcgtgtgaacagaccacacccgcctgggccatgcagcgcgagtccaggctggaaat

SEQ ID NO: 431524 - DNA, 137 bp, Homo sapiens; identical to SEQ ID NO: 302743
  chr4:957439-957576
  hypo

SEQ ID NO: 431525 - DNA, 178 bp, Homo sapiens; identical to SEQ ID NO: 253315
  chr4:965203-965381
  hypo

SEQ ID NO: 431526 - DNA, 309 bp, Homo sapiens; identical to SEQ ID NO: 222331
  chr4:966933-967242
  hypo

SEQ ID NO: 431527 - DNA, 32 bp, Homo sapiens; identical to SEQ ID NO: 209424
  chr4:982809-982841
  hypo

SEQ ID NO: 431528 - DNA, 38 bp, Homo sapiens; identical to SEQ ID NO: 209425
  chr4:995247-995285
  hypo

SEQ ID NO: 431529 - DNA, 396 bp, Homo sapiens; identical to SEQ ID NO: 199291
  chr4:1004393-1004789
  hypo

SEQ ID NO: 431530 - DNA, 250 bp, Homo sapiens; identical to SEQ ID NO: 209427
  chr4:1007048-1007298
  hypo

SEQ ID NO: 431531 - DNA, 133 bp, Homo sapiens; identical to SEQ ID NO: 253321
  chr4:1012455-1012588
  hypo

SEQ ID NO: 431532 - DNA, 67 bp, Homo sapiens; identical to SEQ ID NO: 253323
  chr4:1022505-1022572
  hypo

SEQ ID NO: 431533 - DNA, 232 bp, Homo sapiens; identical to SEQ ID NO: 302755
  chr4:1022602-1022834
  hypo

SEQ ID NO: 431534 - DNA, 181 bp, Homo sapiens; identical to SEQ ID NO: 253327
  chr4:1044472-1044653
  hypo

SEQ ID NO: 431535 - DNA, 97 bp, Homo sapiens; identical to SEQ ID NO: 253328
  chr4:1077032-1077129
  hypo

SEQ ID NO: 431536 - DNA, 128 bp, Homo sapiens; identical to SEQ ID NO: 209432
  chr4:1189100-1189228
  hypo

SEQ ID NO: 431537 - DNA, 42 bp, Homo sapiens; identical to SEQ ID NO: 253331
  chr4:1201010-1201052
  hypo

SEQ ID NO: 431538 - DNA, 240 bp, Homo sapiens; identical to SEQ ID NO: 253332
  chr4:1201278-1201518
  hypo

SEQ ID NO: 431539 - DNA, 333 bp, Homo sapiens; identical to SEQ ID NO: 253333
  chr4:1202638-1202971
  hypo

SEQ ID NO: 431540 - DNA, 63 bp, Homo sapiens; identical to SEQ ID NO: 209434
  chr4:1204981-1205044
  hypo

SEQ ID NO: 431541 - DNA, 396 bp, Homo sapiens; identical to SEQ ID NO: 253337
  chr4:1208723-1209119
  hypo

SEQ ID NO: 431542 - DNA, 135 bp, Homo sapiens; identical to SEQ ID NO: 209437
  chr4:1212170-1212305
  hypo

SEQ ID NO: 431543 - DNA, 415 bp, Homo sapiens; identical to SEQ ID NO: 253341
  chr4:1215813-1216228
  hypo

SEQ ID NO: 431544 - DNA, 200 bp, Homo sapiens; identical to SEQ ID NO: 253342
  chr4:1217207-1217407
  hypo

SEQ ID NO: 431545 - DNA, 175 bp, Homo sapiens; identical to SEQ ID NO: 209442
  chr4:1222481-1222656
  hypo

SEQ ID NO: 431546 - DNA, 365 bp, Homo sapiens; identical to SEQ ID NO: 209443
  chr4:1222883-1223248
  hypo

SEQ ID NO: 431547 - DNA, 40 bp, Homo sapiens; identical to SEQ ID NO: 209444
  chr4:1224485-1224525
  hypo

SEQ ID NO: 431548 - DNA, 76 bp, Homo sapiens; identical to SEQ ID NO: 209445
  chr4:1224555-1224631
  hypo

SEQ ID NO: 431549 - DNA, 38 bp, Homo sapiens; identical to SEQ ID NO: 253347
  chr4:1224661-1224699
  hypo

SEQ ID NO: 431550 - DNA, 552 bp, Homo sapiens; identical to SEQ ID NO: 253349
  chr4:1228596-1229148
  hypo

SEQ ID NO: 431551 - DNA, 77 bp, Homo sapiens; identical to SEQ ID NO: 253350
  chr4:1232725-1232802
  hypo

SEQ ID NO: 431552 - DNA, 166 bp, Homo sapiens; identical to SEQ ID NO: 253351
  chr4:1238879-1239045
  hypo

SEQ ID NO: 431553 - DNA, 140 bp, Homo sapiens; identical to SEQ ID NO: 199293
  chr4:1243421-1243561
  hypo

SEQ ID NO: 431554 - DNA, 70 bp, Homo sapiens; identical to SEQ ID NO: 253356
  chr4:1304008-1304078
  hypo

SEQ ID NO: 431555 - DNA, 135 bp, Homo sapiens; identical to SEQ ID NO: 253357
  chr4:1305766-1305901
  hypo

SEQ ID NO: 431556 - DNA, 369 bp, Homo sapiens; identical to SEQ ID NO: 253358
  chr4:1309326-1309695
  hypo

SEQ ID NO: 431557 - DNA, 110 bp, Homo sapiens; identical to SEQ ID NO: 209451
  chr4:1309945-1310055
  hypo

SEQ ID NO: 431558 - DNA, 91 bp, Homo sapiens; identical to SEQ ID NO: 209453
  chr4:1322319-1322410
  hypo

SEQ ID NO: 431559 - DNA, 223 bp, Homo sapiens; identical to SEQ ID NO: 209454
  chr4:1323177-1323400
  hypo

SEQ ID NO: 431560 - DNA, 157 bp, Homo sapiens; identical to SEQ ID NO: 253364
  chr4:1324018-1324175
  hypo

SEQ ID NO: 431561 - DNA, 56 bp, Homo sapiens; identical to SEQ ID NO: 253365
  chr4:1324514-1324570
  hypo

SEQ ID NO: 431562 - DNA, 256 bp, Homo sapiens; identical to SEQ ID NO: 253366
  chr4:1324847-1325103
  hypo

SEQ ID NO: 431563 - DNA, 220 bp, Homo sapiens; identical to SEQ ID NO: 253372
  chr4:1333934-1334154
  hypo

SEQ ID NO: 431564 - DNA, 68 bp, Homo sapiens; identical to SEQ ID NO: 253373
  chr4:1334471-1334539
  hypo

SEQ ID NO: 431565 - DNA, 33 bp, Homo sapiens; identical to SEQ ID NO: 209466
  chr4:1348027-1348060
  hypo

SEQ ID NO: 431566 - DNA, 248 bp, Homo sapiens; identical to SEQ ID NO: 253378
  chr4:1354334-1354582
  hypo

SEQ ID NO: 431567 - DNA, 132 bp, Homo sapiens; identical to SEQ ID NO: 253379
  chr4:1355307-1355439
  hypo

SEQ ID NO: 431568 - DNA, 69 bp, Homo sapiens; identical to SEQ ID NO: 281916
  chr4:1399564-1399633
  hypo

SEQ ID NO: 431569 - DNA, 58 bp, Homo sapiens; identical to SEQ ID NO: 281917
  chr4:1399665-1399723
  hypo

SEQ ID NO: 431570 - DNA, 213 bp, Homo sapiens; identical to SEQ ID NO: 417390
  chr4:1399768-1399981
  hypo

SEQ ID NO: 431571 - DNA, 124 bp, Homo sapiens; identical to SEQ ID NO: 281921
  chr4:1404605-1404729
  hypo

SEQ ID NO: 431572 - DNA, 408 bp, Homo sapiens; identical to SEQ ID NO: 281922
  chr4:1407532-1407940
  hypo

SEQ ID NO: 431573 - DNA, 101 bp, Homo sapiens; identical to SEQ ID NO: 253380
  chr4:1411588-1411689
  hypo

SEQ ID NO: 431574 - DNA, 137 bp, Homo sapiens; identical to SEQ ID NO: 253381
  chr4:1411719-1411856
  hypo

SEQ ID NO: 431575 - DNA, 283 bp, Homo sapiens; identical to SEQ ID NO: 253382
  chr4:1491943-1492226
  hypo

SEQ ID NO: 431576 - DNA, 120 bp, Homo sapiens; identical to SEQ ID NO: 253383
  chr4:1537043-1537163
  hypo

SEQ ID NO: 431577 - DNA, 94 bp, Homo sapiens; identical to SEQ ID NO: 253384
  chr4:1537283-1537377
  hypo

SEQ ID NO: 431578 - DNA, 119 bp, Homo sapiens; identical to SEQ ID NO: 147828
  chr4:1538148-1538267
  hypo

SEQ ID NO: 431579 - DNA, 575 bp, Homo sapiens; identical to SEQ ID NO: 253389
  chr4:1563631-1564206
  hypo

SEQ ID NO: 431580 - DNA, 62 bp, Homo sapiens; identical to SEQ ID NO: 253391
  chr4:1585407-1585469
  hypo

SEQ ID NO: 431581 - DNA, 524 bp, Homo sapiens; identical to SEQ ID NO: 253392
  chr4:1600696-1601220
  hypo

SEQ ID NO: 431582 - DNA, 127 bp, Homo sapiens; identical to SEQ ID NO: 209469
  chr4:1616406-1616533
  hypo

SEQ ID NO: 431583 - DNA, 471 bp, Homo sapiens; identical to SEQ ID NO: 253394
  chr4:1621151-1621622
  hypo

SEQ ID NO: 431584 - DNA, 265 bp, Homo sapiens; identical to SEQ ID NO: 253395
  chr4:1626395-1626660
  hypo

SEQ ID NO: 431585 - DNA, 39 bp, Homo sapiens; identical to SEQ ID NO: 253396
  chr4:1638196-1638235
  hypo

SEQ ID NO: 431586 - DNA, 45 bp, Homo sapiens; identical to SEQ ID NO: 253397
  chr4:1642970-1643015
  hypo

SEQ ID NO: 431587 - DNA, 478 bp, Homo sapiens; identical to SEQ ID NO: 253398
  chr4:1645866-1646344
  hypo

SEQ ID NO: 431588 - DNA, 374 bp, Homo sapiens; identical to SEQ ID NO: 253399
  chr4:1651637-1652011
  hypo

SEQ ID NO: 431589 - DNA, 162 bp, Homo sapiens; identical to SEQ ID NO: 209471
  chr4:1656589-1656751
  hypo

SEQ ID NO: 431590 - DNA, 99 bp, Homo sapiens; identical to SEQ ID NO: 209472
  chr4:1658844-1658943
  hypo

SEQ ID NO: 431591 - DNA, 312 bp, Homo sapiens; identical to SEQ ID NO: 253402
  chr4:1672854-1673166
  hypo

SEQ ID NO: 431592 - DNA, 50 bp, Homo sapiens; identical to SEQ ID NO: 209473
  chr4:1684725-1684775
  hypo

SEQ ID NO: 431593 - DNA, 35 bp, Homo sapiens; identical to SEQ ID NO: 209474
  chr4:1684805-1684840
  hypo

SEQ ID NO: 431594 - DNA, 43 bp, Homo sapiens; identical to SEQ ID NO: 391023
  chr4:1738656-1738699
  hypo

SEQ ID NO: 431595 - DNA, 681 bp, Homo sapiens; identical to SEQ ID NO: 253407
  chr4:1760184-1760865
  hypo

SEQ ID NO: 431596 - DNA, 148 bp, Homo sapiens; identical to SEQ ID NO: 253408
  chr4:1763039-1763187
  hypo

SEQ ID NO: 431597 - DNA, 129 bp, Homo sapiens; identical to SEQ ID NO: 253409
  chr4:1768300-1768429
  hypo

SEQ ID NO: 431598 - DNA, 368 bp, Homo sapiens; identical to SEQ ID NO: 209476
  chr4:1778329-1778697
  hypo

SEQ ID NO: 431599 - DNA, 475 bp, Homo sapiens; identical to SEQ ID NO: 253411
  chr4:1781228-1781703
  hypo

SEQ ID NO: 431600 - DNA, 97 bp, Homo sapiens; identical to SEQ ID NO: 209478
  chr4:1782913-1783010
  hypo

SEQ ID NO: 431601 - DNA, 474 bp, Homo sapiens; identical to SEQ ID NO: 253413
  chr4:1784388-1784862
  hypo

SEQ ID NO: 431602 - DNA, 73 bp, Homo sapiens; identical to SEQ ID NO: 253414
  chr4:1785062-1785135
  hypo

SEQ ID NO: 431603 - DNA, 58 bp, Homo sapiens; identical to SEQ ID NO: 209479
  chr4:1787676-1787734
  hypo

SEQ ID NO: 431604 - DNA, 41 bp, Homo sapiens
  chr4:1791451-1791492
  hypo
ggaggccctgcacccaggatgggcctccctcccaggcaccc

SEQ ID NO: 431605 - DNA, 1331 bp, Homo sapiens; identical to SEQ ID NO: 417396
  chr4:1794972-1796303
  hypo

SEQ ID NO: 431606 - DNA, 79 bp, Homo sapiens; identical to SEQ ID NO: 253418
  chr4:1798718-1798797
  hypo

SEQ ID NO: 431607 - DNA, 61 bp, Homo sapiens; identical to SEQ ID NO: 253419
  chr4:1801892-1801953
  hypo

SEQ ID NO: 431608 - DNA, 83 bp, Homo sapiens; identical to SEQ ID NO: 209485
  chr4:1804646-1804729
  hypo

SEQ ID NO: 431609 - DNA, 207 bp, Homo sapiens; identical to SEQ ID NO: 209486
  chr4:1804884-1805091
  hypo

SEQ ID NO: 431610 - DNA, 55 bp, Homo sapiens; identical to SEQ ID NO: 209487
  chr4:1805637-1805692
  hypo

SEQ ID NO: 431611 - DNA, 92 bp, Homo sapiens; identical to SEQ ID NO: 209488
  chr4:1805992-1806084
  hypo

SEQ ID NO: 431612 - DNA, 64 bp, Homo sapiens; identical to SEQ ID NO: 302865
  chr4:1806113-1806177
  hypo

SEQ ID NO: 431613 - DNA, 239 bp, Homo sapiens; identical to SEQ ID NO: 253424
  chr4:1808362-1808601
  hypo

SEQ ID NO: 431614 - DNA, 508 bp, Homo sapiens; identical to SEQ ID NO: 281927
  chr4:1828221-1828729
  hypo

SEQ ID NO: 431615 - DNA, 140 bp, Homo sapiens; identical to SEQ ID NO: 209491
  chr4:1835054-1835194
  hypo

SEQ ID NO: 431616 - DNA, 141 bp, Homo sapiens; identical to SEQ ID NO: 209492
  chr4:1844710-1844851
  hypo

SEQ ID NO: 431617 - DNA, 285 bp, Homo sapiens; identical to SEQ ID NO: 209493
  chr4:1955051-1955336
  hypo

SEQ ID NO: 431618 - DNA, 98 bp, Homo sapiens; identical to SEQ ID NO: 302877
  chr4:1962689-1962787
  hypo

SEQ ID NO: 431619 - DNA, 249 bp, Homo sapiens; identical to SEQ ID NO: 302878
  chr4:1962816-1963065
  hypo

SEQ ID NO: 431620 - DNA, 77 bp, Homo sapiens; identical to SEQ ID NO: 253437
  chr4:1973281-1973358
  hypo

SEQ ID NO: 431621 - DNA, 67 bp, Homo sapiens; identical to SEQ ID NO: 253438
  chr4:1976551-1976618
  hypo

SEQ ID NO: 431622 - DNA, 424 bp, Homo sapiens; identical to SEQ ID NO: 253440
  chr4:1980623-1981047
  hypo

SEQ ID NO: 431623 - DNA, 44 bp, Homo sapiens; identical to SEQ ID NO: 302888
  chr4:2038292-2038336
  hypo

SEQ ID NO: 431624 - DNA, 155 bp, Homo sapiens; identical to SEQ ID NO: 302889
  chr4:2038366-2038521
  hypo

SEQ ID NO: 431625 - DNA, 188 bp, Homo sapiens; identical to SEQ ID NO: 209499
  chr4:2045628-2045816
  hypo

SEQ ID NO: 431626 - DNA, 177 bp, Homo sapiens; identical to SEQ ID NO: 253447
  chr4:2128212-2128389
  hypo

SEQ ID NO: 431627 - DNA, 213 bp, Homo sapiens; identical to SEQ ID NO: 253448
  chr4:2165234-2165447
  hypo

SEQ ID NO: 431628 - DNA, 74 bp, Homo sapiens; identical to SEQ ID NO: 302894
  chr4:2251591-2251665
  hypo

SEQ ID NO: 431629 - DNA, 528 bp, Homo sapiens; identical to SEQ ID NO: 302895
  chr4:2278257-2278785
  hypo

SEQ ID NO: 431630 - DNA, 186 bp, Homo sapiens; identical to SEQ ID NO: 253451
  chr4:2303623-2303809
  hypo

SEQ ID NO: 431631 - DNA, 51 bp, Homo sapiens; identical to SEQ ID NO: 253453
  chr4:2306804-2306855
  hypo

SEQ ID NO: 431632 - DNA, 51 bp, Homo sapiens; identical to SEQ ID NO: 253454
  chr4:2337323-2337374
  hypo

SEQ ID NO: 431633 - DNA, 246 bp, Homo sapiens; identical to SEQ ID NO: 253455
  chr4:2362985-2363231
  hypo

SEQ ID NO: 431634 - DNA, 277 bp, Homo sapiens; identical to SEQ ID NO: 253456
  chr4:2396220-2396497
  hypo

SEQ ID NO: 431635 - DNA, 44 bp, Homo sapiens; identical to SEQ ID NO: 209501
  chr4:2427613-2427657
  hypo

SEQ ID NO: 431636 - DNA, 34 bp, Homo sapiens; identical to SEQ ID NO: 253458
  chr4:2459493-2459527
  hypo

SEQ ID NO: 431637 - DNA, 81 bp, Homo sapiens; identical to SEQ ID NO: 209503
  chr4:2524117-2524198
  hypo

SEQ ID NO: 431638 - DNA, 58 bp, Homo sapiens; identical to SEQ ID NO: 302909
  chr4:2527844-2527902
  hypo

SEQ ID NO: 431639 - DNA, 87 bp, Homo sapiens; identical to SEQ ID NO: 302910
  chr4:2527937-2528024
  hypo

SEQ ID NO: 431640 - DNA, 31 bp, Homo sapiens; identical to SEQ ID NO: 209504
  chr4:2559965-2559996
  hypo

SEQ ID NO: 431641 - DNA, 36 bp, Homo sapiens; identical to SEQ ID NO: 253467
  chr4:2567250-2567286
  hypo

SEQ ID NO: 431642 - DNA, 120 bp, Homo sapiens; identical to SEQ ID NO: 209505
  chr4:2568040-2568160
  hypo

SEQ ID NO: 431643 - DNA, 42 bp, Homo sapiens; identical to SEQ ID NO: 253469
  chr4:2592459-2592501
  hypo

SEQ ID NO: 431644 - DNA, 78 bp, Homo sapiens; identical to SEQ ID NO: 209507
  chr4:2626193-2626271
  hypo

SEQ ID NO: 431645 - DNA, 120 bp, Homo sapiens; identical to SEQ ID NO: 253472
  chr4:2626554-2626674
  hypo

SEQ ID NO: 431646 - DNA, 268 bp, Homo sapiens; identical to SEQ ID NO: 209508
  chr4:2626993-2627261
  hypo

SEQ ID NO: 431647 - DNA, 220 bp, Homo sapiens; identical to SEQ ID NO: 253478
  chr4:2687342-2687562
  hypo

SEQ ID NO: 431648 - DNA, 194 bp, Homo sapiens; identical to SEQ ID NO: 253480
  chr4:2698197-2698391
  hypo

SEQ ID NO: 431649 - DNA, 68 bp, Homo sapiens
  chr4:2704943-2705011
  hypo
gtttaggttgtttctaatgctttggttttttgtttttgtttctgttttaaggtggagtctcactctgt

SEQ ID NO: 431650 - DNA, 54 bp, Homo sapiens; identical to SEQ ID NO: 253482
  chr4:2745778-2745832
  hypo

SEQ ID NO: 431651 - DNA, 102 bp, Homo sapiens; identical to SEQ ID NO: 253483
  chr4:2746455-2746557
  hypo

SEQ ID NO: 431652 - DNA, 104 bp, Homo sapiens; identical to SEQ ID NO: 253484
  chr4:2806952-2807056
  hypo

SEQ ID NO: 431653 - DNA, 91 bp, Homo sapiens; identical to SEQ ID NO: 253486
  chr4:2925310-2925401
  hypo

SEQ ID NO: 431654 - DNA, 109 bp, Homo sapiens; identical to SEQ ID NO: 209514
  chr4:2926880-2926989
  hypo

SEQ ID NO: 431655 - DNA, 38 bp, Homo sapiens; identical to SEQ ID NO: 209515
  chr4:2957244-2957282
  hypo

SEQ ID NO: 431656 - DNA, 167 bp, Homo sapiens; identical to SEQ ID NO: 253491
  chr4:3120141-3120308
  hypo

SEQ ID NO: 431657 - DNA, 142 bp, Homo sapiens; identical to SEQ ID NO: 209516
  chr4:3208227-3208369
  hypo

SEQ ID NO: 431658 - DNA, 155 bp, Homo sapiens; identical to SEQ ID NO: 209519
  chr4:3240561-3240716
  hypo

SEQ ID NO: 431659 - DNA, 146 bp, Homo sapiens; identical to SEQ ID NO: 253496
  chr4:3241773-3241919
  hypo

SEQ ID NO: 431660 - DNA, 81 bp, Homo sapiens; identical to SEQ ID NO: 253498
  chr4:3249855-3249936
  hypo

SEQ ID NO: 431661 - DNA, 149 bp, Homo sapiens; identical to SEQ ID NO: 253499
  chr4:3251091-3251240
  hypo

SEQ ID NO: 431662 - DNA, 119 bp, Homo sapiens; identical to SEQ ID NO: 253501
  chr4:3265175-3265294
  hypo

SEQ ID NO: 431663 - DNA, 38 bp, Homo sapiens; identical to SEQ ID NO: 253502
  chr4:3267992-3268030
  hypo

SEQ ID NO: 431664 - DNA, 370 bp, Homo sapiens; identical to SEQ ID NO: 253503
  chr4:3288566-3288936
  hypo

SEQ ID NO: 431665 - DNA, 121 bp, Homo sapiens; identical to SEQ ID NO: 209523
  chr4:3292280-3292401
  hypo

SEQ ID NO: 431666 - DNA, 203 bp, Homo sapiens; identical to SEQ ID NO: 253505
  chr4:3310030-3310233
  hypo

SEQ ID NO: 431667 - DNA, 144 bp, Homo sapiens; identical to SEQ ID NO: 253506
  chr4:3310675-3310819
  hypo

SEQ ID NO: 431668 - DNA, 31 bp, Homo sapiens; identical to SEQ ID NO: 253507
  chr4:3311032-3311063
  hypo

SEQ ID NO: 431669 - DNA, 193 bp, Homo sapiens; identical to SEQ ID NO: 209524
  chr4:3324703-3324896
  hypo

SEQ ID NO: 431670 - DNA, 198 bp, Homo sapiens; identical to SEQ ID NO: 209525
  chr4:3345083-3345281
  hypo

SEQ ID NO: 431671 - DNA, 34 bp, Homo sapiens; identical to SEQ ID NO: 253512
  chr4:3368270-3368304
  hypo

SEQ ID NO: 431672 - DNA, 99 bp, Homo sapiens; identical to SEQ ID NO: 253513
  chr4:3375344-3375443
  hypo

SEQ ID NO: 431673 - DNA, 285 bp, Homo sapiens; identical to SEQ ID NO: 253514
  chr4:3403232-3403517
  hypo

SEQ ID NO: 431674 - DNA, 108 bp, Homo sapiens; identical to SEQ ID NO: 209526
  chr4:3413102-3413210
  hypo

SEQ ID NO: 431675 - DNA, 246 bp, Homo sapiens; identical to SEQ ID NO: 253516
  chr4:3415121-3415367
  hypo

SEQ ID NO: 431676 - DNA, 147 bp, Homo sapiens; identical to SEQ ID NO: 209527
  chr4:3415798-3415945
  hypo

SEQ ID NO: 431677 - DNA, 242 bp, Homo sapiens; identical to SEQ ID NO: 253518
  chr4:3416700-3416942
  hypo

SEQ ID NO: 431678 - DNA, 136 bp, Homo sapiens; identical to SEQ ID NO: 209528
  chr4:3417330-3417466
  hypo

SEQ ID NO: 431679 - DNA, 589 bp, Homo sapiens; identical to SEQ ID NO: 302964
  chr4:3417496-3418085
  hypo

SEQ ID NO: 431680 - DNA, 269 bp, Homo sapiens; identical to SEQ ID NO: 253520
  chr4:3418657-3418926
  hypo

SEQ ID NO: 431681 - DNA, 199 bp, Homo sapiens; identical to SEQ ID NO: 209531
  chr4:3425119-3425318
  hypo

SEQ ID NO: 431682 - DNA, 274 bp, Homo sapiens; identical to SEQ ID NO: 253523
  chr4:3426136-3426410
  hypo

SEQ ID NO: 431683 - DNA, 49 bp, Homo sapiens; identical to SEQ ID NO: 209535
  chr4:3448500-3448549
  hypo

SEQ ID NO: 431684 - DNA, 99 bp, Homo sapiens; identical to SEQ ID NO: 253528
  chr4:3449286-3449385
  hypo

SEQ ID NO: 431685 - DNA, 77 bp, Homo sapiens; identical to SEQ ID NO: 209536
  chr4:3449842-3449919
  hypo

SEQ ID NO: 431686 - DNA, 149 bp, Homo sapiens; identical to SEQ ID NO: 209537
  chr4:3452962-3453111
  hypo

SEQ ID NO: 431687 - DNA, 380 bp, Homo sapiens; identical to SEQ ID NO: 253533
  chr4:3478050-3478430
  hypo

SEQ ID NO: 431688 - DNA, 367 bp, Homo sapiens; identical to SEQ ID NO: 209539
  chr4:3480304-3480671
  hypo

SEQ ID NO: 431689 - DNA, 96 bp, Homo sapiens; identical to SEQ ID NO: 253535
  chr4:3512378-3512474
  hypo

SEQ ID NO: 431690 - DNA, 252 bp, Homo sapiens; identical to SEQ ID NO: 253537
  chr4:3515543-3515795
  hypo

SEQ ID NO: 431691 - DNA, 71 bp, Homo sapiens; identical to SEQ ID NO: 253538
  chr4:3528239-3528310
  hypo

SEQ ID NO: 431692 - DNA, 92 bp, Homo sapiens; identical to SEQ ID NO: 253539
  chr4:3576258-3576350
  hypo

SEQ ID NO: 431693 - DNA, 150 bp, Homo sapiens; identical to SEQ ID NO: 209541
  chr4:3588428-3588578
  hypo

SEQ ID NO: 431694 - DNA, 96 bp, Homo sapiens; identical to SEQ ID NO: 302984
  chr4:3616196-3616292
  hypo

SEQ ID NO: 431695 - DNA, 89 bp, Homo sapiens; identical to SEQ ID NO: 302985
  chr4:3616322-3616411
  hypo

SEQ ID NO: 431696 - DNA, 376 bp, Homo sapiens; identical to SEQ ID NO: 253542
  chr4:3671151-3671527
  hypo

SEQ ID NO: 431697 - DNA, 32 bp, Homo sapiens; identical to SEQ ID NO: 253543
  chr4:3681906-3681938
  hypo

SEQ ID NO: 431698 - DNA, 99 bp, Homo sapiens; identical to SEQ ID NO: 253544
  chr4:3682490-3682589
  hypo

SEQ ID NO: 431699 - DNA, 137 bp, Homo sapiens; identical to SEQ ID NO: 253545
  chr4:3685351-3685488
  hypo

SEQ ID NO: 431700 - DNA, 161 bp, Homo sapiens; identical to SEQ ID NO: 253546
  chr4:3729125-3729286
  hypo

SEQ ID NO: 431701 - DNA, 161 bp, Homo sapiens; identical to SEQ ID NO: 253547
  chr4:3729586-3729747
  hypo

SEQ ID NO: 431702 - DNA, 261 bp, Homo sapiens; identical to SEQ ID NO: 209542
  chr4:3748239-3748500
  hypo

SEQ ID NO: 431703 - DNA, 208 bp, Homo sapiens; identical to SEQ ID NO: 253549
  chr4:3776159-3776367
  hypo

SEQ ID NO: 431704 - DNA, 161 bp, Homo sapiens; identical to SEQ ID NO: 199306
  chr4:4389011-4389172
  hypo

SEQ ID NO: 431705 - DNA, 467 bp, Homo sapiens; identical to SEQ ID NO: 281951
  chr4:4389297-4389764
  hypo

SEQ ID NO: 431706 - DNA, 139 bp, Homo sapiens; identical to SEQ ID NO: 281952
  chr4:4389794-4389933
  hypo

SEQ ID NO: 431707 - DNA, 348 bp, Homo sapiens; identical to SEQ ID NO: 253552
  chr4:4487391-4487739
  hypo

SEQ ID NO: 431708 - DNA, 65 bp, Homo sapiens; identical to SEQ ID NO: 253553
  chr4:4498752-4498817
  hypo

SEQ ID NO: 431709 - DNA, 36 bp, Homo sapiens; identical to SEQ ID NO: 303002
  chr4:4614145-4614181
  hypo

SEQ ID NO: 431710 - DNA, 163 bp, Homo sapiens; identical to SEQ ID NO: 303003
  chr4:4614327-4614490
  hypo

SEQ ID NO: 431711 - DNA, 212 bp, Homo sapiens; identical to SEQ ID NO: 281964
  chr4:4861568-4861780
  hypo

SEQ ID NO: 431712 - DNA, 56 bp, Homo sapiens; identical to SEQ ID NO: 253556
  chr4:4921831-4921887
  hypo

SEQ ID NO: 431713 - DNA, 312 bp, Homo sapiens; identical to SEQ ID NO: 209545
  chr4:5024029-5024341
  hypo

SEQ ID NO: 431714 - DNA, 236 bp, Homo sapiens; identical to SEQ ID NO: 209549
  chr4:5970096-5970332
  hypo

SEQ ID NO: 431715 - DNA, 106 bp, Homo sapiens; identical to SEQ ID NO: 253560
  chr4:6064892-6064998
  hypo

SEQ ID NO: 431716 - DNA, 205 bp, Homo sapiens; identical to SEQ ID NO: 253561
  chr4:6176208-6176413
  hypo

SEQ ID NO: 431717 - DNA, 222 bp, Homo sapiens; identical to SEQ ID NO: 253562
  chr4:6330984-6331206
  hypo

SEQ ID NO: 431718 - DNA, 160 bp, Homo sapiens; identical to SEQ ID NO: 253563
  chr4:6525352-6525512
  hypo

SEQ ID NO: 431719 - DNA, 92 bp, Homo sapiens; identical to SEQ ID NO: 253564
  chr4:6540026-6540118
  hypo

SEQ ID NO: 431720 - DNA, 140 bp, Homo sapiens; identical to SEQ ID NO: 253565
  chr4:6580067-6580207
  hypo

SEQ ID NO: 431721 - DNA, 182 bp, Homo sapiens; identical to SEQ ID NO: 209551
  chr4:6586518-6586700
  hypo

SEQ ID NO: 431722 - DNA, 94 bp, Homo sapiens; identical to SEQ ID NO: 209552
  chr4:6588779-6588873
  hypo

SEQ ID NO: 431723 - DNA, 40 bp, Homo sapiens; identical to SEQ ID NO: 209553
  chr4:6590875-6590915
  hypo

SEQ ID NO: 431724 - DNA, 304 bp, Homo sapiens; identical to SEQ ID NO: 209554
  chr4:6600488-6600792
  hypo

SEQ ID NO: 431725 - DNA, 136 bp, Homo sapiens; identical to SEQ ID NO: 253570
  chr4:6616021-6616157
  hypo

SEQ ID NO: 431726 - DNA, 41 bp, Homo sapiens; identical to SEQ ID NO: 253571
  chr4:6658784-6658825
  hypo

SEQ ID NO: 431727 - DNA, 233 bp, Homo sapiens; identical to SEQ ID NO: 303025
  chr4:6669888-6670121
  hypo

SEQ ID NO: 431728 - DNA, 53 bp, Homo sapiens; identical to SEQ ID NO: 303026
  chr4:6670214-6670267
  hypo

SEQ ID NO: 431729 - DNA, 111 bp, Homo sapiens; identical to SEQ ID NO: 253573
  chr4:6686433-6686544
  hypo

SEQ ID NO: 431730 - DNA, 189 bp, Homo sapiens; identical to SEQ ID NO: 253574
  chr4:6695028-6695217
  hypo

SEQ ID NO: 431731 - DNA, 101 bp, Homo sapiens; identical to SEQ ID NO: 253575
  chr4:6699159-6699260
  hypo

SEQ ID NO: 431732 - DNA, 57 bp, Homo sapiens; identical to SEQ ID NO: 253576
  chr4:6726065-6726122
  hypo

SEQ ID NO: 431733 - DNA, 41 bp, Homo sapiens; identical to SEQ ID NO: 253578
  chr4:6735826-6735867
  hypo

SEQ ID NO: 431734 - DNA, 96 bp, Homo sapiens; identical to SEQ ID NO: 209556
  chr4:6738169-6738265
  hypo

SEQ ID NO: 431735 - DNA, 99 bp, Homo sapiens; identical to SEQ ID NO: 253581
  chr4:6765324-6765423
  hypo

SEQ ID NO: 431736 - DNA, 34 bp, Homo sapiens; identical to SEQ ID NO: 209558
  chr4:6786942-6786976
  hypo

SEQ ID NO: 431737 - DNA, 93 bp, Homo sapiens; identical to SEQ ID NO: 209559
  chr4:6883785-6883878
  hypo

SEQ ID NO: 431738 - DNA, 35 bp, Homo sapiens; identical to SEQ ID NO: 209560
  chr4:6902912-6902947
  hypo

SEQ ID NO: 431739 - DNA, 211 bp, Homo sapiens; identical to SEQ ID NO: 253587
  chr4:6925274-6925485
  hypo

SEQ ID NO: 431740 - DNA, 156 bp, Homo sapiens; identical to SEQ ID NO: 253588
  chr4:6946476-6946632
  hypo

SEQ ID NO: 431741 - DNA, 172 bp, Homo sapiens; identical to SEQ ID NO: 253590
  chr4:6956967-6957139
  hypo

SEQ ID NO: 431742 - DNA, 114 bp, Homo sapiens; identical to SEQ ID NO: 253592
  chr4:6958171-6958285
  hypo

SEQ ID NO: 431743 - DNA, 104 bp, Homo sapiens; identical to SEQ ID NO: 253593
  chr4:6964580-6964684
  hypo

SEQ ID NO: 431744 - DNA, 161 bp, Homo sapiens; identical to SEQ ID NO: 253594
  chr4:6974648-6974809
  hypo

SEQ ID NO: 431745 - DNA, 282 bp, Homo sapiens; identical to SEQ ID NO: 253595
  chr4:6995747-6996029
  hypo

SEQ ID NO: 431746 - DNA, 218 bp, Homo sapiens; identical to SEQ ID NO: 253596
  chr4:7000531-7000749
  hypo

SEQ ID NO: 431747 - DNA, 83 bp, Homo sapiens; identical to SEQ ID NO: 253597
  chr4:7003855-7003938
  hypo

SEQ ID NO: 431748 - DNA, 319 bp, Homo sapiens; identical to SEQ ID NO: 253599
  chr4:7006525-7006844
  hypo

SEQ ID NO: 431749 - DNA, 104 bp, Homo sapiens; identical to SEQ ID NO: 253600
  chr4:7015398-7015502
  hypo

SEQ ID NO: 431750 - DNA, 134 bp, Homo sapiens; identical to SEQ ID NO: 209563
  chr4:7033374-7033508
  hypo

SEQ ID NO: 431751 - DNA, 108 bp, Homo sapiens; identical to SEQ ID NO: 209564
  chr4:7035497-7035605
  hypo

SEQ ID NO: 431752 - DNA, 119 bp, Homo sapiens; identical to SEQ ID NO: 209567
  chr4:7167402-7167521
  hypo

SEQ ID NO: 431753 - DNA, 109 bp, Homo sapiens; identical to SEQ ID NO: 253606
  chr4:7218650-7218759
  hypo

SEQ ID NO: 431754 - DNA, 210 bp, Homo sapiens; identical to SEQ ID NO: 253607
  chr4:7395597-7395807
  hypo

SEQ ID NO: 431755 - DNA, 217 bp, Homo sapiens; identical to SEQ ID NO: 209568
  chr4:7432357-7432574
  hypo

SEQ ID NO: 431756 - DNA, 118 bp, Homo sapiens; identical to SEQ ID NO: 253609
  chr4:7472895-7473013
  hypo

SEQ ID NO: 431757 - DNA, 482 bp, Homo sapiens; identical to SEQ ID NO: 253610
  chr4:7600670-7601152
  hypo

SEQ ID NO: 431758 - DNA, 280 bp, Homo sapiens; identical to SEQ ID NO: 253612
  chr4:7666010-7666290
  hypo

SEQ ID NO: 431759 - DNA, 32 bp, Homo sapiens; identical to SEQ ID NO: 303066
  chr4:7741249-7741281
  hypo

SEQ ID NO: 431760 - DNA, 91 bp, Homo sapiens; identical to SEQ ID NO: 209569
  chr4:7741694-7741785
  hypo

SEQ ID NO: 431761 - DNA, 69 bp, Homo sapiens; identical to SEQ ID NO: 253614
  chr4:7755968-7756037
  hypo

SEQ ID NO: 431762 - DNA, 42 bp, Homo sapiens; identical to SEQ ID NO: 253615
  chr4:7756596-7756638
  hypo

SEQ ID NO: 431763 - DNA, 1009 bp, Homo sapiens; identical to SEQ ID NO: 303070
  chr4:7757467-7758476
  hypo

SEQ ID NO: 431764 - DNA, 74 bp, Homo sapiens; identical to SEQ ID NO: 209571
  chr4:7789549-7789623
  hypo

SEQ ID NO: 431765 - DNA, 44 bp, Homo sapiens; identical to SEQ ID NO: 253618
  chr4:7791292-7791336
  hypo

SEQ ID NO: 431766 - DNA, 34 bp, Homo sapiens; identical to SEQ ID NO: 253619
  chr4:7812695-7812729
  hypo

SEQ ID NO: 431767 - DNA, 306 bp, Homo sapiens; identical to SEQ ID NO: 209572
  chr4:7813251-7813557
  hypo

SEQ ID NO: 431768 - DNA, 78 bp, Homo sapiens; identical to SEQ ID NO: 253622
  chr4:7896170-7896248
  hypo

SEQ ID NO: 431769 - DNA, 49 bp, Homo sapiens; identical to SEQ ID NO: 209573
  chr4:7967943-7967992
  hypo

SEQ ID NO: 431770 - DNA, 211 bp, Homo sapiens; identical to SEQ ID NO: 253624
  chr4:7992552-7992763
  hypo

SEQ ID NO: 431771 - DNA, 190 bp, Homo sapiens; identical to SEQ ID NO: 209574
  chr4:8001655-8001845
  hypo

SEQ ID NO: 431772 - DNA, 92 bp, Homo sapiens; identical to SEQ ID NO: 253626
  chr4:8005614-8005706
  hypo

SEQ ID NO: 431773 - DNA, 149 bp, Homo sapiens; identical to SEQ ID NO: 209575
  chr4:8012068-8012217
  hypo

SEQ ID NO: 431774 - DNA, 261 bp, Homo sapiens; identical to SEQ ID NO: 209576
  chr4:8032213-8032474
  hypo

SEQ ID NO: 431775 - DNA, 356 bp, Homo sapiens; identical to SEQ ID NO: 253629
  chr4:8062502-8062858
  hypo

SEQ ID NO: 431776 - DNA, 152 bp, Homo sapiens; identical to SEQ ID NO: 253631
  chr4:8087174-8087326
  hypo

SEQ ID NO: 431777 - DNA, 114 bp, Homo sapiens; identical to SEQ ID NO: 253632
  chr4:8090830-8090944
  hypo

SEQ ID NO: 431778 - DNA, 389 bp, Homo sapiens; identical to SEQ ID NO: 253633
  chr4:8153834-8154223
  hypo

SEQ ID NO: 431779 - DNA, 216 bp, Homo sapiens; identical to SEQ ID NO: 253634
  chr4:8172088-8172304
  hypo

SEQ ID NO: 431780 - DNA, 188 bp, Homo sapiens; identical to SEQ ID NO: 253635
  chr4:8220507-8220695
  hypo

SEQ ID NO: 431781 - DNA, 399 bp, Homo sapiens; identical to SEQ ID NO: 253636
  chr4:8237001-8237400
  hypo

SEQ ID NO: 431782 - DNA, 125 bp, Homo sapiens; identical to SEQ ID NO: 253637
  chr4:8270688-8270813
  hypo

SEQ ID NO: 431783 - DNA, 271 bp, Homo sapiens; identical to SEQ ID NO: 253638
  chr4:8285419-8285690
  hypo

SEQ ID NO: 431784 - DNA, 38 bp, Homo sapiens; identical to SEQ ID NO: 253640
  chr4:8375724-8375762
  hypo

SEQ ID NO: 431785 - DNA, 173 bp, Homo sapiens; identical to SEQ ID NO: 209581
  chr4:8389738-8389911
  hypo

SEQ ID NO: 431786 - DNA, 121 bp, Homo sapiens; identical to SEQ ID NO: 209582
  chr4:8396396-8396517
  hypo

SEQ ID NO: 431787 - DNA, 154 bp, Homo sapiens; identical to SEQ ID NO: 253646
  chr4:8411915-8412069
  hypo

SEQ ID NO: 431788 - DNA, 31 bp, Homo sapiens; identical to SEQ ID NO: 253647
  chr4:8455077-8455108
  hypo

SEQ ID NO: 431789 - DNA, 71 bp, Homo sapiens; identical to SEQ ID NO: 404155
  chr4:8455168-8455239
  hypo

SEQ ID NO: 431790 - DNA, 56 bp, Homo sapiens; identical to SEQ ID NO: 209586
  chr4:8473097-8473153
  hypo

SEQ ID NO: 431791 - DNA, 262 bp, Homo sapiens; identical to SEQ ID NO: 253651
  chr4:8474998-8475260
  hypo

SEQ ID NO: 431792 - DNA, 131 bp, Homo sapiens; identical to SEQ ID NO: 253652
  chr4:8475645-8475776
  hypo

SEQ ID NO: 431793 - DNA, 142 bp, Homo sapiens; identical to SEQ ID NO: 303109
  chr4:8483724-8483866
  hypo

SEQ ID NO: 431794 - DNA, 146 bp, Homo sapiens; identical to SEQ ID NO: 303110
  chr4:8483963-8484109
  hypo

SEQ ID NO: 431795 - DNA, 279 bp, Homo sapiens; identical to SEQ ID NO: 253654
  chr4:8514257-8514536
  hypo

SEQ ID NO: 431796 - DNA, 322 bp, Homo sapiens; identical to SEQ ID NO: 253655
  chr4:8549955-8550277
  hypo

SEQ ID NO: 431797 - DNA, 293 bp, Homo sapiens; identical to SEQ ID NO: 253656
  chr4:8560360-8560653
  hypo

SEQ ID NO: 431798 - DNA, 42 bp, Homo sapiens; identical to SEQ ID NO: 199340
  chr4:8594310-8594352
  hypo

SEQ ID NO: 431799 - DNA, 218 bp, Homo sapiens; identical to SEQ ID NO: 303115
  chr4:8603005-8603223
  hypo

SEQ ID NO: 431800 - DNA, 269 bp, Homo sapiens; identical to SEQ ID NO: 209591
  chr4:8621150-8621419
  hypo

SEQ ID NO: 431801 - DNA, 110 bp, Homo sapiens; identical to SEQ ID NO: 209592
  chr4:8647631-8647741
  hypo

SEQ ID NO: 431802 - DNA, 330 bp, Homo sapiens; identical to SEQ ID NO: 209593
  chr4:8739498-8739828
  hypo

SEQ ID NO: 431803 - DNA, 166 bp, Homo sapiens; identical to SEQ ID NO: 253663
  chr4:8749242-8749408
  hypo

SEQ ID NO: 431804 - DNA, 232 bp, Homo sapiens; identical to SEQ ID NO: 253664
  chr4:8749438-8749670
  hypo

SEQ ID NO: 431805 - DNA, 143 bp, Homo sapiens; identical to SEQ ID NO: 253665
  chr4:8761656-8761799
  hypo

SEQ ID NO: 431806 - DNA, 35 bp, Homo sapiens; identical to SEQ ID NO: 253668
  chr4:9602117-9602152
  hypo

SEQ ID NO: 431807 - DNA, 209 bp, Homo sapiens; identical to SEQ ID NO: 199346
  chr4:9684933-9685142
  hypo

SEQ ID NO: 431808 - DNA, 207 bp, Homo sapiens; identical to SEQ ID NO: 253669
  chr4:9701510-9701717
  hypo

SEQ ID NO: 431809 - DNA, 35 bp, Homo sapiens; identical to SEQ ID NO: 253670
  chr4:9784385-9784420
  hypo

SEQ ID NO: 431810 - DNA, 62 bp, Homo sapiens; identical to SEQ ID NO: 209595
  chr4:10086436-10086498
  hypo

SEQ ID NO: 431811 - DNA, 58 bp, Homo sapiens; identical to SEQ ID NO: 199347
  chr4:10089890-10089948
  hypo

SEQ ID NO: 431812 - DNA, 134 bp, Homo sapiens; identical to SEQ ID NO: 253673
  chr4:10101397-10101531
  hypo

SEQ ID NO: 431813 - DNA, 173 bp, Homo sapiens; identical to SEQ ID NO: 253677
  chr4:10444978-10445151
  hypo

SEQ ID NO: 431814 - DNA, 120 bp, Homo sapiens; identical to SEQ ID NO: 253678
  chr4:10447425-10447545
  hypo

SEQ ID NO: 431815 - DNA, 84 bp, Homo sapiens; identical to SEQ ID NO: 253679
  chr4:10622723-10622807
  hypo

SEQ ID NO: 431816 - DNA, 189 bp, Homo sapiens; identical to SEQ ID NO: 253680
  chr4:11374203-11374392
  hypo

SEQ ID NO: 431817 - DNA, 318 bp, Homo sapiens; identical to SEQ ID NO: 253681
  chr4:13300414-13300732
  hypo

SEQ ID NO: 431818 - DNA, 43 bp, Homo sapiens; identical to SEQ ID NO: 253683
  chr4:13627679-13627722
  hypo

SEQ ID NO: 431819 - DNA, 89 bp, Homo sapiens; identical to SEQ ID NO: 253684
  chr4:14264570-14264659
  hypo

SEQ ID NO: 431820 - DNA, 62 bp, Homo sapiens; identical to SEQ ID NO: 253685
  chr4:15789216-15789278
  hypo

SEQ ID NO: 431821 - DNA, 43 bp, Homo sapiens; identical to SEQ ID NO: 253687
  chr4:15843148-15843191
  hypo

SEQ ID NO: 431822 - DNA, 42 bp, Homo sapiens; identical to SEQ ID NO: 253688
  chr4:17438265-17438307
  hypo

SEQ ID NO: 431823 - DNA, 120 bp, Homo sapiens; identical to SEQ ID NO: 253689
  chr4:17438427-17438547
  hypo

SEQ ID NO: 431824 - DNA, 35 bp, Homo sapiens; identical to SEQ ID NO: 253690
  chr4:17741679-17741714
  hypo

SEQ ID NO: 431825 - DNA, 120 bp, Homo sapiens; identical to SEQ ID NO: 209603
  chr4:17817849-17817969
  hypo

SEQ ID NO: 431826 - DNA, 91 bp, Homo sapiens; identical to SEQ ID NO: 404175
  chr4:17818029-17818120
  hypo

SEQ ID NO: 431827 - DNA, 106 bp, Homo sapiens; identical to SEQ ID NO: 199361
  chr4:18024246-18024352
  hypo

SEQ ID NO: 431828 - DNA, 53 bp, Homo sapiens; identical to SEQ ID NO: 209606
  chr4:19280790-19280843
  hypo

SEQ ID NO: 431829 - DNA, 1009 bp, Homo sapiens; identical to SEQ ID NO: 282052
  chr4:22517045-22518054
  hypo

SEQ ID NO: 431830 - DNA, 75 bp, Homo sapiens; identical to SEQ ID NO: 253694
  chr4:22601450-22601525
  hypo

SEQ ID NO: 431831 - DNA, 158 bp, Homo sapiens; identical to SEQ ID NO: 253695
  chr4:22780297-22780455
  hypo

SEQ ID NO: 431832 - DNA, 33 bp, Homo sapiens; identical to SEQ ID NO: 209608
  chr4:24422943-24422976
  hypo

SEQ ID NO: 431833 - DNA, 33 bp, Homo sapiens; identical to SEQ ID NO: 209609
  chr4:24423216-24423249
  hypo

SEQ ID NO: 431834 - DNA, 57 bp, Homo sapiens; identical to SEQ ID NO: 253700
  chr4:25014433-25014490
  hypo

SEQ ID NO: 431835 - DNA, 184 bp, Homo sapiens; identical to SEQ ID NO: 253701
  chr4:25025017-25025201
  hypo

SEQ ID NO: 431836 - DNA, 138 bp, Homo sapiens; identical to SEQ ID NO: 253702
  chr4:25360422-25360560
  hypo

SEQ ID NO: 431837 - DNA, 533 bp, Homo sapiens; identical to SEQ ID NO: 253703
  chr4:25677738-25678271
  hypo

SEQ ID NO: 431838 - DNA, 90 bp, Homo sapiens; identical to SEQ ID NO: 253704
  chr4:25681546-25681636
  hypo

SEQ ID NO: 431839 - DNA, 139 bp, Homo sapiens; identical to SEQ ID NO: 253705
  chr4:25811520-25811659
  hypo

SEQ ID NO: 431840 - DNA, 204 bp, Homo sapiens; identical to SEQ ID NO: 253706
  chr4:26223413-26223617
  hypo

SEQ ID NO: 431841 - DNA, 280 bp, Homo sapiens; identical to SEQ ID NO: 253707
  chr4:26466305-26466585
  hypo

SEQ ID NO: 431842 - DNA, 209 bp, Homo sapiens; identical to SEQ ID NO: 209612
  chr4:26823270-26823479
  hypo

SEQ ID NO: 431843 - DNA, 99 bp, Homo sapiens; identical to SEQ ID NO: 209613
  chr4:26856540-26856639
  hypo

SEQ ID NO: 431844 - DNA, 32 bp, Homo sapiens; identical to SEQ ID NO: 253711
  chr4:27077854-27077886
  hypo

SEQ ID NO: 431845 - DNA, 35 bp, Homo sapiens; identical to SEQ ID NO: 253712
  chr4:27486040-27486075
  hypo

SEQ ID NO: 431846 - DNA, 53 bp, Homo sapiens; identical to SEQ ID NO: 253713
  chr4:27570054-27570107
  hypo

SEQ ID NO: 431847 - DNA, 156 bp, Homo sapiens; identical to SEQ ID NO: 253714
  chr4:35039895-35040051
  hypo

SEQ ID NO: 431848 - DNA, 113 bp, Homo sapiens; identical to SEQ ID NO: 303185
  chr4:36345195-36345308
  hypo

SEQ ID NO: 431849 - DNA, 101 bp, Homo sapiens; identical to SEQ ID NO: 253716
  chr4:36896147-36896248
  hypo

SEQ ID NO: 431850 - DNA, 37 bp, Homo sapiens; identical to SEQ ID NO: 253717
  chr4:37585278-37585315
  hypo

SEQ ID NO: 431851 - DNA, 86 bp, Homo sapiens; identical to SEQ ID NO: 199386
  chr4:37688564-37688650
  hypo

SEQ ID NO: 431852 - DNA, 225 bp, Homo sapiens; identical to SEQ ID NO: 282091
  chr4:37891998-37892223
  hypo

SEQ ID NO: 431853 - DNA, 49 bp, Homo sapiens; identical to SEQ ID NO: 253718
  chr4:38016579-38016628
  hypo

SEQ ID NO: 431854 - DNA, 188 bp, Homo sapiens; identical to SEQ ID NO: 209617
  chr4:38278935-38279123
  hypo

SEQ ID NO: 431855 - DNA, 130 bp, Homo sapiens; identical to SEQ ID NO: 253720
  chr4:38313304-38313434
  hypo

SEQ ID NO: 431856 - DNA, 213 bp, Homo sapiens; identical to SEQ ID NO: 253721
  chr4:38568875-38569088
  hypo

SEQ ID NO: 431857 - DNA, 42 bp, Homo sapiens; identical to SEQ ID NO: 253722
  chr4:38678869-38678911
  hypo

SEQ ID NO: 431858 - DNA, 206 bp, Homo sapiens; identical to SEQ ID NO: 209618
  chr4:38729967-38730173
  hypo

SEQ ID NO: 431859 - DNA, 740 bp, Homo sapiens; identical to SEQ ID NO: 199390
  chr4:38868924-38869664
  hypo

SEQ ID NO: 431860 - DNA, 346 bp, Homo sapiens; identical to SEQ ID NO: 282098
  chr4:39183810-39184156
  hypo

SEQ ID NO: 431861 - DNA, 89 bp, Homo sapiens; identical to SEQ ID NO: 253724
  chr4:39297607-39297696
  hypo

SEQ ID NO: 431862 - DNA, 153 bp, Homo sapiens; identical to SEQ ID NO: 209622
  chr4:39481996-39482149
  hypo

SEQ ID NO: 431863 - DNA, 249 bp, Homo sapiens; identical to SEQ ID NO: 282101
  chr4:39529736-39529985
  hypo

SEQ ID NO: 431864 - DNA, 120 bp, Homo sapiens; identical to SEQ ID NO: 209624
  chr4:39623588-39623708
  hypo

SEQ ID NO: 431865 - DNA, 37 bp, Homo sapiens; identical to SEQ ID NO: 253728
  chr4:39629633-39629670
  hypo

SEQ ID NO: 431866 - DNA, 97 bp, Homo sapiens; identical to SEQ ID NO: 209625
  chr4:39745202-39745299
  hypo

SEQ ID NO: 431867 - DNA, 39 bp, Homo sapiens; identical to SEQ ID NO: 209626
  chr4:39761181-39761220
  hypo

SEQ ID NO: 431868 - DNA, 254 bp, Homo sapiens; identical to SEQ ID NO: 253731
  chr4:39773069-39773323
  hypo

SEQ ID NO: 431869 - DNA, 149 bp, Homo sapiens; identical to SEQ ID NO: 253733
  chr4:39817116-39817265
  hypo

SEQ ID NO: 431870 - DNA, 37 bp, Homo sapiens; identical to SEQ ID NO: 209627
  chr4:39913158-39913195
  hypo

SEQ ID NO: 431871 - DNA, 255 bp, Homo sapiens; identical to SEQ ID NO: 253735
  chr4:39937634-39937889
  hypo

SEQ ID NO: 431872 - DNA, 38 bp, Homo sapiens; identical to SEQ ID NO: 209629
  chr4:39964135-39964173
  hypo

SEQ ID NO: 431873 - DNA, 83 bp, Homo sapiens; identical to SEQ ID NO: 209630
  chr4:39972695-39972778
  hypo

SEQ ID NO: 431874 - DNA, 104 bp, Homo sapiens; identical to SEQ ID NO: 209631
  chr4:40161797-40161901
  hypo

SEQ ID NO: 431875 - DNA, 36 bp, Homo sapiens
  chr4:40261280-40261316
  hypo
gccaagaagattcaggacatgcacacacacaaggaa

SEQ ID NO: 431876 - DNA, 107 bp, Homo sapiens; identical to SEQ ID NO: 253740
  chr4:40485048-40485155
  hypo

SEQ ID NO: 431877 - DNA, 83 bp, Homo sapiens; identical to SEQ ID NO: 209632
  chr4:40492771-40492854
  hypo

SEQ ID NO: 431878 - DNA, 39 bp, Homo sapiens; identical to SEQ ID NO: 253743
  chr4:40625666-40625705
  hypo

SEQ ID NO: 431879 - DNA, 744 bp, Homo sapiens; identical to SEQ ID NO: 282109
  chr4:40751829-40752573
  hypo

SEQ ID NO: 431880 - DNA, 40 bp, Homo sapiens; identical to SEQ ID NO: 253744
  chr4:40823880-40823920
  hypo

SEQ ID NO: 431881 - DNA, 100 bp, Homo sapiens; identical to SEQ ID NO: 209633
  chr4:40857394-40857494
  hypo

SEQ ID NO: 431882 - DNA, 39 bp, Homo sapiens; identical to SEQ ID NO: 209634
  chr4:40983409-40983448
  hypo

SEQ ID NO: 431883 - DNA, 188 bp, Homo sapiens; identical to SEQ ID NO: 209635
  chr4:41012740-41012928
  hypo

SEQ ID NO: 431884 - DNA, 88 bp, Homo sapiens; identical to SEQ ID NO: 253749
  chr4:41167664-41167752
  hypo

SEQ ID NO: 431885 - DNA, 34 bp, Homo sapiens; identical to SEQ ID NO: 209636
  chr4:41198150-41198184
  hypo

SEQ ID NO: 431886 - DNA, 138 bp, Homo sapiens; identical to SEQ ID NO: 199395
  chr4:41216265-41216403
  hypo

SEQ ID NO: 431887 - DNA, 35 bp, Homo sapiens; identical to SEQ ID NO: 253751
  chr4:41317297-41317332
  hypo

SEQ ID NO: 431888 - DNA, 89 bp, Homo sapiens; identical to SEQ ID NO: 282120
  chr4:41884432-41884521
  hypo

SEQ ID NO: 431889 - DNA, 60 bp, Homo sapiens; identical to SEQ ID NO: 282122
  chr4:41993656-41993716
  hypo

SEQ ID NO: 431890 - DNA, 128 bp, Homo sapiens; identical to SEQ ID NO: 303233
  chr4:42316081-42316209
  hypo

SEQ ID NO: 431891 - DNA, 200 bp, Homo sapiens; identical to SEQ ID NO: 303235
  chr4:42348066-42348266
  hypo

SEQ ID NO: 431892 - DNA, 138 bp, Homo sapiens; identical to SEQ ID NO: 199401
  chr4:42659535-42659673
  hypo

SEQ ID NO: 431893 - DNA, 34 bp, Homo sapiens; identical to SEQ ID NO: 253757
  chr4:44679263-44679297
  hypo

SEQ ID NO: 431894 - DNA, 181 bp, Homo sapiens; identical to SEQ ID NO: 253758
  chr4:47427738-47427919
  hypo

SEQ ID NO: 431895 - DNA, 439 bp, Homo sapiens; identical to SEQ ID NO: 282140
  chr4:47487073-47487512
  hypo

SEQ ID NO: 431896 - DNA, 150 bp, Homo sapiens; identical to SEQ ID NO: 209641
  chr4:48017182-48017332
  hypo

SEQ ID NO: 431897 - DNA, 227 bp, Homo sapiens; identical to SEQ ID NO: 253761
  chr4:48496110-48496337
  hypo

SEQ ID NO: 431898 - DNA, 136 bp, Homo sapiens; identical to SEQ ID NO: 209644
  chr4:48679320-48679456
  hypo

SEQ ID NO: 431899 - DNA, 44 bp, Homo sapiens; identical to SEQ ID NO: 253767
  chr4:48987268-48987312
  hypo

SEQ ID NO: 431900 - DNA, 33 bp, Homo sapiens; identical to SEQ ID NO: 253768
  chr4:53200853-53200886
  hypo

SEQ ID NO: 431901 - DNA, 93 bp, Homo sapiens; identical to SEQ ID NO: 253769
  chr4:53201066-53201159
  hypo

SEQ ID NO: 431902 - DNA, 89 bp, Homo sapiens; identical to SEQ ID NO: 209646
  chr4:53230797-53230886
  hypo

SEQ ID NO: 431903 - DNA, 43 bp, Homo sapiens; identical to SEQ ID NO: 209647
  chr4:53587809-53587852
  hypo

SEQ ID NO: 431904 - DNA, 394 bp, Homo sapiens; identical to SEQ ID NO: 253772
  chr4:53739882-53740276
  hypo

SEQ ID NO: 431905 - DNA, 32 bp, Homo sapiens; identical to SEQ ID NO: 253773
  chr4:54229705-54229737
  hypo

SEQ ID NO: 431906 - DNA, 32 bp, Homo sapiens; identical to SEQ ID NO: 253774
  chr4:54229977-54230009
  hypo

SEQ ID NO: 431907 - DNA, 39 bp, Homo sapiens; identical to SEQ ID NO: 253775
  chr4:54317441-54317480
  hypo

SEQ ID NO: 431908 - DNA, 37 bp, Homo sapiens; identical to SEQ ID NO: 253776
  chr4:54500677-54500714
  hypo

SEQ ID NO: 431909 - DNA, 142 bp, Homo sapiens; identical to SEQ ID NO: 253777
  chr4:54732285-54732427
  hypo

SEQ ID NO: 431910 - DNA, 247 bp, Homo sapiens; identical to SEQ ID NO: 282174
  chr4:55523973-55524220
  hypo

SEQ ID NO: 431911 - DNA, 224 bp, Homo sapiens; identical to SEQ ID NO: 282175
  chr4:55524294-55524518
  hypo

SEQ ID NO: 431912 - DNA, 229 bp, Homo sapiens; identical to SEQ ID NO: 199420
  chr4:55561714-55561943
  hypo

SEQ ID NO: 431913 - DNA, 91 bp, Homo sapiens; identical to SEQ ID NO: 199421
  chr4:55564469-55564560
  hypo

SEQ ID NO: 431914 - DNA, 75 bp, Homo sapiens; identical to SEQ ID NO: 199422
  chr4:55569950-55570025
  hypo

SEQ ID NO: 431915 - DNA, 45 bp, Homo sapiens; identical to SEQ ID NO: 199423
  chr4:55592094-55592139
  hypo

SEQ ID NO: 431916 - DNA, 43 bp, Homo sapiens; identical to SEQ ID NO: 199424
  chr4:55593675-55593718
  hypo

SEQ ID NO: 431917 - DNA, 34 bp, Homo sapiens; identical to SEQ ID NO: 199425
  chr4:55598031-55598065
  hypo

SEQ ID NO: 431918 - DNA, 96 bp, Homo sapiens; identical to SEQ ID NO: 199426
  chr4:55602683-55602779
  hypo

SEQ ID NO: 431919 - DNA, 204 bp, Homo sapiens; identical to SEQ ID NO: 253780
  chr4:56205291-56205495
  hypo

SEQ ID NO: 431920 - DNA, 35 bp, Homo sapiens; identical to SEQ ID NO: 253782
  chr4:56213651-56213686
  hypo

SEQ ID NO: 431921 - DNA, 103 bp, Homo sapiens; identical to SEQ ID NO: 253784
  chr4:56227951-56228054
  hypo

SEQ ID NO: 431922 - DNA, 34 bp, Homo sapiens; identical to SEQ ID NO: 199431
  chr4:56412390-56412424
  hypo

SEQ ID NO: 431923 - DNA, 705 bp, Homo sapiens; identical to SEQ ID NO: 282194
  chr4:56501725-56502430
  hypo

SEQ ID NO: 431924 - DNA, 397 bp, Homo sapiens; identical to SEQ ID NO: 282195
  chr4:56502467-56502864
  hypo

SEQ ID NO: 431925 - DNA, 105 bp, Homo sapiens; identical to SEQ ID NO: 209659
  chr4:56936357-56936462
  hypo

SEQ ID NO: 431926 - DNA, 37 bp, Homo sapiens; identical to SEQ ID NO: 253786
  chr4:56966393-56966430
  hypo

SEQ ID NO: 431927 - DNA, 38 bp, Homo sapiens; identical to SEQ ID NO: 209660
  chr4:57051388-57051426
  hypo

SEQ ID NO: 431928 - DNA, 31 bp, Homo sapiens; identical to SEQ ID NO: 253788
  chr4:57064132-57064163
  hypo

SEQ ID NO: 431929 - DNA, 89 bp, Homo sapiens; identical to SEQ ID NO: 209661
  chr4:57082785-57082874
  hypo

SEQ ID NO: 431930 - DNA, 174 bp, Homo sapiens; identical to SEQ ID NO: 209662
  chr4:57178037-57178211
  hypo

SEQ ID NO: 431931 - DNA, 92 bp, Homo sapiens; identical to SEQ ID NO: 253792
  chr4:57178241-57178333
  hypo

SEQ ID NO: 431932 - DNA, 41 bp, Homo sapiens; identical to SEQ ID NO: 404224
  chr4:57180855-57180896
  hypo

SEQ ID NO: 431933 - DNA, 38 bp, Homo sapiens; identical to SEQ ID NO: 253794
  chr4:57486552-57486590
  hypo

SEQ ID NO: 431934 - DNA, 37 bp, Homo sapiens; identical to SEQ ID NO: 253795
  chr4:57486830-57486867
  hypo

SEQ ID NO: 431935 - DNA, 114 bp, Homo sapiens; identical to SEQ ID NO: 253797
  chr4:57812272-57812386
  hypo

SEQ ID NO: 431936 - DNA, 360 bp, Homo sapiens; identical to SEQ ID NO: 253798
  chr4:57813006-57813366
  hypo

SEQ ID NO: 431937 - DNA, 342 bp, Homo sapiens; identical to SEQ ID NO: 303294
  chr4:57921794-57922136
  hypo

SEQ ID NO: 431938 - DNA, 227 bp, Homo sapiens; identical to SEQ ID NO: 199436
  chr4:57977107-57977334
  hypo

SEQ ID NO: 431939 - DNA, 841 bp, Homo sapiens; identical to SEQ ID NO: 253801
  chr4:64214827-64215668
  hypo

SEQ ID NO: 431940 - DNA, 43 bp, Homo sapiens; identical to SEQ ID NO: 253802
  chr4:66107503-66107546
  hypo

SEQ ID NO: 431941 - DNA, 44 bp, Homo sapiens; identical to SEQ ID NO: 199438
  chr4:66536636-66536680
  hypo

SEQ ID NO: 431942 - DNA, 217 bp, Homo sapiens; identical to SEQ ID NO: 209671
  chr4:70647970-70648187
  hypo

SEQ ID NO: 431943 - DNA, 38 bp, Homo sapiens; identical to SEQ ID NO: 209673
  chr4:71642192-71642230
  hypo

SEQ ID NO: 431944 - DNA, 93 bp, Homo sapiens; identical to SEQ ID NO: 253806
  chr4:71705996-71706089
  hypo

SEQ ID NO: 431945 - DNA, 37 bp, Homo sapiens; identical to SEQ ID NO: 209674
  chr4:71756389-71756426
  hypo

SEQ ID NO: 431946 - DNA, 730 bp, Homo sapiens; identical to SEQ ID NO: 199439
  chr4:71767778-71768508
  hypo

SEQ ID NO: 431947 - DNA, 38 bp, Homo sapiens; identical to SEQ ID NO: 253809
  chr4:71774023-71774061
  hypo

SEQ ID NO: 431948 - DNA, 83 bp, Homo sapiens; identical to SEQ ID NO: 253813
  chr4:71986660-71986743
  hypo

SEQ ID NO: 431949 - DNA, 38 bp, Homo sapiens; identical to SEQ ID NO: 253814
  chr4:72004454-72004492
  hypo

SEQ ID NO: 431950 - DNA, 36 bp, Homo sapiens; identical to SEQ ID NO: 253815
  chr4:74402451-74402487
  hypo

SEQ ID NO: 431951 - DNA, 224 bp, Homo sapiens; identical to SEQ ID NO: 199444
  chr4:74702525-74702749
  hypo

SEQ ID NO: 431952 - DNA, 209 bp, Homo sapiens; identical to SEQ ID NO: 209678
  chr4:75137755-75137964
  hypo

SEQ ID NO: 431953 - DNA, 98 bp, Homo sapiens; identical to SEQ ID NO: 253818
  chr4:75260920-75261018
  hypo

SEQ ID NO: 431954 - DNA, 34 bp, Homo sapiens; identical to SEQ ID NO: 209679
  chr4:75949441-75949475
  hypo

SEQ ID NO: 431955 - DNA, 37 bp, Homo sapiens; identical to SEQ ID NO: 253821
  chr4:76553301-76553338
  hypo

SEQ ID NO: 431956 - DNA, 37 bp, Homo sapiens; identical to SEQ ID NO: 253822
  chr4:76553578-76553615
  hypo

SEQ ID NO: 431957 - DNA, 106 bp, Homo sapiens
  chr4:76554738-76554844
  hypo
gccaatgggcaaggtgttatttctggatggttctaaaagcaacaattttgataaaaatatttggagaatgctaattttttattttgtttaagacagattaaagggc

SEQ ID NO: 431958 - DNA, 37 bp, Homo sapiens; identical to SEQ ID NO: 209681
  chr4:76917507-76917544
  hypo

SEQ ID NO: 431959 - DNA, 147 bp, Homo sapiens; identical to SEQ ID NO: 253826
  chr4:76932385-76932532
  hypo

SEQ ID NO: 431960 - DNA, 36 bp, Homo sapiens; identical to SEQ ID NO: 209683
  chr4:77448700-77448736
  hypo

SEQ ID NO: 431961 - DNA, 98 bp, Homo sapiens; identical to SEQ ID NO: 253829
  chr4:77596032-77596130
  hypo

SEQ ID NO: 431962 - DNA, 61 bp, Homo sapiens; identical to SEQ ID NO: 253830
  chr4:77661925-77661986
  hypo

SEQ ID NO: 431963 - DNA, 121 bp, Homo sapiens; identical to SEQ ID NO: 253831
  chr4:77662882-77663003
  hypo

SEQ ID NO: 431964 - DNA, 35 bp, Homo sapiens; identical to SEQ ID NO: 253832
  chr4:77776591-77776626
  hypo

SEQ ID NO: 431965 - DNA, 164 bp, Homo sapiens; identical to SEQ ID NO: 253833
  chr4:78034396-78034560
  hypo

SEQ ID NO: 431966 - DNA, 161 bp, Homo sapiens; identical to SEQ ID NO: 253835
  chr4:78839184-78839345
  hypo

SEQ ID NO: 431967 - DNA, 48 bp, Homo sapiens; identical to SEQ ID NO: 253836
  chr4:78924253-78924301
  hypo

SEQ ID NO: 431968 - DNA, 784 bp, Homo sapiens; identical to SEQ ID NO: 282264
  chr4:78979792-78980576
  hypo

SEQ ID NO: 431969 - DNA, 133 bp, Homo sapiens; identical to SEQ ID NO: 253837
  chr4:79345199-79345332
  hypo

SEQ ID NO: 431970 - DNA, 92 bp, Homo sapiens; identical to SEQ ID NO: 209685
  chr4:79702947-79703039
  hypo

SEQ ID NO: 431971 - DNA, 150 bp, Homo sapiens; identical to SEQ ID NO: 209686
  chr4:79828974-79829124
  hypo

SEQ ID NO: 431972 - DNA, 123 bp, Homo sapiens; identical to SEQ ID NO: 209687
  chr4:79832671-79832794
  hypo

SEQ ID NO: 431973 - DNA, 38 bp, Homo sapiens; identical to SEQ ID NO: 253842
  chr4:80273038-80273076
  hypo

SEQ ID NO: 431974 - DNA, 97 bp, Homo sapiens; identical to SEQ ID NO: 253843
  chr4:81205171-81205268
  hypo

SEQ ID NO: 431975 - DNA, 44 bp, Homo sapiens; identical to SEQ ID NO: 209690
  chr4:81605694-81605738
  hypo

SEQ ID NO: 431976 - DNA, 140 bp, Homo sapiens; identical to SEQ ID NO: 253846
  chr4:83301589-83301729
  hypo

SEQ ID NO: 431977 - DNA, 157 bp, Homo sapiens; identical to SEQ ID NO: 253848
  chr4:83407498-83407655
  hypo

SEQ ID NO: 431978 - DNA, 33 bp, Homo sapiens; identical to SEQ ID NO: 253849
  chr4:83448627-83448660
  hypo

SEQ ID NO: 431979 - DNA, 32 bp, Homo sapiens; identical to SEQ ID NO: 209692
  chr4:83700298-83700330
  hypo

SEQ ID NO: 431980 - DNA, 40 bp, Homo sapiens; identical to SEQ ID NO: 253852
  chr4:83760709-83760749
  hypo

SEQ ID NO: 431981 - DNA, 45 bp, Homo sapiens; identical to SEQ ID NO: 209693
  chr4:83808872-83808917
  hypo

SEQ ID NO: 431982 - DNA, 85 bp, Homo sapiens; identical to SEQ ID NO: 222435
  chr4:84292570-84292655
  hypo

SEQ ID NO: 431983 - DNA, 176 bp, Homo sapiens; identical to SEQ ID NO: 253855
  chr4:84310214-84310390
  hypo

SEQ ID NO: 431984 - DNA, 35 bp, Homo sapiens; identical to SEQ ID NO: 253856
  chr4:84468675-84468710
  hypo

SEQ ID NO: 431985 - DNA, 161 bp, Homo sapiens; identical to SEQ ID NO: 209699
  chr4:86167317-86167478
  hypo

SEQ ID NO: 431986 - DNA, 101 bp, Homo sapiens; identical to SEQ ID NO: 222440
  chr4:86396088-86396189
  hypo

SEQ ID NO: 431987 - DNA, 543 bp, Homo sapiens; identical to SEQ ID NO: 222441
  chr4:86396422-86396965
  hypo

SEQ ID NO: 431988 - DNA, 160 bp, Homo sapiens; identical to SEQ ID NO: 209700
  chr4:86801948-86802108
  hypo

SEQ ID NO: 431989 - DNA, 104 bp, Homo sapiens; identical to SEQ ID NO: 253859
  chr4:86877878-86877982
  hypo

SEQ ID NO: 431990 - DNA, 31 bp, Homo sapiens; identical to SEQ ID NO: 253860
  chr4:86958368-86958399
  hypo

SEQ ID NO: 431991 - DNA, 101 bp, Homo sapiens; identical to SEQ ID NO: 253861
  chr4:87468463-87468564
  hypo

SEQ ID NO: 431992 - DNA, 36 bp, Homo sapiens; identical to SEQ ID NO: 209701
  chr4:87797488-87797524
  hypo

SEQ ID NO: 431993 - DNA, 38 bp, Homo sapiens
  chr4:87993169-87993207
  hypo
gatgagagaaataaattgagatggagagaaaataatat

SEQ ID NO: 431994 - DNA, 83 bp, Homo sapiens; identical to SEQ ID NO: 209704
  chr4:87993507-87993590
  hypo

SEQ ID NO: 431995 - DNA, 40 bp, Homo sapiens; identical to SEQ ID NO: 253867
  chr4:88009708-88009748
  hypo

SEQ ID NO: 431996 - DNA, 35 bp, Homo sapiens; identical to SEQ ID NO: 303370
  chr4:88010168-88010203
  hypo

SEQ ID NO: 431997 - DNA, 181 bp, Homo sapiens; identical to SEQ ID NO: 253869
  chr4:88053371-88053552
  hypo

SEQ ID NO: 431998 - DNA, 48 bp, Homo sapiens; identical to SEQ ID NO: 209705
  chr4:88259021-88259069
  hypo

SEQ ID NO: 431999 - DNA, 105 bp, Homo sapiens; identical to SEQ ID NO: 209706
  chr4:88296902-88297007
  hypo

SEQ ID NO: 432000 - DNA, 45 bp, Homo sapiens; identical to SEQ ID NO: 253872
  chr4:88899513-88899558
  hypo

SEQ ID NO: 432001 - DNA, 182 bp, Homo sapiens; identical to SEQ ID NO: 209707
  chr4:88941048-88941230
  hypo

SEQ ID NO: 432002 - DNA, 145 bp, Homo sapiens; identical to SEQ ID NO: 209708
  chr4:88957314-88957459
  hypo

SEQ ID NO: 432003 - DNA, 31 bp, Homo sapiens; identical to SEQ ID NO: 209709
  chr4:90043371-90043402
  hypo

SEQ ID NO: 432004 - DNA, 150 bp, Homo sapiens; identical to SEQ ID NO: 253877
  chr4:90043642-90043792
  hypo

SEQ ID NO: 432005 - DNA, 180 bp, Homo sapiens; identical to SEQ ID NO: 209711
  chr4:91052008-91052188
  hypo

SEQ ID NO: 432006 - DNA, 36 bp, Homo sapiens; identical to SEQ ID NO: 209712
  chr4:91052428-91052464
  hypo

SEQ ID NO: 432007 - DNA, 148 bp, Homo sapiens; identical to SEQ ID NO: 209713
  chr4:91640271-91640419
  hypo

SEQ ID NO: 432008 - DNA, 169 bp, Homo sapiens; identical to SEQ ID NO: 282333
  chr4:91760071-91760240
  hypo

SEQ ID NO: 432009 - DNA, 233 bp, Homo sapiens; identical to SEQ ID NO: 222444
  chr4:95373794-95374027
  hypo

SEQ ID NO: 432010 - DNA, 87 bp, Homo sapiens; identical to SEQ ID NO: 253884
  chr4:95407092-95407179
  hypo

SEQ ID NO: 432011 - DNA, 85 bp, Homo sapiens; identical to SEQ ID NO: 209714
  chr4:95461557-95461642
  hypo

SEQ ID NO: 432012 - DNA, 31 bp, Homo sapiens; identical to SEQ ID NO: 209715
  chr4:95578063-95578094
  hypo

SEQ ID NO: 432013 - DNA, 66 bp, Homo sapiens; identical to SEQ ID NO: 253887
  chr4:95636992-95637058
  hypo

SEQ ID NO: 432014 - DNA, 37 bp, Homo sapiens; identical to SEQ ID NO: 253888
  chr4:99178271-99178308
  hypo

SEQ ID NO: 432015 - DNA, 49 bp, Homo sapiens; identical to SEQ ID NO: 253892
  chr4:99982329-99982378
  hypo

SEQ ID NO: 432016 - DNA, 80 bp, Homo sapiens; identical to SEQ ID NO: 253895
  chr4:100866007-100866087
  hypo

SEQ ID NO: 432017 - DNA, 32 bp, Homo sapiens; identical to SEQ ID NO: 253896
  chr4:102266906-102266938
  hypo

SEQ ID NO: 432018 - DNA, 43 bp, Homo sapiens; identical to SEQ ID NO: 253897
  chr4:102332863-102332906
  hypo

SEQ ID NO: 432019 - DNA, 120 bp, Homo sapiens; identical to SEQ ID NO: 253898
  chr4:103079069-103079189
  hypo

SEQ ID NO: 432020 - DNA, 220 bp, Homo sapiens; identical to SEQ ID NO: 222446
  chr4:103266878-103267098
  hypo

SEQ ID NO: 432021 - DNA, 42 bp, Homo sapiens; identical to SEQ ID NO: 209719
  chr4:103494439-103494481
  hypo

SEQ ID NO: 432022 - DNA, 81 bp, Homo sapiens; identical to SEQ ID NO: 209720
  chr4:103806371-103806452
  hypo

SEQ ID NO: 432023 - DNA, 323 bp, Homo sapiens; identical to SEQ ID NO: 209721
  chr4:103941524-103941847
  hypo

SEQ ID NO: 432024 - DNA, 295 bp, Homo sapiens; identical to SEQ ID NO: 199518
  chr4:106067841-106068136
  hypo

SEQ ID NO: 432025 - DNA, 277 bp, Homo sapiens; identical to SEQ ID NO: 199519
  chr4:106068588-106068865
  hypo

SEQ ID NO: 432026 - DNA, 146 bp, Homo sapiens; identical to SEQ ID NO: 199520
  chr4:106111516-106111662
  hypo

SEQ ID NO: 432027 - DNA, 1085 bp, Homo sapiens; identical to SEQ ID NO: 396799
  chr4:106155053-106156138
  hypo

SEQ ID NO: 432028 - DNA, 2024 bp, Homo sapiens; identical to SEQ ID NO: 396800
  chr4:106157490-106159514
  hypo

SEQ ID NO: 432029 - DNA, 240 bp, Homo sapiens; identical to SEQ ID NO: 199522
  chr4:106159634-106159874
  hypo

SEQ ID NO: 432030 - DNA, 180 bp, Homo sapiens; identical to SEQ ID NO: 199523
  chr4:106160114-106160294
  hypo

SEQ ID NO: 432031 - DNA, 120 bp, Homo sapiens; identical to SEQ ID NO: 199524
  chr4:106161134-106161254
  hypo

SEQ ID NO: 432032 - DNA, 2721 bp, Homo sapiens; identical to SEQ ID NO: 199525
  chr4:106161374-106164095
  hypo

SEQ ID NO: 432033 - DNA, 230 bp, Homo sapiens; identical to SEQ ID NO: 199526
  chr4:106164712-106164942
  hypo

SEQ ID NO: 432034 - DNA, 177 bp, Homo sapiens; identical to SEQ ID NO: 199527
  chr4:106180762-106180939
  hypo

SEQ ID NO: 432035 - DNA, 107 bp, Homo sapiens; identical to SEQ ID NO: 199528
  chr4:106182911-106183018
  hypo

SEQ ID NO: 432036 - DNA, 161 bp, Homo sapiens; identical to SEQ ID NO: 199529
  chr4:106190752-106190913
  hypo

SEQ ID NO: 432037 - DNA, 376 bp, Homo sapiens; identical to SEQ ID NO: 199530
  chr4:106193708-106194084
  hypo

SEQ ID NO: 432038 - DNA, 3101 bp, Homo sapiens; identical to SEQ ID NO: 199531
  chr4:106196198-106199299
  hypo

SEQ ID NO: 432039 - DNA, 1601 bp, Homo sapiens; identical to SEQ ID NO: 199532
  chr4:106199359-106200960
  hypo

SEQ ID NO: 432040 - DNA, 34 bp, Homo sapiens; identical to SEQ ID NO: 209740
  chr4:106335456-106335490
  hypo

SEQ ID NO: 432041 - DNA, 57 bp, Homo sapiens; identical to SEQ ID NO: 209742
  chr4:106631892-106631949
  hypo

SEQ ID NO: 432042 - DNA, 35 bp, Homo sapiens; identical to SEQ ID NO: 253908
  chr4:106689194-106689229
  hypo

SEQ ID NO: 432043 - DNA, 218 bp, Homo sapiens; identical to SEQ ID NO: 209743
  chr4:108132182-108132400
  hypo

SEQ ID NO: 432044 - DNA, 176 bp, Homo sapiens; identical to SEQ ID NO: 303430
  chr4:108302304-108302480
  hypo

SEQ ID NO: 432045 - DNA, 43 bp, Homo sapiens; identical to SEQ ID NO: 209744
  chr4:108446495-108446538
  hypo

SEQ ID NO: 432046 - DNA, 231 bp, Homo sapiens; identical to SEQ ID NO: 282405
  chr4:108852945-108853176
  hypo

SEQ ID NO: 432047 - DNA, 107 bp, Homo sapiens; identical to SEQ ID NO: 282406
  chr4:108853287-108853394
  hypo

SEQ ID NO: 432048 - DNA, 81 bp, Homo sapiens; identical to SEQ ID NO: 209745
  chr4:108975407-108975488
  hypo

SEQ ID NO: 432049 - DNA, 206 bp, Homo sapiens; identical to SEQ ID NO: 253914
  chr4:109002484-109002690
  hypo

SEQ ID NO: 432050 - DNA, 168 bp, Homo sapiens; identical to SEQ ID NO: 209746
  chr4:109009508-109009676
  hypo

SEQ ID NO: 432051 - DNA, 266 bp, Homo sapiens; identical to SEQ ID NO: 417719
  chr4:109089757-109090023
  hypo

SEQ ID NO: 432052 - DNA, 246 bp, Homo sapiens; identical to SEQ ID NO: 282411
  chr4:109094283-109094529
  hypo

SEQ ID NO: 432053 - DNA, 101 bp, Homo sapiens; identical to SEQ ID NO: 253916
  chr4:110314367-110314468
  hypo

SEQ ID NO: 432054 - DNA, 40 bp, Homo sapiens; identical to SEQ ID NO: 253917
  chr4:110314768-110314808
  hypo

SEQ ID NO: 432055 - DNA, 211 bp, Homo sapiens; identical to SEQ ID NO: 199548
  chr4:110651657-110651868
  hypo

SEQ ID NO: 432056 - DNA, 87 bp, Homo sapiens; identical to SEQ ID NO: 253919
  chr4:111019210-111019297
  hypo

SEQ ID NO: 432057 - DNA, 44 bp, Homo sapiens; identical to SEQ ID NO: 209749
  chr4:111096241-111096285
  hypo

SEQ ID NO: 432058 - DNA, 86 bp, Homo sapiens; identical to SEQ ID NO: 209750
  chr4:111097859-111097945
  hypo

SEQ ID NO: 432059 - DNA, 440 bp, Homo sapiens; identical to SEQ ID NO: 282419
  chr4:111117165-111117605
  hypo

SEQ ID NO: 432060 - DNA, 522 bp, Homo sapiens; identical to SEQ ID NO: 282420
  chr4:111119712-111120234
  hypo

SEQ ID NO: 432061 - DNA, 37 bp, Homo sapiens; identical to SEQ ID NO: 253922
  chr4:111144769-111144806
  hypo

SEQ ID NO: 432062 - DNA, 34 bp, Homo sapiens; identical to SEQ ID NO: 253923
  chr4:111177276-111177310
  hypo

SEQ ID NO: 432063 - DNA, 90 bp, Homo sapiens; identical to SEQ ID NO: 253924
  chr4:111213416-111213506
  hypo

SEQ ID NO: 432064 - DNA, 287 bp, Homo sapiens; identical to SEQ ID NO: 253925
  chr4:111214249-111214536
  hypo

SEQ ID NO: 432065 - DNA, 36 bp, Homo sapiens; identical to SEQ ID NO: 209752
  chr4:111383532-111383568
  hypo

SEQ ID NO: 432066 - DNA, 577 bp, Homo sapiens; identical to SEQ ID NO: 209753
  chr4:111508744-111509321
  hypo

SEQ ID NO: 432067 - DNA, 99 bp, Homo sapiens; identical to SEQ ID NO: 282423
  chr4:111539229-111539328
  hypo

SEQ ID NO: 432068 - DNA, 190 bp, Homo sapiens; identical to SEQ ID NO: 253929
  chr4:113276888-113277078
  hypo

SEQ ID NO: 432069 - DNA, 183 bp, Homo sapiens; identical to SEQ ID NO: 209758
  chr4:114417171-114417354
  hypo

SEQ ID NO: 432070 - DNA, 101 bp, Homo sapiens; identical to SEQ ID NO: 209759
  chr4:114528566-114528667
  hypo

SEQ ID NO: 432071 - DNA, 44 bp, Homo sapiens; identical to SEQ ID NO: 253933
  chr4:115416724-115416768
  hypo

SEQ ID NO: 432072 - DNA, 38 bp, Homo sapiens; identical to SEQ ID NO: 209761
  chr4:119501591-119501629
  hypo

SEQ ID NO: 432073 - DNA, 211 bp, Homo sapiens; identical to SEQ ID NO: 253935
  chr4:119951552-119951763
  hypo

SEQ ID NO: 432074 - DNA, 96 bp, Homo sapiens; identical to SEQ ID NO: 253936
  chr4:120024257-120024353
  hypo

SEQ ID NO: 432075 - DNA, 199 bp, Homo sapiens; identical to SEQ ID NO: 253937
  chr4:122158962-122159161
  hypo

SEQ ID NO: 432076 - DNA, 38 bp, Homo sapiens; identical to SEQ ID NO: 253938
  chr4:122165518-122165556
  hypo

SEQ ID NO: 432077 - DNA, 76 bp, Homo sapiens; identical to SEQ ID NO: 209765
  chr4:122615463-122615539
  hypo

SEQ ID NO: 432078 - DNA, 34 bp, Homo sapiens; identical to SEQ ID NO: 209766
  chr4:122924455-122924489
  hypo

SEQ ID NO: 432079 - DNA, 222 bp, Homo sapiens; identical to SEQ ID NO: 253942
  chr4:124029142-124029364
  hypo

SEQ ID NO: 432080 - DNA, 182 bp, Homo sapiens; identical to SEQ ID NO: 209768
  chr4:124036406-124036588
  hypo

SEQ ID NO: 432081 - DNA, 139 bp, Homo sapiens; identical to SEQ ID NO: 209769
  chr4:124106851-124106990
  hypo

SEQ ID NO: 432082 - DNA, 32 bp, Homo sapiens; identical to SEQ ID NO: 253945
  chr4:124313335-124313367
  hypo

SEQ ID NO: 432083 - DNA, 157 bp, Homo sapiens; identical to SEQ ID NO: 209771
  chr4:124335555-124335712
  hypo

SEQ ID NO: 432084 - DNA, 209 bp, Homo sapiens; identical to SEQ ID NO: 282491
  chr4:124426861-124427070
  hypo

SEQ ID NO: 432085 - DNA, 79 bp, Homo sapiens; identical to SEQ ID NO: 282492
  chr4:124427137-124427216
  hypo

SEQ ID NO: 432086 - DNA, 481 bp, Homo sapiens; identical to SEQ ID NO: 209772
  chr4:124468461-124468942
  hypo

SEQ ID NO: 432087 - DNA, 39 bp, Homo sapiens; identical to SEQ ID NO: 209773
  chr4:124533356-124533395
  hypo

SEQ ID NO: 432088 - DNA, 34 bp, Homo sapiens; identical to SEQ ID NO: 209774
  chr4:125038668-125038702
  hypo
